United States Patent Application Publication US 2014/0199313 A1 - sequence listing, part 5

SEQ ID NO: 12656 - DNA, 3654 bp, Rhizobium loti
  CDS (1)..(3654)
atgaccgccggcccgctccctgacgctcgctccacgggacccgccatgccgctcgacaccatccgccagcagatccgcgccaactatctgcccgacgaagatgaggccgtgaaacgattggccgaggcgacagggctttcggctgcggatcgcgacgcgatctcggcgcgagccgccgatctggtgcgggcggtgcgcggctcgtccgatccccggctgatggaggttttcctctcggcctacggcctttccaccaaggagggcgtggcgctgatgtgcctggccgaggcgctgctgcgcgtgcccgacaccgagacgatggacgatctcatcgccgacaagatcgcgccgcatgactggtcggcgcattcgggtggttcgagctcgatcttcgtcaacgcctcgacctgggcgctgatgctgaccggccgcgtgctggacgagggcgagggcggtatcgaaggcacgttgcgctccatggtgcgcaggctgggcgagccggtcatccgcaaggcggtggccgccgccatgcgcgagatgggcgaacagttcgtgctcggccgcaccattgcagaagccgtcaagcgcggccggccgatgacacagaagggctacctctattccttcgacatgctgggcgaggcggcccgcaccgaggccgatgcactgcgctaccacaaggcctatgccgacgcgatttcgtcgctcgatgccggctccaatggtcccgacatcaggcaaaaccacggcatctcggtcaagctttcggcgctgcatccgcgctacgaagtggcgcagaaggaagagatgctgcctgtcatggccgagcggctgctgtcgctggcgcttgcggccagacattcgcgcatgggtctcaacatcgacgccgaggaggccgatcgcttggatctgtcgctcgacgtcatcgagcgcgtgctggccgagccggaactcgccggctggaacggctttggcgtggtcgtgcaagcgtatgggccgcgcgcggccttcgtcatcgactggctctatgctctggccaggaaatacgaccgcaccatcatggtgcggctggtcaagggcgcctattgggacaccgagatcaagcgggcgcagacgctcggacttgccggctatcccgtcttcacccgcaaggccaacaccgacgtttcctacatggcttgcgcgaagaaactgcttggcatgaccgaccgcatctatccgcaattcgccacccacaacgcccacaccgtcgcggccatcctgtcgatggccacgaaccgcgattccttcgaattccagcgcctgcatggcatgggcgaggcgttgcacgagacggtgcgccaggccgaaggcacgcgctgccgcatctatgcgccagtcggcgcgcattcggacctgctggcctatctggtccgccggctgctcgagaacggcgccaactcctccttcgtgcaccaactgaccgacgaggatgtcgagccggaagacatcgcgcgcgatccgctcgaaacggtcgaaagccaaggccctgccgccaatccggcgattgccaggccgtcgcagatttttggcgcaggccgccgcaattccagaggtttcgacatcaccgacacggtgacgctggcggccatcgacaaggccagggcggcgttcgccgggccggaccgctggcatgccaagccgatcacgcgggccgccggctatggcaagccgcacccggtcgtcaatccggccaagcccgatgaagtggtcgggacggttcacgaggccgccgccaagcaggtcgcgatcgccgtgcgcatcgcggtggaggcgcagccggcctgggcgaagcgtcccgttggcgaacgcgccgccatcctcaaccgcgccgccgatctctatgaagccaatgcggtcgagttcttcgcgctcgccacccgcgaggccggcaaatcgctggccgatggtgtggcggaagtgcgcgaggccgtcgacttcctgcgctactacgccgccgaggcggcaaacgccgagacgggcacgcaggcgcgcggcgcgatcgtctgtatttcgccgtggaatttcccgttggcgatcttcaccggccagatcgcggcagcactcgttaccggcaattcggtcatcgccaagccggccgaacagacaccgctgattgccttccgcgccgtcgagttgctgcgcgaggccggcgtgccggaagacatcatccaactgctgcccggcgacggcccatcggtcggcggaccgctgaccgccgacccacgcattgccggcgtctgcttcaccggctcgaccgaagtcgccaagctgatcgagaaacagctggccgagaccgcggcacccgacgccatgctgatcgccgagaccggtggtttgaacgccatgatcgtcgattccaccgcgctgcccgagcaggcggtgcgcgatatactggcctctgccttccagagtgccggccagcgctgctcggcgctgcgcgtgctctacgtgcagaaggacgtcgagaagaagatgctggacatgctgaagggcgccatggaggcgctcaacatcggggatccctggcggatttcgactgatgtcggtccggtcatcgatgatgaggcgcaggcctctatccgtgactattgcaccaggaaaggtctcgaggggcggctgatcgccaagctcgaggcgccgaaggacgggcgcttcgtcgcgccgcatgtcttccgggtcaagggcatcgaggagatggagcgcgaagtgttcgggccggtgctgcacgtcgccagcttcgacgccgatgagatcgatgctgtcatcgctgccatcaaccgcaagggctatggcctgaccttcggcctgcacacccgcatcgaaggtcgcgtccagcatttcgtcgacggcatccatgctggcaacatctacgtcaaccgcaaccagatcggcgccgtggtcggttcccagccctttggcggcgaggggctttccggcaccgggccgaaggctggcggcccgcattatctgcgccgcttccgcaaggggccggaagccggcacagaggttggcgagggccacaaggtgacggcgaccgaactggccgacaatctgcccgatccggccctcggcggctggtcgacgcgcccggaccggatcgccatcctgaggaagcatctgcgcggcaagggcgctgccgccatcggcgctgccgctgcaatcgatttcggccaggtcgacctgcccggcccgaccggcgaggccaatacgctgtcgctgtcgccgcgcgggcgggtgttgtgcctggggccggatgccgagacgctgctcgcccagaccatccaggcgctcgccgccggcaatgcagtgctggccgtggcccctggggcgccggccgccttgtcggcgctgaccggcaagggcttgccgctcgcggcgatagatggccgccccgatccggtcgaggcgcgcgcgctgcgcgtcgatgtcgtcgctttctcgggtacgccggaggccgcgcgcatcgtgcgccaggtgatcgccgacaggaccggcccgatcgtgccgctggtcagcgaggtgctcaatccggccgcctatgcgcatgagcgcgcggtctgtgtcgacaccacggccgcgggcggcaatgccagcctgcttgccgcggcctag

SEQ ID NO: 12657 - protein, 1217 aa, Rhizobium loti
MTAGPLPDARSTGPAMPLDTIRQQIRANYLPDEDEAVKRLAEATGLSAADRDAISARAADLVRAVRGSSDPRLMEVFLSAYGLSTKEGVALMCLAEALLRVPDTETMDDLIADKIAPHDWSAHSGGSSSIFVNASTWALMLTGRVLDEGEGGIEGTLRSMVRRLGEPVIRKAVAAAMREMGEQFVLGRTIAEAVKRGRPMTQKGYLYSFDMLGEAARTEADALRYHKAYADAISSLDAGSNGPDIRQNHGISVKLSALHPRYEVAQKEEMLPVMAERLLSLALAARHSRMGLNIDAEEADRLDLSLDVIERVLAEPELAGWNGFGVVVQAYGPRAAFVIDWLYALARKYDRTIMVRLVKGAYWDTEIKRAQTLGLAGYPVFTRKANTDVSYMACAKKLLGMTDRIYPQFATHNAHTVAAILSMATNRDSFEFQRLHGMGEALHETVRQAEGTRCRIYAPVGAHSDLLAYLVRRLLENGANSSFVHQLTDEDVEPEDIARDPLETVESQGPAANPAIARPSQIFGAGRRNSRGFDITDTVTLAAIDKARAAFAGPDRWHAKPITRAAGYGKPHPVVNPAKPDEVVGTVHEAAAKQVAIAVRIAVEAQPAWAKRPVGERAAILNRAADLYEANAVEFFALATREAGKSLADGVAEVREAVDFLRYYAAEAANAETGTQARGAIVCISPWNFPLAIFTGQIAAALVTGNSVIAKPAEQTPLIAFRAVELLREAGVPEDIIQLLPGDGPSVGGPLTADPRIAGVCFTGSTEVAKLIEKQLAETAAPDAMLIAETGGLNAMIVDSTALPEQAVRDILASAFQSAGQRCSALRVLYVQKDVEKKMLDMLKGAMEALNIGDPWRISTDVGPVIDDEAQASIRDYCTRKGLEGRLIAKLEAPKDGRFVAPHVFRVKGIEEMEREVFGPVLHVASFDADEIDAVIAAINRKGYGLTFGLHTRIEGRVQHFVDGIHAGNIYVNRNQIGAVVGSQPFGGEGLSGTGPKAGGPHYLRRFRKGPEAGTEVGEGHKVTATELADNLPDPALGGWSTRPDRIAILRKHLRGKGAAAIGAAAAIDFGQVDLPGPTGEANTLSLSPRGRVLCLGPDAETLLAQTIQALAAGNAVLAVAPGAPAALSALTGKGLPLAAIDGRPDPVEARALRVDVVAFSGTPEAARIVRQVIADRTGPIVPLVSEVLNPAAYAHERAVCVDTTAAGGNASLLAAA

SEQ ID NO: 12658 - DNA, 3597 bp, Pasteurella multocida
  CDS (1)..(3597)
atgacataccaattacttcccaaattaacttcattacgagaaccattaagccaacattatcgtattgacgaaaccacgttagtgcaaaaacttctctccgacgcagaaattccttccgatctccaaaccaaaattcaacagctagccagaaaattggtcgaaaatgtacgcaacgctcgccaaaatgcaagtggggtagatgccttaatgcatgagttttcattatcgagtcaagaaggtgtcgccttaatgtgcttagctgaagcattattgcgtattcctgataaagccactgcagataaattgattcgcgataaaatttcaaaagggaactggcgttcgcatatcggacagagtccgtctatgtttgtgaatgccgccgcttggggtttattgattaccggtaaattagtttcgacacacagtgaacaacagctttcatccagtttaaccaaattgattgcgaaaggcggagaaccattgattcgtaaaggtgtggaagtggcaatgcgcttattaggtaaacaatttgtcactggggaaacgatcgaacaagcgattaaaaacggtgaaaaacgtttccaacaaggttttcgttatagctatgatatgttgggcgaagctgccttaacggaagaagatgccgcacgttattatcaagactatgtggattccattcatgcggtggggcaacgttcttctgggcttggcgtttatgccgcctctggtgtctcgatcaaactctctgctattcatcctcgttacagtctatcacaacaccaacgtgtgatagacgaactgtatcccaaggtcaaacaactctttttattagcgaagcaatatgacattggtctgaatattgatgctgaagaagcggacagattagacatttctttggatttagtcgatcgtttattagctgatcctgatttagcacattttaacggtatcggtttggtggtacaggcataccaaaaacgttgtacttttgtcattgactatttaattgaacaagcccgcaaacatcaacataaaattatggtacgtttagtgaaaggggcttattgggacagcgaaattaaacgtgcgcaaaccgatggtgccgaaggttaccctgtctttacgcggaaagtgcatacagacgtgtcttacattgcttgtgcgaaaaaattattagcggcacaagatgtgatttatccacaatttgccacccataacgcgcaatctttggcgacggtctatcatttagcacaaggtaaacaatttgaattccaatgcttacacggcatgggcgaaaccttatatgatcaagtggtgggaaaacacaatttgaatgtgcaatgccgtatttatgcgcctgtcggttcatataaaaccctgttggcttatttagtgcgccgcttattagaaaatggggcaaatagctcgtttgtgaatcacattgtcgatgactcaatccccgttgaagccttaatccttgatccagtgcaaaaagcgaaagaaaccgaagggacaatgcaccctaaaacaccattgcctcgcgatctctttgctggaaagcgtgtaaattctaaaggttacgatttaaccgatgcgttgcagttacaacagttacaaaatgcattaactgaactgagtcaaaatgaatatgaagcctatcctttattagaaaataccactgcaccaaccggtaaaccgcgtcttgtatttaaccctgcaaaacgtgcaatgctagttggtaaagtgattgacgccagagaagaagatgtcgaacaggcatttgaaaatgcgcttcgtcataaagacaactgggccaatacaccggtagaacaaagagcggtcattttagaaaaaatggcagatttaatggaacaacacatgccgcagttatttgatttagcggtacgtgaagccggcaaaaccttaaataacgccattgccgaagtgcgtgaggcggtggatttttgtcgctattatgcacaagaagcacgtaaactcggcaatgagaatccaccacgtggtattgtggtggcaattagcccttggaatttccctttagccatttttattggcgaagtttgttctgccttagtcacaggtaatgtggtgattgccaaaccagcagaacaaacctcattaatggcgcattttgcggtgaagttgtttcaacaagcgggcttaccgattggtgtgttgcaatgtttatgtggtgcaggaaaagtgattggtgaaaaattagtctctgacgcccgtgttgatggcgtcatttttaccggttcaacagataccgccaaacgcattaatcaaaatttagcaaaacacaacaaacttattccattgattgccgaaacaggcggacaaaatgcaatgattgtggacagttcagccttagcagaacaagtcgtgcttgatgtactcaattccgcgtttgactcagcagggcaacgttgttctgcattacgtgtgctttatgtgcaacacgatgtcgcaccgcatattttaactatgttaaaaggggcaatggcagagttaaaagtcggcaatccacaacacttaaccactgatgtgggacccgtgattgatgaaatggcacaaaaacgcttattacaacatattgaaaccatgcgaacagtggcaaaagattgctatcaagtgccagttgatccagaaatgcaacaacagggaatttttgtcccaccgactttatttgaactcgaaaatcttcatcatttgaaacacgaagtgttcggtcccgtgttacatgtggttcgttttcatgcttcagaatttaatcaagttattgcacaaatcaattctaccggctttggcttaaccagtggcatacacagtcgtattgatgaaagcattaatcactggcttgaacaggttcacgcggggaatctgtacgtgaatcgtaatactgtcggtgcagtcgtgggggtacaagcctttggtggaagaggtttatctggaacaggaccgaaagcgggaggaccgttctatttgcaacgtttagtccatgcaaaacattgggcattaacgccattgcattacaatacgccgcgtgatttatctgatttagcggcaaaagtgcggtcaattttcactaaatctgaacaagctcctttactctcgcttattgatcaagttgcgcaatgttcgccactaaatacgacctttagaatgcaagggattactggggaagagaattatcttacctttacaccacgttcgttgattgccattgggaatggaccattagcacaacaaatgcaagcgttgattgccgtcgccgcagtgggcgcaactgccgtaatcagtaaatattctcaacttgcggcttatgaaaaacgcttagcggattatctgtttgttgctgaagtggaagaatgcgaggaaataagccagttgattgttctcgatccgataacggccaagcaaaaagcccaatatgccgaccgtccaggcgcgatcttgacctatgtggagcagctagatttagcgttgtccttgttcccattactgcatgaacaagcgatcagcattaacaccacagcagcaggaggtaatgcaagtttaatggcagaaatggattaa

SEQ ID NO: 12659 - protein, 1198 aa, Pasteurella multocida
MTYQLLPKLTSLREPLSQHYRIDETTLVQKLLSDAEIPSDLQTKIQQLARKLVENVRNARQNASGVDALMHEFSLSSQEGVALMCLAEALLRIPDKATADKLIRDKISKGNWRSHIGQSPSMFVNAAAWGLLITGKLVSTHSEQQLSSSLTKLIAKGGEPLIRKGVEVAMRLLGKQFVTGETIEQAIKNGEKRFQQGFRYSYDMLGEAALTEEDAARYYQDYVDSIHAVGQRSSGLGVYAASGVSIKLSAIHPRYSLSQHQRVIDELYPKVKQLFLLAKQYDIGLNIDAEEADRLDISLDLVDRLLADPDLAHFNGIGLVVQAYQKRCTFVIDYLIEQARKHQHKIMVRLVKGAYWDSEIKRAQTDGAEGYPVFTRKVHTDVSYIACAKKLLAAQDVIYPQFATHNAQSLATVYHLAQGKQFEFQCLHGMGETLYDQVVGKHNLNVQCRIYAPVGSYKTLLAYLVRRLLENGANSSFVNHIVDDSIPVEALILDPVQKAKETEGTMHPKTPLPRDLFAGKRVNSKGYDLTDALQLQQLQNALTELSQNEYEAYPLLENTTAPTGKPRLVFNPAKRAMLVGKVIDAREEDVEQAFENALRHKDNWANTPVEQRAVILEKMADLMEQHMPQLFDLAVREAGKTLNNAIAEVREAVDFCRYYAQEARKLGNENPPRGIVVAISPWNFPLAIFIGEVCSALVTGNVVIAKPAEQTSLMAHFAVKLFQQAGLPIGVLQCLCGAGKVIGEKLVSDARVDGVIFTGSTDTAKRINQNLAKHNKLIPLIAETGGQNAMIVDSSALAEQVVLDVLNSAFDSAGQRCSALRVLYVQHDVAPHILTMLKGAMAELKVGNPQHLTTDVGPVIDEMAQKRLLQHIETMRTVAKDCYQVPVDPEMQQQGIFVPPTLFELENLHHLKHEVFGPVLHVVRFHASEFNQVIAQINSTGFGLTSGIHSRIDESINHWLEQVHAGNLYVNRNTVGAVVGVQAFGGRGLSGTGPKAGGPFYLQRLVHAKHWALTPLHYNTPRDLSDLAAKVRSIFTKSEQAPLLSLIDQVAQCSPLNTTFRMQGITGEENYLTFTPRSLIAIGNGPLAQQMQALIAVAAVGATAVISKYSQLAAYEKRLADYLFVAEVEECEEISQLIVLDPITAKQKAQYADRPGAILTYVEQLDLALSLFPLLHEQAISINTTAAGGNASLMAEMD

SEQ ID NO: 12660 - DNA, 2967 bp, Gamma
  CDS (1)..(2967)
atgacccttcgatttcaaaaaatgctcaataaaataattgatgcttgcagagagaataagagcgagagaacaaaactagatgcatttctaagcgaatatgggctagataataaagaaggtgttgctctgatgtgtttagccgaatcaatactaagaatcccagacaaaaaaacaagggatctaataatatctgagaagttatctgagggtgcgtggatagagcatttaaacaaagcggatagtgttttcgttaatgcatcaacatggggtcttcttcttgcaggcaaggtagtttctacacccgatgagtggaccaaaaacccaagcgccctattaagttctttaatctcaaaatctggcgagtttccaattagaaatgctgtagttggtgccatgcatattctcagtcaagaatttgttatgggcagagattttgatgacataaaaaaaattaagaatatagaaaatgaaatttattcatttgacatgcttggagaggcagcaagaaacgctgaacaagccgacacttattatcagtcttataagaatgctatagatgaagtcggcaagataaatctgacaaaaaatacaattaatggtgtctcaataaaaatatcagctttatctcctagatatgaaatgaaaaagctaaaagacataaagtctgatctacttccaaaacttattcagctcacagagtatgcaaagtctaaagatgtagaaattacaatcgatgctgaggagcaagacagactggccgttagtttagagattattaaagagatggccctttcaccaaatattaaaaactggaaaggatttggtattgctgttcaggcatatggcaaaagagctatagccacaatagattggttagaagagctactagaaaacagagcacctatgcatgttcggctcgtaaaaggagcatattgggattatgaaattaagcatgctcaaatctatggctatgatggttatcctgtctatacaaaaaaatctgttacagacttagcttatttagcctgtgcaaaaagaatttttaatgtggaaaaaatttaccctaaatttgctacacataatgcacataccatttctgcaatccatcatcttggctcaaataaggattatgaatttcaaagactatttggaatgggagagctgctttataagtccgcaaacaaaatcttaaatactgaaaaaaatacctcaatttatgcgccgattggcaaatataaagacttgctaccctatcttgtaagaagactattagaaaatggagcaaacagctcatttattaataggttacttgatcctgaaacagattctgcttggcttgccagagggccccatttaaaaattgaggatgaaaaaaaagagataccaatgccaagaaatatatttaatgacagaccgaactctaaaggatttgatttaagtgaaagggtgaatttagaaatgcttgaagaggagcttggaaagtttgattcaaaagaaataaaggcttcatcgatttataaagcaaaggattataagaaaaccaatactcatgacatctcatctcttgcagatggaagaaatattggtacagcctcatatgatgatctagattatataaagggcagccttgaagaacaaaatattagtgaatggtctttgatgcatgttgaaaaaagagcatccattttagaaaaaattgcagacgacattgaagcaaatccttctgagctaatttattaccttatgaatgaagccggaaaaacagtacaaaatactattgatgaaattagagaagctatagattttctcagatactatgcaaaacaagctgttggcctccaaacagaagaccatattcttgagggtcccaccggcgagatcaatgccctatcttactcaccaaaaggccatattttatgtattagtccatggaactttcctgttgcaatacttatagggcaaataagtgcagcccttgcatgtggaaataaagtaacagttaagccctcagaacatacttcaattcttggctacatcattgtgaacaaatttcatgagattggggtcccaaaagatgctttaaatttaatcctaggagacggcattcatggtgacatgctttcaaaggttaataacatcaaaggggttgcattcaccgggtctttaaaaacagcaaaaaaaattcaaagcagccttgcaagtaaccatgaatcaattattcctttgattgcagagacaggaggcataaattcaatgattgttgattcaagcgcacttctcgagcaagcaaccgatgatattattcgttcagcatttgatagctctggacagcgatgctctgccttgagagttctctgtgtacaagacgaaatatatgacgatcttttatcaatgattaagggtggtatgaaagaactaaaaattggaaaccctcaaaatcttgacacagatatcggtccaataattagcaaaacatctcttgatagtctcaatgcttacgtcaaaggttttgaagataagaattattctatttttaggtctgctgataatgtagatgaaaattttgtagctccaacaataattgagattgataatatttctgatctaaaagacgagcaatttggaccaatacttcatatcgttagatttaaatcaaatgaaatggatgcactaattgaaaatattaatgatagtggcttcggccttacaatgggtattcatactagagtagaaaaaagggccgacatatttagtgacaagtgtaatgttggaaatatttacataaatagagatatggtgggagctgttgttggttctcagccttttggtggacaaaatctatccggcagcggttataaggctggtgggcctaattaccttctgcaatttcttaacgaaaaggttgtctcaaagaactcggtagcatttggtggcaacactgaactcttaaatattcaagaggactaa

SEQ ID NO: 12661 - protein, 988 aa, Gamma
MTLRFQKMLNKIIDACRENKSERTKLDAFLSEYGLDNKEGVALMCLAESILRIPDKKTRDLIISEKLSEGAWIEHLNKADSVFVNASTWGLLLAGKVVSTPDEWTKNPSALLSSLISKSGEFPIRNAVVGAMHILSQEFVMGRDFDDIKKIKNIENEIYSFDMLGEAARNAEQADTYYQSYKNAIDEVGKINLTKNTINGVSIKISALSPRYEMKKLKDIKSDLLPKLIQLTEYAKSKDVEITIDAEEQDRLAVSLEIIKEMALSPNIKNWKGFGIAVQAYGKRAIATIDWLEELLENRAPMHVRLVKGAYWDYEIKHAQIYGYDGYPVYTKKSVTDLAYLACAKRIFNVEKIYPKFATHNAHTISAIHHLGSNKDYEFQRLFGMGELLYKSANKILNTEKNTSIYAPIGKYKDLLPYLVRRLLENGANSSFINRLLDPETDSAWLARGPHLKIEDEKKEIPMPRNIFNDRPNSKGFDLSERVNLEMLEEELGKFDSKEIKASSIYKAKDYKKTNTHDISSLADGRNIGTASYDDLDYIKGSLEEQNISEWSLMHVEKRASILEKIADDIEANPSELIYYLMNEAGKTVQNTIDEIREAIDFLRYYAKQAVGLQTEDHILEGPTGEINALSYSPKGHILCISPWNFPVAILIGQISAALACGNKVTVKPSEHTSILGYIIVNKFHEIGVPKDALNLILGDGIHGDMLSKVNNIKGVAFTGSLKTAKKIQSSLASNHESIIPLIAETGGINSMIVDSSALLEQATDDIIRSAFDSSGQRCSALRVLCVQDEIYDDLLSMIKGGMKELKIGNPQNLDTDIGPIISKTSLDSLNAYVKGFEDKNYSIFRSADNVDENFVAPTIIEIDNISDLKDEQFGPILHIVRFKSNEMDALIENINDSGFGLTMGIHTRVEKRADIFSDKCNVGNIYINRDMVGAVVGSQPFGGQNLSGSGYKAGGPNYLLQFLNEKVVSKNSVAFGGNTELLNIQED

SEQ ID NO: 12662 - DNA, 1482 bp, Thermoplasma acidophilum
  CDS (1)..(1482)
atggatacgaagttatacatagatggacagtgggttaattcttcttccggaaagactgtcgacaagtacagcccggtgactggacaggtcatcggaaggtttgaggcggcgaccagagatgatgttgacagggccatagatgctgcggaggatgcattctgggcctggaacgatcttggttcggtggagagatcgaagataatttacagggcaaaggaactgatagagaagaacagggcggaacttgagaacataataatggaggagaacggaaagccggtaaaggaggccaaggaggaggtcgacggcgtcatagaccagatacagtactacgcggaatgggcgaggaagctcaacggcgaggtcgtcgaaggaacgtcgtcccacaggaaaatattccagtacaaggttccttacggcatagtcgttgcgctgacgccctggaatttcccggccggtatggttgcgaggaagctggctcctgcgctgttgacaggaaacaccgttgttctgaagccgagcagcgatacgcccggaagcgcagagtggatcgtgcgcaagttcgtcgaagccggcgtaccgaagggcgttttgaacttcatcaccggaaggggatcagagattggcgattacatagtcgaacacaaaaaggtaaacctaataacgatgaccggttcaaccgcaaccggccagaggataatgcagaaagcatcagccaacatggcaaagctcatactcgagctgggcggaaaggcgccgtttatggtgtggaaggacgcagacatggacaatgcactgaagaccctgctgtgggcgaagtactggaacgcgggccagtcttgcatagcggctgagcgcctctacgtgcacgaagacatctacgacacattcatgagcaggttcgtggaactgagcaggaagctcgcactgggcgatccgaagaacgctgacatgggcccgcttataaacaaaggcgcgctccaggccacatccgagatcgttgaagaggcaaaggagagcggtgcaaagatactgttcggcggaagccagccaagcctcagcggaccgtacaggaacggctacttcttcctgccgaccataataggcaacgcagaccagaaatcgaagatattccaggaggaaatattcgcaccagtcataggcgccaggaagatatccagcgttgaggaaatgtacgatctggccaacgattcaaagtacggcctggcatcgtacctgttcacgaaggacccgaacataatattcgaggcttcagagaggataaggttcggcgaactttacgttaacatgcctggtccggaggcctcgcagggataccacacaggcttccgcatgaccggacaggcaggagaggggagcaagtacggaatatccgaatacctgaagctgaagaacatctacgttgattactccggaaagcccctgcacataaacaccgtgagggacgatctgtttcagtga

SEQ ID NO: 12663 - protein, 493 aa, Thermoplasma acidophilum
MDTKLYIDGQWVNSSSGKTVDKYSPVTGQVIGRFEAATRDDVDRAIDAAEDAFWAWNDLGSVERSKIIYRAKELIEKNRAELENIIMEENGKPVKEAKEEVDGVIDQIQYYAEWARKLNGEVVEGTSSHRKIFQYKVPYGIVVALTPWNFPAGMVARKLAPALLTGNTVVLKPSSDTPGSAEWIVRKFVEAGVPKGVLNFITGRGSEIGDYIVEHKKVNLITMTGSTATGQRIMQKASANMAKLILELGGKAPFMVWKDADMDNALKTLLWAKYWNAGQSCIAAERLYVHEDIYDTFMSRFVELSRKLALGDPKNADMGPLINKGALQATSEIVEEAKESGAKILFGGSQPSLSGPYRNGYFFLPTIIGNADQKSKIFQEEIFAPVIGARKISSVEEMYDLANDSKYGLASYLFTKDPNIIFEASERIRFGELYVNMPGPEASQGYHTGFRMTGQAGEGSKYGISEYLKLKNIYVDYSGKPLHINTVRDDLFQ

SEQ ID NO: 12664 - DNA, 1548 bp, Thermoplasma acidophilum
  CDS (1)..(1548)
atgccattcgaaaatgaaaacacatatgtcaggatggtagaagccggcaaagaggatgaattccacagaaagtatgaggaagcgctcaaagaggtggaatcctatttccacaaggaatatccgaatataataaaggaagacattgttgagagcaaaaagataaaggatataagcccaatagatggcagtgagatagcgactttccaattggcatcggatgaatccgttaacaaagccgtggacatgctctatcggtcatacaagaactggtacaatataggatacatgaagcgcgccctaactttcctgaaagcagcaggcatgctcagcgatcagaagttcaagttcgctgccatacttacgtacgaaaacggaaagaatagatatgaagccattggtgatgtggatgaagccatagacttcatgcgttattacgcaatcaacctcatagaaaatcagggcttcataaaattaacgggcaaagcctacaagaatgaggaatcgatgagtgtgatgaaaccctatggcgtgtttggcgtcatatctccattcaacttcttctcgatcggcgtcggcatgagttcaggcccactcgtcacgggcaatgcagtcatattgaagccgagcagcgatataccgctttcgctgtacctatgggttcgcctgatgcacgatgcgggcgttccgaaagaggtactggcctacgtttcaggttcaggtagcgttgtaggaaagcacatagtcgagaacaagaaggttgcgggaatagtattcacaggatctagggaagtcggtctagacatccagagaaggtctatcgacaatggaccaaaggtcgtcataacagagatgggaggcaaggatgccataatcgtgtccaacaaggctgatctgaacaaagctgtggaaggagttgcaagagcagcctttggattcgctggccagaaatgcagcgcatgctcattgctctatgttcacaaggacgtgtatgatgagttcatgaagcgcctcaaggaaagaaccgaccagataaagccagatgacccaaggaagaaggagacatttctcaacccggtcataaacaaggaggcatacgagaaattcatcaagctgaagcctgaatacaacaagggtaagatactcactggaggacatgaactgaagaggcctggattctacgttgaaccaacaatagtgacggatctgcccaaagatgcctatattgcacggaatgagatcttcctgccggtgctgagtgtgttcaaatgcaacagcatacaggaagccatagaagatataaacagcatggattatgggctcacaggaggcatattcactgaagacccgaatgagatacagtactatttcgacaacgtagaggtaggcgttctctacgcaaacaggaagagcggaggttccaccggttcaatggttggttcgcagcccttcgttggctggaaactcagcggtgtttcaggaaagggaaccggttcgttctactacctgatgcagttcctgagagaacagtcacagacaatagcacattga

SEQ ID NO: 12665 - protein, 515 aa, Thermoplasma acidophilum
MPFENENTYVRMVEAGKEDEFHRKYEEALKEVESYFHKEYPNIIKEDIVESKKIKDISPIDGSEIATFQLASDESVNKAVDMLYRSYKNWYNIGYMKRALTFLKAAGMLSDQKFKFAAILTYENGKNRYEAIGDVDEAIDFMRYYAINLIENQGFIKLTGKAYKNEESMSVMKPYGVFGVISPFNFFSIGVGMSSGPLVTGNAVILKPSSDIPLSLYLWVRLMHDAGVPKEVLAYVSGSGSVVGKHIVENKKVAGIVFTGSREVGLDIQRRSIDNGPKVVITEMGGKDAIIVSNKADLNKAVEGVARAAFGFAGQKCSACSLLYVHKDVYDEFMKRLKERTDQIKPDDPRKKETFLNPVINKEAYEKFIKLKPEYNKGKILTGGHELKRPGFYVEPTIVTDLPKDAYIARNEIFLPVLSVFKCNSIQEAIEDINSMDYGLTGGIFTEDPNEIQYYFDNVEVGVLYANRKSGGSTGSMVGSQPFVGWKLSGVSGKGTGSFYYLMQFLREQSQTIAH

SEQ ID NO: 12666 - DNA, 1683 bp, Leishmania major
  CDS (1)..(1683)
atgctacgccgcaccgtgtcctgtgcctttgcggccttcaagtgcccgcctgtgctgaatgagcccatggacaacttcgagccgggctctgtctccgcgaaggggacgctggaagcctgcaaggaagctcgcggggaggtgcgggagtgcccaatcatgattggcggcaagccgtacacctcctcgaacatcatcaaggccactatgccctcggatcaccaggtgcagattgccaaggcctacaacgcgacgccggagctcgcgaagaaggctgtggaggcggctgtggaggcctccaaggagtggagtcaggtgcccttccgcgaccgcgcggccatcttctacaaggcggcacacctcctgtcaaccaaataccgccacgagatgcgcgccgtgacgatgctgggccagagcaagaacccgtggcaagcggagatcgactgcgtcgccgaggcctgtgacttcatccgctggaacattcactttgccgaggagctgtacgcgcagcagccgcgctccgtctcgaacagtggcgtgtggaatacgacggactaccgcccactcgaggggtttgtgtcggccatcacgcccttcaacttcactgccatcgccgcgaacctcgctggcacgccggcgctgatgggcaacacggtggtctggaagccgagcccgacggcggtgctctcgaactacctcatgtacaagattatggaggaggcggggctgccggcgggcgtcatcaactttgtgccgtgcgagccagcggtgatggatagcgccgtgaacgccgacccgcgcctcgccgccgtcgtcttcaccggctcgacccgcgtctttaccgaaatcaacaagaatgtcttcagccgcctcgagacgtaccacaactttccgcgcatctccggcgagacgggcggcaaggacttccacctcgtccacccctctgccgacgtgaggcacgttgcggccggcaccgtccgtggtgctttcgaattccaagggcagaaatgcagtgcgtgctcgcggctgtacgcaccacagagctgctggaaggagctgaaggcgttgctcatcaagggccagaagcaggtcaagatgggccagccggacgacttccagagcttcatgtgcgccgtcatcgacgaaacgtccttcaacaagaataagaagtatatcgaaatcgccaaggcggactcgagcaactacgagatcgttgcgggaggcaagtgcgacaagacgagggggtacttcgttgagccgaccatcattgagacgaaggacccccgcgcgcagctcatgcgcgaggagatcttcggccctgtgctgacggtgtttgtgtatgacgacagtaagccggggtactggaaggaagtgtgcgagctcgtcgactcgaccacgaagtacggcctgactggtgccgtcttctctcgcgagcgtgcgccgatcagggaggcggacaagtacctgcgctacgcggcgggcaactactacgtgaacgacaagtgcaccggtgccgtcgttggccagcagccgttcggcggctcgcgcctgagtggctcgaacgacaagccgggtgccggccagttcgtcacccgcttcgtctcggcccgctccatcaaggagagcttcgacgtgacgcccaccatctcgtacccgcaccagctgccggatgtgtacacactgtag

SEQ ID NO: 12667 - protein, 560 aa, Leishmania major
MLRRTVSCAFAAFKCPPVLNEPMDNFEPGSVSAKGTLEACKEARGEVRECPIMIGGKPYTSSNIIKATMPSDHQVQIAKAYNATPELAKKAVEAAVEASKEWSQVPFRDRAAIFYKAAHLLSTKYRHEMRAVTMLGQSKNPWQAEIDCVAEACDFIRWNIHFAEELYAQQPRSVSNSGVWNTTDYRPLEGFVSAITPFNFTAIAANLAGTPALMGNTVVWKPSPTAVLSNYLMYKIMEEAGLPAGVINFVPCEPAVMDSAVNADPRLAAVVFTGSTRVFTEINKNVFSRLETYHNFPRISGETGGKDFHLVHPSADVRHVAAGTVRGAFEFQGQKCSACSRLYAPQSCWKELKALLIKGQKQVKMGQPDDFQSFMCAVIDETSFNKNKKYIEIAKADSSNYEIVAGGKCDKTRGYFVEPTIIETKDPRAQLMREEIFGPVLTVFVYDDSKPGYWKEVCELVDSTTKYGLTGAVFSRERAPIREADKYLRYAAGNYYVNDKCTGAVVGQQPFGGSRLSGSNDKPGAGQFVTRFVSARSIKESFDVTPTISYPHQLPDVYTL

SEQ ID NO: 12668 - DNA, 3948 bp, Pseudomonas putida
  CDS (1)..(3948)
atggcgactaccacccttggggtcaaactcgacgacccgacccgtgagcgactcaaagcagctgcgcagtccatcgaccgcacgcctcactggttgatcaagcaagcgatcttcaattacctggagaagctcgagggtggtgccaccctgaccgaactcaacggtcatgccagcaacccggccgacgatgccggtgaagtccaggccgaccacagccaccagtgcttcctcgaatttgccgagagcatcttgccgcagtcggtactgcgctcggcgatcaccgccgcctaccgccgccccgagcaggaagtggtgccgatgctgctggagcaggcgcgcctgagcgcgccgctggccgacgccaccaacaagctggccgcaagcattgccgaaaaactgcgcaaccagaaaagcgtcggcggccgtgccggtatcgtccagggcctgctgcaggaattctcgctgtcgtctcaggaaaggcgtggcgtgtgcctggccgaagccctgctgcgtatccccgacaaaggtacccgtgatgcgctgatccgcgacaagatcagtaccggcaactggcagccgcacctgggcaacagcccgtcactgttcgtcaacgccgccacctgggggctgctgctgaccggcaagctggtcagcacccataacgaaaccggcctcacctcctcgctcacccgcatcatcggcaagagcggcgagccgatgatccgcaagggcgtcgacatggccatgcgcctgatgggtgagcagttcgtcaccggcgagaccattgccgaagccctggccaacgccagccgtttcgaggccaaaggcttccgttactcctacgacatgcttggcgaagccgcactgaccgagcacgacgcgcagaagtacctggcgtcctacgagcaggccatccactcgatcggcaaggcctcgcatggccgtggcatctatgaaggcccaggcatctcgatcaagctgtcggcactgcacccgcgctacagccgggcccagtacgagcgcgtgatggaagagctgtacccgcgcctgctgtcgctgaccctgctggccaagcagtacgacatcggccttaacatcgacgccgaagaagccgaccgcctggagctttcgctggacctgctcgaacgcctgtgcttcgagccatccctggctggctggaacggcatcggcttcgttatccaggcctaccagaagcgctgcccgtacttgatcaactacttcttcgatctggccaagcgcaccccccaccgcctgataatccgcctgttaaaaggcgcctactgggacagcgagatcaagcgtgcccaggtcgaaggcctggaaggctacccggtctatacccgcaaggtgtacaccgacgtgtcctacgtcgcctgcgcccgcaagctgctggccgtgccagaagccatctacccgcagttcgccacccacaacgcccacaccctgtcggccatctaccacattgccgggcagaactattacccgggccagtacgagttccagtgcctgcacggcatgggcgaaccgctgtacgagcaagtggtcggcaagattgccgatggcaagctgaaccgcccgtgccgcgtgtatgcaccggtcggcacccatgaaacgctgctggcctacctggtgcgccgcctgctggaaaacggcgcgaacacctcgttcgtcaaccgcattgccgaccactcgatttccatccaggaactggtcgccgaccggtggccagcatcgatcgcatgggtacccaggaaaggcagtatcggcctgccgcacccacgcattcccctgccgcgcgacctgtatggcaccgaacgggccaaattggccggtattgaaatggccaatgaacaccgcctggggttgttgtcctgcgccatggtggccaccgctcacaaacagtgggaggctgccccgctgctggcctgcgccgccagggagagcgctgccgcaccggtgctgaacccggctgaccaccgcaacgtcgtcggccatgtgcaggaggccaccgttgccaaatttgacaacgccatccattgcgcactgaaccccgcgccgatctggcaggccaccccaccagccgagcgtgctgccattctggagcgcaccgccgacctgatggaggccgaaatccacccgctgatgggcctgctcatccgcgaggccggcaaaaccttccccaacgccattgccgaattgcgtgaagccgtggacttcctgcgctactacgcggtgcaggcacttaacgacttcagcaacgacgcccaccgcccactgggtcctgtggtgtgcatcagcccatggaacttcccgctggcgatcttcaccggccaggtggccgcagccctggctgccggcaacccggtactggccaagcctgccgagcaaaccccactgatcgccgcccaggccgtgcgcctgctgctggaagctggcatcccagaaggcgtgctgcagctgctgccgggccgcggtgaaactgtcggtgccggcctggtcggagacgagcgcgtcaaaggcgtgatgttcaccggctccactgaagtggcccgcctgctgcagcgcaacgtcgctggccgtctggacaaccagggccgcccgatcccgctgatcgccgaaaccggcggccagaacgcgatgatcgtcgactcctcggcactgaccgaacaggtcgtgatcgacgtggtgtcctcggccttcgacagtgccggccagcgttgctcggccctgcgcgtactgtgcttgcaggaagactccgccgaccgcgtaatcgagatgctcaagggcgccatggctgaaagccgcctgggctgcccggaccgcctggccgtggacatcggcccggtgatcgatgccgaagccaaagccggcatcgagaagcacatccagggcatgcgcgagaaaggccgcccggtctaccaagtcgccattgccgatgctgccgagatcaagcgcggcaccttcgtcatgccaaccctgatcgagctggacagcttcgacgagctgaagcgcgaaatcttcggccccgtgctgcacgtggtgcgctacaaccgccgcaatctggaccagctgatcgagcagatcaacaactccggctacggcctgaccctcggcgtgcacacccgtatcgacgagaccatcgccaaagtggtggaaaccgcaacgccggcaacatgtcgtcaccgcaacattgtgggtgcagtggtgggcgtgcagccgttcggtggtgaaggcctgtctggcaccggcccgaaagccggcggcccgctgtacctctaccgcctgctgtcgacccgcccggccgacgccattggccgccacttccagcagcaggacggcgaaggcacgccggaccgcaccctgcacgaacagctggtaaagccgctgcacggcctgaaggcctgggccgagaacaaccagctggccgacctggccgcgctgtgcagccagttcgccagccagtcgcagagcggcatcgcccgcctgctgccaggcccgaccggcgagcgcaacagctacaccattctgccgcgtgagcacgtgctgtgcctggccgacaacgaaaccgacctgctggcgcagttcgccgcggtactggccgttggcagctcggcggtgtgggttgacggtgaaccgggcaaggccctgcgcgcccgcctgccgcgtgagctgcaggccaaggtgaagctggtcgcggactggaacaaggatgaagtggcgttcgacgccgtgatccaccatggcgactcggaccagctgcgcggcgtatgccagcaggtggccaagcgtgccggggcgatcgttggggtgcacgggctgtccagcggggatcaccagattgcgctggagcgcctggtcatcgagcgcgcggtgagcgtgaacactgcagcggcgggtggtaacgccagcctgatgaccattggctaa

SEQ ID NO: 12669 - protein, 1315 aa, Pseudomonas putida
MATTTLGVKLDDPTRERLKAAAQSIDRTPHWLIKQAIFNYLEKLEGGATLTELNGHASNPADDAGEVQADHSHQCFLEFAESILPQSVLRSAITAAYRRPEQEVVPMLLEQARLSAPLADATNKLAASIAEKLRNQKSVGGRAGIVQGLLQEFSLSSQERRGVCLAEALLRIPDKGTRDALIRDKISTGNWQPHLGNSPSLFVNAATWGLLLTGKLVSTHNETGLTSSLTRIIGKSGEPMIRKGVDMAMRLMGEQFVTGETIAEALANASRFEAKGFRYSYDMLGEAALTEHDAQKYLASYEQAIHSIGKASHGRGIYEGPGISIKLSALHPRYSRAQYERVMEELYPRLLSLTLLAKQYDIGLNIDAEEADRLELSLDLLERLCFEPSLAGWNGIGFVIQAYQKRCPYLINYFFDLAKRTPHRLIIRLLKGAYWDSEIKRAQVEGLEGYPVYTRKVYTDVSYVACARKLLAVPEAIYPQFATHNAHTLSAIYHIAGQNYYPGQYEFQCLHGMGEPLYEQVVGKIADGKLNRPCRVYAPVGTHETLLAYLVRRLLENGANTSFVNRIADHSISIQELVADRWPASIAWVPRKGSIGLPHPRIPLPRDLYGTERAKLAGIEMANEHRLGLLSCAMVATAHKQWEAAPLLACAARESAAAPVLNPADHRNVVGHVQEATVAKFDNAIHCALNPAPIWQATPPAERAAILERTADLMEAEIHPLMGLLIREAGKTFPNAIAELREAVDFLRYYAVQALNDFSNDAHRPLGPVVCISPWNFPLAIFTGQVAAALAAGNPVLAKPAEQTPLIAAQAVRLLLEAGIPEGVLQLLPGRGETVGAGLVGDERVKGVMFTGSTEVARLLQRNVAGRLDNQGRPIPLIAETGGQNAMIVDSSALTEQVVIDVVSSAFDSAGQRCSALRVLCLQEDSADRVIEMLKGAMAESRLGCPDRLAVDIGPVIDAEAKAGIEKHIQGMREKGRPVYQVAIADAAEIKRGTFVMPTLIELDSFDELKREIFGPVLHVVRYNRRNLDQLIEQINNSGYGLTLGVHTRIDETIAKVVETATPATCRHRNIVGAVVGVQPFGGEGLSGTGPKAGGPLYLYRLLSTRPADAIGRHFQQQDGEGTPDRTLHEQLVKPLHGLKAWAENNQLADLAALCSQFASQSQSGIARLLPGPTGERNSYTILPREHVLCLADNETDLLAQFAAVLAVGSSAVWVDGEPGKALRARLPRELQAKVKLVADWNKDEVAFDAVIHHGDSDQLRGVCQQVAKRAGAIVGVHGLSSGDHQIALERLVIERAVSVNTAAAGGNASLMTIG

SEQ ID NO: 12670 - DNA, 1500 bp, Gallus gallus
  CDS (1)..(1500)
atggcatctctgcatctgctgccttctcccactctcaaccttgaaatcaaacacacgaagatttttatcaataatgagtggcaaaattctgaaagcgggagagtattcccagtatacaatccagcaacaggagagcagatctgtgagatccaggaagcagacaaggttgacacggacaaggcagtgagagcagctcgccttgctttttctctgggttcagtttggaggagaatggatgcatcggaaagaggccaacttttggataaactggcagacttggttgaaagagacagggcagttcttgctactatggaatcactgaacagtggcaaaccattcctgcaagccttctacgtagatcttcaaggagtcataaaaaccctgaggtattacgctggttgggcagacaaaatccatggaatgaccatacctgtagatggagattattttacgtttacaagacatgaacccatcggagtgtgtggacagatcatcccttggaacttccccctgctgatgtttgcatggaagattgctccagctctgtgctgcggcaatacagtagttattaaaccagcagaacaaacaccactcagcgctctctatatgggagccctcatcaaggaggctggctttccaccaggagttgtgaatattttgccaggatttggtccaattgttggtgcagcaatagcatctcatgtgggcattgataaaattgcgtttactggatccactgaggttgggaagctgatccaagaagcagctggaaggagtaacttgaagagagttacactggagctgggtgggaaaagcccaaacatcatttttgcagatgctgatttggattatgctgtggaacaagctcaccagggggtcttcttcaatcaaggtcaatgctgcactgcaggctcaaggatttacgtggaagaatcaatctatgaagagtttgttagaagaagtgtagaacgtgcaaagaggagagtagtagggagtccttttgacccaactacagaacaagggccacagattgataaaaaacaatacaacaagatcttggaactgattcagagcggcattactgaaggagcaaaacttgaatgtgggggtaaagggctaggaagaaagggcttcttcattgaacctacagtgttttccaatgtaacagatgacatgcggattgccaaggaggagatttttgggcctgttcaagaaatactgagatttaaaaccgtggatgaagtcatagagagagccaacaattctgactttgggctggtagctgctgtctttacaaatgacataaacaaggccctgacagtctcttcagcaatgcaggctgggacagtctggataaattgctacaacgccttaaatgcccagagtccttttggaggattcaaaatgtctggcaatggtagagagatgggtgaaagcggattgagagaatattctgaagttaaaacagtgacaataaagatccctcagaagaattcctaa

SEQ ID NO: 12671 - protein, 499 aa, Gallus gallus
MASLHLLPSPTLNLEIKHTKIFINNEWQNSESGRVFPVYNPATGEQICEIQEADKVDTDKAVRAARLAFSLGSVWRRMDASERGQLLDKLADLVERDRAVLATMESLNSGKPFLQAFYVDLQGVIKTLRYYAGWADKIHGMTIPVDGDYFTFTRHEPIGVCGQIIPWNFPLLMFAWKIAPALCCGNTVVIKPAEQTPLSALYMGALIKEAGFPPGVVNILPGFGPIVGAAIASHVGIDKIAFTGSTEVGKLIQEAAGRSNLKRVTLELGGKSPNIIFADADLDYAVEQAHQGVFFNQGQCCTAGSRIYVEESIYEEFVRRSVERAKRRVVGSPFDPTTEQGPQIDKKQYNKILELIQSGITEGAKLECGGKGLGRKGFFIEPTVFSNVTDDMRIAKEEIFGPVQEILRFKTVDEVIERANNSDFGLVAAVFTNDINKALTVSSAMQAGTVWINCYNALNAQSPFGGFKMSGNGREMGESGLREYSEVKTVTIKIPQKNS

SEQ ID NO: 12672 - DNA, 1641 bp, Agaricus bisporus
  CDS (1)..(1641)
atggccactgctcaactcgcgactttcaagatcccccctgtgtccaatgaacccatgctatcctatgcccccggctcgccggagagagcgggtctgcaagcagcattggcagaaatgcaaagccagctaccctttgaggttccttgtatcatcaatggccaagaggtgagaacgaacaacatccagaaacagcctatgccacacgaccatgctcgccacctgtgtactttccacgaaggatcaccagaactggtcgaaaaggctacctgtggcgctcttcaagccaaagacggttgggaaaccatgccatggaacgatcgtgctgcgattttcctcaaggccgccgatctcgcaagtggaaagtatcgttacaagctcatggcggcgactatgctcggccaaggcaaaaatacatggcaggcggagatagacgctgcggcggagttggcagacttcttccgcttcggagtctcttatgtagaggaactatacgcccaacagccgccgaagaatgctcccgggtgttggaaccgtaccgagtaccgcccgcttgaagggttcgtccttgctgtttcgcccttcaactttaccgctattggtgggaatctacccggatctcccgcacttgttggaaatgtcgtcgtatggaagcctgctccagccgcgacttattccaactacctcgtcttcaagattctttcggaggccggcgttccccccggtgtcattcaatttattcccggaggagctgaaatagtacaagctgccatccagagccctaactttcgttcgcttcacttcactggcagtactaatgtcttcaaatcgctctggaaggatatctcctcgaatctagacaagtacaaggtctaccccagaatcgtcggagagaccggtgggaagaactggcacgtcattcacaagtctgcggaagtgagaaacgctgtgctgcagagtgttcgaggagcattcgaatatcaaggtcaaaagtgctccgccctctcgcgtctctacgtgtccagatcagtctgggaaaacggtttcaagacacagtacctcgaggaaattgccaagatcaaggttggcccttgtctcgactggaacaactacatgggacctgttattggccgtcgggcatatgataatatcaccggttttatcaagaaggcgaaggaagagggaggagaggtgttgattggtggatcaggtgatgactccaagggattcttcattcaaccaactgtcattcttaccaaggttcctcgatctactaccatggttggggagatctttgggcccgtcgtgactgcctatgtcttcgaggacagtgattacgagaaaacgcttgaattgatcgacacaacttccatctacggccttactggagcaatcttcgcttctgaacgtcaagctttacttaccgccacaaaccggtctcgcaatgcggctggtaacatatattacaacgaaaagtgcacgggagcagttgtcggtcagcaaccgttcggtggcgccagagggagtggcaccaacgacaaggccggtagcattagtatcttctatcgctttgttagcgcgaggagcatcaaggagaactttgtcgggttggaagacttccactatccctctaatttggtttga

SEQ ID NO: 12673 - protein, 546 aa, Agaricus bisporus
MATAQLATFKIPPVSNEPMLSYAPGSPERAGLQAALAEMQSQLPFEVPCIINGQEVRTNNIQKQPMPHDHARHLCTFHEGSPELVEKATCGALQAKDGWETMPWNDRAAIFLKAADLASGKYRYKLMAATMLGQGKNTWQAEIDAAAELADFFRFGVSYVEELYAQQPPKNAPGCWNRTEYRPLEGFVLAVSPFNFTAIGGNLPGSPALVGNVVVWKPAPAATYSNYLVFKILSEAGVPPGVIQFIPGGAEIVQAAIQSPNFRSLHFTGSTNVFKSLWKDISSNLDKYKVYPRIVGETGGKNWHVIHKSAEVRNAVLQSVRGAFEYQGQKCSALSRLYVSRSVWENGFKTQYLEEIAKIKVGPCLDWNNYMGPVIGRRAYDNITGFIKKAKEEGGEVLIGGSGDDSKGFFIQPTVILTKVPRSTTMVGEIFGPVVTAYVFEDSDYEKTLELIDTTSIYGLTGAIFASERQALLTATNRSRNAAGNIYYNEKCTGAVVGQQPFGGARGSGTNDKAGSISIFYRFVSARSIKENFVGLEDFHYPSNLV

SEQ ID NO: 12674 - DNA, 1719 bp, Emericella nidulans
  CDS (1)..(1719)
atgcaatcatcgatgctgcttcgggtgagggctctccccaaaacagcgtcggttctctcccgtacaaagacggcgacatacgccacatacaaggttcctcgcattgacaatgaaccaaacaaacactacgccgcaggctcgccggaccgaaaggctctacaagaggctttggcgcgaacgcaacgaaatgctcctctgagcgttcctctagtcattgcaggcaaggaggtcaaatcctcttcatcactaacacaatcgaaccccgcgtcgcacggcccggtggccacctactccaatgcaaccgccaaagacgtccaggcggcgatcgagtccgccctggaagctcgcaaatcatgggcctccacgccgttcgccgatcgtgccagtgtttttcttaaggctgcagacctgatctcgacaaagtaccgctatgatgtgatggctgtgaccatgcacggccaaggcaagaatgcctggcaggcggagattgactctgccgctgagctttgtgacttcttccgatttggcgttaagtatgcggaggatctgtatgcgcagcagcctgtgcaccatgcgccgggtgtttggaaccgcgtcgaataccgtccgcttgaaggatttgtttacgcgatcagtccgttcaatttcactgccattggaggtaatctcgctggagctcctgcactgatgggcaatgttgttgtctggaagccttccccttcggccatcgcatccaactggctcgttcatcagatcctgctcgaagccggcctccctaagaacgtcattcagttcgtccccggcgaagccgaagaagtgaccaagaccgttctcgaccaccccgacttcgcagcccttcatttcactggcagcaccaatgtcttccgtaatctgtacggtcagatctccactcgtgtcgcagccggcaaataccgcagctacccacgtattgtcggcgaaactggcggcaagaacttccacctcattcataaatctgccgacatccgcaacgctgctgtgcagaccgtccgcggtgcttttgagtaccagggccagaagtgcagcgcaacctctcgtgtctatgtcgcgtcctccatcgccgattccttcctcgaacaggtcgcctcggaagcgaagagcctaaaggtcggccccccttcggactttaccaacttctgcgggccggttatccatgaagcctccttcaccaagctcgccaaggtcattgacgaggcaaagaacgaccccgagctcgaactcctcgctggcggctcctacgactcctccaagggctggtacatccagcccaccgtttaccgcaccactaaccctgatcacccgctgctgacacgtgaactttttggtcctattctcgtggtgtatgcctaccctgacgcgacggaggccgactttgcccgtattgcgcagaagatcgacgcaacaggcgaatacggcctcacgggctcggtgttcgctcaggaccgcgaggcactggcggtagccaacgacgtcctccgcaatgcggccggtaacttctatatcaactgcaagagtaccggcgcagttgtgggtcagcagccgtttggcggggcgagggcgtccggtaccaatgataaggctggtagtgggaacctgctgagcaggtttgtgagcctgcggtcgattaaggaggagtttgttcctacctacaaggttgcttatcctagcaacgaggcgtga

SEQ ID NO: 12675 - protein, 572 aa, Emericella nidulans
MQSSMLLRVRALPKTASVLSRTKTATYATYKVPRIDNEPNKHYAAGSPDRKALQEALARTQRNAPLSVPLVIAGKEVKSSSSLTQSNPASHGPVATYSNATAKDVQAAIESALEARKSWASTPFADRASVFLKAADLISTKYRYDVMAVTMHGQGKNAWQAEIDSAAELCDFFRFGVKYAEDLYAQQPVHHAPGVWNRVEYRPLEGFVYAISPFNFTAIGGNLAGAPALMGNVVVWKPSPSAIASNWLVHQILLEAGLPKNVIQFVPGEAEEVTKTVLDHPDFAALHFTGSTNVFRNLYGQISTRVAAGKYRSYPRIVGETGGKNFHLIHKSADIRNAAVQTVRGAFEYQGQKCSATSRVYVASSIADSFLEQVASEAKSLKVGPPSDFTNFCGPVIHEASFTKLAKVIDEAKNDPELELLAGGSYDSSKGWYIQPTVYRTTNPDHPLLTRELFGPILVVYAYPDATEADFARIAQKIDATGEYGLTGSVFAQDREALAVANDVLRNAAGNFYINCKSTGAVVGQQPFGGARASGTNDKAGSGNLLSRFVSLRSIKEEFVPTYKVAYPSNEA

SEQ ID NO: 12676 - DNA, 3134 bp, Homo sapiens
  CDS (31)..(1722)
tccagcgaacagccccgcttctaacccgagatgctgctgccggcgcccgcgctccgccgcgccctgctgtcccgcccctggaccggggccggcctgcggtggaagcacacctcctccctgaaggtggccaacgagcccgtcttagccttcacgcagggcagccctgagcgagatgccctgcaaaaggccttgaaggacctgaagggccggatggaagccatcccatgcgtgatgggggatgaggaggtgtggacgtcggacgtgcagtaccaagtgtcgccttttaaccatggacataaggtggccaagttctgttatgcagacaagagcctgctcaacaaagccattgaggctgccctggctgcccggaaagagtgggacctgaagcctattgcagaccgggcccagatcttcctgaaggcggcagacatgctgagtgggccgcgcagggctgagatcctcgccaagaccatggtgggacagggtaagaccgtgatccaagcggagattgacgctgcagcggaactcatcgacttcttccggttcaatgccaagtatgcggtggagctggaggggcagcagcccatcagcgtgcccccgagcaccaacagcacggtgtaccggggtctggagggcttcgtggcggccatctcgccctttaacttcactgcaatcggcggcaacctggcgggggcaccggccctgatgggcaacgtggtcctatggaagcccagtgacactgccatgctggccagctatgctgtctaccgcatccttcgggaggctggcctgccccccaacatcatccagtttgtgccagctgatgggcccctatttggggacactgtcaccagctcagagcacctctgtggcatcaacttcacaggcagtgtgcccaccttcaaacacctgtggaagcaggtggcccagaacctggaccggttccacaccttcccacgcctggctggagagtgcggcggaaagaacttccacttcgtgcaccgctcggccgacgtggagagcgtggtgagcgggaccctccgctcagccttcgagtacggtggccagaagtgttccgcctgctcgcgtctctacgtgccgcactcgctgtggccgcagatcaaagggcggctgctggaggagcacagtcggatcaaagtgggcgaccctgcagaggattttgggaccttcttctctgcagtgattgatgccaagtcctttgcccgtatcaagaagtggctggagcacgcgcgctcctcgcccagcctcaccatcctggctgggggcaagtgtgatgactccgtgggctactttgtggagccctgcatcgtggagagcaaggaccctcaggagcccatcatgaaggaggagatcttcgggcctgtactgtctgtgtacgtctacccggacgacaagtacaaggagacgctgcagctggttgacagcaccaccagctatggcctcacgggggcagtgttctcccaggataaggacgtcgtgcaggaggccacaaaggtgctgaggaatgctgccggcaacttctacatcaacgacaagtccactggctcgatagtgggccagcagccctttgggggggcccgagcctctggaaccaatgacaagccagggggcccacactacatcctgcgctggacgtcgccgcaggtcatcaaggagacacataagcccctgggggactggagctacgcgtacatgcagtgagcccctctcgggctccaccgtccagctgtctgtccgtccaggtggccgacctcactgcacagaccccactccagcccctccaccccttcttcatgcacagctgcctttctataatccgggcttgactcccttcttaccactgtattctggcctctcccatgcctcaggctctggtttgagatcgtgctggggaggaacatggccactaccccttatcccatcggccatgtgggaggtatgaccctggtgcctggcaggttctccctctgccctccactgggcccagtggctcagggacctggggaaaggagatggagcagctcttgggatcctttggggaaaaggaggccattctgggccccttggcaaacctcaccactcacagaggctcctggccttgatccctgcccctccaggtgtccagggtaaagtgtaactcagactgacctgtggggcacagggggcaccagctggccttgccctctctggtctgggctgtctaccttcctcactgtatctttgcccagacccacctgggccagtaggcctgtccccagccacacaccttagatgctggcatgccttactccaggtgcctgtgtttggccgaggcctgtgtgattcccggtctgcaccacatggcggggttggggggccgctggaggccacctgccaaggcgtgggatgggatggtcctgccggtttaggccgtgattctggaaaaccttggatgggccttcgtcctatgtcagccttccctttgatcctcaggccctacctgtagagacctccactcctagagccagtctcagggtctgggatttccctgcaggagctcagccaccactgtgccatggtgacacaggccaaggcagacattggccctcccttctcccagcccccagaggcctggccttgggttcgtcagcatgggccgaggacgttgcctgtagaatcctcctctgcctgggagtggctctgtgtggaccagtccctcactggcccattctttttttgacgcagccaatctgtgaccacgattcctcccacagatgcctcctgcttggattctgagtggtcagagatctgtaaagcatgactttcaaggatggttcttaggggactgtgtaaagtgttgggtcttcctccaggatgcctgcatgggaccccacccggagctggtgtggccattccccgaagtgccactggcccatggatgggggtgggtgctggtgcacctgggctgggtgtgggttctgtgtccttccaggatctgtgtcatttcccatgaggggccggggcaggtggctgggtgggggcacaggctggagtattcttagttctactggttctacactgtgaggtggcaatgggatttgctcagatgccacccaataaaatgcctgttactt

SEQ ID NO: 12677 - protein, 563 aa, Homo sapiens [sequence omitted]

SEQ ID NO: 12678 - DNA, 4051 bp, Klebsiella aerogenes
  CDS (26)..(3964)
aacgataaatgacggagttttgagcatgggcaccaccaccatgggtgttaagcttgacgacgcaacccgcgagcgcattaaatccgccgcgagccgtattgaccgcacgccgcactggctgattaagcaggccatctttaattatctggaaaaactggagaacgacgagacgctgcctgagctgccggccctgctctccggggccgccaacgaaagcgatgacgccagcgaaccaacggaagagccctatcagccattcctcgaattcgccgagcagatcctgccgcagtcggtgaggcgcgcggcgatcaccgccgcctggcgacgtccggaaaccgacgcggtaccgatgctgctggagcaggcccgtctgccgcagccgctgggcgaacaggcgcacaagctggcgtatcagctggcggaaaaactgcgcaaccagaaaaccgccagcggccgcgccggcatggtgcagagcctgctgcaggagttctccctctcttcacaggaaggggtggcgctgatgtgcctggcggaagccctgctgcgtattccggataaagccacccgcgatgcgctgatccgcgacaaaatcagcaacggcaactggcagtcgcacatcggccgcagcccgtcgctgttcgtcaacgccgccacctgggggctgctgttcaccggaaaactggtgtcgacccataacgagaccagcctctcccgctccctgaaccgcatcatcggcaagagcggcgaaccgctgatccgcaaaggcgtggatatggcgatgcgcctgatgggcgagcagttcgtcaccggggaaaccatcgccgaagcgctggccaacgcccgcaagctggaagaaaaagggttccgctactcctacgatatgctcggcgaagccgccctgaccgccgctgacgcccaggcctatatggtttcttatcagcaggcgatccatgccatcggcaaagcctccaacggccgcggcatttatgaaggtccgggtatctccattaagctctccgcgctgcacccgcgctacagccgcgcgcagtatgaccgggtgatggaagagctttacccgcggctgaaatcgctgaccctgctggcgcgccagtatgacatcggcatcaatattgacgccgaagaggcagaccgtctggagatctccctcgacctgctggaaaaactgtgcttcgagccggaactggccggctggaacgggattggcttcgtgattcaggcctaccagaagcgctgtccgtttgtcattgattacctgattgacctcgccacccgcagccgccgtcgcctgatgatccgtctggtgaaaggcgcctactgggatagcgaaattaaacgcgcgcagatggaaggtctcgaaggctatccggtatacacccgcaaggtttacaccgacgtctcctacctcgcctgcgcgaagaagctgctggcggtgccgaacctgatttacccgcagtttgccacccataacgcccatactctggcggctatctaccagctggcaggccagaactactacccgggccagtatgagttccagtgcctgcacggcatgggcgaaccgctttacgagcaggtggtgggcaaggtcgccgacggcaaactgaatcggccgtgccgcatctacgccccggtgggcacccacgagacgctgctggcgtatctggtgcgtcgtctgctggagaacggcgccaatacctctttcgtcaaccgtatcgcggacaataccctgccgctggacgagctggtggccgacccggtcagcgcggtagaaaaactggcgcagcaggaaggccaggccggcctgccgcatccgaaaatcccgctgccgcgcgatctctacggcagcggccggagcaactccgccggtctcgatctggcgaacgagcaccgtctggcctccctctcctcttccctgctcaacagcgcgctgcataaatggcaggcattgccgatgctggagcagccggtggccgaaggcgagatgcagccggtggttaacccggcagagccgaaagatatcgtcggctacgtccgcgaagccagcgacgctgaagtgcagcaggcgctgaccagcgctatcaacaatgcgccgatctggttcgccactccgccgcaggagcgcgccgccattcttgagcgcgccgcggtgctgatggaaagccaaatgccgaccctgatggggatcctggtgcgcgaggcgggtaaaaccttcagcaacgccatcgctgaagtgcgcgaagccgttgacttcctgcactattacgccggccaggtgcgcgacgatttcgataatgaaactcaccgcccgctgggtccggtggtctgtatcagcccgtggaacttcccgctggcgatcttcaccggccagattgccgccgcgctggcggccggcaacagcgtgctggcgaaacctgccgagcagacgccgcttatcgccgcccagggcgtggcgattctactggaagccggcgtgccgccgggcgttattcaactgctgccgggtcgcggggagaccgtgggcgccgcgctaacctccgatgagcgcgtacgcggcgtgatgttcaccggctccaccgaagtggccaccctgctgcagcgcaatatcgccagccgcctcgatccccagggccgcccgacgccgctgatcgccgaaaccggcgggatgaacgcgatgatcgtcgattcgtcggcgctcaccgagcaggtagtgatcgacgtgctggcttccgcgttcgacagcgctggccagcgctgctccgccctgcgcgtgctttgcctgcaggaagaggtcgccgatcacaccttaaccatgctgcgcggcgccatgagcgagtgccggatgggcaatccggggcgcctgaccaccgatatcggtccggttatcgatgcggaagcgaaagagaatatcgaacgccatattcaggcgatgcgcgccaaaggccgcaccgtctaccaggcggtgcgcgagaatagcgaagacgcccgcgaatggcgtcacgggaccttcgtgccgccgacgcttatcgagctcgacagcttcgacgagctgaaaaaagaggtcttcggcccggtactgcacgtggtgcgctataaccgtaacgagctggacaaactggtcgagcagattaacgcctctggctacggcctgaccctcggcgtgcatacccgtatcgacgaaaccatcgcccaggtcaccggcagcgcgaaggtgggcaacctgtacgtcaaccgcaatatggttggcgcggtggtcggcgtgcagccgttcggcggcgaagggctgtccggtaccggtccgaaagccggcggtccgctgtatctgtaccgtctgctctccagccgtccgcaggacgcggttggcgtgaccttcgcccgccaggatgcagagcgtccgctggacgcccagctgaaaacgctgctggaaaaaccgctgcaggcgctgcagcagtgggccgcgggccgtcctgagctgcaggcgctgtgccagcagtacagcgagcaggcgcaaagcggcactcaacgcctgctgccggggccaaccggcgagcgcaacaccctgacgctgatgccgcgcgagcgcgtgctgtgcgtagcggataacgaacaggatgcgctgatccagctggcggctgtgctggcggtgggttgtgaagtactgtggccggacagcgccctgcagcgcgatctggcgaagaaactgccgcgggaggtcagcgagcgcattcgctttgccaaagcggagcagttgcctgtccaggccttcgacgcggttatctaccacggcgattccgaccagctgcgcgagctgtgcgagcaggtggcggcgcgcgatggggcgattgtctccgtgcagggcttcgcccgcggcgaaaccaatctgctgctggagcggctgtatatcgagcgttcgctgagcgttaacaccgccgcggcaggcgcgtaacgccagcctgatgaccatcggctaaaacgggctccccggtggcgctgcgcttacccggggctacctaccaccgccaaagggtagccc

SEQ ID NO: 12679 - protein, 1312 aa, Klebsiella aerogenes
MGTTTMGVKLDDATRERIKSAASRIDRTPHWLIKQAIFNYLEKLENDETLPELPALLSGAANESDDASEPTEEPYQPFLEFAEQILPQSVRRAAITAAWRRPETDAVPMLLEQARLPQPLGEQAHKLAYQLAEKLRNQKTASGRAGMVQSLLQEFSLSSQEGVALMCLAEALLRIPDKATRDALIRDKISNGNWQSHIGRSPSLFVNAATWGLLFTGKLVSTHNETSLSRSLNRIIGKSGEPLIRKGVDMAMRLMGEQFVTGETIAEALANARKLEEKGFRYSYDMLGEAALTAADAQAYMVSYQQAIHAIGKASNGRGIYEGPGISIKLSALHPRYSRAQYDRVMEELYPRLKSLTLLARQYDIGINIDAEEADRLEISLDLLEKLCFEPELAGWNGIGFVIQAYQKRCPFVIDYLIDLATRSRRRLMIRLVKGAYWDSEIKRAQMEGLEGYPVYTRKVYTDVSYLACAKKLLAVPNLIYPQFATHNAHTLAAIYQLAGQNYYPGQYEFQCLHGMGEPLYEQVVGKVADGKLNRPCRIYAPVGTHETLLAYLVRRLLENGANTSFVNRIADNTLPLDELVADPVSAVEKLAQQEGQAGLPHPKIPLPRDLYGSGRSNSAGLDLANEHRLASLSSSLLNSALHKWQALPMLEQPVAEGEMQPVVNPAEPKDIVGYVREASDAEVQQALTSAINNAPIWFATPPQERAAILERAAVLMESQMPTLMGILVREAGKTFSNAIAEVREAVDFLHYYAGQVRDDFDNETHRPLGPVVCISPWNFPLAIFTGQIAAALAAGNSVLAKPAEQTPLIAAQGVAILLEAGVPPGVIQLLPGRGETVGAALTSDERVRGVMFTGSTEVATLLQRNIASRLDPQGRPTPLIAETGGMNAMIVDSSALTEQVVIDVLASAFDSAGQRCSALRVLCLQEEVADHTLTMLRGAMSECRMGNPGRLTTDIGPVIDAEAKENIERHIQAMRAKGRTVYQAVRENSEDAREWRHGTFVPPTLIELDSFDELKKEVFGPVLHVVRYNRNELDKLVEQINASGYGLTLGVHTRIDETIAQVTGSAKVGNLYVNRNMVGAVVGVQPFGGEGLSGTGPKAGGPLYLYRLLSSRPQDAVGVTFARQDAERPLDAQLKTLLEKPLQALQQWAAGRPELQALCQQYSEQAQSGTQRLLPGPTGERNTLTLMPRERVLCVADNEQDALIQLAAVLAVGCEVLWPDSALQRDLAKKLPREVSERIRFAKAEQLPVQAFDAVIYHGDSDQLRELCEQVAARDGAIVSVQGFARGETNLLLERLYIERSLSVNTAAAGA

SEQ ID NO: 12680 - DNA, 1548 bp, Bacillus anthracis
  CDS (1)..(1548)
atggtagtagcatacaaacatgagccatttacagatttttcagtagaggctaacaaattagcgtttgaagaaggtttaaagaaagtagaatcttatcttggacaagactatccattaattattgggggagaaaaaatcactacagaagacaaaattgtttctgtaaaccctgcaaataaagaggaacttgttggtcgcgtttcaaaagcaagccgtgagttagctgaaaaagcaatgcaagtagcggatgaaacattccaaacttggagaaagtcaaaaccagaaatgcgtgcagacattttattccgtgctgcagcgattgttcgtcgtagaaaacatgaattctctgctattcttgtaaaagaagcaggtaaaccgtggaatgaggcagatgctgatacagcagaagcaatcgactttatggaatattatggtcgtcaaatgttgaaattaaaagacggaattccagtagaaagccgtccaattgaatataatcgtttctcttacattccattaggagtaggtgttatcatttctccttggaacttcccattcgcaattatggcaggtatgacaacagctgctttagtttctggtaacacagtattactaaaaccagctagtacaactcctgtagtagcagcgaaattcatggaagtattagaagaagctggcttaccagctggcgtagtaaacttcgtaccaggtaatggttctgaagttggtgactacttagtagatcaccctcgtacacgtttcattagcttcactggatctcgtgatgtaggtatccgtatttatgagcgcgcagcgaaagtaaacccaggccaaatttggttaaaacgcgttatcgctgaaatgggcggtaaagatacaatcgttgttgataaagaagcagatcttgaattagcagctaaatctatcgttgcatcagcattcggattctcaggacaaaaatgttctgcatgttctcgtgcagtaatccacgaagatgtatacgatcacgtattaaatcgtgctgttgaattaacgaaagaattaacagttgcgaacccagctgtattaggtacaaacatgggtcctgttaatgaccaagctgcattcgataaagtaatgagctatgttgcaattggtaaagaagaaggtagaattttagcaggtggcgaaggagacgactctaaaggctggttcatccaaccaacaatcgttgctgacgttgcagaagatgctcgcctaatgaaagaagaaatcttcggaccagtagtagcattctgtaaagcaaaagactttgaccatgcacttgcaattgcaaacaatacagaatacggtttaacaggagcagttatctctaacaaccgtgatcatattgaaaaagcacgtgaagacttccacgtaggtaacttatacttcaaccgtggatgtactggtgcaatcgtaggataccaaccattcggtggctttaacatgtctggtacagactctaaagctggtggtcctgactacttagcgcttcacatgcaagcaaaaactacttctgaaactttataa

SEQ ID NO: 12681 - protein, 515 aa, Bacillus anthracis
MVVAYKHEPFTDFSVEANKLAFEEGLKKVESYLGQDYPLIIGGEKITTEDKIVSVNPANKEELVGRVSKASRELAEKAMQVADETFQTWRKSKPEMRADILFRAAAIVRRRKHEFSAILVKEAGKPWNEADADTAEAIDFMEYYGRQMLKLKDGIPVESRPIEYNRFSYIPLGVGVIISPWNFPFAIMAGMTTAALVSGNTVLLKPASTTPVVAAKFMEVLEEAGLPAGVVNFVPGNGSEVGDYLVDHPRTRFISFTGSRDVGIRIYERAAKVNPGQIWLKRVIAEMGGKDTIVVDKEADLELAAKSIVASAFGFSGQKCSACSRAVIHEDVYDHVLNRAVELTKELTVANPAVLGTNMGPVNDQAAFDKVMSYVAIGKEEGRILAGGEGDDSKGWFIQPTIVADVAEDARLMKEEIFGPVVAFCKAKDFDHALAIANNTEYGLTGAVISNNRDHIEKAREDFHVGNLYFNRGCTGAIVGYQPFGGFNMSGTDSKAGGPDYLALHMQAKTTSETL

SEQ ID NO: 12682 - DNA, 1548 bp, Oceanobacillus iheyensis
  CDS (1)..(1548)
atggtattaccatttaaacatgaaccatttacagactttacagtgaaggagaaccgtaaagattatcaagatgcgttagcgaaggttaaagaagaattaggtaaagattatccacttgttataaacggtgaaaagatctataccgatgacaagttgatatctataaacccttcaaataaaaatgaagtagtaggaaatgtatccaaagcaacaaaacaacatattgaagaggcttttacttcagcgaaggaagcttttaaagagtggaaatcttggtctgctgaggaccgtgcacgtgtcctatatcgtgcagcagcgattgtaagaagacgtaaacatgagttctctgcatggttatcgtatgatgcaggtaagccgtgggatcaggcagatggagacactgctgaaggaattgactttttagagtattatgctcgccatatggtagagcttgaaaaaggaaaaccgttagcggaccgaccaaatgaagataataaatacttctatcagccacttggaccaggtgtagttattccaccttggaactttgcatttgcaattgtttgtgggacaacagtagctccaatagttgcagggaacccggtgctattaaagccatctgaaaatacacctgtaatcgcctataaattagtggaggtacttgaagaggcaggattaccaaaaggtgttctaaactttgtgccaggagaccctgcggaaatcggtgattatttagtagatcataaagacacacattttattaactttactggttcacgtgcaacaggagttcgtatctttgaacgtgctacaaaaattcaagatggtcaaactcatttgaaacgtattgtagcggaaatgggtgggaaagacacgattatcgttgatgaatcggcagatttagacttagcagcagaatcaattgttcattctgcatttggattttccggtcaaaaatgttctgcatgttctcgtgctgtcattcatgaatctgtttatgatgaagtaattgagaagtcagtagaacttgcaaaaacgcttacagttggtaatccaacggaagataatgtttacatggcgtctgtagttaatcaaaaacagtttgataagataaaagattatattgaagttggtaaacaagaaggtgaacttgtctttgggggagaaacagatgataataagggattctttgtacatccaaccattttcaaagatttagatccaaaagctcgtattatgcaagaagagattttcggaccagtagttgctttttcgaaagcgaaaagttttgatgaattactagatattgcaaataacacagaatatggattgacaggtgcagttatttcaaataatcgcgaaaatctaaaccgagcacaaacagagtttcttgttgggaatttatacttcaaccgtggttgtaccgctgcaattgtaggttatcaaccattcggtggatttaaaatgtcagggacagattcaaaagctggtggtccagattaccttcagcatttcttaaatgcaaaagttgtaaccgaacgattttaa

SEQ ID NO: 12683 - protein, 515 aa, Oceanobacillus iheyensis
MVLPFKHEPFTDFTVKENRKDYQDALAKVKEELGKDYPLVINGEKIYTDDKLISINPSNKNEVVGNVSKATKQHIEEAFTSAKEAFKEWKSWSAEDRARVLYRAAAIVRRRKHEFSAWLSYDAGKPWDQADGDTAEGIDFLEYYARHMVELEKGKPLADRPNEDNKYFYQPLGPGVVIPPWNFAFAIVCGTTVAPIVAGNPVLLKPSENTPVIAYKLVEVLEEAGLPKGVLNFVPGDPAEIGDYLVDHKDTHFINFTGSRATGVRIFERATKIQDGQTHLKRIVAEMGGKDTIIVDESADLDLAAESIVHSAFGFSGQKCSACSRAVIHESVYDEVIEKSVELAKTLTVGNPTEDNVYMASVVNQKQFDKIKDYIEVGKQEGELVFGGETDDNKGFFVHPTIFKDLDPKARIMQEEIFGPVVAFSKAKSFDELLDIANNTEYGLTGAVISNNRENLNRAQTEFLVGNLYFNRGCTAAIVGYQPFGGFKMSGTDSKAGGPDYLQHFLNAKVVTERF

SEQ ID NO: 12684 - DNA, 1545 bp, Staphylococcus epidermidis
  CDS (1)..(1545)
atggtagtacctttcaaaaatgaacctggtattgatttttcagtacagacaaatgttgagcgttttaatgaagaattaaggaaagtaaaagcgcaactaggacaagatataccacttgtgattaacggagaaaaacttactaaaactgatacttttaattcagtgaatcctgcgaatacatcacagctcattgcgaaagtgtctaaagcaacgcaagatgatattgaaaaagctttcgaatcagcaaatcatgcgtatcaatcatggaagaagtggtcgcataaggaccgtgcagaattactgttacgtgtagccgcaattatccgtcgtcgaaaagaggaaatttccgctattatggtttatgaagccggcaagccttgggatgaagcagttggagatgcagctgagggtattgattttatagaatattatgcaagatcaatgatggaacttgcagatggtaagccagtattagacagagaaggtgaacataatcgctatttttataaacctattggtacaggcgtgacaattccaccatggaattttccatttgcaattatggctggtacaaccttagcccctgttgttgcaggtaacactgtattattaaagcctgctgaggatacagttttgactgcttataaattaatggaaatattagaagaagcaggtttaccacaaggtgttgtaaattttgttcctggtgatccaaaagaaattggagattatttagtcgaccataaagatacacattttgtcacatttacaggatcccgagctacaggtacacgtatttatgaacgtagtgctgtagtgcaagaaggacaacagtttttaaaacgtgttattgcagagatgggtggcaaagatgcgatagttgtagataataatgtagatacagatttagcggctgaagcaattgttacatctgcttttggtttctctggtcaaaaatgctctgcgtgttctcgtgccatagtccatcaagacgtacatgatgaaatattggaaaaagcaattcaattaactcaaaaattaactttaggtaatactgaagagaacacatttatggggccagtaattaatcaaaaacaatttgataaaatcaaaaattatattgaaattggtaaaaaagaaggcaaactagagactggtggtggaacagatgattctaccggttatttcattgaaccaacgattttctccggactacaatctgcggatcgtatcatgcaagaagaaatttttggaccagtcgtaggctttattaaggtcaaggattttgatgaggctattgaagtagctaatgatactgactatggtttgacaggcgctgtaattactaatcatcgtgaacattggattaaggctgtgaatgaatttgatgtaggtaacctttacttgaatagaggttgtacagctgcagtagtgggttatcatccatttggtggattcaagatgtctggtacagatgctaaaacaggaagtccagattacttacttaatttcttagaacaaaaagttgtttctgaaatgttttaa

SEQ ID NO: 12685 - protein, 514 aa, Staphylococcus epidermidis
MVVPFKNEPGIDFSVQTNVERFNEELRKVKAQLGQDIPLVINGEKLTKTDTFNSVNPANTSQLIAKVSKATQDDIEKAFESANHAYQSWKKWSHKDRAELLLRVAAIIRRRKEEISAIMVYEAGKPWDEAVGDAAEGIDFIEYYARSMMELADGKPVLDREGEHNRYFYKPIGTGVTIPPWNFPFAIMAGTTLAPVVAGNTVLLKPAEDTVLTAYKLMEILEEAGLPQGVVNFVPGDPKEIGDYLVDHKDTHFVTFTGSRATGTRIYERSAVVQEGQQFLKRVIAEMGGKDAIVVDNNVDTDLAAEAIVTSAFGFSGQKCSACSRAIVHQDVHDEILEKAIQLTQKLTLGNTEENTFMGPVINQKQFDKIKNYIEIGKKEGKLETGGGTDDSTGYFIEPTIFSGLQSADRIMQEEIFGPVVGFIKVKDFDEAIEVANDTDYGLTGAVITNHREHWIKAVNEFDVGNLYLNRGCTAAVVGYHPFGGFKMSGTDAKTGSPDYLLNFLEQKVVSEMF

SEQ ID NO: 12686 - DNA, 24 bp, Artificial sequence
  Primer sequence
atgctatcagcaaggtgcctcaaa

SEQ ID NO: 12687 - DNA, 28 bp, Artificial sequence
  Primer sequence
ttattcataattcgatggatatttgaaa

SEQ ID NO: 12688 - DNA, 1390 bp, Saccharomyces cerevisiae; identical to SEQ ID NO: 531
  CDS (303)..(1118)

SEQ ID NO: 12689 - protein, 271 aa, Saccharomyces cerevisiae; identical to SEQ ID NO: 532

SEQ ID NO: 12690 - DNA, 714 bp, Deinococcus radiodurans; identical to SEQ ID NO: 533
  CDS (1)..(714)

SEQ ID NO: 12691 - protein, 237 aa, Deinococcus radiodurans; identical to SEQ ID NO: 534

SEQ ID NO: 12692 - DNA, 1350 bp, Nostoc sp. PCC 7120; identical to SEQ ID NO: 535
  CDS (1)..(1350)

SEQ ID NO: 12693 - protein, 449 aa, Nostoc sp. PCC 7120; identical to SEQ ID NO: 536

SEQ ID NO: 12694 - DNA, 636 bp, Listeria monocytogenes; identical to SEQ ID NO: 537
  CDS (1)..(636)

SEQ ID NO: 12695 - protein, 211 aa, Listeria monocytogenes; identical to SEQ ID NO: 538

SEQ ID NO: 12696 - DNA, 636 bp, Listeria innocua; identical to SEQ ID NO: 539
  CDS (1)..(636)

SEQ ID NO: 12697 - protein, 211 aa, Listeria innocua; identical to SEQ ID NO: 540

SEQ ID NO: 12698 - DNA, 654 bp, Brucella melitensis; identical to SEQ ID NO: 541
  CDS (1)..(654)

SEQ ID NO: 12699 - protein, 217 aa, Brucella melitensis; identical to SEQ ID NO: 542

SEQ ID NO: 12700 - DNA, 813 bp, Nostoc sp. PCC 7120; identical to SEQ ID NO: 543
  CDS (1)..(813)

SEQ ID NO: 12701 - protein, 270 aa, Nostoc sp. PCC 7120; identical to SEQ ID NO: 544

SEQ ID NO: 12702 - DNA, 615 bp, Deinococcus radiodurans; identical to SEQ ID NO: 545
  CDS (1)..(615)

SEQ ID NO: 12703 - protein, 204 aa, Deinococcus radiodurans; identical to SEQ ID NO: 546

SEQ ID NO: 12704 - DNA, 714 bp, Caulobacter crescentus; identical to SEQ ID NO: 547
  CDS (1)..(714)

SEQ ID NO: 12705 - protein, 237 aa, Caulobacter crescentus; identical to SEQ ID NO: 548

SEQ ID NO: 12706 - DNA, 756 bp, Treponema pallidum subsp. pallidum (syphilis spirochete); identical to SEQ ID NO: 549
  CDS (1)..(756)

SEQ ID NO: 12707 - protein, 251 aa, Treponema pallidum subsp. pallidum (syphilis spirochete); identical to SEQ ID NO: 550

SEQ ID NO: 12708 - DNA, 645 bp, Xylella fastidiosa; identical to SEQ ID NO: 551
  CDS (1)..(645)

SEQ ID NO: 12709 - protein, 214 aa, Xylella fastidiosa; identical to SEQ ID NO: 552

SEQ ID NO: 12710 - DNA, 2034 bp, Arabidopsis thaliana (mouse-ear cress); identical to SEQ ID NO: 553
  CDS (1)..(2034)

SEQ ID NO: 12711 - protein, 677 aa, Arabidopsis thaliana (mouse-ear cress); identical to SEQ ID NO: 554

SEQ ID NO: 12712 - DNA, 582 bp, Bacillus subtilis; identical to SEQ ID NO: 555
  CDS (1)..(582)

SEQ ID NO: 12713 - protein, 193 aa, Bacillus subtilis; identical to SEQ ID NO: 556

SEQ ID NO: 12714 - DNA, 606 bp, Thermotoga maritima; identical to SEQ ID NO: 557
  CDS (1)..(606)

SEQ ID NO: 12715 - protein, 201 aa, Thermotoga maritima; identical to SEQ ID NO: 558

SEQ ID NO: 12716 - DNA, 660 bp, Clostridium acetobutylicum; identical to SEQ ID NO: 559
  CDS (1)..(660)

SEQ ID NO: 12717 - protein, 219 aa, Clostridium acetobutylicum; identical to SEQ ID NO: 560

SEQ ID NO: 12718 - DNA, 744 bp, Saccharomyces cerevisiae; identical to SEQ ID NO: 561
  CDS (1)..(744)

SEQ ID NO: 12719 - protein, 247 aa, Saccharomyces cerevisiae; identical to SEQ ID NO: 562

SEQ ID NO: 12720 - DNA, 1050 bp, Synechocystis sp; identical to SEQ ID NO: 563
  CDS (1)..(1050)

SEQ ID NO: 12721 - protein, 349 aa, Synechocystis sp; identical to SEQ ID NO: 564

SEQ ID NO: 12722 - DNA, 875 bp, Arabidopsis thaliana (mouse-ear cress); identical to SEQ ID NO: 565
  CDS (30)..(722)

SEQ ID NO: 12723 - protein, 230 aa, Arabidopsis thaliana (mouse-ear cress); identical to SEQ ID NO: 566

SEQ ID NO: 12724 - DNA, 741 bp, Debaryomyces hansenii; identical to SEQ ID NO: 567
  CDS (1)..(741)

SEQ ID NO: 12725 - protein, 246 aa, Debaryomyces hansenii; identical to SEQ ID NO: 568

SEQ ID NO: 12726 - DNA, 741 bp, Yarrowia lipolytica; identical to SEQ ID NO: 569
  CDS (1)..(741)

SEQ ID NO: 12727 - protein, 246 aa, Yarrowia lipolytica; identical to SEQ ID NO: 570

SEQ ID NO: 12728 - DNA, 816 bp, Kluyveromyces lactis; identical to SEQ ID NO: 571
  CDS (1)..(816)

SEQ ID NO: 12729 - protein, 271 aa, Kluyveromyces lactis; identical to SEQ ID NO: 572

SEQ ID NO: 12730 - DNA, 687 bp, Kluyveromyces lactis; identical to SEQ ID NO: 573
  CDS (1)..(687)

SEQ ID NO: 12731 - protein, 228 aa, Kluyveromyces lactis; identical to SEQ ID NO: 574

SEQ ID NO: 12732 - DNA, 651 bp, Erwinia carotovora subsp; identical to SEQ ID NO: 575
  CDS (1)..(651)

SEQ ID NO: 12733 - protein, 216 aa, Erwinia carotovora subsp; identical to SEQ ID NO: 576

SEQ ID NO: 12734 - DNA, 840 bp, Candida glabrata; identical to SEQ ID NO: 577
  CDS (1)..(840)

SEQ ID NO: 12735 - protein, 279 aa, Candida glabrata; identical to SEQ ID NO: 578

SEQ ID NO: 12736 - DNA, 744 bp, Candida glabrata; identical to SEQ ID NO: 579
  CDS (1)..(744)

SEQ ID NO: 12737 - protein, 247 aa, Candida glabrata; identical to SEQ ID NO: 580

SEQ ID NO: 12738 - DNA, 621 bp, Bartonella quintana; identical to SEQ ID NO: 581
  CDS (1)..(621)

SEQ ID NO: 12739 - protein, 206 aa, Bartonella quintana; identical to SEQ ID NO: 582

SEQ ID NO: 12740 - DNA, 648 bp, Parachlamydia sp; identical to SEQ ID NO: 583
  CDS (1)..(648)

SEQ ID NO: 12741 - protein, 215 aa, Parachlamydia sp; identical to SEQ ID NO: 584

SEQ ID NO: 12742 - DNA, 636 bp, Listeria monocytogenes; identical to SEQ ID NO: 585
  CDS (1)..(636)

SEQ ID NO: 12743 - protein, 211 aa, Listeria monocytogenes; identical to SEQ ID NO: 586

SEQ ID NO: 12744 - DNA, 633 bp, Thermus thermophilus; identical to SEQ ID NO: 587
  CDS (1)..(633)

SEQ ID NO: 12745 - protein, 210 aa, Thermus thermophilus; identical to SEQ ID NO: 588

SEQ ID NO: 12746 - DNA, 654 bp, Mycobacterium paratuberculosis; identical to SEQ ID NO: 589
  CDS (1)..(654)

SEQ ID NO: 12747 - protein, 217 aa, Mycobacterium paratuberculosis; identical to SEQ ID NO: 590

SEQ ID NO: 12748 - DNA, 1134 bp, Mycobacterium paratuberculosis; identical to SEQ ID NO: 591
  CDS (1)..(1134)

SEQ ID NO: 12749 - protein, 377 aa, Mycobacterium paratuberculosis; identical to SEQ ID NO: 592

SEQ ID NO: 12750 - DNA, 627 bp, Lactobacillus johnsonii; identical to SEQ ID NO: 593
  CDS (1)..(627)

SEQ ID NO: 12751 - protein, 208 aa, Lactobacillus johnsonii; identical to SEQ ID NO: 594

SEQ ID NO: 12752 - DNA, 807 bp, Ashbya gossypii; identical to SEQ ID NO: 595
  CDS (1)..(807)

SEQ ID NO: 12753 - protein, 268 aa, Ashbya gossypii; identical to SEQ ID NO: 596

SEQ ID NO: 12754 - DNA, 687 bp, Mycobacterium tuberculosis; identical to SEQ ID NO: 597
  CDS (1)..(687)

SEQ ID NO: 12755 - protein, 228 aa, Mycobacterium tuberculosis; identical to SEQ ID NO: 598

SEQ ID NO: 12756 - DNA, 618 bp, Photorhabdus luminescens; identical to SEQ ID NO: 599
  CDS (1)..(618)

SEQ ID NO: 12757 - protein, 205 aa, Photorhabdus luminescens; identical to SEQ ID NO: 600

SEQ ID NO: 12758 - DNA, 588 bp, Anopheles gambiae str; identical to SEQ ID NO: 601
  CDS (1)..(588)

SEQ ID NO: 12759 - protein, 195 aa, Anopheles gambiae str; identical to SEQ ID NO: 602

SEQ ID NO: 12760 - DNA, 3762 bp, Neurospora crassa; identical to SEQ ID NO: 603
  CDS (1)..(3762)

SEQ ID NO: 12761 - protein, 1253 aa, Neurospora crassa; identical to SEQ ID NO: 604

SEQ ID NO: 12762 - DNA, 567 bp, Synechococcus sp; identical to SEQ ID NO: 605
  CDS (1)..(567)

SEQ ID NO: 12763 - protein, 188 aa, Synechococcus sp; identical to SEQ ID NO: 606

SEQ ID NO: 12764 - DNA, 612 bp, Rhodopirellula baltica; identical to SEQ ID NO: 607
  CDS (1)..(612)

SEQ ID NO: 12765 - protein, 203 aa, Rhodopirellula baltica; identical to SEQ ID NO: 608

SEQ ID NO: 12766 - DNA, 1329 bp, Prochlorococcus marinus subsp; identical to SEQ ID NO: 609
  CDS (1)..(1329)

SEQ ID NO: 12767 - protein, 442 aa, Prochlorococcus marinus subsp; identical to SEQ ID NO: 610

SEQ ID NO: 12768 - DNA, 1332 bp, Prochlorococcus marinus; identical to SEQ ID NO: 611
  CDS (1)..(1332)

SEQ ID NO: 12769 - protein, 443 aa, Prochlorococcus marinus; identical to SEQ ID NO: 612

SEQ ID NO: 12770 - DNA, 591 bp, Prochlorococcus marinus; identical to SEQ ID NO: 613
  CDS (1)..(591)

SEQ ID NO: 12771 - protein, 196 aa, Prochlorococcus marinus; identical to SEQ ID NO: 614

SEQ ID NO: 12772 - DNA, 618 bp, Streptomyces avermitilis; identical to SEQ ID NO: 615
  CDS (1)..(618)

SEQ ID NO: 12773 - protein, 205 aa, Streptomyces avermitilis; identical to SEQ ID NO: 616

SEQ ID NO: 12774 - DNA, 600 bp, Streptomyces avermitilis; identical to SEQ ID NO: 617
  CDS (1)..(600)

SEQ ID NO: 12775 - protein, 199 aa, Streptomyces avermitilis; identical to SEQ ID NO: 618

SEQ ID NO: 12776 - DNA, 612 bp, Streptomyces avermitilis; identical to SEQ ID NO: 619
  CDS (1)..(612)

SEQ ID NO: 12777 - protein, 203 aa, Streptomyces avermitilis; identical to SEQ ID NO: 620

SEQ ID NO: 12778 - DNA, 645 bp, Enterococcus faecalis; identical to SEQ ID NO: 621
  CDS (1)..(645)

SEQ ID NO: 12779 - protein, 214 aa, Enterococcus faecalis; identical to SEQ ID NO: 622

SEQ ID NO: 12780 - DNA, 666 bp, Lactobacillus plantarum; identical to SEQ ID NO: 623
  CDS (1)..(666)

SEQ ID NO: 12781 - protein, 221 aa, Lactobacillus plantarum; identical to SEQ ID NO: 624

SEQ ID NO: 12782 - DNA, 642 bp, Clostridium tetani; identical to SEQ ID NO: 625
  CDS (1)..(642)

SEQ ID NO: 12783 - protein, 213 aa, Clostridium tetani; identical to SEQ ID NO: 626

SEQ ID NO: 12784 - DNA, 600 bp, Bradyrhizobium japonicum; identical to SEQ ID NO: 627
  CDS (1)..(600)

SEQ ID NO: 12785 - protein, 199 aa, Bradyrhizobium japonicum; identical to SEQ ID NO: 628

SEQ ID NO: 12786 - DNA, 1407 bp, Synechococcus elongatus; identical to SEQ ID NO: 629
  CDS (1)..(1407)

SEQ ID NO: 12787 - protein, 468 aa, Synechococcus elongatus; identical to SEQ ID NO: 630

SEQ ID NO: 12788 - DNA, 582 bp, Oceanobacillus iheyensis; identical to SEQ ID NO: 631
  CDS (1)..(582)

SEQ ID NO: 12789 - protein, 193 aa, Oceanobacillus iheyensis; identical to SEQ ID NO: 632

SEQ ID NO: 12790 - DNA, 648 bp, Bifidobacterium longum; identical to SEQ ID NO: 633
  CDS (1)..(648)

SEQ ID NO: 12791 - protein, 215 aa, Bifidobacterium longum; identical to SEQ ID NO: 634

SEQ ID NO: 12792 - DNA, 1005 bp, Arabidopsis thaliana; identical to SEQ ID NO: 635
  CDS (1)..(1005)

SEQ ID NO: 12793 - protein, 334 aa, Arabidopsis thaliana; identical to SEQ ID NO: 636

SEQ ID NO: 12794 - DNA, 645 bp, Xanthomonas campestris; identical to SEQ ID NO: 637
  CDS (1)..(645)

SEQ ID NO: 12795 - protein, 214 aa, Xanthomonas campestris; identical to SEQ ID NO: 638

SEQ ID NO: 12796 - DNA, 645 bp, Xanthomonas axonopodis; identical to SEQ ID NO: 639
  CDS (1)..(645)

SEQ ID NO: 12797 - protein, 214 aa, Xanthomonas axonopodis; identical to SEQ ID NO: 640

SEQ ID NO: 12798 - DNA, 621 bp, Thermoanaerobacter tengcongensis; identical to SEQ ID NO: 641
  CDS (1)..(621)

SEQ ID NO: 12799 - protein, 206 aa, Thermoanaerobacter tengcongensis; identical to SEQ ID NO: 642

SEQ ID NO: 12800 - DNA, 582 bp, Rhizobium loti; identical to SEQ ID NO: 643
  CDS (1)..(582)

SEQ ID NO: 12801 - protein, 193 aa, Rhizobium loti; identical to SEQ ID NO: 644

SEQ ID NO: 12802 - DNA, 651 bp, Pasteurella multocida; identical to SEQ ID NO: 645
  CDS (1)..(651)

SEQ ID NO: 12803 - protein, 216 aa, Pasteurella multocida; identical to SEQ ID NO: 646

SEQ ID NO: 12804 - DNA, 597 bp, Streptomyces coelicolor; identical to SEQ ID NO: 647
  CDS (1)..(597)

SEQ ID NO: 12805 - protein, 198 aa, Streptomyces coelicolor; identical to SEQ ID NO: 648

SEQ ID NO: 12806 - DNA, 600 bp, Streptomyces coelicolor; identical to SEQ ID NO: 649
  CDS (1)..(600)

SEQ ID NO: 12807 - protein, 199 aa, Streptomyces coelicolor; identical to SEQ ID NO: 650

SEQ ID NO: 12808 - DNA, 660 bp, Gloeobacter violaceus; identical to SEQ ID NO: 651
  CDS (1)..(660)

SEQ ID NO: 12809 - protein, 219 aa, Gloeobacter violaceus; identical to SEQ ID NO: 652

SEQ ID NO: 12810 - DNA, 621 bp, Bartonella henselae; identical to SEQ ID NO: 653
  CDS (1)..(621)

SEQ ID NO: 12811 - protein, 206 aa, Bartonella henselae; identical to SEQ ID NO: 654

SEQ ID NO: 12812 - DNA, 681 bp, Parachlamydia sp; identical to SEQ ID NO: 655
  CDS (1)..(681)

SEQ ID NO: 12813 - protein, 226 aa, Parachlamydia sp; identical to SEQ ID NO: 656

SEQ ID NO: 12814 - DNA, 636 bp, Rhizobium meliloti; identical to SEQ ID NO: 657
  CDS (1)..(636)

SEQ ID NO: 12815 - protein, 211 aa, Rhizobium meliloti; identical to SEQ ID NO: 658

SEQ ID NO: 12816 - DNA, 648 bp, Escherichia coli O6; identical to SEQ ID NO: 659
  CDS (1)..(648)

SEQ ID NO: 12817 - protein, 215 aa, Escherichia coli O6; identical to SEQ ID NO: 660

SEQ ID NO: 12818 - DNA, 648 bp, Photorhabdus luminescens; identical to SEQ ID NO: 661
  CDS (1)..(648)

SEQ ID NO: 12819 - protein, 215 aa, Photorhabdus luminescens; identical to SEQ ID NO: 662

SEQ ID NO: 12820 - DNA, 648 bp, Salmonella typhimurium; identical to SEQ ID NO: 663
  CDS (1)..(648)

SEQ ID NO: 12821 - protein, 215 aa, Salmonella typhimurium; identical to SEQ ID NO: 664

SEQ ID NO: 12822 - DNA, 22 bp, Artificial sequence
  Primer sequence
atgccttcgctaacccccagat

SEQ ID NO: 12823 - DNA, 23 bp, Artificial sequence
  Primer sequence
ttacacatcgccatgctgggatt

SEQ ID NO: 12824 - DNA, 1257 bp, Saccharomyces cerevisiae
  CDS (1)..(1257)
atgtctgccactctgttcaataacatcgaattgctgccccctgatgccctttttggtattaagcaaaggtacgggcaagatcaacgtgctaccaaggtcgacttgggtatcggggcctacagagacgacaacggtaaaccatgggtcttgccaagtgttaaagccgccgaaaagctaattcataacgacagctcctacaaccatgaatacctcggtattaccggtctgccaagtttgacatctaacgccgccaagatcatcttcggtacgcaatccgatgcctttcaggaagacagagtaatctcagtacaatcactgtctggtacgggtgctcttcatatatctgcgaagtttttttcaaaattcttcccagataaactggtctatttgtctaagcctacttgggccaaccacatggccatttttgagaatcaaggcttgaaaacggcgacttacccttactgggccaacgaaactaagtctttggacctaaacggctttctaaatgctattcaaaaagctccagagggctccattttcgttctgcactcttgcgcccataacccaactggtctggaccctactagtgaacaatgggttcaaatcgttgatgctatcgcctcaaagaaccacatcgccttatttgacaccgcctaccaagggtttgccactggagatttggacaaggatgcctatgctgtgcgtctaggtgtggagaagctttcaacggtctctcccgtctttgtctgtcagtcctttgccaagaacgccggtatgtacggtgagcgtgtaggttgtttccatctagcacttacaaaacaagctcaaaacaaaactataaagcctgctgttacatctcaattggccaaaatcattcgtagtgaagtgtccaacccacccgcctacggcgctaagattgtcgctaaactgttggaaacgccagaattaacggaacagtggcacaaggatatggttaccatgtcctccagaattacgaaaatgaggcacgcattaagagaccatttagtcaagttgggcactcctggcaactgggatcatatagtaaatcaatgcgggatgttctcctttacaggattgactcctcaaatggttaaacgacttgaagaaacccacgcagtttacttggttgcctcaggtagagcttctattgctggattgaatcaaggaaacgtggaatacgtggctaaagccattgatgaagtggtgcgcttctatactattgaagctaaattgtaa

SEQ ID NO: 12825 - protein, 418 aa, Saccharomyces cerevisiae
MSATLFNNIELLPPDALFGIKQRYGQDQRATKVDLGIGAYRDDNGKPWVLPSVKAAEKLIHNDSSYNHEYLGITGLPSLTSNAAKIIFGTQSDAFQEDRVISVQSLSGTGALHISAKFFSKFFPDKLVYLSKPTWANHMAIFENQGLKTATYPYWANETKSLDLNGFLNAIQKAPEGSIFVLHSCAHNPTGLDPTSEQWVQIVDAIASKNHIALFDTAYQGFATGDLDKDAYAVRLGVEKLSTVSPVFVCQSFAKNAGMYGERVGCFHLALTKQAQNKTIKPAVTSQLAKIIRSEVSNPPAYGAKIVAKLLETPELTEQWHKDMVTMSSRITKMRHALRDHLVKLGTPGNWDHIVNQCGMFSFTGLTPQMVKRLEETHAVYLVASGRASIAGLNQGNVEYVAKAIDEVVRFYTIEAKL

SEQ ID NO: 12826 - DNA, 1203 bp, Chlamydia trachomatis
  CDS (1)..(1203)
atgagtctttttgaacagttaccttccttttctccggattctattcttggtttagcgcaggctttccaagaggatcctcgtgaggataagattaatttattactaggtacttacgaacgggaaaagaaacgttatggtggtttctcgagcgttagaaaggctcagtctgttttttttgacgatgagaaagataaaaattatctacccatcaaaggatcgtctacctttttagaagaaatggcagctctttgttttggagaagtggatgctagtcgatgggttggtgtgcaggcaattggaggtacaggagccttacatttaggggcttctgtatatgccaacgcatctttagcgggtaaggtgtatattccttctcaaacatgggggaaccattctaggatttttgctcatcaagggttagctttagagtattatccttactatgatcaggagaccaaagaactggatttacagggattgaaagctattttgcgatctgctcctgagacttcattagttctgttgcattgttgctgtcataatcctacagggaaagatattcctctttccgagtggccagaaatcattacgattattaaggagcgggatcttattcctttctttgatatggcttatttaggttttgctagtgggatagaagaagatcgtcgtcctgtgcgactgtgtatagaagctggggttactacttttgtagcaggaggcgctagtaaaattttttcgttatatggttctcgtgtaggattttttggagctatccatcaagataaactggatttaaaccgtattctatcctttttagaagaacagattcgtggggagtactcatctccggctagagaaggagttgctatcgtgacttctatattaagcaatccttacttacggcaagaatgggagcttgaattgaatggcattcggcagtctttggaagagattcgttcgagttttgtgattgccatgcgaaatgtagcggggcactctttcgatttcatagcttctcagaaaggattttttgggtatccaggtttttcaaaggaacaagtgctgttccttagagaagagcttggtatttacacaaccgcaggcgggagattcaatttaaatggcattacggataaaaatataaatcgtgttactcacggttttgctcaggcttatgaataccctcggtccgtatcataa

SEQ ID NO: 12827 - protein, 400 aa, Chlamydia trachomatis
MSLFEQLPSFSPDSILGLAQAFQEDPREDKINLLLGTYEREKKRYGGFSSVRKAQSVFFDDEKDKNYLPIKGSSTFLEEMAALCFGEVDASRWVGVQAIGGTGALHLGASVYANASLAGKVYIPSQTWGNHSRIFAHQGLALEYYPYYDQETKELDLQGLKAILRSAPETSLVLLHCCCHNPTGKDIPLSEWPEIITIIKERDLIPFFDMAYLGFASGIEEDRRPVRLCIEAGVTTFVAGGASKIFSLYGSRVGFFGAIHQDKLDLNRILSFLEEQIRGEYSSPAREGVAIVTSILSNPYLRQEWELELNGIRQSLEEIRSSFVIAMRNVAGHSFDFIASQKGFFGYPGFSKEQVLFLREELGIYTTAGGRFNLNGITDKNINRVTHGFAQAYEYPRSVS

SEQ ID NO: 12828 - DNA, 1242 bp, Vibrio cholerae
  CDS (1)..(1242)
atgatgagttcaatcatcccttcccaccctaacttgacatggatgtgctttatgttcgaaaaagtcgttgccgctcccgctgaccctatcctaggtttaactgaagagttcaaaaaagaccctcgtaccgacaaaattaacctcggtgtaggtatttataagaatgaagcaggtgaaaccccggttctcgctactgtaaagaaagcagaagccgcactgcttgagtcagagaaaaccaaatcttatctcacgatcgaagggacagctgagtacggtttagcagtacaaaaactgctgttcggcgcgaattcggacatagtgacacaaaaactggcaaaaacagcgcaagcccctggtggcactggtgcgctgcgtgtggcgggtgaatttattaagcgtcaactgggcgatgtgaaagtctggatcagtaacccaacttgggctaaccatcacggtgtgttcaatgccgctggcttggaaactacgcaatacgcttattatgatgccaaagccaaagacaaagattttgccgctatgctggcagatttagagcaggcagagaaaggcgatgtggttttactgcatggctgctgccacaatccaacgggtattgacccaacagagcaagagtgggaagtactggcgaaattggtggctgacaaaggcttactgcctctgtttgactttgcttaccaaggctttgcttcaggtgtggaagaagacgcggctggcctacgtatttttgcgaaatacaactctgagattctggttgccagctctttctcaaagaactttggcttgtacaacgaacgtgtcggtgccttcacgctggttgcaccttcaacaaccgttgcagaaacggcgttctcacaagttaaagcgattatccgctctatctactcaaacccaccagctcacggtgctgccgttgtcacttatattctgaacaacccagaattacgcgcagaatgggaagccgaagtcgcggaaatgcgtgaacgtattcaagagatgcgcgtacttttcgttaacacattgaaagaagtgggtgtagacgctgactttagctttatcgagcgtcaaaacggcatgttctctttctctggcctaagcaaagagcaagttgcacgcctcaaatcagagttgggtatctatatcgtcggctctggccgcatcagcgtagcggggatgaccaaatcaaacatgctacccttgtgccaaggcattgctgcggtgatgtaa

SEQ ID NO: 12829 - protein, 413 aa, Vibrio cholerae
MMSSIIPSHPNLTWMCFMFEKVVAAPADPILGLTEEFKKDPRTDKINLGVGIYKNEAGETPVLATVKKAEAALLESEKTKSYLTIEGTAEYGLAVQKLLFGANSDIVTQKLAKTAQAPGGTGALRVAGEFIKRQLGDVKVWISNPTWANHHGVFNAAGLETTQYAYYDAKAKDKDFAAMLADLEQAEKGDVVLLHGCCHNPTGIDPTEQEWEVLAKLVADKGLLPLFDFAYQGFASGVEEDAAGLRIFAKYNSEILVASSFSKNFGLYNERVGAFTLVAPSTTVAETAFSQVKAIIRSIYSNPPAHGAAVVTYILNNPELRAEWEAEVAEMRERIQEMRVLFVNTLKEVGVDADFSFIERQNGMFSFSGLSKEQVARLKSELGIYIVGSGRISVAGMTKSNMLPLCQGIAAVM

SEQ ID NO: 12830 - DNA, 1188 bp, Chlamydophila pneumoniae, Chlamydia pneumoniae
  CDS (1)..(1188)
atgagtttttttaatcacataccaacattttctccggatgctattttaggtttgcagaacgttttctttgcagataagcgtcccgaaaaggttaaccttgtgattggtgtttatgagcatccgcaaaagcgttacggcggcttgtcttgtatacgtaaggcacaaactgtcattttggaagaagaacaaaataagagttatcttcctatttcagggttgcaaatatttttagatgagatgcgtgagctggtttttggtgctgtagatccgagtgctatagtcgggtttcagtctttaggaggtacaggagcgctacacttgggagcccggcttctttccgtggcaaaaggatctggtaaggtttatgttcccgagcagacttggagcaatcatatacgcattttctctcaagagggtcttgaggtaatccgatatccttattatagcaaagaacaaaaacagctgttatttgaacccctgatcgcatttttgaaggaagtagaaaagaattccgttatcttattgcatggttgttgtcacaaccctacaggtgtagattttactgaagatatgtggaaagaactcgccatcttaatgaaagaaagagagttaattccattttttgataccgcataccaaggttttgctcacggcatagagttggatagaaaacctatagaaatttttatatcagagggaaatacggttcttgtcgctgcttcatcaagcaaaaactttgctctttatggtgagcgtgtaggatattttgctgttcacagtacttttactgatgagttggttaaaattcacagtttcttagaagaaaaaattcgaggggaatactcttcaccacaacgttggggtgtagaaattgtttctacaattttgagtaatccatatttgaaagaagaatggcaatcagaactcaattttataagagagtctttgggtaaaatgagaacaagatttgttcaagctttgcgtaaggttgccggtcatacatttgactttttattgtcccaacatggattctttgcataccctgggttttccgataaacaggtgctctttttaagagaacaacacgctgtttatacaacagcgggaggaagaatgaatttaaatggaattacggaaaaaaatatagatcatgtagtgcaaagttttattcaagcttatgagctatag

SEQ ID NO: 12831 - protein, 395 aa, Chlamydophila pneumoniae, Chlamydia pneumoniae
MSFFNHIPTFSPDAILGLQNVFFADKRPEKVNLVIGVYEHPQKRYGGLSCIRKAQTVILEEEQNKSYLPISGLQIFLDEMRELVFGAVDPSAIVGFQSLGGTGALHLGARLLSVAKGSGKVYVPEQTWSNHIRIFSQEGLEVIRYPYYSKEQKQLLFEPLIAFLKEVEKNSVILLHGCCHNPTGVDFTEDMWKELAILMKERELIPFFDTAYQGFAHGIELDRKPIEIFISEGNTVLVAASSSKNFALYGERVGYFAVHSTFTDELVKIHSFLEEKIRGEYSSPQRWGVEIVSTILSNPYLKEEWQSELNFIRESLGKMRTRFVQALRKVAGHTFDFLLSQHGFFAYPGFSDKQVLFLREQHAVYTTAGGRMNLNGITEKNIDHVVQSFIQAYEL

SEQ ID NO: 12832 - DNA, 1194 bp, Yersinia pestis
  CDS (1)..(1194)
atgttccagaatgttgacgcctacgcaggtgaccccatcctttcactgatggaaagttttaaagccgataaccgggcacataaggtgaatctgagtattgggctttattacaatgaacaaggtgaaatcccgcaaatgcaggctgtggatgctgccgaagcgcaattgagtactcaacctcatgggacaccggtttatttaccgatggaaggtctgcaatcttaccgtactgctatccagcaattattatttggtcacgaccatccaatgctggttcagcaacgggtggcgacaatacagacggtgggcggttctggtgcgttgaaagtcggggctgatttccttaatcactatttccctgattcacaggtgtgggtcagcgatcctacctgggaaaaccacgtggctatttttagcggcgcaggttttaaagtgaacacctatccgtatttcgacaatgataagctggcggtgaagtttgacccgatgctggcaaccttgcagcaattgcccgccagaagcatcgtgttgttacatccttgctgccacaatccaaccggttctgatctgaccaatgcccaatgggatcgcctcattgatgtggtaaaagagcgtgaactgatcccgttcctggatatagcgtaccaaggctttggggcagggctgaatgaagatgcttatgctatccgcgctatggccgcagttggattgccatgcctcatcagcaactccttctcaaaaatcttctcgctctataacgagcgggtcggtggtttatctgtggtgtgtgaaagtgacgaggccgcagggcgtgtattgggccaattgaaagcgacagtgcgccgtaactattccagcccgccaaactttggtgcgcaggtcgtttcgaaagtcctaaatgatacggtattgcgcgcgcaatggcaggcagaggtggaacagatgcgcctacggatccttgatatgcgccacacgctggtggaagccttaaaagcctcgttaccagagcgcaattttgattatctgttgcaacaacgcggcatgttcagctacaccggctttagtgaggcacaggtagagagcttacgtgaagagtttggtgtgtatctgattgcgagcggaagaatgtgtatggcgggagtcaatcaccagaatgttgagcaggttgcggtcgcttttgcggcggtacagtaa

SEQ ID NO: 12833 - protein, 397 aa, Yersinia pestis
MFQNVDAYAGDPILSLMESFKADNRAHKVNLSIGLYYNEQGEIPQMQAVDAAEAQLSTQPHGTPVYLPMEGLQSYRTAIQQLLFGHDHPMLVQQRVATIQTVGGSGALKVGADFLNHYFPDSQVWVSDPTWENHVAIFSGAGFKVNTYPYFDNDKLAVKFDPMLATLQQLPARSIVLLHPCCHNPTGSDLTNAQWDRLIDVVKERELIPFLDIAYQGFGAGLNEDAYAIRAMAAVGLPCLISNSFSKIFSLYNERVGGLSVVCESDEAAGRVLGQLKATVRRNYSSPPNFGAQVVSKVLNDTVLRAQWQAEVEQMRLRILDMRHTLVEALKASLPERNFDYLLQQRGMFSYTGFSEAQVESLREEFGVYLIASGRMCMAGVNHQNVEQVAVAFAAVQ

SEQ ID NO: 12834 - DNA, 1191 bp, Salmonella enterica subsp. enterica serovar Typhi
  CDS (1)..(1191)
atgtttgagaacataaccgccgctcctgccgacccgattttgggcctggccgatctgtttcgcgccgatgaccgtccagggaaaattaaccttggcattggcgtatataaagatgaaaccggcaaaacaccggtgctcaccagcgttaaaaaagccgagcagtatttactggaaaatgaaacgacgaaaaactatctcggcattgacgggattccggaatttgctcgctgcactcaggaactgctgttcggcaaaggcagcgcgctgattaatgataagcgcgcacgcacggcgcaaacgccgggcggtaccggcgcgttacgcattgccgccgactttttggcaaaaaatactccggtaaaacgggtgtgggtgagcaaccccagctggccgaaccacaaaagcgtgtttaacgctgccggcctggaagttcgggagtacgcttactacgatgcggaaaatcactcgctggattttgaagcgctacaagccagcctgagcgaagcacaggccggcgatgtggttctgttccacggttgctgtcataacccaaccggcattgaccctactctggaacagtggcaggttctggctgagctttccgttgaaaaagggtggctgccgctattcgatttcgcctaccagggctttgcccgcggcctggaagaagatgcggaaggtctgcgcgcctttgccgcgctgcataaagagctcattgtcgccagctcctactccaaaaacttcggcttatataatgagcgcgtcggcgcctgcaccctcgttgccgccgatgcggaaaccgtggatcgcgcttttagccagatgaaatccgccattcgcgctaactactccaacccaccagcgcacggcgcgtccatcgtcgcgactatcctgagtaatgacgccctgcgcgctatctgggaacaggaactgacggacatgcgccagcgtattcagcgtatgcgtcaactgttcgtgaataccttgcaggaaaaaggcgcgaaccgtgacttcagctttattatcaagcagaacgggatgttctcattcagcggtctgaccaaagatcaggtgctgcgtctgcgtgaagagtttggcgtttatgccgtggcttctggtcgcgtgaacgtggcgggcatgaccccggataatatggcgccgctgtgcgaagccattgtcgcggtactataa

SEQ ID NO: 12835 - protein, 396 aa, Salmonella enterica subsp. enterica serovar Typhi
MFENITAAPADPILGLADLFRADDRPGKINLGIGVYKDETGKTPVLTSVKKAEQYLLENETTKNYLGIDGIPEFARCTQELLFGKGSALINDKRARTAQTPGGTGALRIAADFLAKNTPVKRVWVSNPSWPNHKSVFNAAGLEVREYAYYDAENHSLDFEALQASLSEAQAGDVVLFHGCCHNPTGIDPTLEQWQVLAELSVEKGWLPLFDFAYQGFARGLEEDAEGLRAFAALHKELIVASSYSKNFGLYNERVGACTLVAADAETVDRAFSQMKSAIRANYSNPPAHGASIVATILSNDALRAIWEQELTDMRQRIQRMRQLFVNTLQEKGANRDFSFIIKQNGMFSFSGLTKDQVLRLREEFGVYAVASGRVNVAGMTPDNMAPLCEAIVAVL

SEQ ID NO: 12836 - DNA, 1420 bp, Rhizobium meliloti
  CDS (175)..(1344)
gccggtccgacctgatgaagatcgcctgcgccgagccttcgcgtgcggcgcgaaagccgggggcgctggaggcctgaggctgtcgtttcgaccggtcgcggcgcggaacccgcttgcctttccggctgggggaaacgactatgatccgatccactgctccacaaggaataccggatgttcgacgccctcgcccgccaagccgacgatcccttgctggccctgatcggcctgttcaggaaggatgagcgccccggaaaggtcgatctcggcgtaggagtctatcgcgacgagaccggacgcacgccgatcttccgggccgtcaaggcggcggaaaagcggcttctcgaaacacaggacagcaaggcctatatcggccccgaaggggacctcgtctttctcgatcggctctgggaactcgtcggcggcgacacgatcgagcggagccatgttgcgggcgtccagacgcccggcggctccggcgcgctccgtttggcggcggacctcatcgcccgcatgggcggccgaggcatctggctcgggctgccgagctggccgaaccacgcgccgatcttcaaggcggccgggctcgatatcgccacctacgacttcttcgacattccgtcgcagtcggtcatcttcgataatctggtgagcgcgctggaaggcgccgcatccggcgatgcggtgctgctgcatgcaagctgccacaacccgaccggcggcgtcctgagcgaagcacaatggatggagatcgccgcgctggtggccgagcgcggcctgctgccgctcgtcgatctcgcctatcaggggttcggccgcggcctcgaccaggatgtcgcgggcctccggcatcttctcggcgtggtcccggaagcgctcgtcgcggtttcctgctcgaagtccttcgggctttatcgcgagcgcgcgggcgcgatcttcgcgcggaccagctcgactgcctcggcggacagggtgcgctcaaacctcgcgggcctcgcacgcaccagctattccatgccgccggatcacggcgcagccgtcgtgcggacgatccttgacgacccggaactcaggcgcgactggacggaggagctcgagacgatgcggctcaggatgacgggcctccggcggtcgcttgccgagggactccgcacccgctggcagagcctcggcgcagtcgccgatcaggagggcatgttctccatgctgccgctttccgaagcggaggttatgcggctcaggaccgagcacggcatctatatgccggcatccggccgcatcaacatcgccgggctgaagacggcggaagccgccgagattgccggcaagttcaccagtctctgatctctagatgacgatgcttttaggccgggtcgacctaaaagcatgaacgtgaccggttccgataggtcagagcggg

SEQ ID NO: 12837 - protein, 389 aa, Rhizobium meliloti
MFDALARQADDPLLALIGLFRKDERPGKVDLGVGVYRDETGRTPIFRAVKAAEKRLLETQDSKAYIGPEGDLVFLDRLWELVGGDTIERSHVAGVQTPGGSGALRLAADLIARMGGRGIWLGLPSWPNHAPIFKAAGLDIATYDFFDIPSQSVIFDNLVSALEGAASGDAVLLHASCHNPTGGVLSEAQWMEIAALVAERGLLPLVDLAYQGFGRGLDQDVAGLRHLLGVVPEALVAVSCSKSFGLYRERAGAIFARTSSTASADRVRSNLAGLARTSYSMPPDHGAAVVRTILDDPELRRDWTEELETMRLRMTGLRRSLAEGLRTRWQSLGAVADQEGMFSMLPLSEAEVMRLRTEHGIYMPASGRINIAGLKTAEAAEIAGKFTSL

SEQ ID NO: 12838 - DNA, 1197 bp, Pseudomonas aeruginosa
  CDS (1)..(1197)
atgagtctgttttctgccgtcgaaatggcaccgcgtgatcccatccttggcctgaacgaagccttcaacgccgatacccgtccgggcaagatcaacctgggcgtgggcgtgtactacaacgaggaggggcgcattccgctgttgcgtgccgtgcaggctgccgagaaggcccgcatcgaggcccacgcgccgcgcggctacctgccgatcgaagggatcgccgcctacgaccagggcgtacagaaactgctgttcggtaacgagtccgagctgctggccgccggccgtgtggtcacgacccaggccgtcggcggcaccggcgcgctcaagctcggcgccgacttcctcaagcgcctgctgcccgacgccaccgtggccatcagcgacccgagctgggaaaaccaccgcgcactgttcgaagccgccggcttcccggtgcagaactaccgctattacgacgccgccagcaatggcgtgaaccgcgccggcctgctggaagacctgaatgccctgccggcccgctcgatcgtggttctgcacgcctgctgccataatccgaccggcgtcgatctcgagctggacgactggaaacaggtgctggacgtgctcaaggccaagggccacgtgccgttcctcgacatcgcctaccagggcttcggcaacggcatcgaggaagacgccgccgcggtgcgcctgttcgcccagtcgggcctgagcttcttcgtttccagctcgttctccaaatccttctcgctctatggcgaacgcgtcggcgccctctcgatcgtgaccgaaagccgcgatgaatcggcccgcgtgctgtcccaggtgaagcgggtgatccgcaccaactattcgaacccaccgacccacggcgccagcgtcgtctcctccgtgctcaacagcccggaactgcgggccctctgggagcaggaactgggcgagatgcgcgaccgcatccgcgacatgcgcctggcgatggtcgagcaactggcagcccacggcgccaagcgcgacttcagcttcgtcggtcgccaacgtggcatgttctcctattccggcctgaccgccgaccaggtcgagcgcctgaagaccgagttcggtatctacgccgtcagcaccggccgtatctgcgtcgccgcgctgaacaaatcgaacctggagaccatcaccaaggccatcgtccaggtcctgtag

SEQ ID NO: 12839 - protein, 398 aa, Pseudomonas aeruginosa
MSLFSAVEMAPRDPILGLNEAFNADTRPGKINLGVGVYYNEEGRIPLLRAVQAAEKARIEAHAPRGYLPIEGIAAYDQGVQKLLFGNESELLAAGRVVTTQAVGGTGALKLGADFLKRLLPDATVAISDPSWENHRALFEAAGFPVQNYRYYDAASNGVNRAGLLEDLNALPARSIVVLHACCHNPTGVDLELDDWKQVLDVLKAKGHVPFLDIAYQGFGNGIEEDAAAVRLFAQSGLSFFVSSSFSKSFSLYGERVGALSIVTESRDESARVLSQVKRVIRTNYSNPPTHGASVVSSVLNSPELRALWEQELGEMRDRIRDMRLAMVEQLAAHGAKRDFSFVGRQRGMFSYSGLTADQVERLKTEFGIYAVSTGRICVAALNKSNLETITKAIVQVL

SEQ ID NO: 12840 - DNA, 1194 bp, Neisseria meningitidis
  CDS (1)..(1194)
atgttcttcaagcacatcgaagccgcccccgccgatccgattctcggtttgggcgaagcgttcaaagccgaaacccgccccgaaaaagtcaacctcggcatcggcgtttataaagacgcatccggcgcgacacccctcgtcaaagccgtcaaagaagccgaaaaacgcctgttggaaagcgaaaccaccaaaaactacctcaccatcgacggcgttgccgactacaacgcgcaaacccaaatcctgctgttcggcaaagaccacgaaatcatcgccagccgtcgcgccaaaacagcgcaaagcctcggcggtacgggcgcattgcgtattgcggccgagtttgccaaacgccagttgaacgcgcaaaccatctggatttccaatccgacttggcccaaccacaacgccatcgccaaagcggtcggtatccaagacaaaccttatcgttactatgatgccgccaaacacggtttggattgggacggcatgattgaggacttgagccaagcgcaaaaaggcgacatcgtcctgctgcacggctgctgccacaatcctaccggcatcgaccctacgcccgaacaatgggaaactttggcaaaactttctgccgaaaaaggctggttgccgctgtttgactttgcctaccaaggcttcggcaatggtttggaagaagatgcctacggcttgcgcgtgttcttgaaacacaatacagaattgctgattgccagctcttattccaaaaacttcggtatgtacaacgagcgcgtcggcgcgttcactttggtggccgaagatgaagaaacagcagcccgcgcccacagccaagtcaaaaccatcatccgtaccttgtattccaacccggcttcacacggtgcgaacaccattgcgctggtgttgaaaaatgatgatttgaaagcacaatggattgccgaactcgatgaaatgcgcggccgcatcaaagccatgcgccaaaaatttgtcgggttgctcaaagccaaaggtgcaagccaaaactttgatttcattatcaaacaaaacggtatgttctctttcagcggcttgactcccgaacaagtcgaccgcctgaaaaacgagtttgccatttatgccgtccgctccggccgcatcaacgtcgccggcattaccgacaacaacatcgattatctgtgcgaaagcatcgtgaaagtactgtaa

SEQ ID NO: 12841 - protein, 397 aa, Neisseria meningitidis
MFFKHIEAAPADPILGLGEAFKAETRPEKVNLGIGVYKDASGATPLVKAVKEAEKRLLESETTKNYLTIDGVADYNAQTQILLFGKDHEIIASRRAKTAQSLGGTGALRIAAEFAKRQLNAQTIWISNPTWPNHNAIAKAVGIQDKPYRYYDAAKHGLDWDGMIEDLSQAQKGDIVLLHGCCHNPTGIDPTPEQWETLAKLSAEKGWLPLFDFAYQGFGNGLEEDAYGLRVFLKHNTELLIASSYSKNFGMYNERVGAFTLVAEDEETAARAHSQVKTIIRTLYSNPASHGANTIALVLKNDDLKAQWIAELDEMRGRIKAMRQKFVGLLKAKGASQNFDFIIKQNGMFSFSGLTPEQVDRLKNEFAIYAVRSGRINVAGITDNNIDYLCESIVKVL

SEQ ID NO: 12842 - DNA, 1203 bp, Xylella fastidiosa
  CDS (1)..(1203)
atgcccttatttacagatgtggaattggttccaggtgatcccattctgagcctcaacgatacttataacgccgatacacgtaccaacaaggtcaatttgggtattggcatttattgtgacgagagcggttgtatcccgctgttgcgggctgtccagcaggttgaagagcaacttgcgaagcatccgaaaccgcgcggttatctgccgattgatggtttgccagcctatatcaaagccacacaacaattgttgtttggagtcgactcccccttgttgacggctggccgtgtggcgacctcacagactattggaggttctggggcattgcgggtgactgctgaggtactgaagcaggtgctaccacatgccactgtggccattagccgtccaagctgggagaaccaccgtgctttgttcaccgctgctggcttcaagattgaggactatacctatttcgatacgctcggccacgcggtggactttactggaatggtggcggacttggcgaagctgcaaccaaagaccgtggtattacttcatggttgctgtcataacccaacgggtgccgatctcagcagggatcagtggaagcagcttgttgccttgttccaggaacgtcaattgctgccatgtattgatctggcttaccaaggattcaatcagggcattgatgcggatgcttatgccatacgtttgcttgccgaagaaggtattagtaactatgtagttgccaactcgtactccaaatcgttctcgttgtatggcgagcgtgttggggggctgtcgatcgttgcttccaatacggagcaagcccaagcaatccagtcacaagtaaagcgtattatccgtacgatttattccagtccgtcggcacacggcgcctacttggtcgcaggtgtgctcaacagtcatgagctgcggacgctgtgggagcaggagttaacccagatgcgtgaacgtatccacgggttgcgtgcgggtttggttgctcgattgacggcgctgggtgcgccggagtttgatttcatacaacgtcaagcaggcatgttttcgtattcggggctgagcaagatccaggtggatcgtttgcgcgacgagttcgggatttatgcggtcagtagtggacgtatctgtgtggctgcgttgagtcagcacaaattggaatacgtggcgcaggctgtggtgaaggtgcatcaaggctga

SEQ ID NO: 12843 - protein, 400 aa, Xylella fastidiosa
MPLFTDVELVPGDPILSLNDTYNADTRTNKVNLGIGIYCDESGCIPLLRAVQQVEEQLAKHPKPRGYLPIDGLPAYIKATQQLLFGVDSPLLTAGRVATSQTIGGSGALRVTAEVLKQVLPHATVAISRPSWENHRALFTAAGFKIEDYTYFDTLGHAVDFTGMVADLAKLQPKTVVLLHGCCHNPTGADLSRDQWKQLVALFQERQLLPCIDLAYQGFNQGIDADAYAIRLLAEEGISNYVVANSYSKSFSLYGERVGGLSIVASNTEQAQAIQSQVKRIIRTIYSSPSAHGAYLVAGVLNSHELRTLWEQELTQMRERIHGLRAGLVARLTALGAPEFDFIQRQAGMFSYSGLSKIQVDRLRDEFGIYAVSSGRICVAALSQHKLEYVAQAVVKVHQG

SEQ ID NO: 12844 - DNA, 1200 bp, Pseudomonas aeruginosa
  CDS (1)..(1200)
atgagtcatttcgccaaggtcgcccgcgtaccgggcgacccgatcctgggcctgctcgacgcctaccgcaacgatccgcgcgcggacaagctggacctcggcgtcggtgtctacaaggatgcccagggcctgaccccgatcctgcgctcggtgaaactcgccgagcagcgcctggtcgagcaggaaaccaccaagagctacgtcggcggccacggcgatgcgctgttcgccgcgcgcctggcggaactggcgctcggcgccgcctcgccgctgttgctggagcaacgcgccgacgccacccagacgcccggcggcaccggcgccttgcgcctggccggcgacttcatcgcccattgcctgcccggccgcggcatctggctgagcgacccgacctggccgatccacgagaccctgttcgccgccgccggcctgaaggtttcccactacccctacgtcagcgccgacaaccgcctggatgtcgaggcgatgcttgctggcctggagcgcattccccagggagacgtggtgctgctgcatgcctgctgccacaacccgaccggtttcgacctgagccacgacgactggcgcagggtgctcgacgtggtgcgtcgccgcgagctgctgccgctgatcgacttcgcctaccagggcttcggcgacggtctcgaggaagacgcctgggcggtacgcctgttcgccggcgaactgccggaggtgctggtcaccagttcctgctcgaagaacttcggcctgtaccgcgaccgcgtcggtgcgctgatcgtctgcgcgcagaacgccgagaagctcaccgacctgcgtagccaactggccttcctcgcccgcaacctctggtcgaccccgccggcgcatggtgccgaggtggtcgcggcgatcctcggcgacagcgagttgaagggactctggcaggaagaggtcgaaggcatgcgctcgcgcatcgccagcctgcgcatcggcctggtcgaagccctggcgccgcacggcctggccgagcgcttcgcccatgtcggcgcgcaacgcgggatgttttcctataccggactgagcccgcagcaggtcgctcggctgcgcgacgagcacgccgtttacctggtctccagcggccgggccaacgtcgccggtctcgacgcgcgccgcctcgaccgcctggcgcaagccatcgcccaggtctgcgcggactga

SEQ ID NO: 12845 - protein, 399 aa, Pseudomonas aeruginosa
MSHFAKVARVPGDPILGLLDAYRNDPRADKLDLGVGVYKDAQGLTPILRSVKLAEQRLVEQETTKSYVGGHGDALFAARLAELALGAASPLLLEQRADATQTPGGTGALRLAGDFIAHCLPGRGIWLSDPTWPIHETLFAAAGLKVSHYPYVSADNRLDVEAMLAGLERIPQGDVVLLHACCHNPTGFDLSHDDWRRVLDVVRRRELLPLIDFAYQGFGDGLEEDAWAVRLFAGELPEVLVTSSCSKNFGLYRDRVGALIVCAQNAEKLTDLRSQLAFLARNLWSTPPAHGAEVVAAILGDSELKGLWQEEVEGMRSRIASLRIGLVEALAPHGLAERFAHVGAQRGMFSYTGLSPQQVARLRDEHAVYLVSSGRANVAGLDARRLDRLAQAIAQVCAD

SEQ ID NO: 12846 - DNA, 1215 bp, Vibrio cholerae
  CDS (1)..(1215)
atgttacctgaatttcaaagggttgtgactttcatgtttactcatttaccagcaccagttttagatccaatactttctctctccgtcgcctttcgcaatgatcctcgtccacaaaaagtggatcttggaatcggcgtttataaaaacagtcttggcgaaacgccaattatgcgtgccgttgcgctggcgcaagataaagtggtggcaagccaaaaaaccaaatcttatgtcggccttgccggctgtgaagagttcaaccagagcatgatgcagctcgtattaggttcaaccttggatacggagcgcacgattgcaatccagactccgggagccagcggcgcgctgcgtatgctgggggatttgatgcgtgtggcgcaaccggatactaccgtgtggatcaccgatcctagttatgtcaaccacaagcccgtgatggaagcggctggtctgaaagtacgttactaccgttatttcagccgtgaaaccaaaatggtggataccgaacaaatgttggccgatctggcacaagcgggaacgaaagatgtggtgttactgcatggttgttgtcataacccgacaggtgccgatatcgatttttctgcgtggcaagcgatcactgagttggcgcagaaaaacggctttatcccttttgtcgacatcgcctatcaaggttttggtgacggcttagaacaagatgcacagggtttgcgttacatggctgagcgcatggaagagatgttgatcacgacatcctgctctaagaatttcggcttgtatcgtgagcgtacgggagcggcgattgtgattgggaaaaatcagcaagaggtgaccaatgcacgcggcaaaatgctgaccttagcgcgttccacttacactatgccgcccgatcacggtgctgctctcgtcaaaacagtgttaagagatgaacagctcacggcaatttggaaacaagagttgagtgaaatgcagcaacgtttgttaactctgcgcaaaaatttgtgtaatgagttgagaaatcaacacaatacgcgacaattcgacttcattgagagccatagaggcatgtttactgtactgggattcagtgcagagcagatgggaaggctgcgtgaagagtttgcgatttatggtgtcgcagatggcagaattaatatcgcagggctgaccgaaaaagacattccttatgtggccaatgctattattcatgtgtcgtaa

SEQ ID NO: 12847 - protein, 404 aa, Vibrio cholerae
MLPEFQRVVTFMFTHLPAPVLDPILSLSVAFRNDPRPQKVDLGIGVYKNSLGETPIMRAVALAQDKVVASQKTKSYVGLAGCEEFNQSMMQLVLGSTLDTERTIAIQTPGASGALRMLGDLMRVAQPDTTVWITDPSYVNHKPVMEAAGLKVRYYRYFSRETKMVDTEQMLADLAQAGTKDVVLLHGCCHNPTGADIDFSAWQAITELAQKNGFIPFVDIAYQGFGDGLEQDAQGLRYMAERMEEMLITTSCSKNFGLYRERTGAAIVIGKNQQEVTNARGKMLTLARSTYTMPPDHGAALVKTVLRDEQLTAIWKQELSEMQQRLLTLRKNLCNELRNQHNTRQFDFIESHRGMFTVLGFSAEQMGRLREEFAIYGVADGRINIAGLTEKDIPYVANAIIHVS

SEQ ID NO: 12848 - DNA, 1287 bp, Staphylococcus aureus
  CDS (1)..(1287)
atgaatcctttagcccaaagcttaaatgaacaacttcaacagtcaaatgcaactgcctttacaatgttatctgacttaggtcaaaatatgttttatccaaaaggcattttatctcaatctgctgaagcaaagagtacaacatataatgcaactataggtatggcgacaaacaaagacggaaaaatgtttgcatcatctttagatgcaatgtttaatgatttaactccagatgaaatattcccttatgcgccaccacaaggcatcgaagaattacgtgatttatggcaacaaaaaatgttgcgtgacaatccagagctatcaatcgacaacatgtcactaccaattgttacgaatgcattaacacatggtttatctttagttggcgatttatttgtaaatcaaggtgacactatcttgttaccagagcataattggggtaattacaaacttgttttcaatacgagaaatggtgcaaaccttcaaacatatcctatctttgataaagacgggcattatactactgattcacttgtagaagctttacaatcatacaataaagataaagtcattatgattttaaattatcctaataatccgacaggttacacacctacgcataaagaagtgactaccatcgtcgatgcaattaaagcattagctgataaaggtacaaaagttatagctgttgtggatgacgcatactatggtttattctatgaagatgtgtatactcaatcattatttactgcattatctaatttaaattcaaatgcaatattacctgttcgtttagatggtgcaacaaaagaatttttcgcatggggattccgtgttgggtttatgacatttggaacgtctgatcaaacaactaaagaagtattagaagccaaagtaaaaggtcttatacgaagtaacatttctagtggacctcttccaacacaaagcgctgttaagcatgtattaaaaaataataaacaattcgataaagaaatcgaacaaaatattcaaacattaaaagaacgctatgaagtcactaaggaagttgtctatgctgatcaatatcattcacattggcaagcctatgactttaactctggatactttatggcaataaaagttcatgatgttgaccctgaagaacttcgtaaacatttaattgaaaaatattcaattggtgttattgcacttaatgcaacagatattcgtattgcgtttagctgtgtagaaaaagaagatatcccacatgtatttgattcaattgctaaagcgattgatgacttaagatag

SEQ ID NO: 12849 - protein, 428 aa, Staphylococcus aureus
MNPLAQSLNEQLQQSNATAFTMLSDLGQNMFYPKGILSQSAEAKSTTYNATIGMATNKDGKMFASSLDAMFNDLTPDEIFPYAPPQGIEELRDLWQQKMLRDNPELSIDNMSLPIVTNALTHGLSLVGDLFVNQGDTILLPEHNWGNYKLVFNTRNGANLQTYPIFDKDGHYTTDSLVEALQSYNKDKVIMILNYPNNPTGYTPTHKEVTTIVDAIKALADKGTKVIAVVDDAYYGLFYEDVYTQSLFTALSNLNSNAILPVRLDGATKEFFAWGFRVGFMTFGTSDQTTKEVLEAKVKGLIRSNISSGPLPTQSAVKHVLKNNKQFDKEIEQNIQTLKERYEVTKEVVYADQYHSHWQAYDFNSGYFMAIKVHDVDPEELRKHLIEKYSIGVIALNATDIRIAFSCVEKEDIPHVFDSIAKAIDDLR

SEQ ID NO: 12850 - DNA, 1182 bp, Bacillus subtilis
  CDS (1)..(1182)
atgaaattggctgggttatcccgggaagttgaagaaaacttaaataaaggatcatggattcgcaagctgtttgatgaaggtgcaaggctgaagaaggagttcggggaagaccaggtatttgatttttcactcggcaacccgattgttgaaccgcctgaagcttttaagagagcgttaatagaggaagctgaaaaaggcagccacggatacatacaaaaccaagggcttcttgcagcgagagaaaaagtcgcgcaatttctgggctcgcgttttgaagctgatttctcagcggagcgcatcgtcatgacggtgggcgcgggaggcgctttgaatgttgcgttaaaaagcatcgtaaaccctggggaagaggtcattattcttgcaccttattttgccgaatataagttgtatattgagaactacgggggaaaagccgtcagctgcccgttgacaagccggtttgagatcgacattgaagcggtaaggcaatcgatcactccacagacgaaagggctgattctcaatacaccgcataaccccacaggcactgttctcagccagaaaaatatagacgatttaggcgctttattaaaagaaatagaagagaagagcggccagacgatttatgtgctgtttgatgaaccgtacagtcaattaatctatgatgaagagctggcaaatccgtttcaatcgtaccatcgtgtgatattggccagctcattcagtaaagatctcggcatagccggagagcggctcgggtatatcggattggacagccgaatgccggatgcggaccttttgatcaacgcttttgtgtattgtaatcgaacgcttggatttgtgaatgcccctgtcatgatgcagcgggctgtggcacgaatggatgatttaagagtagacgcgagcgcttataaagagcgccgggatttaatggtagacattttaaaagaagccggttttgaatttgaaatgccaaagggaggtttctttgtttttccgaaatcgccgattgaagatgaagttgcattttgcgtgcatgccgcccaaaaatacaaattattaattgtgccgagcagcggttttggaatgagcgggcatttccgattatccttcagtgtgccgatcgagcagattaaaaactcacgggacattttcatttctttatataaagattttgcttaa

SEQ ID NO: 12851 - protein, 393 aa, Bacillus subtilis
MKLAGLSREVEENLNKGSWIRKLFDEGARLKKEFGEDQVFDFSLGNPIVEPPEAFKRALIEEAEKGSHGYIQNQGLLAAREKVAQFLGSRFEADFSAERIVMTVGAGGALNVALKSIVNPGEEVIILAPYFAEYKLYIENYGGKAVSCPLTSRFEIDIEAVRQSITPQTKGLILNTPHNPTGTVLSQKNIDDLGALLKEIEEKSGQTIYVLFDEPYSQLIYDEELANPFQSYHRVILASSFSKDLGIAGERLGYIGLDSRMPDADLLINAFVYCNRTLGFVNAPVMMQRAVARMDDLRVDASAYKERRDLMVDILKEAGFEFEMPKGGFFVFPKSPIEDEVAFCVHAAQKYKLLIVPSSGFGMSGHFRLSFSVPIEQIKNSRDIFISLYKDFA

SEQ ID NO: 12852 - DNA, 1218 bp, Plasmodium falciparum
  CDS (1)..(1218)
atggataagttattaagcagcttagaaaatatcgaagtcgacaatatcttaaaaacggcaagagagtttaaggaagatacatgtgaggagaaaataaatttatccatcggtgtgtgttgtaatgatgatggagacttacatatatttgatagtgtattaaatgccgataagttagtaacagaaaattataaagagaaaccatatttgttaggtaacggtacagaagatttttcaacattaacacagaatttaatatttggtaataattccaaatatatagaagataaaaaaatatgtacaattcaatgtattggaggtactggtgctatttttgttttattagaatttttaaaaatgttaaatgttgaaactttatatgttacaaatccaccttatattaatcatgtgaatatgattgaatcaaggggatttaatttaaaatatataaatttttttgattataatttgatagatataaattatgatttatttctaaatgatcttagaaatataccaaatggatcctcagttattttacaaatatcttgttataatccttgtagtgttaatattgaagaaaaatattttgatgaaataatagaaattgttttacataaaaaacatgttattatctttgatatagcttatcaaggatttggacatacaaatttagaagaagatgtcttacttattcgaaagtttgaagaaaaaaatatcgccttttcggtatgtcaatccttttcaaaaaatatgtcgctttatggagaaagagcaggtgctcttcatattgtttgtaaaaatcaagaagaaaaaaaaatcgtttttaataatttatgttttatcgtacgtaaattttattcgtctcctgttatacatacgaatcgtattctatgccaacttttaaataatcaaaatttaaaattaaattggattaaagaacttagtcaattatcacaacgtattacgaataatagaatcctattctttaataaattagaaacatatcaaaaaaaatataatctaaattatgattggaatgtctataaaaaacaaagaggccttttttcattcgttcctctactagccaaaattgctgagcatttaaaaacacatcatatttatataattaataatggtagaataaatgtctccggaataaccaaaaataatgtcgattatatagccgacaaaatttgtctttcgctaagtcaaatatga

SEQ ID NO: 12853 - protein, 405 aa, Plasmodium falciparum
MDKLLSSLENIEVDNILKTAREFKEDTCEEKINLSIGVCCNDDGDLHIFDSVLNADKLVTENYKEKPYLLGNGTEDFSTLTQNLIFGNNSKYIEDKKICTIQCIGGTGAIFVLLEFLKMLNVETLYVTNPPYINHVNMIESRGFNLKYINFFDYNLIDINYDLFLNDLRNIPNGSSVILQISCYNPCSVNIEEKYFDEIIEIVLHKKHVIIFDIAYQGFGHTNLEEDVLLIRKFEEKNIAFSVCQSFSKNMSLYGERAGALHIVCKNQEEKKIVFNNLCFIVRKFYSSPVIHTNRILCQLLNNQNLKLNWIKELSQLSQRITNNRILFFNKLETYQKKYNLNYDWNVYKKQRGLFSFVPLLAKIAEHLKTHHIYIINNGRINVSGITKNNVDYIADKICLSLSQI

SEQ ID NO: 12854 - DNA, 1194 bp, Neisseria meningitidis
  CDS (1)..(1194)
atgtaccgacacatcgaatactatcctggcgacccgattttgagtttggtcgaaaccttcaaaaacgacccgcgccccgaaaaagtcaatttgagcataggcatttatttcgacgacgaaggcaaaatgcccgtgttggaatccgtgagccgagccgaaaccgcccgtgccgccgcgcctgcgccgtcgccctacctgccgatggaaggcttggacacttaccgcagcgcggtgcagcatttattgttcggcaaagacaatcccgcgcttgcgcaagggcgcatcgttaccgtacaaaccttgggcggctcgggcgcgctcaaagtcggggcggacttcctgcaccgctggtttcccgaagcgcgcgcctacgtcagcgacccgacttgggacaaccatcgcggcatttttgaaggcgcaggtttcgaggtcggcacttacccatattacgaccctgccactgtcggcgtgaaattcgacgaaatgaccgcgtttttcaacaccctgcccgaaaacagcgtcctgatcctccatccctgctgccacaacccgaccggcgtggatatgtcggaacggcaatgggacgaagtgttgcacatcatcaaaacgcgcaaactgattccgtttatggacattgcctaccaaggattcggcggcgatttggacagcgatgcctacgccgtccgcaaagcggtggaaatggaattgcccttgttcgtcagcaattccttctcaaaaaacctgtcgctctacggcgagcgcgtcggcggcttaagcgtggtttgcccgaataaggaagaagcggatttggtgttcggacagctcaaattcaccgtccgccgcatctactccagcccgcccgcgcacggcgcgtatatcgccgccgacgtgatgaacagccccgaactttacgccttgtggcaaaacgaggtttatatgatgcgcgaccgcatccgtgcgatgcggcagaaactttatgatgtcttaactgcgcaaatccccaatcgcgatttcacttatttcatcaaacagcgcggcatgttcggctacacaggattgagcgtggaacaagtccgcaggctgcgcgacgaatttgccgtttacctgctggattccggcaggatgtgcgtcgccggactgaatacgtcgaataccgactatgttgcccgcgcatttgcggaagtcttgaaataa

SEQ ID NO: 12855 - protein, 397 aa, Neisseria meningitidis
MYRHIEYYPGDPILSLVETFKNDPRPEKVNLSIGIYFDDEGKMPVLESVSRAETARAAAPAPSPYLPMEGLDTYRSAVQHLLFGKDNPALAQGRIVTVQTLGGSGALKVGADFLHRWFPEARAYVSDPTWDNHRGIFEGAGFEVGTYPYYDPATVGVKFDEMTAFFNTLPENSVLILHPCCHNPTGVDMSERQWDEVLHIIKTRKLIPFMDIAYQGFGGDLDSDAYAVRKAVEMELPLFVSNSFSKNLSLYGERVGGLSVVCPNKEEADLVFGQLKFTVRRIYSSPPAHGAYIAADVMNSPELYALWQNEVYMMRDRIRAMRQKLYDVLTAQIPNRDFTYFIKQRGMFGYTGLSVEQVRRLRDEFAVYLLDSGRMCVAGLNTSNTDYVARAFAEVLK

SEQ ID NO: 12856 - DNA, 1293 bp, Arabidopsis thaliana (mouse-ear cress)
  CDS (1)..(1293)
atggctttggcgatgatgatccgaaacgcagcttcgaagcgaggaatgactccgatctccggtcatttcggtggtttgagatctatgtcttcatggtggaagagcgttgagcctgctcctaaagatccgatcctcggagttaccgaagcttttctcgctgatcctagtcctgaaaaagttaatgttggtgtgggagcatatcgtgatgataatgggaagcctgttgtcttggaatgtgtcagagaagctgagaaaaggcttgctgggagcactttcatggagtaccttcctatgggaggaagtgccaaaatggtggacctaacattgaagcttgcctatggggacaatagtgaatttatcaaagataaaagaattgctgcagttcagactctgtctggcactggagcctgccggctctttgcagacttccagaaacgtttttctcctggttcacagatctacattcctgttccaacctggtccaaccaccacaacatctggaaagatgcacaagtccctcaaaagacatatcattactatcatccagaaaccaagggcttggatttctcagcattgatggatgatgtgaagaatgctccggaagggtcattcttccttcttcatgcttgtgctcataatcctactggagtagaccctacagaggaacaatggagagagatatcacagctattcaaggctaaaaagcatttcgcattcttcgatatggcttaccaaggttttgctagtggagatccagcgagagatgccaagtccatcaggatctttcttgaagatggtcatcatattggaatttctcagtcctatgcaaaaaacatgggactctacggccagagggtgggatgtctcagtgtgctttgtgaagatccgaagcaagccgtggctgtgaaaagtcaattgcagcagctagctagaccaatgtacagcaacccacctttgcatggtgctcagctggtctcaaccattcttgaagacccagagttaaagagtctgtggctaaaagaagttaaggtcatggctgataggatcatcggcatgagaactactttgcgagaaagccttgagaagttaggatcgcctttgtcatgggagcacgttaccaaacagattggaatgttctgctacagtgggttaacaccagaacaggttgaccgcttaacaagcgaatatcacatctatatgacccgtaacggccgtatcagtatggctggtgttacaacaggaaacgtgggataccttgcgaatgctatacatgaagtcaccaagtcatcttaa

SEQ ID NO: 12857 - protein, 430 aa, Arabidopsis thaliana (mouse-ear cress)
MALAMMIRNAASKRGMTPISGHFGGLRSMSSWWKSVEPAPKDPILGVTEAFLADPSPEKVNVGVGAYRDDNGKPVVLECVREAEKRLAGSTFMEYLPMGGSAKMVDLTLKLAYGDNSEFIKDKRIAAVQTLSGTGACRLFADFQKRFSPGSQIYIPVPTWSNHHNIWKDAQVPQKTYHYYHPETKGLDFSALMDDVKNAPEGSFFLLHACAHNPTGVDPTEEQWREISQLFKAKKHFAFFDMAYQGFASGDPARDAKSIRIFLEDGHHIGISQSYAKNMGLYGQRVGCLSVLCEDPKQAVAVKSQLQQLARPMYSNPPLHGAQLVSTILEDPELKSLWLKEVKVMADRIIGMRTTLRESLEKLGSPLSWEHVTKQIGMFCYSGLTPEQVDRLTSEYHIYMTRNGRISMAGVTTGNVGYLANAIHEVTKSS

SEQ ID NO: 12858 - DNA, 1191 bp, Haemophilus influenzae
  CDS (1)..(1191)
atgtttgaacatatcaaagcggcaccagccgatccaatcttaggcttaggcgaagcatttaaatccgaaactcgcgaaaataaaatcaatttgggtattggcgtttataaagatgcgcaaggcacaaccccaattatgcacgcggtaaaagaagccgaaaaacgattatttgataaggaaaaaaccaagaattatctgactatcgatggtattgcggattataacgaacaaacaaaagcactccttttcggtaaagattctgaagtcatccaatctaatcgagcaagaacagtacaaagtttaggcggaacaggtgcattacgcattgcggcagaatttattaaacgccaaactaaagcacaaaatgtttggatcagcacaccaacttggccaaaccacaatgcgattttcaatgctgtcggtatgaccattcgtgaatatcgttattatgatgctgaacgcaaagcccttgattgggaacacttattagaagatttaagccaagcaagcgaaggcgatgtggtgcttttacacggttgttgccataatccgactggtattgaccctactccagaacaatggcaagaattagccgcactttcagctaaaaatggttggttgccactctttgactttgcttatcaaggtttagccaacggattagatgaagatgcttatggtttacgtgcttttgcagcaaaccacaaagaattattagtggcgagttcattctcgaaaaactttggtttatataatgaacgtgttggtgcatttacccttgtggcagaaaatgcagaaattgcatcaacctcattaacccaagtaaaatcaattattcgcaccctatactctaacccagcttctcacggcggggcgaccgtagcaacagtattaaatgatgctcaacttcgccaagaatgggaaaatgaattaactgaaatgcgtgaacgcatcaaaaaaatgcgtcacttattcgttcagttattaaaagaatatggtgcagaacaagatttcagctttatcattgaacaaaacggtatgttttctttcagtggattaacaggggaacaagtggatcgtttaaaaaatgaatttgccatttacgctgttcgttctggtcgtatcaacgtagctggaatcacagaagataatattcgctatctatgtgaaagtatcgtgaaagtactttaa

SEQ ID NO: 12859 - protein, 396 aa, Haemophilus influenzae
MFEHIKAAPADPILGLGEAFKSETRENKINLGIGVYKDAQGTTPIMHAVKEAEKRLFDKEKTKNYLTIDGIADYNEQTKALLFGKDSEVIQSNRARTVQSLGGTGALRIAAEFIKRQTKAQNVWISTPTWPNHNAIFNAVGMTIREYRYYDAERKALDWEHLLEDLSQASEGDVVLLHGCCHNPTGIDPTPEQWQELAALSAKNGWLPLFDFAYQGLANGLDEDAYGLRAFAANHKELLVASSFSKNFGLYNERVGAFTLVAENAEIASTSLTQVKSIIRTLYSNPASHGGATVATVLNDAQLRQEWENELTEMRERIKKMRHLFVQLLKEYGAEQDFSFIIEQNGMFSFSGLTGEQVDRLKNEFAIYAVRSGRINVAGITEDNIRYLCESIVKVL

SEQ ID NO: 12860 - DNA, 1701 bp, Bacillus circulans
  CDS (367)..(1665)
aagcttcagccggaagcggctatgctacgattgatgcacaggacccgaagtatgccaaaaggctgaaaggggtcgccgtcatcaagctggtgccccatcggctgagcgcaaaattcaaattcgggcaaaatctgacaccggagcgtctggagagcatcgcgcaggcgctcgaaagccgggatcaggagcaggatcgcgaaaccgcaaaactaatgcgaaaatatttcacgggatcgcattaaagcgacgcgaattgatcgtgacggttgatgtgcaaggtggtataatgttaggcaatgaatcggagacattacatccaatgtcgtcataatatccaatagaattgcggaaggaaggagccaattcatgaacccattggccggacaattgaatgagaagctgcaagccggtaacccgcatgtatttgacatgctctccacactcggcaaggagctctatttcccgaaggaaggcattctgagccaatccgctgaggcagcagcccatgcgaaaaaatataatgcaacgattggaatcgcaaccgaaggcggcattcctatgcatctgggggtcattcaggagaagctgtcggctttcgctccgaaggacctgtacccgtacgcccctccagccggcaagccggagctgcgctctctatggcgggacaagatgctggaagagaacccttcgctgcaagggaagagcttcggcaatccgattgcaaccaatgcactgacccacggtctcagcatcgtcgctgacctgttcgtagatgaaggcgatgccgtcatctatcccgacaagaactgggaaaactatgacctgacattcggcgtccgccgccatggggtgaacgtgaatttccctcttttcacatcggagatgacctttaatgccgcaggtttgcgcgacgcccttctggcccagaaggataaggggaaagccgtggtcatcctcaacttcccgaacaacccgacaggctacacacctggggcagccgagggagacgccatcgtcgcagcgatcaaggatgcggccgaagcgggaatcaatgtcgttgtggttacggatgatgcgtatttcggcctgttctttgaagattcgctcaaggaatcgctgtttggccgcctggccgatctgcatccgcgcgtgctggcggtgaaggtggatggagccacgaaggaggaattcgtctggggattccgtgtcggcttcattacctatgcttcggagaacaaggacgtgctggatgccctggagcagaagacgctcggcatcatccgcgcaaccatctccagcggtccccacccttcgcagacctttgtgctggatgcgttgaaggcaccgggattcaaggagcagaaggaagagaagcttcagattatgaaaggccgcgccaataaagtgaaggacattctggacagcggcaaatatagcgaagcatgggactactacccgttcaactccggatacttcatgtgtctgaagctcaagacggtccaggctgaagcgctccgctcccatctgattcacgagtacgggatcggcaccattgccttgggcgaacatgatctgcggatcgcattctcttgcattgaggagccatatttggaggatctgtttgatttgattcaccagggtgttcaggatctgcagcaggcgtaatcacgcagtgaccggacacacgcggtgatgatcgat

SEQ ID NO: 12861 - protein, 432 aa, Bacillus circulans
MNPLAGQLNEKLQAGNPHVFDMLSTLGKELYFPKEGILSQSAEAAAHAKKYNATIGIATEGGIPMHLGVIQEKLSAFAPKDLYPYAPPAGKPELRSLWRDKMLEENPSLQGKSFGNPIATNALTHGLSIVADLFVDEGDAVIYPDKNWENYDLTFGVRRHGVNVNFPLFTSEMTFNAAGLRDALLAQKDKGKAVVILNFPNNPTGYTPGAAEGDAIVAAIKDAAEAGINVVVVTDDAYFGLFFEDSLKESLFGRLADLHPRVLAVKVDGATKEEFVWGFRVGFITYASENKDVLDALEQKTLGIIRATISSGPHPSQTFVLDALKAPGFKEQKEEKLQIMKGRANKVKDILDSGKYSEAWDYYPFNSGYFMCLKLKTVQAEALRSHLIHEYGIGTIALGEHDLRIAFSCIEEPYLEDLFDLIHQGVQDLQQA

SEQ ID NO: 12862 - DNA, 1578 bp, Oryza sativa (rice)
  CDS (20)..(1312)
ctcctccgatcgcgcgcgcatggcgatgtcacgagcggccgccgctgccgcggggactcccgtggcgcggcggcgattgatgggggccgtggcggcgaggtcgatggcgtcgtggttcggccacgtggaaccggccgccaaggaccccatcctcggcgtcaccgaggcgttcctcgccgacccctccccggacaaagtcaacgtcggcgtcggcgcgtaccgggacgacagcgggaagcccgtggtgctggagtgcgtgcgcgaggcgggacggcggatcgccgggagcatgaacatggagtaccttccaatgggtggaagcataaagatgattgaagaatcacttaaactggcctatggggagaactgtgagttcatcaaggacaagaggatcgcagcagtgcaggctctttcaggaactggtgcatgtcgcctctttgcagatttccagaagcgtttcttgccagattcacagatttatatacccacacctacatgggccaaccatcacaatatttggagggatgcccaagtaccacaaaagacatttacctattaccatccagagtcaagaggacttgactttgcaggcctaatggatgatatcaagaatgctccagatggttcattctttttgcttcatgcttgtgcgcataatcccactggagtagatccttcagaagaacaatggagggagatatctcatcagttcaaggtgaagaaacattttccattcttcgacatggcataccaaggatttgctagtggtgatccagagagagatgccaaggcaattcgaatatttcttgaagatggacatcaaattggatgtgcacagtcatatgcgaaaaacatgggactttatggacaaagagcaggatgccttagtattctatgtgatgatgagatgcaagcagttgctgttaagagccagttacaacagattgctagacctttgtacagcaacccacccgttcatggtgcattaattgtttcaactattcttggtgatccggagttgaaaagtttatggctgaaagaggtcaagggtatggctgatcgtatcattggaatgcgaacagcactcaaagagaaccttgaaaagttgggttcaccaatgtcatgggaacatatcactaatcagattggaatgttctgctacagtggtatgacacctgaacaagtcgatcgcttgacaaaagagttccatatctacatgactcgtaacgggcggataagcatggctggagtaacaacaggaaatgttgcctatctggctaatgctattcatgaggttaccaagacaaagtgagagtgttggagacattcctatcatcattttcagtacctttttaccgaccgcaaaatgggtcaaatggtgaaataaaattgtagtccgatatgatgtgaaataaaatggctggtaagctagaaaagggcaagtttattttttgaggacaagacttttgctgtaccagtgaaaacattttttaggacaagactttacagttagaacgaacgttctaactgtgacagtgtcatgctttgtaaaggaagtgtacctttccaccgatgggc

SEQ ID NO: 12863 - protein, 430 aa, Oryza sativa (rice)
MAMSRAAAAAAGTPVARRRLMGAVAARSMASWFGHVEPAAKDPILGVTEAFLADPSPDKVNVGVGAYRDDSGKPVVLECVREAGRRIAGSMNMEYLPMGGSIKMIEESLKLAYGENCEFIKDKRIAAVQALSGTGACRLFADFQKRFLPDSQIYIPTPTWANHHNIWRDAQVPQKTFTYYHPESRGLDFAGLMDDIKNAPDGSFFLLHACAHNPTGVDPSEEQWREISHQFKVKKHFPFFDMAYQGFASGDPERDAKAIRIFLEDGHQIGCAQSYAKNMGLYGQRAGCLSILCDDEMQAVAVKSQLQQIARPLYSNPPVHGALIVSTILGDPELKSLWLKEVKGMADRIIGMRTALKENLEKLGSPMSWEHITNQIGMFCYSGMTPEQVDRLTKEFHIYMTRNGRISMAGVTTGNVAYLANAIHEVTKTK

SEQ ID NO: 12864 - DNA, 1334 bp, Paracoccus denitrificans
  CDS (131)..(1315)
cgggggtgacggcggccgtgctgttcctggcgcttgaacgcatcgggcaccgggaccattcgctttatgacggaagctgggccgaatggggcaggttccccgaccttaaaatcgcaaccggagacgcgtgatgctgggcaatctgaaaccgcaggcccccgacaagatcctggccctgatgggcgaattcagggccgatccccgccagggcaagatcgacctgggcgtgggggtctacaaggatgccaccggccacaccccgatcatgcgggccgtccacgccgccgagcagcgcatgctggaaaccgagaccaccaagacctatgccggcctctcgggcgagcccgagttccaaaaggccatgggcgagctgatcctgggcgacggactgaaatccgagaccaccgcgacgctggcgacggtcggcggcaccggcgccctccggcaggcgctggaactggcgcgcatggcgaacccggacctgcgggtcttcgtcagcgatccgacctggccgaaccatgtctcgatcatgaatttcatgggcctgccggtgcagacctatcgctatttcgatgccgagacccgcggcgtcgatttcgagggcatgaaggccgacctcgccgccgcgaaaaagggcgacatggtgctgctgcacggctgctgccacaacccgaccggcgccaacctgacgctggatcaatgggccgagatcgcctcgatcctggaaaagaccggcgcgctgccgctgatcgacctggcctatcagggcttcggcgacgggctggaagaggacgcggccggcacccggctgatcgcctcgcgcatccccgaggtgctgatcgcggcctcgtgcagcaagaacttcggcatctaccgcgaacgcaccggctgcctgctggcgctttgcgccgatgcggcgaccagggagctggcgcagggcgccatggccttcctgaaccgccagacctattccttcccgcccttccacggcgccaagatcgtctcgaccgtgctgaccacgcccgaactgcgcgccgactggatggccgagctggaagcggtgcgcagcggcatgctgcgcctgcgcgagcaattggcgggcgagttgcgcgatctcagcggttcggaccgtttcggcttcgtggccgagcatcgcggcatgttctcgcgcctgggcgccacgcccgaacaggtcaagcgcatcaaggaagagttcggcatctacatggtgggcgattcgcgcatcaacatcgccgggctgaacgacaacaccatcccgatcctggcccgcgctatcatcgaggtgggggtctaagccaccgcaagggcgccgg

SEQ ID NO: 12865 - protein, 394 aa, Paracoccus denitrificans
MLGNLKPQAPDKILALMGEFRADPRQGKIDLGVGVYKDATGHTPIMRAVHAAEQRMLETETTKTYAGLSGEPEFQKAMGELILGDGLKSETTATLATVGGTGALRQALELARMANPDLRVFVSDPTWPNHVSIMNFMGLPVQTYRYFDAETRGVDFEGMKADLAAAKKGDMVLLHGCCHNPTGANLTLDQWAEIASILEKTGALPLIDLAYQGFGDGLEEDAAGTRLIASRIPEVLIAASCSKNFGIYRERTGCLLALCADAATRELAQGAMAFLNRQTYSFPPFHGAKIVSTVLTTPELRADWMAELEAVRSGMLRLREQLAGELRDLSGSDRFGFVAEHRGMFSRLGATPEQVKRIKEEFGIYMVGDSRINIAGLNDNTIPILARAIIEVGV

SEQ ID NO: 12866 - DNA, 1677 bp, Panicum miliaceum (proso millet)
  CDS (84)..(1370)
cagagaccaagcccaaaaagcccacagctttcctccccctccccctccccggcgccgcccagctcctccacctccgtcccggcatggcggcgctgtcccgcgcggcctcctgcttgacccggcggccgcagatgcagccgtcgaggctgcaggcggcgagggcgatggcgtcgtcgctgttcggccacgtcgagccggcgcccaaggaccccatcctcggcgtcaccgaggcctacctcgccgacccctcgcccgacaaggtcaacgtcggcgtcggcgcctaccgggacgacaacggcaaacccctcgtgctcgactgcgtgcgcgaggccgagcgccggattgccggcaacctcaacatggagtacctcccaatgggaggcagtgtaaagatgatcgaagaatcgctgaagctggcatacggagaggattccgaactcatcaaagacaagaggatcgcggcagtgcaggcgctttcgggcactggtgcctgtcggctctttgctgatttccaaaagcgattcttgcccgattcgcaaatctatatacctacacccacgtggtccaaccatcacaatatttggagggatgctcaagtgccacagaaggcatacacatactaccatccagagtcaagagggcttgattttgcaggattaatgaatgacatcaagaatgctccagatggttcgttctttatgctccatgcatgtgctcataatcctactggagtagatcctacagaggaacaatggagagaaatatcccatcagttcaaggtgaaaaaacattttccattctttgacatggcataccaagggtttgccagcggtgatccagagagagatgctaaggcaatccgaattttccttgaagatggacaccaaattggatgtgctcagtcatacgcaaagaacatgggactttatggacagagagtaggatgcctgagtattttgtgtgaggatgagatgcaagcagttgctgtcaagagccaactgcaacagattgcaagaccaatgtacagcaacccacctgttcatggtgcacttgttgtttctataatcctcaatgatccagaattgaagagtttatggttaaaagaggtcaagggtatggctgatcgtatcattggaatgcggacggcacttaaggaaaatcttgaaaagctaggttcatctttgtcatgggagcacatcactaatcagattggaatgttctgctacagtgggatgacacctgaacaagttgaccggttgacaaatgaattccatatttacatgacccgcaacgggaggataagcatggctggtgtaacgacacgaaatgttggttacttggcaaatgctattcacgaggttaccaaatagaattgagttcggccctcctaccctcgtcggccgatgaaatgaggctttcaagtggcttttttggtgcctgacatatcaacattatcattctcgagaaataagttaagcctgttggggctgtccaaagcatgcccggcgcttcagccacttcagttgcggattagtgaaaatgcatattctgtcaaccagatgctgtgaggattgacaacgataagccatgacatatcctaacaggcttgttctactcgattttgttgcaacttctcagtgagaatttttaccaaagctgctgctaaaaaaaaaaaaa

SEQ ID NO: 12867 - protein, 428 aa, Panicum miliaceum (proso millet)
MAALSRAASCLTRRPQMQPSRLQAARAMASSLFGHVEPAPKDPILGVTEAYLADPSPDKVNVGVGAYRDDNGKPLVLDCVREAERRIAGNLNMEYLPMGGSVKMIEESLKLAYGEDSELIKDKRIAAVQALSGTGACRLFADFQKRFLPDSQIYIPTPTWSNHHNIWRDAQVPQKAYTYYHPESRGLDFAGLMNDIKNAPDGSFFMLHACAHNPTGVDPTEEQWREISHQFKVKKHFPFFDMAYQGFASGDPERDAKAIRIFLEDGHQIGCAQSYAKNMGLYGQRVGCLSILCEDEMQAVAVKSQLQQIARPMYSNPPVHGALVVSIILNDPELKSLWLKEVKGMADRIIGMRTALKENLEKLGSSLSWEHITNQIGMFCYSGMTPEQVDRLTNEFHIYMTRNGRISMAGVTTRNVGYLANAIHEVTK

SEQ ID NO: 12868 - DNA, 1659 bp, Panicum miliaceum (proso millet)
  CDS (84)..(1370)
cagagaccaagccccaaaagcccacagctttccttcccctccccctccccggcgccgcccagctcctccacctccgccccggcatggcggcgctgtcccgcgcggcctcctgcttgacccggcggccgcagatgcagccgtcgaggctccaggcggcgagggcgatggcgtcgtcgctgttcggccacgtcgagccggcgcccaaggaccctatcctcggcgtcaccgaggccttcctcgccgacccctcgcccgacaaggtcaacgtcggcgtcggcgcctaccgggacgacaacggcaagcccctcgtgctcgactgcgtgcgcgaggccgagcgccggattgccggcaacctcaacatggagtacctcccaatgggaggcagtataaagacgatcgaagaatcgctgaagctggcgtatggagaggattccgaacacatcaaagacaagaggatcgcagcagtgcaggcgctttcgggcactggtgcctgtcggctctttgctgatttccaaaagcgattcttgcccgattcgcaaatctacatacctacaccaacgtggtccaaccatcacaatatttggagggatgctcaagtgccacagaagacattcacatactaccatccggagacgagagggcttgattttgcaggattaatgaatgacatcaagaatgctccagatggttcattctttttgctccatgcatgtgctcataatcctactggagtagatcctacagaggaacaatggagagaaatatcccatcagttcaaggtgaaaaaacattttccattctttgacatggcataccaagggtttgccagcggtgatccagagagagatgctaaggcaatccgaattttccttgaagatgggcaccaaattggatgtgctcagtcgtacgcaaagaacatgggactttatggacaaagagtaggatgcctgagtattttgtgtgaggatgagatgcaagcagtttctgtcaagagccaactgcaacagattgcaagaccaatgtacagcaacccacctgttcatggtgcacttgttgtttctataatcctcagtgatccagaattaaagagtttatggttaaaagaggtcaagggtatggctgatcgtatcattggaatgcggacggcacttaaggaaaatcttgaaaagctaggttcatctttgtcatgggagcacatcactaatcagattggaatgttctgctacagtgggatgacacctgaacaagttgaccggttgaccaatgaattccatatttacatgacccgcaacgggaggataagcatggctggtgtaacgacaggaaatgttgcttacttggcaaatgctattcacgaggttaccaaataattgactttggctctcctaccctcgttggccgatgaaatgaggctttcaagtgacactttggtgcctgacgtatcaacattatcattctcgagaaataagttaagcctgttggggctgtccaagggcgaatttcacatacatgtacgagaactatagatgtgaaacttcagtcttgatagctacatgatcctgtttattttctttttctttcttttttccccatcttgtcatggcaatttttacacttagctgcaaatggttgtagcatgatctacagttctgaagaaaa

SEQ ID NO: 12869 - protein, 428 aa, Panicum miliaceum (proso millet)
MAALSRAASCLTRRPQMQPSRLQAARAMASSLFGHVEPAPKDPILGVTEAFLADPSPDKVNVGVGAYRDDNGKPLVLDCVREAERRIAGNLNMEYLPMGGSIKTIEESLKLAYGEDSEHIKDKRIAAVQALSGTGACRLFADFQKRFLPDSQIYIPTPTWSNHHNIWRDAQVPQKTFTYYHPETRGLDFAGLMNDIKNAPDGSFFLLHACAHNPTGVDPTEEQWREISHQFKVKKHFPFFDMAYQGFASGDPERDAKAIRIFLEDGHQIGCAQSYAKNMGLYGQRVGCLSILCEDEMQAVSVKSQLQQIARPMYSNPPVHGALVVSIILSDPELKSLWLKEVKGMADRIIGMRTALKENLEKLGSSLSWEHITNQIGMFCYSGMTPEQVDRLTNEFHIYMTRNGRISMAGVTTGNVAYLANAIHEVTK

SEQ ID NO: 12870 - DNA, 1755 bp, Glycine max (soybean)
  CDS (73)..(1464)
gtttccttcatcttcttcttcttcttctatctctctacaacacacttttttaagtgattcgttcgcagaaacatggcttcttcgtttctatccgcagcttcgcacgctgtctcaccctcttgttctctgtccaccacgcacaagggaaagcccatgcttggaggcaacactttgagatttcacaaaggacccaattccttctctagttcaaggtctagaggtcggatctctatggctgttgcagttaatgtatctcggtttgaaggcatacctatggctcctcctgatccaattctcggagtttccgaggcgtttaaggcagacaatagtgatgtcaagctcaatcttggagttggggcatacagaacagaagaactacagccatatgtgcttaatgttgttaagaaggcagagaatcttatgctggagagaggggataacaaagagtatctcccaattgagggtttggcagcatttaataaggcaactgcagagttgttactcggagcagacaacccagcaatcaaacagcaaagagttgccactgtccaaggtctttctggaactggttctctgcgactaggtgcagctctgatagagcgatattttcctggggcaaaagttttgatatcagctcctacctggggtaatcacaagaatattttcaatgatgctagtgtcccatggtctgagtaccgatattatgatcccaagacagttgggttggattttgagggcatgattgaagatataaagtcagctccggaaggatcttttatcttacttcatggatgtgctcataatcctactggtattgatccaacacctgaacagtgggaaaaaatagctgatttaattgaagaaaagaaccacattcccttttttgatgttgcttaccaggggtttgctagtggaagccttgatgaagatgcagcttctgtgagactgtttgtggcacgtggcatcgaggttcttgtagctcaatcttacagtaaaaatctcggtctctatgctgaaaggattggagcaatcaatgtgatttcatcgtcaccagaatctgcagcaagggaaacgagccaactgaaaaggattgcccgaccaatgtactctaatccaccggtacacggggctaggatagttgccgatgttgttggaaacccagttctctttaatgaatggaaagcagagatggaaatgatggctggaaggataaagaatgttagacagcagctatatgatagtattacttcaaaagacaaaagtggaaaggattggtcattcatacttaagcagataggcatgttctcattcactggcttgaacaagaaccagagtgacaacatgacaaacaagtggcacgtatacatgacaaaggatggaaggatttccctggcaggattgtcgttggctaaatgcgaataccttgcggatgctattattgattcatatcataatgtcagctgaaactcaattagatatttttggtgagtgttatacccaatcggagcgattggcatacatgaaaataatttagaataatttatgtatgcattatgtgtgtacatatgtaccctcaaagtaccctaggaaattttttttaactttgaaacaagttgactcaaagtattgatgcgtaatgagtcaggttctcagacttaaagctagttgaatcgaagtactgatgcatagtgaggatgtttatcatttcatatgggtgagattggataaatcatggtaacaatagtttcgttaaaa

SEQ ID NO: 12871 - protein, 463 aa, Glycine max (soybean)
MASSFLSAASHAVSPSCSLSTTHKGKPMLGGNTLRFHKGPNSFSSSRSRGRISMAVAVNVSRFEGIPMAPPDPILGVSEAFKADNSDVKLNLGVGAYRTEELQPYVLNVVKKAENLMLERGDNKEYLPIEGLAAFNKATAELLLGADNPAIKQQRVATVQGLSGTGSLRLGAALIERYFPGAKVLISAPTWGNHKNIFNDASVPWSEYRYYDPKTVGLDFEGMIEDIKSAPEGSFILLHGCAHNPTGIDPTPEQWEKIADLIEEKNHIPFFDVAYQGFASGSLDEDAASVRLFVARGIEVLVAQSYSKNLGLYAERIGAINVISSSPESAARETSQLKRIARPMYSNPPVHGARIVADVVGNPVLFNEWKAEMEMMAGRIKNVRQQLYDSITSKDKSGKDWSFILKQIGMFSFTGLNKNQSDNMTNKWHVYMTKDGRISLAGLSLAKCEYLADAIIDSYHNVS

SEQ ID NO: 12872 - DNA, 2114 bp, Saccharomyces cerevisiae
  CDS (466)..(1821)
cttgctgtaactaattggtttatatttaaatatttcactttttaaagggcgtttgcatgcgaccatcgtcgatgattcatattgttcggatgcggaagatggcttccatgagttttgcacgccgtctcatgtgattgttggagtcatagctcgcatatcttcctattgtcagatgtaatatcgacggaaatggcatcttggagtatggaagcactattctgctttgctccaatatttaggatgccgcatttttcatatttttttttacatttttcgcttacgtatataaattgctagcaagtattcgctctctctgtcttggttatctaattgctaaccgtcgcaattgaaaagaaaaaaaaaatacagaatagacgatagcggattgaacgatagcatactattgagtgcgttttcccttctcatttgaaaattactatccgtttttcactgccgaaagacttgatgttgaggacgaggcttactaattgcagtctatggaggccctactacacgtcatcgcttagtagagtaccaagagcacctccagataaagtcttggggttatctgaacacttcaaaaaggtaaaaaatgttaacaaaattgacctgaccgtaggaatatataaagatggttggggcaaagtgacgacgtttccctccgttgcaaaagctcaaaaattgattgaatctcatttagagttgaataagaatctttcatatttaccaataacaggttccaaagaatttcaggaaaacgttatgaaatttttgttcaaggaatcatgtccgcagtttgggccattttatttagcccatgatagaatcagctttgttcagactttgagtggtacaggcgccctagctgtagcagctaaattcttggcattatttatttcaagagatatttggatacctgacccatcatgggcaaatcataagaacatttttcagaacaatggttttgaaaatatttaccggtattcctattataaggacggtcagatagacatcgacggatggattgagcaattgaaaacctttgcatataacaaccagcaagaaaacaataagaacccaccttgcataatcttgcatgcgtgttgtcacaaccctacaggtctcgacccaactaaagagcaatgggaaaagattatagatactatatatgagctaaaaatggtacccattgttgatatggcttatcagggtttagagtctggtaacttactaaaggacgcatatttattgaggctatgtctcaatgtaaataaatatccaaattggagtaacggtatctttctttgtcaatcttttgccaagaacatgggcctttatggtgaacgagttggttccttaagcgttatcacgccggcaactgcgaacaatggaaagttcaaccctctacaacagaaaaactcattgcagcaaaatattgactcccaattaaaaaagattgtcagaggtatgtattcttctccaccaggatacggttctcgtgtggtaaatgtagtattatcagatttcaaattgaaacagcaatggttcaaggatgttgatttcatggttcagagattgcatcacgtcagacaggagatgtttgaccgtctagggtggccggatcttgtaaatttcgcacaacagcacggtatgttttactatacaaggtttagtccaaagcaagtcgaaatattgagaaacaattacttcgtctatttaacaggtgatggtagattgtcgcttagcggagtcaatgattcgaacgttgattacttatgtgaatctcttgaagcagtctcgaaaatggacaaactcgcataattttttcaccttacagttcacctttgtctttatttttttattacttttcccttctcattttgccacacaataatttatagaatataataattttttgtaataattaataaaccttttttttatctactctatatacacttttcagataactagattggattaattcgtgatcgaactagttattaaattttaaatgaaaagaaagctagcgctagccaactattttaattacggtggcagtgcatcatatccttacatttcattttaggtttcctatgttttcttctttcaaa

SEQ ID NO: 12873 - protein, 451 aa, Saccharomyces cerevisiae
MLRTRLTNCSLWRPYYTSSLSRVPRAPPDKVLGLSEHFKKVKNVNKIDLTVGIYKDGWGKVTTFPSVAKAQKLIESHLELNKNLSYLPITGSKEFQENVMKFLFKESCPQFGPFYLAHDRISFVQTLSGTGALAVAAKFLALFISRDIWIPDPSWANHKNIFQNNGFENIYRYSYYKDGQIDIDGWIEQLKTFAYNNQQENNKNPPCIILHACCHNPTGLDPTKEQWEKIIDTIYELKMVPIVDMAYQGLESGNLLKDAYLLRLCLNVNKYPNWSNGIFLCQSFAKNMGLYGERVGSLSVITPATANNGKFNPLQQKNSLQQNIDSQLKKIVRGMYSSPPGYGSRVVNVVLSDFKLKQQWFKDVDFMVQRLHHVRQEMFDRLGWPDLVNFAQQHGMFYYTRFSPKQVEILRNNYFVYLTGDGRLSLSGVNDSNVDYLCESLEAVSKMDKLA

SEQ ID NO: 12874 - DNA, 1257 bp, Medicago sativa (alfalfa)
  CDS (1)..(1257)
atggcttctcaaaacatcactccttctccaaccgcttcttctgattccgtcttcgctcatctcgttcgtgctcctgaagatcctatcctcggtgtaactgtcgcttacaacaaggatccaagcccaattaagctcaacttgggtgttggtgcttaccgaactgaggaaggtaaaccccttgtgttggatgttgtgaggcgagttgaacgccaactattgaatgacatgtcacgcaacaaggagtatattccaattgttgggctcgctgattttaacaaattgagtgctaagcttatttttggtgcagacagccctgctattcaagagaacagggttaccactgttcaaggcttatctggtactggttcgctaagagttgggggtgaatttctagctaaacactatcatcaacgcattatatacttgccaacacctacttggggcaatcatacaaaggttttcaacttggcaggtttaactgtcaaaacatatcgctactatgctccagcaacacgagggcttgactttcaaggacttcttgaggatcttggttctgccccatctggatctgttgttttgctacatgcatgtgcacataaccctactggtgttgatccaacgcttgaacaatgggagcagattagacagctgataagatcaaaatctttgttacctttctttgacagtgcttatcagggttttgccagtggaagtctagatgcagatgcacagcctgttcgtttgtttgttgctgatggtggagaattgctggtagcccagagttatgcgaagaacatgggtctttatggtgaacgtgttggtgccttgagcattgtcagcaagtcagcggatgtttcaagcagggttgagagccaactgaaacttgtgattaggcccatgtactcaagtcctcctattcatggtgcatccattgtggccgccattctcaaggacagggatttgtacaatgactggactattgagttgaaggcaatggctgatcgcattatcaatatgcgccaacaactttttgatgctttacgtgctagaggtacaccaggtgattggagtcacattatcaagcaaattggaatgtttactttcacagggttgaatcctgagcaagtttccatcttgactaaagagtaccatatatacctgacatctgatgggaggattagcatggctggtttgagctccaaaacagtcccacatctggctcatgcaatacatgcagttgtaacccgagttgcttaa

SEQ ID NO: 12875 - protein, 418 aa, Medicago sativa (alfalfa)
MASQNITPSPTASSDSVFAHLVRAPEDPILGVTVAYNKDPSPIKLNLGVGAYRTEEGKPLVLDVVRRVERQLLNDMSRNKEYIPIVGLADFNKLSAKLIFGADSPAIQENRVTTVQGLSGTGSLRVGGEFLAKHYHQRIIYLPTPTWGNHTKVFNLAGLTVKTYRYYAPATRGLDFQGLLEDLGSAPSGSVVLLHACAHNPTGVDPTLEQWEQIRQLIRSKSLLPFFDSAYQGFASGSLDADAQPVRLFVADGGELLVAQSYAKNMGLYGERVGALSIVSKSADVSSRVESQLKLVIRPMYSSPPIHGASIVAAILKDRDLYNDWTIELKAMADRIINMRQQLFDALRARGTPGDWSHIIKQIGMFTFTGLNPEQVSILTKEYHIYLTSDGRISMAGLSSKTVPHLAHAIHAVVTRVA

SEQ ID NO: 12876 - DNA, 1368 bp, Medicago sativa (alfalfa)
  CDS (1)..(1368)
atggcatcatcttcattactctcctctgtaccttcacactctgcttcactttcgatcctcgacaccaacatcaagggaaagcttaagcttggaatcaacaacttctccaatttaaggtcatctggtcggatctgcatggctgttgcgactaatgtttctcggtttgagggtataccgatggctcctcctgatccaattcttggagtttctgaagcatttaaagcagacacgaatgatgtcaagctcaatcttggagttggggcctacagaacggaagaactacaaccatatgtgcttaatgttgtgaaaaaggcagaaaatcttatgctggagagaggggaaaacaaagagtatctccccattgagggtttggctgcatttaacaaggcaactgcagagttgttgctcggagcagacaatccagcaatcaaacagcaaagagttgccactgtccaaggtctttcaggaactggttctctgcgactaggtgcagctctgatagaacgatattttcctggagcaaaagttttgatatcaaatcctacgtggggtaatcacaagaatattttcaacgatgctcgagtaccatggtctgagtaccgatactatgaccccaagacagttggcttggattttgagggcatgatagaagatataaagtcggctccggaaggaacttttgtgctacttcatggatgtgcacataaccctactggtattgatccaacaccagaacagtgggaaaaaatagctgatgtaattcaacaaaagaaccactttccattttttgatgttgcttaccagggttttgctagtggaagccttgatgaagatgcggcttctgtgagattgtttgagtcacgtggcatggaagttcttgtagctcagtcatacagtaaaaacctcggcctttatgctgaaagggttggagctattaatgtcatttcctcatcaccggaatctgcaacaagggtaaagagccaattgaaaaggcttgctcgaccaatgtactctaatccaccagttcacggggctaggattgttgctaatattgttgggactccagctctctttgatgaatggaaagcagaaatggaaatgatggctggaaggataaaaactgttaggcaggcgctgtatgatagtatttcttcaaaagacaaaagtggaaaggattggtcattcatactcaagcagataggcatgttctcattcacaggcttgaacaagagccagagtgacaatatgacaaataagtggcatatatacatgacaaaggatggaaggatttccctggcaggattgtccctggccaaatgtgaatacctggcagatgctattatcgattcatatcataatgtcagctga

SEQ ID NO: 12877 - protein, 455 aa, Medicago sativa (alfalfa)
MASSSLLSSVPSHSASLSILDTNIKGKLKLGINNFSNLRSSGRICMAVATNVSRFEGIPMAPPDPILGVSEAFKADTNDVKLNLGVGAYRTEELQPYVLNVVKKAENLMLERGENKEYLPIEGLAAFNKATAELLLGADNPAIKQQRVATVQGLSGTGSLRLGAALIERYFPGAKVLISNPTWGNHKNIFNDARVPWSEYRYYDPKTVGLDFEGMIEDIKSAPEGTFVLLHGCAHNPTGIDPTPEQWEKIADVIQQKNHFPFFDVAYQGFASGSLDEDAASVRLFESRGMEVLVAQSYSKNLGLYAERVGAINVISSSPESATRVKSQLKRLARPMYSNPPVHGARIVANIVGTPALFDEWKAEMEMMAGRIKTVRQALYDSISSKDKSGKDWSFILKQIGMFSFTGLNKSQSDNMTNKWHIYMTKDGRISLAGLSLAKCEYLADAIIDSYHNVS

SEQ ID NO: 12878 - DNA, 1514 bp, Panicum miliaceum (proso millet)
  CDS (47)..(1276)
agcggcagcagcagacacctccgccaccctcgaatccttccccaccatggcgtcgcaggtggcctccgtcttcgcaggcatcgcgcaggccccggaggaccccatcctcggggtgacggttgcgttcaacaaggatcccagccccgtgaagatcaacctcggcgtcggcgcctaccggaccgaggaagggaagcccctcgtgctgaatgtggtcaggcgcgccgagcagatgctgatcaatgacccgtctcgtgtgaaggagtacctaccaatcactggtttggctgaatataataagctgagcgctaagcttatcttcggtgctgacagccctgctattcaggagaatagggttgctacagtgcagtgcctatcaggaactggttctttaagagtgggaggtgaatttcttgcaaagcactaccatgagcgcactatctacatcccagtaccaacctggggaaaccacccaaaagtcttcaccctagctggattgactgtcaggagctaccgctactatgatcctgcaactcgtggtcttgacttcaacgggctcttagaagacctcagttctgctcctttaggatcaattgtactgctgcatgcttgcgcccataaccctaccggggtagatcctaccattgatcagtgggaacagattaggcagctgatgagatcaaaatcattgcttccgttctttgacagtgcttatcaaggctttgcgagtggaagtcttgacaaagatgcccagccagtgcgcatgtttattgctgatggtggtgaattgctcatggctcagagctacgctaagaacatgggaatgtatggagagcgtgttggtgctttgagcattgtatgtggaagtgctgatgtagctgctagggttgaaagtcaactcaagcttgtgattaggcctatgtattcaagccctcctcttcatggtccctctgtcgtggcaaccatactcaaggacagtgagatgttccacgaatggactgtggaactgaaggccatggctgataggataattagcatgaggcaacagctatttgatgcgctaaaatccagaggaactcctggagattggagccacatcattaagcaaattggtatgtttactttcactgggctcaatagcgagcaagtggccttcatgaggcaagaataccacatttacatgacatccgacgggaggatcagtatggctggtttgaacatgaagaatgtgccccatcttgcagatgccatacacgctgcagttactcaactgaagtgagtggcagcatctcgtcttcctccatggataaaatccaaatcacctacagcagtgtcctgaggactcagctagtggtatttactggcagaactcctgtaatttgccttttaatagacatgtttgactctgtcgtcggagcagttttctactgacggattcaaacatcatggtgctttcagacaccaaatataaaaaaaacgcacatgcatatgttttttgcaaaaaaaaaaaaaaaaaa

SEQ ID NO: 12879 - protein, 409 aa, Panicum miliaceum (proso millet)
MASQVASVFAGIAQAPEDPILGVTVAFNKDPSPVKINLGVGAYRTEEGKPLVLNVVRRAEQMLINDPSRVKEYLPITGLAEYNKLSAKLIFGADSPAIQENRVATVQCLSGTGSLRVGGEFLAKHYHERTIYIPVPTWGNHPKVFTLAGLTVRSYRYYDPATRGLDFNGLLEDLSSAPLGSIVLLHACAHNPTGVDPTIDQWEQIRQLMRSKSLLPFFDSAYQGFASGSLDKDAQPVRMFIADGGELLMAQSYAKNMGMYGERVGALSIVCGSADVAARVESQLKLVIRPMYSSPPLHGPSVVATILKDSEMFHEWTVELKAMADRIISMRQQLFDALKSRGTPGDWSHIIKQIGMFTFTGLNSEQVAFMRQEYHIYMTSDGRISMAGLNMKNVPHLADAIHAAVTQLK

SEQ ID NO: 12880 - DNA, 1717 bp, Glycine max (soybean)
  CDS (54)..(1337)
ctctccctctctgttcgcactctgtctttcccctgtttccgcgtcactgagtcatggcgattcgcaactcgctcaccggccaattcctccgccgcagctccgtcgccggagcaaggctcatgtcttcttcgtcctcatggttccggagcatcgagcccgctcccaaggatcctatcctcggagtcactgaagctttcctcgccgatcagagtccaaacaaagtcaacgtcggagtgggtgcgtatcgcgatgaccaacggaaacctgtggttttggaatgtgttagagaagcagagaggagggttgccggaagtcaattcatggagtatcttcccatgggtggaagcataaaaatgatagaagaatcgctgaagctggcatttggagacaactctgagttcatcaaggataaaagaatagctgcagtgcaggctttatctgggactggtgcatgtcgactttttgctgcatttcaacagagatttcatcctaatacccaaatctatataccagtgcctacctgggccaaccaccataacatttggagagatgctggagtgcctatgaagacattccgttactatcaccctgagtctagaggattggatttttcaggactgatggatgacataaagaatgctccagatggttccttctttctgcttgtgcttactgctcataatcctactggagtagatccttcagaagaacaatggagagagatctcttcccagataaaggctaagggtcatttccctttctttgacatggcatatcaaggttttgctagtggtgatccagagagagatgcaaaagccataaagatttttcttgaggatggtcatttaataggacttgctcagtcatatgcaaaaaatatgggactgtatggccagcgagcaggaagcctgagtgtgctttgtgaagatgagaaacaagctgtggctgtaaaaagtcagttgcagctgattgctagacccatgtacagtaacccacctctccatggagcacttatagtttctactgtccttggtgatccagatttgaagaagttatggcttaaagaagtcaaggttatggcagaccgcatcatcggaatgaggactacactacgagaaaacttagaaaagaaggggtctactttgccatggcagcatataactaatcagattggtatgttctgctacagtggattgacacctgaacaggttgatcgtatgacaaacgagtttcatatttacatgacccgtaacggtcgtatcagtatggctggtcttaatacgggcaacgttggatatgtcttggacgctatccatgaggttacaaaatcattctagattattcaatcacccaacaggtgaccaaatttttgtctttggagacaaacatctcagaagtagtacccttatccaggggagcaaaataaatttaataaagtctgacaaattttcaacttgtttcggggtaagatagtgatactcttcagggtttaccttgcatattgaagacccttattgcaatacgtatccgatttatcatatccatgcaccatagattatatccatttttacagacatcttgtttagcactttaatgagcataaccctgtatcatcattttttttataaaataatttgagtagtagattgaataagggctttatttatggtgaacaggaagtacgtagcttcattccttactacactattattctgtt

SEQ ID NO: 12881 - protein, 427 aa, Glycine max (soybean)
MAIRNSLTGQFLRRSSVAGARLMSSSSSWFRSIEPAPKDPILGVTEAFLADQSPNKVNVGVGAYRDDQRKPVVLECVREAERRVAGSQFMEYLPMGGSIKMIEESLKLAFGDNSEFIKDKRIAAVQALSGTGACRLFAAFQQRFHPNTQIYIPVPTWANHHNIWRDAGVPMKTFRYYHPESRGLDFSGLMDDIKNAPDGSFFLLVLTAHNPTGVDPSEEQWREISSQIKAKGHFPFFDMAYQGFASGDPERDAKAIKIFLEDGHLIGLAQSYAKNMGLYGQRAGSLSVLCEDEKQAVAVKSQLQLIARPMYSNPPLHGALIVSTVLGDPDLKKLWLKEVKVMADRIIGMRTTLRENLEKKGSTLPWQHITNQIGMFCYSGLTPEQVDRMTNEFHIYMTRNGRISMAGLNTGNVGYVLDAIHEVTKSF

SEQ ID NO: 12882 - DNA, 1681 bp, Panicum miliaceum (proso millet)
  CDS (64)..(1437)
cttcagtacagtagtagtagcaggcccacgcctccgatccgctgctccctcgccgtccggaagatggcttccgccgccttcgccctcacctcgccggcggcccccgccatcgccgcccggtccaaggtgcttggatgggggaagaatcaggggagaaatggctgccgcgtggggatcacgaggaagaactttggccgtgttttgatggcccttgcagtggatgtttctcgttttgagggagtgccaatggctcctccagacccaattcttggggtttcagaggcctttaaagcagataaaaatgacctgaagctcaatcttggtgttggtgcctatagaacagaagagttgcagccttatgtcctcaatgtagtcaagaaggctgaaaatcttatgttggagaaaggagaaaacaaagagtatcttcctattgaaggcttagctgcatttaacaaagcaactgcagagctactgcttggagctgacaaccctgtcatcaagcaaggactggttgctacacttcaatctctctcaggcactggatcgctacgacttgccgcagcgtttatacaaagatacttccctgaagccaaagtactcatatcatcgcccacgtgggggaaccacaagaacatcttcaatgatgctagggtaccttggtcagagtaccggtactatgaccccaaaactgttgggttagattttgagggaatgatagctgacattgaggctgctcctgaaggatcttttgttctgctacatggttgcgctcacaacccaactggaatagacccaactcctgaacaatgggagaaaattgcagatgttattcaagagaaaaagcatatgcctttcttcgatgttgcgtatcagggttttgccagtggaagccttgatgaagatgcattttcagttaggctttttgttaagcgtggcatggaagtgtttgttgcacaatcttacagcaagaaccttggtctatatgcagaaaggattggggcaataaatgttgtttgctcagcaccagaagttgcagatagggtaaagagccagctgaaacgtctggcacgtcccatgtactcgaacccccctattcacggtgctaggatagttgccaatattgttggtgatccaactatgtttggtgaatggaagcaggagatggaacaaatggcagggcggatcaagaatgtaaggcagaagctctacgatagtttgtctgcaaaggacaagagtggcaaggactggtctttcattctgagacagattggcatgttctcctacactggcttgaacaaagcacagagtgataacatgacagataaatggcatgtttatatgaccaaggatgggcggatttcgttagctggactttccctggctaagtgcgattatcttgccgacgccatcatcgattccttccacaatgtcagctagatagaggcctgaggattcaggtgaagctattccggttgagtccttggacgcttggctgggatttttgggtccttccagctatagtttttgggtgtattacatccagtgtaatttggagaaataatttttttgtcatcacagcaaaactcaagtgcctggctgcatgtaacagtagtacgctatttacaggatcgtaaaacttaattgaataatggcactggcaatgttaattgcgccctgcgcc

SEQ ID NO: 12883 - protein, 457 aa, Panicum miliaceum (proso millet)
MASAAFALTSPAAPAIAARSKVLGWGKNQGRNGCRVGITRKNFGRVLMALAVDVSRFEGVPMAPPDPILGVSEAFKADKNDLKLNLGVGAYRTEELQPYVLNVVKKAENLMLEKGENKEYLPIEGLAAFNKATAELLLGADNPVIKQGLVATLQSLSGTGSLRLAAAFIQRYFPEAKVLISSPTWGNHKNIFNDARVPWSEYRYYDPKTVGLDFEGMIADIEAAPEGSFVLLHGCAHNPTGIDPTPEQWEKIADVIQEKKHMPFFDVAYQGFASGSLDEDAFSVRLFVKRGMEVFVAQSYSKNLGLYAERIGAINVVCSAPEVADRVKSQLKRLARPMYSNPPIHGARIVANIVGDPTMFGEWKQEMEQMAGRIKNVRQKLYDSLSAKDKSGKDWSFILRQIGMFSYTGLNKAQSDNMTDKWHVYMTKDGRISLAGLSLAKCDYLADAIIDSFHNVS

SEQ ID NO: 12884 - DNA, 1447 bp, Arabidopsis thaliana (mouse-ear cress)
  CDS (1)..(1362)
atggcttctttaatgttatctctcggttccacttctctgttaccgcgcgagattaacaaggataagctaaagcttggaacttctgcttcgaacccgttcctaaaagcaaagtcttttagcagagtgactatgacggttgcagtgaagccttctcgtttcgagggtataactatggctccaccagaccctattcttggagtcagtgaagcattcaaagctgacactaacgggatgaaactcaatcttggtgttggtgcttatcgtactgaggaactccagccttatgtgcttaatgttgttaaaaaggcggagaatttgatgttggagagaggagataacaaagagtatcttccaattgaggggttggcagcattcaacaaggctactgctgagttgctatttggagctggtcatcctgttattaaggaacaaagagtagcaacaattcagggtctttcgggaacaggttcactgcgattagcagcggctcttatagagcgttatttccctggagcaaaagttgtgatctcatcaccaacctggggtaatcacaagaatatcttcaatgatgccaaagttccgtggtccgaataccgctactatgatccaaaaacaattggtttggattttgagggaatgatagcagatataaaggaagctccagaaggatccttcatcttgcttcacggatgtgctcacaacccaactggaattgacccaacaccagaacagtgggtaaaaattgctgatgtcattcaggaaaagaaccatatcccatttttcgatgttgcataccagggctttgctagtggaagccttgatgaagatgcagcatctgtgagattatttgctgagcggggaatggagttttttgttgctcagtcatatagtaaaaatttaggtttgtatgcagaaagaattggggcaatcaatgtcgtgtgctcctcagctgatgctgctacaagggtcaagagccagttgaaaaggattgctcggcctatgtactcgaatccaccagttcatggggcgagaatcgtggccaatgtagtgggtgatgtaactatgttcagtgaatggaaagcagagatggaaatgatggcaggaagaataaagacggttagacaagagctgtatgatagcctcgtttcaaaagacaagagcgggaaggactggtccttcattctgaagcaaattggcatgttctctttcaccggcctaaacaaagctcagagcgataacatgacggacaaatggcacgtgtatatgactaaagacgggaggatatcattggccggattatctctggccaaatgcgagtatcttgctgatgcgatcatcgactcataccataacgtaagctgagcttccatctcagtagatgacaataagaaacagttttatataccctttttagcttcttcttgatctttgattgaaaccagatggc

SEQ ID NO: 12885 - protein, 453 aa, Arabidopsis thaliana (mouse-ear cress)
MASLMLSLGSTSLLPREINKDKLKLGTSASNPFLKAKSFSRVTMTVAVKPSRFEGITMAPPDPILGVSEAFKADTNGMKLNLGVGAYRTEELQPYVLNVVKKAENLMLERGDNKEYLPIEGLAAFNKATAELLFGAGHPVIKEQRVATIQGLSGTGSLRLAAALIERYFPGAKVVISSPTWGNHKNIFNDAKVPWSEYRYYDPKTIGLDFEGMIADIKEAPEGSFILLHGCAHNPTGIDPTPEQWVKIADVIQEKNHIPFFDVAYQGFASGSLDEDAASVRLFAERGMEFFVAQSYSKNLGLYAERIGAINVVCSSADAATRVKSQLKRIARPMYSNPPVHGARIVANVVGDVTMFSEWKAEMEMMAGRIKTVRQELYDSLVSKDKSGKDWSFILKQIGMFSFTGLNKAQSDNMTDKWHVYMTKDGRISLAGLSLAKCEYLADAIIDSYHNVS

SEQ ID NO: 12886 - DNA, 1523 bp, Daucus carota (carrot)
  CDS (24)..(1241)
caaaaccctagcttatacttccgatgtcttccgtcttcgctaacgtcgttcgcgctcctgaggatcctatcttaggggtcactgttgcttatcacaaagatcaaagtcctaataagttgaatttgggtgttggtgcttatcgaactgaggaaggaaaacctcttgttcttaatgttgtgaagaaagcagagcagatgcttgtaaatgatcagtctcgagtaaaagagtatcttcctattgttggactggcagactttaacaaattgagtgccaagctgattttcggcgctgatagtcctgccattcaagagaatagagtcgcaactgtccagtgcttatctggtactggctcactgagggttgggggtgaattcctggccagacattatcatgaacatacagtgtatatcccccagccaacttggggaaaccatccaaaaattttcactttagcaggcttatcggtgaagacataccgctattataatccagaaacgcgtggattggattttgaaggcatgctagaggatcttggttctgctccattgggagcaatagtgcttcttcatgcatgtgctcacaatccaaccggtgttgatccaaccattgagcagtgggagcagatcagacagctgatgagatcgaaaagcttgttacctttctttgacagtgcatatcagggttttgctagcggcagccttgacgccgatgcacagtctgttcgcatctttgttgcagatggtggtgaatgccttgcagctcagagttatgcaaagaatatgggactctatggggaacgcgttggtgccctgagcattgtttgcaagactgcagatgtggcaagcaaggttgagagccaattgaaactagttatcaggcctatgtattccagtccacctcttcatggtgcatctattgtggctgcgattctcaaagatggtgacctctataatgaatggacactggagctgaaagcaatggctgaccgaatcatcagcatgcgacaggagctctttaatgctttacaagcaaaaggaacaccaggtgactggagtcacattgtcaagcaaattggaatgtttacattcactgggttaaactctgagcaagtcaccttcatgaccaatgagtatcatatatatttgacatctgatgggcggatcagcatggcaggtcttagttcccgaacagttcctcatcttgcagatgctattcatgctgcagttactggcaaggcctagatactgttgtgttatatatacatgtttcatgagatttttgggtagatgtctgaaaaccttgtttggagctcactgatcttcagttagctttaataaagatgtacatgtcgcctggagccaaatggttaggttttatctgtgagctagcatgtctggtaagagcatgacatgacattaagcacaatataaatgcctagacagctattacaggaacatgattgacgctgagaaatgacttcgtttttgcaaaaacttttttatatatctaaatgcatcatattt

SEQ ID NO: 12887 - protein, 405 aa, Daucus carota (carrot)
MSSVFANVVRAPEDPILGVTVAYHKDQSPNKLNLGVGAYRTEEGKPLVLNVVKKAEQMLVNDQSRVKEYLPIVGLADFNKLSAKLIFGADSPAIQENRVATVQCLSGTGSLRVGGEFLARHYHEHTVYIPQPTWGNHPKIFTLAGLSVKTYRYYNPETRGLDFEGMLEDLGSAPLGAIVLLHACAHNPTGVDPTIEQWEQIRQLMRSKSLLPFFDSAYQGFASGSLDADAQSVRIFVADGGECLAAQSYAKNMGLYGERVGALSIVCKTADVASKVESQLKLVIRPMYSSPPLHGASIVAAILKDGDLYNEWTLELKAMADRIISMRQELFNALQAKGTPGDWSHIVKQIGMFTFTGLNSEQVTFMTNEYHIYLTSDGRISMAGLSSRTVPHLADAIHAAVTGKA

SEQ ID NO: 12888 - DNA, 1245 bp, Caenorhabditis elegans
  CDS (1)..(1245)
atgagcgtttccaagaagcttttctctaccgccgtgcgaggaaagtcgtggtggtcgcatgttgagatgggaccaccagatgcgattcttggagtcaccgaggccttcaaagccgattcaaacccaaagaagatcaaccttggagtcggagcttaccgtgacgatcaaggaaagccatttgttctcccatcggtcaaggaagctgaacgtcaagtgatcgctgccaatcttgataaggagtacgccggaattgttggacttcccgagttcaccaagctctctgctcaactcgctcttggagagaactctgatgtgatcaagaacaagagaatcttcaccactcagagcatttctggaactggagcccttagaatcggatctgagttcctttctaagtacgccaagaccaaggttatctaccagccaacaccaacttggggaaaccatgttccaatcttcaaatttgccggagtcgatgtcaagcaataccgctattatgacaagtccacctgtggttttgatgaaactggagcactcgctgacattgctcaaatcccggaaggatccacaatcttgcttcacgcttgtgctcacaacccaactggagttgatccatcccgtgaccagtggaagaagatctccgacattgtgaagaaacgcaacttgtttgtcttcttcgatatggcttaccaaggtttcgcttccggagatgttgacaatgacgcgttcgctgttcgttactttgtcgagcaaggacacaacattgttctctctcaatcctttgccaagaacatgggactttatggtgaacgagtcggtgctttctccgttgttacctcggacgctgatgaggctgctcgtgttgcttctcaagtcaagatccttattcgcccactctactccaacccaccagtccatggagctcgcattgcttcccgcatcctcgcggatccagctctcaacaagcaatggctcggagatgtcaagctcatggctgatcgtatcatcaccatgagaactacgctcaaggatttgctcgccaaggagggatctactcgtaattgggagcacattaccaaccaaattggaatgttctgctttactggaatcaacccacaacaagttgagaagcttatcaaggaacactctgtctacctcaccaaggacggacgtatctcggtggcgggaatttcatcgaacaatgtcgcttaccttgcccacgctctccaccaagtcaccaagtaa

SEQ ID NO: 12889 - protein, 414 aa, Caenorhabditis elegans
MSVSKKLFSTAVRGKSWWSHVEMGPPDAILGVTEAFKADSNPKKINLGVGAYRDDQGKPFVLPSVKEAERQVIAANLDKEYAGIVGLPEFTKLSAQLALGENSDVIKNKRIFTTQSISGTGALRIGSEFLSKYAKTKVIYQPTPTWGNHVPIFKFAGVDVKQYRYYDKSTCGFDETGALADIAQIPEGSTILLHACAHNPTGVDPSRDQWKKISDIVKKRNLFVFFDMAYQGFASGDVDNDAFAVRYFVEQGHNIVLSQSFAKNMGLYGERVGAFSVVTSDADEAARVASQVKILIRPLYSNPPVHGARIASRILADPALNKQWLGDVKLMADRIITMRTTLKDLLAKEGSTRNWEHITNQIGMFCFTGINPQQVEKLIKEHSVYLTKDGRISVAGISSNNVAYLAHALHQVTK

SEQ ID NO: 12890 - DNA, 1095 bp, Caenorhabditis elegans
  CDS (1)..(1095)
atgattcaaatccacatccgaaatgaagtgataatggcaaacagttatggggaaatgctcgatgtattgagagcattgctggaagattatgtgcagcgtcttgagcgtctggatcaagtgttgatccaagtgatggagctgaatcctggcgaatttcgggatcgtcagcgtctgatgcaagatatcagggacctgattcaggagaccactttccaggctcgagaagtacgcgttgcacgtcgaatggtgcgaactcttcacgaacgggaatcccaccatctcatctgtaaaaaagctggctttacgacagtcgccgaatacactttctggaattatgaggaaaagtgtgtagatattgaaaagctcctctccgatcttgaattcgcccctgcaaaatcggtcatcattcttcctgcatgtgcttacaacccgactggaatggatttgagcgaaaatcagtggaagcagatcgcccgggtcatcaagagaaaacgccttttccctttttttgacatttcttaccaaggatgtgcatctggagacccggccgccgattcttgggctatccgacactttgttagtgacggaatagaattgtttgtggctcagtcgttcgctaaaaacttattttttacgaatccgcggttgggaaatcttacagttgtcgtaaacaacgctgccgtcattcctggaataaaatctcagatgtcgcttgctatccgcattaacgcgttttatccaacagcatttggagctacaattgtacacaaggtcctctccacctcagctcgtcgtgaattttggattcagtctattcaacagatatcttctcgcatcaagcaaatgagaactgctttgtttgacgttttgagtgctctcaaaactccaggaagctgggatcatatcattcgacaaactggaatgtttagctacactggtctcacttctactcaagtcgatcacctcgttcgcaaccacaaagtcttcctcctcagcgacggacgcataaatattagtggactaaacatgaaaaacgtcgaatacgttgccaaggcaatcgacgagactgttcgtgccgtcaagagcaacgtctaa

SEQ ID NO: 12891 - protein, 364 aa, Caenorhabditis elegans
MIQIHIRNEVIMANSYGEMLDVLRALLEDYVQRLERLDQVLIQVMELNPGEFRDRQRLMQDIRDLIQETTFQAREVRVARRMVRTLHERESHHLICKKAGFTTVAEYTFWNYEEKCVDIEKLLSDLEFAPAKSVIILPACAYNPTGMDLSENQWKQIARVIKRKRLFPFFDISYQGCASGDPAADSWAIRHFVSDGIELFVAQSFAKNLFFTNPRLGNLTVVVNNAAVIPGIKSQMSLAIRINAFYPTAFGATIVHKVLSTSARREFWIQSIQQISSRIKQMRTALFDVLSALKTPGSWDHIIRQTGMFSYTGLTSTQVDHLVRNHKVFLLSDGRINISGLNMKNVEYVAKAIDETVRAVKSNV

SEQ ID NO: 12892 - DNA, 1074 bp, Caenorhabditis elegans
  CDS (1)..(1074)
atgcggctatctttctttgatggaattcatgttgcttcgccaatcaaagagctccatacatcggaactcttccagaaagaaatttgccctgtgaaaataaatcttgcaatagaagcttatcgcacggaagatggagagccgtgggttttgccagtggttcgagaaatcgaacttaaattccctcacgagcctcatcacaatcatgagtacctaccgattcttggacatgatggattctgcaaatcagccaccgctttgctactcggaaatgattctttggctatcaaagagggaagatcatttagtgttcagtgcatctctggtacaggtgccatatgtgttggagcagagtttcttgctcaagttcttagtatgaagacgatttatgtcagcaatccatgctgcctgtgctataatccaacaggaatggacccaactcgagagcaatggatacaaatggcgcaagtcatcaaacagaagaatcttttcactttttttcatattgctgatcagggattagcttctggcgacgctgatgcagatgcttgggctgttcggttctttgtcgaacagggtttggaaatgattgtctctcaatctttctcaaagaattttgggctttacaatgatcgtgttggaagccttactgtgatcgtgaacaaaccaagtcatattgcgaacctaaaatcccaactgacacttgttaatgtttctaatttttctaaccctccagcttacggagcacgtattgtgcatgagattctcaagtcgccgaagtacagagaacaatggcaaaattccattaaaatgatggcttttcgtattaagaaaacaagacaagaactgattcgagagttgaatatgcttcaaacttctggaaaatgggatcgtattactcaacaatcggggttgttcagttataccggattgacgccttgtcaagtcgaccatctcatagcccatcacaagatctaccttctcagtgacggtcgtattaatatctgcgggcttaacatgagtaacttggattatgtggctagagcaattgatgacactgtacgaacaattcattaa

SEQ ID NO: 12893 - protein, 357 aa, Caenorhabditis elegans
MRLSFFDGIHVASPIKELHTSELFQKEICPVKINLAIEAYRTEDGEPWVLPVVREIELKFPHEPHHNHEYLPILGHDGFCKSATALLLGNDSLAIKEGRSFSVQCISGTGAICVGAEFLAQVLSMKTIYVSNPCCLCYNPTGMDPTREQWIQMAQVIKQKNLFTFFHIADQGLASGDADADAWAVRFFVEQGLEMIVSQSFSKNFGLYNDRVGSLTVIVNKPSHIANLKSQLTLVNVSNFSNPPAYGARIVHEILKSPKYREQWQNSIKMMAFRIKKTRQELIRELNMLQTSGKWDRITQQSGLFSYTGLTPCQVDHLIAHHKIYLLSDGRINICGLNMSNLDYVARAIDDTVRTIH

SEQ ID NO: 12894 - DNA, 1227 bp, Caenorhabditis elegans
  CDS (1)..(1227)
atgtccttctttgacggaatcccagttgctccaccaatcgaggtgttccacaagaacaagatgtacctcgatgagacggctcccgtcaaagttaacctgacaattggagcctaccgcacagaggagggacagccatgggtgcttccagtcgttcatgagactgaagtcgaaatcgccaacgacacctcgctcaatcacgagtatcttccagttctcggtcacgagggtttccgcaaggctgccaccgagcttgtcctcggagccgaatcgccagctatcaaggaggaaagatcgtttggagtacagtgtctctctggaaccggagctcttcgtgctggagccgagtttcttgcttcagtgtgtaacatgaagaccgtctacgtgagcaacccaacatggggaaatcacaagcttgtcttcaagaaggctggtttcaccaccgtcgccgactacaccttctgggactatgataacaaacgtgtgcacattgagaagttcctctccgatcttgagtcagccccagagaagtctgtcatcattcttcacggatgtgctcacaacccaactggaatggacccaactcaggagcaatggaagttggttgccgaggtgatcaagagaaagaacctcttcaccttctttgacattgcttaccaaggattcgcatctggtgatccagctgcggacgcctgggcgatccgctactttgtagaccagggaatggagatggttgtgtcccaatcatttgccaagaactttggactttacaacgagcgtgtcggaaaccttactgtcgtcgtcaacaatccagctgtcattgccggattccagtctcaaatgtcgttggttatccgtgccaactggtccaatccaccagcacatggagcaagaattgtgcacaaggtgctcaccaccccagctcgccgtgaacaatggaaccagtctattcaagcgatgtcttctcgtatcaagcagatgagagccgccttattgcgccatttgatggatcttggcactcctggaacttgggatcacatcattcaacaaattggaatgttcagctacaccggacttacttctgcccaagtggatcacctgattgccaatcacaaagtattcctgctcagagacggccgcatcaacatttgtggtcttaacacgaaaaacgtggaatatgtcgccaaggcgattgatgagactgtgcgtgccgtgaagagcaacatctaa

SEQ ID NO: 12895 - protein, 408 aa, Caenorhabditis elegans
MSFFDGIPVAPPIEVFHKNKMYLDETAPVKVNLTIGAYRTEEGQPWVLPVVHETEVEIANDTSLNHEYLPVLGHEGFRKAATELVLGAESPAIKEERSFGVQCLSGTGALRAGAEFLASVCNMKTVYVSNPTWGNHKLVFKKAGFTTVADYTFWDYDNKRVHIEKFLSDLESAPEKSVIILHGCAHNPTGMDPTQEQWKLVAEVIKRKNLFTFFDIAYQGFASGDPAADAWAIRYFVDQGMEMVVSQSFAKNFGLYNERVGNLTVVVNNPAVIAGFQSQMSLVIRANWSNPPAHGARIVHKVLTTPARREQWNQSIQAMSSRIKQMRAALLRHLMDLGTPGTWDHIIQQIGMFSYTGLTSAQVDHLIANHKVFLLRDGRINICGLNTKNVEYVAKAIDETVRAVKSNI

SEQ ID NO: 12896 - DNA, 1350 bp, Caenorhabditis elegans
  CDS (1)..(1350)
atgctggcattcttcagaaggttcatgtcaacgactactgtaactgctcaaccagtgctcccgtggttcagaaatgtgccgctagcgcctgctgatccaattctaggagttactgaagcattcaagaaggatacgaatccgaataagattaatttaggagttggagcatatcgtgatgatcagggaaaaccattcgtgctccgagcggtccgcgaagctgagcagcaaattatagatgctaaaatggacaaagagtactcaacaatcactggagttccagaatttgcgccattggctgcgaaactcgctttcggcgacaattccgaagtgattcgcgatggaagagtcttcacaactcaatcgatatccggaactggtgctttgagaattggaggacaatttgtggaaaagtttattccatccaagactttgttttatccaacaccaacttgggctaatcatttgccagtttttagagaaaatcgaagaaccatacttttcgattttttgattttccgtaaagcaaaaaatcaaaatttccatgcacttgttgtattttttcccctaaattctggtctttcgattcaaccataccgttactacaatcaagaaactcttggatttgatgttgaaggagctctcgaagatatttcaaagatgccagaaggatctgttatacttttgcatgcttgtgcacataacccaactggtgttgatcctactaaggagcaatggaaaaagctgagccaagtgctgaaagaacgaaaaattcttccattcttcgatatggcttatcaaggatttgcatcaggagacgttgacgatgacgcatttgctcttcgtcatttcatagaacaaggacacaatgttctcgttgctcaatcatttgcaaaaaatatgggattgtacggagaacgtgttggtgcattttcgattgtttgtgattctgctgaagaagcgattcgtgttggatctcaaatgagaattatcattcgtccaatgatctcaatgccaccacttcatggagcaagaattgcttcacggattttgagtaatccagagttgaagaaatcttggctggaagatgtgaaactaatggctgaccgtatcaaatcaatgcgtacggctctaaaagacggcctgaaagctgaaggatctactctcaactgggatcatattaccaatcaaattggaatgttttgtttcactggaatcaatgagaaacaagttcaaaagctcatcaaagagcactcagtgtacttgacaaatgatggacgtatttctatttctggtattaatactggaaatgttgcatatttggctaaagctctccatgacgtcaccaagtaa

SEQ ID NO: 12897 - protein, 449 aa, Caenorhabditis elegans
MLAFFRRFMSTTTVTAQPVLPWFRNVPLAPADPILGVTEAFKKDTNPNKINLGVGAYRDDQGKPFVLRAVREAEQQIIDAKMDKEYSTITGVPEFAPLAAKLAFGDNSEVIRDGRVFTTQSISGTGALRIGGQFVEKFIPSKTLFYPTPTWANHLPVFRENRRTILFDFLIFRKAKNQNFHALVVFFPLNSGLSIQPYRYYNQETLGFDVEGALEDISKMPEGSVILLHACAHNPTGVDPTKEQWKKLSQVLKERKILPFFDMAYQGFASGDVDDDAFALRHFIEQGHNVLVAQSFAKNMGLYGERVGAFSIVCDSAEEAIRVGSQMRIIIRPMISMPPLHGARIASRILSNPELKKSWLEDVKLMADRIKSMRTALKDGLKAEGSTLNWDHITNQIGMFCFTGINEKQVQKLIKEHSVYLTNDGRISISGINTGNVAYLAKALHDVTK

SEQ ID NO: 12898 - DNA, 1230 bp, Schizosaccharomyces pombe
  CDS (1)..(1230)
atgtcagactacgggtttgcaaatattgaggaagctaaggcagatgcaatttttaaattaaatgctcaataccatcaggatgaagatcccaagaaggttaacatgagtgttggcgcctatcgtgacgatactggtaagccttggattttgcctgcagttaaaaaagcatctaaaatagtggaagaacaggcaagcttcaaccatgaatatttaccaattgctggattgcctcgtttcactaaggctgcggctgaagttcttttcagacccaatcctcatttattgtccgaggaccgtgttgcatctatgcagtcagtctctggtactggtgccaattttcttgctgctagtttcattgagactttctatgtaaagcacactggagcccatgtatacatctccaaccctacttggcctgtccatcgcactttgtgggaaaaattgggagtcactgtagatacatatccttattgggatgccaagaatagatcttttgattacgaaggcatgctaagtaccattaaatctgctcccgaaggaagtatatttttacttcatgcttgtgctcacaatcctactggtattgaccccactagggaacaatggctttctatattcgagagtctgctttctcgcaagcatctggtagtttttgacattgcttatcaaggttttgccagtggtgatctgaatcgtgactcttgggctctaaacgagtttgtcaaatataacaaggactttttcgtttgtcagtcatttgctaaaaatatgggtctttatggtgaacgtactggttgcatgcattacgttgcaaaggacgcttccactaaaaacaaggtcttatctcaattgtgtattgttcaacgtaacaccatttctaaccctcccgcttacggtgcacgtattgctgccgaaattcttaacagtcctcaattgtttgctgaatgggaacaagatttaaagactatgtcttctagaatcattgagatgaggaaacgtcttcgcgattctcttgttgcactcaaaacccccggttcttgggatcatattacacaacaaattggaatgttttcttttaccggtttaacgcctgcacaagtccaattttgccaggagcggtaccatctttatttcagtgcaaatggtcgtatttctatggctggtttgaacaattctaatgtagagcatgttgcacaggcatttaaccatgctgttcgcgagttgccttaa

SEQ ID NO: 12899 - protein, 409 aa, Schizosaccharomyces pombe
MSDYGFANIEEAKADAIFKLNAQYHQDEDPKKVNMSVGAYRDDTGKPWILPAVKKASKIVEEQASFNHEYLPIAGLPRFTKAAAEVLFRPNPHLLSEDRVASMQSVSGTGANFLAASFIETFYVKHTGAHVYISNPTWPVHRTLWEKLGVTVDTYPYWDAKNRSFDYEGMLSTIKSAPEGSIFLLHACAHNPTGIDPTREQWLSIFESLLSRKHLVVFDIAYQGFASGDLNRDSWALNEFVKYNKDFFVCQSFAKNMGLYGERTGCMHYVAKDASTKNKVLSQLCIVQRNTISNPPAYGARIAAEILNSPQLFAEWEQDLKTMSSRIIEMRKRLRDSLVALKTPGSWDHITQQIGMFSFTGLTPAQVQFCQERYHLYFSANGRISMAGLNNSNVEHVAQAFNHAVRELP

SEQ ID NO: 12900 - DNA, 1314 bp, Schizosaccharomyces pombe
  CDS (1)..(1314)
atgttggccaggaatttgcgttgtttgcatccaaatacatttgcatcgttaaaaaccaacgtttcctaccatggagtaaaatgcttggcaagtcagagcaagcgtggattcaaggtttgggcagatgtacctatgggaccaccggatcccatctttggtattacagaggcctataaaaaggatggagatgttaagaaaatgaacttgggtgctggtacatatcgtgatgatgccggaaagccttatgttctgcccagtgttcgtcaggcagaaactgagctgttgagtcagaaactcgacaaagaatatgcacccatcacaggaattcccagtttccgtgtgcaagcaacaaaattggcttatggcgatgtttacgagtctataaaggataggctggtttctgctcaatccattagtggtaccggtgccttgtgtatagcagctaatttccttgcttcattttatccatcaaagactatttacgtatctgaccctacttggggaaatcacaagaatgtattttctcgagctggcttgaccgttaagtcctacaagtattatgatcctgctactcgtgggttggacattaaaggcatgttgtccgatttaacttcagctcctgatggctctattatattattgcatgcttgtgctcacaatccaactggtgtagatcctacgaaagctcagtgggatgatatcctcaaaacaatgcaaaagaaaaaccattttgctcttttagacatggcttaccaaggatttgccagtggtgattttgctcgtgatgcttatgccactcgtctgttcgcctccagcaatgtccccatgttactctgccaatcctttgctaaaaacatgggtctatatggtgaacgtgctggctgctttagcattttagccaacgatgctgaggaagccgctcgtatcgaaagccaaactaagattctcattcgtgctttgtattccaaccctcccgtcaatggggccagaattgccaaccatatattgagcaaccctgcacttcgtgaacagtgggctggtgaagttgtaggcatgtccgaacgtcttaagagtatgcgtaaggctcttcgcaacatccttgaaaaggaccttaagaataaacacagctggaagcatatcactgaccaaattggtatgttttgttatactggtttaaatccccagcaagttgatgttttggctaaacagtatcacatttacctcactaagaatggtcgtattagcatctccggtctcaacacttccaatgtaagatactttgccgaagctatcaatgccgttacttcgaattag

SEQ ID NO: 12901 - protein, 437 aa, Schizosaccharomyces pombe
MLARNLRCLHPNTFASLKTNVSYHGVKCLASQSKRGFKVWADVPMGPPDPIFGITEAYKKDGDVKKMNLGAGTYRDDAGKPYVLPSVRQAETELLSQKLDKEYAPITGIPSFRVQATKLAYGDVYESIKDRLVSAQSISGTGALCIAANFLASFYPSKTIYVSDPTWGNHKNVFSRAGLTVKSYKYYDPATRGLDIKGMLSDLTSAPDGSIILLHACAHNPTGVDPTKAQWDDILKTMQKKNHFALLDMAYQGFASGDFARDAYATRLFASSNVPMLLCQSFAKNMGLYGERAGCFSILANDAEEAARIESQTKILIRALYSNPPVNGARIANHILSNPALREQWAGEVVGMSERLKSMRKALRNILEKDLKNKHSWKHITDQIGMFCYTGLNPQQVDVLAKQYHIYLTKNGRISISGLNTSNVRYFAEAINAVTSN

SEQ ID NO: 12902 - DNA, 1381 bp, Arabidopsis thaliana (mouse-ear cress)
  CDS (1)..(1350)
atgaaaactactcatttctcttcctcttcttcttccgatcgcaggatcggtgctctgctccgtcatctcaattccggctcagattcggacaacctgagctctctttatgcatctccgacatcgggaggcaccggtggttctgttttctctcatcttgttcaagctccagaggatcctattcttggggtgacagttgcatacaacaaagatcctagcccagttaagctgaatttaggagttggtgcttaccgaactgaggagggaaaacctttggttcttaatgttgtgaggaaagctgagcagcagcttatcaatgacagaacaagaatcaaggagtatcttcccattgttggattggttgagttcaacaagttaagcgctaagctcatactaggcgctgacagtcctgctattcgggagaatcggattaccaccgtggagtgtttgtctggtactggttctctgagagttggaggagagtttttggctaaacattatcatcagaaaacaatttacatcactcagccaacatggggaaatcatccaaagattttcacgctcgctggtttgacagtgaaaacttaccgatactacgatccagcgacgcgtgggttgaactttcaaggtttattagaagaccttggtgctgccgcacctggttctatagtgcttctccatgcctgtgcccataaccctactggtgttgatccaaccattcaacaatgggagcaaatcaggaagttgatgcgatcaaagggattgatgcccttcttcgatagtgcttatcagggctttgcaagtggaagtcttgatacagatgcgaaacctattaggatgtttgttgctgatggcggagaatgcctcgttgctcaaagttatgcgaagaacatgggactctatggagaacgagttggagctctcagcattgtatgcaaatcagcagatgttgcggggagagttgaaagccaactgaaactagtgataaggccaatgtactcgagtcctccaatccatggtgcatcaatcgtggctgtaatcctccgtgacaagaatttgttcaacgaatggactctggaactgaaggccatggctgatcgtatcatcagcatgaggaaacagcttttcgaggcattacgtactcgaggcactcctggagactggagtcacatcataaagcagattggtatgtttaccttcacagggttaaacccagctcaagtctccttcatgactaaagagtaccacatctacatgacatctgacgggaggataagcatggctggtctgagttcgaagactgtacctcaccttgcagacgctatccatgctgttgtcaccaaagccgtctgagaaactgaacaccaccatgacaccaaagctt

SEQ ID NO: 12903 - protein, 449 aa, Arabidopsis thaliana (mouse-ear cress)
MKTTHFSSSSSSDRRIGALLRHLNSGSDSDNLSSLYASPTSGGTGGSVFSHLVQAPEDPILGVTVAYNKDPSPVKLNLGVGAYRTEEGKPLVLNVVRKAEQQLINDRTRIKEYLPIVGLVEFNKLSAKLILGADSPAIRENRITTVECLSGTGSLRVGGEFLAKHYHQKTIYITQPTWGNHPKIFTLAGLTVKTYRYYDPATRGLNFQGLLEDLGAAAPGSIVLLHACAHNPTGVDPTIQQWEQIRKLMRSKGLMPFFDSAYQGFASGSLDTDAKPIRMFVADGGECLVAQSYAKNMGLYGERVGALSIVCKSADVAGRVESQLKLVIRPMYSSPPIHGASIVAVILRDKNLFNEWTLELKAMADRIISMRKQLFEALRTRGTPGDWSHIIKQIGMFTFTGLNPAQVSFMTKEYHIYMTSDGRISMAGLSSKTVPHLADAIHAVVTKAV

SEQ ID NO: 12904 - DNA, 1791 bp, Gallus gallus (chicken)
  CDS (25)..(1263)
aacgcacctcgcgcccgcaccgccatggccgcctccatcttcgccgctgtgccccgcgctccgcccgtcgccgtcttcaagctgacggcggacttccgggaggacggcgactcgcgaaaggtcaacctgggtgtgggcgcgtaccgcacggatgaagggcagccgtgggtcctgccggtggtgaggaaggtggagcagctgatcgctggcgacggcagcctgaaccacgagtacctgcccatcctcggcctgccggagttccgcgccaacgcctcccgcatcgccctgggcgacgacagcccggccatcgcacagaagagggttgggagtgtccagggtttgggcgggacgggcgctctgcgtataggtgccgagttcctgaggcgttggtacaacgggaacaacaacactgccacccctgtgtacgtctcgtccccaacatgggagaaccacaactctgtatttatggatgctgggtttaaagatatcagaacctaccgctactgggatgctgccaagaggggtttggacctccaggggctgctggatgacatggagaaagccccagagttctccattttcatcctccatgcctgtgcacacaacccaacgggcacagaccctactccagacgagtggaagcagattgctgctgttatgaagcgacggtgcctgtttccgttcttcgactcggcgtatcaaggttttgcctctggcagcctggacaaggatgcctgggctgtgcgatactttgtctccgagggctttgagctcttctgtgcacagtcgttttccaagaactttgggctctacaatgaacgtgtggggaacctgtctgtggtggggaaggatgaagacaatgtgcagcgtgtgctttcccagatggagaagattgtgcgtaccacttggtccaaccctccctcccagggagcacgcattgtggcaactacgcttacttccccacagctctttgctgagtggaaggacaatgtgaagacaatggcagatcgggtcttgctcatgcggtcagagctccggtctcgcctggagtcccttgggaccccaggcacctggaaccacatcacagatcaaattggcatgtttagctttacagggttgaaccctaagcaggtggagtacatgatcaaggaaaaacacatctacctgatggctagtgggcgcatcaacatgtgtggtctgactaccaagaacctggactatgtggccaagtccatccatgaagccgtcacaaaaatccagtgaagcacacgaacaaccaaacttacatgaactcaccaaagttgtaatgtgtagtcctgtcttactcacggcttgccatgtccacacctcttggggtttaataaagatgggagcaggagctcaatcagggatagtcttattttgaccttcaatgaagtacttcttgcaatatgataagccccaagaggtgggggcagcatgagctgtagtttcttgtttgacagcagcctggtcttcaggcacttagagctgcatctttagcacatccaaatcaactccttacccttatctgtttgatctaggcaaagtccggtgccagtgcaatgtgctatgggttgacagcccaaatagttgttctctgcagacaagctgtcaagctgctgtcacttgctagtattttgtgcagggggaaagctgttgctagctttcctccacggcagtttgctgagcccgatgcgagcaaacttttgtgaacctgtgatgattgcgtagtgttgctgacagaaaattaaagtctccatctctgatgct

SEQ ID NO: 12905 - protein, 412 aa, Gallus gallus (chicken)
MAASIFAAVPRAPPVAVFKLTADFREDGDSRKVNLGVGAYRTDEGQPWVLPVVRKVEQLIAGDGSLNHEYLPILGLPEFRANASRIALGDDSPAIAQKRVGSVQGLGGTGALRIGAEFLRRWYNGNNNTATPVYVSSPTWENHNSVFMDAGFKDIRTYRYWDAAKRGLDLQGLLDDMEKAPEFSIFILHACAHNPTGTDPTPDEWKQIAAVMKRRCLFPFFDSAYQGFASGSLDKDAWAVRYFVSEGFELFCAQSFSKNFGLYNERVGNLSVVGKDEDNVQRVLSQMEKIVRTTWSNPPSQGARIVATTLTSPQLFAEWKDNVKTMADRVLLMRSELRSRLESLGTPGTWNHITDQIGMFSFTGLNPKQVEYMIKEKHIYLMASGRINMCGLTTKNLDYVAKSIHEAVTKIQ

SEQ ID NO: 12906 - DNA, 1331 bp, Escherichia coli
  CDS (10)..(1200)
aacctcgtcatgtttgagaacattaccgccgctcctgccgacccgattctgggcctggccgatctgtttcgtgccgatgaacgtcccggcaaaattaacctcgggattggtgtctataaagatgagacgggcaaaaccccggtactgaccagcgtgaaaaaggctgaacagtatctgctcgaaaatgaaaccaccaaaaattacctcggcattgacggcatccctgaatttggtcgctgcactcaggaactgctgtttggtaaaggtagcgccctgatcaatgacaaacgtgctcgcacggcacagactccggggggcactggcgcactacgcgtggctgccgatttcctggcaaaaaataccagcgttaagcgtgtgtgggtgagcaacccaagctggccgaaccataagagcgtctttaactctgcaggtctggaagttcgtgaatacgcttattatgatgcggaaaatcacactcttgacttcgatgcactgattaacagcctgaatgaagctcaggctggcgacgtagtgctgttccatggctgctgccataacccaaccggtatcgaccctacgctggaacaatggcaaacactggcacaactctccgttgagaaaggctggttaccgctgtttgacttcgcttaccagggttttgcccgtggtctggaagaagatgctgaaggactgcgcgctttcgcggctatgcataaagagctgattgttgccagttcctactctaaaaactttggcctgtacaacgagcgtgttggcgcttgtactctggttgctgccgacagtgaaaccgttgatcgcgcattcagccaaatgaaagcggcgattcgcgctaactactctaacccaccagcacacggcgcttctgttgttgccaccatcctgagcaacgatgcgttacgtgcgatttgggaacaagagctgactgatatgcgccagcgtattcagcgtatgcgtcagttgttcgtcaatacgctgcaggaaaaaggcgcaaaccgcgacttcagctttatcatcaaacagaacggcatgttctccttcagtggcctgacaaaagaacaagtgctgcgtctgcgcgaagagtttggcgtatatgcggttgcttctggtcgcgtaaatgtggccgggatgacaccagataacatggctccgctgtgcgaagcgattgtggcagtgctgtaagcattaaaaacaatgaacgcgctgaaaagcgggctgagactgatgacaaacgcaacattgcctgatggctacgcttatcaggcctacgcgtcccctgcaatattttgaatttgcacgattttgtaggccgg

SEQ ID NO: 12907 - protein, 396 aa, Escherichia coli
MFENITAAPADPILGLADLFRADERPGKINLGIGVYKDETGKTPVLTSVKKAEQYLLENETTKNYLGIDGIPEFGRCTQELLFGKGSALINDKRARTAQTPGGTGALRVAADFLAKNTSVKRVWVSNPSWPNHKSVFNSAGLEVREYAYYDAENHTLDFDALINSLNEAQAGDVVLFHGCCHNPTGIDPTLEQWQTLAQLSVEKGWLPLFDFAYQGFARGLEEDAEGLRAFAAMHKELIVASSYSKNFGLYNERVGACTLVAADSETVDRAFSQMKAAIRANYSNPPAHGASVVATILSNDALRAIWEQELTDMRQRIQRMRQLFVNTLQEKGANRDFSFIIKQNGMFSFSGLTKEQVLRLREEFGVYAVASGRVNVAGMTPDNMAPLCEAIVAVL

SEQ ID NO: 12908 - DNA, 1208 bp, Escherichia coli
  CDS (14)..(1207)
ggagaaccatcgcatgtttcaaaaagttgacgcctacgctggcgacccgattcttacgcttatggagcgttttaaagaagaccctcgcagcgacaaagtgaatttaagtatcggtctgtactacaacgaagacggaattattccacaactgcaagccgtggcggaggcggaagcgcgcctgaatgcgcagcctcatggcgcttcgctttatttaccgatggaagggcttaactgctatcgccatgccattgcgccgctgctgtttggtgcggaccatccggtactgaaacaacagcgcgtagcaaccattcaaacccttggcggctccggggcattgaaagtgggcgcggatttcctgaaacgctacttcccggaatcaggcgtctgggtcagcgatcctacctgggaaaaccacgtagcaatattcgccggggctggattcgaagtgagtacttacccctggtatgacgaagcgactaacggcgtgcgctttaatgacctgttggcgacgctgaaaacattacctgcccgcagtattgtgttgctgcatccatgttgccacaacccaacgggtgccgatctcactaatgatcagtgggatgcggtgattgaaattctcaaagcccgcgagcttattccattcctcgatattgcctatcaaggatttggtgccggtatggaagaggatgcctacgctattcgcgccattgccagcgctggattacccgctctggtgagcaattcgttctcgaaaattttctccctttacggcgagcgcgtcggcggactttctgttatgtgtgaagatgccgaagccgctggccgcgtactggggcaattgaaagcaacagttcgccgcaactactccagcccgccgaattttggtgcgcaggtggtggctgcagtgctgaatgacgaggcattgaaagccagctggctggcggaagtagaagagatgcgtactcgcattctggcaatgcgtcaggaattggtgaaggtattaagcacagagatgccagaacgcaatttcgattatctgcttaatcagcgcggcatgttcagttataccggtttaagtgccgctcaggttgaccgactacgtgaagaatttggtgtctatctcatcgccagcggtcgcatgtgtgtcgccgggttaaatacggcaaatgtacaacgtgtggcaaaggcgtttgctgcggtgatgtaat

SEQ ID NO: 12909 - protein, 397 aa, Escherichia coli
MFQKVDAYAGDPILTLMERFKEDPRSDKVNLSIGLYYNEDGIIPQLQAVAEAEARLNAQPHGASLYLPMEGLNCYRHAIAPLLFGADHPVLKQQRVATIQTLGGSGALKVGADFLKRYFPESGVWVSDPTWENHVAIFAGAGFEVSTYPWYDEATNGVRFNDLLATLKTLPARSIVLLHPCCHNPTGADLTNDQWDAVIEILKARELIPFLDIAYQGFGAGMEEDAYAIRAIASAGLPALVSNSFSKIFSLYGERVGGLSVMCEDAEAAGRVLGQLKATVRRNYSSPPNFGAQVVAAVLNDEALKASWLAEVEEMRTRILAMRQELVKVLSTEMPERNFDYLLNQRGMFSYTGLSAAQVDRLREEFGVYLIASGRMCVAGLNTANVQRVAKAFAAVM

SEQ ID NO: 12910 - DNA, 1266 bp, Homo sapiens
  CDS (1)..(1266)
atgcccaccctttcagtgttcatggatgtgcccctcgcccacaagctagagggcagcttgttaaagacctacaaacaagatgattacccgaacaagatattcttagcctatagagtctgcatgacaaatgaaggccatccctgggtttctctcgtggtgcagaagactcgactacagatttcacaggatccctccctgaattatgagtacttgcccaccatgggcctgaaatcattcatccaggcctctctagcactcctctttggaaagcacagccaagccattgtggagaacagggtagggggtgtacacactgttggtgacagtggtgccttccagcttggcgtccagtttctcagagcttggcataaggatgctcgtatagtttacatcatctcttctcaaaaagaactgcatggactcgtcttccaggacatgggctttacagtttatgaatactctgtctgggaccccaagaagctatgcatggaccccgacatactcctcaatgtggtggagcagatcccacatggctgtgtccttgtgatggggaacattatcgactgcaagttgacaccaagtgggtgggcaaagttgatgtccatgataaagagcaagcagatattcccattttttgatattccctgtcaaggtttatacaccagtgacttggaagaagatactagaatcttacaatactttgtgtctcaaggctttgagttcttctgcagccagtctctgtccaagaattttggcatttatgatgaaggagtggggatgctagtggtggtggcagtcaacaaccagcagctgctgtgtgtcctctcccagctggaaggattagcccaggccctgtggctaaacccccccaacacgggtgcacgtgtcatcacctccatcctctgcaaccctgctctgctgggagaatggaagcagagtctaaaagaagttgtagagaacatcatgctaaccaaggaaaaagtgaaggagaaactccagctcctgggaacccctgggtcctggggtcacatcaccgagcagagtgggacccacggctatcttggactcaactcccagcaggtggaatacctggtcaggaagaagcacatctatatccccaagaacggtcagattaacttcagctgtatcaatgccaacaacataaattacatcactgagggcatcaatgaggctgtcctcctcacagagagctcagagatgtgtcttccaaaggaaaaaaaaacactgattggaataaaactttag

SEQ ID NO: 12911 - protein, 421 aa, Homo sapiens
MPTLSVFMDVPLAHKLEGSLLKTYKQDDYPNKIFLAYRVCMTNEGHPWVSLVVQKTRLQISQDPSLNYEYLPTMGLKSFIQASLALLFGKHSQAIVENRVGGVHTVGDSGAFQLGVQFLRAWHKDARIVYIISSQKELHGLVFQDMGFTVYEYSVWDPKKLCMDPDILLNVVEQIPHGCVLVMGNIIDCKLTPSGWAKLMSMIKSKQIFPFFDIPCQGLYTSDLEEDTRILQYFVSQGFEFFCSQSLSKNFGIYDEGVGMLVVVAVNNQQLLCVLSQLEGLAQALWLNPPNTGARVITSILCNPALLGEWKQSLKEVVENIMLTKEKVKEKLQLLGTPGSWGHITEQSGTHGYLGLNSQQVEYLVRKKHIYIPKNGQINFSCINANNINYITEGINEAVLLTESSEMCLPKEKKTLIGIKL

SEQ ID NO: 12912 - DNA, 1685 bp, Lotus corniculatus
  CDS (119)..(1492)
ttcgattcatccggtacgccattaaaccactctgcaactagatccatcactctttcactcgagtttggttgtaaccgtttccgttatttctgttgtggtcggtttgtttccgttgcagatggcggcgtcttcagtgttctctgtagcttcacactctgtttcgccttcgaatcaccatgctcacaagggaaaaaccaagattggaggtagcggtttgagattggcaaattcaaggtcttttggtagtggccggatctctatggctgttgctgttaatgcttctcgatttgagggaataccgatggctccacctgatccaattctcggagtttctgaagcatttaaagcggacaaatgcgatctcaagctcaatcttggagtcggggcctacagaactgaagaattacagccatatgtgcttaatgttgttaagaaggcagagaatcttatgctgaatagaggggaaaacaaagagtatctacctattgagggttgggctgcatttaataaggcaactgcagagttgttactcggagctgacaacccagcaatcaaagaacaaagagttgccactgtccaaggtctttctggaactggttctctgcgacatgctgctgctctgatagagcgatattttccaggggcaaaagttttgatatcatcccctacctggggtaatcacaagaatattttcaatgatgctagagtcccatggtcagagtaccgatattatgatcctaagacagttggattggattttgagggcatgttagaagatataaagtcagctcctgaaggatctttcgtgctacttcatggatgtgctcataaccctaccggtattgatcccacaccagaacagtgggtgaaaatagctgatctaattcaacaaaagaaccacattccattttttgatgtcgcttaccaggggtttgctagtggaagcctggatgaagatgctgcttctgtgcgattgtttgtgtcacgtggcatggaggttctagtagctcagtcatacagtaaaaatcttggtctctatgctgaaaggattggagcaatcaatgtcatttcctcatcaccagaatctgctgcaagggtaaagagccaattgaaaaggattgccaggccaatgtactctaatccaccggttcacggggctaggattgttgctgatatagttggaaatccagatctcttcaatgaatggaaagcagagatggaaatgatggcaggaaggataaagaatgttagacagaagctatatgatagtatttcttcaaaagacaagagtggaaaggattggtcattcatacttaagcagataggcatgttctcattcacaggcttgaacaagaatcagagtgacaatatgacaaataagtggcatgtatacatgacaaaagatggaaggatttccctggcaggattgtcactggccaaatgtgaataccttgcagatgctattattgactcctatcataatgtcagctgaaactagatgaaatattctttatcaccaagcttatattttttggtgagtattgtatccaatcatagtggtcggcacacatgacaataattcatgtaaacattaatgtcatacatgtacttttaattccctaggaattttgtaaccttaaaataagttgaatcaaactattgatgcaaaaaaaaaaaaaaaaaaa

SEQ ID NO: 12913 - protein, 457 aa, Lotus corniculatus
MAASSVFSVASHSVSPSNHHAHKGKTKIGGSGLRLANSRSFGSGRISMAVAVNASRFEGIPMAPPDPILGVSEAFKADKCDLKLNLGVGAYRTEELQPYVLNVVKKAENLMLNRGENKEYLPIEGWAAFNKATAELLLGADNPAIKEQRVATVQGLSGTGSLRHAAALIERYFPGAKVLISSPTWGNHKNIFNDARVPWSEYRYYDPKTVGLDFEGMLEDIKSAPEGSFVLLHGCAHNPTGIDPTPEQWVKIADLIQQKNHIPFFDVAYQGFASGSLDEDAASVRLFVSRGMEVLVAQSYSKNLGLYAERIGAINVISSSPESAARVKSQLKRIARPMYSNPPVHGARIVADIVGNPDLFNEWKAEMEMMAGRIKNVRQKLYDSISSKDKSGKDWSFILKQIGMFSFTGLNKNQSDNMTNKWHVYMTKDGRISLAGLSLAKCEYLADAIIDSYHNVS

SEQ ID NO: 12914 - DNA, 1748 bp, Moraxella sp
  CDS (340)..(1533)
aaggtagtctgaggtgtgctaccttattaataggagtggtgaatgcgatggaattattgatgctgagsgtttcataatgatttttttgatgaaaaagtactcgcagtcctaattgcatgctgtattaaaattcctcaatttttagtttaaataacaaaaatagactatgttgaggtttttaataatgattttttgcatgcacaaggtattaactgtattaatggcatgctgtattaaaattcctcacttttttgtaccaataacactagtcaacctagcgtgtttttatgataagcttaagctcacaccaaccccctaaataatgataagagatagtcaatgttctcagtattaaaaccattacccacagatcctattcttggccttatggcggcctataagcaagatactaaccctaataaaattgatttaggtgtgggtgtctataaagatgagctaggcaatacaccggtacttaaagcggtaaaaaaagcagaagcgtttcgtttagaaaatgaaaccagcaaatcttatattggtttagcgggtaatttagattactgtcaaaaaatggaaagcttactattaggtgagcacaaaacattactagctaaccgtgtacgtacggcgcaagcgccaggtggtactggggcattacgtgttgctgctgaatttattatgcgttgtaatccaaaagcaacagtgtgggtaactacgccaacatgggctaatcatattagcttatttgaagcagcgggcttaacagtaaaagaatacccttattacgattacgaaaataaagacttattatttgatgagatgatcaacacacttaagcaagtgcctaaaggcgatgtggttttactacatgcgtgttgtcataacccaagtggtatggatttaaacgaagcacagtggaaggtagttgctgagcttgcaaaagaagtgggctttacgccgcttgttgatattgcataccaaggttttggctcttcactagaagaagatgcacgtggtttacgtattttagctgacgcagttgaagagttaattatttgttcttcatgttctaaaaactttggtctttaccgcgaacgtattggtgcgtgttcactaattgcaaaagacagcgcaactgctgatatttcaaactcagtattacttagtgttgtacgtagtatttattcaatgccgccagcgcatggtgctgacattgtaaatacaattttaagcagcactgagcttacgcaaatgtggcatcaagagcttgatgaaatgcgtagccgtataaatggtttacgtacacaaattaaagaaacactagcgactaaagacatagcgcaagacttctcgtttattgagcgtcagcacggtatgttttctttcttaggaattaataaagagcaaattactcgcctacaaaaagagtacggcatttatattgttggctcaagtcgtgtaaacgtagcgggcgtgagtgatgcaaatattgaatactttgcaaatgcagttgccgacgtatgtaaatcataatagttaacctgaactctggttaagagatttactaacatattgaatcatcgttatatttaattttattttctctagccagaggttttcagtgaaaacaaggcgaatttacscgstcaatagctggcctattgcaagtaaatcaacccagttagccctgaaaacagctgcttgagataagttttattatccggacctcaggtagttaaattatttaa

SEQ ID NO: 12915 - protein, 397 aa, Moraxella sp
MFSVLKPLPTDPILGLMAAYKQDTNPNKIDLGVGVYKDELGNTPVLKAVKKAEAFRLENETSKSYIGLAGNLDYCQKMESLLLGEHKTLLANRVRTAQAPGGTGALRVAAEFIMRCNPKATVWVTTPTWANHISLFEAAGLTVKEYPYYDYENKDLLFDEMINTLKQVPKGDVVLLHACCHNPSGMDLNEAQWKVVAELAKEVGFTPLVDIAYQGFGSSLEEDARGLRILADAVEELIICSSCSKNFGLYRERIGACSLIAKDSATADISNSVLLSVVRSIYSMPPAHGADIVNTILSSTELTQMWHQELDEMRSRINGLRTQIKETLATKDIAQDFSFIERQHGMFSFLGINKEQITRLQKEYGIYIVGSSRVNVAGVSDANIEYFANAVADVCKS

SEQ ID NO: 12916 - DNA, 1194 bp, Klebsiella pneumoniae
  CDS (1)..(1194)
atgtttcaaaaagttgacgcctacgccggcgaccctattctttctctgatggaacgcttcaaagaagacccgcgaagcgacaaagtcaacctgagtatcgggctgtactacaacgatgacggcattatcccgcagctgcaggcggtggcggaagcggaagcacgcctgaacgccgagccgcatggcgcctccctgtatctgccaatggaagggtttagcggctaccgtcaggcgattgcgccgctgctgtttggcgcagaacataccgcgcttaagcaaaatcgcattgcctccattcagacggtcggcggttccggcgcgttgaaggtcggggccgacttcctcaaacgttactttcctgagtctcatgtctgggtcagcgatccgacctgggaaaaccacatcgccatttttgaaggggctggcttcgaagtaagtacttacccctggtttgataaagccaccaacggcgtgcgctttgagaacctgctggcgatgctgcaaacgctgccggcccgcgatattgtgctgctgcacccttgctgccacaacccgaccggcgccgacctgacgccagcccagtgggaccgcgtggttgaggtattgaaagcgcgtcagctgatccccttcctcgacatcgcctaccagggctttggcggggggctggaagaggatgcctacgccattcgcgccatcgccagcgccgggatgccgatgttggtcagcaattcgttctccaaaattttctcgctgtacggggagcgcgtcggcggtctgtccgtggtctgtgaagacagcgaaaccgcgggccgcgtgctgggtcagctgaaggccaccgtgcgccgcaactactccagcccgccaagctttggcgcgcaggtggtggcgacggtgctgaacgatgcagctctgaaagccacctggcaggcggaggtggacgccatgcgcgcgcacatcctgaccatgcgccaggcgctggtcgacgcgctgcagcaggttgccccgggcagcaaagtggattacctgctcaagcagcgcgggatgttcagctataccggatttagcgcggcgcaggtggatcgtctgcgcgatgagtttggcgtctacctgattgccagcggacgcatgcgcgtggcggggttaaactcacgtaatgttcagcaggtagcgaaggcgtttgttgcggtgatgtaa

SEQ ID NO: 12917 - protein, 397 aa, Klebsiella pneumoniae
MFQKVDAYAGDPILSLMERFKEDPRSDKVNLSIGLYYNDDGIIPQLQAVAEAEARLNAEPHGASLYLPMEGFSGYRQAIAPLLFGAEHTALKQNRIASIQTVGGSGALKVGADFLKRYFPESHVWVSDPTWENHIAIFEGAGFEVSTYPWFDKATNGVRFENLLAMLQTLPARDIVLLHPCCHNPTGADLTPAQWDRVVEVLKARQLIPFLDIAYQGFGGGLEEDAYAIRAIASAGMPMLVSNSFSKIFSLYGERVGGLSVVCEDSETAGRVLGQLKATVRRNYSSPPSFGAQVVATVLNDAALKATWQAEVDAMRAHILTMRQALVDALQQVAPGSKVDYLLKQRGMFSYTGFSAAQVDRLRDEFGVYLIASGRMRVAGLNSRNVQQVAKAFVAVM

SEQ ID NO: 12918 - DNA, 1737 bp, Canavalia lineata
  CDS (44)..(1441)
aacttaatcttcttgctttggttctttccctcctgaccaaagcatggcttcttcagtcctttccggggccaaccagtcttccccttcgtcgaccgttctcaacacccaccttaagggaaagcctcggctaggtgacaatgctctcagattctctggaaacaaaggaggatccaatgccttctcctcaaggtctcgaggtcgtatctccatggctgttgctgataatgtttctcggtttgaaggcatacctatggctcctcctgatccaattctcggagtttcagaggcgtttaaggcagacaatagtgatgtgaagctcaatcttggagttggggcatacagaacagaagaattacagccatacgtgcttaatgttgttaaaaaggcagaaaatcttatgctggagagagggcaaaacaaagagtatcttcctattgagggtttggcagcatttaacaaggcaactgcagagttgctactcggagcagacaatccagcaatcaaacagcaaagagttgccactgtccaaggtctttcaggactggtatctctgcgactaggtgcagctctgatagaacgatattttcctggggcaaaagttttgatatcaagtcctacctggggtaatcacaagaatattttcaatgatgctagggtcccatggtccgagtaccgatattatgatcccaagacagttggtttggattttgagggcatgatagaagatataaagtcggctccggaaggtacttttgtcctacttcatggatgtgctcataaccctactggtattgatccaacacctgaacagtgggaaaaaatagctgatgtaattgaagaaaaaaaccaccggcccttttttgatgttgcttaccaggggtttgctagtggaagccttgatgaagacgcagcatccgtccgactgttagtggcacgtggcatcgaattattcattgcacagtcttattccaaaaacctgggtctttatgctcaaaggattggagcaatcaatgtcatttcctcatcaccagaatctgcagctaggctgacgagccaactgaaaaggattgcacgaccaatgtactctaatccaccggttcacggggctaggattgttgccgatcttgttggcaatccattgctctttgaagaatggaaagctttcatggaaatgatggctggaaggataaagaatgttagacagcttctgtatgattccatttcttcaaaagacaaaagtggaaaggattggtcattcatacttaagcagataggcatgttctcattcacaggcttgaacaaggaacagagtgacaacatgacaaataagtggcatgtatacatgacaaaggatggaaggatttccctggcaggattgtcgttggctaaatgtgaataccttgcggatgctattatcgattcatatcataatgtcagctgaaactcaatgagttatgcttcagaactaagcttcttacttttttggtgagtattatacccagtcacagtgggcacattccaagaccgaaatagtgtatgcattatttagaataattatatagtacccaatgtgccttcggaaattatgttgtgaccttgaatatgttccctcaaagtattgatgtaacaaagaaataacttttttcgagatttgaaacaagttgattggaaccaaatttaagaatatgatttcttatgttgtccataaagtctgcttgaagtataaaaaaaaaaaaa

SEQ ID NO: 12919 - protein, 465 aa, Canavalia lineata
MASSVLSGANQSSPSSTVLNTHLKGKPRLGDNALRFSGNKGGSNAFSSRSRGRISMAVADNVSRFEGIPMAPPDPILGVSEAFKADNSDVKLNLGVGAYRTEELQPYVLNVVKKAENLMLERGQNKEYLPIEGLAAFNKATAELLLGADNPAIKQQRVATVQGLSGLVSLRLGAALIERYFPGAKVLISSPTWGNHKNIFNDARVPWSEYRYYDPKTVGLDFEGMIEDIKSAPEGTFVLLHGCAHNPTGIDPTPEQWEKIADVIEEKNHRPFFDVAYQGFASGSLDEDAASVRLLVARGIELFIAQSYSKNLGLYAQRIGAINVISSSPESAARLTSQLKRIARPMYSNPPVHGARIVADLVGNPLLFEEWKAFMEMMAGRIKNVRQLLYDSISSKDKSGKDWSFILKQIGMFSFTGLNKEQSDNMTNKWHVYMTKDGRISLAGLSLAKCEYLADAIIDSYHNVS

SEQ ID NO: 12920 - DNA, 1263 bp, Lupinus angustifolius
  CDS (1)..(1263)
atggcttccgttaatcaatccgtttccgtttctccaaccgcttcttctgattccgttttcgctcatcttcttcctgctcctgaagatcctattctcggggtgactgtggcttataacaaagatccaagcccagttaagctcaatttaggtgttggtgcttaccgaactgaggaaggaaaacctcttgttctgaatgtagtgaggcgtgttgaacagcaacttgtgaatgaagcgtcacgcaacaaggagtatcttccaattgttggggtcgccgatttcaacaaattgagtgctaggctcatttttggtgctgacagccctgctattcaagagaacagggtgaccactgttcaatgcttgtctggtactggttcattaagagttgggggtgaatttctagctagacactatcaccagaggactatatatattcctcaaccaacatggggtaatcacccaaagattttcaccttagctgggttatctgtcaaaacatatcgctattatgctccggcaacaagagggcttgactttgaaggacttctagaagatcttggttctgccccatctggatccattgttttgctacatgcatgcgcacataaccctactggtgttgatccaaccactgagcaatgggagcagattaggaagctgttgagatcaaaagctttgttacctttctttgacagtgcttatcaaggctttgctagtggaagtctagatatagatgcacaggctgttcgcttgtttgttgctgatgggggtgaattgctgcttgcccagagttatgctaagaacatgggtctatatggagaacgtgttggcgccctaagcattgtctccaagtcagctgatgttgcaagcagggttgagagccaggtgaaacttgtggttaggccaatgtactcaaaccctcccattcatggtgcatccattgtggctgccattctcagggaccgggatttgtacaatgagtggactattgagctgaaggcaatggctgatcgcattatcaaaatgcgccaacaactttttgatgctttgcaatccagaggcacacctggtgattggagtcacattatcaagcagattggaatgtttactttcacaggattgaatgctgagcaagtttccttcttaactaaggagtaccatatatacttgacatctgatgggaggattagcatggctggtctgagttccaaaacagttcctcatttggctgatgcaatacatgcagctgtaaccagagttgtctaa

SEQ ID NO: 12921 - protein, 420 aa, Lupinus angustifolius
MASVNQSVSVSPTASSDSVFAHLLPAPEDPILGVTVAYNKDPSPVKLNLGVGAYRTEEGKPLVLNVVRRVEQQLVNEASRNKEYLPIVGVADFNKLSARLIFGADSPAIQENRVTTVQCLSGTGSLRVGGEFLARHYHQRTIYIPQPTWGNHPKIFTLAGLSVKTYRYYAPATRGLDFEGLLEDLGSAPSGSIVLLHACAHNPTGVDPTTEQWEQIRKLLRSKALLPFFDSAYQGFASGSLDIDAQAVRLFVADGGELLLAQSYAKNMGLYGERVGALSIVSKSADVASRVESQVKLVVRPMYSNPPIHGASIVAAILRDRDLYNEWTIELKAMADRIIKMRQQLFDALQSRGTPGDWSHIIKQIGMFTFTGLNAEQVSFLTKEYHIYLTSDGRISMAGLSSKTVPHLADAIHAAVTRVV

SEQ ID NO: 12922 - DNA, 1753 bp, Lotus japonicus
  CDS (86)..(1342)
ggcacgagctttttcttcttcttcttcttccccaagcgatcgcagactcaacgttctcgcaggccacctcgttcacaacgatcaaatggattctcagaacatctctccttctccaaccgcctcttctggttccgtcttcgctcatctcgttcgtgctcccgaagatcctattctcggggtgactgtcgctttcaacaaagatcctagccctgttaagctcaacttgggtgttggtgcttaccgaactgaggaaggaaaacctcttgttttgaatgtggtcaggaaagctcaacaccaaatcgtgaatgatccgtcacgcaacaaggagtatcttccaattgtggggctcgctgattttaataaattgagtgccaagcttatttttggtgctgacagccctgctattcaagagaacaggattaccactgttcagtgcttgtctggtactggttcattaagagttgggggtgaatttttggctaaacactatcaccaacggattatatacttgccaaaaccaacttggggcaatcacacaaaggttttcaccttggcagggttatctgtcaaaacatatcgctactatgctccagcaacacgaggccttgactttcaaggacttctagaagatcttggttctgccccatctggatccattgttttgctacatgcatgcgctcataaccctactggtgttgatccaacccctgagcaatgggagcagattaggcagctgataagatcaaaggctttattacctttctttgacagtgcttatcagggttttgctagtggaaatctagatgcagatgcacattctgttcgttcatttgttgctgatgggggtgaattgctggcagcccagagttatgcaaagaacatgggtctttatggagaacgtgttggtgccttaagcattgtctccaagtcagctgatgttgcaagtttggttgagagtcagctgaagcttgtcatcaggcccatgtactcaaatcctccccttcatggtgcatccattgtagctacgattcttaaggaccgggatttgtacaatgagtggactattgagttgaagggaatggctgatcgtattatcagtatgcgccaacaactttttgatgctttacgttccagaggcacgcctggtgactggagtcacattatcaagagtatcggtatgttcactttcacaggattgaatcctgagcaggtttccttcatgactaaagagtaccatatatacctgacatccgatgggcggattagcatggctggtttgagttccaaaaccgtcccacatctggcggatgctatacatgcggctgtaacccgagcttcctgaacatgtttggaaagatatctcaaccatagatgaaaaaatcaactgttagatattaacaaatcatggatttgttgaaatatactcttgattttctcatcaaccattgagatacctttactttctccctttaaagctttagaggagccaaattctatgagcggcgcgattttcaactcacctagtaggacttccattttcaatgtaataatatcacatcaaacaatgaaaacttttttttgatgtgagaattagagacaacttttctgcccagggtgcctcggtctccgatcttggcattctaacattttcgccaagttttcctagtgtaagcatgatcaagtgcccccaagaaggaggctttctattttctaaataatttctgaaggataaaaaaaaaaaaaaaaaaaaaaa

SEQ ID NO: 12923 - protein, 418 aa, Lotus japonicus
MDSQNISPSPTASSGSVFAHLVRAPEDPILGVTVAFNKDPSPVKLNLGVGAYRTEEGKPLVLNVVRKAQHQIVNDPSRNKEYLPIVGLADFNKLSAKLIFGADSPAIQENRITTVQCLSGTGSLRVGGEFLAKHYHQRIIYLPKPTWGNHTKVFTLAGLSVKTYRYYAPATRGLDFQGLLEDLGSAPSGSIVLLHACAHNPTGVDPTPEQWEQIRQLIRSKALLPFFDSAYQGFASGNLDADAHSVRSFVADGGELLAAQSYAKNMGLYGERVGALSIVSKSADVASLVESQLKLVIRPMYSNPPLHGASIVATILKDRDLYNEWTIELKGMADRIISMRQQLFDALRSRGTPGDWSHIIKSIGMFTFTGLNPEQVSFMTKEYHIYLTSDGRISMAGLSSKTVPHLADAIHAAVTRAS

SEQ ID NO: 12924 - DNA, 1263 bp, Debaryomyces hansenii CBS767
  CDS (1)..(1263)
atgtcaaaatatttttcaagtattaaagaattacctccagatccattatttgggttgaaagctagatacacggccgatgaccgttcagataaagtagatttgggaatcggtgcttatagagataataacgggaagccatggatattaccagcggttagaaaggcagaagtgaagttggttaactcggaagaatacaaccacgagtatttatcgatttcggggtatcagccatttttgaccgagagtgctaaagttattttgggaaacaactcagctgccatcaaggaatcaagagtgaccagtcaacaatcgttgtctggtaccggggctttgcacttggctggagcctttttgaaggaatttttcaccactgaatcgaagaaagctccaacggtgtacttatcgaatcctacgtgggccaaccataaccaaattttcactagtttgggtttgcaggtagagaagtatccatactgggacaatgataccaaatcattgaacttgaaggggttcttgtcgactattcaagaagcacctaagaactcgatttttgtgttgcatgcgtgtgcccataatcctactggactcgatgccaccaaggagcaatgggaggaaattctcgaagcattggccaagaatgaacacttagcattatacgactctgcctaccaagggttcgctagtggtaacttggataacgatgggtttgctgtaagattggctgtcgactcgaagaagttgaaaaccccaattgttatctgtcaatcttttgcaaagaattgtggtatgtacggtgaaagagttggtgcaattcacgtcatcccagccgagaatgataagtcgttgaacaacgctataaagtcgcaattgaacaagctcaccaggtcggaaatttctaatcccccagcgtacggagccaaggttgttgcaaccattttgaccgactcagaattgagacagcaatgggaagacgacttggtcaccatgagttcgagaatcaacaaaatgagaaccaggttgagagatttgttgacaaaccaatacagcactcctggcaactgggatcacattgtctcccaatcaggtatgttctcgttcacaggattgaccccagatatggtgtccagattggaaaagaaccacggaatctacttggttagctccggtagagcctccgttgctggtttgaatgatggcaacgtcgaacaggtcgctaaggctatcgacgaagttgttcgtttctactccaagtccaagttataa

SEQ ID NO: 12925 - protein, 420 aa, Debaryomyces hansenii CBS767
MSKYFSSIKELPPDPLFGLKARYTADDRSDKVDLGIGAYRDNNGKPWILPAVRKAEVKLVNSEEYNHEYLSISGYQPFLTESAKVILGNNSAAIKESRVTSQQSLSGTGALHLAGAFLKEFFTTESKKAPTVYLSNPTWANHNQIFTSLGLQVEKYPYWDNDTKSLNLKGFLSTIQEAPKNSIFVLHACAHNPTGLDATKEQWEEILEALAKNEHLALYDSAYQGFASGNLDNDGFAVRLAVDSKKLKTPIVICQSFAKNCGMYGERVGAIHVIPAENDKSLNNAIKSQLNKLTRSEISNPPAYGAKVVATILTDSELRQQWEDDLVTMSSRINKMRTRLRDLLTNQYSTPGNWDHIVSQSGMFSFTGLTPDMVSRLEKNHGIYLVSSGRASVAGLNDGNVEQVAKAIDEVVRFYSKSKL

SEQ ID NO: 12926 - DNA, 1296 bp, Debaryomyces hansenii CBS767
  CDS (1)..(1296)
atgttatcaagggtacaattaaagcgcataccaaattgcagacagttttctgtgatgaacagggcttgcaaatggaacgatattccattagcaccaccggataaaatcttgggtatcagcgaagcatttgttaaggattccaacaccaagaaaatcaatttgggagttggtgcatacagaaacaactctggtaagccaattgtgttcgaatcggtcaaaaatgctgaggccaagttattagaaacagaaaccgaaaaggaatacactggtattatcggtaacaagaacttccaaaaagtggtcagaaactttattttcaacaacagcggtaaggacgccaatggggccagattgattgacgaaaacagaatcgtcaccagtcaaaccatttctggtaccggttctttgagggttattgctgatttcttacacagattcaacacggccaagaaaatatacgtgccaaagccaacctgggccaaccacattgctgttttcactgatgctggtatgagtaccgaatactacgattactacaataaggaaatcaacaacttggactacgataagttgaagcaatcgttgtctaacgccgaagaaggttctgtggtcttgttgcacgcttgttgccacaaccctactggtatggacttgtcatccgaacaatgggacgaagtcttagccatcgtccaacaaaagcaattgttcccattagttgatatggcctaccagggtttcgcgtccggtaacccatacaaggacattggattgattcgtagattgaacgagttagtcgtcaacggtgacatttccacctacgctttatgtcaatctttcgctaagaacatgggtttgtacggtgaaagaactggttctatctccattgtcaccgaatctgctgaacattccactgcgattgagtcccaattgaagaagttaatcagaccaatctactcgtcgcctccaatccacggttccaagattgtggaaaccatcttcgccgacgaatccttgtacaactcttggttaagtgacttggaccaagttgtttccagattaaacaccgtcagaaccaagttatacgagaaattggacaagtccaactacaactgggaccacttattaaaacaaagaggtatgttcgtttacactggtttatcagctgaacaagttattgaattgagagaaaagtactctgtttacgctactgaagacggtagattctccatttctggtatcaacgacaacaacgttgattacttggccgatgccatgaaccaagttgttaacaaataa

SEQ ID NO: 12927 - protein, 431 aa, Debaryomyces hansenii CBS767
MLSRVQLKRIPNCRQFSVMNRACKWNDIPLAPPDKILGISEAFVKDSNTKKINLGVGAYRNNSGKPIVFESVKNAEAKLLETETEKEYTGIIGNKNFQKVVRNFIFNNSGKDANGARLIDENRIVTSQTISGTGSLRVIADFLHRFNTAKKIYVPKPTWANHIAVFTDAGMSTEYYDYYNKEINNLDYDKLKQSLSNAEEGSVVLLHACCHNPTGMDLSSEQWDEVLAIVQQKQLFPLVDMAYQGFASGNPYKDIGLIRRLNELVVNGDISTYALCQSFAKNMGLYGERTGSISIVTESAEHSTAIESQLKKLIRPIYSSPPIHGSKIVETIFADESLYNSWLSDLDQVVSRLNTVRTKLYEKLDKSNYNWDHLLKQRGMFVYTGLSAEQVIELREKYSVYATEDGRFSISGINDNNVDYLADAMNQVVNK

SEQ ID NO: 12928 - DNA, 1212 bp, Debaryomyces hansenii CBS767
  CDS (1)..(1212)
atggtacaatacgaatttttcggagatttaactctagctcccaaagatgaaatgaatgatcttaagataaaacttgaaaattgtcaatccagtaaggttgatgtttccgcaggagtatatagaggggagaatggtgagtcgtatacattatcatcagtaaaagcagctaaaggagtattacatgcaaatgatcccgggcatgactataattttaccctaggtatcaaaaacttcaacctgatggctgctgatatcatatttgggaaagatatttctactggtggatatattgctacatgtcaaacaatatctggaaccggtgcttgcagtatagctattaaatttctagtggactgctgcaaacttaccaatttctatattggaacaccaacttggcccaattacgctccaatgattaaagcagccaatgctgaagtcgtggaatatgttcattacaatccgttgacaagaagtcttgattttgaaagcgttttagaagccatttctaaagctaagatgcattcagtattcatcctacaattatgttgtcataatcccaccggtactgatttttcaatagatcagtggaaaattttggctgataaaatgcaagaaaaaaaaatcatgccagtgtttgattctgcctatcaagggtttggttcaggtgacattgcggtggacgcaaaacctattagattatactatgctaaaggattgcaatttttggtctgtcaatcattctccaaaaacttggggttatatagcgaaagggttggtgcacttcacgtcgtagtatgtgaaaaaaaattagctgaaattgtctctgatcaattaagaagtatattcagaagagagtgttcaagtgcgccagcttatggggctaggttggctgtcattatagcaaacgacccaaaattaactgaacaatggagaaacgatttaagaacaatctataagagactagttgataaaagaattgagcttcatgatttattgataaagtatcaaactccaggcagcttcgatcatttgttaaatcagaatggtttattttggttcagtggtttgtctaaggtccaatgtaaattattggttgaagaatatcatatctttattccttcgaatggtcgcgttaatatagccggtttaaataatagtaatattcattactttgcgaaatcattttccgaagtaatcaagatctcagtatag

SEQ ID NO: 12929 - protein, 403 aa, Debaryomyces hansenii CBS767
MVQYEFFGDLTLAPKDEMNDLKIKLENCQSSKVDVSAGVYRGENGESYTLSSVKAAKGVLHANDPGHDYNFTLGIKNFNLMAADIIFGKDISTGGYIATCQTISGTGACSIAIKFLVDCCKLTNFYIGTPTWPNYAPMIKAANAEVVEYVHYNPLTRSLDFESVLEAISKAKMHSVFILQLCCHNPTGTDFSIDQWKILADKMQEKKIMPVFDSAYQGFGSGDIAVDAKPIRLYYAKGLQFLVCQSFSKNLGLYSERVGALHVVVCEKKLAEIVSDQLRSIFRRECSSAPAYGARLAVIIANDPKLTEQWRNDLRTIYKRLVDKRIELHDLLIKYQTPGSFDHLLNQNGLFWFSGLSKVQCKLLVEEYHIFIPSNGRVNIAGLNNSNIHYFAKSFSEVIKISV

SEQ ID NO: 12930 - DNA, 1296 bp, Yarrowia lipolytica CLIB99
  CDS (1)..(1296)
atgtcatactttgcatcagtccccgcagctcccgcagatgcccttttcggcctcatggccaagtacaaggccgataccttcgacaagaaggtcgacctcggagtcggagcctaccgagataacaccggaaaaccctgggtcctccctgtcgtctccaaggtcgattctctgattgtcgccgaccccactgccaaccacgagtacctccccatcactggtctgccagacttcaccaagtctgccgccaagctgattctggggcctgactctcctgccatcaaggagaaccgagttgcctcttgccagacaatctctggaactggagcaaaccatctgggatctctcttcctgtcgcggttcccctcctccgccgctccccccaagagcgtcttcctcagccgttctcccccttcccctggagcaaccggagatactcctccccgagctgctggcggccgaatctggatctccaaccccacctgggccaaccacaagcagatcttcgagaacgtcggtctgaccgttaagcagtacccctactgggaccccaagactctaggtctggacctcaagggcatgctcaacgctctggagaatgagacccgacccggagacattgttctgttgcacgcctgcgcacacaaccccaccggtgttgaccctgctcgagaggagtgggagaagattgccgctgtctgcaagtccaagaagctcttccccttcttcgactctgcctaccagggctttgcctccggtgatctcgagcgagacgcctgggcagtccagtactttgtttcccagggcctggagctgctcatctgccagtccttcgcaaagaactttggcctgtacggccagcgggccggatgcctgcacttcatcacccagaccgccaaggcgtcggagaacgtcaagtcacagcttgccttcctgcagcgatcagaaatctccaaccctcccatctacggtgcccgaattgtggcccgagttcttaacaaccccgagctcttcaatgagtggaaggaaaacctgctggagatggccaaccgaatcaagagcatgcgagatgcgctcaagagcgaactcatcaagcttgatactcccggtaactgggaccatatcactaaccagattggtatgttctctttcaccggtctgtcgccccagcaggtggaccgactggttaacgagttccacgtttacctgaccaagaacggccgaatttccatggctggtcttaacacacacaacgtcgcttacgtcgccaaggcctttgatgccgtcgttcgaggttaa

SEQ ID NO: 12931 - protein, 431 aa, Yarrowia lipolytica CLIB99
MSYFASVPAAPADALFGLMAKYKADTFDKKVDLGVGAYRDNTGKPWVLPVVSKVDSLIVADPTANHEYLPITGLPDFTKSAAKLILGPDSPAIKENRVASCQTISGTGANHLGSLFLSRFPSSAAPPKSVFLSRSPPSPGATGDTPPRAAGGRIWISNPTWANHKQIFENVGLTVKQYPYWDPKTLGLDLKGMLNALENETRPGDIVLLHACAHNPTGVDPAREEWEKIAAVCKSKKLFPFFDSAYQGFASGDLERDAWAVQYFVSQGLELLICQSFAKNFGLYGQRAGCLHFITQTAKASENVKSQLAFLQRSEISNPPIYGARIVARVLNNPELFNEWKENLLEMANRIKSMRDALKSELIKLDTPGNWDHITNQIGMFSFTGLSPQQVDRLVNEFHVYLTKNGRISMAGLNTHNVAYVAKAFDAVVRG

SEQ ID NO: 12932 - DNA, 1302 bp, Yarrowia lipolytica CLIB99
  CDS (1)..(1302)
atgctccgaaccatcgcccgaacccacgctgtggccgccaccaaggtcgtgcgagcctccactttttctgccacccccgccgcctcttttgtgcgattccagtccgtctgggccaaggtcccccagggtccccccgacgccattctcggaatcaccgaggcgttcaagaaggacgcctttgagcagaagatcaacctcggtgttggcgcctaccgagatgacggcggaaagcccttcgttcttccctccgtccgagaggccgagaaggaggtggtgaacaaggccctcgacaaggagtacgcccccatcaccggagtccccgccttcaccaaggctgctgccgagctcgcttacggcgccgactcccccgccgtcctcgaggaccgaattgccatcacccagaccatctccggtaccggtgctctgcgaatcggagccgagttcctcaacaagttctactcctccaagaagattctgctcccccagccttcttgggctaaccacaaggccgttttcaccgccgccggcctcgagcccgccacctaccggtactacgaccccaagaacattgccctcgactttgagggtctgctcgccgacctggaggctgcccccaacggaaccgccgtccttctgcacgcctgtgcccacaaccccaccggtgttgaccccactcccgagcagtggcgaaagattgaggaggtcgtcaaggccaagggccacttccccttcttcgacatggcctaccagggctttgccaccggtgacgtcaaccgagacgcctaccccatccgatactttgtcgagcagggccacgaggttgctctgtgccagtccttcgccaagaacatgggtctttacggtgagcgagtcggtgctttctctcttgtctgccaggacaccgccgagaagaaccgagttgactctcagctgaagattatcatccgacccttctactccaacccccccgtccacggtgcccgaatcgccgccaccatcctcaacaaccccgagctcaagaagcagtggctcggtgaggtcaagcagatggccgaccgaatgatcaagatgcgagctctgctcaaggagaacctcgagagacttggctcccagcagaactgggaccacgtcacctctcagattggtatgttctgctacaccggtctgtctcctgagcaggttgagcgacttgccaaggagttctccgtctacggaaccaaggacggccgaatctccattgccggaatcacctctcagaacgtcggccgactggcccaggctatctacgaggtgaccaaatag

SEQ ID NO: 12933 - protein, 433 aa, Yarrowia lipolytica CLIB99
MLRTIARTHAVAATKVVRASTFSATPAASFVRFQSVWAKVPQGPPDAILGITEAFKKDAFEQKINLGVGAYRDDGGKPFVLPSVREAEKEVVNKALDKEYAPITGVPAFTKAAAELAYGADSPAVLEDRIAITQTISGTGALRIGAEFLNKFYSSKKILLPQPSWANHKAVFTAAGLEPATYRYYDPKNIALDFEGLLADLEAAPNGTAVLLHACAHNPTGVDPTPEQWRKIEEVVKAKGHFPFFDMAYQGFATGDVNRDAYPIRYFVEQGHEVALCQSFAKNMGLYGERVGAFSLVCQDTAEKNRVDSQLKIIIRPFYSNPPVHGARIAATILNNPELKKQWLGEVKQMADRMIKMRALLKENLERLGSQQNWDHVTSQIGMFCYTGLSPEQVERLAKEFSVYGTKDGRISIAGITSQNVGRLAQAIYEVTK

SEQ ID NO: 12934 - DNA, 1266 bp, Kluyveromyces lactis NRRL Y
  CDS (1)..(1266)
atgtccagaaccatacttaacaacatccaagaattgccaggcgatgctttattcgctatcaaacaacgtttagctgaagaccctagatctgctaaggtcgatttgggtattggtgcctatagagatgaggatggtaaaccatgggtattaccagctgttcgtaaagctgaaacattgatccattctgacgcatctttcaaccatgaatatttgggtattgccggtttacctgctttgacttcaggtgcagccaaagtgatcttgggcgatgattcatctgctttggctgagaaaagagttgtttctgctcagtctctatccggtactggtgccttacacattgcagctaaattcatccaaaagttcttacctgggaagttgttgtatgtttctgatccaacctgggctaaccatgtctctatctttgagtcacaaggtgtcaaaactgctacgtatccttactgggatgctgctaccaaatctttggatttggaaggatttatcaaggctatagaatcaagtccaagaggctccgtgttcttgcttcatgcttgtgctcataatccaactggtttggatccaaccgaagctcaatgggagaaaattctcagtgcctgtgtgaagaatgatatcatcccattgttcgactctgcctaccagggtttcgcatctggtagtctaacgaatgatgcttttgccgtcagacttggtgtgaagaaattcgctgaatctgctccaattttcatctgtcaatcatttgccaagaatgttggtatgtacggtgaacgttgtggatgcattcatttgattgttccaagacaagaatctaacgttaatgtttccactattaccaaagctgttgcatctcaaatcagtaaaatcaccagatcagaggtttctaaccctcctgcttacggtgccaagatcgttgccaaaattttgaacaatgctgaattgactgaacaatggcataaggatatggttacaatgtctcaaagaatcaccaaaatgagacactccttacgtgacaagttactcgagttacagactccaggtaactgggatcacatcgtcaaccaatgtggtatgttctcttacaccggtttaacaaagccaatggtggaaagattagaaaaagaacatggtgtatacatggttgctagtggtagagcttccattgctgggttgaatgaaaagaacgttgaacatgtggctaaggctattaatgaagtcgttcgtcatttcaatgaatcatccaaattataa

SEQ ID NO: 12935 - protein, 421 aa, Kluyveromyces lactis NRRL Y
MSRTILNNIQELPGDALFAIKQRLAEDPRSAKVDLGIGAYRDEDGKPWVLPAVRKAETLIHSDASFNHEYLGIAGLPALTSGAAKVILGDDSSALAEKRVVSAQSLSGTGALHIAAKFIQKFLPGKLLYVSDPTWANHVSIFESQGVKTATYPYWDAATKSLDLEGFIKAIESSPRGSVFLLHACAHNPTGLDPTEAQWEKILSACVKNDIIPLFDSAYQGFASGSLTNDAFAVRLGVKKFAESAPIFICQSFAKNVGMYGERCGCIHLIVPRQESNVNVSTITKAVASQISKITRSEVSNPPAYGAKIVAKILNNAELTEQWHKDMVTMSQRITKMRHSLRDKLLELQTPGNWDHIVNQCGMFSYTGLTKPMVERLEKEHGVYMVASGRASIAGLNEKNVEHVAKAINEVVRHFNESSKL

SEQ ID NO: 12936 - DNA, 1257 bp, Kluyveromyces lactis NRRL Y
  CDS (1)..(1257)
atgagaataccaacgcgaagagggctgtcggccttgtcaagagtaactagggctcctgctgataagattctaggtttaacagagaagtttaacgttgacagacatccaaacaagataaatctgaccgttgggatctataaggacaaccggggccgtgtgaccaccttccctagtgtagcttctgcccaatcattacttgagacgagtctcgatctgaataatgatttatcgtatttgcctatcactgggtcgcaggattaccaaaacaatgtgttaaatttcttgtatcgagagtcaagtgacgggagtgaattattggagaacaacagaatcacgtttgtgcaaactttgagtggtaccggtgcattagctgtagcttcaaaactcttggcaacgtttgtgtcgaaaaccgtatggataccaaatccatcttgggctaatcattcgaacgttttccaatggaacggattcaatcagatcaaatattatacgtactacgaggatgggaaattgagtatcgataaatggctcaaggaactcaaggagagttgtagttctagggaccccgactggcccccctctatagtgttacacgcttgctgtcataatccaacaggagtggaccctacgttggaacaatggcaacagatattgccagtgatccatgatttaggaataactcccataatagacatggcgtaccaaggaatggaatcagggaaccttatacaggatgcttatctattaagaatgtgtctagaatacgaatggcccaacggtctatttgtgtgccaatcgtttgctaagaacatgggcttatacggtgaacgtgtaggttcgttaagtgtcgttgtcccaccaaatcccttggatctcaaatcaaccatcgactctcaactaaagaagattgtaagaggtatatactcttctccaccgggatatgggtctcgtgtagcgaacttggtgctaagcaatccaaaattgaagcagcaatggttcgtagacgttaagaatatgtctgatagactatggaacgttagaattcaaatgcatgagagattgaattggcccaatcttgttgattttaaaacacaacatgggatgttttattacacagggttaaacccatatcaggttcaaattctgcaggagaggtacggtatttatttaactgaagacggcaggatgtcgttatctggagttaacgacggtaatattgattatttatgcgattctttgcgccaagtggttcaataa

SEQ ID NO: 12937 - protein, 418 aa, Kluyveromyces lactis NRRL Y
MRIPTRRGLSALSRVTRAPADKILGLTEKFNVDRHPNKINLTVGIYKDNRGRVTTFPSVASAQSLLETSLDLNNDLSYLPITGSQDYQNNVLNFLYRESSDGSELLENNRITFVQTLSGTGALAVASKLLATFVSKTVWIPNPSWANHSNVFQWNGFNQIKYYTYYEDGKLSIDKWLKELKESCSSRDPDWPPSIVLHACCHNPTGVDPTLEQWQQILPVIHDLGITPIIDMAYQGMESGNLIQDAYLLRMCLEYEWPNGLFVCQSFAKNMGLYGERVGSLSVVVPPNPLDLKSTIDSQLKKIVRGIYSSPPGYGSRVANLVLSNPKLKQQWFVDVKNMSDRLWNVRIQMHERLNWPNLVDFKTQHGMFYYTGLNPYQVQILQERYGIYLTEDGRMSLSGVNDGNIDYLCDSLRQVVQ

SEQ ID NO: 12938 - DNA, 1194 bp, Erwinia carotovora subsp
  CDS (1)..(1194)
atgtttcaaaacgttgatacctatgccggagatcctatcctgtctctgatggaaaaattcaaacaggatccaagagcagataagatcaatttgagtatcgggctgtactacaacgagcagaatattatcccgcagttgcgatccgtcagcacagcggaaagcagcctacggcagcctgctcagagcgcgaattcctatctgccgatggaagggttacagccttaccgcacggctatccagcatttgttgttcggtgaaagccacgcggcgctggaagcaggtcgcatcgcgaccatccagacgttgggcggttccggtgcgctgaaagtcggtgcagatttcctgaaacgctacttcccagcgtcagaagtgtgggtcagcgatccaacatgggaaaaccatattgcgatcttcgagggcgcgggctttaacgttcacacctacccgtatttcgatagcgaaagtctgggcgtgaaatttgacgccatgctctccaccctgcaaacgctgccaacacgcagcattgtgctgctacatccgtgctgccataacccgactggttccgatctcaccaccgaacagtgggatcgcgtcattgaggttatcatccagcgtgagctgattccgtttatggacatcgcttatcagggctttggcctcggcatcgagcaggatgcgtatgcaattcgcgccgttgccagcgcaggcgttccggcactgatcgccaactcgttctccaagattttctcactgtatagcgagcgcgtcggtggcctttccgtggtgtgtgacgatgccgacagcgcgcagcgcgtattgggtcagttaaaagcgaccgtacgccgcaactactcttccccaccaaatttcggcgctcaggtggtttctaaagtcctgaacgacgtgcagttgaacgccgactggaaagcggaagtcgaagagatgcgcacgcgtattctaagcatgcgtcaggagttggtttccgcattgaaaaacgcactgccgaaccgcaacgtcgactacctgctcacccagcgcggtatgttcagttacacgggtttcagcccggaacaagttgaccgcctgcgtgaagaatttggcgtgtacctgatcgccagcggccgtatgtgtatggcgggactcaaccacagcaacgtccaacgcgtcgctgccgctttcgccgccattcagtaa

SEQ ID NO: 12939 - protein, 397 aa, Erwinia carotovora subsp
MFQNVDTYAGDPILSLMEKFKQDPRADKINLSIGLYYNEQNIIPQLRSVSTAESSLRQPAQSANSYLPMEGLQPYRTAIQHLLFGESHAALEAGRIATIQTLGGSGALKVGADFLKRYFPASEVWVSDPTWENHIAIFEGAGFNVHTYPYFDSESLGVKFDAMLSTLQTLPTRSIVLLHPCCHNPTGSDLTTEQWDRVIEVIIQRELIPFMDIAYQGFGLGIEQDAYAIRAVASAGVPALIANSFSKIFSLYSERVGGLSVVCDDADSAQRVLGQLKATVRRNYSSPPNFGAQVVSKVLNDVQLNADWKAEVEEMRTRILSMRQELVSALKNALPNRNVDYLLTQRGMFSYTGFSPEQVDRLREEFGVYLIASGRMCMAGLNHSNVQRVAAAFAAIQ

SEQ ID NO: 12940 - DNA, 1191 bp, Erwinia carotovora subsp
  CDS (1)..(1191)
atgtttgaaaatatctctgctgcaccggccgatcctattctcgggctgaccgatcttttccgcgccgatgaccgcgcggataaaatcaatctgggtattggtgtctataaagatgaaaccggcaaaactccggttctgaccagcgtaaaaaaagcagaacactatctgctggaaaatgaaaccaccaaaaactatctgggcattgacggtctgccagcattcggtcagtgcacgcaggaactgctgtttggcaagcagaatgccatcattgccgacaaacgtgctcgtacggcacaaaccccaggcggaaccggtgcgttgcgcgtagccgctgatttcattgcaaatcagacgtcagcaaaacgcatctggatcagtaacccaacctggccaaatcacaataacgtgttctctgctgccggtttggaagtttgccagtatgactattacgatgctgctaaccacgcactggattttgatggtttgctgaatagcctgaacgccgtagaagcgggtgacgtggtgctgtttcacggctgttgtcataacccaaccggtatcgatcctaccgctgagcagtgggctacgctggccgagctgtcggtagcaaaaggctggctgccgctgtttgacttcgcctatcagggctttgcccgtggtatcgaagaagatgcggaaggcctgcgactcttcgctgcgaagcacgctgaactgatcgtatgcagctcgtactctaaaaatttcggtctgtacaatgaacgtgtcggtgcctgtacgctggttgctgctgatgccgcaacagcagacaaggcattcagtcaggtgaaagccgccattcgcgcaaactactctaacccgccgtcacacggcgcgaccattgttgctaccatcttgggcaatgatgcgctgaaggccatttgggagcaggaattgacggcaatgcgggagcgtattcagcgtatgcgtcagctgttcgtgaataccttgcaggaaaaaggcgcacagcaggatttctccttcatcatcaaccagaatgggatgttctcattcagcggcttgaccaaggagcaggttctgcgtctgcgtgacgaattcggcgtttatgcggtgaattctggccgagtcaatgttgcaggaatgacgccagaaaacatggcgccactctgcgaagcgattgttgccgtgctctga

SEQ ID NO: 12941 - protein, 396 aa, Erwinia carotovora subsp
MFENISAAPADPILGLTDLFRADDRADKINLGIGVYKDETGKTPVLTSVKKAEHYLLENETTKNYLGIDGLPAFGQCTQELLFGKQNAIIADKRARTAQTPGGTGALRVAADFIANQTSAKRIWISNPTWPNHNNVFSAAGLEVCQYDYYDAANHALDFDGLLNSLNAVEAGDVVLFHGCCHNPTGIDPTAEQWATLAELSVAKGWLPLFDFAYQGFARGIEEDAEGLRLFAAKHAELIVCSSYSKNFGLYNERVGACTLVAADAATADKAFSQVKAAIRANYSNPPSHGATIVATILGNDALKAIWEQELTAMRERIQRMRQLFVNTLQEKGAQQDFSFIINQNGMFSFSGLTKEQVLRLRDEFGVYAVNSGRVNVAGMTPENMAPLCEAIVAVL

SEQ ID NO: 12942 - DNA, 1232 bp, Pseudomonas putida
  CDS (10)..(1206)
aaggtaacaatgagcctgttttccgctgtcgagctggcaccccgcgaccctatcctgggcctcaacgaagcattcaacgccgacccacgtaccgacaaggtcaacttgggcgttggcgtgtactgcaatgaggaaggccgcattccgctgctgcgcgccgtgatcgaagccgaaacccagcgtgccgcccagcacgcctcgcgcggctacctgccgatcgacggcatcgccacttacgaccaggccgtgcaaaaactgatcttcggcgccgagtcgccactgctggccgctggccgcgtggtcaccgtgcaggccgttggcggcaccggcgcgctgaagatcggcgccgacttcctcaagcgcctgtcgcccaatgccgtggttgccatcagtgacccgagctgggaaaaccaccgcgcactgttcgaaaccgccggtttcccggtacagaactaccgctactacgacgcgcctagcaacgacgtcaaccgtgccggcatgctcgaagacctgaacaacctgccgtccggctcgatcgtcgtgctgcatgcctgctgccacaacccgactggcgtcgacctgggcctggacgactggaaaaacgtcctggaagtggtcaaggccaagggccatgtgccgttcctcgacatggcctaccagggctttggtgacggtatcgccgaagacgccttcgccgtgcgcctgttcgccgagtcgggcctggagttcttcgtttccagctcgttctccaagtcgttctcgctgtacggcgagcgcgttggcgcactgtcgatcgtcaccggcaacaaagacgaaagcactcgcgtgctgtcgcaggtcaagcgcgtaatccgcaccacctactccaacccgccgacccacggcgcgaccatcgtcgctaccgtgctgaacagcgacgaactgcgccagatgtgggaagccgagctgggcgagatgcgccagcgcatccacggcatgcgccagcaaatggtcagcctgctggctgaatatggcgccaagcgcgacttcagcttcgttggccgccaggcgggcatgttctcctactcgggcctgaccgttgaacaagtggcgcgcctgaagaacgattttggcatctacgcgctggacaccggccgcatcgcggttgccgcgctgaaccagagcaacatccacgtggtgaccaaggccatcgtcgaagtgctgtaacctattgatttgcctgggagaggctt

SEQ ID NO: 12943 - protein, 398 aa, Pseudomonas putida
MSLFSAVELAPRDPILGLNEAFNADPRTDKVNLGVGVYCNEEGRIPLLRAVIEAETQRAAQHASRGYLPIDGIATYDQAVQKLIFGAESPLLAAGRVVTVQAVGGTGALKIGADFLKRLSPNAVVAISDPSWENHRALFETAGFPVQNYRYYDAPSNDVNRAGMLEDLNNLPSGSIVVLHACCHNPTGVDLGLDDWKNVLEVVKAKGHVPFLDMAYQGFGDGIAEDAFAVRLFAESGLEFFVSSSFSKSFSLYGERVGALSIVTGNKDESTRVLSQVKRVIRTTYSNPPTHGATIVATVLNSDELRQMWEAELGEMRQRIHGMRQQMVSLLAEYGAKRDFSFVGRQAGMFSYSGLTVEQVARLKNDFGIYALDTGRIAVAALNQSNIHVVTKAIVEVL

SEQ ID NO: 12944 - DNA, 1765 bp, Oryza sativa
  CDS (152)..(1450)
gatcaaagcgagacaccttttcttttggcctccttcctcgcgaaaaccaccaaaccaaaacccacacacccacagcttttctccccctcactgctttgctctccagtctccacctcctcctcctcgctgccgcgccgcccatccgccagccatggcgatgtcgtcgtcccgctcggcggccgcgatccgggggcggcgggtcggggcgctggcgagggcgaggaggcacgcgacgagggcgatggcgtcgctgttcggccacgtcgagccggcttccaaggaccccatcctcggcgtcaccgaggccttcctcgccgacccctcccccgacaaagtcaacgtcggcgtcggcgcctaccgggacgacaacggcaagcccgtcgtgctcgagtgcgtgcgcgaggccgagcgccggatcgccggcaacctcaacatggagtaccttccaatgggaggaagtataaagatgattgaagagtcactaaagctggcatatggtgaggattctgatttcatcaaagataagaggattgctgcggtgcaggctctttcaggcacaggtgcatgccggctctttgccgatttccagaggcgtttcttgccaaattcacagatctacatacctacacctacatggtccaatcatcataacatttggagggatgctcaagtacctcaaaggacattcacctattaccatccagagtcaagagggcttgatttcgcaggactgatggatgatattaagaacgctccaaatggttcattctttttgcttcatgcttgtgcccataatcctactggagttgatcctacagaagaacaatggagagagatatcctaccaattcaagataaagaatcatttcccattctttgacatggcataccaaggatttgccagcggtgatccagagagagatgctaaggcaatccgaatcttccttgaagatgggcatcaaattggatgtgctcagtcatatgcaaagaacatgggactgtatgggcaaagggcagggtgcttgagtattctgtgtgaggatgagatgcaagcagtttctgttaagagccaattgcaacagattgcaaggccaatgtacagcaacccacctgttcatggtgcactggttgtctccataatccttaatgatccagaattaaagagtttatggttgaaagaggtcaagggtatggctgatcgaatcattggaatgcggaaggcactccgggaaaatctcgaaggcctaggttcaccattgtcatgggatcacatcaccaatcagattggaatgttctgctacagtgggatgacacctgaacaggtggatcgcttaaccaatgaataccatatttacatgacccgtaatggcagaataagcatggctggtgtaacaacaggaaatgtggcgtatttggctaatgctattcatgaggtcactaaaacgaaatgaagctacttcctcttccctcttcggccaatgaaatgaggcttgcaagcggcggcgttttttttttggggggtggtctattgacctttaagatggttgtactagagaaataatccagtgaacatgctggtgtttctccaacttcggattttccctgtatggaggagagaactagaaacctacccaattttgagagctatagatgccgatcctgttatttcaatcgtcagatgttatgcctgtggcagcctggcaggtcacctcagaaacagagatatgtgaaagagaataaatgcaaatgagctgagcattttgacg

SEQ ID NO: 12945 - protein, 432 aa, Oryza sativa
MAMSSSRSAAAIRGRRVGALARARRHATRAMASLFGHVEPASKDPILGVTEAFLADPSPDKVNVGVGAYRDDNGKPVVLECVREAERRIAGNLNMEYLPMGGSIKMIEESLKLAYGEDSDFIKDKRIAAVQALSGTGACRLFADFQRRFLPNSQIYIPTPTWSNHHNIWRDAQVPQRTFTYYHPESRGLDFAGLMDDIKNAPNGSFFLLHACAHNPTGVDPTEEQWREISYQFKIKNHFPFFDMAYQGFASGDPERDAKAIRIFLEDGHQIGCAQSYAKNMGLYGQRAGCLSILCEDEMQAVSVKSQLQQIARPMYSNPPVHGALVVSIILNDPELKSLWLKEVKGMADRIIGMRKALRENLEGLGSPLSWDHITNQIGMFCYSGMTPEQVDRLTNEYHIYMTRNGRISMAGVTTGNVAYLANAIHEVTKTK

SEQ ID NO: 12946 - DNA, 1215 bp, Acinetobacter sp
  CDS (1)..(1215)
atgtttcaacatatcccaccgtatgcgggcgatccaatcttgtcgcttatggaacaattcaacgccgattcacgcgaagcgaaagttaatttgagcattggtctttattataatgaagacagtattgtgcctcagcttgacagcgtcattgaagcacaaaaacgcattgaaccacgtcaaaacaaggttaagccatacctgccaatggaaggttttaaaccttaccgtgatgcaattcaaaccttgctctttggtcacaatagcccagcagttaaagcagggcgtgccgtgaccattcagacgcttggtggctcaggtgcacttaaagtgggtgcagattttttaaaaaactatttcccagattcagaagtctgggtaagccagccaacctgggataatcatatcgccatttttaatggtgcaggatttaaaacgcatttttatccgtactttgatgcagaaacacgtggtctcgattttgaaggcatgttagcgacattaaaacagcttccaaagcacagcattgtgctactacatccatgctgtcataacccgactggtgttgatctggtaccggcacaatgggatcaggtcattgacgtattaaaagcaggccatctgattcctttcctcgacattgcctatcagggctttggtgatggcatggagcaagatgcttatgcaattcgtgcacttgatcagtctggtcttaattttattgtcagcaattcgttctccaaaatcttttcactgtatggcgaacgtgtaggcgggctcacctttgtttgtgatgatgccgaagcagctcaatgcacttttggccagttaaaagcgactgtacgtcgaatttattctagtccaccgactacaggtgcatggttggtcgatcaggtcttgaatgatgctgaactcagtcaacagtggcaaaatgaagttaaggagatgcgtgaacgtattctcaaaatgcgtatcattttacgtgatgaattgaccaaggctttaccagatcgtgactttaactatctggtcgatcaaaaaggcatgtttagctatacaggtttgactgcagatcaggtcgataccctgcgtgaagattatgccatctatctggttcgtagtggccgtatttgtgttgcgggtttaaacatgaataatgtctatattgtagccaaagcgatggctgaagtattagccaccgaagtgactcctgcttaa

SEQ ID NO: 12947 - protein, 404 aa, Acinetobacter sp
MFQHIPPYAGDPILSLMEQFNADSREAKVNLSIGLYYNEDSIVPQLDSVIEAQKRIEPRQNKVKPYLPMEGFKPYRDAIQTLLFGHNSPAVKAGRAVTIQTLGGSGALKVGADFLKNYFPDSEVWVSQPTWDNHIAIFNGAGFKTHFYPYFDAETRGLDFEGMLATLKQLPKHSIVLLHPCCHNPTGVDLVPAQWDQVIDVLKAGHLIPFLDIAYQGFGDGMEQDAYAIRALDQSGLNFIVSNSFSKIFSLYGERVGGLTFVCDDAEAAQCTFGQLKATVRRIYSSPPTTGAWLVDQVLNDAELSQQWQNEVKEMRERILKMRIILRDELTKALPDRDFNYLVDQKGMFSYTGLTADQVDTLREDYAIYLVRSGRICVAGLNMNNVYIVAKAMAEVLATEVTPA

SEQ ID NO: 12948 - DNA, 1362 bp, Candida glabrata CBS138
  CDS (1)..(1362)
atgactctgaactacgcgagtgtgcaatgtgtgctgaggatgcgaagcgccgtgatgttaggccgcaggcggttgtcgcggaaagcattaaaacaaagtactttatttgatatccccatggcgccaccggatggtgttttggggctgacggaaactttcaatgcagacgagaacccaaataagattaatttgacagttggggtatataaagatggatggggtcaggtgacaaccttcccttcagtggctcaagctcaaaagattatagacatggatgtgggaatgaacactgatctatcatatttaccgataagtgggtgtgaggatttcaagaagcatacaattaattttctgtatagggacagctgcccgcaagacggccctgcattgattaagaatgatcgaatcagttttatacaaacgctaagtggaactggtgcattagctgtcgcatctaggcttttatcatcttttatttcgagaaagatatggatacccaaaccgtcttggcctaatcacaccaatatatttacccaaaacggttttaccaatcctagattttatagctactatgacagaggcgatttgacgattggaagatggttacaggaattgaggcatgaagttggtaaagactcaaataccaaaacaccacattgtattgttttacatgcctgctgccataatccgaccggccttgatccgacaaaaaagcaatgggaggatataatggatactatttatgaattaggaatgattccaattatagacatggcataccaaggtttagaatcgggcaagctgatagatgacgcatatttactaagactatgtctggacaccagcaggtacaggtcctgggataacggtctatatctgtgccaatcttttgccaaaaacatgggattgtatggagaaagagttggatctttaagtattgtggcacctgaacatgttcctggtgtgaaagaggtcctggactcacaacttaaacagattatcagaagtatgtattcctcccctcctggatatggttcaagagtcgctaaattagtcttatcgaatgataagctcaagtatcaatggtattctgatgttgagacaatggtgaatagactaaaatcggtgagggaaatgatacatgagaggttacaatgggaagagatagttaattttgagcaacaacatggtatgttctatttcacaaaattaggacctgatattgtaaaaaaactcagggaacaatactctatatatttaacgaacgatggcagaatgtccttaagtggcgttaataagagcaatgttgactacttatgcaattccatcaaggctgtgacatctagtaaaacattactgtaa

SEQ ID NO: 12949 - protein, 453 aa, Candida glabrata CBS138
MTLNYASVQCVLRMRSAVMLGRRRLSRKALKQSTLFDIPMAPPDGVLGLTETFNADENPNKINLTVGVYKDGWGQVTTFPSVAQAQKIIDMDVGMNTDLSYLPISGCEDFKKHTINFLYRDSCPQDGPALIKNDRISFIQTLSGTGALAVASRLLSSFISRKIWIPKPSWPNHTNIFTQNGFTNPRFYSYYDRGDLTIGRWLQELRHEVGKDSNTKTPHCIVLHACCHNPTGLDPTKKQWEDIMDTIYELGMIPIIDMAYQGLESGKLIDDAYLLRLCLDTSRYRSWDNGLYLCQSFAKNMGLYGERVGSLSIVAPEHVPGVKEVLDSQLKQIIRSMYSSPPGYGSRVAKLVLSNDKLKYQWYSDVETMVNRLKSVREMIHERLQWEEIVNFEQQHGMFYFTKLGPDIVKKLREQYSIYLTNDGRMSLSGVNKSNVDYLCNSIKAVTSSKTLL

SEQ ID NO: 12950 - DNA, 1260 bp, Candida glabrata CBS138
  CDS (1)..(1260)
atggtaaaaatttcagctacggtgtacaacgatgtcgaaccgatcaagaccgacatattatttgcaacaaagcaaaggtacttgaaggataccagaggtttcaaagttgatttgggtgttggagcatatcgcgctgacaatggtaagccatggattcttccctcggtacgtaaggctgaaaggttggtacaagaggaagatgattatgaccacgaatatctaaatatttgtggtcttgacagtttaacaaacagcgctgctaaagttatacttggggaggattgtccagcattgagagaaagtagggttatctctgtacaatctctgtcaggtgcaggtgccttacatgtggctgctaaatttattaaaaagtacacacctgaaaagaaaatttacttgtcaaacccaacttggcctattcatcagtcaatatttgaaaatgtggatttagagactgattcctacccatattgggatgctaccaataaaagcttggattttgagggtttcataaaggcaattgatcatgccccaagaggatccatatttgttctgcatgcttgtgcacacaacccaacgggacttgatccaacgcaagagcaatggcatcaaattattgaatccattcagaaaggtgatcacatcccactatttgactctgcttatcaaggctttgcgtccggcgatcttgaaagagatgcatatgctatacgctacaccataaatcaattaagagactgtgcacctatatttgtagcacaatcatttgctaaaaatgttggaatgtatggtgagagagttggttgtctgcacttagttctaccggcgcagaaggaggatattgtaccaataaaggatgctataacctcccaactttcgagaattatcagaagtgaaatttcaactccaccagcatacggtgctaaggttgtatcaaaaatatttactacaccagaactgaaggagcaatggtatcaagatttggtgaccatgtcaagtagaatcatatcggttaggacacgtttacgtgacctattagctgagtacaatacacctggaaactgggatcatattgttcagcagtgtggtatgttctcatttacaggactaactcctgagatgaccaagcgattggaaactgaacatgcagtttatatggtgcctactggtagggcatctgttgcaggcctaaatactgggaatgtacaacatgttgctaaggctataaatgaagtggttaatcactttatgaaagattag

SEQ ID NO: 12951 - protein, 419 aa, Candida glabrata CBS138
MVKISATVYNDVEPIKTDILFATKQRYLKDTRGFKVDLGVGAYRADNGKPWILPSVRKAERLVQEEDDYDHEYLNICGLDSLTNSAAKVILGEDCPALRESRVISVQSLSGAGALHVAAKFIKKYTPEKKIYLSNPTWPIHQSIFENVDLETDSYPYWDATNKSLDFEGFIKAIDHAPRGSIFVLHACAHNPTGLDPTQEQWHQIIESIQKGDHIPLFDSAYQGFASGDLERDAYAIRYTINQLRDCAPIFVAQSFAKNVGMYGERVGCLHLVLPAQKEDIVPIKDAITSQLSRIIRSEISTPPAYGAKVVSKIFTTPELKEQWYQDLVTMSSRIISVRTRLRDLLAEYNTPGNWDHIVQQCGMFSFTGLTPEMTKRLETEHAVYMVPTGRASVAGLNTGNVQHVAKAINEVVNHFMKD

SEQ ID NO: 12952 - DNA, 1257 bp, Candida glabrata CBS138
  CDS (1)..(1257)
atgtctgccaccatatttaacaacatcgaagaacttcctgctgatgcccttttcggtatcaagcaaaggtacaatcaagataccagagccaccagagttgacttgggtattggtgcgtaccgtgatgaccaaggcaaaccatgggtgttgccttcggttagaatggctgaaagggcaatccaagaggatccaagctacaatcatgaatacttgggtatcaatggtcttccaagtttgtcttccgctgctgctaatgttatatttggtgaagactccccagctttgaaagaaggcagaaccatctcagttcaatctttgtctggtacaggtgctttgcacattgctgccaagtttatctctaagttcgctgctgacaagaagatttatttgtctcagccaacttgggctaaccacaacgccatcttcaaggcacaaggtttagagactgcttcttatccatactggaagagttctaccaagtcccttgacttggaaggtttcatctcagccatcgaaagtgcgccaaagggttctatattcctgctgcatgcatgtgcacacaacccaactggtttggacccatctgagaagcaatggcccgttatcctggatgctctggtcaagggcgatcacttggccttattcgactccgcttaccaaggttttgcctccggtgacttggacaaggacgcctttgctgtgcgtttgggtgtcgaaaagttggcctccacttcaccaatctttgtatgccagtctttcgccaagaacgtcggtatgtatggtgaaagagtcggttgtttccacttgatcctacctaagcagaatgccaatctcgcaccaatcaagtctgctatcacatctcaaatatctagtattatcagaagtgaagtgtccaactccccagcttatggtgccaagatcgtttctaagattttgaacacaccagagcttactaagcaatggcacgaagacatggttaccatgtcatctagaatcaaggagatgagaatcgcattgagagaccatctagttaagttgggaactccaggtacttgggaccacatcgtcgagcaatgcggtatgttctctttcacaggcttgaccccagagatggttaagagactggaggtccagcacgctgtctacttggtctccagtggtagagcctctattgccggcctaaactccggcaacgttgagtacaccgcaaaggccatcgacgaagtagtccgtcactactcaacttccaagttgtga

SEQ ID NO: 12953 - protein, 418 aa, Candida glabrata CBS138
MSATIFNNIEELPADALFGIKQRYNQDTRATRVDLGIGAYRDDQGKPWVLPSVRMAERAIQEDPSYNHEYLGINGLPSLSSAAANVIFGEDSPALKEGRTISVQSLSGTGALHIAAKFISKFAADKKIYLSQPTWANHNAIFKAQGLETASYPYWKSSTKSLDLEGFISAIESAPKGSIFLLHACAHNPTGLDPSEKQWPVILDALVKGDHLALFDSAYQGFASGDLDKDAFAVRLGVEKLASTSPIFVCQSFAKNVGMYGERVGCFHLILPKQNANLAPIKSAITSQISSIIRSEVSNSPAYGAKIVSKILNTPELTKQWHEDMVTMSSRIKEMRIALRDHLVKLGTPGTWDHIVEQCGMFSFTGLTPEMVKRLEVQHAVYLVSSGRASIAGLNSGNVEYTAKAIDEVVRHYSTSKL

SEQ ID NO: 12954 - DNA, 1287 bp, Staphylococcus aureus subsp
  CDS (1)..(1287)
atgaatcctttagcccaaagcttaaatgaacaacttcaacagtcaaatgcaactgcctttgcaatgttatctgacttaggtcaaaatatgttttatccaaagggcattttatctcaatctgctgaagcaaagagtacaacatataatgcaactataggtatggcgacaaataaagacggaaaaatgtttgcatcatctttagatgcaatgtttaatgatttaactccagatgaaatattcccttatgcgccaccacaaggcatcgaagaattacgtgatttatggcaacaaaaaatgttgcgtgacaatccagagctatcaatcgacaacatgtcacgaccaattgttacgaatgcattaacacatggtttatctctagttggcgatttatttgtaaatcaagatgacactatcttgttaccagagcataattggggtaattacaaacttgttttcaatacaagaaatggtgcaaaccttcaaacatatcctatctttgataaagacgggcattatactactgattcactagtagaagctttacaatcatacaataaagataaagtcattatgattttaaattatcctaataatccgacaggttacacacctacgcataaagaagtgactacgatcgtcgaagcaattaaagcattagctaataaaggtacaaaagttatagctgttgtggatgatgcatactatggtttattctatgaagatgtgtatactcaatcattatttactgcattaactaatttacattcaaatgcaatattacctattcgtttagatggggcaacaaaagaatttttcgcatggggattccgtgttggatttatgacatttggaacgtctgatcaaacaactaaagaagttttagaagccaaagtaaaaggtcttatacgaagcaacatttctagtggaccgcttccaacacaaagcgctgttaagcatgtattaaaaaataataaacaattcgataaagaaatcgaacaaaatattcaaacattaaaagaacgctatgaagtcactaaggaagttgtctatgctgatcaatatcattcacattggcaagcatatgactttaactctggatactttatggcaataaaagttcatgatgttgaccctgaagcattgcgcaagcatttaattgacaagtattctattggtgtcattgcacttaatgctacagatattcgtattgcgtttagttgtgtagaaaaagacgatatcccacatgtatttgattcaattgctaaagcaattgatgacttaagataa

SEQ ID NO: 12955 - protein, 428 aa, Staphylococcus aureus subsp
MNPLAQSLNEQLQQSNATAFAMLSDLGQNMFYPKGILSQSAEAKSTTYNATIGMATNKDGKMFASSLDAMFNDLTPDEIFPYAPPQGIEELRDLWQQKMLRDNPELSIDNMSRPIVTNALTHGLSLVGDLFVNQDDTILLPEHNWGNYKLVFNTRNGANLQTYPIFDKDGHYTTDSLVEALQSYNKDKVIMILNYPNNPTGYTPTHKEVTTIVEAIKALANKGTKVIAVVDDAYYGLFYEDVYTQSLFTALTNLHSNAILPIRLDGATKEFFAWGFRVGFMTFGTSDQTTKEVLEAKVKGLIRSNISSGPLPTQSAVKHVLKNNKQFDKEIEQNIQTLKERYEVTKEVVYADQYHSHWQAYDFNSGYFMAIKVHDVDPEALRKHLIDKYSIGVIALNATDIRIAFSCVEKDDIPHVFDSIAKAIDDLR

SEQ ID NO: 12956 - DNA, 1681 bp, Oryza sativa
  CDS (62)..(1438)
ctccactgcgcactgcaccagcaacgcccccccctgatccctctccacggctgcaccggagatggcttccgcccccttcgccgtctcctcctcaccggcggcttccgccgtggccgcgcgctccaaggtgttgcgaggagggaggagcgaggcgaggactggatgccgcctggggatcacgaggaagaattttggacgtgtcatgatggcccttgcagtagatgtctctcgttttgaaggagtgccgatggcccctccagacccaattctcggggtttcagaagcatttaaggcagatcaaaatgatctgaagctcaaccttggtgttggtgcctatagaacagaagagttacagccttatgtcctcaatgtggtcaagaaggctgaaactcttatgttggagaaaggagaaaacaaggagtatctgccaattgaaggcttagctgcatttaacaaagcaactgcagaactattgtttggagctgataatccagtactcaagcaaggacgtgttgctactcttcagtctctctcaggaaccgggtcgctgcgccttgctgcagcatttatacaaagatatttccctgaagcaaaagtactgatatcatctcccacttggggcaatcacaagaacattttcaatgatgcaaaggtaccttggtcagagtaccgttattacgaccccaagactgttggcttggattttgagggaatgatagctgacatacaggctgccccagatggatcttttgttctgctgcatggttgcgctcacaacccaactggaatagacccaactccggaacaatgggagaaaattgcagatgtcattcaagagaagaaacacatgcctttctttgatgttgcatatcagggttttgccagtggaagccttgatgaagatgcatcttctgtcaggctttttgttcaacggggactggaagtgtttgttgcgcagtcttatagcaaaaaccttggtttatatgcagaaagaattggagcaataaatgttgtctgctcaacacctgaagtcgcaaacagggtgaagagccagctgaaacgattggcacggcccatgtattcgaatccccctattcatggtgctaggatagttgccaacgttgttggggatccaaccatgtttggtgaatggaaacaggagatggaagaaatggcagggcgtatcaagaatgtaagacagaagctttatgatagtttgtctgcaaaggacgacagtggcaaggactggtctttcattctgaggcagataggcatgttctcctacacgggcttgaacaaaactcagagtgataatatgaccgacaaatggcacatatacatgacaaaggatgggagaatttcgttggctggattgtccctggctaaatgcgagtacctagctgacgccatcatcgactccttccataacgttagctagacgaggattcaggtcactgctattgtggttaatccttcaatatgctgggatttttggttccttccagcttgagttcttagccaggattgtatatccggcgctacgtaatttggagataataatgaattttgtctgtgcaacaaactttgcatatgctttgtcgaatgtacactggcactatgttagaagcttgaaatatcgaattgaataataatgagactagcaataagccaaactaattcc

SEQ ID NO: 12957 - protein, 458 aa, Oryza sativa
MASAPFAVSSSPAASAVAARSKVLRGGRSEARTGCRLGITRKNFGRVMMALAVDVSRFEGVPMAPPDPILGVSEAFKADQNDLKLNLGVGAYRTEELQPYVLNVVKKAETLMLEKGENKEYLPIEGLAAFNKATAELLFGADNPVLKQGRVATLQSLSGTGSLRLAAAFIQRYFPEAKVLISSPTWGNHKNIFNDAKVPWSEYRYYDPKTVGLDFEGMIADIQAAPDGSFVLLHGCAHNPTGIDPTPEQWEKIADVIQEKKHMPFFDVAYQGFASGSLDEDASSVRLFVQRGLEVFVAQSYSKNLGLYAERIGAINVVCSTPEVANRVKSQLKRLARPMYSNPPIHGARIVANVVGDPTMFGEWKQEMEEMAGRIKNVRQKLYDSLSAKDDSGKDWSFILRQIGMFSYTGLNKTQSDNMTDKWHIYMTKDGRISLAGLSLAKCEYLADAIIDSFHNVS

SEQ ID NO: 12958 - DNA, 1182 bp, Photobacterium profundum
  CDS (1)..(1182)
atgtttaagcagcttacacaagcacaacttgacccaattttgtcgctttctattgcctatcgtgcagatgatcgtgcagataaaatggatttaggtattggcgtatataaaaatagccaaggtgaaacgccaattatgcaagctgttcagcaggcgcaacagcaagtactagcaacacaaacaactaaatcttacgttggtcttgctggaagtgaagtcttcaaccaatcgatgatggatttgctgcttagtggtacatccgctcatagccgtgctgctgcagtccaaacaccaggggcgagtggtgcactgcgtatgttggctgatttgatgcacctcgcgcagccagatactactgtgtggttaacaaacccaagctatgttaaccataaacccgtaatggaagcggctggcttaaccgttaaatactacccgtattttgaccatgcaacgaagcaagtaaatagcgatgcaatgttggctgaattagcaaaagcaggccctaaagatgttgtattacttcatgggtgttgccataaccccacgggtgcagatatttcattttctgattggcaagctattactgcgctagcaaataagaatggttttttaccgtttgttgatattgcttatttaggttttggtgatggtttagagcaggatggtgctggtctaaagtacatggctgacaacgttgaagaaatgattgtagcggcatcatgctctaaaaactttggtttataccgagaacgtactggcgcagctattgttatcagtgattctttgccagaagcacaaaaagcgaaaggacgtatcctacaactggcgcgagcttcttatactatgccgcctgatcacggtgctgcattagttgctacaattttgacagatgatgcgttaaccgcaacatggaagcaagagcttgatcaaatgcataagcgtttacttagcttacgttctggtttaacaaaagctgtacgagcacaaggttcagatgcatttaatttcatcgagcagcataaaggtatgttctctgtaacgggtttaagcccagagcagatcgagcgtcttcgtgctgaatacggcatttatgcggtcggtgatggtcgaatcaatattgcaggcctgcaagagcagcaattagattatttagcaaatgcacttattacggtaacaaagtag

SEQ ID NO: 12959 - protein, 393 aa, Photobacterium profundum
MFKQLTQAQLDPILSLSIAYRADDRADKMDLGIGVYKNSQGETPIMQAVQQAQQQVLATQTTKSYVGLAGSEVFNQSMMDLLLSGTSAHSRAAAVQTPGASGALRMLADLMHLAQPDTTVWLTNPSYVNHKPVMEAAGLTVKYYPYFDHATKQVNSDAMLAELAKAGPKDVVLLHGCCHNPTGADISFSDWQAITALANKNGFLPFVDIAYLGFGDGLEQDGAGLKYMADNVEEMIVAASCSKNFGLYRERTGAAIVISDSLPEAQKAKGRILQLARASYTMPPDHGAALVATILTDDALTATWKQELDQMHKRLLSLRSGLTKAVRAQGSDAFNFIEQHKGMFSVTGLSPEQIERLRAEYGIYAVGDGRINIAGLQEQQLDYLANALITVTK

SEQ ID NO: 12960 - DNA, 1191 bp, Photobacterium profundum
  CDS (1)..(1191)
atgtttgaaaaaatcactgcagcgcctgccgaccctattcttggcttaactgatgagtttaaaaatgatactcgcccagagaaaattaacttgggtgtaggtatctataaagacgagtcaggaaacacgccagtacttgctacagtaaaaaaagcagaagctattttgctggaaaaagaaacgactaagtcgtacttaggcattccaggtacagcagagtacggtcttgccgttcagcagttattatttggtgctaacgctactattatttcagacaaacgagctcaaacagcacaagctccaggaggtacaggcgcactacgtgttgctgccgagtttattaaacgccaactaggcgatgtgaaagtatggatcagtaacccaacatgggctaaccacatcggtgtattcgcggctgcaggtttagaaacggcttcttactcttattacaatgcagaaactaaagacatcgattttgatgctgctttagctgatcttgcaaacgcaaatgaaggcgatattgttttgctacacggttgctgccacaacccaacaggtatcgaccctgttgaagctcagtggcaccagctagcggcgctgtgtgtagagaaaaagttactgccaatgttcgactttgcatatcaaggtttcgcagtaggcgttgaagaagatgcacaaggtttacgtattttcgccgagcagtgttctgaactattggtggcgagctctttctctaaaaactttggcctatacaacgaacgtgttggcgcgttcactcttgttggtaagaatgcagagcaagctgcaacagcatttagccaagtgaaaagtattgctcgtgttatttactcgaacccgccagcacacggtgcagcaatcgttaccctgattctaaatgatgaagcattgcgtaatgagtgggaacaagaagtagccgatatgcgcaatcgtattcaagaaatgcgcacacttttcgttcaaacattaaaagactgtggtgttgatgctgacttcagctttattgaacgtcaaaatggtatgttttcgttttctggtctaaacaaagaccaagtaaatcgcctaaaagaagagtttggcatttacattgttggttctggccgcattagtgttgctggtatgacaaagaacaacatgctgccattatgtaaaggtattgcagctgtgctataa

SEQ ID NO: 12961 - protein, 396 aa, Photobacterium profundum
MFEKITAAPADPILGLTDEFKNDTRPEKINLGVGIYKDESGNTPVLATVKKAEAILLEKETTKSYLGIPGTAEYGLAVQQLLFGANATIISDKRAQTAQAPGGTGALRVAAEFIKRQLGDVKVWISNPTWANHIGVFAAAGLETASYSYYNAETKDIDFDAALADLANANEGDIVLLHGCCHNPTGIDPVEAQWHQLAALCVEKKLLPMFDFAYQGFAVGVEEDAQGLRIFAEQCSELLVASSFSKNFGLYNERVGAFTLVGKNAEQAATAFSQVKSIARVIYSNPPAHGAAIVTLILNDEALRNEWEQEVADMRNRIQEMRTLFVQTLKDCGVDADFSFIERQNGMFSFSGLNKDQVNRLKEEFGIYIVGSGRISVAGMTKNNMLPLCKGIAAVL

SEQ ID NO: 12962 - DNA, 1221 bp, Parachlamydia sp
  CDS (1)..(1221)
atgtcatttgagataagggatcccatgcctttttttaataatatttctcttttgccaccagacccaattttaaatctttctatagacttctctcttgatcaaaatcctcaaaaaattaatttgagtgcaggaacttataaaactgcagatgggcattcgctagttttcaccagtgtccgaaaagcagaaattgatctgcttcaaaaacatctcaataaagattatcaaccgatagagggaaatagtgttttcctaaaaaattctttagagctgttatttggttcagaccacgctttgtttaccaataaaaaattttttgctgttcaaaccgttggaggaacaagcgctttaagattaggaggagagtttttaaataagcttacttgccaaaaaatttttatttctcaaccatcgtggccaaaccacaaacaggtttttgaaaaaacaggtttaaaaattgattcctatccttacttcgattttaatgcatacaaattaaatttttcagggatgtgccaagccatccgccaaatgccaactggaagcgttatccttctgcatggttgctgtcacaatccatcaggggtcgatccaacttttgaacaatggaaagagctttctcagcttattaaaaaacatgaactcattcctttttttgatatcgcttatcaaggatttgggaaagatttagaactcgatgcacaacctattcggtactttgctagtgaaggccatgaaatgttgatcgcttactctttttctaaaaattttggtttatacggggaacgagtaggttttttgactgttgtgacatctcaacaaaaacaaataccatctatagctagtcaattaaaggttttaattcgtgctaattactccaatcctcctcttcaaggagctcgaattgtttctacaatcttgagttcaccagaattaaccgaagaatggaaaatagaattaaaaaatatgcgtgaccgagttgttgaaatgcggaaaacatttattgcttctttgttagtcaaaggagaagataaaaatttaaactacttgcaacaacaaattggtttatttggtttttgtggattaaattattcccaagtcaatcgtttgcggaaagaatttgctatttatattcctagcgacggacgaatcaatattgcaggattaaacactcaaaatattgaatatgtagtcaatgcaatttcatctgttatggagtag

SEQ ID NO: 12963 - protein, 406 aa, Parachlamydia sp
MSFEIRDPMPFFNNISLLPPDPILNLSIDFSLDQNPQKINLSAGTYKTADGHSLVFTSVRKAEIDLLQKHLNKDYQPIEGNSVFLKNSLELLFGSDHALFTNKKFFAVQTVGGTSALRLGGEFLNKLTCQKIFISQPSWPNHKQVFEKTGLKIDSYPYFDFNAYKLNFSGMCQAIRQMPTGSVILLHGCCHNPSGVDPTFEQWKELSQLIKKHELIPFFDIAYQGFGKDLELDAQPIRYFASEGHEMLIAYSFSKNFGLYGERVGFLTVVTSQQKQIPSIASQLKVLIRANYSNPPLQGARIVSTILSSPELTEEWKIELKNMRDRVVEMRKTFIASLLVKGEDKNLNYLQQQIGLFGFCGLNYSQVNRLRKEFAIYIPSDGRINIAGLNTQNIEYVVNAISSVME

SEQ ID NO: 12964 - DNA, 1191 bp, Rhodopseudomonas palustris
  CDS (1)..(1191)
atgctcgatgcgaccaagacacaacgtgcgcgcggattgttgaccgcgtctgcccgcagcgacgtaccgccgttcatggtgatggacgtgatggccgcggccgaccggatcgaagcggcgggcggtcacgtcattcatatggaagtcggacagccatgggcgccggcgccgcgtgcagcgcttgccgccgcgcatgcggcgctcgacagcagccggatcgactacacgtccgcactcgggattccgtcgctgcgcgcacggatcgcgaagcattatcgcgaaacctatcgctgcgacgtcgatccggaccgcatcgtggtcaccaccgggtcgtcgggcgcgttcatcctatcgttcctggctctgttcgaaccgggcgatcgcgtcgcagtgacggtgccgggctatccgccgtatcgccacattctgaatgcgctcggctgtgtgccggtgccgatcgaaacccacagcgagacgcgtcatgcgctgaccggcgaggcgctgcttgccgcgcaccgcaaggcaccgctgaagggtgtgctggttggcagtcccgccaatccgaccggcacgatgatgacgcgcgaggcgctgaccgaattgatcgcggtcgccgaaagcgaaggcatccgcttcatctccgacgagatctatcacggtctcgactatgcattccccgcggtgaccgctgcggagctgtcaccgaacgcggtggtgatcaactcgttctcgaagtacttctgcatgaccggctggcgcgtcggctggatggtgctgccggagagcctggtgcgtccggtcgagcgtctgcagcagaatctggcgatctcggtgccgacgctgtcgcagatcgccgccgaggcggcgttcgacgggcgcgccgagatggaagcggtcaagcgtggttatgaagagaaccgcgcgatcctgatcgaagggctgccgaaggccggcttgaccgagttcctgccggccgacggcgcattctatctgtacgcggacgtctcggccttcacctccgacagctacgatttcaccaagcggatgctggaagaggcgagggtggcggcgaccccggggatcgatttcgacccggtgcgcggcaagagcttcgtgcggttttcctacgcccgctcggcggacgacatgcgcgaggcggtgcgccggatcacggcctggcttggtcgataa

SEQ ID NO: 12965 - protein, 396 aa, Rhodopseudomonas palustris
MLDATKTQRARGLLTASARSDVPPFMVMDVMAAADRIEAAGGHVIHMEVGQPWAPAPRAALAAAHAALDSSRIDYTSALGIPSLRARIAKHYRETYRCDVDPDRIVVTTGSSGAFILSFLALFEPGDRVAVTVPGYPPYRHILNALGCVPVPIETHSETRHALTGEALLAAHRKAPLKGVLVGSPANPTGTMMTREALTELIAVAESEGIRFISDEIYHGLDYAFPAVTAAELSPNAVVINSFSKYFCMTGWRVGWMVLPESLVRPVERLQQNLAISVPTLSQIAAEAAFDGRAEMEAVKRGYEENRAILIEGLPKAGLTEFLPADGAFYLYADVSAFTSDSYDFTKRMLEEARVAATPGIDFDPVRGKSFVRFSYARSADDMREAVRRITAWLGR

SEQ ID NO: 12966 - DNA, 1194 bp, Neisseria subflava
  CDS (1)..(1194)
atgtaccaacacgtcgaatactatcccggcgacccgattttgagcctagtcgaaaccttcaaaaacgaccagcgccccgaaaaagtcaatttgagcataggcatttatttcgacgacgaaggcaaaatgcccgtattggaatccgtgagccgcgccgaaaccgcccgcgccgccacgcctgcgccgtcgccctatctgccgatggaaggtttgaacacttaccgcagcgcggtgcagcatttattgttcggcaaagacaaccctgcgcttgcgcaaggacgcatcgttaccgtacaaaccttgggcggttcgggcgcgctcaaagtcggggcggatttcctgcaccgctggttccccgaagcgcgcgcctacgtcagcgacccaacttgggacaaccaccgcggcatttttgaaggcgcaggtttcgaggtcggcacttatccttattacgaccccgccaccgtcggcgtgaaattcgacgaaatgaccgcgtttttcaatactctgcccgaacacagcgccttaatcctacacccctgctgccacaacccgaccggcgtggatatgtcggaacagcaatgggacgaagtgttgcaaatcatcaaaacgcgcaagcttattccgtttatggacattgcctaccaaggcttcggcggcgatttggacagcgatgcctacgccatccgcaaagcggtggaaatggatttgcctctgttcgtcagcaattcattctcaaaaaacctgtcgctctacggcgagcgcgtcggcggtttgagcgtggtttgcccgaataaagaagaagcagaattggtgttcggacaactcaaattcaccgtccgccgcatctactccagcccgcccgcacacggcgcctacatcgccgccgatgtgatgaacaaccccgaactttacgccttgtggcaaaatgaagtctatgtcatgcgcgaccgcatccgcgccatgcggcagaaactttacgacgtcttgaccgcgcaaatccctgaccgcgatttcacttatttcatcaaacagcgcggcatgttcagttacacaggattgagcgtggaacaagtccgcaggctgcgcgacgaatttgccgtttacctgctggattccggcaggatgtgcgtcgccgggctgaatgcttcgaatatcgcctatgttgccgatgcgtttgccgaagtgctgaaataa

SEQ ID NO: 12967 - protein, 397 aa, Neisseria subflava
MYQHVEYYPGDPILSLVETFKNDQRPEKVNLSIGIYFDDEGKMPVLESVSRAETARAATPAPSPYLPMEGLNTYRSAVQHLLFGKDNPALAQGRIVTVQTLGGSGALKVGADFLHRWFPEARAYVSDPTWDNHRGIFEGAGFEVGTYPYYDPATVGVKFDEMTAFFNTLPEHSALILHPCCHNPTGVDMSEQQWDEVLQIIKTRKLIPFMDIAYQGFGGDLDSDAYAIRKAVEMDLPLFVSNSFSKNLSLYGERVGGLSVVCPNKEEAELVFGQLKFTVRRIYSSPPAHGAYIAADVMNNPELYALWQNEVYVMRDRIRAMRQKLYDVLTAQIPDRDFTYFIKQRGMFSYTGLSVEQVRRLRDEFAVYLLDSGRMCVAGLNASNIAYVADAFAEVLK

SEQ ID NO: 12968 - DNA, 1329 bp, Bacillus amyloliquefaciens
  CDS (1)..(1329)
atgaagggattgtcgtacatgaatgatgcagcaaaagagctgaacagaacattatctgaagaaaacccgcacgtgcttcatatgctttctgatttgggcagagagttgttttatccgaaaggggtgctgacacaatcggcggaagcgaaagccaaggccggaaagtataatgccacgatcggaatcgccacctcacagggcgagtccatgcacttttcccatattcaagagacactgtccgcctataaccccgatgatatctacgattatgctccgccgcagggaaaagagccgctcagacaggaatggctgaaaaaaatgcgtctcgaaaatccttcattagccggcaaagacatcagcacgccgatcgtgacaaacgctttaacacacgggctgagcatcgccgccgacttgttcgtcaatgaaggggatacgctgcttctgcctgataaatattggggaaattacaatttcattttcggtgtccggcgcaaggcatccattgagacgtacccgctttttcagcaggatgggcgttttaatgcggcggggctgtccgagctgctgaaaaagcaggaagaaaaggcgattgtcgtgctgaatttcccgaataatccgacaggctacacgccgggagaagaggaagcggcagaaatcgtcagcgtgatcctggaggcggcggaggccggcaaagagattgtcgtgctcgtagacgatgcgtattacaatctgttttacgatgaaacggccattcaggaatccatcttcagcaaactcgcccaagtgcacgaccgggtgctttgcgtaaaaatagacggcgcgacgaaggaaaattacgcgtggggtttccgcgtcggttttattacgtacagcacaaaaagcgaaaaagcgctgcgcgtgcttgaggaaaaaacaaaagggattatcaggggaacgatttcaagcgccccgcacccgtcccaaacgtttatgctgcgggcgatgcagtcaccggaatacgagaaagaaaaatcgctgaagtataacatcatgaaaaaacgggctgacaaagtgaaagccgttcttgcagaaaacaagcactatgaagacgtatggacgccttatccgtttaactcgggttatttcatgtgtgtccggctgaaagacataaacgccggcgaattgagagtatcgttgcttgaaaagagaggaatcgggacgatatccattaatgaaaccgatttgcgaatcgcattttcatgtgttgaagaagaacacatcgcggatctgttcgaagaaatttatcaagaagcaaagcagctgcagaaacaggcggaaatatcaggctga

SEQ ID NO: 12969 - protein, 442 aa, Bacillus amyloliquefaciens
MKGLSYMNDAAKELNRTLSEENPHVLHMLSDLGRELFYPKGVLTQSAEAKAKAGKYNATIGIATSQGESMHFSHIQETLSAYNPDDIYDYAPPQGKEPLRQEWLKKMRLENPSLAGKDISTPIVTNALTHGLSIAADLFVNEGDTLLLPDKYWGNYNFIFGVRRKASIETYPLFQQDGRFNAAGLSELLKKQEEKAIVVLNFPNNPTGYTPGEEEAAEIVSVILEAAEAGKEIVVLVDDAYYNLFYDETAIQESIFSKLAQVHDRVLCVKIDGATKENYAWGFRVGFITYSTKSEKALRVLEEKTKGIIRGTISSAPHPSQTFMLRAMQSPEYEKEKSLKYNIMKKRADKVKAVLAENKHYEDVWTPYPFNSGYFMCVRLKDINAGELRVSLLEKRGIGTISINETDLRIAFSCVEEEHIADLFEEIYQEAKQLQKQAEISG

SEQ ID NO: 12970 - DNA, 1260 bp, Ashbya gossypii
  CDS (1)..(1260)
atgtctttgactgcgtttaaccagctagaaatccttcctccggacgcactgttcgatgtcaagaagcggctaacccaagacacgcggtcgtttaaagttgacctcgggctcggggcataccgggacgaaaacgggaagccgtgggtgctaccgtgtgtgcgcgaagcggagaaacagttgatggcggaccccggatacaaccacgagtacctggggattgccgggctggaggagttccgcgcggccgcggcgcgtgtgctactcggcgaagacagcgaggcgctggccgagggccgggtggtgtcggtgcagtcgatttccggcaccggggcgctgcacgtggcggcgaagctacttgcgaagacggtgccagatgcgacggtgtacatgtcggaccccacgtggggcaaccactttgccgtgttcgagacacagggtctgcgcacggcgacgtacccatactgggatgcggcgacccgctcactggacatggagggcgttctgggcgcgctgggcgcggcgccgcgcgggtcggtcttcgtgctgcacgcttgtgcgcacaatccaacggggcttgaccccaacgaggagcaatgggtgcagatcctggacgcggtagccgcgcgcgagcacaccgtgctgttcgatagcgcctaccaggggtttgcgtcgggcagcctggctcgcgacgcgtacgcgctgcgcgccgggctgcggcgcctggccgaggtcacgccggtgcttgtgtgtcagtcctttgccaagaacattggcatgtacggtgagcgtgtgggcgctctgcatgttgtcctgccccgccagcctgccgagtcgctggcgcacgtcaaggctgccgtgctgtcgcagctgagccacatcacgcgctcggagctgtcgaacccgcccgcctacggcgccaagatcgtgaccaaggtcctcaccacccccgaactcgccgctcagtggaagaaggacatgatcaccatgtcgagccgcattgcgcgcatgcgccgcgtgctccgcgaccgtctggtcgagctcggtacacctggcaactgggaccacatcgtccaacagtgcggcatgttctcatacaccggtttgacgaaggagatggtcgcccgcatggaaaaggacttcgccatctacatggtctcctcgggccgcatttcgatagccggccttaacgacagcaatgtcggccacgttgccaacgcaattgacaatgctgttcgccacttctctacacccaagctgtga

SEQ ID NO: 12971 - protein, 419 aa, Ashbya gossypii
MSLTAFNQLEILPPDALFDVKKRLTQDTRSFKVDLGLGAYRDENGKPWVLPCVREAEKQLMADPGYNHEYLGIAGLEEFRAAAARVLLGEDSEALAEGRVVSVQSISGTGALHVAAKLLAKTVPDATVYMSDPTWGNHFAVFETQGLRTATYPYWDAATRSLDMEGVLGALGAAPRGSVFVLHACAHNPTGLDPNEEQWVQILDAVAAREHTVLFDSAYQGFASGSLARDAYALRAGLRRLAEVTPVLVCQSFAKNIGMYGERVGALHVVLPRQPAESLAHVKAAVLSQLSHITRSELSNPPAYGAKIVTKVLTTPELAAQWKKDMITMSSRIARMRRVLRDRLVELGTPGNWDHIVQQCGMFSYTGLTKEMVARMEKDFAIYMVSSGRISIAGLNDSNVGHVANAIDNAVRHFSTPKL

SEQ ID NO: 12972 - DNA, 1332 bp, Ashbya gossypii
  CDS (1)..(1332)
atgacacagacaaaccaggtcagagcaagcaccaaaggagtactgggcatgacaagaaatgtagtaggggcgttcacggctaactggcgctgccgcaggcagcaccaagcgcttggacgggtgccggaggcgatgccagaccagatattggggctcacggagcgattcaaccaggaccggaacccgcacaaggtgaacttgaccgtggggatctacaaggacgacaatggggaggtgacgagcttcccgtccgtggcgcgggcgcagcttatggtggaggggcagcggggcggcaggctggcgtacctgccaattgccgggtgtccgagctacggtgcgagggtcagcgactttttgtacagcgagtgtgcgccgcaggggcgggaattcctagccagcggatgcgtcagcttcatgcagacgctgagtgggacgggggcgctctcgctggcatccctgttcctctcgaacttcatctcgaagacgatctgggtgccgcagccctcgtgggccaaccacatgaatatcttcaagctaaacgggtttgaggaggtccgacggtaccgctactacgaggacggggcggtggacgtcgacagctggcttgcccagctagaacgcgcggccgccgaccggccatatccacagtgtattctgttgcatgcctgctgccacaaccccacgggcgttgaccccacgcgcgagcaatggtcccggatcttgagcgtaatcaacggacttggaatggtgcctatcgtggatatggcctaccaagggttggagtctggtgaccttcgtgccgatgcctacttgttgcggatgtgcctcgagcacagatgggacaacgggctttatgtgtgtcattcttttgcgaagaacatgggtctttatggcgaacgagtggggtccctcagtgtggtgcatccgctgggacaatttcaggctaaggccgcgacagattctcagttgaaatgtataatacgggcttcatactcatcaccgccttcatatggctctcgggtcgcaacgaccgtgctttctgtccccgaaatcaagcaacagtggcatgaagatgtacacgggatgtgcaatagactctggtctgtccgctgcatgttacatgagaaactacggtggcccaagttgatagacagtacctcgcaacacgggatgttttattataccggaattggccctgacgccgtggacaccctgagagagaaatattctgtttatttgaccaaggatggtcgattgtcgctagcaggaataaatactggcaatgttgattacgttgctagggcgcttcgtaacgtatctacatacccgtga

SEQ ID NO: 12973 - protein, 443 aa, Ashbya gossypii
MTQTNQVRASTKGVLGMTRNVVGAFTANWRCRRQHQALGRVPEAMPDQILGLTERFNQDRNPHKVNLTVGIYKDDNGEVTSFPSVARAQLMVEGQRGGRLAYLPIAGCPSYGARVSDFLYSECAPQGREFLASGCVSFMQTLSGTGALSLASLFLSNFISKTIWVPQPSWANHMNIFKLNGFEEVRRYRYYEDGAVDVDSWLAQLERAAADRPYPQCILLHACCHNPTGVDPTREQWSRILSVINGLGMVPIVDMAYQGLESGDLRADAYLLRMCLEHRWDNGLYVCHSFAKNMGLYGERVGSLSVVHPLGQFQAKAATDSQLKCIIRASYSSPPSYGSRVATTVLSVPEIKQQWHEDVHGMCNRLWSVRCMLHEKLRWPKLIDSTSQHGMFYYTGIGPDAVDTLREKYSVYLTKDGRLSLAGINTGNVDYVARALRNVSTYP

SEQ ID NO: 12974 - DNA, 1690 bp, Glycine max
  CDS (263)..(1522)
tcattcttcttacataataggggaaggagaagaaaaaaaatgaaataagaaaaactcaactttgtaattcgtggagggaatacttttccattacgcacgcactttaattacagacgagaaaattataattaatagtaatacagacagcagcatgcgcccaccggttattctcaaaactaccacctctcttttggattcttcttcttcttcaccaccctgtgatcgcagactcaacactctcgctagacacttccttccgcaaatggcttctcacgacagcatctccgcttctccaacctccgcttctgattccgtcttcaatcacctcgttcgtgctcccgaagatcctatcctcggggtaactgtcgcttataacaaagatccaagtccagttaagctcaacttgggagttggtgcttaccgaactgaggaaggaaaacctcttgttttgaatgtagtgaggcgagttgaacagcaactcataaatgacgtgtcacgcaacaaggaatatattccgatcgttgggcttgctgattttaataaattgagtgctaagcttatttttggggctgacagccctgctattcaagacaacagggttaccactgttcaatgcttgtctggaactggttctttaagagttgggggtgaatttttggctaaacactatcaccaacggactatatacttgccaacaccaacttggggcaatcacccgaaggttttcaacttagcaggcttgtctgtcaaaacataccgctactatgctccagcaacacgaggacttgactttcaaggacttctggaagaccttggttctgctccatctggatctattgttttgctacatgcatgcgcacataaccccactggtgtggatccaacccttgagcaatgggagcagattaggcagctaataagatcaaaagctttgttacctttctttgacagtgcttatcagggttttgctagtggaagtctagatgcagatgcccaacctgttcgtttgtttgttgctgatggaggcgaattgctggtagcacaaagctatgcaaagaatctgggtctttatggggaacgtgttggcgccttaagcattgtctgcaagtcagctgatgttgcaagcagggttgagagccagctgaagctagtgattaggcccatgtactcaagtcctcccattcatggtgcatccattgtggctgccattctcaaggaccggaatttgttcaatgactggactattgagttgaaggcaatggctgatcgcatcatcagtatgcgccaagaacttttcgatgctttatgttccagaggcacacctggcgattggagtcacattatcaaacagattggaatgtttactttcactggattgaatgcggaacaagtttccttcatgactaaagagttccatatatacatgacatctgatgggaggattagcatggctggtctgagttccaaaactgtcccacttctggcggatgcgatacatgcagctgtaacccgagttgtctaaaacatgttgacaacagttttcaacatgctccctagtccctataggagaacttccattatttttgtttaataattgtcaacatcaacaatgaaaccttttatttgatgtgagatttttaaaggaaacttttctgcctaccgggctccaaaaaaaaaaaaaaaaaaaaaa

SEQ ID NO: 12975 - protein, 419 aa, Glycine max
MASHDSISASPTSASDSVFNHLVRAPEDPILGVTVAYNKDPSPVKLNLGVGAYRTEEGKPLVLNVVRRVEQQLINDVSRNKEYIPIVGLADFNKLSAKLIFGADSPAIQDNRVTTVQCLSGTGSLRVGGEFLAKHYHQRTIYLPTPTWGNHPKVFNLAGLSVKTYRYYAPATRGLDFQGLLEDLGSAPSGSIVLLHACAHNPTGVDPTLEQWEQIRQLIRSKALLPFFDSAYQGFASGSLDADAQPVRLFVADGGELLVAQSYAKNLGLYGERVGALSIVCKSADVASRVESQLKLVIRPMYSSPPIHGASIVAAILKDRNLFNDWTIELKAMADRIISMRQELFDALCSRGTPGDWSHIIKQIGMFTFTGLNAEQVSFMTKEFHIYMTSDGRISMAGLSSKTVPLLADAIHAAVTRVV

SEQ ID NO: 12976 - DNA, 1197 bp, Vibrio vulnificus
  CDS (1)..(1197)
atgactttcatgttctctcaattaccaacaccagctttagatcctattctttctctaaccgttgcttttcgtaacgatccgcgtgaccaaaaagtagaccttggcattggcgtatacaaaaacaacaaaggcgaaacgccaatcatgcgtgcggtgtcccaagcgcaaaaaatcgttgctgatacacagacaaccaagtcgtacgtcggcctagcgggatgcgaagagtttaaccaatcgatggtgaatttattgcttgcgggtacttccgtacttgaccgagtgagtgcgattcaaacaccgggagccagtggcgcactgcgtatgctcggagatttgatgaaagtagcgcagccagacaccaccgtttggatctctaaccctagttatgtgaaccataagccagtgatggaagctgccgggttgaaagtgcgttattaccgctacttcagcccagaaacaaagcaagtcgacatcggccagatgttagatgatcttgctactgcaggtccaaaggatgtcgtactgcttcatggttgttgtcacaacccaacgggagcagacattgattttgctgcttggcaagccatcaccgatttggcagtaaagaacggtttcacaccctttgttgatattgcctaccaaggctttggtgatggccttgaagaagacgcaaaagggctgcagttcatggctgaccgtgttgaagaaatgctgattaccacttcatgttcgaagaattttggtctttaccgtgaacgtactggcgcggccattgtgattggcaaaaacgcaaaagaatcatcaaacgcgaaaggtaagttgctgacactcgcacgttcaacttacaccatgccgcctgatcacggtgctgcattggtcaaaacaatcctacaaaatgtcgaacttacaaccacttggaagcaagaattgtgtgaaatgcagcaacgtttgttaaacctgcgtcaaactttatgtaatgaattgagaaatcaacacaatacgtcacaattcgacttcattgaaagccacaagggtatgtttactgtgctaggctttacacctgagcaaatgggaacgctacgagatgaatatggaatttatggtgtaggtgacgggcgaattaacatcgctggccttacagaagctcacattccatacgtggcagacgcgatagtcaaagtctcacaacgttaa

SEQ ID NO: 12977 - protein, 398 aa, Vibrio vulnificus
MTFMFSQLPTPALDPILSLTVAFRNDPRDQKVDLGIGVYKNNKGETPIMRAVSQAQKIVADTQTTKSYVGLAGCEEFNQSMVNLLLAGTSVLDRVSAIQTPGASGALRMLGDLMKVAQPDTTVWISNPSYVNHKPVMEAAGLKVRYYRYFSPETKQVDIGQMLDDLATAGPKDVVLLHGCCHNPTGADIDFAAWQAITDLAVKNGFTPFVDIAYQGFGDGLEEDAKGLQFMADRVEEMLITTSCSKNFGLYRERTGAAIVIGKNAKESSNAKGKLLTLARSTYTMPPDHGAALVKTILQNVELTTTWKQELCEMQQRLLNLRQTLCNELRNQHNTSQFDFIESHKGMFTVLGFTPEQMGTLRDEYGIYGVGDGRINIAGLTEAHIPYVADAIVKVSQR

SEQ ID NO: 12978 - DNA, 1200 bp, Photorhabdus luminescens
  CDS (1)..(1200)
atgttccagaatgttgatgcttatgctggtgatccgattctttcgctggctgaagaatttaaaaaagatcctcgtgcggaaaaaattaatctgagcatcgggctttattacgatgagcagggagtgactccgcaattgcaggcagtggctaccgcagaagaacaacttagagcgttgtcacagactgcttctctttatctgccaatggagggattggaatcctatcgtcttgcggttcaggaactgttatttggtaaagatcatccggtgttgaaacagcgggtggtggcaacgattcaatcattaggtggttctggcgctcttaaaattggtgctgactttttgcatcgttatttccctgattcagaagtgtggtgcagtgatccaacttgggaaaaccacgcagctatttttgcgggggcaggtattaaggtgaactattacccttattttgatacacagaccaaaggggtaaaattcagtgaaatgctggaaacattcaggaaactgccggcaaaaagcattattgtgatgcacccttgttgccataacccaaccggatcggatctgacctatgatcaatgggatcaagttgttcaaattgttaaagagagagagctcctgccattccttgatattgcttatcaggggcttgcggatgggatggaaaaagatgcttatgccattcgtgctatggcgacagccggtttgccttgtctggtgagcaactctttctccaagatattttctatgtatggtgagcgagtgggtggcttgtctgttatttgtgatgatgagcagaccaaagaacgggtattggggcagttgaaagcaggtgtgcgtcgcgtttactctagcccaccgagttttggtgcacaggttgtggcgaaagtactgactgatcctgctttgaaggcacaatggttaacagaagttgagcatatgcgcttgcgtattttggaaatgcgcacggtgctggtggatgctctgaaaacggcattaccagagaaaaactttgagtattttctgaaacagcgcgggatgttcagctataccggttttagccagaaacaggtggatcgcttgcgccaagaatttgctgtttatctggtcggtaatggccgagtctgtatggcgggcgtcaaccatcgtaatgttgcacgtattgctgaaacatttgcggcggtaaataagtcataa

SEQ ID NO: 12979 - protein, 399 aa, Photorhabdus luminescens
MFQNVDAYAGDPILSLAEEFKKDPRAEKINLSIGLYYDEQGVTPQLQAVATAEEQLRALSQTASLYLPMEGLESYRLAVQELLFGKDHPVLKQRVVATIQSLGGSGALKIGADFLHRYFPDSEVWCSDPTWENHAAIFAGAGIKVNYYPYFDTQTKGVKFSEMLETFRKLPAKSIIVMHPCCHNPTGSDLTYDQWDQVVQIVKERELLPFLDIAYQGLADGMEKDAYAIRAMATAGLPCLVSNSFSKIFSMYGERVGGLSVICDDEQTKERVLGQLKAGVRRVYSSPPSFGAQVVAKVLTDPALKAQWLTEVEHMRLRILEMRTVLVDALKTALPEKNFEYFLKQRGMFSYTGFSQKQVDRLRQEFAVYLVGNGRVCMAGVNHRNVARIAETFAAVNKS

SEQ ID NO: 12980 - DNA, 1191 bp, Photorhabdus luminescens
  CDS (1)..(1191)
atgtttgagaaaatcaccgcagcgcctgccgaccctattcttggcttagccgatagtttccgttctgatcctcgtacaaataaaatcaaccttggtatcggtgtctataaagacgaaacaggaaaaaccccggttctgaccagtgttaaaaaagctgaacaatatttactggaaaacgaaacaacaaagaattatctgccgattagcggcttagccgaatttggccgcgtaactcaagaattactgtttggcaaagatcacccagttgtcacagataaacgcgcccgcacagcacaaagcccaggcggtaccggtgctttacgtattgctgcggatttcattgccaaacagactaatgctaaacgagtttggatcagcaacccaacctggccaaaccataaaaacgttttttccgccgctggtctggaagtctgtgaatataaatactatgacgctgaaaaacacgcgctgaatttcgaagacatgctggcaagcctgtccgaagctcaggctggtgatgttgttctgttccacggctgctgccacaatccgacaggcatcgatccaaccccggcacaatgggctaaactggcagaaatgtctgcggagaaaggctggttgcctatttttgatttcgcttaccaaggatttgccaagggcctaaacgaagatgcagagggcctacgtatttttgcgaaaaatcataatgaactgattgttgccagctcttactccaaaaactttggcctgtacaatgaacgtgtcggtgcctgtactattgttgctagtgacagtgatacagcagaaaaagcgttcagccaagctaaagcgattatccgtgctaactattccaacccacccgctcatggtgcatctattgtcactaccattttgtcaaatgaagacctgaaagcagcttgggaacaggaactgaccaccatgcgcgaacgtatccagcgtatgcgtcaactgtttgtcaataccttgcaggaaaaaggggcaaaacaggatttcagctttattattagccaaaatggtatgttctcattcagtggcctgacaaaagaacaagtagaacgtctgcgtgatgagtttggtatatacgctgtcagttccggtcgtattaacgtcgctggcttgacgttagaaaacatggctccactatgtgaagccattgttgcagtactctaa

SEQ ID NO: 12981 - protein, 396 aa, Photorhabdus luminescens
MFEKITAAPADPILGLADSFRSDPRTNKINLGIGVYKDETGKTPVLTSVKKAEQYLLENETTKNYLPISGLAEFGRVTQELLFGKDHPVVTDKRARTAQSPGGTGALRIAADFIAKQTNAKRVWISNPTWPNHKNVFSAAGLEVCEYKYYDAEKHALNFEDMLASLSEAQAGDVVLFHGCCHNPTGIDPTPAQWAKLAEMSAEKGWLPIFDFAYQGFAKGLNEDAEGLRIFAKNHNELIVASSYSKNFGLYNERVGACTIVASDSDTAEKAFSQAKAIIRANYSNPPAHGASIVTTILSNEDLKAAWEQELTTMRERIQRMRQLFVNTLQEKGAKQDFSFIISQNGMFSFSGLTKEQVERLRDEFGIYAVSSGRINVAGLTLENMAPLCEAIVAVL

SEQ ID NO: 12982 - DNA, 1209 bp, Chromobacterium violaceum
  CDS (1)..(1209)
atgacctcttcgatcttcgccggcgtggagctggcgccgcgcgaccccatcctcggactcaatgaggcgttcaacgccgatacccgcagcaccaaggtcaatcttggcgtgggcgtgtattccgacgacaacggcaagattccactgctggccgcggtgcaggcggccgagaaagctcgcctcgaagcattgccggcgcgcggctaccagccgatcgaaggccccgccgcttacgatgtcgccgtgcagaagctgctgttcggcgagagcagcgaactgctggccgccggccgcgtggtgaccgcccaggcgctgggcggcaccggcgcgctgaagatcggcgcggacttcctgaaacgcctgaatccggccgccaaggtgtacatcagcgacccgtcctgggaaaaccaccgcgcgctgttcgagtccgccggctttgccgtggaaaactacccgtattatcacgcagccagccgcggcgtggatttcgccgcgatgaaggcgcatttgtcctcgctggatgcgggctccatcatcgtgctgcatgcctgctgccacaatcccaccggcgccgacctgtccgccgcgcaatgggaagaagtggtgtcgatctgccgcgagcgcagcctggtgcccttcctggacatggcctaccagggcttcgccgacggcatcgacgccgatgcgctggcggtgcgcctgttcgccgcctcgaatctgcagttcttcgtcgccagctccttctccaagagcttctcgctgtacggagagcgtgtcggcgcgctgtccatcatcacggcagccaaggacgagtcggtccgcgtcttgtcccagctgaagcgcgtgatccgcaccaactactccaatccgcccatccatggcgcggccatcgtcgccgccgtgctgtccagcccggcgctgcgcgcgcaatgggaggaagagctggcgggcatgcgcgatcgcattcgcgacatgcgattggccttgctggaggcgatcaaggcgcaaggcgtggccgtcgacttttccttcatcacggcccagcgcggcatgttctcctacaccggcctgagcgccgcccaggtggaccgcctgcgcgaggagttcggcatttacgcggtatccactggccgcatctgcctggcggccctgaacagcaagaacgtaggctatgtggcctccgccatcgccaaggtggttcaggcctga

SEQ ID NO: 12983 - protein, 402 aa, Chromobacterium violaceum
MTSSIFAGVELAPRDPILGLNEAFNADTRSTKVNLGVGVYSDDNGKIPLLAAVQAAEKARLEALPARGYQPIEGPAAYDVAVQKLLFGESSELLAAGRVVTAQALGGTGALKIGADFLKRLNPAAKVYISDPSWENHRALFESAGFAVENYPYYHAASRGVDFAAMKAHLSSLDAGSIIVLHACCHNPTGADLSAAQWEEVVSICRERSLVPFLDMAYQGFADGIDADALAVRLFAASNLQFFVASSFSKSFSLYGERVGALSIITAAKDESVRVLSQLKRVIRTNYSNPPIHGAAIVAAVLSSPALRAQWEEELAGMRDRIRDMRLALLEAIKAQGVAVDFSFITAQRGMFSYTGLSAAQVDRLREEFGIYAVSTGRICLAALNSKNVGYVASAIAKVVQA

SEQ ID NO: 12984 - DNA, 1194 bp, Chromobacterium violaceum
  CDS (1)..(1194)
atgttccaacatgtagacgcctacgccggcgatcccatcctgtcgctggtggaagctttcggcaaagacccgcgcgagcagaaggtcaacctcagcatcggcctgtattacgacgaggcaggccgcatcccgcggctgaaggcggtggagcaggccgaggcgctgctggccagccagccgcagccgccgtgcacctatctgccgatggacggcatgccggcttaccgcagcgccatccagacgctactattcggcgccgagcatccggcggtgaaagacggccgcatcgccacgctgcagacgctgggcggctccggcgcgctgaaagtgggcgccgacttcctcaagcgctatttcccggcatccggcgtctgggtcagcgacccgacctgggacaaccacgtcgccatcttcgaaggcgcgggcctggccgtggagcgctacccgtatttcgacccggccacccgcggcgtggatttcccggccatgctggccaagctgcagacgctgccggccaagagcatcgtgctgctgcacccgtgttgccacaaccccaccggcgcggacctcaccgacgcgcagtgggaccaggtggtggaagtggccaaggcgcgccagctgattcccttcctggacattgcctaccagggcttcggcgccggtctggaggaagacgcctacgccatccgcgcgatggcagacgccggcatcgccttcctggtcagcaactccttctccaagatcttctcgttgtacggcgaacgctgcggcggcctgtccgtggtgtgcgaaaccgccgccgaggcggcgctggtgtccggccagctcaaggccaccgtgcgccgcaactactccagcccgccgacgcacggcgccagggtgatcgccaccgtgctgaacgatccggagctgaaggcgctgtgggtgtccgaggtgaacgagatgcgcgagcgcatccaggcgatgcgcggcgtgctggtgcaagtgctgaaggaagcgctgcccgagcgcgacttcggctacctggtgaaccagcgcggcatgttcagctacaccggcttcagccaggcgcaggtggacaagctgcgcgagcagttcgccgtctacctggtgggcagcggccgcatgtgcgtggccggcctcaacgccgccaacgcgccctacgtggcccaggccttcgcccaggtgcagtaa

SEQ ID NO: 12985 - protein, 397 aa, Chromobacterium violaceum
MFQHVDAYAGDPILSLVEAFGKDPREQKVNLSIGLYYDEAGRIPRLKAVEQAEALLASQPQPPCTYLPMDGMPAYRSAIQTLLFGAEHPAVKDGRIATLQTLGGSGALKVGADFLKRYFPASGVWVSDPTWDNHVAIFEGAGLAVERYPYFDPATRGVDFPAMLAKLQTLPAKSIVLLHPCCHNPTGADLTDAQWDQVVEVAKARQLIPFLDIAYQGFGAGLEEDAYAIRAMADAGIAFLVSNSFSKIFSLYGERCGGLSVVCETAAEAALVSGQLKATVRRNYSSPPTHGARVIATVLNDPELKALWVSEVNEMRERIQAMRGVLVQVLKEALPERDFGYLVNQRGMFSYTGFSQAQVDKLREQFAVYLVGSGRMCVAGLNAANAPYVAQAFAQVQ

SEQ ID NO: 12986 - DNA, 1233 bp, Plasmodium yoelii yoelii
  CDS (1)..(1233)
atggaaaaatatctttgtgaaataaaagagattgaagcagatgagattttgaaaagtattaacgaatataatgcagacccatctaataaaaaagtgaatctttctattggtgtttgtgcaggtaataatggtagtgttcagatatttaatagtgtattaaaagctgaacaaatcataacagaaaagtataaagaaaaaccatatttattaagtaatgggggggatgtatttagtttattaacacaaaaattaatatttggggaagattctaaatatataaaagaaaacagaataagcacaatacaaactataggaggaacaggagctatagctattgctttggaatttttaaaatgcttcaatatatgtaacccatcaatatatgttacaaatattccatatataaatcatgttaatatgataaaatcaaataaatttaatttaaaatatataaatttttttgataataatttaattgatataaattataatttatttttaaatgatttaaaaaatattgataatgaatcaattatatttttacaaccttcatgttataatccatgtagtataaatataaaatccgaatattttgaagaaattacaaatatagttttattaaaaaaacatataattgtttttgatattgcttatcaaggatttggaaatggagaaatagataatgatgtaattttaattagacaatttcaagaaaaaaatattccttttatagtttgtcaatcttttgcaaaaaatatgtcattatatggtgaacgtgcaggtgctttacatattgtgtgcaaaaatgaaaatgaaaaaaaaaaaattttaagtagcttgttaataataactcgtagattttattcatctcccactatacatacaaatagattagtttgtgaaattttacaaaatcctaatttaaaagaagaatggttaaatgaattaaaagaattatcacaccatatagctaatattaggaatttattttttgataaattacagcaaattcaaaataaatataatttagattatgattggagtgtgtataaaaaacaagtaggactattttcttatgtaccaattttttcagatatatttcaaagtctaaaaaatcatcatatttatattgttaaaactggacgaataaatgtgtcaggaataacaatggataacattgattatataacggaaaaaatttgtctttgcttatcagagcgagcagctagctaa

SEQ ID NO: 12987 - protein, 410 aa, Plasmodium yoelii yoelii
MEKYLCEIKEIEADEILKSINEYNADPSNKKVNLSIGVCAGNNGSVQIFNSVLKAEQIITEKYKEKPYLLSNGGDVFSLLTQKLIFGEDSKYIKENRISTIQTIGGTGAIAIALEFLKCFNICNPSIYVTNIPYINHVNMIKSNKFNLKYINFFDNNLIDINYNLFLNDLKNIDNESIIFLQPSCYNPCSINIKSEYFEEITNIVLLKKHIIVFDIAYQGFGNGEIDNDVILIRQFQEKNIPFIVCQSFAKNMSLYGERAGALHIVCKNENEKKKILSSLLIITRRFYSSPTIHTNRLVCEILQNPNLKEEWLNELKELSHHIANIRNLFFDKLQQIQNKYNLDYDWSVYKKQVGLFSYVPIFSDIFQSLKNHHIYIVKTGRINVSGITMDNIDYITEKICLCLSERAAS

SEQ ID NO: 12988 - DNA, 1449 bp, Neurospora crassa
  CDS (1)..(1449)
atggcgcctgcctcgactttattgcgcgctgccgctcccgctcctcacgcccacacttccttcccctcccaccacacaccaacgtcatcgccaaatcgcacaaccatcaccaacaccaaccctagtgccaactccacctcttctactcccctccaccgaatccagaccatcgccaaacacatggcgctgccacaaataacaagtttccccgccgaggtggtacctcaagcccccgaggatcctctctttgggttggcgagagcgttcaaggcggacccaagtccccaaaaagttgatttgggcatcggcgcgtacagagatgagaatgcgaagccgtgggtattaccagttgtcaagaaggccgatgaaattatacgaaatgaccctgaagccaaccacgaatatctccccatcgccggtctcgcttccctaaccagcaaagccgccgagctcgttgtcggtgcctctgctcccgccatcactgaggggcgcgtcgcctcgatccagaccatctccggcactggcgcctgccatctcggcggtctcttcctctcgcgcttctacaacccatacggcgacgcttccaagaagcccaccgtctacctcagcaatccaacatgggccaaccacaaccagatcttctccaacgtcggcctccccatcgcccaatacccttacttcgaccagaagaccaagggcctcgacattgacggcatgaagaaggccctctctgacgcccccgagcgctccatcatcctcctccacgcctgcgcccacaaccctaccggcgtcgaccctacgctcgcccagtggcgcgagatcgccgagatcatggccgccaagggccactttcccttcttcgacaccgcctaccagggtttcgcttcgggcgacctcgaccgggacgcctccgccatccggctcttcgtcgagctcggtttcgagctcgtagtcgcccagtccttcgccaagaactttggtctctacgggcaacgcgctggctgcttccacttcatctccgctccttcgcccgacgctgcgtccataaccacccgcgtggcctcgcagctcaccctactccagcgctccgagatttctaacccgcccatctacggcgccaaggtggcttcgatcgtcctcaacgaccccgcgctcttcgccgagtggaaggagaacctgcgtaccatgtcgggccgcatcatcgacatgaggaaagctctgcgggcaaagctcgaggagctgggcaccccgggcccgtggaaccacattaccgaccaaatcggcatgttctcatttaccgggttgaacgagaagcaggtggctaagctcagggaggagttccacatctacatgaccaagaacggccgcatcagcatggccggtctaaataagaagaacgtagattacgttgccagggcggtggacaaggttgtcagggaagtgcaatag

SEQ ID NO: 12989 - protein, 482 aa, Neurospora crassa
MAPASTLLRAAAPAPHAHTSFPSHHTPTSSPNRTTITNTNPSANSTSSTPLHRIQTIAKHMALPQITSFPAEVVPQAPEDPLFGLARAFKADPSPQKVDLGIGAYRDENAKPWVLPVVKKADEIIRNDPEANHEYLPIAGLASLTSKAAELVVGASAPAITEGRVASIQTISGTGACHLGGLFLSRFYNPYGDASKKPTVYLSNPTWANHNQIFSNVGLPIAQYPYFDQKTKGLDIDGMKKALSDAPERSIILLHACAHNPTGVDPTLAQWREIAEIMAAKGHFPFFDTAYQGFASGDLDRDASAIRLFVELGFELVVAQSFAKNFGLYGQRAGCFHFISAPSPDAASITTRVASQLTLLQRSEISNPPIYGAKVASIVLNDPALFAEWKENLRTMSGRIIDMRKALRAKLEELGTPGPWNHITDQIGMFSFTGLNEKQVAKLREEFHIYMTKNGRISMAGLNKKNVDYVARAVDKVVREVQ

SEQ ID NO: 12990 - DNA, 1290 bp, Neurospora crassa
  CDS (1)..(1290)
atgctttcctcggtcagacttgtcacgcgcagagctgctgtcagaagcgcttttgcttcccctggtcgcagcttgcttgctgtccgcgccgcctcgttctgggccaacgtcccccaaggtcctcctgatgccattctcggtatcacggaagctttcaaggccgacaccttcgacaagaagatcaatctcggtgtcggtgcctaccgcgatgacaagggcaagccttacgtcctcccctccgtccgcaaggccgaggacaaggtcatccactcccgcatgaacaaggagtacgcaggcatcactggtgtccccgagttcaccaaggccgccgccgttctcgcctacggcaaggacagctccgccctggaccgtcttgtcatcacccagtccatctcgggtaccggtgccctccgcattggtggtgaattcctcaaccgcttcttccccggagccaagaagatctacatccccaccccttcgtgggccaaccacggcgccgtcttccgcgactccggtctcgaggtcgcccagtatgcctactacgacaagaacaccatcggcctcgactttgagggtctgatccgcgacctcaaggctgcccccaacagctccatcttcctcttccacgcctgcgcccacaaccccaccggtgtcgaccccacccccgagcagtggaaggagatcgaggccgtcgtcaaggacaagggccactactccttcttcgacatggcctaccagggtttcgcttccggcgacatccacaaggacgcttttgctgttcgctactttgtcgagcagggccacaacatctgccttgcccagtccttcgccaagaacatgggtctctacggcgagcgtgttggtgccttctccattgtctgtgccgacgccgacgagaagaagcgcgttgactcgcaggtcaagattctggtccgccctctctactccaacccccccattcacggtgcccgcatcgccgccgagatcctcaacacccccgagctctacgagcagtggcttaccgaggtcaaggagatggctgaccgcatcatcaagatgcgcgccctcctcaaggagaacctcgagaagctcggcagcaagcacgactggagccacatcaccagccagatcggcatgtttgcctacaccggtctgacccccgagcagatggagaagctggccaaggagcacagcgtgtatgccaccaaggacggccgtatctctgtcgctggtatcactagcgagaacgttggccgtctcgccgaggccattttcaaggtcaagggttag

SEQ ID NO: 12991 - protein, 429 aa, Neurospora crassa
MLSSVRLVTRRAAVRSAFASPGRSLLAVRAASFWANVPQGPPDAILGITEAFKADTFDKKINLGVGAYRDDKGKPYVLPSVRKAEDKVIHSRMNKEYAGITGVPEFTKAAAVLAYGKDSSALDRLVITQSISGTGALRIGGEFLNRFFPGAKKIYIPTPSWANHGAVFRDSGLEVAQYAYYDKNTIGLDFEGLIRDLKAAPNSSIFLFHACAHNPTGVDPTPEQWKEIEAVVKDKGHYSFFDMAYQGFASGDIHKDAFAVRYFVEQGHNICLAQSFAKNMGLYGERVGAFSIVCADADEKKRVDSQVKILVRPLYSNPPIHGARIAAEILNTPELYEQWLTEVKEMADRIIKMRALLKENLEKLGSKHDWSHITSQIGMFAYTGLTPEQMEKLAKEHSVYATKDGRISVAGITSENVGRLAEAIFKVKG

SEQ ID NO: 12992 - DNA, 1451 bp, Mus musculus
  CDS (62)..(1276)
agcgctgccaaggttctggaagaaagaggcctgaaattattggcaccgcacgtgctcaactatgaccagtctttctgtgttcagggatgtacccacagcccagaagctagaaggcagcttactaaagatctacaggcaagatggctatcccagcaagttgttcctggcctacaaagtctgcatgaccgaagaaggccatccctgggtttctcttgtggtgcacaagacccgcctgcagattgcagaggacccctctctggactatgagtacttgcccctggtgggcctgaaatcattcatccagtcttctctggaactcctctttggaaagcacagcgaagccattgcggagaaaagggttgggggtgtgcacatcgttggtgagagtggagccttccagcttggggctcagttcctcaagacgtggcgaaagaatgtgaaaatcgtttgtatcgtctcatgtcaaaaagaacagtgtggactcatcttccaggacatgggctttatagtttatgagtactctatctggaacgccagtgatctctgctcagaccccagcatgttcgtggaagtactccagcatatcccggtcggcagcatccttgtgattgggaacatcactgattgcaagttcacacagaatcagtggacgaaactgatgtccatcattaagagcaagcagatattcccattctttgacattccctgtcaaggtttatccactggtgacctcgaggaagataccaaaatcttacagtactttgtgtccctaggcttggagttcttctgcagccaatctctgtccaagaattttggcatttatgatgaaggagtggggatcctagtagtggctgccctcagcaaccagcacctgctgtgtgtcctctcccagctgatggattatgtccaggccctgtggggaaaccctcctgccacgggtgctcggataatcacctccatcctctgcaaccctgctctgtttggagaatggaagcagagtctcaaaggtgtggtggagaacatgatgctgatcaaggagaaagtgaaggagaagctgcggctcctagggacccctgggtcgtgggatcacatcacccgacagagcgggacccatggttatctgggactcacctatcaacaggtggagtttctggtcaagaagaaacatatctacttgcccaaaactagccggatcaacttcacctgcatcaatgccaggaatatagactacatcactcagagcatccatgaggccgtgatgctaacagagggctgagagggtgtctgctcaaaactgcccctgactggaacgaaagctttacgctgtctttgaaaataaaaatcctggaggaactaaaaaaaaaaaaaaaaaaaaaaaaaaaaaaaaaaaaaaaaaaaaaaaaaaaaaaaaaaaaaaaaaaaaaaaaaaaaaaaaaaaaaaaaaaaaaaaa

SEQ ID NO: 12993 - protein, 404 aa, Mus musculus
MTSLSVFRDVPTAQKLEGSLLKIYRQDGYPSKLFLAYKVCMTEEGHPWVSLVVHKTRLQIAEDPSLDYEYLPLVGLKSFIQSSLELLFGKHSEAIAEKRVGGVHIVGESGAFQLGAQFLKTWRKNVKIVCIVSCQKEQCGLIFQDMGFIVYEYSIWNASDLCSDPSMFVEVLQHIPVGSILVIGNITDCKFTQNQWTKLMSIIKSKQIFPFFDIPCQGLSTGDLEEDTKILQYFVSLGLEFFCSQSLSKNFGIYDEGVGILVVAALSNQHLLCVLSQLMDYVQALWGNPPATGARIITSILCNPALFGEWKQSLKGVVENMMLIKEKVKEKLRLLGTPGSWDHITRQSGTHGYLGLTYQQVEFLVKKKHIYLPKTSRINFTCINARNIDYITQSIHEAVMLTEG

SEQ ID NO: 12994 - DNA, 1194 bp, Rhodopirellula baltica
  CDS (1)..(1194)
atgcaccgattcgactccatctccgttgccccgcccgacgccattttgggactgaccgaagcgttcaaagccgatgaacgcgaaaccaaaatgaatttgtccgtgggcgtgtaccaagacgcttccggcaccacccccgtgcttcgctgcgtcaaagaagccgaaaaacggctgttggatacagaatcgaccaagggatacctctcgatcgacggcctgccggactaccgcgaagccgcccgccgattgatcttctccgaccaaatcgctgccgagcgagtggcagcggttcagacgccgggcggaaccggagccctccgtgtggcggcagaattcctggccactcagtgcggaccgctacgaattttcttgcccacgccaacctgggccaaccacaacgcgatcatggccgcggccggactgccggtggaaacgtattcctacctggcgtctgacaaaaagacgctggacttcgacgcactcatcgaagacctgaagaccaaacccaaggccggcgatgcggttctgctgcatgcgtgctgccacaacccaaccggagtcgacccgacaccggaacagtgggaacaaatcgcgagcgtggtctccgaaaagaaactgatcccattgctggactttgcctaccaagggttcggcgaaggcctggacgaagacgccatcggtgtgcgcacgattctgcgacagatggatgaagccatcgtctgctcgtcattcagcaaaaactttggcctgtacagcgaacgagttggaacagcgtgcttggtatccgggtcagccgaaacgaccaaagccgctctcagccaactcaaacgagtcgtccgagccaactacagcaacccacctcggcacggcggcgcgatcgtggccactgtgttggccgatgagggactgacccaaatgtggcacgaagagctcgccgaaatgcgaactcggatcgcctccctacgaaaacaattcgttgatggaatggccgcgacgggagtcgaccaagacttctcgttcttgctggaccaaaaaggcatgttctctttcagtggtttgtcaccgatgcaggtcgaccaactgcgaagcgaacatggcgtgtatctggtcggtagcggtcgaatcaacgtcgccggaatgaacgaatcgaagatggaatggttgtgcaatgccgtggcggcggtattgcgatag

SEQ ID NO: 12995 - protein, 397 aa, Rhodopirellula baltica
MHRFDSISVAPPDAILGLTEAFKADERETKMNLSVGVYQDASGTTPVLRCVKEAEKRLLDTESTKGYLSIDGLPDYREAARRLIFSDQIAAERVAAVQTPGGTGALRVAAEFLATQCGPLRIFLPTPTWANHNAIMAAAGLPVETYSYLASDKKTLDFDALIEDLKTKPKAGDAVLLHACCHNPTGVDPTPEQWEQIASVVSEKKLIPLLDFAYQGFGEGLDEDAIGVRTILRQMDEAIVCSSFSKNFGLYSERVGTACLVSGSAETTKAALSQLKRVVRANYSNPPRHGGAIVATVLADEGLTQMWHEELAEMRTRIASLRKQFVDGMAATGVDQDFSFLLDQKGMFSFSGLSPMQVDQLRSEHGVYLVGSGRINVAGMNESKMEWLCNAVAAVLR

SEQ ID NO: 12996 - DNA, 1191 bp, Haemophilus ducreyi
  CDS (1)..(1191)
atgttcaatcatatcgaggccgctctaaccgatccaattttaggtttaaatgatgccttccgagcagatattcgaaaaacaaaaactaatttgggcattggtgtgtatatgaatgccgaaggtcagacaccgattatgaatgccgtaaaattagcagaaacgcgtttacttgctgaagaatcacaaaagaattatcttcagattgatggtatcgcacactttaatagttatacgcaaaccttattatttgggcaagatgccgatgttattcaaacggggcgagtaaaaacagcacaaagtttaggtggcacaggcgcattacgtatagcaatggagtttattaagcgccaaactgacgcaaagactatttggatatcaaacccaacttggcctaatcataatgcaattgctgaagcggttggcttaacgataaaaaactaccgctattataatcccgaaactaacggcttagattgggataatctgttggctgacttgcaacaagctgaacgtggcgatgtagtgttattacacggttgttgccataacccgaccggtatcgatccaacagcagaacagtgggataaactcgctatactttcagctgaaaaaggctggttacctttatttgatttcgcttatcaaggattagccaatggcttagatgaagatgcttacggtttacgtgcatttgctaaaaaccataaagaattattaatcgcgagttcttattcaaaaaattttggtttatataatgaacgcgtgggcgcttttactttagtggcagaaaatgcagaaatagcaaataatgcatttactcaaattaaatcgattattcgagtgctctattctaatccagcggcacacggtgctcataccgtaaccaccgtattggctgatgatcaattacgcgcaaattggatcgctgaattaagtgagatgcgtgatcggattaaaacgatgcgaactaaaatggttcaattactagctgaaaaaggcgcgaaaaaagatttctcatttatttctgatcagaatggtatgttttcattcagcggtttaaccgctacacaagtcgaccgtttacgtgatgaatttgcaatttatgcggttcgttctgggcgaataaatgtagccggacttactgatgataatatcgaagcgttttgcgatgctgtagtaaaagtactttag

SEQ ID NO: 12997 - protein, 396 aa, Haemophilus ducreyi
MFNHIEAALTDPILGLNDAFRADIRKTKTNLGIGVYMNAEGQTPIMNAVKLAETRLLAEESQKNYLQIDGIAHFNSYTQTLLFGQDADVIQTGRVKTAQSLGGTGALRIAMEFIKRQTDAKTIWISNPTWPNHNAIAEAVGLTIKNYRYYNPETNGLDWDNLLADLQQAERGDVVLLHGCCHNPTGIDPTAEQWDKLAILSAEKGWLPLFDFAYQGLANGLDEDAYGLRAFAKNHKELLIASSYSKNFGLYNERVGAFTLVAENAEIANNAFTQIKSIIRVLYSNPAAHGAHTVTTVLADDQLRANWIAELSEMRDRIKTMRTKMVQLLAEKGAKKDFSFISDQNGMFSFSGLTATQVDRLRDEFAIYAVRSGRINVAGLTDDNIEAFCDAVVKVL

SEQ ID NO: 12998 - DNA, 1221 bp, Candidatus Blochmannia floridanus
  CDS (1)..(1221)
atgtttaaatcaatgataatggctccaccagacccaattcttggattatcaaaaatttatcattctgacactaaaaaaaacaaaattaatcttggtattggagtatatatagaaaaatttcatgcagctccaattttagaaagcgttaaacaagctgaagatttattactcaaaaaagaaattagtaaaaattatcttgctattgaaggttctaatgactttaataatgccaatcaaacattattatttggaccaaatgactcaataatatcaaaaaataggattagaactgttcaagctcctggaggaactggagcattgagaatagccgcggaatgtattgcaaaatatgataatactataaataaaaaaagacgaatatggattagcgaacctagctgggtaaatcataaaaatattttttttgctgctggattagaagtatgtacttatccatattatcaaaaatctacacactccattgaatttgataaactgattgatactttcaacaatatagtaaaacctggagatatagttttattacacggttgttgtcataatccaaccggaatggatcctactatagaacaatggaaaatgttatctgaatgtgcagaaaaaaatagatggatacctttgtttgatctggcatatcaaggatttgataatggattacaagaagacttgataggattacatatgttttgtaaaaacaatccagaattaatagtctgtaattcttactccaaaaattttggtttgtataacgaacgtgtaggagcatgtactataattactgaaaacaataatcatgctgattgtgtgctaagccaactacgagcgaccattagggcaatttattctaatccaccagcacatggagctgccattgtatctacaattttacaaaataaaacactacgtttcatttgggaaaaagaattaaaaaatatgagagatcatattaaaaatatgcgtaaattgttatttaatacactgaataaatataaaaatagtaaagtaataaatcaagattttagttttattaataatcaaaaaggtatgtttgcctatataggattaaactctaatcaagtaattaaattacgtgaagaattaggaatttatttagtagattctggtaggctaaacttagcaggtttatcacacaaaaatatcgattacatatgtaatgcaatatgtaacttatacatttaa

SEQ ID NO: 12999 - protein, 406 aa, Candidatus Blochmannia floridanus
MFKSMIMAPPDPILGLSKIYHSDTKKNKINLGIGVYIEKFHAAPILESVKQAEDLLLKKEISKNYLAIEGSNDFNNANQTLLFGPNDSIISKNRIRTVQAPGGTGALRIAAECIAKYDNTINKKRRIWISEPSWVNHKNIFFAAGLEVCTYPYYQKSTHSIEFDKLIDTFNNIVKPGDIVLLHGCCHNPTGMDPTIEQWKMLSECAEKNRWIPLFDLAYQGFDNGLQEDLIGLHMFCKNNPELIVCNSYSKNFGLYNERVGACTIITENNNHADCVLSQLRATIRAIYSNPPAHGAAIVSTILQNKTLRFIWEKELKNMRDHIKNMRKLLFNTLNKYKNSKVINQDFSFINNQKGMFAYIGLNSNQVIKLREELGIYLVDSGRLNLAGLSHKNIDYICNAICNLYI

SEQ ID NO: 13000 - DNA, 1203 bp, Bordetella bronchiseptica
  CDS (1)..(1203)
atgagcactcttttcgcttccgtcgaactcgcgccgcgcgaccccattcttggcctgaacgaacagtacaacgccgatacccgtcccggcaaagtgaacctgggcgtgggcgtgtactacgacgacgaaggccgcatcccgctgcttcaggccgtgcgcaaggccgaggtggcccgcatcgaagccgccgccgcccgcggctatctgccgatcgaaggcatcgcggggtacaacaagggtgcgcaggcgctgctgctgggcgccgactcgccgctggccgccgaaggccgcgtgctgaccgcgcaggccctgggcggcaccggcgcgctgaagatcggcgccgacttcctgcgccagctgctgccgcagtccaaggtcctcatcagcgaccccagctgggaaaaccaccgcgccctgttcgagcgcgccggcttcccggtcgagacctacgcttattacgatgccgccacccatggcctgaacttcgaagccatgctggccgccctgcaggccgcgcccgaacagaccatcgtggtgctgcacgcctgctgccacaacccgaccggcgtcgatcccacgccgcaacagtgggaacagatcgccgccgtggtcaaggcgcgcaacctggtgccgttcctcgacatcgcctaccagggcttcggcgaaggcctggagcaggacgccgccgtggtgcgcatgttcgccgcgctcgacctgaccatgttcatcagctcgtcgttctccaagtccttctcgctgtatggcgagcgggtcggggccctgaccgtggtggccggcagcaaggacgaggccgcccgcgtgctcagccagctcaagcgcgtgatccgcaccaactactccaacccgcccacccacggcggcaccgtggtgtccacggtcctgaacacacccgagctgttcgcgctctgggaaaatgaactggccggcatgcgcgaccgcatccgcctgatgcgcaaggagctggtcgagaagatcaaggcccagggcgtggcgcaggacttcagcttcgtgctggcgcagcgcggcatgttctcgtactcgggcctgaccgccgcccaggtcgatcgcctgcgcgaagagcacggcatctacgcggtctccagcggccgcatctgcgtggccgcgctcaacagccgcaacatcgacgcggtcgcggccggcatcgccgcggtgctgaagtag

SEQ ID NO: 13001 - protein, 400 aa, Bordetella bronchiseptica
MSTLFASVELAPRDPILGLNEQYNADTRPGKVNLGVGVYYDDEGRIPLLQAVRKAEVARIEAAAARGYLPIEGIAGYNKGAQALLLGADSPLAAEGRVLTAQALGGTGALKIGADFLRQLLPQSKVLISDPSWENHRALFERAGFPVETYAYYDAATHGLNFEAMLAALQAAPEQTIVVLHACCHNPTGVDPTPQQWEQIAAVVKARNLVPFLDIAYQGFGEGLEQDAAVVRMFAALDLTMFISSSFSKSFSLYGERVGALTVVAGSKDEAARVLSQLKRVIRTNYSNPPTHGGTVVSTVLNTPELFALWENELAGMRDRIRLMRKELVEKIKAQGVAQDFSFVLAQRGMFSYSGLTAAQVDRLREEHGIYAVSSGRICVAALNSRNIDAVAAGIAAVLK

SEQ ID NO: 13002 - DNA, 1200 bp, Bordetella bronchiseptica
  CDS (1)..(1200)
atgttcgagcacgttcaagcctatccgggcgaccccatcctcagcctgaacgaggatttccagaaagatccccgggccggcaaggtcaacctgaccatcggcatctatttcgacgaagccggccgcatccccgtcatggccgccgcccgcgaggccgaggccgcgctgctggccgacatcgggccgcgcccctacctgccgatggccggcctgccggcctatcgcgacctggtgcaggagctggtgttcggcgccggcagcgccgcgcgccgcgccggccgtatcgccacggtgcagacgctgggcgggtcgggcgcgctgaaagtgggcgccgacttcctcaagcgctattttcccaagtcggaagtctgggtcagcgacccgagctgggaaaaccatcgcaccattttcgagggcgccggcttcgcggtgcacacctatccctattacgacgacgccagcggcggcctgcgctttgacgaaatgctggccacggtgggcggcctgccggccggcagcgtcgtgctgctgcacgcctgctgccacaacccgaccggcgtggacctcgatcgcgcccagtgggacgcgctgattccggtgctgcgcgagcgcggcctgatcgccttcgtcgacatggcctaccagggcttcggcgatggcctggacgacgacgcctatgccgtgcgggccatcgccgaggcgggcgtgacctgtgtggtggccaactcgttctcgaagaatttctcgctgtacggcgagcgctgcggcgggctgagcgtggtgtgcgaaaccgccgagcaggctggctgcgtgctgggccagctgaccagcaccatccgcgccatctacagcaacccgcctacccatggcgcgcgcatcgtcgcccaggtgctgggcacgccggcgctgcggcaatcgtgggaggccgagctgggcgccatgcgcgagcgtatccaggcgatgcggcgcgccatccatgacggcctggccggccgcgtcgagccgcgcatgctgcagcgctacctgtcgcagcgcggcatgttcacctacaccggcctgggcgccgagcaggtcgagaccttgcggcgcgaccagggcgtgtatctgctgcgctcgggccgcatgtgcgtggcgggcctgaaccgcgacaacgtggcggtggccgccgacgccatcgccagcgtgctggcgcgcggctag

SEQ ID NO: 13003 - protein, 399 aa, Bordetella bronchiseptica
MFEHVQAYPGDPILSLNEDFQKDPRAGKVNLTIGIYFDEAGRIPVMAAAREAEAALLADIGPRPYLPMAGLPAYRDLVQELVFGAGSAARRAGRIATVQTLGGSGALKVGADFLKRYFPKSEVWVSDPSWENHRTIFEGAGFAVHTYPYYDDASGGLRFDEMLATVGGLPAGSVVLLHACCHNPTGVDLDRAQWDALIPVLRERGLIAFVDMAYQGFGDGLDDDAYAVRAIAEAGVTCVVANSFSKNFSLYGERCGGLSVVCETAEQAGCVLGQLTSTIRAIYSNPPTHGARIVAQVLGTPALRQSWEAELGAMRERIQAMRRAIHDGLAGRVEPRMLQRYLSQRGMFTYTGLGAEQVETLRRDQGVYLLRSGRMCVAGLNRDNVAVAADAIASVLARG

SEQ ID NO: 13004 - DNA, 1586 bp, Drosophila melanogaster
  CDS (1)..(1251)
atgtccatctacgccgacgttccaaaaggacccgccatcgaggtcttcgccctgacgcaggccttcaaggacgacagcaatcccaacaaggtcaatttgtcggtgggcgcttacaggacagatgctggagttccttgggttttgcctgtggtgcgcaagacggaaatcagcattgccagcgatgagcaggttaaccacgagtatttgccagtgactggactcgaaacattcaccaatgcggccactgaattggttctgggtgccgattccccagccatcaaggagaatcgcgcctttggagtgcagaccatttcgggcacgggtgccctgcgcgttgccgccgatttcctgcacacacaactgaatcgcaatgtggtttactactcgaaccccacctgggagaatcaccacaagatcttttgcgatgccggctttacgaccgttaaatcgtaccgctactgggaccaaaataaacgcgagttggacttcaagaacatgctggccgatctgaacgatgctccgcccggtgctgtgatcattctgcacgcctgtgcccacaatcccaccggcattgatcccacccaggagcagtggactgagctggccgatctgatggagaagaagaagttgttcccgctgttcgactcggcttaccagggctttgccagtggtgatcccgatcgcgatgcctgggccgctaggtacttcgtgcagcgtggcttcgagctcttcatctgccagtcgttcgccaagaactttggcctctactgcgaacgtaccggcaatctgactgtggtgcaaaagaatggtgctaccaaggcagcggttcactctcagctgacgctgctcattcgtggacagtactcgaatccgcccgcgtatggagctcgcatcgtttccaaagtcctaaacacaccggagttgcgcaaggagtggatggcctccatccaggcaatgtcgagccgcatccgcgagatgcgtacagctttgcgggacaagctggttgccttgggcacccccggcacctgggatcacattgtcaaccagatcggcatgttctcctacaccggtctgaacgagagccatgttcgtgtgctgatcgaccagtaccacatttacctgctgaagacgggacgcatcagcatgagtggcctgaataagggcaacgttgaatatgtggccaaggcgatccatgccgctgtcaccggatcaggagaaagtgcatcatgtccttgcgaaaacaaattgtaatcgtaccattggatcgcaccattggatagatacgtacaacgactagctatgtacatatattgggcatgcgatttagaaatcccaaagctggatcacagatgtctgcaccattggcatttaaatcaaaccaacaacaattgcaattactaaacgtttatacgcggcttttagatggatatacacatattatacaccggaaacgaatgttccacattaaagtaaaaactttacaaaaattacgcactattgaaagccgtcgaagattggttaaataatttaagcttacaacgtttattgacctgtgtgtagtaactaaataaatcgacaatatcatt

SEQ ID NO: 13005 - protein, 416 aa, Drosophila melanogaster
MSIYADVPKGPAIEVFALTQAFKDDSNPNKVNLSVGAYRTDAGVPWVLPVVRKTEISIASDEQVNHEYLPVTGLETFTNAATELVLGADSPAIKENRAFGVQTISGTGALRVAADFLHTQLNRNVVYYSNPTWENHHKIFCDAGFTTVKSYRYWDQNKRELDFKNMLADLNDAPPGAVIILHACAHNPTGIDPTQEQWTELADLMEKKKLFPLFDSAYQGFASGDPDRDAWAARYFVQRGFELFICQSFAKNFGLYCERTGNLTVVQKNGATKAAVHSQLTLLIRGQYSNPPAYGARIVSKVLNTPELRKEWMASIQAMSSRIREMRTALRDKLVALGTPGTWDHIVNQIGMFSYTGLNESHVRVLIDQYHIYLLKTGRISMSGLNKGNVEYVAKAIHAAVTGSGESASCPCENKL

SEQ ID NO: 13006 - DNA, 1191 bp, Chlamydophila caviae
  CDS (1)..(1191)
atgagttttttcaatcaattacccacgttctcacctgattctattttaggtttgcaaaaactatttttagaagatgagcgagaggaaaaggtgaatcttgttataggtgtctatgaagatcctagcaaggcatatggtggtttttctagcgtccgtaaggcgcaatttctttttttagaagatgagatgaataaggggtatttacccatcagtggcttatcttcttttaatcaagaaatggaaaagctggtttttggtgatgtaaattctagttttgttgttggtgctcaggcgctagggggaactggagctttgcatttaggggctaagattttttctatggcctatacctcaggcaaagtatacattcccgagcaaacttggggaaaccacgtaagaatatttgctcaacaaggtttagaggttcttaaatacccttattatagctcagaaagcaaaagtttgctttttgatgagatgctttctgtattgaaagccgctccaaaaaattctttggtgcttttgcagtgttgttgtcataatcctacgggaatggatcttaatgaagatatgtggacacgtcttgctgaagttatgaaagaacatcagcttcttccattttttgataccgcttatttaggttttgggcgaggcatcaaagaagataggcgtcctatagagattttcatagaagttggtaatcccgtatttgtagcagcatgcgcaagtaaaaatttttctctttatggagagagggtaggctacttcgcagttcatagcaaaattactgaggatttagataagatttctagctgtctcgaagagaaagcccgtggagaatattcttcacctcctagacatggagctaaaattgtttcaacgattttatccgacgcttctttgaagaaagaatggttgtcagaattagatacgattcgtagttctttagggaaaactcgcgcaagacttgttcaagctatgcgaaatcacgtcggtcattcgtttgactttatcttgtctcagaagggattttttggttatcccggattttctgtagaacaggtgctctttttaagatcagagaagggtatctatacgacgagtggagcaagatttaacttaaacggaattactgataaaaatatcgaccacgtctctcagagttttgctgaggcgtatcagttgtcttag

SEQ ID NO: 13007 - protein, 396 aa, Chlamydophila caviae
MSFFNQLPTFSPDSILGLQKLFLEDEREEKVNLVIGVYEDPSKAYGGFSSVRKAQFLFLEDEMNKGYLPISGLSSFNQEMEKLVFGDVNSSFVVGAQALGGTGALHLGAKIFSMAYTSGKVYIPEQTWGNHVRIFAQQGLEVLKYPYYSSESKSLLFDEMLSVLKAAPKNSLVLLQCCCHNPTGMDLNEDMWTRLAEVMKEHQLLPFFDTAYLGFGRGIKEDRRPIEIFIEVGNPVFVAACASKNFSLYGERVGYFAVHSKITEDLDKISSCLEEKARGEYSSPPRHGAKIVSTILSDASLKKEWLSELDTIRSSLGKTRARLVQAMRNHVGHSFDFILSQKGFFGYPGFSVEQVLFLRSEKGIYTTSGARFNLNGITDKNIDHVSQSFAEAYQLS

SEQ ID NO: 13008 - DNA, 1236 bp, Shigella flexneri
  CDS (1)..(1236)
atgtgttttaaccacctgcccgtaaacctggagaaccatcgcgtgtttcaaaaagttgacgcctacgctggcgacccgattcttacgcttatggagcgttttaaagaagaccctcgcagcgacaaagtgaatttaagtatcggtctgtactacaacgaagacggaattattccacaattgaaagccgtggcggaggcggaagcgcgcctgaatgcgcagccccatggcgcttcgctttatttaccgatggaagggcttaacagctatcgccatgccattgcgccgctgctgtttggtgcggaccatccggtactgcaacaacagcgcgtagcaaccattcaaacccttggcggctcaggggcattgaaagtgggcgcggatttcctgaaacgctacttcccggaatcaggcgtctgggtcagcgatcctacttgggaaaaccacgtagcaatattcgccggggctggattcgaagtgagtacttacccctggtatgacgaagtgactaacagcgtgcgctttaatgacctgttggcgacgctgaaaacattacctgcccgcagtattgtgttgctgcatccatgttgccacaacccaacgggtgccgatctcactaatgatcagtgggatgcggtgattgaaattctcaaagcccgcgagcttatcccattcctcgatattgcctatcaaggatttagtgccggtatggaagaggatgcctacgctattcgcgccattgccagtgctggattacccgctctggtgagcaattcgttctcgaaaattttctccctttacggcgagcgcgtcggcggactttctgttctgtgtgaagatgccgaagccgctggccgcgtactggggcaattgaaagcaacagttcgccgcaactactccagcccgccgaattttggtgcgcaggtggtggctgcagtgctgaatgacgaggcattgaaagccagctggctggcggaagtagaagagatgcgtactcgcattctggcaatgcgtcaggaattggtgaaggtattaagcacagagatgccagaacgcaatttcgattatctgcttaatcagcgcggcatgttcagttataccggtttaagtgccgctcaggttgaccgactacgtgaagaatttggtgtctatctcatcgccagcggtcgcatgtgtgtcgccgggttaaatacggcaaatgtacaacgtgtggcaaaggcgtttgctgcggtgatgtaa

SEQ ID NO: 13009 - protein, 411 aa, Shigella flexneri
MCFNHLPVNLENHRVFQKVDAYAGDPILTLMERFKEDPRSDKVNLSIGLYYNEDGIIPQLKAVAEAEARLNAQPHGASLYLPMEGLNSYRHAIAPLLFGADHPVLQQQRVATIQTLGGSGALKVGADFLKRYFPESGVWVSDPTWENHVAIFAGAGFEVSTYPWYDEVTNSVRFNDLLATLKTLPARSIVLLHPCCHNPTGADLTNDQWDAVIEILKARELIPFLDIAYQGFSAGMEEDAYAIRAIASAGLPALVSNSFSKIFSLYGERVGGLSVLCEDAEAAGRVLGQLKATVRRNYSSPPNFGAQVVAAVLNDEALKASWLAEVEEMRTRILAMRQELVKVLSTEMPERNFDYLLNQRGMFSYTGLSAAQVDRLREEFGVYLIASGRMCVAGLNTANVQRVAKAFAAVM

SEQ ID NO: 13010 - DNA, 1203 bp, Xylella fastidiosa
  CDS (1)..(1203)
atgcccttatttacagatgtggaattggttccgggtgatcccattctgagcctcaacgatgcttataacgccgatacgcgtaccaacaaggtcaatttgggtattggtatttattgtgacgagagcggttgtatcccgctgttgcgggctgtccagcaggttgaagagcaacttgcgaagcatccgaaaccgcgcggttatctgccgattgatggtttgccagcctatatcaaagccacacaacaattgttgtttggagttgactccctcttgttgacggctggccgtgtggcgacttcacagactgttggaggttctggtgcattgcgggtggctgctgaggtactgaagcaggtgctaccgcatgccactgtggccattagccgtccaagctgggagaaccaccgtgctttgttcaccgctgctggcttcaagattgaggactatacctatttcgatacgctcggccacgcggtggactttactggaatggtggcggacttggcgaagctgcaaccaaagaccgtggtattacttcatggttgctgtcataacccaacgggtgccgatctcagcagggatcagtggaagcagcttgttgccttgttccaggaacgtcaattgctgccatgtatcgatctggcttaccaaggattcaatcagggcattgatgcggatgcttatgccatacgtttgcttgccgaagaaggtattagtaactatgtagttgccaactcgtactccaaatcgttctcgttgtatggcgagcgtgttggagggctgtcgatcgttgcttccaatactgagcaagcccaagcaatccagtcacaagtaaagcgtatcatccgtacgatttattccagtccgccggcacacggtgcctacttggtcgcgggtgtgctgaacagtcatgaattacgcacgctgtgggagcaggagttaactcagatgcgtgaacgtatccacgggttgcgtgcgggtttggttgctcgattgaaggcgctgggtgcgccggagtttgatttcatacaacgtcaagcaggcatgttttcgtattcggggttgagcaagatccaggtggatcgtttacgcgacgagttcgggatttatgcggtcagtagtggacgtatctgtgtggctgcgttgagtcagcacaaattggaatacgtggcccaggctgtggtgaaggtgcatcaaggctga

SEQ ID NO: 13011 - protein, 400 aa, Xylella fastidiosa
MPLFTDVELVPGDPILSLNDAYNADTRTNKVNLGIGIYCDESGCIPLLRAVQQVEEQLAKHPKPRGYLPIDGLPAYIKATQQLLFGVDSLLLTAGRVATSQTVGGSGALRVAAEVLKQVLPHATVAISRPSWENHRALFTAAGFKIEDYTYFDTLGHAVDFTGMVADLAKLQPKTVVLLHGCCHNPTGADLSRDQWKQLVALFQERQLLPCIDLAYQGFNQGIDADAYAIRLLAEEGISNYVVANSYSKSFSLYGERVGGLSIVASNTEQAQAIQSQVKRIIRTIYSSPPAHGAYLVAGVLNSHELRTLWEQELTQMRERIHGLRAGLVARLKALGAPEFDFIQRQAGMFSYSGLSKIQVDRLRDEFGIYAVSSGRICVAALSQHKLEYVAQAVVKVHQG

SEQ ID NO: 13012 - DNA, 1197 bp, Vibrio parahaemolyticus
  CDS (1)..(1197)
atgactttcatgttttctaatctaccaactcccgtattagatccaattttatctttatccgttgcataccgtaacgatgaacgtccaaacaaggttgaccttggtattggcgtatacaaaaacagcgcaggcgaaacgccgatcatgaaagccattcaaatggctcaagatgtcgttgttgaaactcaaaaaaccaaatcttacgttggtcttgctggttgtgaagagttcaaccaaagcatgattgatcttctactgacgggaacgtcagcgatggatcgtgttgctgcaattcaaacgccaggagcaagtggtgcactgcgtatgctgggtgacctaatgaaggtcgcacaaccagatacaacggtttggatttcgaatccaagctatgtgaaccacaagccagtaatggaagctgctgggcttaaagttaagttctaccattatttctcgccagaaacgaaacaagtcgacaccgcaaaaatgctggatgatcttgctaaagcagggccgacagatgtggttctactgcatggttgttgtcacaacccaacaggcgcagacatcgacttttccgcatggcaagctattacagaactttctcaaaagaacggttttacgccatttgttgatatcgcgtatcaaggttttggtgacggcttagaagctgacgcaaaaggtcttcgttacatggcggataatgtcgaagagatgttgattacaacttcttgttctaaaaactttggcttgtaccgcgaacgtactggtgcagctattgttgtgggtaagaacacgcaagacatcactaacgcgaaaggcaaattgttaacgttagcgcgctctacgtacacgatgccacccgatcatggtgctgctttagtgaaaaccattctgcaagatgcgaacctgacttctgtctggaagcaagagttgagcgaaatgcaacaacgtttggtcagccttcgtcaaagtttgtgtaacgaattgagaaacaaccataatacagatcaatttgacttcattgagagtcacaaaggcatgtttactgtgctaggctttagtgaaaaccaaatggcgcaactgcgtgaagattatggcatttatggtgttggcgatggtcgaattaacatcgctggcttaaccgaaactcatattccatacgtagctgacgcaattaagaaaatatctcaaccttaa

SEQ ID NO: 13013 - protein, 398 aa, Vibrio parahaemolyticus
MTFMFSNLPTPVLDPILSLSVAYRNDERPNKVDLGIGVYKNSAGETPIMKAIQMAQDVVVETQKTKSYVGLAGCEEFNQSMIDLLLTGTSAMDRVAAIQTPGASGALRMLGDLMKVAQPDTTVWISNPSYVNHKPVMEAAGLKVKFYHYFSPETKQVDTAKMLDDLAKAGPTDVVLLHGCCHNPTGADIDFSAWQAITELSQKNGFTPFVDIAYQGFGDGLEADAKGLRYMADNVEEMLITTSCSKNFGLYRERTGAAIVVGKNTQDITNAKGKLLTLARSTYTMPPDHGAALVKTILQDANLTSVWKQELSEMQQRLVSLRQSLCNELRNNHNTDQFDFIESHKGMFTVLGFSENQMAQLREDYGIYGVGDGRINIAGLTETHIPYVADAIKKISQP

SEQ ID NO: 13014 - DNA, 1245 bp, Vibrio parahaemolyticus
  CDS (1)..(1245)
atgctgaaaggtataaatacgagcagaccccttcgattaacatggatgaagattatgtttgaaaaagtagttgccgctccggccgaccctatccttggccttactgaagaatttaaaaaagatcctcgcgctgaaaagattaaccttggcgttggtatttacaaaaacgaacaaggcgaaacacctgttcttgctaccgtaaagaaagccgaagcagcactgattgaaacggaaaaaaccaaatcatacctaaccatcgaagggactgctgagtacggtctggcggtacaaaaactacttttcggtgcagacgctgaaatcgtagcggaaaaacgcgcgaaaacagctcaagcgcctggtggtacaggtgcattacgcgtggcgggtgaatttattaaacgccaacttggtaacgtaaaaatctggatcagcaacccaacttgggcaaaccacaacggcgtgtttaccgctgcaggtctagaaacggctcaatacacttactacaacgcagaaactaaagacaaagacttcgatgcaatgctaaacgatcttcaagctgcatctgaaggtgacatcgttcttctacacggctgctgccacaacccaactggcatcgatccaactgctgaagaatgggaaacactagcgaagctgattgctgagaagaaactgcttcctctgttcgactttgcataccagggctttgctaagggtgtagaagaagacgcagctggcctacgtattttcgcgaaatacaacaaagaaattctcgttgcgagctcgttctcgaaaaacttcggcctatacaatgaacgtgtaggcgcattcacgcttgttgctgaatctgaagaagtggcaacaacagcattctctcaagtaaaagcgatcatccgctctatctactctaacccaccagctcacggtagtgctgttgttactcatattctaaacaacaaagaactgcgtgccgaatgggaagcggaagtacaagaaatgcgtgaccgtattcaagagatgcgcgagctgttcgtagcaactctgaaagaagaaggtgtggatgcagatttcagctttatcgaacgtcaaaacggcatgttctcgttctctggtctatctaaagagcaagttaaccgtctgaaagatgagttcgcaatttacatcgttggttctggccgtatcagcgtagctggtatgacaaaatcaaacatgggcccactatgtaaaggtatcgcagcggttctataa

SEQ ID NO: 13015 - protein, 414 aa, Vibrio parahaemolyticus
MLKGINTSRPLRLTWMKIMFEKVVAAPADPILGLTEEFKKDPRAEKINLGVGIYKNEQGETPVLATVKKAEAALIETEKTKSYLTIEGTAEYGLAVQKLLFGADAEIVAEKRAKTAQAPGGTGALRVAGEFIKRQLGNVKIWISNPTWANHNGVFTAAGLETAQYTYYNAETKDKDFDAMLNDLQAASEGDIVLLHGCCHNPTGIDPTAEEWETLAKLIAEKKLLPLFDFAYQGFAKGVEEDAAGLRIFAKYNKEILVASSFSKNFGLYNERVGAFTLVAESEEVATTAFSQVKAIIRSIYSNPPAHGSAVVTHILNNKELRAEWEAEVQEMRDRIQEMRELFVATLKEEGVDADFSFIERQNGMFSFSGLSKEQVNRLKDEFAIYIVGSGRISVAGMTKSNMGPLCKGIAAVL

SEQ ID NO: 13016 - DNA, 1200 bp, Pseudomonas syringae
  CDS (1)..(1200)
atgctagcccacgtggagtcgtacgccggtgatccgatcctttcgctgatggaagcctttggcaaggatccacgcgcagacaaggtcaatctgagcatcggtctgtattacgacgcgcagggacgtatcccgcagttggcatgcgtggcaactgcgcaacaacaattggccgaaggcgagcaggcggcttctgtctatttgccgatggaaggcctggcggcttaccggcaggcggtgcaaaccctgttgttcggcgccgaccatccgctggtgcaggccggtcgcgtggcgactatccaaaccgtgggcggctcgggcgcgcttaaagtgggggccgacttcctcaaatatgcattccccgattctcaggtgtgggtcagtgatccgacctgggaaaaccaccttgcgctgttcggcggtgcgggcttcaaggtcaatacttacccctacttcgatgcccagactggcggcgtcaggttcgaggctatgctcgacaccgtgcagggtctgccggcgcaaagcatccttttgctgcacccgtgctgccacaacccgactggcgcggatttgtccgtcgagcagtgggaccggttgatcgaagtgatcaaggatcgccagctcatcgcgtttctggatatcgcctatcagggcttcggcaaaggcatcgacgaagacgcctacgctatccgcgcgatggccgacgcgggcatcaccacgctggtcagcaactcgttctcgaaaatcttctcgctgtatggcgagcgggtcggcgggctatcggtggtctgcgaagacaccgcatcggccgccaatgtattcggccagctcaaggccacagtacgccgcaactattccagtccgcctgcgcatggcgcgtttctggtgtccagagtgctcaacacaccgcaactgcgtgatcagtggctgagcgaggtcgaaaccatgcgcctgcgcatcatcgacatgcgcagccgtctggtttcggtgctggcgcagaaagttgccgggcgcgatttcagctttatcctcaggcagagcggcatgttcagctacaccggattgacgccgcagcaggttgacgagctgaaagatgttcacggtatttacatgctgcgcagtggccgggtgtgcatggcgggcttgaatgaaagaaatatcgacaaggtgtgtgacgcgattgcgagcctctttgcccactaa

SEQ ID NO: 13017 - protein, 399 aa, Pseudomonas syringae
MLAHVESYAGDPILSLMEAFGKDPRADKVNLSIGLYYDAQGRIPQLACVATAQQQLAEGEQAASVYLPMEGLAAYRQAVQTLLFGADHPLVQAGRVATIQTVGGSGALKVGADFLKYAFPDSQVWVSDPTWENHLALFGGAGFKVNTYPYFDAQTGGVRFEAMLDTVQGLPAQSILLLHPCCHNPTGADLSVEQWDRLIEVIKDRQLIAFLDIAYQGFGKGIDEDAYAIRAMADAGITTLVSNSFSKIFSLYGERVGGLSVVCEDTASAANVFGQLKATVRRNYSSPPAHGAFLVSRVLNTPQLRDQWLSEVETMRLRIIDMRSRLVSVLAQKVAGRDFSFILRQSGMFSYTGLTPQQVDELKDVHGIYMLRSGRVCMAGLNERNIDKVCDAIASLFAH

SEQ ID NO: 13018 - DNA, 1197 bp, Pseudomonas syringae
  CDS (1)..(1197)
atgagcctgttctccgctgtcgaaatggcaccccgcgatccgatcctgggtatcaacgaagccttcaacgccgacacccgtaccaccaaggtcaaccttggcgtgggcgtctactgtgatgaagacgggcgcattcctctgctgcgtgccgtggctgaagctgaaaagattcgtgtcgcccagcacgcgccgcgcggctacctgccgatcgacggcattgccgcctacgaccaggccgtgcaaaaactgttgctgggtgccgattcaccgctgatcgcctcgggccgggtgctaaccactcaatcggtgggcggcacgggtgctttgaagatcggtgccgacttcctcaagcaactgctgcccaatgcggtggtggccatcagcgacccaagctgggaaaaccatcgcgcgctgttcgaaaccgccggtttcccggtgcagaactatcgttactacgacgccgccacgcatgacgtgaaccgcgccggcatgctcgaagacctgcacaacctgccgaacaactcggtggtggtgctgcacgcctgctgccacaacccgactggcgtcgatctgagcctggacgactggaaaaaagtgctggaagtggtcaaggccaagggccacgtaccgtttctggacatggcttaccagggctttggccaaggcattcaggaagacgcgctggcggtgcgcctgttcgccgagtcgggcctgaccttcttcgcttccagctcgttctccaaatcgctgtcgctgtatggcgagcgcgtcggtgcgctgtcgatcatcacagaatccaaggaagaaaccgcccgcgttctgtcgcaggtcaagcgtgtgatccgcaccaactactccaacccgccgacccacggcgcgatcatttccgccgccgtcctcaacgacccggccctgcgcgcgatgtgggaagaagaactcggcgagatgcgcgtgcgcattcagggcatgcgcaaggcgatggtcgagcgtctggccgacaacccggccggccaggatttcagcttcgtcggccgtcagtgcggcatgttctcctactccggcctgaccgccgcccaggcccagcgcctacgcagtgaattcggcatctacgcgctggacaccggccgtatctgcgtggccgcgctgaatcagaaaaatatcgatgcggtgtgtgaggcgatcaagaaggttctttaa

SEQ ID NO: 13019 - protein, 398 aa, Pseudomonas syringae
MSLFSAVEMAPRDPILGINEAFNADTRTTKVNLGVGVYCDEDGRIPLLRAVAEAEKIRVAQHAPRGYLPIDGIAAYDQAVQKLLLGADSPLIASGRVLTTQSVGGTGALKIGADFLKQLLPNAVVAISDPSWENHRALFETAGFPVQNYRYYDAATHDVNRAGMLEDLHNLPNNSVVVLHACCHNPTGVDLSLDDWKKVLEVVKAKGHVPFLDMAYQGFGQGIQEDALAVRLFAESGLTFFASSSFSKSLSLYGERVGALSIITESKEETARVLSQVKRVIRTNYSNPPTHGAIISAAVLNDPALRAMWEEELGEMRVRIQGMRKAMVERLADNPAGQDFSFVGRQCGMFSYSGLTAAQAQRLRSEFGIYALDTGRICVAALNQKNIDAVCEAIKKVL

SEQ ID NO: 13020 - DNA, 1197 bp, Pseudomonas putida
  CDS (1)..(1197)
atgttcaaacatgtcgatgcctatgccggcgacccgatcctctcgttgatggaaaccttcaaggccgacccgcgcgccgacaaggtcaacctgagtattggcctgtactacgatgaggccggcgtggtgccgcaactggcggcggtggatgcggtggaaaaacgcattgccggtcaggaccacgaagcctccctgtacctgccaatggaaggcctggccagctaccgccaagccatccaggcgctgctgttcggtgctgatcacccggccgtgaccggcggtcgtgtggccaccgtacagaccgtgggtggctccggcgccctgaaagtcggtgccgatttcctcaagcgctacttcccgcagtccgaagtctgggtcagcaacccgacctgggacaaccaccgcgccatcttcgaaggtgcaggcttcaaggtgcacacctatccgtactttgaccaggccacccgtggcgtggacttcgacggcatgctggccaccttgcagagcctgccggccaacagcgtggtactgctgcacccgtgctgccacaaccctaccggtgccgatctgcagcagcaccagtggcaacaagtggtcgaagtggtcaaggcacgccagctgatcccgttcctcgacatcgcttatcaaggcttcgccgaaggcctggtggaagatgcctacgccatccgcgaaatggcccgtgccggcgtgccgtgcctggtcagcaactccttctcgaaaatcttctcgctgtatggcgagcgggtgggcggcctgtcggtggtgtgcgatgacgaggccactgcccagagcgtgcttggccagctgaaggccaccgtgcgccgcaactactccagcccgcccaacttcggcgcccagctggttgccggcgtactgagcgatgctggcctgaatgcccagtgggccgaagaagtcgaagtgatgcgcaagcgtattctcgacatgcgccaggcgctggtcgatgccctggccgtgctgctgccgggccaggacttccagttcttcctgcgccagcgcggcatgttcagctacaccggctttagcgtcgagcaggtacgtcgcctgcgtgacgagttcggcgtgtacctgatcgacagcggccgtgtgtgcatgtccggcctgcgcccggccaacctgcaacgggttgccgaagcgttcgctgccgttcagaagtaa

SEQ ID NO: 13021 - protein, 398 aa, Pseudomonas putida
MFKHVDAYAGDPILSLMETFKADPRADKVNLSIGLYYDEAGVVPQLAAVDAVEKRIAGQDHEASLYLPMEGLASYRQAIQALLFGADHPAVTGGRVATVQTVGGSGALKVGADFLKRYFPQSEVWVSNPTWDNHRAIFEGAGFKVHTYPYFDQATRGVDFDGMLATLQSLPANSVVLLHPCCHNPTGADLQQHQWQQVVEVVKARQLIPFLDIAYQGFAEGLVEDAYAIREMARAGVPCLVSNSFSKIFSLYGERVGGLSVVCDDEATAQSVLGQLKATVRRNYSSPPNFGAQLVAGVLSDAGLNAQWAEEVEVMRKRILDMRQALVDALAVLLPGQDFQFFLRQRGMFSYTGFSVEQVRRLRDEFGVYLIDSGRVCMSGLRPANLQRVAEAFAAVQK

SEQ ID NO: 13022 - DNA, 1197 bp, Pseudomonas putida
  CDS (1)..(1197)
atgagcctgttttccgctgtcgagctggcaccccgcgaccctattctgggcctcaacgaagcattcaacgccgacccacgtaccgacaaggtcaacctgggcgtaggcgtgtattgcaatgaggaaggccgcattccgctgctgcgcgccgtgatcgaagccgaaacccagcgtgccgcccagcacgcttcgcgcggctacctgccgatcgacggcatcgccacctacgaccaggctgtgcagaagctgctgttcggcgccgagtcgccactgctggccgccggccgcgtggtcaccgtgcaggccgtcggtggtaccggcgcgctgaagatcggtgccgacttcctcaagcgcctctcgcccaatgccgtggttgccatcagcgaccctagctgggaaaaccaccgtgcgctgttcgaatcggccggcttcccggtgcagacctaccgctactacgatgcgccgaccaacgacgtcaaccgcgctggcatgctcgaagacctcaacgccctgccatccggttcgatcgtggtgctgcacgcctgctgccacaacccgaccggtgtcgacctgaacctggacgactggaagaacgtcctggaagtggtcaaggccaagggccacgtgccgttcctcgacatggcctaccagggctttggtgacggtatcgccgaagacgccttcgccgtgcgcctgttcgccgagtcgggcctggagttcttcgtttccagctcgttctccaaatcgttctcgctgtacggcgagcgcgtcggcgcactgtcgatcgtcaccgcctccaaggacgagagcacccgcgtgctgtcgcaggtcaagcgcgtgatccgcaccacctactccaacccgccaacccacggcgcaaccattgttgccaccgtgctgaacagcgcagaactgcgccagatgtgggaaaccgaactggccgaaatgcgcgagcgcatccacggcatgcgcaagcagatggtatcgctgctggccgaatacggtgcaaaccgcgacttcagcttcgttggccgccaggtcggcatgttctcctactcgggcctgaccgttgaacaggtcacccgcctgaagaacgacttcggcatctatgccctggacaccggccgtatcgcggtggccgcgctgaaccagagcaacatccacgtggtgaccaaagcgatcgtggaagtgctgtaa

SEQ ID NO: 13023 - protein, 398 aa, Pseudomonas putida
MSLFSAVELAPRDPILGLNEAFNADPRTDKVNLGVGVYCNEEGRIPLLRAVIEAETQRAAQHASRGYLPIDGIATYDQAVQKLLFGAESPLLAAGRVVTVQAVGGTGALKIGADFLKRLSPNAVVAISDPSWENHRALFESAGFPVQTYRYYDAPTNDVNRAGMLEDLNALPSGSIVVLHACCHNPTGVDLNLDDWKNVLEVVKAKGHVPFLDMAYQGFGDGIAEDAFAVRLFAESGLEFFVSSSFSKSFSLYGERVGALSIVTASKDESTRVLSQVKRVIRTTYSNPPTHGATIVATVLNSAELRQMWETELAEMRERIHGMRKQMVSLLAEYGANRDFSFVGRQVGMFSYSGLTVEQVTRLKNDFGIYALDTGRIAVAALNQSNIHVVTKAIVEVL

SEQ ID NO: 13024 - DNA, 1305 bp, Staphylococcus epidermidis
  CDS (19)..(1305)
aaagaggttaagacaatgatgaatccattagcccaaaaattgaatgatgaaataaagcaatcaagtccagaagtattagatatgatgtcacaattaggtaaagatatgttttatccaaaaggaattttatcgcaatctgccgaagcaaaacgcacaacatataatgctactattggtatggcaaccaaaaaagaaggtaaaatgtacgcaaattcacttaaccaaatgtttaatgaccttacaccggatgaaattttcccatatgcacctcctcaaggtgtagaggaattacgtgatttatggcagaaaaaaatgcttaaagaaaatcccgacttaaagtctaaatctatctctcgtcccatcgttacaaatgctctcacgcacggtctttctctagtagctgatttatttgtagatacagatgataccgtcttattaccgacacacaactggggcaattataaacttgtatttagcacacgtcacggtgctcatatcgatacgtattctatttttgataactcaggtcacttcactacatctgaacttgtaaaaacattaaaagaatataaaaaagacaaagtgattattattttaaattatcctaataacccaactggttacacaccaaataaagaagaagttaatactattgtaaatgcaattgaagaactagctaataaaggtactaaagtagtaactgttgtcgatgatgcatactatgggttattttatgaagaagtttaccaacagtcgattttcacggctttaacacaggtgaaatcttcaaaccttttaccagtgcgtttggatggagctactaaagaattcttctcttgggggttccgcgttggctttatgacgtttggaattgatcatgaaacgttaaaaaatgcgctagaagctaaagtaaaaggattaattcgtagcaatatttcaagttctccactaccttctcaaagtgcaatcaaacatgtacttaaacatcatgagcaatttgataaagaaatcgatcaaaatatcaatattttaaaagaacgctacgaagtaactaaacaagtagtgtatgataataaatatgccaaatattggcaagcctatgactttaattcaggatactttatgtcattgaaattaaatcaagtcgatccagaagaattacgtgaacatttaattaataactattcaattggtattattgctttaaatagcacagatattcgtattgcctttagttgtgtagaaaaagaagatattccttatgtctttgagtctattgctaatgcaattgatgatattaaataa

SEQ ID NO: 13025 - protein, 428 aa, Staphylococcus epidermidis
MNPLAQKLNDEIKQSSPEVLDMMSQLGKDMFYPKGILSQSAEAKRTTYNATIGMATKKEGKMYANSLNQMFNDLTPDEIFPYAPPQGVEELRDLWQKKMLKENPDLKSKSISRPIVTNALTHGLSLVADLFVDTDDTVLLPTHNWGNYKLVFSTRHGAHIDTYSIFDNSGHFTTSELVKTLKEYKKDKVIIILNYPNNPTGYTPNKEEVNTIVNAIEELANKGTKVVTVVDDAYYGLFYEEVYQQSIFTALTQVKSSNLLPVRLDGATKEFFSWGFRVGFMTFGIDHETLKNALEAKVKGLIRSNISSSPLPSQSAIKHVLKHHEQFDKEIDQNINILKERYEVTKQVVYDNKYAKYWQAYDFNSGYFMSLKLNQVDPEELREHLINNYSIGIIALNSTDIRIAFSCVEKEDIPYVFESIANAIDDIK

SEQ ID NO: 13026 - DNA, 1206 bp, Yersinia pestis
  CDS (1)..(1206)
atggaagcctctgacatgtttgaaaaaattactgctgcacctgcggatcctattttaggtttgaccgatatcttccgcgcggatgaccgcgctcataaaatcaatctggggatcggtgtctacaaagacgaaaccggtaaaaccccagtgctgaccagcgtgaagaaagctgagcagtatttactggaaaatgaagctaccaaaaattatctgggtattgacggcctgcctgtttttgccagttgcacccaagaactgctgttcggtgctaatagtgcaattattgcggataaacgtgctcgtaccgctcaaacgccaggtggtaccggtggtttgcgcattgccgctgattttatcgcccatcagaccagcgctaaacgtgtctgggtcagtaacccaagctggccaaaccataaaaacgtcttcgaagccgcagggctggaagtggtggagtacgcttattatgatgctgctaaccatgcattggacttcgatggcttgttaaatagcctgtcagaagctcaggcgggtgatgtggtgttgttccacggctgctgccataacccaacgggtatcgacccaacagaaactcagtggagccaactggcggagttatcggttgctaaaggctggttgccactgtttgatttcgcttatcaaggctttgccaacggtttggaagaagatgctcagggcctgcgtattttcgcggcaacacatcaagagttgatcgtttgcagctcttattcgaaaaactttggtttgtacaatgaacgtgttggggcttgtacccttgtcgccgccgacagtaacgttgccgataccgcattcagccaagttaaagcggttatccgagccaactactctaacccaccggcacatggtgcatcagtcgttgccactattctgagtaatgccgcactacgggcgatttgggaacaagaactgaccgatatgcgtcagcgcatccaacgtatgcgtcagttgtttgttaataccttgcaggaaaaaggcgctcaacaagattttagctttatcattaaccagaatgggatgttctcgttcagtggtctgaccaaagaacaagtgctgcgcctgcgtgatgagttcgccgtctatgcggtaaattctggccgggttaacgtggcggggatgacaccagacaatatggcgccgttatgtgaagctatcgttgcggtgctctaa

SEQ ID NO: 13027 - protein, 401 aa, Yersinia pestis
MEASDMFEKITAAPADPILGLTDIFRADDRAHKINLGIGVYKDETGKTPVLTSVKKAEQYLLENEATKNYLGIDGLPVFASCTQELLFGANSAIIADKRARTAQTPGGTGGLRIAADFIAHQTSAKRVWVSNPSWPNHKNVFEAAGLEVVEYAYYDAANHALDFDGLLNSLSEAQAGDVVLFHGCCHNPTGIDPTETQWSQLAELSVAKGWLPLFDFAYQGFANGLEEDAQGLRIFAATHQELIVCSSYSKNFGLYNERVGACTLVAADSNVADTAFSQVKAVIRANYSNPPAHGASVVATILSNAALRAIWEQELTDMRQRIQRMRQLFVNTLQEKGAQQDFSFIINQNGMFSFSGLTKEQVLRLRDEFAVYAVNSGRVNVAGMTPDNMAPLCEAIVAVL

SEQ ID NO: 13028 - DNA, 1197 bp, Wigglesworthia glossinidia brevipalpis
  CDS (1)..(1197)
atgtttgaattaacagagctttctcctttagatccagtattaggaatgatcgatattattaaaaatgataaaagagatggtttaataaatttaggaattggagtttataaagatataaaaggtaacactcctatattagatagtgtaaaaaaagcagaaaatattttaatagaatcagaaaaaacaaaaaattatttaaatattgaaggactagaatcatttatacaacattcaaaaagtttaatttttggcaaagaaaatttatctgagttaaatgattttattgcttcagtacaatgcccaggaggaacttctgctttaaaaattgctgcagagtttttaattagacatacaaaaatacgtaaaatttggatcagtgatccaagttggcctaatcatgaaaagttattttcatttgccggatttaaagtacataaatatccttattttaataaggaaaaaaatcaattagatttttataatatgaaaaaatgcttagaaaatattaaagatgactctgctgttatttttcacagctcttgtcataatccaacaggaatagatcctagttttgaacaatggttagaattagctaaaatttctagaaataaaaaatggattccaatatttgattctgcatatcaaggtttttccaatggattaaaagatgatgtatttggtataaaaatttttttaaaatatattaatgaatttgtagtttgcaattcattttctaaaaattttagtttgtataatgaaagagttgggacatgcaattttataacaaaaaacaaaaaacatgccagtaatgttttcagtcaattaagatctattatacgtgtaaattactctaatcctccagctcatggagcaaatattataaatgtaattttctctaaaaaagatttatttaatttatggaaatctgaattaaatgaaatgagaaatagaattaaacaaataagatctttatttgcagatacattatttaaaataaataataaaaaaaatttcaattttattaaaaatcagcatggaatgttttcttttattggattaaatagaaaaaatgtaatggatcttagaaataattttagaatatatgttattgattctggaagattaaatttcgcagcaataacaaataaaaatatttatgaggtgtgtagatcaattaattgtgttttaaataattga

SEQ ID NO: 13029 - protein, 398 aa, Wigglesworthia glossinidia brevipalpis
MFELTELSPLDPVLGMIDIIKNDKRDGLINLGIGVYKDIKGNTPILDSVKKAENILIESEKTKNYLNIEGLESFIQHSKSLIFGKENLSELNDFIASVQCPGGTSALKIAAEFLIRHTKIRKIWISDPSWPNHEKLFSFAGFKVHKYPYFNKEKNQLDFYNMKKCLENIKDDSAVIFHSSCHNPTGIDPSFEQWLELAKISRNKKWIPIFDSAYQGFSNGLKDDVFGIKIFLKYINEFVVCNSFSKNFSLYNERVGTCNFITKNKKHASNVFSQLRSIIRVNYSNPPAHGANIINVIFSKKDLFNLWKSELNEMRNRIKQIRSLFADTLFKINNKKNFNFIKNQHGMFSFIGLNRKNVMDLRNNFRIYVIDSGRLNFAAITNKNIYEVCRSINCVLNN

SEQ ID NO: 13030 - DNA, 1200 bp, Vibrio vulnificus
  CDS (1)..(1200)
atgaagattatgtttgaaaaagtagttgccgctcccgcggacccgattcttggcctaactgaagaattcaaaaaagaccctcgcgcagaaaaaattaaccttggcgtgggtatctacaaaacagaacaaggtgaaactcctgttcttgctacggtaaagaaagcggaagcagcgcttgttgaaaccgagaaaaccaaatcttacctaaccatcgaaggaacagcagaatacgcattagcggttcaaaaactactgtttggtgcggatgctgagctaatcaatgcgcaacgtgcaaaaacagcacaagcacctggcggtactggcgcactgcgcgttgcaggcgaattcatcaaacgccaactcggcgatgtaaaaatctggatcagcaacccaacttgggctaaccaccatggtgtgttccgcgcagcaggcctagaaacggttgagtacgcttactacaacccagaaaccaaagacaaagactttgccgctatgctggccgaccttgaaaaagcgtccgctggtgatgtggtactgctgcacggatgttgccataacccaacaggcatcgacccaacggcacaagagtgggaagcgcttgctaaactggttgccgacaagggcctacttccactatttgactttgcctaccaaggtttcgcgaaaggtgttgaagaagatgcgcaaggcctacgtaccttcgctaaattcaacaaagagatcctcgtagcaagttcattctcgaaaaactttggtctgtacaacgagcgtgtaggcgcattcacgttagtggctgaaagccaagagatcgcagaaacggcattctcacaagtgaaagcgatcattcgctctatctactcaaacccaccagcgcacggcagtgcggtagtgactcacatccttaacgatgccgcgcttcgtgcagagtgggaagcggaagtggcagagatgcgcgatcgcatccaagagatgcgcgaactttttgttacgacactgaaagaagaaggcgttgcggctgactttagctttatccaacgtcaaaacggcatgttctctttctctggcttgaacaaagatcaagtggctcgcctaaaagaagagtttgcgatctacatcgtcggttctggtcgcatcagcgttgcgggcatgaccaaatccaacatgggtccgctttgtaaagccatcgctgcggtactgtaa

SEQ ID NO: 13031 - protein, 399 aa, Vibrio vulnificus
MKIMFEKVVAAPADPILGLTEEFKKDPRAEKINLGVGIYKTEQGETPVLATVKKAEAALVETEKTKSYLTIEGTAEYALAVQKLLFGADAELINAQRAKTAQAPGGTGALRVAGEFIKRQLGDVKIWISNPTWANHHGVFRAAGLETVEYAYYNPETKDKDFAAMLADLEKASAGDVVLLHGCCHNPTGIDPTAQEWEALAKLVADKGLLPLFDFAYQGFAKGVEEDAQGLRTFAKFNKEILVASSFSKNFGLYNERVGAFTLVAESQEIAETAFSQVKAIIRSIYSNPPAHGSAVVTHILNDAALRAEWEAEVAEMRDRIQEMRELFVTTLKEEGVAADFSFIQRQNGMFSFSGLNKDQVARLKEEFAIYIVGSGRISVAGMTKSNMGPLCKAIAAVL

SEQ ID NO: 13032 - DNA, 1191 bp, Shewanella oneidensis
  CDS (1)..(1191)
atgtttaactcactcatcgcaatgcctgcggatccgatccttggcttgttgacccagtaccgcgaagacacacatccacagaaagtagacttaggtgtcggcgtttataaagatcccgcgggaaacacccccattctcaattgtgtaaaaaaagccgagaaatttcgtttagaaaccgagacgacaaaggtctatatcggtccaactggttcgcctcagtttaataccctgatgacagagttagcctttggcagtgatcatagcgcgattatcgctaaccgtattcgtactgtttccacacctggcggtacgggcgctctgcgtgttgcgggtgactttattaagcgttgcaatcctaatgcggtgttgtgggtaagcgatcccacatgggctaatcatacaggtttattcgaagctgctgggatcacagttaaaacttatccctattatgactacgatagtaaatcgttgaaatttgacgagatgcttgctgcattatcgcaagtgagtcctgatgacgtagtgttattacacgcctgctgccataacccaagtgggatggatttgaccactgatcaatgggataaagtcgtcaccctcaccaaagagcaaggttttaccccgcttatcgacatggcttaccaaggttttggtgacggtgtcgatatcgatgcctacggcgtgcgtaaaatggctgcagcggtcgataatatgatcctgtgtagctcttgctcgaagaacttcggtctgtaccgtgagcgtatcggttcctgctctgtggttgcaaaggatgcgaacacggcaaacattgcgcaatctgtactgctttatgtggttcgctgcctctactctatgccacctgcccatggcgcggcgattgttgagacgattttaggatcaaaagaattaacccaagaatggcttgatgagctcaaagtgatgcgcgaccgtatcaatggtaaccgcgcgattttagttgaaaaactcaaagccaatggtgttgctcgcgactttagctttattgctcgccaaaaaggcatgttctctttccttggtgtaaatcctgagcaagtggcgcgtctgcaaaaagaatttagcatctacatggtgggttcaagccggatcagtatcgcggggatcagtgaagataacgtcgattatctcgcccaatcgatcgccaaagtgctttga

SEQ ID NO: 13033 - protein, 396 aa, Shewanella oneidensis
MFNSLIAMPADPILGLLTQYREDTHPQKVDLGVGVYKDPAGNTPILNCVKKAEKFRLETETTKVYIGPTGSPQFNTLMTELAFGSDHSAIIANRIRTVSTPGGTGALRVAGDFIKRCNPNAVLWVSDPTWANHTGLFEAAGITVKTYPYYDYDSKSLKFDEMLAALSQVSPDDVVLLHACCHNPSGMDLTTDQWDKVVTLTKEQGFTPLIDMAYQGFGDGVDIDAYGVRKMAAAVDNMILCSSCSKNFGLYRERIGSCSVVAKDANTANIAQSVLLYVVRCLYSMPPAHGAAIVETILGSKELTQEWLDELKVMRDRINGNRAILVEKLKANGVARDFSFIARQKGMFSFLGVNPEQVARLQKEFSIYMVGSSRISIAGISEDNVDYLAQSIAKVL

SEQ ID NO: 13034 - DNA, 1194 bp, Shewanella oneidensis
  CDS (1)..(1194)
atgattttctctcaggtagtgctcgctccagcagatcccatccttggtttaaccgatacttttaaagctgatccacgtcaagataaagtcaaccttggtgtcggcatttataaggatgaagcagggcagactccggtattgcaatcggttaagaaagcagaagccatactgctagaacaagagaagactaaaaactatttaggcatagaaggggtccaaacctacaaccgcgttgtacaagagttgttatttggtgaaggtagtgagctagtggcttctggccgtgccgcaaccgcccaagcgcctggtggtacaggggcattgcgtatagccgccgagtttttattgagaaacacgccatctcgcactatttgggtaagtaatcccacttgggctaaccatcaaaatatttttgaaactgcagggttaacggttaaagagtttggatattacaacgccagtgctcacgatatcgatttcgatggcatgatgaccgatctcgccaatgcacaggcgggtgacattattctactgcacggctgctgtcataacccaacgggtattgacttgactttagcgcaatgggatttagtggctaacctctgtgctgacaaacaattagtgcctttgtttgactttgcttaccaaggttttggaacaggtattgaagaagatgctgcaggcctgcgtttagtcgcttcaaaagttcctgagctgttagtcgcaaattctttctctaaaaactttgggctttataatgaacgtatcggtgctgtgactgtggttgctcacaatgcagatgaagctgttcgcgcttttagccaagtgaaacgtacaattcgggcaaactattcaaatcccccagcccatggtgcgttaattgttagcaccattttaagtgatgcagctttgaaagccctttgggtacaagagctgaccgaaatgcgtgagcgtatagcccttatgcgtactctatttgtgcagagcttaaaagatgagggtgtgactcaagattttagctttatttcgcgccaaaatggtatgtttagcttctctggcttgaataagtcgcaagtggcccgtttaaaagacgaatttggagtttatattgtcggttctggtcgtattagtgtggcgggtatgacgaaagccaatatgcctgcgatctgtaaagcgattgctcaggtcgtataa

SEQ ID NO: 13035 - protein, 397 aa, Shewanella oneidensis
MIFSQVVLAPADPILGLTDTFKADPRQDKVNLGVGIYKDEAGQTPVLQSVKKAEAILLEQEKTKNYLGIEGVQTYNRVVQELLFGEGSELVASGRAATAQAPGGTGALRIAAEFLLRNTPSRTIWVSNPTWANHQNIFETAGLTVKEFGYYNASAHDIDFDGMMTDLANAQAGDIILLHGCCHNPTGIDLTLAQWDLVANLCADKQLVPLFDFAYQGFGTGIEEDAAGLRLVASKVPELLVANSFSKNFGLYNERIGAVTVVAHNADEAVRAFSQVKRTIRANYSNPPAHGALIVSTILSDAALKALWVQELTEMRERIALMRTLFVQSLKDEGVTQDFSFISRQNGMFSFSGLNKSQVARLKDEFGVYIVGSGRISVAGMTKANMPAICKAIAQVV

SEQ ID NO: 13036 - DNA, 1236 bp, Escherichia coli O6
  CDS (1)..(1236)
atgtgttttaaccaccagcccgtaaacctggagaaccatcgcgtgtttcaaaaagttgacgcctacgctggcgacccgattcttacgcttatggagcgttttaaagaagaccctcgcagcgacaaagtgaatttaagtatcggtctgtactacaacgaagacggaattattccacaactgaaagccgtggcggatgcggaagcgcgcctgaatgcgcagcctcatggtgcttcgctttatttaccgatggaagggcttaacagctatcgccatgccattgcgccgctgctgtttggtgcggaccatccggtactgcaacaacagcgcgtagcaaccattcaaacccttggcggctcaggggcattgaaagtgggtgcagatttcctgaaacgctacttcccggaatcaggcgtctgggtcagcgatcctacctgggaaaaccacgtagcaatattcgccggggctggattcgaagtgagcacttacccctggtatgacgaagcgactaacggcgtgcgctttaatgacctgttggcgacgctgaaaacattacctgcccgcagtattgtgttgctgcatccatgttgccacaacccaacgggtgccgatctcactaatgaccagtgggattccgtgattgaaattctcaaagcccgcgagcttattccattcctcgatattgcctatcaaggatttggtgccggtatggaagaggatgcctacgccattcgcgccattgccagcgctggattacccgctctggtgagcaattcgttctcgaaaattttctccctttacggcgagcgcgtcggcggactttctgttctgtgtgaagatgccgaagccgcaggccgcgtactggggcaattgaaagcaaccgttcgccgcaactactccagcccgccgaattttggtgcgaaggtggtggctgcggtgctgaatgacgaggcattgaaagccagctggctggcggaagtagaagagatgcgaactcgcattctggcaatgcgtcaggaactggtgaaggtattgagcacagagatgccagagcgcaatttcgattatctgcttaatcagcgcggcatgttcagttataccggtttaagaaccgctcaggttgaccgactacgtgaagaatttggtgtctatctcatcgccagcggtcgcatgtgtgtcgccgggcttaacgcgcaaaatgtgcatcgcgtggcaaaggcgtttgctgcggtgatgtga

SEQ ID NO: 13037 - protein, 411 aa, Escherichia coli O6
MCFNHQPVNLENHRVFQKVDAYAGDPILTLMERFKEDPRSDKVNLSIGLYYNEDGIIPQLKAVADAEARLNAQPHGASLYLPMEGLNSYRHAIAPLLFGADHPVLQQQRVATIQTLGGSGALKVGADFLKRYFPESGVWVSDPTWENHVAIFAGAGFEVSTYPWYDEATNGVRFNDLLATLKTLPARSIVLLHPCCHNPTGADLTNDQWDSVIEILKARELIPFLDIAYQGFGAGMEEDAYAIRAIASAGLPALVSNSFSKIFSLYGERVGGLSVLCEDAEAAGRVLGQLKATVRRNYSSPPNFGAKVVAAVLNDEALKASWLAEVEEMRTRILAMRQELVKVLSTEMPERNFDYLLNQRGMFSYTGLRTAQVDRLREEFGVYLIASGRMCVAGLNAQNVHRVAKAFAAVM

SEQ ID NO: 13038 - DNA, 1797 bp, Phaseolus vulgaris
  CDS (176)..(1561)
gcacgaggaactgtcttctctttcttcacttcttctcatcgcccattgtttccttcttcaattctatctctctaagcttcttcaagtgtttcacaaaaacgaatctacttcatcgcatcatcgtcttttctacgcaactcaacttctacaacactcagatccgcacttcacagtgatggcttcttctgttctctccgcagctttgaactctctctctccctcttattctctctcctcgcgccaaacccacaaggggaagcccaagattggaggcaacgctttgagatttaacaagtccttcccaaatgcaaggtctagtggtcgggttatggctgttgcagttaatgggtctcggtttgagggcatacctatggctcctcctgatccaattcttggagtttctgaggcatttaaagcggacacaagtgatgtcaagctcaatcttggagtgggggcataccgaacagaagaactacagccgtatgtgcttaatgttgttaagaaggctgagaatcttatgctggagaggggggataacaaagagtatctctctattgagggtttagctgcgtttaacaaggcaactgcagagttgttacttggagcagacaacccagcaatcaaacagcaaagagttgccactgtccaaggtctttctggaactggttctctgcggctagctgcagctctgatagaaagatattttgctggggctaaagttttgatatcatctcctacctggggtaatcacaagaatattttcaatgatgctagagtgccatggtctgagtacagatattatgatcccaagacagttggcttggattttgagggcatgattgaagatataaagtcagctcctgaaggatcttttgtgcttctacatggatgtgctcataaccctactggtattgatccaacacctgagcaatgggaaaaaatagctgatttaattcaagaaaagaaccacattcccttttttgatgttgcttaccagggctttgctagtggaagccttgatgaagatgcagcttctgtgaggctttttgttgcacgtggtatggaggttcttgtagctcagtcatacagtaaaaatcttggtctctatgctgaaaggattggagcaatcaatgtgatttcatcatccccagaatctgcagcaagggtaaagagccagctgaaaaggctcgcccgaccaatgtactcaaatccacctgtacatggggctagaattgttgccgatgttgttggaaacccagttctctttaatgaatggagagcagaaatggaaatgatggctggaaggatcaagaatgttagacaacagctatacaatagtattacttcaaaagacaacagtggaaaagattggtcatttatacttaagcagataggcatgttctcattcactggcttgaacaaggaacagactgacaacatgacaaataagtggcatgtatacatgacaaaggacggaaggatttccctggcaggattgtcgttggctaaatgcgaataccttgcagatgctattatagactcgtatcataatgtcagctgaaactcggtgaaatatttttggtgagtgttatatccaatcggaaagattgtgagatacatgaaaataatttatgtatgcattaattaattgtcatacatatgtacctcaaagtaccttaggaaattttgtaaccttgttgaaacaaattgactctgtattgacgcataacaagtcggattgtctgacttaaagctagttgaatcagcaccgatttatagtaaaaaaaaaaaaaaaaa

SEQ ID NO: 13039 - protein, 461 aa, Phaseolus vulgaris
MASSVLSAALNSLSPSYSLSSRQTHKGKPKIGGNALRFNKSFPNARSSGRVMAVAVNGSRFEGIPMAPPDPILGVSEAFKADTSDVKLNLGVGAYRTEELQPYVLNVVKKAENLMLERGDNKEYLSIEGLAAFNKATAELLLGADNPAIKQQRVATVQGLSGTGSLRLAAALIERYFAGAKVLISSPTWGNHKNIFNDARVPWSEYRYYDPKTVGLDFEGMIEDIKSAPEGSFVLLHGCAHNPTGIDPTPEQWEKIADLIQEKNHIPFFDVAYQGFASGSLDEDAASVRLFVARGMEVLVAQSYSKNLGLYAERIGAINVISSSPESAARVKSQLKRLARPMYSNPPVHGARIVADVVGNPVLFNEWRAEMEMMAGRIKNVRQQLYNSITSKDNSGKDWSFILKQIGMFSFTGLNKEQTDNMTNKWHVYMTKDGRISLAGLSLAKCEYLADAIIDSYHNVS

SEQ ID NO: 13040 - DNA, 1179 bp, Ruegeria sp
  CDS (1)..(1179)
atgcttagtgaccttggcagcgtgccatcagatgaaatcctgacgctcatgcaaatgcaccgggaagatccccggcgcgacaagatcgaccagacggttggcgtctaccgcaatgaacttggccagacgccagtcatgcaggccgtcaaggcggcggaatacaagatctggcaggatcagacgagcaaatcctacaccggattgctgggggaccccgagtttctcgaggtcatgcaggcgctggtgcttggtccggaggcgccgccctgtaccgctgctgccgtgcccggcggctctggcgcgtgtcggcaggcctttgaactgatccgccaggccacgccgggggcccgtgtctacgtctccgatccgacttgggcaaaccacacgaccatgctggcgcataccgggctggcccgggaaacctaccgctttcgagacccggcgacggggggcttgaactttgacggcatgatgcaggatctcggaacggctcgggccggtgacgtggtcctgctgcacggctgctgtcacaatcccacgggcatttcgctgacccggacccagtggcgcgccctggcagaccgcatggcgaaaaacggcctggtcggcatgattgacctggcctacctgggctttggggacgggctcgaagaggacgcctggggcacgcgccatctagcggaaacgctggatgaatgcctgatcgccgtgtcctgttccaagaacttcggtctttaccgcgaaagggcaggcgccctgttggtcacggcacgcaacccggcgctgctggcccacacgcgtgaggtcctggcctatctcaatcgacaggcctactcctttccgcccgatcatggagcgcgcatcgtcaccagcatcctcaaggacccggccctgcgcgaagtctggacccaggagctgcatggcatccgcaattcgatcgcggccctgcgcctgcagctgtgcaatgcctttgccgagaaaaccgggacccggcggtttgactacatccgggagcacaaaggcatgttttcctgcctcggtgccacccccgagcaagtccggaccctgcgcgcgaaacacggcatctacatggtcacggacagccggttgaactttgccagtctgagccagcaaaacgtcgaacgcatcgtggacgcggtgaccgacgtaggaatttag

SEQ ID NO: 13041 - protein, 392 aa, Ruegeria sp
MLSDLGSVPSDEILTLMQMHREDPRRDKIDQTVGVYRNELGQTPVMQAVKAAEYKIWQDQTSKSYTGLLGDPEFLEVMQALVLGPEAPPCTAAAVPGGSGACRQAFELIRQATPGARVYVSDPTWANHTTMLAHTGLARETYRFRDPATGGLNFDGMMQDLGTARAGDVVLLHGCCHNPTGISLTRTQWRALADRMAKNGLVGMIDLAYLGFGDGLEEDAWGTRHLAETLDECLIAVSCSKNFGLYRERAGALLVTARNPALLAHTREVLAYLNRQAYSFPPDHGARIVTSILKDPALREVWTQELHGIRNSIAALRLQLCNAFAEKTGTRRFDYIREHKGMFSCLGATPEQVRTLRAKHGIYMVTDSRLNFASLSQQNVERIVDAVTDVGI

SEQ ID NO: 13042 - DNA, 1203 bp, Xanthomonas campestris
  CDS (1)..(1203)
atgtccttctttgcaaatgtagaacaggttccaggcgaccccatcctgggcctgaccgaggcctacaacgccgacagccgccccaacaaggtcaatctgggtgttggcatctattacgacgaaaacgggcgcatcccgctgttgcgtgccgtgcagaagatcgagcagcagctcgcgctggatgccaaaccgcgcggctacctgcccatcgacggcctggccgcctacgacaaggccacccaggagctgctgttcggcgccgagtcggcgctggtggcctccggccgcgtggcgacctcgcagaccgttggcggcagcggtgcgctgcgcgtgggcgcggacctgctcaagaagctgctgcccacctccaccatcgccatcagcaaccccagctgggaaaaccaccgcgcggtgttcggcgcggccggcttcgaggtggtggattacacctatttcgatgccgccagccacgggctgaacttcgacggcatgctggccgacctggccaagctggagccgggcacggtggtgctgctgcatgcctgctgccacaaccccaccggtgccgacctcagccgcgagcagtggaagcagctggccggcctgttgaaagaacgcaacctgttcccgttcgtggacatcgcctaccagggcttcgacaagggcatcgaggccgatgcgtacgcggtgcgcctgctggcggccgaaggcatcgacacctacgtggtggcgagctcgtactccaagtcgttctcgctgtatggcgagcgcgtgggcgcgctgtcggtggtctcggccacggccgccgaagccaaggcggtgcagtcgcaggtcaagcgcatcatccgcacgatctactccagcccgtccacgcacggcgccgccctggtggccggcgtgctgaccagcccggagctgcgcgatgtgtgggagcaggaactcaccgaaatgcgcgagcgcatccacgcgttgcgtgccggcctggtcgccaagctggccgcgctgggcgcaccggagttcgagttcatccagcgccaggccggcatgttttcgtactcgggcctgaccaagtcgcaggtggaccgcctgcgtgacgagttcgcgatctatgcggtcggcaccggccgcatctgcgtggccgcgctgagccagcgcaatctggactacgtggcccaggccgtggccacggtcagccgcggctga

SEQ ID NO: 13043 - protein, 400 aa, Xanthomonas campestris
MSFFANVEQVPGDPILGLTEAYNADSRPNKVNLGVGIYYDENGRIPLLRAVQKIEQQLALDAKPRGYLPIDGLAAYDKATQELLFGAESALVASGRVATSQTVGGSGALRVGADLLKKLLPTSTIAISNPSWENHRAVFGAAGFEVVDYTYFDAASHGLNFDGMLADLAKLEPGTVVLLHACCHNPTGADLSREQWKQLAGLLKERNLFPFVDIAYQGFDKGIEADAYAVRLLAAEGIDTYVVASSYSKSFSLYGERVGALSVVSATAAEAKAVQSQVKRIIRTIYSSPSTHGAALVAGVLTSPELRDVWEQELTEMRERIHALRAGLVAKLAALGAPEFEFIQRQAGMFSYSGLTKSQVDRLRDEFAIYAVGTGRICVAALSQRNLDYVAQAVATVSRG

SEQ ID NO: 13044 - DNA, 1203 bp, Xanthomonas axonopodis
  CDS (1)..(1203)
atgtccttctttgcaaacgtggaacaggttccaggcgaccccatcctgggcctgaccgaggcctacaacgccgacagccgccccaacaaggtcaacctgggcgtgggcatctattacgacgaaaacgggcgcatcccgctgttgcgcgccgtgcacaagatcgagcagcagctcgcgcaggacgccaaaccgcggggttatctgcccatcgacggcctggccgcgtacgacaaggccacccaggagctgctgtttggcgccgactctgcgctggtgacctccggccgcgtggcgacctcgcagaccgtcggcggcagcggcgcattgcgcgtgggcgcggacctgctcaagaagctgctgcccaccgccaccatcgccatcagcaaccccagctgggaaaaccatcgcgcggtgttcggcgcggccggcttcgaggttgtcgattacacctacttcgatgccgccatccatggcctgaacttcgacggcatgctcgccgacctggccaagctcgaaccgggcaccgtggtgctgctgcacgcctgctgccacaaccccaccggcgccgacctgagcaaggaacagtggaagcaggtggccggcctgttgaaggaacgcaacctgttcccgttcgtcgacatcgcctaccagggcttcgacaagggcatcgaggccgatgcctatgcggtgcgcctgctggctgccgaaggcatcgacagctacgtggtcgccagttcctattccaagtcgttctcgctgtatggcgagcgcgtgggcgcgctgtcggtggtctcggccaccgccgccgaagccaaggcggtgcagtcgcaggtcaagcgcatcatccgcacgatctactccagcccgtccacgcacggcgccgccctggtggccggcgtgctgaccagcccggagctgcgcgatctgtgggagcaggaactgaccgagatgcgcgagcgcatccattccctgcgcgccgggctggtggaaaaactcgccacgctgggtgcgccggagttcgacttcatccagcgccaggccggcatgttctcgtactcgggcctgaccaagacccaggtggaccgcctgcgcgacgagttcgcgatctacgcggtcggcaccggccgcatctgcgtggcagcactgagccagcgtaacctggactacgtggcccaggccgtggccactgtcagccgggtgtag

SEQ ID NO: 13045 - protein, 400 aa, Xanthomonas axonopodis
MSFFANVEQVPGDPILGLTEAYNADSRPNKVNLGVGIYYDENGRIPLLRAVHKIEQQLAQDAKPRGYLPIDGLAAYDKATQELLFGADSALVTSGRVATSQTVGGSGALRVGADLLKKLLPTATIAISNPSWENHRAVFGAAGFEVVDYTYFDAAIHGLNFDGMLADLAKLEPGTVVLLHACCHNPTGADLSKEQWKQVAGLLKERNLFPFVDIAYQGFDKGIEADAYAVRLLAAEGIDSYVVASSYSKSFSLYGERVGALSVVSATAAEAKAVQSQVKRIIRTIYSSPSTHGAALVAGVLTSPELRDLWEQELTEMRERIHSLRAGLVEKLATLGAPEFDFIQRQAGMFSYSGLTKTQVDRLRDEFAIYAVGTGRICVAALSQRNLDYVAQAVATVSRV

SEQ ID NO: 13046 - DNA, 1248 bp, Fusobacterium nucleatum
  CDS (1)..(1248)
atgttagcaaaaagatatacagggaaaaaattagtggacaacatatttgcaacaagtaaaaaagctaaacaagctattgtaaaatttggtaaagaaaatgtaatcaatgcaactatcggttctctttataatgaagatgaaaaattagctgtgtatgatgtagttgaaagtgtatatagaaatcttccaccagaagacttatatgcttatgccactaatgtaataggagaagatgactatcttgaagaagttataaaagcagttttttttgatgattataaagaagcattaaaagaattacacattgcttctattgcaacaacaggtggaacaggggctatatctaatactgttaaaaactatatggatacaggagataaagttttactaccaaattggatgtggggaacatataaaaatatagttattgaaaatggtggaaaaattgaaacttatcaattatttaatgaaaatggagattttaactttgaagatttcaaaaataaagttttagaattagcaaaaattcaaaaaaatgttgttcttatactaaatgaacctagtcacaatccaacaggattcagaatgacctatgaagaatgggtaaatcttttggacttctttaagagtataaaagatactaatataattgttataagagatgtagcttactttgaatatgatgatagaggcgaagaagaaacaaaaaaattaagaaaattattaattggtatgcctaagaatatattatttatgtatgcttttagcctatcaaaatctttatctatatatggaatgagaataggagcacaaattgcagtgtcatctgatgaagaagttatacaagagtttaaagatgctcttccattttcttgtagaacaacttggtctaatattccaaaaggtggaatgaaattatttgctactattatgaaaaatcctgaattaaaagctaatttcttaaaggaaaagcaaggttatatgaatttgttaaatgaaagagctaatatattcttaaaagaagctaaggaagaaaatttaaaagttttaccatataaaagtggtttttttgtaactgttccagttggagaaactgttgataaaattatagaagatttagaaagtaagaatatatttgttataaaatttgatacaggtataagaataggattatgtagtgttccaaaaagaaaaataaaaggacttgctaaaaaaataaaggactctattaataaatttaaaaattaa

SEQ ID NO: 13047 - protein, 415 aa, Fusobacterium nucleatum
MLAKRYTGKKLVDNIFATSKKAKQAIVKFGKENVINATIGSLYNEDEKLAVYDVVESVYRNLPPEDLYAYATNVIGEDDYLEEVIKAVFFDDYKEALKELHIASIATTGGTGAISNTVKNYMDTGDKVLLPNWMWGTYKNIVIENGGKIETYQLFNENGDFNFEDFKNKVLELAKIQKNVVLILNEPSHNPTGFRMTYEEWVNLLDFFKSIKDTNIIVIRDVAYFEYDDRGEEETKKLRKLLIGMPKNILFMYAFSLSKSLSIYGMRIGAQIAVSSDEEVIQEFKDALPFSCRTTWSNIPKGGMKLFATIMKNPELKANFLKEKQGYMNLLNERANIFLKEAKEENLKVLPYKSGFFVTVPVGETVDKIIEDLESKNIFVIKFDTGIRIGLCSVPKRKIKGLAKKIKDSINKFKN

SEQ ID NO: 13048 - DNA, 1197 bp, Ralstonia solanacearum
  CDS (1)..(1197)
atgtcgcttttttccgccgtcgagctggccccgcgcgaccccatcctggggctgaatgaagctttcaacgccgatgcccgcagcaccaaagtcaacctgggcgtgggcgtgtacttcaccgacgaaggaaaaatcccggtactgcgcgccgtgcaggaagccgagaaggcccgcctggccatggccgcgccgcgcggctacctgccgatcgaaggcatcgccgcctacgaccaggccgtgcagaagctgctgttcggcgccgattcgccgctgctggccgaaggccgcgtggtgacggcccaggcactgggcggcaccggcgcactgaagatcggcgccgatttcctcaaacgcctgtacccggacgccaaggtcgccatctccgacccgagctgggaaaaccaccgcgcgctgttcgaggccgccggcttcccggtcgtgaactatccgtactacgacgccccgacgcacggcctgaacttcgccgccatgctcgaagcgctcaacggctacgcgcccaacaccatcgtcgtgctgcacgcctgctgccacaacccgaccggcgtggacctgaccaccgagcagtggaagcaggtggtcgaagtcatcaaggccaagcagctgatcccgttcctcgacatggcctaccagggcttcgccgacggcatcgcccaggacggcctggccgtgagcctgttcgccgaatcgggcctgcagttcttcgtgtcgagctcgttctccaagtcgttctcgctgtacggcgagcgcgtcggcgctctgtcgatcgtcaccaccagcaaggacgaggcagcccgcgtgatgtcgcaggtcaagcgcgtgatccgcaccaactactccaacccgccgacgcacggcggcacggtggtcgccagcgtgctgaccagccccgagctgcgcgcgatgtgggagcaggaactgggcgagatgcgcgaccgcatcaagtcgatgcgccacgcgctggtcgacaagcttgccgccaagggcgtgaagaccgacttctcgttcgtgaaggcgcagcgcggcatgttctcgtattcgggcctgtccgccgcccaggtggaccgcctgcgcaacgagcacggcatctacgcggtgtcgaccggccgcatctgcgtggccgcgctgaactcgcacaacatcgacgccgtggtcaacgccatcgccgaagtgctctga

SEQ ID NO: 13049 - protein, 398 aa, Ralstonia solanacearum
MSLFSAVELAPRDPILGLNEAFNADARSTKVNLGVGVYFTDEGKIPVLRAVQEAEKARLAMAAPRGYLPIEGIAAYDQAVQKLLFGADSPLLAEGRVVTAQALGGTGALKIGADFLKRLYPDAKVAISDPSWENHRALFEAAGFPVVNYPYYDAPTHGLNFAAMLEALNGYAPNTIVVLHACCHNPTGVDLTTEQWKQVVEVIKAKQLIPFLDMAYQGFADGIAQDGLAVSLFAESGLQFFVSSSFSKSFSLYGERVGALSIVTTSKDEAARVMSQVKRVIRTNYSNPPTHGGTVVASVLTSPELRAMWEQELGEMRDRIKSMRHALVDKLAAKGVKTDFSFVKAQRGMFSYSGLSAAQVDRLRNEHGIYAVSTGRICVAALNSHNIDAVVNAIAEVL

SEQ ID NO: 13050 - DNA, 1369 bp, Brugia malayi
  CDS (23)..(1237)
cggcacgaggaggaatacaaaaatggcgtctttcttcgggaacatcgagattgcatctcctattgaagttttttatatgaacaaaatgtatcatgaggaaccagcggagtataaagttaacttaaccgttggagcatatcgtacggaagaaggtcaaccgtgggtattaccggtggtacgtgaagcagagaaacgacttgcagatgatattagccatgaatatttaccagtgcttggctatgaaccattctgtagtgcagcagtggaactagttcttgggaagaattcatcgactatcagagctggaaaagccataggtgtgcagtgtctttccggaacgggttcactaaaagctggagccgattttctcagttttgtcatgaaaatggaaacggtttatgtttccaaacctacttggggcaatcataaattgatatttgcaagagctggttttactgatatacgtgaatattattactgggattcaacaaatcgttgtattaatatgaaaaatatgttggccgatcttgagactgcacctgagaatgctgtagtggttttgcatggttgcgctcataatccaacgggtatggatccgactcgtgaccagtggaaacagattgcagaagtttttaagaggaggcatctatttcctttcttcgatcttgcttatcaaggttttgcaagtggtgatctggacgcggatgcctgggctgtacgatattttgttgagcaaggattggagatgttttgtgcgcagtcatttgctaagaattttggcctttataatgaacgagttggtaatctgacagttgtagcatcggatccattggtactagcaagtattaaatcacagatgtcattggttattcgatctaattggtctaatcctcccagtcatggggcaagaattgtgcacatgatattaacttcgccaagtatgtgcgctcagtggcatgatgctataaagacgatgtcttcgcgcataaaggatatgcgatatgcattgcgaaacaatctggaaaaacttggtactcctggaacatgggagcatattacacagcaaattggaatgttttcatttattggtcttaatacggaacaagttgatcaccttatcaagaagtataaagtgtttctgctgaagaatggacgaataaatgtttgtggattaaatccagaaaatgttgaatacgttgcgaaagcaatcaatgaaactatcaataacataaaataaatgggacgctaaattttgtgatttacagtaaagttctttgttaagtgggttaaagaataaagttacagatacaagattgcaaatagtcgcataaagtgtatatatttccgattatcgcctaatttccaaaaa

SEQ ID NO: 13051 - protein, 404 aa, Brugia malayi
MASFFGNIEIASPIEVFYMNKMYHEEPAEYKVNLTVGAYRTEEGQPWVLPVVREAEKRLADDISHEYLPVLGYEPFCSAAVELVLGKNSSTIRAGKAIGVQCLSGTGSLKAGADFLSFVMKMETVYVSKPTWGNHKLIFARAGFTDIREYYYWDSTNRCINMKNMLADLETAPENAVVVLHGCAHNPTGMDPTRDQWKQIAEVFKRRHLFPFFDLAYQGFASGDLDADAWAVRYFVEQGLEMFCAQSFAKNFGLYNERVGNLTVVASDPLVLASIKSQMSLVIRSNWSNPPSHGARIVHMILTSPSMCAQWHDAIKTMSSRIKDMRYALRNNLEKLGTPGTWEHITQQIGMFSFIGLNTEQVDHLIKKYKVFLLKNGRINVCGLNPENVEYVAKAINETINNIK

SEQ ID NO: 13052 - DNA, 1284 bp, Giardia lamblia
  CDS (1)..(1284)
atgtctgtcttctcagggtttcctgcttccccaccagatgctatcctgaatctcacggtactctacaacgccgatacctacccgaaaaaggtgaacctgggggttggcgcgtatcgtgacgagagcggtaaaccatggattctgccggccgtgaaggaggcagaggccattatatcttccgatctttcgaagtataataaggagtatcctccagtcgccggatttcctctgtttctggaggccgcccagttcctgatgttcggcaaggacagcaaggcagcccaggagggtcgcattgctagctgccagtctctctctggcaccggctctctccacatcgggtttgagttcctgcacctctggatgccaaaggcagagttttacatgccgagcacaacgtggcccaaccactacggaatatacgataaggtgttcaacaaattgaaggtgccatacaaggagtatacgtatcttcgtaaagacggagagcttgagatagacttttccaacacgaagaaggacatccagtcggctccagagaaaagcatattcctgttccacgcctgtgcccacaacccgtctgggatcgacttcactgaggctcagtggaaggagctccttccgatcatgaaggagaagaagcacattgccttttttgattcagcataccagggctttgctacgggctcctttgaggccgacgccttcgctgtgcgcatgtttgtcgatgcgggggtagaggtccttgtcgcccagagcttctccaagaacttcgggctctatggagagcgtatcggctgcctacatgttgtccatgcaggagtggaggggtccgtcgagaagaacaaggcgctttctgctgctatggtgagtggaatgactctccagatccgtaagacgtggtccatgtctgcgatccacggggcctatatcgtccaagtcatcgttcacgacaagcgccttctgcagatgttttatgacaatgtcaaggagatgagtgctcgcattcaccgaatgcgtagtctcctgcatgcctcccttgcgaagcgcaagactccaggccccggttccaaagggacctgggaccatatactgacagccatcggcatgttcactttcaccgggctcaccccagagcacgttgattatctgaaggagaagtggagtatctatcttgtgaaggcagggggacgcatgagtatgtgcgggctcactgagtctaattgtgactatgtggctgaggcgattcacgacgccgtcacgaagctcccgttcaagaaatga

SEQ ID NO: 13053 - protein, 427 aa, Giardia lamblia
MSVFSGFPASPPDAILNLTVLYNADTYPKKVNLGVGAYRDESGKPWILPAVKEAEAIISSDLSKYNKEYPPVAGFPLFLEAAQFLMFGKDSKAAQEGRIASCQSLSGTGSLHIGFEFLHLWMPKAEFYMPSTTWPNHYGIYDKVFNKLKVPYKEYTYLRKDGELEIDFSNTKKDIQSAPEKSIFLFHACAHNPSGIDFTEAQWKELLPIMKEKKHIAFFDSAYQGFATGSFEADAFAVRMFVDAGVEVLVAQSFSKNFGLYGERIGCLHVVHAGVEGSVEKNKALSAAMVSGMTLQIRKTWSMSAIHGAYIVQVIVHDKRLLQMFYDNVKEMSARIHRMRSLLHASLAKRKTPGPGSKGTWDHILTAIGMFTFTGLTPEHVDYLKEKWSIYLVKAGGRMSMCGLTESNCDYVAEAIHDAVTKLPFKK

SEQ ID NO: 13054 - DNA, 1173 bp, Trypanosoma brucei
  CDS (1)..(1173)
atggggaaaccggatcccatcctcggcctcgggcaggattttcgtatggatcccgccaaaaggaaggtgaatttgtctattggtgtgtaccgcgacgacgccgaccagccttttgtgctggaatgtgtgaaacaagccacattaggcaccaacatggactacgccccagtcacaggaattgcaagttttgtagaggaggctcaaaaactgtgttttggcccaacgtgtgcggcgcttcgggatggacgcattgcaagttgccaaacgcttggcggcacaggtgcgcttcggattggtggtgaccttctcaatcgctttgtggccaattgtaaccgcatttacggtcctgacgtcggttatccgaatcatgagagtatctttgctaaggcgggaatggaacttaccccatattcgtactatgatcctgccacaaaaggttttaaccttgcgggtatgctcgagtgcctagaccaagggcgcctgaggggctctgttaaaactcgttcaatgccagcgcaacacaatccaactggcgtcgatccaacacacgatgactggcgacaggtgtgcgatgtgataaagaggcgtaaccatattccgttcgtagacatggcttacccaagttttgctactggtcaattggattatgatgccttcgtgccacgccacctggtggatatggtgccaaacctgattgttgcgcagagtttctccaagaactttggcctgtacgggcatcgctgtggtgctcttcacctctcaacggcgagtgctgaagaggcgaagcgtttggtctcacaattggccctactgattcggcccatgtatagcaatccgcctctttatggtgcctgggtcgtaagttctattctaaaggacccgcagctgactgcactctggaagaaggaattgaagcaaatgtcatctcgcattgctgaggtgcgcaagcgtttggtttcagagctgaaagcatgcggctccgtccatgactggtctcacattgagcgccaagttggtatgatggcatacacaggcctaacaagggagcaggtggagttactgaggagcgagtaccacatatacatgacattaaatggtcgcgctgcggtgtccggacttaacagcacaaatgttgaatatgtttcacaagctattcacaacgttactaaatga

SEQ ID NO: 13055 - protein, 390 aa, Trypanosoma brucei
MGKPDPILGLGQDFRMDPAKRKVNLSIGVYRDDADQPFVLECVKQATLGTNMDYAPVTGIASFVEEAQKLCFGPTCAALRDGRIASCQTLGGTGALRIGGDLLNRFVANCNRIYGPDVGYPNHESIFAKAGMELTPYSYYDPATKGFNLAGMLECLDQGRLRGSVKTRSMPAQHNPTGVDPTHDDWRQVCDVIKRRNHIPFVDMAYPSFATGQLDYDAFVPRHLVDMVPNLIVAQSFSKNFGLYGHRCGALHLSTASAEEAKRLVSQLALLIRPMYSNPPLYGAWVVSSILKDPQLTALWKKELKQMSSRIAEVRKRLVSELKACGSVHDWSHIERQVGMMAYTGLTREQVELLRSEYHIYMTLNGRAAVSGLNSTNVEYVSQAIHNVTK

SEQ ID NO: 13056 - DNA, 1212 bp, Trypanosoma brucei
  CDS (1)..(1212)
atgtccaggccctttaaggacttagcacccgttccattggaccccgtctttggtctagcgagggctgcaaaggccgccccagaaccgaaggcggatctcgttattggtgcctaccgcgaccaaaacgggttgccgtatccattaaaagtagtgcggaaggctgagcggcgcattgtggacatgggccttgataaagagtacccacccatgactggtcttcttaactttgttgaagaagctgtaaaactcgcctacggcaatacggtgccattggagcgtatcgccgcctcgcagggtctcagcggcaccggctcgcttagccttggagccacgctcctcaggcaggttgtacctgaagatacccctgtgtatgtttcaaatcccacatggtcaaaccacgtatcaatattcggaattgtgggccacaaaaatatccgtgaataccgttactacagtcccagcacccatgagctggacttcgttggcctcattgaagatctgaacgtggcccctcaggggagtattattgtgctgcacgcatgtgcccataaccccactggtgtggatccaagcaaagatcagtgggcaaccatcgccgatgtatttgttgaacgtaaattgattcccttctttgactccgcctaccagggttttgcatccggcagtctcgacgaggacgcctacgccatccgccactttgcaaagagagggatggaaatgttacttgcacartccttttccaagaacatgggtttgtatgccgaacgtgttggtgtgatttctgctgtcgtttcggatgcttcaaggaaggaggccgtgcggagccgccttgaggtgatcgcccgttcctattactcaaccccacctgtacatggcgctcgcatcgctcacctcgtgatgagtgacaaagaactccgcgcagaatgggagcaggaactcaaggagatggtgaaccgcgttcgaagcatgcgtcaaggtgtttatgaagggctgatgaaactcggtactcccggcacttgggagcacatcatcaaccagaagggtatgttctcttatatgggactttcaaggcctcagtgcgaaaggttgtgcgagaagcgcgtttttgtgctgcctgtcggccgcgccaacctcgcagcgttaacgccctcaacaatggattttctggtcaagtcgattgacgatgttgtccgacacgtgcgtaacaagtag

SEQ ID NO: 13057 - protein, 403 aa, Trypanosoma brucei
MSRPFKDLAPVPLDPVFGLARAAKAAPEPKADLVIGAYRDQNGLPYPLKVVRKAERRIVDMGLDKEYPPMTGLLNFVEEAVKLAYGNTVPLERIAASQGLSGTGSLSLGATLLRQVVPEDTPVYVSNPTWSNHVSIFGIVGHKNIREYRYYSPSTHELDFVGLIEDLNVAPQGSIIVLHACAHNPTGVDPSKDQWATIADVFVERKLIPFFDSAYQGFASGSLDEDAYAIRHFAKRGMEMLLAQSFSKNMGLYAERVGVISAVVSDASRKEAVRSRLEVIARSYYSTPPVHGARIAHLVMSDKELRAEWEQELKEMVNRVRSMRQGVYEGLMKLGTPGTWEHIINQKGMFSYMGLSRPQCERLCEKRVFVLPVGRANLAALTPSTMDFLVKSIDDVVRHVRNK

SEQ ID NO: 13058 - DNA, 1218 bp, Crithidia fasciculata
  CDS (1)..(1218)
atgtctggatctccgaccgacaacttcgacggcctctccgcgctgccgccggactccatcttcttcacgtcgcaaaaggccaaggcggcgcagggtcccaaggccgacctcatcatcggcgcctaccgcgacgagcatggctgcccctacccgctcaagacagtgcgcaaggcggagcgcatactgctcgacatgaacctcgactacgagtacctgcccatgaccggctacaagcccttcgtggacgaggcaaccaagatcatctacgccgacagcgtggcaccggaccacctcgtagcggtgcagacgctcagcggcaccggcgccgtctacctcggtgccgccttcctcgccgaggtgtacgacccaaagaccacgcccatctaccttccgaacccgacgtggcccaaccacccgagcatcttgaagctgacgggctggaaggatatccgcacctacaactactacgaccccaagacggtagcactggacttcgaggggattaagaaggacattcaggaggcgccagagtgctcggtgttcctgctgcaccagtgcgcacacaaccccaccggcgtcgacccctcgcacgcgcagtgggaggagatcgctgatctgatgctggccaagaagcaccaggtgttcttcgactccgcctaccagggctacgcgagcggcagcctcgacgaggacgccttcgcggcgcgtctctttgtgaagaagggcgtccaattcattctcgcccagtccttctccaagaacatgggtctttacaacgagcgcaccggcaccctgtccgtcgtcctgcgcaacccggagcgtgcggcggccgtgaagacgcacctggatctgctcatccgtgccaactactcgaacccgccggcccacggtgcccgcctcgtgcacctcgtgctgagcgataaggagttgcggaaggagtgggaggccgagctggcggagatggcgaaccgcattcgcacgatgcgtcacaccgtctacgacgagctgaagcgcctcgggacgccgggcacgtgggagcacatcatcaaccagatcggcatgttctccttcctcggtctctccaaggagcagtgccagtactgccaggaccacaacgtcttcatcctgctctctggccgcgcgaacatggccgggctgacgcacgacacggcgctcatgctggccaggacaatcgatgaggcggttcgcacggtgtaa

SEQ ID NO: 13059 - protein, 405 aa, Crithidia fasciculata
MSGSPTDNFDGLSALPPDSIFFTSQKAKAAQGPKADLIIGAYRDEHGCPYPLKTVRKAERILLDMNLDYEYLPMTGYKPFVDEATKIIYADSVAPDHLVAVQTLSGTGAVYLGAAFLAEVYDPKTTPIYLPNPTWPNHPSILKLTGWKDIRTYNYYDPKTVALDFEGIKKDIQEAPECSVFLLHQCAHNPTGVDPSHAQWEEIADLMLAKKHQVFFDSAYQGYASGSLDEDAFAARLFVKKGVQFILAQSFSKNMGLYNERTGTLSVVLRNPERAAAVKTHLDLLIRANYSNPPAHGARLVHLVLSDKELRKEWEAELAEMANRIRTMRHTVYDELKRLGTPGTWEHIINQIGMFSFLGLSKEQCQYCQDHNVFILLSGRANMAGLTHDTALMLARTIDEAVRTV

SEQ ID NO: 13060 - DNA, 1185 bp, Rhizobium loti
  CDS (1)..(1185)
atgttcgaagacctgcagccagctcccgccgacaagatcctggccctcatcggcctctatcgcgccgatccgcgtcccaacaaggtcgacctcggcgtcggcgtctacaaggatcgcgacggcaagaccccagtgatgcgcgccgtgcgtgaggctgaaaagcggctgctgaacagccaggacaccaagacctatctcgggctcgccggcgacaccggcttcaacgcggtgatggccaagctcgccttcggcccgggcgcggacatgacgcgcattcgggcggcccaggcgcctggcggctccggtgcgcttcgcctggtggcggagctgctcaagcggacccgttcggacgccacgatctggctgtcggacccaacctggccgaaccatatgccggtgatgcgcgctgccggcctgcagatccgcgaatatccctatttcgacgcggcctccggtgctgttcgcttcgacgacatgctggcggcgttgcggacggccaagagcggcgacgtggtgctgctgcacggctgctgccacaatccaaccggcgccaatctggatgcggcgcagtggcaggccgtcaccgatctgatggtcgagcgcggcctgctgccattcgtcgacatcgcctatcagggctttggcgacggcctcgaggccgacgctcttggcctgcgcctgctggcggcgaaagttccggaaatggttgttgcctcgagctgctcgaagaatttcgccgtctaccgcgaccgtgtcggcgcagcgatggttttggccagggacagcgcgcaggctgacgtggcgatgagccagatgctgtcggcggcgcgcgccatgtattcgatgccgccggaccatggtgccgcggcggtgcgcatcgtgctcgaagacgcaagcctgcgcgccgactgggaagccgaattggaagagatgcgcctgcgcatgctgaggcttcgcgtggctttcgccgaggcgctgcgccggcagtccaactccgaccgcttcgacttcgtcgccagccaccgcggcatgttctcacggcttggcctgacggaagcgcaggtcgagcggctgcgcgccgagcacggcgtgtacatggtcggcgatagccgcatcaacgtcgctggactgccggaggatggcatggacgcgctcgccaaggcgatcgtctccgtgctcgactga

SEQ ID NO: 13061 - protein, 394 aa, Rhizobium loti
MFEDLQPAPADKILALIGLYRADPRPNKVDLGVGVYKDRDGKTPVMRAVREAEKRLLNSQDTKTYLGLAGDTGFNAVMAKLAFGPGADMTRIRAAQAPGGSGALRLVAELLKRTRSDATIWLSDPTWPNHMPVMRAAGLQIREYPYFDAASGAVRFDDMLAALRTAKSGDVVLLHGCCHNPTGANLDAAQWQAVTDLMVERGLLPFVDIAYQGFGDGLEADALGLRLLAAKVPEMVVASSCSKNFAVYRDRVGAAMVLARDSAQADVAMSQMLSAARAMYSMPPDHGAAAVRIVLEDASLRADWEAELEEMRLRMLRLRVAFAEALRRQSNSDRFDFVASHRGMFSRLGLTEAQVERLRAEHGVYMVGDSRINVAGLPEDGMDALAKAIVSVLD

SEQ ID NO: 13062 - DNA, 1191 bp, Pasteurella multocida
  CDS (1)..(1191)
atgtttgaaaatattaccgccgcgccagctgatccgattttaggtttaggggaatcatttaaagcggaaacgcgcgataataaaatcaatcttggcattggtgtatataaagatgcgaaaggcaatacaccaattatgcgtgcggtcaaagaggcagaaaagcgcttatttgatcttgaaatgagcaaaaattatttagctattgacggggtcgcagaattcaatgcctgtacgaaagaattgttatttggcgcagattcagagatagttaaacaaggtcgtgcaaaaaccgttcaaagtttaggtggtactggtgcattacgtatcgcagcagagtttattaaacgccaaactaaatcacaaaatgtttggattagcacaccaacttggccaaaccataatgcgatttttaatgctgtcggcatgacgattcgtgaataccgctattatgatgcagaaaataaatgcttagattgggataacttaattgctgatttaagcaatgcgggggaaggcgatgttgttttactacatggttgctgtcataacccgactggaattgaccctactccagcacaatggcaacaattagccaagatgtcggaagaaaaaggttggttaccgttatttgactttgcttaccaaggttttgcaaatggtctcgaagaagatgcgtttggtttacgtacctttgccaaaaatcataaagaattattagtcgcaagttcttattctaaaaactttggtctttatagcgagcgcgttggtgctttcacgttagtggcagaaacagagcaaatagccgcgacggcactcacgcaagtcaaaaccattattcgtacgctctattctaacccagcatcacatggcgcaacgacagtttctatggtattaaaagacagtcagttacgtgccgagtgggaaaacgaattaaccgaaatgcgtgaacgtattaagcaaatgcgtagccaatttgttgaattattgaaagcatttgcttcagaacaagattttagttttattattgatcaaaatgggatgttctctttctgtggcttaaatccagcacaaatggatcgtttaaaagaggaatttgccatttatgccgtgcgttctggtcggattaatgtcgcaggcattactgaacagaatattcgttatctgtgtgaaagtattgcgaaagtcctttaa

SEQ ID NO: 13063 - protein, 396 aa, Pasteurella multocida
MFENITAAPADPILGLGESFKAETRDNKINLGIGVYKDAKGNTPIMRAVKEAEKRLFDLEMSKNYLAIDGVAEFNACTKELLFGADSEIVKQGRAKTVQSLGGTGALRIAAEFIKRQTKSQNVWISTPTWPNHNAIFNAVGMTIREYRYYDAENKCLDWDNLIADLSNAGEGDVVLLHGCCHNPTGIDPTPAQWQQLAKMSEEKGWLPLFDFAYQGFANGLEEDAFGLRTFAKNHKELLVASSYSKNFGLYSERVGAFTLVAETEQIAATALTQVKTIIRTLYSNPASHGATTVSMVLKDSQLRAEWENELTEMRERIKQMRSQFVELLKAFASEQDFSFIIDQNGMFSFCGLNPAQMDRLKEEFAIYAVRSGRINVAGITEQNIRYLCESIAKVL

SEQ ID NO: 13064 - DNA, 1302 bp, Bacillus subtilis
  CDS (1)..(1302)
atgaatgatgcagcaaaagagctgaacagaacattatctgaagaaaacccgtacgtgcttcatatgctttctgatttgggcagagagttgttttatccgaaaggggtgctgacacaatcggcggaacgaaagcaaggccggaagtataatgccacgatcgggattgccacctcacaaggcgagtccatgcacttttcccatattcaagagacactgtccgcctataaccccgatgatatctacgattatgctccgccgcagggaaaagagccgctcagacaggaatggctgaaaaaaatgcgtctcgaaaatccttcattagccggcaaagacatcagcacgccgatcgtgacaaacgctttacacacgggctacattgccgccgacttgttcgtcaatgaaggggatgcgctgcttctgcctgataaatattggggaaattacaatttcattttcggtgtccggcgcaaggcatccattgagacgtacccgctttttcagcaggatgggcgttttaatgcggcggggctgtccgagctgctgaaaaagcagaaagaaaaggcgattgttgtgctgaatttcccgaataatccgacaggctatacgccgggggaagaggaagcgtcagaaatcgtcagcgtgattctggaggcggcggaggccggcaaagagattgtcgtgctcgtagatgatgcgtattacaatctgttttacgatgaaacggccattcaggaatccatcttcagcaaactcgcccaagtgcacgaccgggtgctttgcgtgaaaatagacggcgcgacgaaggaaaattacgcatggggattccgcgtcggttttattacgtacagcacaaaaagcgaaaagctgcgcgtgctcgaggaaaaaacaaaagggattatcaggggaacgatttcaagcgccccgcacccgtcccaaacattcatgcttcgggcgatgcagtcaccggaatacgagaaagaaaaatcgctgaaatataacatcatgaaaaaacgggctgacaaagtgaaagccgttcttgcagaaaacaagcattatgaagacgtatggacgccttatccgtttaactcgggctatttcatgtgtgtccggctgaaagacataaacgccggcgaattgagagtgtcgttgcttgaaaagagaggaatcggaacgatatccattaatgaaaccgatttgcgaatcgcattttcatgtgttgaagaagaacacatcgcggatctgttcgaagaaatttatcaagaagcaaagcagctgcagaaacaggcggaaatatcaggctga

SEQ ID NO: 13065 - protein, 433 aa, Bacillus subtilis
MNDAAKELNRTLSEENPYVLHMLSDLGRELFYPKGVLTQSAERKQGRKYNATIGIATSQGESMHFSHIQETLSAYNPDDIYDYAPPQGKEPLRQEWLKKMRLENPSLAGKDISTPIVTNALHTGYIAADLFVNEGDALLLPDKYWGNYNFIFGVRRKASIETYPLFQQDGRFNAAGLSELLKKQKEKAIVVLNFPNNPTGYTPGEEEASEIVSVILEAAEAGKEIVVLVDDAYYNLFYDETAIQESIFSKLAQVHDRVLCVKIDGATKENYAWGFRVGFITYSTKSEKLRVLEEKTKGIIRGTISSAPHPSQTFMLRAMQSPEYEKEKSLKYNIMKKRADKVKAVLAENKHYEDVWTPYPFNSGYFMCVRLKDINAGELRVSLLEKRGIGTISINETDLRIAFSCVEEEHIADLFEEIYQEAKQLQKQAEISG

SEQ ID NO: 13066 - DNA, 1203 bp, Chlamydia muridarum
  CDS (1)..(1203)
atgagtctttttgaacagttaccttctttctctccggattctattcttggtttagcacaagcttttcaagaagatcctcgtgaggataaaattaatttattactgggtacttacgagcgagaaaaaagccgatacggaggattctcaagcgtcagaaaggctcaaacagtgttttttggtgatgagaaagataaaaactatcttcccatcagaggatcctcagtttttttagaccagatggctgctctatgttttggcgagattgatgctaatcgatggactggagtgcaagctgttggtgggactggagccttacatttgggcgccttagtgtatgctaaatcttctcttgcaggtaaagtctatatcccagctcaaacttgggggaaccactctagaattttttctcgtctaggattgtccctagaacattatccctactatgatcaagaaaaaaaagatctcgatttgcaaggattaaaagcatctcttcgggatgctcctgaggcttctttaattcttttacattgttgttgtcataaccctacagggaaggatattcccctttctgaatggcctgaaattattgctattataaaggacagaggcctcattcctttctttgatatggcttatttaggttttgctaacggaatagtagaggatcgccgacctgttcggctttgcatagaggctggagttgctacttttgttgcaggaagttgtagtaaaaacttctcattatatggttctcgggtaggattttttggggttgttcaccaagataaaacggatttgagcaggatactttctttcttggaagagcagatccgtggggaatactcttctcctgctagagaaggtgttgcaatcgttacctctatattagagaatccctacttgcgacaagagtgggggcttgaactgaatggtattcgccagtctttggaagaaattcgagcgaattttgttattgcaatgagagaagtagcgggacattcttttgatttcatcgcgtctcagaaaggattttttgggtatccaggtttttcaaaagagcaggttgtgttccttagagaagagcttggtatttatacaacagctggtggaagattcaatttaaatggcattacagataaaaatataaatcgtgttatccacggttttgctaaggcctatgaatactctcggtccgtatcataa

SEQ ID NO: 13067 - protein, 400 aa, Chlamydia muridarum
MSLFEQLPSFSPDSILGLAQAFQEDPREDKINLLLGTYEREKSRYGGFSSVRKAQTVFFGDEKDKNYLPIRGSSVFLDQMAALCFGEIDANRWTGVQAVGGTGALHLGALVYAKSSLAGKVYIPAQTWGNHSRIFSRLGLSLEHYPYYDQEKKDLDLQGLKASLRDAPEASLILLHCCCHNPTGKDIPLSEWPEIIAIIKDRGLIPFFDMAYLGFANGIVEDRRPVRLCIEAGVATFVAGSCSKNFSLYGSRVGFFGVVHQDKTDLSRILSFLEEQIRGEYSSPAREGVAIVTSILENPYLRQEWGLELNGIRQSLEEIRANFVIAMREVAGHSFDFIASQKGFFGYPGFSKEQVVFLREELGIYTTAGGRFNLNGITDKNINRVIHGFAKAYEYSRSVS

SEQ ID NO: 13068 - DNA, 1191 bp, Aeromonas hydrophila
  CDS (1)..(1191)
atgtttgaaaaggttgttgccgccccaccggatccgatcctgggcctgaccgaagccttccgcgctgactctcgcagccacaagatcaatctgggggtcgggatctacaaggatgaaaccggtgccacccctatccttcactgcgtcaagaaagccgagcagaagctgctcaccgacgagaagaccaagaattatctcggtattgaaggcaatatcgaatacggccgcatagtgcagcaactgctgttcggacaggactccgccttgatcgccagtggccgcgccaagaccgcccaggcgccgggcggcaccggtgccctgcgcattgccgccgagttcgtggtgcgcaacgggctggccaagaccatctggatctccgatcccacctgggccaaccacgtcagcgtattccaggccgccggtttgaccgtcaagtggtacaagtactacgacgccgccaccaaggggctcgactttgccgccatgcaggcgtcgctcaatgacgtacaggctggtgagctggtgctgctgcacggctgctgccacaacccgaccggtatcgaccccaccgctgagcagtggcgcgccctggccaaacagagtgccgccgccggctggctgccgctgtttgacttcgcctatcagggctttgcccgtggcatcgaagaagatgccgagggtcttcgcatcttcgccgagtgtcacgacgagctgctggtggcgagctctttctccaaaaacttcggcctctacaacgagcgggtcggcgccttcaccctggtcagcgcgaccaaggcgatcgccgatgtggccttcacccaggtcaagaccgtcatccgtgccaactactccaacccgccgtcacacggcgctgccgtggtgacaaccatcgtcagtgacccggctctctatgtcgagtgggttgaagaagtggcggccatgcgggtgcgcattcgcgagatgcgcgagctgctggtggagaagctggcagccttgggtgtgagccaggatttcagctttatccgcgagcagaacggcatgttctccttctccggtctctccaaggatcaggttgagcagctcaagagcgagtttgccatctacatcgtcggttcaggccggatcagcgtggccgggatcacccgtgccaacatagatcccctgtgtgacgccatcgccaaggtactgtga

SEQ ID NO: 13069 - protein, 396 aa, Aeromonas hydrophila
MFEKVVAAPPDPILGLTEAFRADSRSHKINLGVGIYKDETGATPILHCVKKAEQKLLTDEKTKNYLGIEGNIEYGRIVQQLLFGQDSALIASGRAKTAQAPGGTGALRIAAEFVVRNGLAKTIWISDPTWANHVSVFQAAGLTVKWYKYYDAATKGLDFAAMQASLNDVQAGELVLLHGCCHNPTGIDPTAEQWRALAKQSAAAGWLPLFDFAYQGFARGIEEDAEGLRIFAECHDELLVASSFSKNFGLYNERVGAFTLVSATKAIADVAFTQVKTVIRANYSNPPSHGAAVVTTIVSDPALYVEWVEEVAAMRVRIREMRELLVEKLAALGVSQDFSFIREQNGMFSFSGLSKDQVEQLKSEFAIYIVGSGRISVAGITRANIDPLCDAIAKVL

SEQ ID NO: 13070 - DNA, 1574 bp, Drosophila melanogaster
  CDS (106)..(1380)
ttgtctttagtattctcttgaggccggcggcgattggcaacgtttattacagtttctaattgttattaacttaaagcttagtacaaccaccgagtgcatttagcaatgtcgcagatctgtaagcgcggtttgttgatcagcaaccgattggcgcccgccgccctccgctgcaaatcaacatggttctccgaggtgcagatgggcccacccgatgccatcttgggtgtcacggaagccttcaagaaggacaccaaccccaagaagatcaacttgggcgctggcgcctatcgcgatgacaacacccagcccttcgtgctccccagtgttcgggaggccgagaagagagtggtgagccgtagtctggacaaggagtacgccacaatcatcggcattcccgagttctacaacaaggccatcgagctggcattgggcaagggatccaagcgtttggcggccaagcacaacgtgaccgcccagtccatcagtggaactggagctctgcgcatcggagccgccttcctggccaagttctggcagggcaaccgcgagatctacatcccgtcgccatcgtggggcaaccatgtggccattttcgagcacgccggtctgccggtgaaccgataccgctactacgacaaggacacctgtgccctggactttggcggcctgatcgaggatctgaagaaaatccccgagaagagcattgttcttctgcacgcctgcgcccacaaccccactggagtggatcccactctggagcagtggcgtgagatctcggctctggtcaagaaacgcaatctgtatcccttcatcgacatggcctaccaaggcttcgccaccggagacattgaccgcgacgcccaggcggtccgcaccttcgaggccgatggccacgacttctgcctggcccagagtttcgccaagaacatgggattgtatggtgagcgcgctggcgccttcaccgtgctgtgctccgacgaggaggaggctgctcgcgtgatgtcccaagttaagatcctgatccgtggtctgtactccaatcccccggtgcacggagctcgtattgccgccgagatcctcaacaacgaggacttgcgcgcccagtggctgaaggatgtgaagctgatggccgaccgcatcatcgatgtgcgcaccaagctcaaggacaatctaattaagctgggatccagccagaactgggaccacattgtcaaccaaatcggcatgttctgcttcacgggcctgaagccggagcaggtgcagaagctgatcaaggatcacagcgtctatctcaccaacgatggacgtgtttcgatggcgggagtcaccagcaagaatgtcgagtacctggctgagagcatacacaaggttaccaagtaaggaggaccagtggagatcgaagtggagatggagtttctgtagtaccttctaatcggcacttgtacgaattttctagcaccaacgaaattgcgaagtctagataagccaatgcattttgcacactctctatccatatctctgtatataagctaaatgatctgccttttaaaaaataaagcatttaaaatgttagt

SEQ ID NO: 13071 - protein, 424 aa, Drosophila melanogaster
MSQICKRGLLISNRLAPAALRCKSTWFSEVQMGPPDAILGVTEAFKKDTNPKKINLGAGAYRDDNTQPFVLPSVREAEKRVVSRSLDKEYATIIGIPEFYNKAIELALGKGSKRLAAKHNVTAQSISGTGALRIGAAFLAKFWQGNREIYIPSPSWGNHVAIFEHAGLPVNRYRYYDKDTCALDFGGLIEDLKKIPEKSIVLLHACAHNPTGVDPTLEQWREISALVKKRNLYPFIDMAYQGFATGDIDRDAQAVRTFEADGHDFCLAQSFAKNMGLYGERAGAFTVLCSDEEEAARVMSQVKILIRGLYSNPPVHGARIAAEILNNEDLRAQWLKDVKLMADRIIDVRTKLKDNLIKLGSSQNWDHIVNQIGMFCFTGLKPEQVQKLIKDHSVYLTNDGRVSMAGVTSKNVEYLAESIHKVTK

SEQ ID NO: 13072 - DNA, 1535 bp, Arabidopsis thaliana
  CDS (96)..(1313)
tgtgaacaagattaaaaagacgacttctcttttaacttattcctcctctgcttcttcaagatccattgtctgcaatttcaatcccttgtctcgtcatggattccgtcttctctaacgttgctcgtgctcccgaagatcctattctcggtgtaactgttgcttacaacaatgatcctagtcctgttaagatcaatttgggtgtcggtgcctaccgaactgaggaagggaagcctcttgttcttgatgtggtgcgtaaggcagagcaacagctagtgaacgatccgtctcgggtcaaggaatacattcccattgttggtatttccgattttaacaagttaagcgccaagctcatcttaggtgctgacagtcctgcgattacagaaagtagagttactacagtccagtgcttgtctggtactggttcgttgagagttggggctgagtttctcaaaacacactaccaccaaagtgtcatttacattccaaaaccaacttgggggaaccatcccaaagttttcaacttggcaggcttgtctgtggagtatttccgctactatgatcctgcaacccgtggtcttgacttcaaaggcttgctcgaggatcttggcgctgcaccatctggagctattgtcttacttcatgcatgtgcacacaatcccactggagttgacccaacctctgaacagtgggaacagattcgacagctgatgagatctaaaagcttattacccttttttgatagtgcatatcagggttttgctagtggtagccttgacacagatgcacaatctgtccgtacatttgttgctgatggcggtgaatgcttgatagctcaaagttacgccaaaaatatgggactttatggggagcgtgttggtgcccttagcattgtctgcaagtcagcagatgtggctagtaaggttgagagccaggtgaagcttgttgtgcggcccatgtattcgagcccccctattcatggagcatcaattgttgccaccattctaaaaagcagtgatatgtacaacaactggaccatcgagctgaaagaaatggctgaccgtataaagagcatgcgccaacagttatttgaagctatacaagctagaggtacacctggtgactggagtcatattatcaaacagattgggatgtttacatttactggattgaacaaggagcaagttgaattcatgaccaaagagttccacatttacatgacctctgatgggagaataagcatggcaggtctaagttcgaagacagtgcctcaccttgccgatgctatgcatgctgcagtgacccgcctcggctaaactagcgaccatacatttttttgctgtttctacaaataaaatgggacaaaaaaaaagaacaccgtttttgttggcttatatactatggtttttttctgatggtaccatatgtttcctcatgtcttttgactaaagatggttgaaccaaaaccaaagtgaggattgtgacattgagatctaccgtttctaagaaaatattggttactttaatttgccaccaac

SEQ ID NO: 13073 - protein, 405 aa, Arabidopsis thaliana
MDSVFSNVARAPEDPILGVTVAYNNDPSPVKINLGVGAYRTEEGKPLVLDVVRKAEQQLVNDPSRVKEYIPIVGISDFNKLSAKLILGADSPAITESRVTTVQCLSGTGSLRVGAEFLKTHYHQSVIYIPKPTWGNHPKVFNLAGLSVEYFRYYDPATRGLDFKGLLEDLGAAPSGAIVLLHACAHNPTGVDPTSEQWEQIRQLMRSKSLLPFFDSAYQGFASGSLDTDAQSVRTFVADGGECLIAQSYAKNMGLYGERVGALSIVCKSADVASKVESQVKLVVRPMYSSPPIHGASIVATILKSSDMYNNWTIELKEMADRIKSMRQQLFEAIQARGTPGDWSHIIKQIGMFTFTGLNKEQVEFMTKEFHIYMTSDGRISMAGLSSKTVPHLADAMHAAVTRLG

SEQ ID NO: 13074 - DNA, 1490 bp, Arabidopsis thaliana
  CDS (48)..(1259)
aatgaattttggggtcaaattcatttcaactgattcaatcaattctcatgaattccatcttgtcaagcgtccttcctgctcccgaagatcctgttctcagtgtaatttttgcttgtagagatgatcctagtccggttaagttgaatttgagcgcaggtacctatcgaactgaggaaggaaagcctcttgttcttgatgttgtgagaagagcagagcaacagttagccaacgacctggacaaggaatatcttcccctcaatggacttcctgaatttaataaattaagtaccaagctcatcttaggtgatgatagtcctgcattgaaagagaatagagttgttacaacccaatgtttgtctggtactggttctttgagagttggagctgagtttctagcaacacacaacaaagaaagtgtcattttcgttccaaacccaacgtgggggaaccatccccgtatttttactttggcgggtttgtctgtccagtatttccgttattatgatccgaagagccgaggactcgacttcaaaggcatgctcgaggatcttggcgctgcacctcctggagctatagtggtacttcaagcttgtgcgcataaccccacaggagttgacccaacattcgaacaatgggaaaagattcgacgactagtgagatcgaaaagcttattacctttctttgatagtgcatatcagggttttgctagtggtagccttgacgcagatgcacaagcggttcgtatgtttgtagccgatggaggtgaatgtttgatagctcaaagttatgccaaaaatatgggcctttatggggagcgtattggctctcttacgatcgtatgcacatcagaagatgtcgctaagaaagttgagaaccaagtgctacttgttgtgaggcctatgtatcttacaccacctattcatggtgcatctattgttgccacaattctaaaaaacagtgatatgtacaatgactggaccattgagctgaaaggaatggctgaccgcataattagcatgcgtcaacagttatatgcagctctagaagctagaggaacacctggtgattggagtcacattattaaacatattgggatgtttacttttaccggattgagtgaggagcaagttcgcttgatggccaaagaatatcacatttacatgacttatgatgggaggataagcatggcaagtctaagttcgaagacagtgcctcaactcgctgatgctatacatgctgttgttactcgcatcgcctaattaaatttgcgattctgttcttttgttgtttaatttatgaacacaattagagaataaaactgcgttcttggtttacatttaataagatagcacaaagaagcaatattatggatgatattgtttctagttggtagtcaaacctaccaaaatgaggattgggacctttaaaccaacacagttttttatattttgttttcattttcaatttatataataaagattacatcaatt

SEQ ID NO: 13075 - protein, 403 aa, Arabidopsis thaliana
MNSILSSVLPAPEDPVLSVIFACRDDPSPVKLNLSAGTYRTEEGKPLVLDVVRRAEQQLANDLDKEYLPLNGLPEFNKLSTKLILGDDSPALKENRVVTTQCLSGTGSLRVGAEFLATHNKESVIFVPNPTWGNHPRIFTLAGLSVQYFRYYDPKSRGLDFKGMLEDLGAAPPGAIVVLQACAHNPTGVDPTFEQWEKIRRLVRSKSLLPFFDSAYQGFASGSLDADAQAVRMFVADGGECLIAQSYAKNMGLYGERIGSLTIVCTSEDVAKKVENQVLLVVRPMYLTPPIHGASIVATILKNSDMYNDWTIELKGMADRIISMRQQLYAALEARGTPGDWSHIIKHIGMFTFTGLSEEQVRLMAKEYHIYMTYDGRISMASLSSKTVPQLADAIHAVVTRIA

SEQ ID NO: 13076 - DNA, 2001 bp, Sus scrofa
  CDS (54)..(1295)
gagcggctccgggcgcgaggtgaaagctcccggccgactcctgctctctagctatggcacctccatcagtctttgccgaggttcctcaggcccagccggtccttgtctttaagctcattgctgacttccgggaggatccggacccccgcaaggtcaacctaggagtgggagcttatcgcaccgatgattgccagccttgggttttgccagtcgtgaggaaggtggagcagaggattgctaatgacagcagcctaaaccacgagtacctgcccatcctgggcctggcagagttccggacctgtgcttcccgccttgcccttggagatgacagcccagctcttcaggagaagcgggtgggaggggtgcagtctttggggggaacgggtgcacttcgaattggagctgagttcttagcacgatggtacaatggaacgaacaacaaagacacgcctgtctacgtatcctcaccaacctgggaaaatcacaatggagtcttcactactgctggattcaaagacattcggtcctatcgctattgggataccgagaagagaggacttgatctccagggtttcctgagtgatctggagaacgctcctgagttctccatctttgtcctccacgcctgtgcccacaacccgacagggaccgacccaactccggagcaatggaagcagatcgcctctgtcatgaagcgccggtttctgttccccttctttgactcagcctatcagggcttcgcatctggcaacctagaaaaagacgcctgggccattcgctattttgtgtctgaagggttcgagctcttctgtgcccagtccttctccaagaacttcgggctctacaatgagcgcgtggggaacctgaccgtggttgcaaaagaacccgatagcatcctgcgagtcctttcccagatggagaagatcgtgcgagtgacgtggtccaatccccctgctcagggagcgagaatcgtggcccgtacgctctctgaccctgagctctttcatgaatggacaggtaacgtgaagacaatggctgaccgcattctgagcatgagatctgagcttagggcacgattagaagccctcaagacccctggaacctggaaccacatcacggaccagattggaatgttcagcttcactgggttgaaccccaagcaggttgaatatctgatcaacgaaaagcacatctatctgctaccaagtggtcggatcaacatgtgtggcttaaccaccaaaaatctagattatgtggccacctccatccatgaagctgtcaccaaaatccagtgaagcaacaccacccaagccagcgccacccaagcggtcctctgtctcgtgtgttccctgcctgcacaaacctggttctatacatcacaactgtattagaggctaccgagggacagaaaaggctgctctggtgaggtagctgctatttaaattggccccatgggaagagaacatctcttgaaaagaaatgggggccagggaatagagcccttttggaggccagagcaaattcaggcttttatttgaaaagaataaaaaggtcctttgatcatgagatgtagatgtcttgccccctcactagaagcaggagtattgcctgtgtcactcacgtgctcctgtgtgttttactctgtacaaagtctagtcccaaagatcaagttgtctgaagagcaaagtgtgattgtgggtattggctgtgtcattaacagttgtcctctggacccagagtgtctgtctccctgctctttctgcatggctctgtccctagccctaagcttgagttctttagggtggtcaaggtaggaaatatatttatattttacccacacgttaactgaaataaaagtttcacagagtcaaatttacccttactatgtggagtacattctggtattttcttttctattctattctattctattctattctattctattctattctattctgttgtttcactaaagaaataaaagtgctgattgagacccat

SEQ ID NO: 13077 - protein, 413 aa, Sus scrofa
MAPPSVFAEVPQAQPVLVFKLIADFREDPDPRKVNLGVGAYRTDDCQPWVLPVVRKVEQRIANDSSLNHEYLPILGLAEFRTCASRLALGDDSPALQEKRVGGVQSLGGTGALRIGAEFLARWYNGTNNKDTPVYVSSPTWENHNGVFTTAGFKDIRSYRYWDTEKRGLDLQGFLSDLENAPEFSIFVLHACAHNPTGTDPTPEQWKQIASVMKRRFLFPFFDSAYQGFASGNLEKDAWAIRYFVSEGFELFCAQSFSKNFGLYNERVGNLTVVAKEPDSILRVLSQMEKIVRVTWSNPPAQGARIVARTLSDPELFHEWTGNVKTMADRILSMRSELRARLEALKTPGTWNHITDQIGMFSFTGLNPKQVEYLINEKHIYLLPSGRINMCGLTTKNLDYVATSIHEAVTKIQ

SEQ ID NO: 13078 - DNA, 1194 bp, Salmonella typhimurium
  CDS (1)..(1194)
atgtttcaaaaagttgacgcctatgccggcgatccgattctttcactgatggagcgttttaaagacgactcccgtcacgacaaagtgaatctgagcattggcctgtattacaacgaagacgggattatcccacagcttaaaacggtggccgaagccgaagcccggcttaacgcgcagccgcatggcgcttcgctgtacctgccgatggaaggactcaatacttatcgccatactatcgcgcctttgctctttggcgccgatcacccggttcttcagcaacagcgcgtggccactatccagacattaggcggctccggcgcgctgaaagtaggcgcggatttcctgaagcgttatttccccgacgcaggcgtatgggtgagcgaccccacctgggaaaaccatattgcgatatttgccggggcaggattcgaagtgagtacttacccctggtatgacgacgcgactaacggcatccgttttaacgatctgctggccacgctgaatacgttacctgcgcgcagtatcgtgttgctgcacccctgttgtcacaacccgaccggggcggatttaacgccttcgcaatgggatgcggtgattgaaatagtgaaagcgcgcgatctgattccgtttcttgatattgcctatcaggggtttggcgcaggcatggacgatgatgcgtacgttattcgcgccattgccagcgctgggttacctgcgttagtcagtaattctttttcgaagattttctcgctgtacggcgagcgcgtcggcggcctgtccgtggtgtgtgaagatgctgaaatcgccgcgcgggttctgggacagctaaaagcgacggtgcgccgaatttactccagtccgccgtgtttcggcgctcaggtggtcgctacggtcctgggcgatgaggcgttaaaagcgggctggctggcggaagtcgacgcgatgcgtaaccgcattatatcgatgcgccagacgctggtgaaggagctgaaggcggagatgcctgaccgcaactttgattacttgttacagcagcgcggtatgttcagctataccgggttaagcgaggagcaggtcgatcggttgcgcgatgagtttggcgtttacctgattgccagtggccgcatgtgtgtcgccgggcttaatgcttcaaatgtacaccgcgtggcgaaggcatttgccgctgtcatgtaa

SEQ ID NO: 13079 - protein, 397 aa, Salmonella typhimurium
MFQKVDAYAGDPILSLMERFKDDSRHDKVNLSIGLYYNEDGIIPQLKTVAEAEARLNAQPHGASLYLPMEGLNTYRHTIAPLLFGADHPVLQQQRVATIQTLGGSGALKVGADFLKRYFPDAGVWVSDPTWENHIAIFAGAGFEVSTYPWYDDATNGIRFNDLLATLNTLPARSIVLLHPCCHNPTGADLTPSQWDAVIEIVKARDLIPFLDIAYQGFGAGMDDDAYVIRAIASAGLPALVSNSFSKIFSLYGERVGGLSVVCEDAEIAARVLGQLKATVRRIYSSPPCFGAQVVATVLGDEALKAGWLAEVDAMRNRIISMRQTLVKELKAEMPDRNFDYLLQQRGMFSYTGLSEEQVDRLRDEFGVYLIASGRMCVAGLNASNVHRVAKAFAAVM

SEQ ID NO: 13080 - DNA, 2032 bp, Xenopus tropicalis
  CDS (30)..(1265)
gttctgtgccaggtagttgctgcttagtgatggcttccatttttacctccgttcctcaggctccccctgtggctgtcttcaagcttactgcagatttccgcgctgaccctgacactaggaaggtcaaccttggagtgggagcatatcgtactgatgactctcagccatgggtcctgccagtggtgaaaaaggtggagcagatgattgcaaaagacagctctttgaaccatgaatatctgccaattttggggctgcctgaattccgttctagtgcttccagaattgctttgggggatgacagccctgcatttaaggagaatcgggtaggcggtgtgcaatccttgggtggaactggagctctgcgcattggagcagaatttctgaggcgctggtacaatggaaacaacaacacagctactcccatctatatttcttctccctcatgggaaaaccacaatgctgtgttcagtgacgctggatttaaggatatcagggcttatagttactgggatgctgctaaaaggggccttgatctcgagggattcctgcgggatttagagaatgcccccgagttctctatctttgtgttgcacgcatgtgcgcacaatcccactggtacagaccccacccctgatgagtggaaacagatagctgatgtcatgaagcggaggtctctctttcctttcttcgactcagcctatcaaggatttgcctctggcagcctagacaaggatgcatgggccgtgcgtttctttgtgtctcagggttttgagttgttctgtgctcagtctttttccaagaactttggcttgtacaatgagagagtaggaaacctaactgttgtagggaaagactgtgataacgttgcacgtgtcctgtctcagatggagaaaattgtccgtacaacctggtcaaatcctccatcgcaaggagctcgtattgttgccaccactctcaacactcctgaactatttgatgaatggagagataatgtaaagactatggcagagagagtcctgctgatgagagcagaactgaaatcccgactggaggctcttaaaactcctgggacatggaaccatattgtcaaccagataggaatgttcagctacacaggacttaaccctaagcaagtggagtatcttattaaagagaagcacatctacttgatggccagtggacgtataaatatgtgtgggctgacaacaaagaacctcgactatgtagcccagtctatttatgaagcagcaaccaagatccagtaaagaaaccccaagctttcagtagatgaaatagcagtgtaattatgtgttgttgtagtgcgtgtccccaagctcacagtcacaaagatatctgatcacctcattatctatggctttaacaggaaccaatgaagctgctgggagatgtgttacaagtgctagcatgtttgttccgtgggacaccatgctatatattgtgattctttgggcttttacactattttgcactcaagttgttttgttttttttaaatgtttcctaatgactgcattgacatcttaattctacgtattatttgttctgcatcatcttgtaaccctgtaatttatagaaaattagatataaccttcaaaaaccttcaaccataacaaattatgttttcgttgtcatagaaatcctgcatcaaggtgtccttggcagcaagctttaatgaattttgttatgctctagatatgcatggtatcacaactaaagtctatttggttgcaatagttaactatgcaaagagccccttctgcaggaatgatacgtagaaatatccagaaactgtatatagaacattggctagaacattaactctacatgtctgagcccattctcagatggtgcaatacagatcttagaactaaggtctccaaaatctagtcatcattgctagagtgcacaatggaaaaccaaaactattgtcttaaattgaacatgctaaagcggttaatttaatgtaataaacacattctgttgagtgcaaaaaaaaaaaaaaaaaaaaaaaa

SEQ ID NO: 13081 - protein, 411 aa, Xenopus tropicalis
MASIFTSVPQAPPVAVFKLTADFRADPDTRKVNLGVGAYRTDDSQPWVLPVVKKVEQMIAKDSSLNHEYLPILGLPEFRSSASRIALGDDSPAFKENRVGGVQSLGGTGALRIGAEFLRRWYNGNNNTATPIYISSPSWENHNAVFSDAGFKDIRAYSYWDAAKRGLDLEGFLRDLENAPEFSIFVLHACAHNPTGTDPTPDEWKQIADVMKRRSLFPFFDSAYQGFASGSLDKDAWAVRFFVSQGFELFCAQSFSKNFGLYNERVGNLTVVGKDCDNVARVLSQMEKIVRTTWSNPPSQGARIVATTLNTPELFDEWRDNVKTMAERVLLMRAELKSRLEALKTPGTWNHIVNQIGMFSYTGLNPKQVEYLIKEKHIYLMASGRINMCGLTTKNLDYVAQSIYEAATKIQ

SEQ ID NO: 13082 - DNA, 26 bp, Artificial sequence
  Primer sequence
atgaacaaaagaacacaggaatacaa

SEQ ID NO: 13083 - DNA, 28 bp, Artificial sequence
  Primer sequence
ttacaatttagcttcaatagtatagaag

SEQ ID NO: 13084 - DNA, 1518 bp, Saccharomyces cerevisiae; identical to SEQ ID NO: 2533
  CDS (1)..(1518)

SEQ ID NO: 13085 - protein, 505 aa, Saccharomyces cerevisiae; identical to SEQ ID NO: 2534

SEQ ID NO: 13086 - DNA, 1548 bp, Mus musculus (house mouse); identical to SEQ ID NO: 2535
  CDS (1)..(1548)

SEQ ID NO: 13087 - protein, 515 aa, Mus musculus (house mouse); identical to SEQ ID NO: 2536

SEQ ID NO: 13088 - DNA, 1593 bp, Fugu rubripes (Japanese pufferfish); identical to SEQ ID NO: 2537
  CDS (1)..(1593)

SEQ ID NO: 13089 - protein, 530 aa, Fugu rubripes (Japanese pufferfish); identical to SEQ ID NO: 2538

SEQ ID NO: 13090 - DNA, 1506 bp, Vibrio cholerae; identical to SEQ ID NO: 2539
  CDS (1)..(1506)

SEQ ID NO: 13091 - protein, 501 aa, Vibrio cholerae; identical to SEQ ID NO: 2540

SEQ ID NO: 13092 - DNA, 1470 bp, Pseudomonas aeruginosa; identical to SEQ ID NO: 2541
  CDS (1)..(1470)

SEQ ID NO: 13093 - protein, 489 aa, Pseudomonas aeruginosa; identical to SEQ ID NO: 2542

SEQ ID NO: 13094 - DNA, 1485 bp, Staphylococcus aureus; identical to SEQ ID NO: 2543
  CDS (1)..(1485)

SEQ ID NO: 13095 - protein, 494 aa, Staphylococcus aureus; identical to SEQ ID NO: 2544

SEQ ID NO: 13096 - DNA, 1488 bp, Streptococcus pneumoniae; identical to SEQ ID NO: 2545
  CDS (1)..(1488)

SEQ ID NO: 13097 - protein, 495 aa, Streptococcus pneumoniae; identical to SEQ ID NO: 2546

SEQ ID NO: 13098 - DNA, 1476 bp, Salmonella enterica subsp. enterica serovar Typhi; identical to SEQ ID NO: 2547
  CDS (1)..(1476)

SEQ ID NO: 13099 - protein, 491 aa, Salmonella enterica subsp. enterica serovar Typhi; identical to SEQ ID NO: 2548

SEQ ID NO: 13100 - DNA, 1476 bp, Agrobacterium tumefaciens; identical to SEQ ID NO: 2549
  CDS (1)..(1476)

SEQ ID NO: 13101 - protein, 491 aa, Agrobacterium tumefaciens; identical to SEQ ID NO: 2550

SEQ ID NO: 13102 - DNA, 1530 bp, Nostoc sp. PCC 7120; identical to SEQ ID NO: 2551
  CDS (1)..(1530)

SEQ ID NO: 13103 - protein, 509 aa, Nostoc sp. PCC 7120; identical to SEQ ID NO: 2552

SEQ ID NO: 13104 - DNA, 1386 bp, Agrobacterium tumefaciens; identical to SEQ ID NO: 2553
  CDS (1)..(1386)

SEQ ID NO: 13105 - protein, 461 aa, Agrobacterium tumefaciens; identical to SEQ ID NO: 2554

SEQ ID NO: 13106 - DNA, 1476 bp, Brucella melitensis; identical to SEQ ID NO: 2555
  CDS (1)..(1476)

SEQ ID NO: 13107 - protein, 491 aa, Brucella melitensis; identical to SEQ ID NO: 2556

SEQ ID NO: 13108 - DNA, 1458 bp, Zymomonas mobilis; identical to SEQ ID NO: 2557
  CDS (1)..(1458)

SEQ ID NO: 13109 - protein, 485 aa, Zymomonas mobilis; identical to SEQ ID NO: 2558

SEQ ID NO: 13110 - DNA, 1470 bp, Bacillus subtilis; identical to SEQ ID NO: 2559
  CDS (1)..(1470)

SEQ ID NO: 13111 - protein, 489 aa, Bacillus subtilis; identical to SEQ ID NO: 2560

SEQ ID NO: 13112 - DNA, 1401 bp, Mycobacterium tuberculosis; identical to SEQ ID NO: 2561
  CDS (1)..(1401)

SEQ ID NO: 13113 - protein, 466 aa, Mycobacterium tuberculosis; identical to SEQ ID NO: 2562

SEQ ID NO: 13114 - DNA, 1545 bp, Mycobacterium tuberculosis; identical to SEQ ID NO: 2563
  CDS (1)..(1545)

SEQ ID NO: 13115 - protein, 514 aa, Mycobacterium tuberculosis; identical to SEQ ID NO: 2564

SEQ ID NO: 13116 - DNA, 1320 bp, Chlamydia trachomatis; identical to SEQ ID NO: 2565
  CDS (1)..(1320)

SEQ ID NO: 13117 - protein, 439 aa, Chlamydia trachomatis; identical to SEQ ID NO: 2566

SEQ ID NO: 13118 - DNA, 1773 bp, Deinococcus radiodurans; identical to SEQ ID NO: 2567
  CDS (1)..(1773)

SEQ ID NO: 13119 - protein, 590 aa, Deinococcus radiodurans; identical to SEQ ID NO: 2568

SEQ ID NO: 13120 - DNA, 1467 bp, Pseudomonas aeruginosa; identical to SEQ ID NO: 2569
  CDS (1)..(1467)

SEQ ID NO: 13121 - protein, 488 aa, Pseudomonas aeruginosa; identical to SEQ ID NO: 2570

SEQ ID NO: 13122 - DNA, 1422 bp, Caulobacter crescentus; identical to SEQ ID NO: 2571
  CDS (1)..(1422)

SEQ ID NO: 13123 - protein, 473 aa, Caulobacter crescentus; identical to SEQ ID NO: 2572

SEQ ID NO: 13124 - DNA, 1437 bp, Borrelia burgdorferi (Lyme disease spirochete); identical to SEQ ID NO: 2573
  CDS (1)..(1437)

SEQ ID NO: 13125 - protein, 478 aa, Borrelia burgdorferi (Lyme disease spirochete); identical to SEQ ID NO: 2574

SEQ ID NO: 13126 - DNA, 1539 bp, Chlamydophila pneumoniae, Chlamydia pneumoniae; identical to SEQ ID NO: 2575
  CDS (1)..(1539)

SEQ ID NO: 13127 - protein, 512 aa, Chlamydophila pneumoniae, Chlamydia pneumoniae; identical to SEQ ID NO: 2576

SEQ ID NO: 13128 - DNA, 1476 bp, Escherichia coli; identical to SEQ ID NO: 2577
  CDS (1)..(1476)

SEQ ID NO: 13129 - protein, 491 aa, Escherichia coli; identical to SEQ ID NO: 2578

SEQ ID NO: 13130 - DNA, 1548 bp, Treponema pallidum subsp. pallidum (syphilis spirochete); identical to SEQ ID NO: 2579
  CDS (1)..(1548)

SEQ ID NO: 13131 - protein, 515 aa, Treponema pallidum subsp. pallidum (syphilis spirochete); identical to SEQ ID NO: 2580

SEQ ID NO: 13132 - DNA, 1476 bp, Buchnera sp; identical to SEQ ID NO: 2581
  CDS (1)..(1476)

SEQ ID NO: 13133 - protein, 491 aa, Buchnera sp; identical to SEQ ID NO: 2582

SEQ ID NO: 13134 - DNA, 1512 bp, Lactococcus lactis subsp. lactis; identical to SEQ ID NO: 2583
  CDS (1)..(1512)

SEQ ID NO: 13135 - protein, 503 aa, Lactococcus lactis subsp. lactis; identical to SEQ ID NO: 2584

SEQ ID NO: 13136 - DNA, 1572 bp, Drosophila melanogaster; identical to SEQ ID NO: 2585
  CDS (1)..(1572)

SEQ ID NO: 13137 - protein, 523 aa, Drosophila melanogaster; identical to SEQ ID NO: 2586

SEQ ID NO: 13138 - DNA, 1575 bp, Synechococcus sp; identical to SEQ ID NO: 2587
  CDS (1)..(1575)

SEQ ID NO: 13139 - protein, 524 aa, Synechococcus sp; identical to SEQ ID NO: 2588

SEQ ID NO: 13140 - DNA, 1485 bp, Haemophilus influenzae; identical to SEQ ID NO: 2589
  CDS (1)..(1485)

SEQ ID NO: 13141 - protein, 494 aa, Haemophilus influenzae; identical to SEQ ID NO: 2590

SEQ ID NO: 13142 - DNA, 1446 bp, Neisseria meningitidis; identical to SEQ ID NO: 2591
  CDS (1)..(1446)

SEQ ID NO: 13143 - protein, 481 aa, Neisseria meningitidis; identical to SEQ ID NO: 2592

SEQ ID NO: 13144 - DNA, 1278 bp, Helicobacter pylori; identical to SEQ ID NO: 2593
  CDS (1)..(1278)

SEQ ID NO: 13145 - protein, 425 aa, Helicobacter pylori; identical to SEQ ID NO: 2594

SEQ ID NO: 13146 - DNA, 1434 bp, Xylella fastidiosa; identical to SEQ ID NO: 2595
  CDS (1)..(1434)

SEQ ID NO: 13147 - protein, 477 aa, Xylella fastidiosa; identical to SEQ ID NO: 2596

SEQ ID NO: 13148 - DNA, 1296 bp, Aquifex aeolicus; identical to SEQ ID NO: 2597
  CDS (1)..(1296)

SEQ ID NO: 13149 - protein, 431 aa, Aquifex aeolicus; identical to SEQ ID NO: 2598

SEQ ID NO: 13150 - DNA, 1491 bp, Thermotoga maritima; identical to SEQ ID NO: 2599
  CDS (1)..(1491)

SEQ ID NO: 13151 - protein, 496 aa, Thermotoga maritima; identical to SEQ ID NO: 2600

SEQ ID NO: 13152 - DNA, 1494 bp, Kluyveromyces marxianus var. lactis, Candida sphaerica; identical to SEQ ID NO: 2601
  CDS (1)..(1494)

SEQ ID NO: 13153 - protein, 497 aa, Kluyveromyces marxianus var. lactis, Candida sphaerica; identical to SEQ ID NO: 2602

SEQ ID NO: 13154 - DNA, 2813 bp, Erwinia chrysanthemi; identical to SEQ ID NO: 2603
  CDS (322)..(1797)

SEQ ID NO: 13155 - protein, 491 aa, Erwinia chrysanthemi; identical to SEQ ID NO: 2604

SEQ ID NO: 13156 - DNA, 3244 bp, Plasmodium falciparum; identical to SEQ ID NO: 2605
  CDS (184)..(2916)

SEQ ID NO: 13157 - protein, 910 aa, Plasmodium falciparum; identical to SEQ ID NO: 2606

SEQ ID NO: 13158 - DNA, 1785 bp, Medicago sativa (alfalfa); identical to SEQ ID NO: 2607
  CDS (38)..(1585)

SEQ ID NO: 13159 - protein, 515 aa, Medicago sativa (alfalfa); identical to SEQ ID NO: 2608

SEQ ID NO: 13160 - DNA, 1689 bp, Solanum tuberosum (potato); identical to SEQ ID NO: 2609
  CDS (46)..(1581)

SEQ ID NO: 13161 - protein, 511 aa, Solanum tuberosum (potato); identical to SEQ ID NO: 2610

SEQ ID NO: 13162 - DNA, 1530 bp, Synechocystis sp; identical to SEQ ID NO: 2611
  CDS (1)..(1530)

SEQ ID NO: 13163 - protein, 509 aa, Synechocystis sp; identical to SEQ ID NO: 2612

SEQ ID NO: 13164 - DNA, 1953 bp, Nicotiana tabacum (common tobacco); identical to SEQ ID NO: 2613
  CDS (43)..(1824)

SEQ ID NO: 13165 - protein, 593 aa, Nicotiana tabacum (common tobacco); identical to SEQ ID NO: 2614

SEQ ID NO: 13166 - DNA, 1869 bp, Nicotiana tabacum (common tobacco); identical to SEQ ID NO: 2615
  CDS (22)..(1788)

SEQ ID NO: 13167 - protein, 588 aa, Nicotiana tabacum (common tobacco); identical to SEQ ID NO: 2616

SEQ ID NO: 13168 - DNA, 2058 bp, Solanum tuberosum (potato); identical to SEQ ID NO: 2617
  CDS (41)..(1774)

SEQ ID NO: 13169 - protein, 577 aa, Solanum tuberosum (potato); identical to SEQ ID NO: 2618

SEQ ID NO: 13170 - DNA, 2049 bp, Spinacia oleracea (spinach); identical to SEQ ID NO: 2619
  CDS (147)..(1871)

SEQ ID NO: 13171 - protein, 574 aa, Spinacia oleracea (spinach); identical to SEQ ID NO: 2620

SEQ ID NO: 13172 - DNA, 2359 bp, Petroselinum crispum (parsley); identical to SEQ ID NO: 2621
  CDS (172)..(1986)

SEQ ID NO: 13173 - protein, 604 aa, Petroselinum crispum (parsley); identical to SEQ ID NO: 2622

SEQ ID NO: 13174 - DNA, 1848 bp, Petroselinum crispum (parsley); identical to SEQ ID NO: 2623
  CDS (41)..(1528)

SEQ ID NO: 13175 - protein, 495 aa, Petroselinum crispum (parsley); identical to SEQ ID NO: 2624

SEQ ID NO: 13176 - DNA, 1957 bp, Petroselinum crispum (parsley); identical to SEQ ID NO: 2625
  CDS (74)..(1678)

SEQ ID NO: 13177 - protein, 534 aa, Petroselinum crispum (parsley); identical to SEQ ID NO: 2626

SEQ ID NO: 13178 - DNA, 1569 bp, Caenorhabditis elegans; identical to SEQ ID NO: 2627
  CDS (1)..(1569)

SEQ ID NO: 13179 - protein, 522 aa, Caenorhabditis elegans; identical to SEQ ID NO: 2628

SEQ ID NO: 13180 - DNA, 1779 bp, Streptomyces coelicolor; identical to SEQ ID NO: 2629
  CDS (1)..(1779)

SEQ ID NO: 13181 - protein, 592 aa, Streptomyces coelicolor; identical to SEQ ID NO: 2630

SEQ ID NO: 13182 - DNA, 1524 bp, Streptomyces coelicolor; identical to SEQ ID NO: 2631
  CDS (1)..(1524)

SEQ ID NO: 13183 - protein, 507 aa, Streptomyces coelicolor; identical to SEQ ID NO: 2632

SEQ ID NO: 13184 - DNA, 1422 bp, Schizosaccharomyces pombe; identical to SEQ ID NO: 2633
  CDS (1)..(1422)

SEQ ID NO: 13185 - protein, 473 aa, Schizosaccharomyces pombe; identical to SEQ ID NO: 2634

SEQ ID NO: 13186 - DNA, 1503 bp, Schizosaccharomyces pombe; identical to SEQ ID NO: 2635
  CDS (1)..(1503)

SEQ ID NO: 13187 - protein, 500 aa, Schizosaccharomyces pombe; identical to SEQ ID NO: 2636

SEQ ID NO: 13188 - DNA, 1428 bp, Schizosaccharomyces pombe; identical to SEQ ID NO: 2637
  CDS (1)..(1428)

SEQ ID NO: 13189 - protein, 475 aa, Schizosaccharomyces pombe; identical to SEQ ID NO: 2638

SEQ ID NO: 13190 - DNA, 1461 bp, Leuconostoc mesenteroides; identical to SEQ ID NO: 2639
  CDS (1)..(1461)

SEQ ID NO: 13191 - protein, 486 aa, Leuconostoc mesenteroides; identical to SEQ ID NO: 2640

SEQ ID NO: 13192 - DNA, 3038 bp, Corynebacterium glutamicum; identical to SEQ ID NO: 2641
  CDS (115)..(1659)

SEQ ID NO: 13193 - protein, 514 aa, Corynebacterium glutamicum; identical to SEQ ID NO: 2642

SEQ ID NO: 13194 - DNA, 1852 bp, Nicotiana tabacum; identical to SEQ ID NO: 2643
  CDS (102)..(1634)

SEQ ID NO: 13195 - protein, 510 aa, Nicotiana tabacum; identical to SEQ ID NO: 2644

SEQ ID NO: 13196 - DNA, 1821 bp, Nicotiana tabacum; identical to SEQ ID NO: 2645
  CDS (88)..(1623)

SEQ ID NO: 13197 - protein, 511 aa, Nicotiana tabacum; identical to SEQ ID NO: 2646

SEQ ID NO: 13198 - DNA, 1808 bp, Chlamydia trachomatis; identical to SEQ ID NO: 2647
  CDS (105)..(1643)

SEQ ID NO: 13199 - protein, 512 aa, Chlamydia trachomatis; identical to SEQ ID NO: 2648

SEQ ID NO: 13200 - DNA, 2750 bp, Plasmodium falciparum; identical to SEQ ID NO: 2649
  CDS (48)..(2258)

SEQ ID NO: 13201 - protein, 736 aa, Plasmodium falciparum; identical to SEQ ID NO: 2650

SEQ ID NO: 13202 - DNA, 1509 bp, Debaryomyces hansenii; identical to SEQ ID NO: 2651
  CDS (1)..(1509)

SEQ ID NO: 13203 - protein, 502 aa, Debaryomyces hansenii; identical to SEQ ID NO: 2652

SEQ ID NO: 13204 - DNA, 1503 bp, Candida glabrata; identical to SEQ ID NO: 2653
  CDS (1)..(1503)

SEQ ID NO: 13205 - protein, 500 aa, Candida glabrata; identical to SEQ ID NO: 2654

SEQ ID NO: 13206 - DNA, 1485 bp, Bacillus thuringiensis serovar konkukian str; identical to SEQ ID NO: 2655
  CDS (1)..(1485)

SEQ ID NO: 13207 - protein, 494 aa, Bacillus thuringiensis serovar konkukian str; identical to SEQ ID NO: 2656

SEQ ID NO: 13208 - DNA, 1554 bp, Oryza sativa; identical to SEQ ID NO: 2657
  CDS (1)..(1554)

SEQ ID NO: 13209 - protein, 517 aa, Oryza sativa; identical to SEQ ID NO: 2658

SEQ ID NO: 13210 - DNA, 1500 bp, Photobacterium profundum; identical to SEQ ID NO: 2659
  CDS (1)..(1500)

SEQ ID NO: 13211 - protein, 499 aa, Photobacterium profundum; identical to SEQ ID NO: 2660

SEQ ID NO: 13212 - DNA, 1551 bp, Parachlamydia sp; identical to SEQ ID NO: 2661
  CDS (1)..(1551)

SEQ ID NO: 13213 - protein, 516 aa, Parachlamydia sp; identical to SEQ ID NO: 2662

SEQ ID NO: 13214 - DNA, 1515 bp, Rhodopseudomonas palustris; identical to SEQ ID NO: 2663
  CDS (1)..(1515)

SEQ ID NO: 13215 - protein, 504 aa, Rhodopseudomonas palustris; identical to SEQ ID NO: 2664

SEQ ID NO: 13216 - DNA, 1650 bp, Corynebacterium diphtheriae; identical to SEQ ID NO: 2665
  CDS (1)..(1650)

SEQ ID NO: 13217 - protein, 549 aa, Corynebacterium diphtheriae; identical to SEQ ID NO: 2666

SEQ ID NO: 13218 - DNA, 1446 bp, uncultured bacterium 581; identical to SEQ ID NO: 2667
  CDS (1)..(1446)

SEQ ID NO: 13219 - protein, 481 aa, uncultured bacterium 581; identical to SEQ ID NO: 2668

SEQ ID NO: 13220 - DNA, 1602 bp, Nonomuraea sp; identical to SEQ ID NO: 2669
  CDS (1)..(1602)

SEQ ID NO: 13221 - protein, 533 aa, Nonomuraea sp; identical to SEQ ID NO: 2670

SEQ ID NO: 13222 - DNA, 1476 bp, Listeria monocytogenes; identical to SEQ ID NO: 2671
  CDS (1)..(1476)

SEQ ID NO: 13223 - protein, 491 aa, Listeria monocytogenes; identical to SEQ ID NO: 2672

SEQ ID NO: 13224 - DNA, 1485 bp, Bacillus cereus; identical to SEQ ID NO: 2673
  CDS (1)..(1485)

SEQ ID NO: 13225 - protein, 494 aa, Bacillus cereus; identical to SEQ ID NO: 2674

SEQ ID NO: 13226 - DNA, 1410 bp, Mycobacterium paratuberculosis; identical to SEQ ID NO: 2675
  CDS (1)..(1410)

SEQ ID NO: 13227 - protein, 469 aa, Mycobacterium paratuberculosis; identical to SEQ ID NO: 2676

SEQ ID NO: 13228 - DNA, 2454 bp, Mycobacterium paratuberculosis; identical to SEQ ID NO: 2677
  CDS (1)..(2454)

SEQ ID NO: 13229 - protein, 817 aa, Mycobacterium paratuberculosis; identical to SEQ ID NO: 2678

SEQ ID NO: 13230 - DNA, 1545 bp, Mycobacterium paratuberculosis; identical to SEQ ID NO: 2679
  CDS (1)..(1545)

SEQ ID NO: 13231 - protein, 514 aa, Mycobacterium paratuberculosis; identical to SEQ ID NO: 2680

SEQ ID NO: 13232 - DNA, 1449 bp, Lactobacillus johnsonii; identical to SEQ ID NO: 2681
  CDS (1)..(1449)

SEQ ID NO: 13233 - protein, 482 aa, Lactobacillus johnsonii; identical to SEQ ID NO: 2682

SEQ ID NO: 13234 - DNA, 1539 bp, Ashbya gossypii; identical to SEQ ID NO: 2683
  CDS (1)..(1539)

SEQ ID NO: 13235 - protein, 512 aa, Ashbya gossypii; identical to SEQ ID NO: 2684

SEQ ID NO: 13236 - DNA, 1734 bp, Oryza sativa; identical to SEQ ID NO: 2685
  CDS (1)..(1734)

SEQ ID NO: 13237 - protein, 577 aa, Oryza sativa; identical to SEQ ID NO: 2686

SEQ ID NO: 13238 - DNA, 1467 bp, Gluconobacter oxydans; identical to SEQ ID NO: 2687
  CDS (1)..(1467)

SEQ ID NO: 13239 - protein, 488 aa, Gluconobacter oxydans; identical to SEQ ID NO: 2688

SEQ ID NO: 13240 - DNA, 1581 bp, Vibrio vulnificus; identical to SEQ ID NO: 2689
  CDS (1)..(1581)

SEQ ID NO: 13241 - protein, 526 aa, Vibrio vulnificus; identical to SEQ ID NO: 2690

SEQ ID NO: 13242 - DNA, 1476 bp, Photorhabdus luminescens; identical to SEQ ID NO: 2691
  CDS (1)..(1476)

SEQ ID NO: 13243 - protein, 491 aa, Photorhabdus luminescens; identical to SEQ ID NO: 2692

SEQ ID NO: 13244 - DNA, 1539 bp, Gloeobacter violaceus; identical to SEQ ID NO: 2693
  CDS (1)..(1539)

SEQ ID NO: 13245 - protein, 512 aa, Gloeobacter violaceus; identical to SEQ ID NO: 2694

SEQ ID NO: 13246 - DNA, 1539 bp, Gloeobacter violaceus; identical to SEQ ID NO: 2695
  CDS (1)..(1539)

SEQ ID NO: 13247 - protein, 512 aa, Gloeobacter violaceus; identical to SEQ ID NO: 2696

SEQ ID NO: 13248 - DNA, 1479 bp, Chromobacterium violaceum; identical to SEQ ID NO: 2697
  CDS (1)..(1479)

SEQ ID NO: 13249 - protein, 492 aa, Chromobacterium violaceum; identical to SEQ ID NO: 2698

SEQ ID NO: 13250 - DNA, 2229 bp, Giardia lamblia ATCC 50803; identical to SEQ ID NO: 2699
  CDS (1)..(2229)

SEQ ID NO: 13251 - protein, 742 aa, Giardia lamblia ATCC 50803; identical to SEQ ID NO: 2700

SEQ ID NO: 13252 - DNA, 2850 bp, Plasmodium yoelii yoelii; identical to SEQ ID NO: 2701
  CDS (1)..(2850)

SEQ ID NO: 13253 - protein, 949 aa, Plasmodium yoelii yoelii; identical to SEQ ID NO: 2702

SEQ ID NO: 13254 - DNA, 1476 bp, Neurospora crassa; identical to SEQ ID NO: 2703
  CDS (1)..(1476)

SEQ ID NO: 13255 - protein, 491 aa, Neurospora crassa; identical to SEQ ID NO: 2704

SEQ ID NO: 13256 - DNA, 1524 bp, Synechococcus sp; identical to SEQ ID NO: 2705
  CDS (1)..(1524)

SEQ ID NO: 13257 - protein, 507 aa, Synechococcus sp; identical to SEQ ID NO: 2706

SEQ ID NO: 13258 - DNA, 1455 bp, Rhodopirellula baltica; identical to SEQ ID NO: 2707
  CDS (1)..(1455)

SEQ ID NO: 13259 - protein, 484 aa, Rhodopirellula baltica; identical to SEQ ID NO: 2708

SEQ ID NO: 13260 - DNA, 1524 bp, Prochlorococcus marinus subsp; identical to SEQ ID NO: 2709
  CDS (1)..(1524)

SEQ ID NO: 13261 - protein, 507 aa, Prochlorococcus marinus subsp; identical to SEQ ID NO: 2710

SEQ ID NO: 13262 - DNA, 1524 bp, Prochlorococcus marinus; identical to SEQ ID NO: 2711
  CDS (1)..(1524)

SEQ ID NO: 13263 - protein, 507 aa, Prochlorococcus marinus; identical to SEQ ID NO: 2712

SEQ ID NO: 13264 - DNA, 1521 bp, Prochlorococcus marinus; identical to SEQ ID NO: 2713
  CDS (1)..(1521)

SEQ ID NO: 13265 - protein, 506 aa, Prochlorococcus marinus; identical to SEQ ID NO: 2714

SEQ ID NO: 13266 - DNA, 1488 bp, Haemophilus ducreyi; identical to SEQ ID NO: 2715
  CDS (1)..(1488)

SEQ ID NO: 13267 - protein, 495 aa, Haemophilus ducreyi; identical to SEQ ID NO: 2716

SEQ ID NO: 13268 - DNA, 1497 bp, Candidatus Blochmannia floridanus; identical to SEQ ID NO: 2717
  CDS (1)..(1497)

SEQ ID NO: 13269 - protein, 498 aa, Candidatus Blochmannia floridanus; identical to SEQ ID NO: 2718

SEQ ID NO: 13270 - DNA, 1768 bp, Oryza sativa; identical to SEQ ID NO: 2719
  CDS (2)..(1768)

SEQ ID NO: 13271 - protein, 588 aa, Oryza sativa; identical to SEQ ID NO: 2720

SEQ ID NO: 13272 - DNA, 1548 bp, Bos indicus; identical to SEQ ID NO: 2721
  CDS (1)..(1548)

SEQ ID NO: 13273 - protein, 515 aa, Bos indicus; identical to SEQ ID NO: 2722

SEQ ID NO: 13274 - DNA, 1536 bp, Chlamydophila caviae; identical to SEQ ID NO: 2723
  CDS (1)..(1536)

SEQ ID NO: 13275 - protein, 511 aa, Chlamydophila caviae; identical to SEQ ID NO: 2724

SEQ ID NO: 13276 - DNA, 1524 bp, Streptomyces avermitilis; identical to SEQ ID NO: 2725
  CDS (1)..(1524)

SEQ ID NO: 13277 - protein, 507 aa, Streptomyces avermitilis; identical to SEQ ID NO: 2726

SEQ ID NO: 13278 - DNA, 1647 bp, Streptomyces avermitilis; identical to SEQ ID NO: 2727
  CDS (1)..(1647)

SEQ ID NO: 13279 - protein, 548 aa, Streptomyces avermitilis; identical to SEQ ID NO: 2728

SEQ ID NO: 13280 - DNA, 1491 bp, Nitrosomonas europaea; identical to SEQ ID NO: 2729
  CDS (1)..(1491)

SEQ ID NO: 13281 - protein, 496 aa, Nitrosomonas europaea; identical to SEQ ID NO: 2730

SEQ ID NO: 13282 - DNA, 1524 bp, Enterococcus faecalis; identical to SEQ ID NO: 2731
  CDS (1)..(1524)

SEQ ID NO: 13283 - protein, 507 aa, Enterococcus faecalis; identical to SEQ ID NO: 2732

SEQ ID NO: 13284 - DNA, 1464 bp, Tropheryma whipplei; identical to SEQ ID NO: 2733
  CDS (1)..(1464)

SEQ ID NO: 13285 - protein, 487 aa, Tropheryma whipplei; identical to SEQ ID NO: 2734

SEQ ID NO: 13286 - DNA, 2145 bp, Leishmania mexicana; identical to SEQ ID NO: 2735
  CDS (298)..(1986)

SEQ ID NO: 13287 - protein, 562 aa, Leishmania mexicana; identical to SEQ ID NO: 2736

SEQ ID NO: 13288 - DNA, 1494 bp, Dictyostelium discoideum; identical to SEQ ID NO: 2737
  CDS (1)..(1494)

SEQ ID NO: 13289 - protein, 497 aa, Dictyostelium discoideum; identical to SEQ ID NO: 2738

SEQ ID NO: 13290 - DNA, 1503 bp, Xylella fastidiosa; identical to SEQ ID NO: 2739
  CDS (1)..(1503)

SEQ ID NO: 13291 - protein, 500 aa, Xylella fastidiosa; identical to SEQ ID NO: 2740

SEQ ID NO: 13292 - DNA, 1506 bp, Vibrio parahaemolyticus; identical to SEQ ID NO: 2741
  CDS (1)..(1506)

SEQ ID NO: 13293 - protein, 501 aa, Vibrio parahaemolyticus; identical to SEQ ID NO: 2742

SEQ ID NO: 13294 - DNA, 1533 bp, Pseudomonas syringae; identical to SEQ ID NO: 2743
  CDS (1)..(1533)

SEQ ID NO: 13295 - protein, 510 aa, Pseudomonas syringae; identical to SEQ ID NO: 2744

SEQ ID NO: 13296 - DNA, 1470 bp, Pseudomonas syringae; identical to SEQ ID NO: 2745
  CDS (1)..(1470)

SEQ ID NO: 13297 - protein, 489 aa, Pseudomonas syringae; identical to SEQ ID NO: 2746

SEQ ID NO: 13298 - DNA, 1458 bp, Pseudomonas putida; identical to SEQ ID NO: 2747
  CDS (1)..(1458)

SEQ ID NO: 13299 - protein, 485 aa, Pseudomonas putida; identical to SEQ ID NO: 2748

SEQ ID NO: 13300 - DNA, 1506 bp, Pseudomonas putida; identical to SEQ ID NO: 2749
  CDS (1)..(1506)

SEQ ID NO: 13301 - protein, 501 aa, Pseudomonas putida; identical to SEQ ID NO: 2750

SEQ ID NO: 13302 - DNA, 1470 bp, Pseudomonas putida; identical to SEQ ID NO: 2751
  CDS (1)..(1470)

SEQ ID NO: 13303 - protein, 489 aa, Pseudomonas putida; identical to SEQ ID NO: 2752

SEQ ID NO: 13304 - DNA, 1485 bp, Lactobacillus plantarum; identical to SEQ ID NO: 2753
  CDS (1)..(1485)

SEQ ID NO: 13305 - protein, 494 aa, Lactobacillus plantarum; identical to SEQ ID NO: 2754

SEQ ID NO: 13306 - DNA, 1440 bp, Clostridium tetani; identical to SEQ ID NO: 2755
  CDS (1)..(1440)

SEQ ID NO: 13307 - protein, 479 aa, Clostridium tetani; identical to SEQ ID NO: 2756

SEQ ID NO: 13308 - DNA, 1512 bp, Bradyrhizobium japonicum; identical to SEQ ID NO: 2757
  CDS (1)..(1512)

SEQ ID NO: 13309 - protein, 503 aa, Bradyrhizobium japonicum; identical to SEQ ID NO: 2758

SEQ ID NO: 13310 - DNA, 1497 bp, Bacteroides thetaiotaomicron; identical to SEQ ID NO: 2759
  CDS (1)..(1497)

SEQ ID NO: 13311 - protein, 498 aa, Bacteroides thetaiotaomicron; identical to SEQ ID NO: 2760

SEQ ID NO: 13312 - DNA, 4583 bp, Mus musculus; identical to SEQ ID NO: 2761
  CDS (119)..(2488)

SEQ ID NO: 13313 - protein, 789 aa, Mus musculus; identical to SEQ ID NO: 2762

SEQ ID NO: 13314 - DNA, 1485 bp, Staphylococcus epidermidis; identical to SEQ ID NO: 2763
  CDS (1)..(1485)

SEQ ID NO: 13315 - protein, 494 aa, Staphylococcus epidermidis; identical to SEQ ID NO: 2764

SEQ ID NO: 13316 - DNA, 1590 bp, Yersinia pestis; identical to SEQ ID NO: 2765
  CDS (1)..(1590)

SEQ ID NO: 13317 - protein, 529 aa, Yersinia pestis; identical to SEQ ID NO: 2766

SEQ ID NO: 13318 - DNA, 1530 bp, Synechococcus elongatus; identical to SEQ ID NO: 2767
  CDS (1)..(1530)

SEQ ID NO: 13319 - protein, 509 aa, Synechococcus elongatus; identical to SEQ ID NO: 2768

SEQ ID NO: 13320 - DNA, 1473 bp, Shewanella oneidensis; identical to SEQ ID NO: 2769
  CDS (1)..(1473)

SEQ ID NO: 13321 - protein, 490 aa, Shewanella oneidensis; identical to SEQ ID NO: 2770

SEQ ID NO: 13322 - DNA, 1476 bp, Oceanobacillus iheyensis; identical to SEQ ID NO: 2771
  CDS (1)..(1476)

SEQ ID NO: 13323 - protein, 491 aa, Oceanobacillus iheyensis; identical to SEQ ID NO: 2772

SEQ ID NO: 13324 - DNA, 1344 bp, Corynebacterium efficiens; identical to SEQ ID NO: 2773
  CDS (1)..(1344)

SEQ ID NO: 13325 - protein, 447 aa, Corynebacterium efficiens; identical to SEQ ID NO: 2774

SEQ ID NO: 13326 - DNA, 1545 bp, Corynebacterium efficiens; identical to SEQ ID NO: 2775
  CDS (1)..(1545)

SEQ ID NO: 13327 - protein, 514 aa, Corynebacterium efficiens; identical to SEQ ID NO: 2776

SEQ ID NO: 13328 - DNA, 1668 bp, Bifidobacterium longum; identical to SEQ ID NO: 2777
  CDS (1)..(1668)

SEQ ID NO: 13329 - protein, 555 aa, Bifidobacterium longum; identical to SEQ ID NO: 2778

SEQ ID NO: 13330 - DNA, 1284 bp, Rhodococcus opacus; identical to SEQ ID NO: 2779
  CDS (1)..(1284)

SEQ ID NO: 13331 - protein, 427 aa, Rhodococcus opacus; identical to SEQ ID NO: 2780

SEQ ID NO: 13332 - DNA, 2879 bp, Leishmania guyanensis; identical to SEQ ID NO: 2781
  misc_feature (1992)..(2321): n is a, c, g, or t
  misc_feature (2700)..(2700): n is a, c, g, or t
  misc_feature (2840)..(2840): n is a, c, g, or t
  CDS (205)..(1893)

SEQ ID NO: 13333 - protein, 562 aa, Leishmania guyanensis; identical to SEQ ID NO: 2782

SEQ ID NO: 13334 - DNA, 1689 bp, Leishmania mexicana; identical to SEQ ID NO: 2783
  misc_feature (227)..(444): n is a, c, g, or t
  misc_feature (1475)..(1528): n is a, c, g, or t
  CDS (1)..(1689)

SEQ ID NO: 13335 - protein, 562 aa, Leishmania mexicana; identical to SEQ ID NO: 2784
  misc_feature (76)..(148): Xaa can be any naturally occuring amino acid
  misc_feature (187)..(187): Xaa can be any naturally occuring amino acid
  misc_feature (197)..(197): Xaa can be any naturally occuring amino acid
  misc_feature (224)..(224): Xaa can be any naturally occuring amino acid
  misc_feature (243)..(243): Xaa can be any naturally occuring amino acid
  misc_feature (250)..(250): Xaa can be any naturally occuring amino acid
  misc_feature (492)..(510): Xaa can be any naturally occuring amino acid

SEQ ID NO: 13336 - DNA, 2916 bp, Leishmania amazonensis; identical to SEQ ID NO: 2785
  misc_feature (2191)..(2311): n is a, c, g, or t
  CDS (207)..(1895)

SEQ ID NO: 13337 - protein, 562 aa, Leishmania amazonensis; identical to SEQ ID NO: 2786
  misc_feature (463)..(463): Xaa can be any naturally occuring amino acid
  misc_feature (481)..(481): Xaa can be any naturally occuring amino acid

SEQ ID NO: 13338 - DNA, 1440 bp, Chlorobium tepidum; identical to SEQ ID NO: 2787
  CDS (1)..(1440)

SEQ ID NO: 13339 - protein, 479 aa, Chlorobium tepidum; identical to SEQ ID NO: 2788

SEQ ID NO: 13340 - DNA, 2187 bp, Methylobacterium extorquens; identical to SEQ ID NO: 2789
  CDS (640)..(2187)

SEQ ID NO: 13341 - protein, 515 aa, Methylobacterium extorquens; identical to SEQ ID NO: 2790

SEQ ID NO: 13342 - DNA, 1476 bp, Bartonella henselae; identical to SEQ ID NO: 2791
  CDS (1)..(1476)

SEQ ID NO: 13343 - protein, 491 aa, Bartonella henselae; identical to SEQ ID NO: 2792

SEQ ID NO: 13344 - DNA, 2266 bp, Toxoplasma gondii; identical to SEQ ID NO: 2793
  CDS (169)..(1851)

SEQ ID NO: 13345 - protein, 560 aa, Toxoplasma gondii; identical to SEQ ID NO: 2794

SEQ ID NO: 13346 - DNA, 1923 bp, Xanthomonas campestris; identical to SEQ ID NO: 2795
  CDS (1)..(1923)

SEQ ID NO: 13347 - protein, 640 aa, Xanthomonas campestris; identical to SEQ ID NO: 2796

SEQ ID NO: 13348 - DNA, 1431 bp, Xanthomonas campestris; identical to SEQ ID NO: 2797
  CDS (1)..(1431)

SEQ ID NO: 13349 - protein, 476 aa, Xanthomonas campestris; identical to SEQ ID NO: 2798

SEQ ID NO: 13350 - DNA, 1839 bp, Xanthomonas axonopodis; identical to SEQ ID NO: 2799
  CDS (1)..(1839)

SEQ ID NO: 13351 - protein, 612 aa, Xanthomonas axonopodis; identical to SEQ ID NO: 2800

SEQ ID NO: 13352 - DNA, 1431 bp, Xanthomonas axonopodis; identical to SEQ ID NO: 2801
  CDS (1)..(1431)

SEQ ID NO: 13353 - protein, 476 aa, Xanthomonas axonopodis; identical to SEQ ID NO: 2802

SEQ ID NO: 13354 - DNA, 1458 bp, Thermoanaerobacter tengcongensis; identical to SEQ ID NO: 2803
  CDS (1)..(1458)

SEQ ID NO: 13355 - protein, 485 aa, Thermoanaerobacter tengcongensis; identical to SEQ ID NO: 2804

SEQ ID NO: 13356 - DNA, 1762 bp, Oryza sativa; identical to SEQ ID NO: 2805
  CDS (41)..(1558)

SEQ ID NO: 13357 - protein, 505 aa, Oryza sativa; identical to SEQ ID NO: 2806

SEQ ID NO: 13358 - DNA, 1305 bp, Encephalitozoon cuniculi; identical to SEQ ID NO: 2807
  CDS (1)..(1305)

SEQ ID NO: 13359 - protein, 434 aa, Encephalitozoon cuniculi; identical to SEQ ID NO: 2808

SEQ ID NO: 13360 - DNA, 2125 bp, Drosophila melanogaster; identical to SEQ ID NO: 2809
  CDS (158)..(1738)

SEQ ID NO: 13361 - protein, 526 aa, Drosophila melanogaster; identical to SEQ ID NO: 2810

SEQ ID NO: 13362 - DNA, 1470 bp, Ralstonia solanacearum; identical to SEQ ID NO: 2811
  CDS (1)..(1470)

SEQ ID NO: 13363 - protein, 489 aa, Ralstonia solanacearum; identical to SEQ ID NO: 2812

SEQ ID NO: 13364 - DNA, 1521 bp, Enterococcus mundtii; identical to SEQ ID NO: 2813
  CDS (1)..(1521)

SEQ ID NO: 13365 - protein, 506 aa, Enterococcus mundtii; identical to SEQ ID NO: 2814

SEQ ID NO: 13366 - DNA, 2230 bp, Homo sapiens; identical to SEQ ID NO: 2815
  CDS (54)..(1601)

SEQ ID NO: 13367 - protein, 515 aa, Homo sapiens [sequence omitted]

SEQ ID NO: 13368 - DNA, 1470 bp, Rhizobium loti; identical to SEQ ID NO: 2817
  CDS (1)..(1470)

SEQ ID NO: 13369 - protein, 489 aa, Rhizobium loti; identical to SEQ ID NO: 2818

SEQ ID NO: 13370 - DNA, 1428 bp, Rhizobium loti; identical to SEQ ID NO: 2819
  CDS (1)..(1428)

SEQ ID NO: 13371 - protein, 475 aa, Rhizobium loti; identical to SEQ ID NO: 2820

SEQ ID NO: 13372 - DNA, 3584 bp, Plasmodium berghei; identical to SEQ ID NO: 2821
  CDS (370)..(3222)

SEQ ID NO: 13373 - protein, 950 aa, Plasmodium berghei; identical to SEQ ID NO: 2822

SEQ ID NO: 13374 - DNA, 1491 bp, Pasteurella multocida; identical to SEQ ID NO: 2823
  CDS (1)..(1491)

SEQ ID NO: 13375 - protein, 496 aa, Pasteurella multocida; identical to SEQ ID NO: 2824

SEQ ID NO: 13376 - DNA, 1470 bp, Pseudomonas putida; identical to SEQ ID NO: 2825
  CDS (1)..(1470)

SEQ ID NO: 13377 - protein, 489 aa, Pseudomonas putida; identical to SEQ ID NO: 2826

SEQ ID NO: 13378 - DNA, 1566 bp, Trypanosoma brucei; identical to SEQ ID NO: 2827
  CDS (1)..(1566)

SEQ ID NO: 13379 - protein, 521 aa, Trypanosoma brucei; identical to SEQ ID NO: 2828

SEQ ID NO: 13380 - DNA, 1904 bp, Triticum aestivum; identical to SEQ ID NO: 2829
  CDS (153)..(1682)

SEQ ID NO: 13381 - protein, 509 aa, Triticum aestivum; identical to SEQ ID NO: 2830

SEQ ID NO: 13382 - DNA, 2098 bp, Solanum tuberosum; identical to SEQ ID NO: 2831
  CDS (27)..(1775)

SEQ ID NO: 13383 - protein, 582 aa, Solanum tuberosum; identical to SEQ ID NO: 2832

SEQ ID NO: 13384 - DNA, 1924 bp, Dunaliella bioculata; identical to SEQ ID NO: 2833
  CDS (68)..(1840)

SEQ ID NO: 13385 - protein, 590 aa, Dunaliella bioculata; identical to SEQ ID NO: 2834

SEQ ID NO: 13386 - DNA, 1976 bp, Cyanidium caldarium; identical to SEQ ID NO: 2835
  CDS (46)..(1848)

SEQ ID NO: 13387 - protein, 600 aa, Cyanidium caldarium; identical to SEQ ID NO: 2836

SEQ ID NO: 13388 - DNA, 2106 bp, Drosophila melanogaster; identical to SEQ ID NO: 2837
  CDS (28)..(1746)

SEQ ID NO: 13389 - protein, 572 aa, Drosophila melanogaster; identical to SEQ ID NO: 2838

SEQ ID NO: 13390 - DNA, 1777 bp, Mesembryanthemum crystallinum; identical to SEQ ID NO: 2839
  CDS (39)..(1589)

SEQ ID NO: 13391 - protein, 516 aa, Mesembryanthemum crystallinum; identical to SEQ ID NO: 2840

SEQ ID NO: 13392 - DNA, 1542 bp, Mus musculus; identical to SEQ ID NO: 2841
  CDS (1)..(1542)

SEQ ID NO: 13393 - protein, 513 aa, Mus musculus; identical to SEQ ID NO: 2842

SEQ ID NO: 13394 - DNA, 1485 bp, Actinobacillus actinomycetemcomitans; identical to SEQ ID NO: 2843
  CDS (1)..(1485)

SEQ ID NO: 13395 - protein, 494 aa, Actinobacillus actinomycetemcomitans; identical to SEQ ID NO: 2844

SEQ ID NO: 13396 - DNA, 1473 bp, Buchnera aphidicola; identical to SEQ ID NO: 2845
  CDS (1)..(1473)

SEQ ID NO: 13397 - protein, 490 aa, Buchnera aphidicola; identical to SEQ ID NO: 2846

SEQ ID NO: 13398 - DNA, 1473 bp, Buchnera aphidicola; identical to SEQ ID NO: 2847
  CDS (1)..(1473)

SEQ ID NO: 13399 - protein, 490 aa, Buchnera aphidicola; identical to SEQ ID NO: 2848

SEQ ID NO: 13400 - DNA, 2049 bp, Ceratitis capitata; identical to SEQ ID NO: 2849
  CDS (60)..(1640)

SEQ ID NO: 13401 - protein, 526 aa, Ceratitis capitata; identical to SEQ ID NO: 2850

SEQ ID NO: 13402 - DNA, 1524 bp, Chlamydia muridarum; identical to SEQ ID NO: 2851
  CDS (1)..(1524)

SEQ ID NO: 13403 - protein, 507 aa, Chlamydia muridarum; identical to SEQ ID NO: 2852

SEQ ID NO: 13404 - DNA, 2062 bp, Drosophila melanogaster; identical to SEQ ID NO: 2853
  CDS (303)..(1877)

SEQ ID NO: 13405 - protein, 524 aa, Drosophila melanogaster; identical to SEQ ID NO: 2854

SEQ ID NO: 13406 - DNA, 1536 bp, Emericella nidulans; identical to SEQ ID NO: 2855
  CDS (1)..(1536)

SEQ ID NO: 13407 - protein, 511 aa, Emericella nidulans; identical to SEQ ID NO: 2856

SEQ ID NO: 13408 - DNA, 1957 bp, Leuconostoc mesenteroides; identical to SEQ ID NO: 2857
  CDS (206)..(1666)

SEQ ID NO: 13409 - protein, 486 aa, Leuconostoc mesenteroides; identical to SEQ ID NO: 2858

SEQ ID NO: 13410 - DNA, 2055 bp, Macropus robustus; identical to SEQ ID NO: 2859
  CDS (94)..(1641)

SEQ ID NO: 13411 - protein, 515 aa, Macropus robustus; identical to SEQ ID NO: 2860

SEQ ID NO: 13412 - DNA, 1530 bp, Nostoc punctiforme; identical to SEQ ID NO: 2861
  CDS (1)..(1530)

SEQ ID NO: 13413 - protein, 509 aa, Nostoc punctiforme; identical to SEQ ID NO: 2862

SEQ ID NO: 13414 - DNA, 1476 bp, Rhizobium meliloti; identical to SEQ ID NO: 2863
  CDS (1)..(1476)

SEQ ID NO: 13415 - protein, 491 aa, Rhizobium meliloti; identical to SEQ ID NO: 2864

SEQ ID NO: 13416 - DNA, 2853 bp, Homo sapiens; identical to SEQ ID NO: 2865
  CDS (273)..(2648)

SEQ ID NO: 13417 - protein, 791 aa, Homo sapiens; identical to SEQ ID NO: 2866

SEQ ID NO: 13418 - DNA, 1970 bp, Arabidopsis thaliana; identical to SEQ ID NO: 2867
  CDS (60)..(1790)

SEQ ID NO: 13419 - protein, 576 aa, Arabidopsis thaliana; identical to SEQ ID NO: 2868

SEQ ID NO: 13420 - DNA, 2112 bp, Arabidopsis thaliana; identical to SEQ ID NO: 2869
  CDS (142)..(1932)

SEQ ID NO: 13421 - protein, 596 aa, Arabidopsis thaliana; identical to SEQ ID NO: 2870

SEQ ID NO: 13422 - DNA, 2161 bp, Arabidopsis thaliana; identical to SEQ ID NO: 2871
  CDS (90)..(1967)

SEQ ID NO: 13423 - protein, 625 aa, Arabidopsis thaliana; identical to SEQ ID NO: 2872

SEQ ID NO: 13424 - DNA, 1936 bp, Arabidopsis thaliana; identical to SEQ ID NO: 2873
  CDS (136)..(1686)

SEQ ID NO: 13425 - protein, 516 aa, Arabidopsis thaliana; identical to SEQ ID NO: 2874

SEQ ID NO: 13426 - DNA, 1959 bp, Arabidopsis thaliana; identical to SEQ ID NO: 2875
  CDS (194)..(1741)

SEQ ID NO: 13427 - protein, 515 aa, Arabidopsis thaliana [sequence omitted]

SEQ ID NO: 13428 - DNA, 1503 bp, Xenopus laevis; identical to SEQ ID NO: 2877
  CDS (1)..(1503)

SEQ ID NO: 13429 - protein, 500 aa, Xenopus laevis; identical to SEQ ID NO: 2878

SEQ ID NO: 13430 - DNA, 2004 bp, Arabidopsis thaliana; identical to SEQ ID NO: 2879
  CDS (51)..(1850)

SEQ ID NO: 13431 - protein, 599 aa, Arabidopsis thaliana; identical to SEQ ID NO: 2880

SEQ ID NO: 13432 - DNA, 23 bp, Artificial sequence
  Primer sequence
atgagtgaaggccccgtcaaatt

SEQ ID NO: 13433 - DNA, 25 bp, Artificial sequence
  Primer sequence
ctaattatccttcgtatcttctggc

SEQ ID NO: 13434 - protein, 266 aa, Artificial sequence; identical to SEQ ID NO: 1303
  Consensus
  Variant (3)..(3): Xaa in Position 3 is any amino acid
  Variant (6)..(8): Xaa in Position 6 to 8 is any amino acid
  Variant (10)..(10): Xaa in Position 10 is Arg or Lys
  Variant (11)..(11): Xaa in Position 11 is any amino acid
  Variant (13)..(13): Xaa in Position 13 is any amino acid
  Variant (15)..(16): Xaa in Position 15 to 16 is any amino acid
  Variant (19)..(20): Xaa in Position 19 to 20 is any amino acid
  Variant (26)..(26): Xaa in Position 26 is any amino acid
  Variant (29)..(29): Xaa in Position 29 is Leu or Ile
  Variant (36)..(36): Xaa in Position 36 is Ile or Val
  Variant (37)..(37): Xaa in Position 37 is any amino acid
  Variant (44)..(44): Xaa in Position 44 is Ile or Leu
  Variant (46)..(46): Xaa in Position 46 is any amino acid
  Variant (47)..(47): Xaa in Position 47 is Ala or Ser
  Variant (48)..(48): Xaa in Position 48 is any amino acid
  Variant (53)..(53): Xaa in Position 53 is Val or Ile
  Variant (56)..(56): Xaa in Position 56 is Arg or Lys
  Variant (58)..(58): Xaa in Position 58 is Phe or Tyr
  Variant (60)..(60): Xaa in Position 60 is Ser or Thr
  Variant (61)..(61): Xaa in Position 61 is any amino acid
  Variant (63)..(64): Xaa in Position 63 to 64 is any amino acid
  Variant (65)..(65): Xaa in Position 65 is no amino acid or any amino acid
  Variant (67)..(67): Xaa in Position 67 is any amino acid
  Variant (68)..(68): Xaa in Position 68 is Tyr or Trp
  Variant (71)..(71): Xaa in Position 71 is Ser or Thr
  Variant (72)..(73): Xaa in Position 72 to 73 is any amino acid
  Variant (79)..(79): Xaa in Position 79 is any amino acid
  Variant (80)..(80): Xaa in Position 80 is Leu or Met
  Variant (82)..(84): Xaa in Position 82 to 84 is any amino acid
  Variant (87)..(87): Xaa in Position 87 is Ile or Met
  Variant (88)..(88): Xaa in Position 88 is Val or Ile
  Variant (92)..(92): Xaa in Position 92 is Leu, Ile, Val or Met
  Variant (94)..(96): Xaa in Position 94 to 96 is any amino acid
  Variant (98)..(98): Xaa in Position 98 is Asp or Glu
  Variant (99)..(99): Xaa in Position 99 is any amino acid
  Variant (106)..(106): Xaa in Position 106 is Leu or Met
  Variant (108)..(108): Xaa in Position 108 is any amino acid
  Variant (111)..(112): Xaa in Position 111 to 112 is any amino acid
  Variant (114)..(114): Xaa in Position 114 is any amino acid
  Variant (116)..(116): Xaa in Position 116 is Phe or Tyr
  Variant (117)..(117): Xaa in Position 117 is any amino acid
  Variant (122)..(122): Xaa in Position 122 is Phe or Tyr
  Variant (124)..(125): Xaa in Position 124 to 125 is any amino acid
  Variant (127)..(127): Xaa in Position 127 is Gly or Ala
  Variant (134)..(134): Xaa in Position 134 is any amino acid
  Variant (136)..(136): Xaa in Position 136 is any amino acid
  Variant (137)..(137): Xaa in Position 137 is Gly or Ala
  Variant (138)..(138): Xaa in Position 138 is Met or Ile
  Variant (145)..(145): Xaa in Position 145 is any amino acid
  Variant (147)..(147): Xaa in Position 147 is any amino acid
  Variant (149)..(149): Xaa in Position 149 is Ser or Thr
  Variant (154)..(154): Xaa in Position 154 is Ile or Val
  Variant (163)..(163): Xaa in Position 163 is Leu or Met
  Variant (165)..(165): Xaa in Position 165 is Thr or Ser
  Variant (169)..(169): Xaa in Position 169 is Leu or Ile
  Variant (172)..(172): Xaa in Position 172 is any amino acid
  Variant (176)..(176): Xaa in Position 176 is Leu or Ile
  Variant (179)..(179): Xaa in Position 179 is Ala or Ser
  Variant (187)..(191): Xaa in Position 187 to 191 is any amino acid
  Variant (193)..(193): Xaa in Position 193 is Glu or Asp
  Variant (206)..(206): Xaa in Position 206 is any amino acid
  Variant (208)..(208): Xaa in Position 208 is any amino acid
  Variant (211)..(211): Xaa in Position 211 is any amino acid
  Variant (212)..(212): Xaa in Position 212 is Ile, Leu or Val
  Variant (216)..(216): Xaa in Position 216 is any amino acid
  Variant (226)..(226): Xaa in Position 226 is Lys or Arg
  Variant (228)..(228): Xaa in Position 228 is any amino acid
  Variant (230)..(232): Xaa in Position 230 to 232 is any amino acid
  Variant (235)..(235): Xaa in Position 235 is Arg or Lys
  Variant (238)..(238): Xaa in Position 238 is any amino acid
  Variant (240)..(240): Xaa in Position 240 is any amino acid
  Variant (246)..(246): Xaa in Position 246 is any amino acid
  Variant (249)..(249): Xaa in Position 249 is Glu or Asp
  Variant (250)..(250): Xaa in Position 250 is Ile or Leu
  Variant (251)..(251): Xaa in Position 251 is any amino acid
  Variant (253)..(253): Xaa in Position 253 is any amino acid
  Variant (254)..(254): Xaa in Position 254 is Leu or Met
  Variant (255)..(255): Xaa in Position 255 is any amino acid
  Variant (256)..(256): Xaa in Position 256 is Leu or Val
  Variant (257)..(258): Xaa in Position 257 to 258 is any amino acid
  Variant (260)..(261): Xaa in Position 260 to 261 is any amino acid
  Variant (264)..(264): Xaa in Position 264 is Glu or Asp

SEQ ID NO: 13435 - protein, 89 aa, Artificial sequence; identical to SEQ ID NO: 1304
  Consensus
  Variant (2)..(2): Xaa in Position 2 is any amino acid
  Variant (7)..(7): Xaa in Position 7 is Ile or Leu
  Variant (8)..(8): Xaa in Position 8 is any amino acid
  Variant (11)..(11): Xaa in Position 11 is any amino acid
  Variant (13)..(13): Xaa in Position 13 is any amino acid
  Variant (14)..(14): Xaa in Position 14 is Gly or Ala
  Variant (16)..(16): Xaa in Position 16 is any amino acid
  Variant (17)..(17): Xaa in Position 17 is Thr or Ser
  Variant (18)..(18): Xaa in Position 18 is any amino acid
  Variant (20)..(21): Xaa in Position 20 to 21 is any amino acid
  Variant (23)..(23): Xaa in Position 23 is Ile or Leu
  Variant (25)..(25): Xaa in Position 25 is any amino acid
  Variant (30)..(30): Xaa in Position 30 is Tyr or Phe
  Variant (32)..(32): Xaa in Position 32 is Lys or Arg
  Variant (35)..(35): Xaa in Position 35 is Val or Met
  Variant (36)..(36): Xaa in Position 36 is any amino acid
  Variant (38)..(38): Xaa in Position 38 is Asp or Glu
  Variant (39)..(39): Xaa in Position 39 is any amino acid
  Variant (45)..(45): Xaa in Position 45 is Ile or Leu
  Variant (52)..(52): Xaa in Position 52 is Ile or Leu
  Variant (53)..(53): Xaa in Position 53 is any amino acid
  Variant (54)..(54): Xaa in Position 54 is Ala or Gly
  Variant (56)..(57): Xaa in Position 56 to 57 is any amino acid
  Variant (60)..(61): Xaa in Position 60 to 61 is any amino acid
  Variant (63)..(65): Xaa in Position 63 to 65 is any amino acid
  Variant (68)..(68): Xaa in Position 68 is Phe, Tyr or Trp
  Variant (69)..(69): Xaa in Position 69 is any amino acid
  Variant (70)..(70): Xaa in Position 70 is Leu or Ile
  Variant (71)..(72): Xaa in Position 71 to 72 is any amino acid
  Variant (73)..(73): Xaa in Position 73 is Phe or Tyr
  Variant (77)..(77): Xaa in Position 77 is any amino acid
  Variant (79)..(79): Xaa in Position 79 is any amino acid
  Variant (80)..(80): Xaa in Position 80 is Ile or Val
  Variant (81)..(82): Xaa in Position 81 to 82 is any amino acid
  Variant (88)..(88): Xaa in Position 88 is Leu or Met

SEQ ID NO: 13436 - protein, 125 aa, Artificial sequence; identical to SEQ ID NO: 1305
  Consensus
  Variant (1)..(1): Xaa in Position 1 is Ala or Ser
  Variant (2)..(3): Xaa in Position 2 to 3 is any amino acid
  Variant (5)..(5): Xaa in Position 5 is Ser or Ala
  Variant (7)..(7): Xaa in Position 7 is any amino acid
  Variant (10)..(10): Xaa in Position 10 is Met or Ile
  Variant (11)..(11): Xaa in Position 11 is any amino acid
  Variant (12)..(12): Xaa in Position 12 is Val or Leu
  Variant (13)..(13): Xaa in Position 13 is Ala or Ser
  Variant (18)..(18): Xaa in Position 18 is any amino acid
  Variant (21)..(21): Xaa in Position 21 is Ala or Gly
  Variant (22)..(22): Xaa in Position 22 is any amino acid
  Variant (25)..(25): Xaa in Position 25 is Phe or Tyr
  Variant (27)..(27): Xaa in Position 27 is Leu or Ile
  Variant (29)..(29): Xaa in Position 29 is Ser or Ala
  Variant (31)..(31): Xaa in Position 31 is Met or Ile
  Variant (34)..(34): Xaa in Position 34 is Ser or Ala
  Variant (35)..(35): Xaa in Position 35 is any amino acid
  Variant (40)..(40): Xaa in Position 40 is Thr or Ser
  Variant (42)..(42): Xaa in Position 42 is Ile or Val
  Variant (46)..(47): Xaa in Position 46 to 47 is any amino acid
  Variant (50)..(50): Xaa in Position 50 is Val, Leu or Met
  Variant (51)..(52): Xaa in Position 51 to 52 is any amino acid
  Variant (53)..(53): Xaa in Position 53 is Ile or Val
  Variant (54)..(54): Xaa in Position 54 is Ile or Val
  Variant (55)..(56): Xaa in Position 55 to 56 is any amino acid
  Variant (57)..(57): Xaa in Position 57 is Val or Ile
  Variant (59)..(60): Xaa in Position 59 to 60 is any amino acid
  Variant (62)..(62): Xaa in Position 62 is any amino acid
  Variant (65)..(67): Xaa in Position 65 to 67 is any amino acid
  Variant (74)..(74): Xaa in Position 74 is Ser or Thr
  Variant (76)..(76): Xaa in Position 76 is any amino acid
  Variant (77)..(77): Xaa in Position 77 is Phe or Tyr
  Variant (80)..(84): Xaa in Position 80 to 84 is any amino acid
  Variant (87)..(87): Xaa in Position 87 is any amino acid
  Variant (89)..(89): Xaa in Position 89 is any amino acid
  Variant (90)..(90): Xaa in Position 90 is Val or Ile
  Variant (91)..(91): Xaa in Position 91 is Val or Ile
  Variant (97)..(97): Xaa in Position 97 is any amino acid
  Variant (99)..(99): Xaa in Position 99 is Arg or Lys
  Variant (102)..(102): Xaa in Position 102 is any amino acid
  Variant (109)..(110): Xaa in Position 109 to 110 is any amino acid
  Variant (113)..(113): Xaa in Position 113 is any amino acid
  Variant (118)..(118): Xaa in Position 118 is any amino acid
  Variant (121)..(121): Xaa in Position 121 is any amino acid

SEQ ID NO: 13437 - protein, 622 aa, Artificial sequence; identical to SEQ ID NO: 1306
  Consensus
  Variant (1)..(622): Xaa in all Positions is any amino acid

SEQ ID NO: 13438 - protein, 65 aa, Artificial sequence; identical to SEQ ID NO: 1307
  Consensus
  Variant (4)..(4): Xaa in Position 4 is Glu, Gln, Lys or Ala
  Variant (5)..(5): Xaa in Position 5 is Thr or Ser
  Variant (6)..(6): Xaa in Position 6 is any amino acid
  Variant (7)..(7): Xaa in Position 7 is Trp, Phe or Tyr
  Variant (8)..(8): Xaa in Position 8 is Asn, Ser or Ala
  Variant (9)..(13): Xaa in Position 9 to 13 is any amino acid
  Variant (14)..(14): Xaa in Position 14 is Gln or Thr
  Variant (15)..(15): Xaa in Position 15 is Gly or Ser
  Variant (16)..(16): Xaa in Position 16 is no amino acid or any amino acid
  Variant (17)..(18): Xaa in Position 17 to 18 is any amino acid
  Variant (19)..(19): Xaa in Position 19 is Asp, Asn or Glu
  Variant (20)..(21): Xaa in Position 20 to 21 is any amino acid
  Variant (23)..(25): Xaa in Position 23 to 25 is any amino acid
  Variant (26)..(26): Xaa in Position 26 is Gly or Ser
  Variant (27)..(29): Xaa in Position 27 to 29 is any amino acid
  Variant (30)..(30): Xaa in Position 30 is Ala, Met, Val or Ile
  Variant (31)..(36): Xaa in Position 31 to 36 is any amino acid
  Variant (37)..(37): Xaa in Position 37 is Leu, Ile, Val, Ala or Phe
  Variant (38)..(44): Xaa in Position 38 to 44 is any amino acid
  Variant (45)..(55): Xaa in Position 45 to 55 is no amino acid or any amino acid
  Variant (56)..(56): Xaa in Position 56 is Thr, Ser, Ala or Val
  Variant (58)..(60): Xaa in Position 58 to 60 is any amino acid
  Variant (62)..(62): Xaa in Position 62 is Ala, Thr or Pro
  Variant (63)..(64): Xaa in Position 63 to 64 is any amino acid

SEQ ID NO: 13439 - protein, 150 aa, Artificial sequence; identical to SEQ ID NO: 2917
  Consensus
  Variant (1)..(1): Xaa in Position 1 is Arg or Lys
  Variant (2)..(2): Xaa in Position 2 is Val, Ile, Leu or Ala
  Variant (3)..(3): Xaa in Position 3 is Ile, Val, Met or Ala
  Variant (4)..(4): Xaa in Position 4 is Ile, Val, Leu, Met or Ala
  Variant (8)..(8): Xaa in Position 8 is Phe, Ile, Leu or Tyr
  Variant (9)..(9): Xaa in Position 9 is Gly or Ala
  Variant (10)..(10): Xaa in Position 10 is any amino acid
  Variant (11)..(11): Xaa in Position 11 is Asp, Ser or Asn
  Variant (12)..(13): Xaa in Position 12 to 13 is any amino acid
  Variant (14)..(14): Xaa in Position 14 is Ser, Thr or Asn
  Variant (15)..(15): Xaa in Position 15 is Ala, Ser, Phe or Tyr
  Variant (16)..(17): Xaa in Position 16 to 17 is any amino acid
  Variant (18)..(18): Xaa in Position 18 is Leu, Ile, Val or Phe
  Variant (19)..(21): Xaa in Position 19 to 21 is any amino acid
  Variant (22)..(22): Xaa in Position 22 is Leu, Ile or Val
  Variant (23)..(27): Xaa in Position 23 to 27 is any amino acid
  Variant (28)..(28): Xaa in Position 28 is Glu, Asp, Pro or Ser
  Variant (29)..(30): Xaa in Position 29 to 30 is any amino acid
  Variant (31)..(31): Xaa in Position 31 is Ile, Val, Leu, Thr or Met
  Variant (32)..(32): Xaa in Position 32 is Tyr, Phe or Leu
  Variant (33)..(33): Xaa in Position 33 is Arg, His or Leu
  Variant (34)..(34): Xaa in Position 34 is Ile, Val, Met or Leu
  Variant (37)..(37): Xaa in Position 37 is Tyr or Phe
  Variant (39)..(39): Xaa in Position 39 is Gly, Ser or Ala
  Variant (40)..(40): Xaa in Position 40 is Lys, Arg or Glu
  Variant (41)..(42): Xaa in Position 41 to 42 is any amino acid
  Variant (43)..(43): Xaa in Position 43 is Val, Ile, Leu, Ala or Met
  Variant (44)..(44): Xaa in Position 44 is any amino acid
  Variant (45)..(45): Xaa in Position 45 is Asn, Gly, Gln or Ala
  Variant (46)..(46): Xaa in Position 46 is Leu, Ile, Met, Phe or Val
  Variant (47)..(49): Xaa in Position 47 to 49 is any amino acid
  Variant (50)..(50): Xaa in Position 50 is Arg, Lys or Glu
  Variant (51)..(51): Xaa in Position 51 is Phe or Tyr
  Variant (52)..(52): Xaa in Position 52 is any amino acid
  Variant (54)..(59): Xaa in Position 54 to 59 is any amino acid
  Variant (60)..(60): Xaa in Position 60 is no amino acid or any amino acid
  Variant (61)..(61): Xaa in Position 61 is Trp, Met, Asn or Leu
  Variant (62)..(63): Xaa in Position 62 to 63 is any amino acid
  Variant (64)..(64): Xaa in Position 64 is no amino acid or any amino acid
  Variant (65)..(65): Xaa in Position 65 is no amino acid or any amino acid
  Variant (66)..(66): Xaa in Position 66 is Ile, Val or Ala
  Variant (67)..(68): Xaa in Position 67 to 68 is any amino acid
  Variant (69)..(69): Xaa in Position 69 is Val, Ile, Met or Leu
  Variant (70)..(70): Xaa in Position 70 is any amino acid
  Variant (71)..(71): Xaa in Position 71 is Ile, Leu, Val, Phe or Ser
  Variant (72)..(74): Xaa in Position 72 to 74 is any amino acid
  Variant (76)..(77): Xaa in Position 76 to 77 is any amino acid
  Variant (78)..(78): Xaa in Position 78 is Gly, Asp, Val or Ala
  Variant (79)..(81): Xaa in Position 79 to 81 is any amino acid
  Variant (82)..(82): Xaa in Position 82 is Arg or Lys
  Variant (83)..(83): Xaa in Position 83 is no amino acid or any amino acid
  Variant (84)..(84): Xaa in Position 84 is no amino acid or any amino acid
  Variant (85)..(85): Xaa in Position 85 is Tyr or Phe
  Variant (86)..(86): Xaa in Position 86 is Tyr, Phe or Trp
  Variant (87)..(87): Xaa in Position 87 is Asp, Glu, Ala or Asn
  Variant (88)..(89): Xaa in Position 88 to 89 is any amino acid
  Variant (91)..(91): Xaa in Position 91 is no amino acid or any amino acid
  Variant (92)..(92): Xaa in Position 92 is any amino acid
  Variant (93)..(93): Xaa in Position 93 is Leu, Ile, Val, Met or Ala
  Variant (94)..(94): Xaa in Position 94 is Arg, Lys or Leu
  Variant (96)..(96): Xaa in Position 96 is Met, Val, Ile or Leu
  Variant (97)..(97): Xaa in Position 97 is Val, Met, Ile, Leu or Phe
  Variant (98)..(98): Xaa in Position 98 is Gln, Pro or Thr
  Variant (99)..(99): Xaa in Position 99 is Asn or Ser
  Variant (100)..(100): Xaa in Position 100 is His, Gln or Pro
  Variant (101)..(102): Xaa in Position 101 to 102 is any amino acid
  Variant (103)..(103): Xaa in Position 103 is Gln, Glu, Asn or Leu
  Variant (104)..(104): Xaa in Position 104 is Leu, Ile, Val, Met or Thr
  Variant (105)..(105): Xaa in Position 105 is Leu, Met, Val, Ile, Phe or Tyr
  Variant (106)..(106): Xaa in Position 106 is any amino acid
  Variant (107)..(107): Xaa in Position 107 is Leu, Met, Ile, Val, Trp or Phe
  Variant (108)..(109): Xaa in Position 108 to 109 is any amino acid
  Variant (111)..(111): Xaa in Position 111 is Glu, Asp, Ser or Asn
  Variant (112)..(112): Xaa in Position 112 is any amino acid
  Variant (114)..(118): Xaa in Position 114 to 118 is any amino acid
  Variant (119)..(121): Xaa in Position 119 to 121 is no amino acid or any amino acid
  Variant (122)..(122): Xaa in Position 122 is Ile, Val, Leu, Phe or Met
  Variant (123)..(124): Xaa in Position 123 to 124 is any amino acid
  Variant (125)..(125): Xaa in Position 125 is Glu, Lys, Ala, Arg or His
  Variant (126)..(126): Xaa in Position 126 is Lys or Val
  Variant (127)..(128): Xaa in Position 127 to 128 is any amino acid
  Variant (129)..(129): Xaa in Position 129 is Val, Ile, Ala, Leu or Phe
  Variant (130)..(130): Xaa in Position 130 is Leu, Ile, Val, Phe or Met
  Variant (131)..(140): Xaa in Position 131 to 140 is any amino acid
  Variant (141)..(145): Xaa in Position 141 to 145 is no amino acid or any amino acid
  Variant (146)..(146): Xaa in Position 146 is Val, Leu, Ile, Ala or Ser
  Variant (147)..(147): Xaa in Position 147 is any amino acid
  Variant (148)..(148): Xaa in Position 148 is Gly or Ala
  Variant (149)..(149): Xaa in Position 149 is Gln or Arg
  Variant (150)..(150): Xaa in Position 150 is Tyr or Phe

SEQ ID NO: 13440 - protein, 44 aa, Artificial sequence; identical to SEQ ID NO: 2918
  Consensus
  Variant (1)..(1): Xaa in Position 1 is Tyr or Leu
  Variant (2)..(2): Xaa in Position 2 is any amino acid
  Variant (3)..(13): Xaa in Position 3 to 13 is no amino acid or any amino acid
  Variant (15)..(17): Xaa in Position 15 to 17 is any amino acid
  Variant (19)..(19): Xaa in Position 19 is Phe or Tyr
  Variant (20)..(25): Xaa in Position 20 to 25 is any amino acid
  Variant (26)..(26): Xaa in Position 26 is Ile, Val, Leu or Phe
  Variant (27)..(29): Xaa in Position 27 to 29 is any amino acid
  Variant (30)..(30): Xaa in Position 30 is Arg, Asn, Phe or Gln
  Variant (31)..(31): Xaa in Position 31 is Trp or Phe
  Variant (32)..(32): Xaa in Position 32 is any amino acid
  Variant (33)..(33): Xaa in Position 33 is Gly or Asp
  Variant (34)..(34): Xaa in Position 34 is Val or Thr
  Variant (36)..(36): Xaa in Position 36 is Phe or Ile
  Variant (37)..(37): Xaa in Position 37 is any amino acid
  Variant (38)..(38): Xaa in Position 38 is Leu, Met, Ile, Val or Phe
  Variant (39)..(40): Xaa in Position 39 to 40 is any amino acid
  Variant (41)..(41): Xaa in Position 41 is Gly or Ala
  Variant (43)..(43): Xaa in Position 43 is any amino acid
  Variant (44)..(44): Xaa in Position 44 is Leu, Met or Val

SEQ ID NO: 13441 - protein, 97 aa, Artificial sequence; identical to SEQ ID NO: 2919
  Consensus
  Variant (1)..(1): Xaa in Position 1 is Asn, Asp, Gln, Arg or Lys
  Variant (2)..(4): Xaa in Position 2 to 4 is any amino acid
  Variant (5)..(5): Xaa in Position 5 is Ile, Leu, Met, Phe or Val
  Variant (6)..(6): Xaa in Position 6 is any amino acid
  Variant (7)..(7): Xaa in Position 7 is Ile, Leu, Val, Ala or Ser
  Variant (8)..(8): Xaa in Position 8 is any amino acid
  Variant (9)..(9): Xaa in Position 9 is Pro or His
  Variant (10)..(12): Xaa in Position 10 to 12 is any amino acid
  Variant (13)..(13): Xaa in Position 13 is Ile, Val, Met, Leu, Phe or Ala
  Variant (14)..(19): Xaa in Position 14 to 19 is any amino acid
  Variant (20)..(20): Xaa in Position 20 is Lys, Ser or Arg
  Variant (21)..(29): Xaa in Position 21 to 29 is any amino acid
  Variant (30)..(35): Xaa in Position 30 to 35 is no amino acid or no amino acid
  Variant (36)..(36): Xaa in Position 36 is Leu, Ile, Met or Val
  Variant (37)..(44): Xaa in Position 37 to 44 is any amino acid
  Variant (45)..(64): Xaa in Position 45 to 64 is no amino acid or any amino acid
  Variant (65)..(65): Xaa in Position 65 is Ala, Gly, Pro or Ser
  Variant (66)..(66): Xaa in Position 66 is Tyr or Leu
  Variant (67)..(68): Xaa in Position 67 to 68 is any amino acid
  Variant (69)..(69): Xaa in Position 69 is Leu, Met or Tyr
  Variant (70)..(70): Xaa in Position 70 is Leu, Ile, Phe or Met
  Variant (71)..(71): Xaa in Position 71 is any amino acid
  Variant (72)..(72): Xaa in Position 72 is Asp, Glu, Ala, Asn or His
  Variant (73)..(75): Xaa in Position 73 to 75 is any amino acid
  Variant (76)..(76): Xaa in Position 76 is Gly, Ser or Asp
  Variant (77)..(80): Xaa in Position 77 to 80 is any amino acid
  Variant (81)..(81): Xaa in Position 81 is Phe or Tyr
  Variant (82)..(85): Xaa in Position 82 to 85 is any amino acid
  Variant (86)..(86): Xaa in Position 86 is no amino acid or any amino acid
  Variant (87)..(87): Xaa in Position 87 is Val, Ile, Leu, Ala or Gln
  Variant (88)..(90): Xaa in Position 88 to 90 is any amino acid
  Variant (92)..(96): Xaa in Position 92 to 96 is any amino acid
  Variant (97)..(97): Xaa in Position 97 is Ile, Val, Leu, Phe or Ala

SEQ ID NO: 13442 - protein, 1277 aa, Artificial sequence; identical to SEQ ID NO: 2920
  Consensus
  Variant (1)..(1277): Xaa in all Positions is any amino acid

SEQ ID NO: 13443 - protein, 55 aa, Artificial sequence; identical to SEQ ID NO: 6162
  Consensus
  Variant (1)..(1): Xaa in position 1 is Ser, Ala, Thr, Pro or Val
  Variant (2)..(2): Xaa in position 2 is Pro, Ala, Asn, Ser or Gly
  Variant (3)..(3): Xaa in position 3 is Tyr, Phe, His or Arg
  Variant (4)..(12): Xaa in position 4 to 12 is any or no amino acid
  Variant (13)..(22): Xaa in position 13 to 22 is any amino acid
  Variant (23)..(23): Xaa in position 23 is Leu, Ile or Val
  Variant (24)..(24): Xaa in position 24 is any amino acid
  Variant (25)..(25): Xaa in position 25 is Gly, Ser, Ala or Cys
  Variant (26)..(26): Xaa in position 26 is any amino acid
  Variant (30)..(37): Xaa in position 30 to 37 is any or no amino acid
  Variant (38)..(46): Xaa in position 38 to 46 is any amino acid
  Variant (47)..(47): Xaa in position 47 is Val, Ile, Ala, Leu or Phe
  Variant (48)..(50): Xaa in position 48 to 50 is any amino acid
  Variant (52)..(52): Xaa in position 52 is Ile, Leu or Met
  Variant (53)..(53): Xaa in position 53 is Ala, Lys or Ser
  Variant (55)..(55): Xaa in position 55 is Thr or Ser

SEQ ID NO: 13444 - protein, 49 aa, Artificial sequence; identical to SEQ ID NO: 6163
  Consensus
  Variant (2)..(2): Xaa in position 2 is Glu, Asp, Gln or Asn
  Variant (3)..(3): Xaa in position 3 is any amino acid
  Variant (4)..(4): Xaa in position 4 is Ala or Ser
  Variant (6)..(6): Xaa in position 6 is His, Asn or Leu
  Variant (7)..(7): Xaa in position 7 is any amino acid
  Variant (8)..(8): Xaa in position 8 is Met or Val
  Variant (9)..(9): Xaa in position 9 is Leu, Ile, Cys or Ser
  Variant (10)..(10): Xaa in position 10 is Val, Ile, Leu, Thr or Ser
  Variant (12)..(12): Xaa in position 12 is Leu or Val
  Variant (13)..(13): Xaa in position 13 is any amino acid
  Variant (15)..(15): Xaa in position 15 is Asn, His or Glu
  Variant (16)..(16): Xaa in position 16 is Asp or Glu
  Variant (17)..(17): Xaa in position 17 is Leu, Ile, Val, Lys or Met
  Variant (18)..(20): Xaa in position 18 to 20 is any amino acid
  Variant (21)..(21): Xaa in position 21 is Cys, Ser or Ala
  Variant (22)..(23): Xaa in position 22 to 23 is any or no amino acid
  Variant (24)..(24): Xaa in position 24 is any amino acid
  Variant (25)..(25): Xaa in position 25 is Ser, Thr, Glu or Lys
  Variant (26)..(27): Xaa in position 26 to 27 is any amino acid
  Variant (28)..(28): Xaa in position 28 is Val, Ile, Leu, Thr or Ala
  Variant (29)..(33): Xaa in position 29 to 33 is any amino acid
  Variant (34)..(34): Xaa in position 34 is Val, Ile, Leu or Thr
  Variant (35)..(36): Xaa in position 35 to 36 is any amino acid
  Variant (37)..(37): Xaa in position 37 is Tyr, Phe or Arg
  Variant (38)..(39): Xaa in position 38 to 39 is any amino acid
  Variant (40)..(40): Xaa in position 40 is Val, Leu or Ile
  Variant (41)..(41): Xaa in position 41 is any amino acid
  Variant (42)..(42): Xaa in position 42 is His or Gln
  Variant (43)..(43): Xaa in position 43 is Leu, Ile, Met or Thr
  Variant (44)..(44): Xaa in position 44 is any amino acid
  Variant (45)..(45): Xaa in position 45 is Ser, Asp or Thr
  Variant (46)..(46): Xaa in position 46 is any amino acid
  Variant (47)..(47): Xaa in position 47 is Val or Ile
  Variant (48)..(48): Xaa in position 48 is any amino acid
  Variant (49)..(49): Xaa in position 49 is Gly or Ala

SEQ ID NO: 13445 - protein, 52 aa, Artificial sequence; identical to SEQ ID NO: 6164
  Consensus
  Variant (1)..(1): Xaa in position 1 is Gly or Val
  Variant (2)..(2): Xaa in position 2 is Thr or Ser
  Variant (3)..(3): Xaa in position 3 is Val, Leu, Ile, Met or Ala
  Variant (4)..(4): Xaa in position 4 is Thr or Ser
  Variant (6)..(6): Xaa in position 6 is Ala, Cys, Ser or Ile
  Variant (9)..(10): Xaa in position 9 to 10 is any amino acid
  Variant (11)..(11): Xaa in position 11 is Ala, Thr, Ser or Cys
  Variant (12)..(12): Xaa in position 12 is Met, Ile, Leu or Val
  Variant (13)..(13): Xaa in position 13 is any or no amino acid
  Variant (14)..(14): Xaa in position 14 is any amino acid
  Variant (15)..(15): Xaa in position 15 is Ile, Leu or Val
  Variant (16)..(17): Xaa in position 16 to 17 is any amino acid
  Variant (18)..(18): Xaa in position 18 is any or no amino acid
  Variant (19)..(19): Xaa in position 19 is Glu or Tyr
  Variant (20)..(22): Xaa in position 20 to 22 is any amino acid
  Variant (24)..(25): Xaa in position 24 to 25 is any amino acid
  Variant (26)..(26): Xaa in position 26 is Tyr, Phe or Trp
  Variant (27)..(27): Xaa in position 27 is Gly, Ala, Ser, Cys, Thr or Tyr
  Variant (29)..(30): Xaa in position 29 to 30 is any amino acid
  Variant (31)..(31): Xaa in position 31 is Gly, Ala, Leu, Phe or Ile
  Variant (32)..(37): Xaa in position 32 to 37 is any or no amino acid
  Variant (38)..(47): Xaa in position 38 to 47 is any amino acid
  Variant (48)..(48): Xaa in position 48 is Ile, Leu, Val or Met
  Variant (49)..(49): Xaa in position 49 is any amino acid
  Variant (50)..(50): Xaa in position 50 is Ile or Leu
  Variant (52)..(52): Xaa in position 52 is Thr, Ser, Met or Ala

SEQ ID NO: 13446 - protein, 20 aa, Artificial sequence
  Consensus
  Variant (1)..(1): Xaa in position 1 is Gly or Ala
  Variant (2)..(2): Xaa in position 2 is Ala, Gly, Cys or Ser
  Variant (3)..(3): Xaa in position 3 is Gly, Ala or Thr
  Variant (4)..(4): Xaa in position 4 is Ile, Val or Leu
  Variant (5)..(5): Xaa in position 5 is Val, Thr, Leu or Ile
  Variant (6)..(7): Xaa in position 6 to 7 is any amino acid
  Variant (9)..(12): Xaa in position 9 to 12 is any amino acid
  Variant (14)..(15): Xaa in position 14 to 15 is any amino acid
  Variant (17)..(19): Xaa in position 17 to 19 is any amino acid
XXXXXXXSXXXXEXXEXXXK

SEQ ID NO: 13447 - protein, 23 aa, Artificial sequence
  Consensus
  Variant (1)..(1): Xaa in position 1 is Leu or Met
  Variant (2)..(2): Xaa in position 2 is any amino acid
  Variant (3)..(3): Xaa in position 3 is Arg, Lys or Ser
  Variant (6)..(6): Xaa in position 6 is Ile, Val or Leu
  Variant (8)..(8): Xaa in position 8 is any amino acid
  Variant (9)..(9): Xaa in position 9 is Leu or Val
  Variant (10)..(11): Xaa in position 10 to 11 is any amino acid
  Variant (12)..(12): Xaa in position 12 is Thr or Ser
  Variant (13)..(15): Xaa in position 13 to 15 is any amino acid
  Variant (16)..(16): Xaa in position 16 is Tyr, Leu, Phe or Met
  Variant (17)..(21): Xaa in position 17 to 21 is any amino acid
  Variant (22)..(22): Xaa in position 22 is Pro or Ala
  Variant (23)..(23): Xaa in position 23 is Leu, Phe or Val
XXXLPXPXXXXXXXXXXXXXXXX

SEQ ID NO: 13448 - protein, 27 aa, Artificial sequence
  Consensus
  Variant (1)..(1): Xaa in position 1 is Gln, Pro or Met
  Variant (2)..(3): Xaa in position 2 to 3 is any amino acid
  Variant (4)..(4): Xaa in position 4 is Arg or Lys
  Variant (5)..(5): Xaa in position 5 is Ala, Ser or Thr
  Variant (6)..(6): Xaa in position 6 is Ala, Thr, Ser or Gly
  Variant (7)..(7): Xaa in position 7 is any amino acid
  Variant (8)..(8): Xaa in position 8 is Leu, Ile, Met or Val
  Variant (9)..(10): Xaa in position 9 to 10 is any amino acid
  Variant (11)..(11): Xaa in position 11 is Ser, Ala, Thr or Tyr
  Variant (12)..(12): Xaa in position 12 is any amino acid
  Variant (13)..(13): Xaa in position 13 is Leu, Val, Ile, Met or Ala
  Variant (14)..(14): Xaa in position 14 is any amino acid
  Variant (15)..(15): Xaa in position 15 is Phe, Ile or Tyr
  Variant (16)..(18): Xaa in position 16 to 18 is any amino acid
  Variant (19)..(19): Xaa in position 19 is Leu, Ile, Val or Met
  Variant (20)..(20): Xaa in position 20 is Arg, Lys, Gln or Asp
  Variant (21)..(23): Xaa in position 21 to 23 is any amino acid
  Variant (25)..(25): Xaa in position 25 is any amino acid
  Variant (26)..(26): Xaa in position 26 is Pro, Thr, Val or Ala
  Variant (27)..(27): Xaa in position 27 is Asp or Glu
XXXXXXXXXXXXXXXXXXXXXXXLXXX

SEQ ID NO: 13449 - protein, 16 aa, Artificial sequence
  Consensus
  Variant (1)..(1): Xaa in position 1 is Leu, Phe, Met or Ile
  Variant (2)..(2): Xaa in position 2 is Cys, Ser, Asp or Thr
  Variant (3)..(3): Xaa in position 3 is Met or Ser
  Variant (4)..(5): Xaa in position 4 to 5 is any amino acid
  Variant (6)..(6): Xaa in position 6 is Tyr, Phe or Trp
  Variant (7)..(8): Xaa in position 7 to 8 is any amino acid
  Variant (9)..(9): Xaa in position 9 is Leu or Met
  Variant (11)..(11): Xaa in position 11 is Gly, Asn, Ala or Cys
  Variant (12)..(12): Xaa in position 12 is any amino acid
  Variant (13)..(13): Xaa in position 13 is Ser, Thr or Ala
  Variant (15)..(15): Xaa in position 15 is any amino acid
  Variant (16)..(16): Xaa in position 16 is Pro or Ala
XXXXXXXXXFXXXRXX

SEQ ID NO: 13450 - protein, 45 aa, Artificial sequence; identical to SEQ ID NO: 2913
  Consensus
  Variant (1)..(1): Xaa in position 1 is Leu, Ile, Val, Met or Phe
  Variant (2)..(2): Xaa in position 2 is Gly or Ala
  Variant (3)..(3): Xaa in position 3 is any amino acid
  Variant (4)..(4): Xaa in position 4 is Leu or Phe
  Variant (5)..(5): Xaa in position 5 is Thr or Ser
  Variant (6)..(6): Xaa in position 6 is Ser, Thr or Ala
  Variant (7)..(8): Xaa in position 7 to 8 is any amino acid
  Variant (9)..(9): Xaa in position 9 is Arg, Phe or Thr
  Variant (10)..(11): Xaa in position 10 to 11 is any amino acid
  Variant (13)..(15): Xaa in position 13 to 15 is any amino acid
  Variant (16)..(16): Xaa in position 16 is Arg, Tyr or His
  Variant (17)..(26): Xaa in position 17 to 26 is any amino acid
  Variant (27)..(30): Xaa in position 27 to 30 is any or no amino acid
  Variant (31)..(31): Xaa in position 31 is Leu or Glu
  Variant (32)..(33): Xaa in position 32 to 33 is any amino acid
  Variant (34)..(34): Xaa in position 34 is any or no amino acid
  Variant (35)..(35): Xaa in position 35 is Ile or Val
  Variant (36)..(36): Xaa in position 36 is Asp, His or Glu
  Variant (37)..(37): Xaa in position 37 is any amino acid
  Variant (38)..(38): Xaa in position 38 is Ala, Ser or Gly
  Variant (39)..(39): Xaa in position 39 is Leu, Ser, Val or Ala
  Variant (41)..(41): Xaa in position 41 is any amino acid
  Variant (42)..(42): Xaa in position 42 is Leu, Val or Ile
  Variant (43)..(43): Xaa in position 43 is Cys, Val or Thr
  Variant (44)..(44): Xaa in position 44 is Leu, Phe or Met

SEQ ID NO: 13451 - protein, 31 aa, Artificial sequence; identical to SEQ ID NO: 2914
  Consensus
  Variant (2)..(2): Xaa in position 2 is Trp or Phe
  Variant (3)..(3): Xaa in position 3 is Tyr or Phe
  Variant (4)..(4): Xaa in position 4 is Asp or Cys
  Variant (6)..(6): Xaa in position 6 is any or no amino acid
  Variant (7)..(7): Xaa in position 7 is Leu, Phe or Ile
  Variant (8)..(8): Xaa in position 8 is any amino acid
  Variant (9)..(9): Xaa in position 9 is Leu, Ile, Phe or Thr
  Variant (10)..(10): Xaa in position 10 is Ile, Val, Phe or Leu
  Variant (11)..(11): Xaa in position 11 is Val, Ile or Met
  Variant (12)..(13): Xaa in position 12 to 13 is any amino acid
  Variant (14)..(14): Xaa in position 14 is Asn, Asp, Cys or Gly
  Variant (15)..(15): Xaa in position 15 is Gly, Ala, Ser or Val
  Variant (16)..(16): Xaa in position 16 is any amino acid
  Variant (17)..(17): Xaa in position 17 is Ala, Ser or Thr
  Variant (18)..(18): Xaa in position 18 is Gly, Ala, Thr or Cys
  Variant (19)..(19): Xaa in position 19 is Ile, Val or Phe
  Variant (20)..(20): Xaa in position 20 is any amino acid
  Variant (21)..(21): Xaa in position 21 is Phe, Trp, Ala or Gly
  Variant (22)..(22): Xaa in position 22 is Glu or Asp
  Variant (23)..(23): Xaa in position 23 is His or Ser
  Variant (24)..(24): Xaa in position 24 is Ser, Thr, Phe or Ala
  Variant (25)..(26): Xaa in position 25 to 26 is any amino acid
  Variant (27)..(27): Xaa in position 27 is Asp or Glu
  Variant (28)..(28): Xaa in position 28 is Gly or Ala
  Variant (29)..(30): Xaa in position 29 to 30 is any amino acid
  Variant (31)..(31): Xaa in position 31 is Val, Thr or Ile

SEQ ID NO: 13452 - protein, 43 aa, Artificial sequence; identical to SEQ ID NO: 2915
  Consensus
  Variant (2)..(2): Xaa in position 2 is Ala or Ser
  Variant (3)..(4): Xaa in position 3 to 4 is any amino acid
  Variant (6)..(6): Xaa in position 6 is Met, Leu, Gln, Val or Ile
  Variant (7)..(7): Xaa in position 7 is any amino acid
  Variant (8)..(8): Xaa in position 8 is Phe, Leu, Ile or Met
  Variant (10)..(10): Xaa in position 10 is any amino acid
  Variant (11)..(11): Xaa in position 11 is Ala or Thr
  Variant (12)..(12): Xaa in position 12 is Tyr, Phe, His, Val or Asn
  Variant (13)..(13): Xaa in position 13 is Tyr, Phe, Leu or Arg
  Variant (14)..(15): Xaa in position 14 to 15 is any amino acid
  Variant (16)..(16): Xaa in position 16 is Tyr, Leu, Thr or Met
  Variant (17)..(17): Xaa in position 17 is Gly, Lys or Ser
  Variant (18)..(22): Xaa in position 18 to 22 is any amino acid
  Variant (23)..(23): Xaa in position 23 is Tyr, Leu or Phe
  Variant (25)..(25): Xaa in position 25 is Pro, Ser or Ala
  Variant (26)..(26): Xaa in position 26 is Ala, Cys, Val, Ile or Ser
  Variant (27)..(27): Xaa in position 27 is Ser, Met, Ala or Thr
  Variant (28)..(28): Xaa in position 28 is Thr or Val
  Variant (29)..(29): Xaa in position 29 is Lys, Arg, Ala or Ser
  Variant (30)..(30): Xaa in position 30 is any amino acid
  Variant (31)..(31): Xaa in position 31 is Phe or Tyr
  Variant (32)..(33): Xaa in position 32 to 33 is any amino acid
  Variant (34)..(34): Xaa in position 34 is Gly or Ser
  Variant (35)..(35): Xaa in position 35 is Arg or Met
  Variant (36)..(36): Xaa in position 36 is Thr or Ser
  Variant (37)..(37): Xaa in position 37 is Glu, Ser, Ala or Thr
  Variant (38)..(38): Xaa in position 38 is any amino acid
  Variant (39)..(39): Xaa in position 39 is Ile, Gly, Val, Met or Cys
  Variant (40)..(40): Xaa in position 40 is Arg, Pro, Asn or Cys
  Variant (41)..(41): Xaa in position 41 is Ser, Pro, Thr, Ile or Val
  Variant (42)..(42): Xaa in position 42 is Val, Ala, Gln or Cys
  Variant (43)..(43): Xaa in position 43 is Ser, Thr or Asn

SEQ ID NO: 13453 - protein, 24 aa, Artificial sequence
  Consensus
  Variant (2)..(5): Xaa in position 2 to 5 is any amino acid
  Variant (6)..(6): Xaa in position 6 is Lys or Arg
  Variant (7)..(7): Xaa in position 7 is any amino acid
  Variant (8)..(8): Xaa in position 8 is Ala, Cys, Ser or Thr
  Variant (9)..(10): Xaa in position 9 to 10 is any amino acid
  Variant (11)..(11): Xaa in position 11 is Gly or Ala
  Variant (12)..(12): Xaa in position 12 is any amino acid
  Variant (13)..(13): Xaa in position 13 is Gly or Ala
  Variant (14)..(14): Xaa in position 14 is any amino acid
  Variant (15)..(15): Xaa in position 15 is Asp or Glu
  Variant (16)..(16): Xaa in position 16 is Arg or Lys
  Variant (17)..(17): Xaa in position 17 is His or Tyr
  Variant (18)..(18): Xaa in position 18 is Leu or Phe
  Variant (19)..(19): Xaa in position 19 is Tyr, Phe, Asn or Leu
  Variant (20)..(20): Xaa in position 20 is Ala or Gly
  Variant (21)..(21): Xaa in position 21 is Leu, Met or Ile
  Variant (22)..(23): Xaa in position 22 to 23 is any amino acid
  Variant (24)..(24): Xaa in position 24 is Leu, Met, Ile, Val or Thr
HXXXXXXXXXXXXXXXXXXXXXXX

SEQ ID NO: 13454 - protein, 76 aa, Artificial sequence; identical to SEQ ID NO: 2897
  Consensus
  Variant (1)..(1): Xaa in position 1 is Leu, Met or Val
  Variant (2)..(2): Xaa in position 2 is Gly or Asp
  Variant (3)..(3): Xaa in position 3 is Asp, Ser, Asn, Gln or Gly
  Variant (4)..(4): Xaa in position 4 is Leu or Arg
  Variant (5)..(6): Xaa in position 5 to 6 is any amino acid
  Variant (7)..(7): Xaa in position 7 is His or Pro
  Variant (8)..(8): Xaa in position 8 is any amino acid
  Variant (9)..(9): Xaa in position 9 is Gly, Ser, Glu or Asp
  Variant (10)..(13): Xaa in position 10 to 13 is any amino acid
  Variant (14)..(14): Xaa in position 14 is Ala or Ser
  Variant (15)..(15): Xaa in position 15 is Gln, Glu or Met
  Variant (16)..(18): Xaa in position 16 to 18 is any amino acid
  Variant (19)..(19): Xaa in position 19 is Ala or Ser
  Variant (20)..(21): Xaa in position 20 to 21 is any amino acid
  Variant (22)..(22): Xaa in position 22 is Phe, Tyr, Trp or Val
  Variant (23)..(23): Xaa in position 23 is any amino acid
  Variant (24)..(24): Xaa in position 24 is Ala, Ser or Val
  Variant (25)..(27): Xaa in position 25 to 27 is any amino acid
  Variant (28)..(28): Xaa in position 28 is Tyr, Phe or Trp
  Variant (29)..(30): Xaa in position 29 to 30 is any amino acid
  Variant (31)..(31): Xaa in position 31 is Val, Thr, Leu or Ile
  Variant (32)..(32): Xaa in position 32 is any amino acid
  Variant (34)..(34): Xaa in position 34 is Thr or Ser
  Variant (35)..(35): Xaa in position 35 is Ser or Thr
  Variant (36)..(36): Xaa in position 36 is any amino acid
  Variant (37)..(37): Xaa in position 37 is Ser, Ala or Gly
  Variant (38)..(38): Xaa in position 38 is Asn, Ile, Val or Ser
  Variant (39)..(51): Xaa in position 39 to 51 is any amino acid
  Variant (52)..(52): Xaa in position 52 is Val, Ile, Leu or Ala
  Variant (53)..(53): Xaa in position 53 is Leu, Ile, Val or Met
  Variant (54)..(55): Xaa in position 54 to 55 is any amino acid
  Variant (57)..(57): Xaa in position 57 is Asn or Asp
  Variant (58)..(58): Xaa in position 58 is any amino acid
  Variant (60)..(60): Xaa in position 60 is Lys, Gln or Arg
  Variant (61)..(61): Xaa in position 61 is Ser or Ala
  Variant (62)..(65): Xaa in position 62 to 65 is any amino acid
  Variant (66)..(66): Xaa in position 66 is any or no amino acid
  Variant (67)..(67): Xaa in position 67 is Leu, Ile, Met or Val
  Variant (68)..(73): Xaa in position 68 to 73 is any amino acid
  Variant (74)..(74): Xaa in position 74 is Pro or Ala
  Variant (75)..(75): Xaa in position 75 is any amino acid
  Variant (76)..(76): Xaa in position 76 is Tyr, Phe or Trp

SEQ ID NO: 13455 - protein, 39 aa, Artificial sequence; identical to SEQ ID NO: 2898
  Consensus
  Variant (1)..(1): Xaa in position 1 is Val, Ile, Leu, Phe or Thr
  Variant (2)..(2): Xaa in position 2 is Ile, Val, Leu, Phe or Ala
  Variant (3)..(5): Xaa in position 3 to 5 is any amino acid
  Variant (6)..(6): Xaa in position 6 is Thr, Asn or Ser
  Variant (7)..(7): Xaa in position 7 is Tyr, Phe or Pro
  Variant (8)..(8): Xaa in position 8 is Asp, Tyr, Phe or His
  Variant (10)..(12): Xaa in position 10 to 12 is any amino acid
  Variant (13)..(13): Xaa in position 13 is Asn, Asp or Ser
  Variant (14)..(17): Xaa in position 14 to 17 is any or no amino acid
  Variant (18)..(29): Xaa in position 18 to 29 is any amino acid
  Variant (30)..(30): Xaa in position 30 is Ile, Val, Leu or Phe
  Variant (31)..(31): Xaa in position 31 is any amino acid
  Variant (32)..(32): Xaa in position 32 is Phe, Val, Trp or Ile
  Variant (34)..(34): Xaa in position 34 is Glu, Ser or Cys
  Variant (36)..(36): Xaa in position 36 is Trp or His
  Variant (37)..(37): Xaa in position 37 is any amino acid
  Variant (38)..(38): Xaa in position 38 is Ala, Gly, Pro or Val
  Variant (39)..(39): Xaa in position 39 is Tyr, His or Phe

SEQ ID NO: 13456 - protein, 84 aa, Artificial sequence; identical to SEQ ID NO: 2899
  Consensus
  Variant (1)..(1): Xaa in position 1 is Ser or Leu
  Variant (2)..(2): Xaa in position 2 is any amino acid
  Variant (5)..(7): Xaa in position 5 to 7 is any amino acid
  Variant (8)..(8): Xaa in position 8 is Ala, Gly or Ser
  Variant (9)..(9): Xaa in position 9 is Leu, Phe, Met or Ile
  Variant (10)..(10): Xaa in position 10 is Ser, Thr, Arg or Glu
  Variant (11)..(11): Xaa in position 11 is Gln or Met
  Variant (12)..(12): Xaa in position 12 is any amino acid
  Variant (13)..(13): Xaa in position 13 is Ser or Ala
  Variant (14)..(14): Xaa in position 14 is any amino acid
  Variant (15)..(15): Xaa in position 15 is Ile, Leu, Met, Val or Phe
  Variant (16)..(16): Xaa in position 16 is His, Asn, Leu or Ile
  Variant (17)..(24): Xaa in position 17 to 24 is any or no amino acid
  Variant (25)..(33): Xaa in position 25 to 33 is any amino acid
  Variant (34)..(34): Xaa in position 34 is Phe, Val, Leu, Met or Ile
  Variant (35)..(42): Xaa in position 35 to 42 is any amino acid
  Variant (43)..(43): Xaa in position 43 is Ser or Thr
  Variant (44)..(44): Xaa in position 44 is Thr or Ser
  Variant (46)..(47): Xaa in position 46 to 47 is any amino acid
  Variant (48)..(48): Xaa in position 48 is Tyr, Gln or Val
  Variant (49)..(49): Xaa in position 49 is any amino acid
  Variant (50)..(50): Xaa in position 50 is Leu, Ile, Phe or Met
  Variant (51)..(51): Xaa in position 51 is any amino acid
  Variant (52)..(52): Xaa in position 52 is Ala or Ser
  Variant (53)..(53): Xaa in position 53 is Ser, Ala or Thr
  Variant (54)..(54): Xaa in position 54 is any amino acid
  Variant (55)..(55): Xaa in position 55 is Asp or Glu
  Variant (56)..(57): Xaa in position 56 to 57 is any or no amino acid
  Variant (58)..(65): Xaa in position 58 to 65 is any amino acid
  Variant (66)..(66): Xaa in position 66 is Gly, Ala, Lys or Asn
  Variant (67)..(73): Xaa in position 67 to 73 is any amino acid
  Variant (74)..(74): Xaa in position 74 is Ile, Val, Leu, Tyr or Phe
  Variant (75)..(80): Xaa in position 75 to 80 is any amino acid
  Variant (81)..(81): Xaa in position 81 is Arg or Lys
  Variant (82)..(83): Xaa in position 82 to 83 is any amino acid
  Variant (84)..(84): Xaa in position 84 is Ile, Leu, Val, Met, Phe, Ala or Thr

SEQ ID NO: 13457 - protein, 31 aa, Artificial sequence; identical to SEQ ID NO: 2900
  Consensus
  Variant (1)..(1): Xaa in position 1 is Val, Ile, Leu, Cys or Arg
  Variant (2)..(5): Xaa in position 2 to 5 is any or no amino acid
  Variant (6)..(9): Xaa in position 6 to 9 is any amino acid
  Variant (10)..(10): Xaa in position 10 is Gly, Thr, Asp or Asn
  Variant (11)..(11): Xaa in position 11 is any amino acid
  Variant (12)..(12): Xaa in position 12 is Ile, Val or Thr
  Variant (13)..(13): Xaa in position 13 is any amino acid
  Variant (14)..(14): Xaa in position 14 is Ala, Gly, Thr or Leu
  Variant (15)..(16): Xaa in position 15 to 16 is any amino acid
  Variant (17)..(17): Xaa in position 17 is Val, Ile, Ala, Leu or Phe
  Variant (18)..(19): Xaa in position 18 to 19 is any amino acid
  Variant (24)..(24): Xaa in position 24 is Ile, Val or Phe
  Variant (25)..(26): Xaa in position 25 to 26 is any amino acid
  Variant (27)..(27): Xaa in position 27 is Val, Leu, Ile, Phe or Met
  Variant (28)..(29): Xaa in position 28 to 29 is any amino acid
  Variant (31)..(31): Xaa in position 31 is Glu or Gln

SEQ ID NO: 13458 - protein, 101 aa, Artificial sequence; identical to SEQ ID NO: 1322
  Consensus
  Variant (2)..(23): Xaa in Position 2 to 23 is any amino acid
  Variant (24)..(30): Xaa in Position 24 to 30 is no amino acid or any amino acid
  Variant (32)..(32): Xaa in Position 32 is any amino acid
  Variant (37)..(39): Xaa in Position 37 to 39 is any amino acid
  Variant (41)..(55): Xaa in Position 41 to 55 is any amino acid
  Variant (56)..(56): Xaa in Position 56 is no amino acid or any amino acid
  Variant (57)..(57): Xaa in Position 57 is no amino acid or any amino acid
  Variant (59)..(62): Xaa in Position 59 to 62 is any amino acid
  Variant (64)..(64): Xaa in Position 64 is any amino acid
  Variant (67)..(70): Xaa in Position 67 to 70 is any amino acid
  Variant (72)..(72): Xaa in Position 72 is any amino acid
  Variant (75)..(77): Xaa in Position 75 to 77 is any amino acid
  Variant (79)..(85): Xaa in Position 79 to 85 is any amino acid
  Variant (87)..(90): Xaa in Position 87 to 90 is any amino acid
  Variant (92)..(93): Xaa in Position 92 to 93 is any amino acid
  Variant (97)..(97): Xaa in Position 97 is any amino acid
  Variant (100)..(100): Xaa in Position 100 is any amino acid

SEQ ID NO: 13459 - protein, 642 aa, Artificial sequence; identical to SEQ ID NO: 2902
  Consensus
  Variant (1)..(642): Xaa in all positions is any amino acid

SEQ ID NO: 13460 - protein, 48 aa, Artificial sequence; identical to SEQ ID NO: 9104
  Consensus
  Variant (2)..(2): Xaa in position 2 is Ile, Val or Leu
  Variant (4)..(6): Xaa in position 4 to 6 is any amino acid
  Variant (7)..(7): Xaa in position 7 is Gly, Ala, Ser, Thr or Val
  Variant (8)..(8): Xaa in position 8 is Val, Ile, Leu or Met
  Variant (9)..(10): Xaa in position 9 to 10 is any amino acid
  Variant (11)..(13): Xaa in position 11 to 13 is any or no amino acid
  Variant (14)..(14): Xaa in position 14 is Phe, Ile, Leu or Met
  Variant (15)..(16): Xaa in position 15 to 16 is any amino acid
  Variant (17)..(17): Xaa in position 17 is Ile, Val or Leu
  Variant (18)..(18): Xaa in position 18 is Leu, Ile, Val, Ala or Cys
  Variant (19)..(20): Xaa in position 19 to 20 is any amino acid
  Variant (21)..(21): Xaa in position 21 is Ser, Ala, Thr, Phe or Cys
  Variant (22)..(22): Xaa in position 22 is Asp or Gln
  Variant (23)..(23): Xaa in position 23 is any amino acid
  Variant (24)..(24): Xaa in position 24 is Ile, Val, Leu, Phe or Ala
  Variant (25)..(25): Xaa in position 25 is Met or Ile
  Variant (26)..(26): Xaa in position 26 is Val, Ile or Leu
  Variant (27)..(27): Xaa in position 27 is Ala or Ser
  Variant (31)..(31): Xaa in position 31 is Leu or Met
  Variant (32)..(32): Xaa in position 32 is Gly or Ala
  Variant (33)..(33): Xaa in position 33 is Val, Ile, Met, Ala or Leu
  Variant (34)..(34): Xaa in position 34 is Glu or Gln
  Variant (35)..(35): Xaa in position 35 is Ile, Leu, Val, Met, Cys or Tyr
  Variant (36)..(39): Xaa in position 36 to 39 is any amino acid
  Variant (40)..(40): Xaa in position 40 is Val, Leu, Ile or Met
  Variant (41)..(43): Xaa in position 41 to 43 is any amino acid
  Variant (44)..(44): Xaa in position 44 is Gln or Glu
  Variant (45)..(45): Xaa in position 45 is Lys, Arg, Glu or Gln
  Variant (46)..(46): Xaa in position 46 is any amino acid
  Variant (47)..(47): Xaa in position 47 is Ile, Leu, Met or Ala
  Variant (48)..(48): Xaa in position 48 is Ile, Val, Thr, Leu or Ala

SEQ ID NO: 13461 - protein, 63 aa, Artificial sequence; identical to SEQ ID NO: 9105
  Consensus
  Variant (1)..(1): Xaa in position 1 is Val, Ile, Ala, Cys, Ser or Thr
  Variant (2)..(2): Xaa in position 2 is Ile, Val or Ala
  Variant (3)..(3): Xaa in position 3 is any or no amino acid
  Variant (5)..(5): Xaa in position 5 is Thr or Ser
  Variant (6)..(6): Xaa in position 6 is Gln, Asn, His or Glu
  Variant (7)..(7): Xaa in position 7 is Met, Leu, Val or Ile
  Variant (8)..(8): Xaa in position 8 is Leu, Met or Val
  Variant (9)..(9): Xaa in position 9 is any amino acid
  Variant (10)..(10): Xaa in position 10 is Ser or Thr
  Variant (11)..(11): Xaa in position 11 is Met or Leu
  Variant (12)..(16): Xaa in position 12 to 16 is any amino acid
  Variant (17)..(17): Xaa in position 17 is Pro or Ala
  Variant (20)..(20): Xaa in position 20 is Ala or Ser
  Variant (22)..(22): Xaa in position 22 is Val, Ala, Ile, Thr or Gly
  Variant (23)..(23): Xaa in position 23 is any amino acid
  Variant (25)..(25): Xaa in position 25 is Val or Ile
  Variant (26)..(26): Xaa in position 26 is Ala, Gly, Phe, Ser, Tyr or Thr
  Variant (27)..(27): Xaa in position 27 is any amino acid
  Variant (28)..(28): Xaa in position 28 is Ala or Ser
  Variant (29)..(29): Xaa in position 29 is Val, Ile or Thr
  Variant (30)..(32): Xaa in position 30 to 32 is any amino acid
  Variant (33)..(33): Xaa in position 33 is Thr, Ala, Ser or Val
  Variant (34)..(34): Xaa in position 34 is Asp, Ser or Asn
  Variant (35)..(35): Xaa in position 35 is Ala, Cys, Ser or Gly
  Variant (36)..(36): Xaa in position 36 is Val, Ile, Thr or Leu
  Variant (37)..(37): Xaa in position 37 is Met or Leu
  Variant (39)..(39): Xaa in position 39 is Ser or Thr
  Variant (40)..(40): Xaa in position 40 is Gly, Ala, Asn or Glu
  Variant (42)..(42): Xaa in position 42 is Thr or Ser
  Variant (43)..(43): Xaa in position 43 is Ala, Ser or Thr
  Variant (44)..(44): Xaa in position 44 is any amino acid
  Variant (46)..(46): Xaa in position 46 is any amino acid
  Variant (47)..(47): Xaa in position 47 is Tyr, Phe, His, Asp or Trp
  Variant (49)..(50): Xaa in position 49 to 50 is any amino acid
  Variant (51)..(51): Xaa in position 51 is Ala, Thr, Ser, Val or Cys
  Variant (52)..(52): Xaa in position 52 is Val, Ile, Leu or Ala
  Variant (53)..(54): Xaa in position 53 to 54 is any amino acid
  Variant (55)..(55): Xaa in position 55 is Met, Leu or Gln
  Variant (56)..(57): Xaa in position 56 to 57 is any amino acid
  Variant (58)..(58): Xaa in position 58 is Ile, Val, Thr or Ala
  Variant (59)..(61): Xaa in position 59 to 61 is any amino acid
  Variant (62)..(62): Xaa in position 62 is Ala, Thr, Val, Ile or Ser
  Variant (63)..(63): Xaa in position 63 is Glu, Asp or Gln

SEQ ID NO: 13462 - protein, 346 aa, Artificial sequence; identical to SEQ ID NO: 9106
  Consensus
  Variant (1)..(346): Xaa in all positions is any amino acid

SEQ ID NO: 13463 - protein, 16 aa, Artificial sequence
  Consensus
  Variant (2)..(3): Xaa in position 2 to 3 is any amino acid
  Variant (4)..(4): Xaa in position 4 is Gly or Ala
  Variant (5)..(5): Xaa in position 5 is Asp or Glu
  Variant (7)..(8): Xaa in position 7 to 8 is any amino acid
  Variant (9)..(9): Xaa in position 9 is Arg, Lys, Asn or His
  Variant (10)..(12): Xaa in position 10 to 12 is any amino acid
  Variant (13)..(13): Xaa in position 13 is Pro or Arg
  Variant (14)..(14): Xaa in position 14 is any amino acid
  Variant (15)..(15): Xaa in position 15 is Leu, Ile, Val, Met or Phe
  Variant (16)..(16): Xaa in position 16 is Tyr, Phe, Trp or Leu
GXXXXLXXXXXXXXXX

SEQ ID NO: 13464 - protein, 101 aa, Artificial sequence
  Consensus
  Variant (1)..(1): Xaa in position 1 is Arg or Lys
  Variant (2)..(2): Xaa in position 2 is Val, Leu, Ile or Ala
  Variant (3)..(3): Xaa in position 3 is Ile, Val, Met or Ala
  Variant (4)..(4): Xaa in position 4 is Ile, Val, Leu or Met
  Variant (8)..(8): Xaa in position 8 is any amino acid
  Variant (9)..(9): Xaa in position 9 is Gly or Ala
  Variant (10)..(13): Xaa in position 10 to 13 is any amino acid
  Variant (14)..(14): Xaa in position 14 is Ser or Thr
  Variant (15)..(15): Xaa in position 15 is Ala, Ser or Tyr
  Variant (16)..(17): Xaa in position 16 to 17 is any amino acid
  Variant (18)..(18): Xaa in position 18 is Leu, Ile, Val or Phe
  Variant (19)..(21): Xaa in position 19 to 21 is any amino acid
  Variant (22)..(22): Xaa in position 22 is Leu, Ile, Val or Phe
  Variant (23)..(24): Xaa in position 23 to 24 is any amino acid
  Variant (25)..(28): Xaa in position 25 to 28 is any or no amino acid
  Variant (29)..(29): Xaa in position 29 is Glu or Asp
  Variant (30)..(31): Xaa in position 30 to 31 is any amino acid
  Variant (32)..(32): Xaa in position 32 is Ile, Val, Leu or Thr
  Variant (33)..(33): Xaa in position 33 is Tyr, Phe or Leu
  Variant (34)..(34): Xaa in position 34 is Arg,  or Leu
  Variant (35)..(35): Xaa in position 35 is Ile, Val, Leu or Met
  Variant (38)..(38): Xaa in position 38 is Tyr, Phe, Met or Leu
  Variant (41)..(41): Xaa in position 41 is Lys or Arg
  Variant (42)..(42): Xaa in position 42 is Glu, Asp, Gln, Pro or Ala
  Variant (43)..(43): Xaa in position 43 is any amino acid
  Variant (44)..(44): Xaa in position 44 is Val, Ile, Leu or Met
  Variant (45)..(45): Xaa in position 45 is any amino acid
  Variant (46)..(46): Xaa in position 46 is Asn or Glu
  Variant (47)..(47): Xaa in position 47 is Leu, Ile, Val, Met or Phe
  Variant (48)..(50): Xaa in position 48 to 50 is any amino acid
  Variant (51)..(51): Xaa in position 51 is Arg, Lys or Glu
  Variant (52)..(52): Xaa in position 52 is Phe or Tyr
  Variant (53)..(53): Xaa in position 53 is any amino acid
  Variant (55)..(58): Xaa in position 55 to 58 is any amino acid
  Variant (59)..(61): Xaa in position 59 to 61 is any or no amino acid
  Variant (62)..(62): Xaa in position 62 is Trp, Met or Asn
  Variant (63)..(66): Xaa in position 63 to 66 is any amino acid
  Variant (67)..(67): Xaa in position 67 is Ile, Val or Ala
  Variant (68)..(69): Xaa in position 68 to 69 is any amino acid
  Variant (70)..(70): Xaa in position 70 is Val, Ile, Met or Leu
  Variant (71)..(71): Xaa in position 71 is any amino acid
  Variant (72)..(72): Xaa in position 72 is Ile, Leu, Val or Phe
  Variant (73)..(75): Xaa in position 73 to 75 is any amino acid
  Variant (77)..(78): Xaa in position 77 to 78 is any amino acid
  Variant (79)..(79): Xaa in position 79 is Gly, Ala, Lys or Val
  Variant (80)..(82): Xaa in position 80 to 82 is any amino acid
  Variant (83)..(83): Xaa in position 83 is Arg or Lys
  Variant (84)..(85): Xaa in position 84 to 85 is any amino acid
  Variant (86)..(86): Xaa in position 86 is Tyr or Phe
  Variant (87)..(87): Xaa in position 87 is Tyr, Phe or Trp
  Variant (88)..(88): Xaa in position 88 is Asp, Glu, Ala or Asn
  Variant (89)..(90): Xaa in position 89 to 90 is any amino acid
  Variant (92)..(93): Xaa in position 92 to 93 is any amino acid
  Variant (94)..(94): Xaa in position 94 is any or no amino acid
  Variant (95)..(95): Xaa in position 95 is Arg or Lys
  Variant (97)..(97): Xaa in position 97 is Met, Val, Ile or Leu
  Variant (98)..(98): Xaa in position 98 is Val, Ile, Leu, Met or Phe
  Variant (99)..(99): Xaa in position 99 is Gln, Pro or Thr
  Variant (100)..(100): Xaa in position 100 is Asn or Ser
  Variant (101)..(101): Xaa in position 101 is His or Gln
XXXXEKPXXXXXXXXXXXXXXXXXXXXXXXXXXXXDHXLGXXXXXXXXXXXXXNXXXXXXXXXXXXXXXXXXXXXEXXXXXXXXXXXXXXGXXXXDXXXXX

SEQ ID NO: 13465 - protein, 26 aa, Artificial sequence
  Consensus
  Variant (1)..(1): Xaa in position 1 is Arg, Phe or Gln
  Variant (2)..(2): Xaa in position 2 is Trp or Phe
  Variant (3)..(3): Xaa in position 3 is any amino acid
  Variant (4)..(4): Xaa in position 4 is Gly or Asp
  Variant (5)..(5): Xaa in position 5 is Val, Ile, Met or Thr
  Variant (7)..(7): Xaa in position 7 is Phe or Ile
  Variant (8)..(8): Xaa in position 8 is any amino acid
  Variant (9)..(9): Xaa in position 9 is Leu, Val, Met or Ile
  Variant (10)..(10): Xaa in position 10 is Arg, Lys, Gln or Cys
  Variant (11)..(11): Xaa in position 11 is any amino acid
  Variant (12)..(12): Xaa in position 12 is Gly or Ala
  Variant (14)..(14): Xaa in position 14 is any amino acid
  Variant (15)..(15): Xaa in position 15 is Leu, Met or Val
  Variant (16)..(21): Xaa in position 16 to 21 is any amino acid
  Variant (22)..(22): Xaa in position 22 is Ile, Val or Ala
  Variant (23)..(23): Xaa in position 23 is any amino acid
  Variant (24)..(24): Xaa in position 24 is Ile, Leu, Val or Met
  Variant (25)..(25): Xaa in position 25 is any amino acid
  Variant (26)..(26): Xaa in position 26 is Phe, Tyr or Leu
XXXXXPXXXXXXKXXXXXXXXXXXXX

SEQ ID NO: 13466 - protein, 534 aa, Artificial sequence
  Consensus
  Variant (1)..(534): Xaa in all positions is any amino acid
GXXGDLXXXKXXPXXXXLXXXXXLXXXXXXXXGXXRXXXXXXXXXXXXXXXXXXXXXXXXXXXXXXXXXXXXXXXXXXXXXYXXXXXXXXXXXXXLXXXXXXXXXXXXXXXXXXXXXXYXXXXPXXXXXXXXXXXXXXXXXXXXXXXXXXXRXXXEKPXGXDXXSXXXLXXXXXXXXXEXXXXRIDHYLGKEXVXNXXXXRFXNXXXXXXXWXXXXXXXXXXXXXEXXGXXXRXXYXXXXGXXXRDXXQNHXXQXXXXXAMEXPXXXXXXXXXRXEKXKVLXXXXXXXXXXXXXXXXXGQYXXXXXXXXXXXXXXYXXXXXXXXXXXXSXXXTXXXXXXXXXNXRWXGVPFXXXXGKXXXXXXXXXXXXFXXXXXXXXXXXXXXXXXXXXXXXXXXXXXXNXXXXXXQPXEXXXXXXXXKXPGXXXXXXXXXXXXXXXXXXXXXXXXXXXXXXXAYEXLXXDXXXGXXXXFXXXXEXXXXWXXXXXXXXXXXXXXXXXXXXXXYXXGXXGPXXXXXXXXXXXXXXXXXXXXXXW

SEQ ID NO: 13467 - protein, 96 aa, Artificial sequence
  Consensus
  Variant (1)..(1): Xaa in position 1 is Ile, Leu, Val or Met
  Variant (2)..(2): Xaa in position 2 is Ile, Val, Met or Leu
  Variant (3)..(3): Xaa in position 3 is any amino acid
  Variant (4)..(4): Xaa in position 4 is Gly, Ser or Ala
  Variant (5)..(5): Xaa in position 5 is Thr or Val
  Variant (6)..(6): Xaa in position 6 is any amino acid
  Variant (7)..(7): Xaa in position 7 is Ile, Val or Leu
  Variant (9)..(9): Xaa in position 9 is Ala or Gly
  Variant (11)..(11): Xaa in position 11 is Met or Val
  Variant (12)..(12): Xaa in position 12 is Leu or Phe
  Variant (13)..(13): Xaa in position 13 is Ala, Ser or Gly
  Variant (14)..(14): Xaa in position 14 is Leu, Met, Ile, Val or Asn
  Variant (16)..(21): Xaa in position 16 to 21 is any amino acid
  Variant (22)..(22): Xaa in position 22 is Gly or Trp
  Variant (23)..(23): Xaa in position 23 is Phe, Thr or Leu
  Variant (24)..(25): Xaa in position 24 to 25 is any amino acid
  Variant (26)..(26): Xaa in position 26 is Ser, Thr, Ala or Gly
  Variant (27)..(29): Xaa in position 27 to 29 is any amino acid
  Variant (30)..(30): Xaa in position 30 is Leu, Met, Phe, Tyr or Ile
  Variant (31)..(33): Xaa in position 31 to 33 is any amino acid
  Variant (34)..(34): Xaa in position 34 is Trp, Met, Ala or Gly
  Variant (35)..(39): Xaa in position 35 to 39 is any amino acid
  Variant (40)..(40): Xaa in position 40 is Ser, Thr or Ala
  Variant (41)..(41): Xaa in position 41 is Gly, Ala or Ser
  Variant (42)..(43): Xaa in position 42 to 43 is any amino acid
  Variant (44)..(44): Xaa in position 44 is Leu, Ile, Phe, Met or Tyr
  Variant (45)..(45): Xaa in position 45 is Leu or Val
  Variant (46)..(46): Xaa in position 46 is Glu or Asp
  Variant (47)..(49): Xaa in position 47 to 49 is any or no amino acid
  Variant (50)..(62): Xaa in position 50 to 62 is any amino acid
  Variant (63)..(63): Xaa in position 63 is Leu, Met, Ile, Val or Phe
  Variant (64)..(64): Xaa in position 64 is Ala, Thr, Val or Ser
  Variant (65)..(67): Xaa in position 65 to 67 is any amino acid
  Variant (68)..(68): Xaa in position 68 is Leu or Phe
  Variant (69)..(69): Xaa in position 69 is Gly or Ala
  Variant (70)..(74): Xaa in position 70 to 74 is any amino acid
  Variant (75)..(75): Xaa in position 75 is Ile, Val, Leu or Phe
  Variant (76)..(82): Xaa in position 76 to 82 is any amino acid
  Variant (83)..(83): Xaa in position 83 is Leu, Val, Phe or Asn
  Variant (84)..(84): Xaa in position 84 is Leu, Phe, Met, Gly or Ser
  Variant (85)..(85): Xaa in position 85 is Tyr, Gly or Val
  Variant (86)..(86): Xaa in position 86 is any amino acid
  Variant (87)..(87): Xaa in position 87 is Leu or Ile
  Variant (88)..(89): Xaa in position 88 to 89 is any amino acid
  Variant (92)..(94): Xaa in position 92 to 94 is any amino acid
  Variant (95)..(95): Xaa in position 95 is Gly, Ser or Ala
  Variant (96)..(96): Xaa in position 96 is Gly, Ser, Thr or Ala
XXXXXXXGXGXXXXPXXXXXXXXXXXXXXXXXXXXXXXXXXXXXXXXXXXXXXXXXXXXXXXXXXXXXXXXXXXXXXXXXXXXXXXXXXAYXXXXX

SEQ ID NO: 13468 - protein, 49 aa, Artificial sequence
  Consensus
  Variant (1)..(1): Xaa in position 1 is Ser, Ala or Thr
  Variant (2)..(2): Xaa in position 2 is Phe or Tyr
  Variant (4)..(4): Xaa in position 4 is Phe or Tyr
  Variant (5)..(5): Xaa in position 5 is His, Gln or Met
  Variant (6)..(7): Xaa in position 6 to 7 is any amino acid
  Variant (8)..(8): Xaa in position 8 is Val, Ile or Met
  Variant (9)..(9): Xaa in position 9 is Pro, Ala, Ser or Cys
  Variant (10)..(10): Xaa in position 10 is any amino acid
  Variant (11)..(11): Xaa in position 11 is Leu, Ile, Met or Val
  Variant (12)..(21): Xaa in position 12 to 21 is any amino acid
  Variant (22)..(22): Xaa in position 22 is any or no amino acid
  Variant (23)..(23): Xaa in position 23 is Leu, Val, Ile or Ala
  Variant (24)..(29): Xaa in position 24 to 29 is any amino acid
  Variant (31)..(34): Xaa in position 31 to 34 is any amino acid
  Variant (35)..(35): Xaa in position 35 is Leu or Phe
  Variant (36)..(37): Xaa in position 36 to 37 is any amino acid
  Variant (39)..(40): Xaa in position 39 to 40 is any amino acid
  Variant (42)..(46): Xaa in position 42 to 46 is any amino acid
  Variant (48)..(48): Xaa in position 48 is any amino acid
  Variant (49)..(49): Xaa in position 49 is Leu, Ile or Val
XXGXXXXXXXXXXXXXXXXXXXXXXXXXXGXXXXXXXYXXWXXXXXGXX

SEQ ID NO: 13469 - protein, 85 aa, Artificial sequence
  Consensus
  Variant (2)..(4): Xaa in position 2 to 4 is any amino acid
  Variant (6)..(6): Xaa in position 6 is Leu, Val, Ile or Met
  Variant (7)..(7): Xaa in position 7 is any amino acid
  Variant (8)..(8): Xaa in position 8 is Thr, Ser or Cys
  Variant (10)..(10): Xaa in position 10 is Phe or Leu
  Variant (11)..(11): Xaa in position 11 is Leu, Ile, Val or Met
  Variant (12)..(12): Xaa in position 12 is Gly, Ala or Ser
  Variant (13)..(13): Xaa in position 13 is Val, Ala or Ile
  Variant (14)..(14): Xaa in position 14 is Ala, Ser, Thr or Gly
  Variant (15)..(15): Xaa in position 15 is Leu, Met or Ile
  Variant (16)..(16): Xaa in position 16 is Gly, Ser or Ala
  Variant (17)..(17): Xaa in position 17 is Leu, Val or Met
  Variant (18)..(18): Xaa in position 18 is any amino acid
  Variant (19)..(19): Xaa in position 19 is Asp or Glu
  Variant (20)..(20): Xaa in position 20 is any amino acid
  Variant (21)..(21): Xaa in position 21 is Leu, Ile, Val, Met, Asn, Phe or Tyr
  Variant (22)..(22): Xaa in position 22 is any amino acid
  Variant (23)..(23): Xaa in position 23 is Asp, Ala or Glu
  Variant (24)..(29): Xaa in position 24 to 29 is any or no amino acid
  Variant (30)..(44): Xaa in position 30 to 44 is any amino acid
  Variant (45)..(45): Xaa in position 45 is Pro, Phe or Ile
  Variant (47)..(50): Xaa in position 47 to 50 is any amino acid
  Variant (51)..(51): Xaa in position 51 is Leu, Ile, Val or Met
  Variant (52)..(53): Xaa in position 52 to 53 is any amino acid
  Variant (55)..(55): Xaa in position 55 is any amino acid
  Variant (56)..(56): Xaa in position 56 is any or no amino acid
  Variant (57)..(57): Xaa in position 57 is Phe or Val
  Variant (58)..(58): Xaa in position 58 is Leu, Ile or Val
  Variant (59)..(60): Xaa in position 59 to 60 is any amino acid
  Variant (61)..(61): Xaa in position 61 is Leu or Ile
  Variant (62)..(62): Xaa in position 62 is any amino acid
  Variant (63)..(63): Xaa in position 63 is Tyr or Phe
  Variant (64)..(64): Xaa in position 64 is Ala or Ser
  Variant (65)..(65): Xaa in position 65 is Gly or Ala
  Variant (66)..(73): Xaa in position 66 to 73 is any amino acid
  Variant (74)..(74): Xaa in position 74 is any or no amino acid
  Variant (75)..(75): Xaa in position 75 is Ile, Phe, Val or Leu
  Variant (76)..(76): Xaa in position 76 is any amino acid
  Variant (78)..(79): Xaa in position 78 to 79 is any amino acid
  Variant (80)..(80): Xaa in position 80 is Leu, Met or Ile
  Variant (81)..(84): Xaa in position 81 to 84 is any amino acid
FXXXAXXXSXXXXXXXXXXXXXXXXXXXXXXXXXXXXXXXXXXXXPXXXXXXXPXXXXXXXXXXXXXXXXXXXXXXPXXXXXXXR

SEQ ID NO: 13470 - protein, 477 aa, Artificial sequence
  Consensus
  Variant (1)..(477): Xaa in all positions is any amino acid
XXXXXXXXXXXXXXXXXXXXXXXXXXXXXXXXXXXGXXXXXXGTXXGAGMXXXPXXXXXXXFXXXXXXXXXXWXXXXXXXXXXXEXXXXXXXXXXXXXXXXXXXXXLGXXXXXXXXXXXXXXXYXLXXAYXXXXGXXXXXXXXXXXXXXXXXXXXXXXXXXXXFXXXXXXXXXXXXXXVXXXXXXXXXXXXXXXXXXXXXXXXXXXXXXLXXXXXXXXXXXXXXXXXXXXXXXPXXXXSFGXHXXXPXXXXYXXXXXXXXXXXXXXXGXXXXLXXYXXWXXXXXGXXXXXXXXXXXXXXXXXXXXXXXXXXXXXXXXXXXXXXXXXXFXXXAXXXSFXGVXLGXXDXXXDXXXXXXXXXXXRXXXXXXTFXPPXXXXXXXPXXFXXAXXXAXXXXXXXXXXXXPXXXXXXXRXXXXXXXXXXXXXXXXXGGXXXXXXXXXXXXXXXXXXXXXXXXXXXXXXXXXXXXXXXXXXXXXX

SEQ ID NO: 13471 - protein, 54 aa, Artificial sequence
  Consensus
  Variant (1)..(1): Xaa in position 1 is Lys or Arg
  Variant (2)..(2): Xaa in position 2 is any amino acid
  Variant (3)..(3): Xaa in position 3 is Val, Ile or Ala
  Variant (4)..(4): Xaa in position 4 is any amino acid
  Variant (5)..(5): Xaa in position 5 is Val, Ile, Met, Leu or Cys
  Variant (7)..(7): Xaa in position 7 is any amino acid
  Variant (9)..(9): Xaa in position 9 is Phe, Leu, Ile, Tyr or Met
  Variant (11)..(11): Xaa in position 11 is Val, Ser or Ala
  Variant (13)..(13): Xaa in position 13 is Leu, Met, Val, Ile, Phe or Gln
  Variant (14)..(17): Xaa in position 14 to 17 is any or no amino acid
  Variant (18)..(21): Xaa in position 18 to 21 is any amino acid
  Variant (22)..(22): Xaa in position 22 is Ile or Val
  Variant (23)..(23): Xaa in position 23 is any amino acid
  Variant (24)..(24): Xaa in position 24 is Asp, Asn, Ser or Glu
  Variant (25)..(26): Xaa in position 25 to 26 is any amino acid
  Variant (27)..(27): Xaa in position 27 is Arg or Lys
  Variant (28)..(28): Xaa in position 28 is Ile, Leu or Phe
  Variant (29)..(33): Xaa in position 29 to 33 is any amino acid
  Variant (34)..(34): Xaa in position 34 is Thr, Ser or Ala
  Variant (35)..(35): Xaa in position 35 is Ile, Leu or Val
  Variant (36)..(37): Xaa in position 36 to 37 is any amino acid
  Variant (38)..(38): Xaa in position 38 is Leu, Ala, Val, Cys or Ile
  Variant (39)..(42): Xaa in position 39 to 42 is any amino acid
  Variant (43)..(45): Xaa in position 43 to 45 is any or no amino acid
  Variant (46)..(46): Xaa in position 46 is Val, Ile, Cys, Leu or Ala
  Variant (47)..(47): Xaa in position 47 is Ile, Val, Met, Leu or Ala
  Variant (48)..(48): Xaa in position 48 is Leu, Val or Ile
  Variant (49)..(49): Xaa in position 49 is any amino acid
  Variant (50)..(50): Xaa in position 50 is Ser, Ala or Thr
  Variant (52)..(52): Xaa in position 52 is Leu, Phe, Gln or Cys
  Variant (53)..(53): Xaa in position 53 is Gly or Ser
  Variant (54)..(54): Xaa in position 54 is Arg or Lys
XXXXXRXDXNXPXXXXXXXXXXXXXXXXXXXXXXXXXXXXXXXXXXXXXXHXXX

SEQ ID NO: 13472 - protein, 11 aa, Artificial sequence
  Consensus
  Variant (1)..(1): Xaa in position 1 is Gly, Lys, Asn or Ser
  Variant (2)..(2): Xaa in position 2 is any amino acid
  Variant (3)..(3): Xaa in position 3 is Val, Ile, Leu or Ala
  Variant (4)..(4): Xaa in position 4 is any amino acid
  Variant (5)..(5): Xaa in position 5 is Leu, Val, Met or Ile
  Variant (6)..(6): Xaa in position 6 is Leu, Phe, Val or Ile
  Variant (7)..(7): Xaa in position 7 is Glu or Gln
  Variant (9)..(9): Xaa in position 9 is Val, Leu, Thr, Ile or Cys
  Variant (11)..(11): Xaa in position 11 is Phe, Tyr, Ile, Met or Leu
XXXXXXXNXRX

SEQ ID NO: 13473 - protein, 15 aa, Artificial sequence
  Consensus
  Variant (1)..(1): Xaa in position 1 is Tyr or Phe
  Variant (2)..(2): Xaa in position 2 is Val, Ile or Leu
  Variant (3)..(3): Xaa in position 3 is any amino acid
  Variant (5)..(5): Xaa in position 5 is Ala or Gly
  Variant (7)..(7): Xaa in position 7 is Gly, Ser or Ala
  Variant (8)..(8): Xaa in position 8 is Thr, Ala, Val or Ser
  Variant (9)..(9): Xaa in position 9 is Ala, Ser, Val, Cys or Ile
  Variant (12)..(14): Xaa in position 12 to 14 is any amino acid
  Variant (15)..(15): Xaa in position 15 is Ser or Thr
XXXDXFXXXHRXXXX

SEQ ID NO: 13474 - protein, 61 aa, Artificial sequence
  Consensus
  Variant (2)..(2): Xaa in position 2 is any amino acid
  Variant (3)..(3): Xaa in position 3 is Leu, Val, Thr or Ser
  Variant (4)..(4): Xaa in position 4 is Met, Leu, Val, Ile or Phe
  Variant (5)..(6): Xaa in position 5 to 6 is any amino acid
  Variant (8)..(8): Xaa in position 8 is Leu, Ile, Val or Met
  Variant (9)..(11): Xaa in position 9 to 11 is any or no amino acid
  Variant (12)..(21): Xaa in position 12 to 21 is any amino acid
  Variant (23)..(25): Xaa in position 23 to 25 is any amino acid
  Variant (26)..(26): Xaa in position 26 is Ile, Val or Ala
  Variant (27)..(27): Xaa in position 27 is Leu, Val, Ile or Met
  Variant (28)..(28): Xaa in position 28 is Gly or Ala
  Variant (30)..(30): Xaa in position 30 is Ala or Ser
  Variant (32)..(32): Xaa in position 32 is Val, Ile, Ala or Leu
  Variant (33)..(33): Xaa in position 33 is any amino acid
  Variant (34)..(34): Xaa in position 34 is Asp, Thr, Ser, Gly or Glu
  Variant (35)..(35): Xaa in position 35 is Lys, Ser or Thr
  Variant (36)..(36): Xaa in position 36 is Ile, Leu, Phe or Val
  Variant (37)..(37): Xaa in position 37 is any amino acid
  Variant (38)..(38): Xaa in position 38 is Val, Leu, Ile or Ala
  Variant (39)..(39): Xaa in position 39 is Ile, Leu, Ala, Met or Val
  Variant (40)..(41): Xaa in position 40 to 41 is any amino acid
  Variant (42)..(42): Xaa in position 42 is Leu, Met, Val or Ile
  Variant (43)..(44): Xaa in position 43 to 44 is any or no amino acid
  Variant (45)..(47): Xaa in position 45 to 47 is any amino acid
  Variant (48)..(48): Xaa in position 48 is Val, Ala, Cys, Ile or Ser
  Variant (49)..(50): Xaa in position 49 to 50 is any amino acid
  Variant (51)..(51): Xaa in position 51 is Leu, Ile, Val or Met
  Variant (52)..(52): Xaa in position 52 is Ile, Leu, Val or Phe
  Variant (53)..(53): Xaa in position 53 is Ile, Val, Leu or Thr
  Variant (54)..(54): Xaa in position 54 is Gly, Thr, Cys, Ala or Ser
  Variant (56)..(56): Xaa in position 56 is Gly, Ala, Val or Leu
  Variant (57)..(57): Xaa in position 57 is Met, Ile, Val or Leu
  Variant (58)..(60): Xaa in position 58 to 60 is any amino acid
GXXXXXEXXXXXXXXXXXXXXPXXXXXXGXKXXXXXXXXXXXXXXXXXXXXXXXGXXXXXF

SEQ ID NO: 13475 - protein, 85 aa, Artificial sequence
  Consensus
  Variant (1)..(1): Xaa in position 1 is Ile, Val, Leu or Ala
  Variant (2)..(2): Xaa in position 2 is Val, Ile, Leu or Phe
  Variant (3)..(3): Xaa in position 3 is Trp, Ala, Leu or Met
  Variant (4)..(4): Xaa in position 4 is Asn or Arg
  Variant (7)..(7): Xaa in position 7 is any amino acid
  Variant (9)..(9): Xaa in position 9 is Val, Ala, Met, Ile or Leu
  Variant (10)..(10): Xaa in position 10 is Phe, Tyr, Ile or Ser
  Variant (12)..(12): Xaa in position 12 is any or no amino acid
  Variant (13)..(15): Xaa in position 13 to 15 is any amino acid
  Variant (16)..(16): Xaa in position 16 is Phe or Tyr
  Variant (17)..(18): Xaa in position 17 to 18 is any amino acid
  Variant (19)..(19): Xaa in position 19 is Gly or Ala
  Variant (20)..(20): Xaa in position 20 is Thr or Ser
  Variant (21)..(22): Xaa in position 21 to 22 is any amino acid
  Variant (23)..(23): Xaa in position 23 is Val, Ile, Leu, Met, Ala or Thr
  Variant (24)..(32): Xaa in position 24 to 32 is any amino acid
  Variant (33)..(37): Xaa in position 33 to 37 is any or no amino acid
  Variant (38)..(38): Xaa in position 38 is Ser, Thr, Val or Lys
  Variant (39)..(39): Xaa in position 39 is Ile, Val or Leu
  Variant (40)..(40): Xaa in position 40 is any amino acid
  Variant (44)..(44): Xaa in position 44 is Asp, His or Glu
  Variant (45)..(45): Xaa in position 45 is Thr, Ser, Leu, Ala or Ile
  Variant (46)..(48): Xaa in position 46 to 48 is any or no amino acid
  Variant (49)..(61): Xaa in position 49 to 61 is any amino acid
  Variant (62)..(62): Xaa in position 62 is His, Tyr, Phe or Trp
  Variant (63)..(63): Xaa in position 63 is Ile, Val or Leu
  Variant (66)..(66): Xaa in position 66 is Gly or Ala
  Variant (70)..(70): Xaa in position 70 is any amino acid
  Variant (71)..(71): Xaa in position 71 is Leu, Ile or Met
  Variant (72)..(72): Xaa in position 72 is any amino acid
  Variant (73)..(73): Xaa in position 73 is Leu, Phe, Tyr, Trp or Ala
  Variant (74)..(74): Xaa in position 74 is Leu, Met, Val, Ile or Phe
  Variant (75)..(75): Xaa in position 75 is Glu, Ala, Ser, Gln or Gly
  Variant (76)..(78): Xaa in position 76 to 78 is any amino acid
  Variant (79)..(79): Xaa in position 79 is Leu or Met
  Variant (80)..(80): Xaa in position 80 is Pro or Val
  Variant (81)..(81): Xaa in position 81 is Gly, Ala or Val
  Variant (82)..(82): Xaa in position 82 is Val, Ile, Leu, Thr or Phe
  Variant (83)..(84): Xaa in position 83 to 84 is any amino acid
  Variant (85)..(85): Xaa in position 85 is Leu, Ile or Val
XXXXGPXGXXEXXXXXXXXXXXXXXXXXXXXXXXXXXXXXGGGXXXXXXXXXXXXXXXXXXXXSTXGGAXXXXXXXXXXXXXXXX

SEQ ID NO: 13476 - protein, 554 aa, Artificial sequence
  Consensus
  Variant (2)..(2): Xaa in position 2 is any amino acid
  Variant (4)..(5): Xaa in position 4 to 5 is any amino acid
  Variant (7)..(7): Xaa in position 7 is any amino acid
  Variant (9)..(9): Xaa in position 9 is any amino acid
  Variant (13)..(26): Xaa in position 13 to 26 is any amino acid
  Variant (29)..(32): Xaa in position 29 to 32 is any amino acid
  Variant (36)..(49): Xaa in position 36 to 49 is any amino acid
  Variant (56)..(63): Xaa in position 56 to 63 is any amino acid
  Variant (64)..(160): Xaa in position 64 to 160 is any or no amino acid
  Variant (162)..(162): Xaa in position 162 is any amino acid
  Variant (164)..(167): Xaa in position 164 to 167 is any amino acid
  Variant (169)..(171): Xaa in position 169 to 171 is any amino acid
  Variant (173)..(179): Xaa in position 173 to 179 is any amino acid
  Variant (181)..(200): Xaa in position 181 to 200 is any amino acid
  Variant (202)..(205): Xaa in position 202 to 205 is any amino acid
  Variant (209)..(209): Xaa in position 209 is any amino acid
  Variant (212)..(214): Xaa in position 212 to 214 is any amino acid
  Variant (216)..(259): Xaa in position 216 to 259 is any amino acid
  Variant (261)..(261): Xaa in position 261 is any amino acid
  Variant (266)..(266): Xaa in position 266 is any amino acid
  Variant (270)..(272): Xaa in position 270 to 272 is any amino acid
  Variant (274)..(275): Xaa in position 274 to 275 is any amino acid
  Variant (277)..(290): Xaa in position 277 to 290 is any amino acid
  Variant (292)..(292): Xaa in position 292 is any amino acid
  Variant (294)..(296): Xaa in position 294 to 296 is any amino acid
  Variant (298)..(308): Xaa in position 298 to 308 is any amino acid
  Variant (310)..(311): Xaa in position 310 to 311 is any amino acid
  Variant (313)..(315): Xaa in position 313 to 315 is any amino acid
  Variant (317)..(317): Xaa in position 317 is any amino acid
  Variant (320)..(320): Xaa in position 320 is any amino acid
  Variant (323)..(324): Xaa in position 323 to 324 is any amino acid
  Variant (326)..(343): Xaa in position 326 to 343 is any amino acid
  Variant (346)..(349): Xaa in position 346 to 349 is any amino acid
  Variant (352)..(362): Xaa in position 352 to 362 is any amino acid
  Variant (364)..(364): Xaa in position 364 is any amino acid
  Variant (366)..(401): Xaa in position 366 to 401 is any amino acid
  Variant (403)..(403): Xaa in position 403 is any amino acid
  Variant (405)..(442): Xaa in position 405 to 442 is any amino acid
  Variant (444)..(444): Xaa in position 444 is any amino acid
  Variant (446)..(471): Xaa in position 446 to 471 is any amino acid
  Variant (476)..(476): Xaa in position 476 is any amino acid
  Variant (481)..(484): Xaa in position 481 to 484 is any amino acid
  Variant (486)..(487): Xaa in position 486 to 487 is any amino acid
  Variant (490)..(509): Xaa in position 490 to 509 is any amino acid
  Variant (514)..(532): Xaa in position 514 to 532 is any amino acid
  Variant (539)..(539): Xaa in position 539 is any amino acid
  Variant (542)..(543): Xaa in position 542 to 543 is any amino acid
  Variant (547)..(547): Xaa in position 547 is any amino acid
  Variant (550)..(553): Xaa in position 550 to 553 is any amino acid
KXVXXRXDXNVPXXXXXXXXXXXXXXRIXXXXPTIXXXXXXXXXXXXXXSHLGRPXXXXXXXXXXXXXXXXXXXXXXXXXXXXXXXXXXXXXXXXXXXXXXXXXXXXXXXXXXXXXXXXXXXXXXXXXXXXXXXXXXXXXXXXXXXXXXXXXXXXXXXXXLXPXXXXLXXXLXXXXXXXVXXXXXXXXXXXXXXXXXXXXGXXXXLENXRFXXXEXXXXXXXXXXXXXXXXXXXXXXXXXXXXXXXXXXXXXXXXXXXXVXDAFGXAHRXXXSXXGXXXXXXXXXXXXXXGXLXXXEXXXXXXXXXXXPXXPXXXIXGGXKVXXKXXXXXXXXXXXXXXXXXXGGXXXXTFXXXXXXXXXXXGXSXXXXXXXXXXXXXXXXXXXXXXXXXXXXXXXXXXXXPXDXXXXXXXXXXXXXXXXXXXXXXXXXXXXXXXXXXXXXXDXGXXXXXXXXXXXXXXXXXXXXXXXXXXWNGPXGVFEXXXXFXXGTXXXXXXXXXXXXXXXXXXXXGGGDXXXXXXXXXXXXXXXXXXXSTGGGAXLEXXEGKXLPXXXXL

SEQ ID NO: 13477 - protein, 80 aa, Artificial sequence
  Consensus
  Variant (1)..(1): Xaa in position 1 is Val, Ile or Ala
  Variant (2)..(2): Xaa in position 2 is Val, Ile, Phe or Leu
  Variant (3)..(3): Xaa in position 3 is Pro or Ala
  Variant (5)..(5): Xaa in position 5 is Gly, Ser or Asp
  Variant (8)..(8): Xaa in position 8 is any amino acid
  Variant (10)..(10): Xaa in position 10 is any amino acid
  Variant (12)..(12): Xaa in position 12 is Tyr or Gly
  Variant (15)..(15): Xaa in position 15 is Ser, Thr, Ala or Asn
  Variant (16)..(16): Xaa in position 16 is Tyr or Phe
  Variant (17)..(17): Xaa in position 17 is Trp, Phe, Met or Leu
  Variant (18)..(18): Xaa in position 18 is Ile, Thr, Glu, Val or Met
  Variant (19)..(19): Xaa in position 19 is any amino acid
  Variant (20)..(20): Xaa in position 20 is Leu, Glu, Lys, Arg or Ile
  Variant (23)..(30): Xaa in position 23 to 30 is any amino acid
  Variant (31)..(42): Xaa in position 31 to 42 is any or no amino acid
  Variant (43)..(43): Xaa in position 43 is Ala, Val, Ser, Thr or Leu
  Variant (44)..(48): Xaa in position 44 to 48 is any amino acid
  Variant (49)..(49): Xaa in position 49 is Asn, His or Gln
  Variant (50)..(50): Xaa in position 50 is Phe, Leu or Met
  Variant (51)..(53): Xaa in position 51 to 53 is any amino acid
  Variant (54)..(54): Xaa in position 54 is Ile, Val or Leu
  Variant (55)..(56): Xaa in position 55 to 56 is any amino acid
  Variant (57)..(57): Xaa in position 57 is Tyr, Phe, Ile, His or Trp
  Variant (58)..(58): Xaa in position 58 is Gly, Ser or Asn
  Variant (59)..(59): Xaa in position 59 is any amino acid
  Variant (60)..(60): Xaa in position 60 is Ile, Val or Ala
  Variant (61)..(61): Xaa in position 61 is Pro or Leu
  Variant (63)..(63): Xaa in position 63 is Gly or Ala
  Variant (64)..(64): Xaa in position 64 is Asn, Gly, Ala, Thr or Ser
  Variant (66)..(66): Xaa in position 66 is any amino acid
  Variant (67)..(67): Xaa in position 67 is Tyr or Phe
  Variant (68)..(68): Xaa in position 68 is Tyr or Met
  Variant (69)..(70): Xaa in position 69 to 70 is any amino acid
  Variant (72)..(72): Xaa in position 72 is Ser or Thr
  Variant (75)..(75): Xaa in position 75 is Pro or Ser
  Variant (76)..(76): Xaa in position 76 is Phe, Leu, Val or Tyr
  Variant (77)..(77): Xaa in position 77 is Leu or Phe
  Variant (78)..(79): Xaa in position 78 to 79 is any amino acid
  Variant (80)..(80): Xaa in position 80 is Met, Cys or Leu
XXXGXRFXEXYXWDXXXXXXGLXXXXXXXXXXXXXXXXXXXXXXXXXXXXXXXXXXXXXXXNXXRXXXXXRXQPXXXXXX

SEQ ID NO: 13478 - protein, 57 aa, Artificial sequence
  Consensus
  Variant (1)..(1): Xaa in position 1 is Tyr, Phe, Trp or His
  Variant (2)..(3): Xaa in position 2 to 3 is any amino acid
  Variant (4)..(4): Xaa in position 4 is Leu, Asp, Ile or Val
  Variant (5)..(5): Xaa in position 5 is Arg, Ala, Lys or Gly
  Variant (6)..(6): Xaa in position 6 is Ala, Ser, Gly or Thr
  Variant (7)..(7): Xaa in position 7 is any amino acid
  Variant (8)..(8): Xaa in position 8 is Ala, Arg or Cys
  Variant (9)..(9): Xaa in position 9 is Glu or Ala
  Variant (10)..(10): Xaa in position 10 is Ser or Thr
  Variant (12)..(12): Xaa in position 12 is any amino acid
  Variant (14)..(14): Xaa in position 14 is Phe, Thr, Tyr or Ile
  Variant (15)..(15): Xaa in position 15 is Ser or Thr
  Variant (16)..(16): Xaa in position 16 is Ser, Tyr, Thr or Asn
  Variant (18)..(18): Xaa in position 18 is Trp, Leu or Phe
  Variant (19)..(35): Xaa in position 19 to 35 is any or no amino acid
  Variant (36)..(37): Xaa in position 36 to 37 is any amino acid
  Variant (38)..(38): Xaa in position 38 is Thr, Cys, Ala, Ile or Val
  Variant (39)..(41): Xaa in position 39 to 41 is any amino acid
  Variant (42)..(42): Xaa in position 42 is Val, Ala, Ile or Leu
  Variant (43)..(43): Xaa in position 43 is Pro, Thr, Ala or Val
  Variant (44)..(44): Xaa in position 44 is Val, Ile or Ala
  Variant (45)..(45): Xaa in position 45 is Asp or Glu
  Variant (46)..(46): Xaa in position 46 is Leu or Val
  Variant (48)..(48): Xaa in position 48 is Ala, Ser, Thr, Gly or Val
  Variant (49)..(49): Xaa in position 49 is Leu, Phe, Ile or Tyr
  Variant (50)..(50): Xaa in position 50 is Leu, Met, Ile or Phe
  Variant (51)..(53): Xaa in position 51 to 53 is any amino acid
  Variant (54)..(54): Xaa in position 54 is Glu, Ala, Met, Phe or Leu
  Variant (55)..(56): Xaa in position 55 to 56 is any amino acid
  Variant (57)..(57): Xaa in position 57 is Ile, Leu, Met or Thr
XXXXXXXXXXGXDXXXRXXXXXXXXXXXXXXXXXXXXXXXXXXXXXNXXXXXXXXXX

SEQ ID NO: 13479 - protein, 119 aa, Artificial sequence
  Consensus
  Variant (4)..(4): Xaa in position 4 is any amino acid
  Variant (5)..(5): Xaa in position 5 is Pro or Glu
  Variant (6)..(6): Xaa in position 6 is Asn, Phe or Tyr
  Variant (7)..(7): Xaa in position 7 is Gly, Ala, Val or Ser
  Variant (9)..(9): Xaa in position 9 is Ala, Pro or Ser
  Variant (11)..(13): Xaa in position 11 to 13 is any amino acid
  Variant (14)..(14): Xaa in position 14 is Leu, Met, Ile or Val
  Variant (15)..(15): Xaa in position 15 is Ala, Leu, Ile, Val or Met
  Variant (16)..(17): Xaa in position 16 to 17 is any amino acid
  Variant (18)..(18): Xaa in position 18 is Gly or Ala
  Variant (19)..(19): Xaa in position 19 is Leu, Phe, Ser, Met or Ile
  Variant (20)..(27): Xaa in position 20 to 27 is any amino acid
  Variant (28)..(39): Xaa in position 28 to 39 is any or no amino acid
  Variant (40)..(40): Xaa in position 40 is Ala, Gly, Thr or Ser
  Variant (41)..(42): Xaa in position 41 to 42 is any amino acid
  Variant (43)..(43): Xaa in position 43 is Leu, Ile, Trp, Met or Val
  Variant (44)..(44): Xaa in position 44 is Ala, Gly, Val, Thr or Ser
  Variant (45)..(46): Xaa in position 45 to 46 is any amino acid
  Variant (47)..(47): Xaa in position 47 is Trp, Phe, Tyr or Leu
  Variant (48)..(48): Xaa in position 48 is Leu, Val or Ile
  Variant (49)..(54): Xaa in position 49 to 54 is any amino acid
  Variant (55)..(55): Xaa in position 55 is Phe, Tyr or Trp
  Variant (56)..(60): Xaa in position 56 to 60 is any amino acid
  Variant (61)..(78): Xaa in position 61 to 78 is any or no amino acid
  Variant (79)..(79): Xaa in position 79 is Met, Val, Leu, Ile or Phe
  Variant (80)..(80): Xaa in position 80 is any amino acid
  Variant (83)..(83): Xaa in position 83 is Tyr, Phe or Leu
  Variant (84)..(86): Xaa in position 84 to 86 is any amino acid
  Variant (87)..(98): Xaa in position 87 to 98 is any or no amino acid
  Variant (99)..(99): Xaa in position 99 is Gly or Ala
  Variant (100)..(100): Xaa in position 100 is Gly, Asn, Ser, Tyr or Thr
  Variant (101)..(101): Xaa in position 101 is Gly, Gln, Ser or Lys
  Variant (102)..(102): Xaa in position 102 is Gly or Ser
  Variant (103)..(105): Xaa in position 103 to 105 is any amino acid
  Variant (106)..(113): Xaa in position 106 to 113 is any or no amino acid
  Variant (118)..(118): Xaa in position 118 is Thr, Val, Ser or Asp
  Variant (119)..(119): Xaa in position 119 is Asn or Glu
QWDXXXXWXPXXXXXXXXXXXXXXXXXXXXXXXXXXXXXXXXXXXXXXXXXXXXXXXXXXXXXXXXXXXXXXXXXXXXXXEKXXXXXXXXXXXXXXXXXXXXXXXXXXXXXXXGFGWXX

SEQ ID NO: 13480 - protein, 518 aa, Artificial sequence
  Consensus
  Variant (1)..(518): Xaa in all positions is any amino acid
PGGRFXEXYXWDSYXXXXGLXXXXXXXXXXXXXXXXXXXXXXXXXXNXXXXXXXXGXXXNXXRXYYXXRSQPPXXXXMXXXXXXXXXXXXXXXXXXXXXXXXXXXXXXXXEXXXXXXXXXXXXXXXXXXXXXXXXXXXXXXXXXXXXXXXXXXXXXXXXXXXXXXXXXXXXXXXXXXXXXXXXXXXXXXXXXXXXXXXESGXDXXXRXXXXXXXXXXXXXXXXXXXXXXXXXXXDLNXXLXXXXXXXXXXXXXXXXXXXXXXXXXXXXXXXXXXXXXXXXXXXXXXXXXXXXXXXXXWXXXXXXXXDYXXXXXXXXXXXXXXXXXXXXXXXXXXXXXXXXXXXXXXXXXLXXXXXXXXXXXXXXXXXXXXXXXXXXXXXXXXXXXGXXXXXXXXXXXXXQWDXPXXWXPXXXXXXXGLXXXXXXXXXXXXXXXXXXXXAXXXXXXXXXXXXXXXXXXXXXXXXXXXXXXXXXXXXXXXXEKYXXXXXXXXXXXXXXXGXXGXXXXXXXXXXXGFGWXN

SEQ ID NO: 13481 - protein, 26 aa, Artificial sequence
  Consensus
  Variant (1)..(1): Xaa in position 1 is Gly or Ala
  Variant (2)..(2): Xaa in position 2 is Leu, Val, Met or Ile
  Variant (3)..(3): Xaa in position 3 is any amino acid
  Variant (5)..(5): Xaa in position 5 is Leu or Met
  Variant (6)..(6): Xaa in position 6 is Ala or Gly
  Variant (7)..(7): Xaa in position 7 is any amino acid
  Variant (10)..(10): Xaa in position 10 is any amino acid
  Variant (12)..(12): Xaa in position 12 is Leu, Ile, Met or Phe
  Variant (13)..(13): Xaa in position 13 is Ala, Ile, Val, Arg or Gly
  Variant (14)..(14): Xaa in position 14 is any amino acid
  Variant (15)..(15): Xaa in position 15 is Asn or Arg
  Variant (16)..(19): Xaa in position 16 to 19 is any amino acid
  Variant (20)..(20): Xaa in position 20 is Gly or Lys
  Variant (21)..(24): Xaa in position 21 to 24 is any amino acid
  Variant (25)..(25): Xaa in position 25 is Val, Ala, Ile, Gly or Leu
  Variant (26)..(26): Xaa in position 26 is Tyr, Phe or His
XXXGXXXMGXNXXXXXXXXXXXXXXX

SEQ ID NO: 13482 - protein, 85 aa, Artificial sequence
  Consensus
  Variant (1)..(1): Xaa in position 1 is Leu or Ile
  Variant (2)..(3): Xaa in position 2 to 3 is any amino acid
  Variant (5)..(5): Xaa in position 5 is Arg or Lys
  Variant (6)..(6): Xaa in position 6 is any amino acid
  Variant (7)..(7): Xaa in position 7 is Ile, Val, Ala or Leu
  Variant (8)..(8): Xaa in position 8 is Ile, Met, Leu, Trp, Phe or Val
  Variant (9)..(9): Xaa in position 9 is Leu, Ile, Val or Met
  Variant (10)..(10): Xaa in position 10 is Met or Leu
  Variant (11)..(11): Xaa in position 11 is Val, Ile or Leu
  Variant (12)..(12): Xaa in position 12 is any amino acid
  Variant (13)..(13): Xaa in position 13 is Ala, Ser or His
  Variant (14)..(14): Xaa in position 14 is Gly or Ala
  Variant (15)..(16): Xaa in position 15 to 16 is any amino acid
  Variant (17)..(17): Xaa in position 17 is Val, Thr or Asp
  Variant (18)..(19): Xaa in position 18 to 19 is any amino acid
  Variant (20)..(23): Xaa in position 20 to 23 is any or no amino acid
  Variant (24)..(24): Xaa in position 24 is Ile, Leu, Val, Met or Thr
  Variant (25)..(26): Xaa in position 25 to 26 is any amino acid
  Variant (27)..(27): Xaa in position 27 is Leu, Ile, Val or Phe
  Variant (28)..(30): Xaa in position 28 to 30 is any amino acid
  Variant (31)..(31): Xaa in position 31 is Leu, Met or Phe
  Variant (32)..(33): Xaa in position 32 to 33 is any amino acid
  Variant (34)..(34): Xaa in position 34 is Gly, Asp or Glu
  Variant (36)..(36): Xaa in position 36 is any amino acid
  Variant (37)..(37): Xaa in position 37 is Ile, Leu, Val or Met
  Variant (38)..(38): Xaa in position 38 is Ile, Val or Met
  Variant (39)..(39): Xaa in position 39 is Asp or Glu
  Variant (40)..(40): Xaa in position 40 is Gly, Ala, Thr or Ser
  Variant (43)..(43): Xaa in position 43 is Ser, Thr, Ala or Glu
  Variant (44)..(44): Xaa in position 44 is any amino acid
  Variant (45)..(45): Xaa in position 45 is Tyr, Phe or Trp
  Variant (46)..(47): Xaa in position 46 to 47 is any amino acid
  Variant (48)..(48): Xaa in position 48 is Thr, Ser, Asp or Gln
  Variant (49)..(50): Xaa in position 49 to 50 is any amino acid
  Variant (51)..(51): Xaa in position 51 is Arg or His
  Variant (52)..(56): Xaa in position 52 to 56 is any or no amino acid
  Variant (57)..(60): Xaa in position 57 to 60 is any amino acid
  Variant (61)..(61): Xaa in position 61 is Ile, Leu, Phe or Val
  Variant (62)..(62): Xaa in position 62 is any amino acid
  Variant (63)..(63): Xaa in position 63 is Phe, Tyr or Leu
  Variant (64)..(64): Xaa in position 64 is Val, Ile, Leu, Met or Phe
  Variant (65)..(65): Xaa in position 65 is Gly or Asp
  Variant (66)..(66): Xaa in position 66 is any amino acid
  Variant (68)..(68): Xaa in position 68 is Val, Ile or Thr
  Variant (72)..(73): Xaa in position 72 to 73 is any amino acid
  Variant (75)..(75): Xaa in position 75 is Ala or Leu
  Variant (76)..(76): Xaa in position 76 is Arg, Leu, Glu, Gln or Asp
  Variant (77)..(77): Xaa in position 77 is any amino acid
  Variant (79)..(79): Xaa in position 79 is Pro, Tyr or Ala
  Variant (80)..(80): Xaa in position 80 is Ser, Cys or Ala
  Variant (81)..(81): Xaa in position 81 is Leu, Ile, Met or Phe
  Variant (82)..(82): Xaa in position 82 is Met or Phe
  Variant (83)..(83): Xaa in position 83 is Pro, Val, Ile or Tyr
XXXPXXXXXXXXXXXXXXXXXXXXXXXXXXXXXXDXXXXXGNXXXXXXXXXXXXXXXXXXXXXXXXGXSGGXXGXXXGXXXXXGG

SEQ ID NO: 13483 - protein, 28 aa, Artificial sequence
  Consensus
  Variant (1)..(1): Xaa in position 1 is Gly or Ser
  Variant (2)..(2): Xaa in position 2 is Ala or Ser
  Variant (4)..(4): Xaa in position 4 is His, Asn or Ser
  Variant (5)..(5): Xaa in position 5 is Phe, Tyr or Cys
  Variant (6)..(6): Xaa in position 6 is Val, Leu, Thr or Ser
  Variant (8)..(8): Xaa in position 8 is Met, Thr or Ala
  Variant (9)..(9): Xaa in position 9 is Val, Ile or Tyr
  Variant (12)..(12): Xaa in position 12 is Gly or Ala
  Variant (13)..(13): Xaa in position 13 is Ile or Gly
  Variant (16)..(16): Xaa in position 16 is Gly, Ala or Ser
  Variant (17)..(17): Xaa in position 17 is Asp, Met, Ile, Val or Leu
  Variant (18)..(18): Xaa in position 18 is Met, Leu, Glu or Ile
  Variant (19)..(19): Xaa in position 19 is Gln or Ala
  Variant (20)..(20): Xaa in position 20 is Leu, Ala, Ile, Val or Met
  Variant (21)..(21): Xaa in position 21 is Ile, Tyr, Leu, Trp or Phe
  Variant (22)..(22): Xaa in position 22 is Ala, Cys, Ser, Gly or Thr
  Variant (24)..(24): Xaa in position 24 is Ala, Gly, Ser, Val, Thr or Ile
  Variant (25)..(25): Xaa in position 25 is Tyr, Phe, Trp or Leu
  Variant (26)..(26): Xaa in position 26 is any amino acid
  Variant (27)..(27): Xaa in position 27 is Leu, Ile, Val or Phe
  Variant (28)..(28): Xaa in position 28 is Leu or Met
XXGXXXKXXHNXXEYXXXXXXXEXXXXX

SEQ ID NO: 13484 - protein, 88 aa, Artificial sequence
  Consensus
  Variant (2)..(2): Xaa in position 2 is Asn, Arg, Lys, Ser or Gln
  Variant (3)..(4): Xaa in position 3 to 4 is any or no amino acid
  Variant (5)..(7): Xaa in position 5 to 7 is any amino acid
  Variant (8)..(8): Xaa in position 8 is Leu, Ile or Val
  Variant (9)..(9): Xaa in position 9 is any amino acid
  Variant (10)..(10): Xaa in position 10 is Ser or Gly
  Variant (11)..(11): Xaa in position 11 is Tyr, Phe or Trp
  Variant (12)..(12): Xaa in position 12 is Leu or Met
  Variant (13)..(13): Xaa in position 13 is Ile, Leu, Val or Met
  Variant (14)..(14): Xaa in position 14 is Glu, Asp, Gly or Arg
  Variant (15)..(15): Xaa in position 15 is Ile or Leu
  Variant (16)..(16): Xaa in position 16 is Thr, Ser or Ala
  Variant (17)..(18): Xaa in position 17 to 18 is any amino acid
  Variant (19)..(19): Xaa in position 19 is Ile, Ala, Val or Cys
  Variant (20)..(20): Xaa in position 20 is Leu, Phe, Ala, Met or Cys
  Variant (21)..(28): Xaa in position 21 to 28 is any amino acid
  Variant (29)..(50): Xaa in position 29 to 50 is any or no amino acid
  Variant (51)..(51): Xaa in position 51 is Ile, Val, Leu, Phe or Tyr
  Variant (52)..(52): Xaa in position 52 is any amino acid
  Variant (53)..(53): Xaa in position 53 is Asp, Gly or Pro
  Variant (54)..(57): Xaa in position 54 to 57 is any amino acid
  Variant (58)..(58): Xaa in position 58 is Lys or Ser
  Variant (60)..(60): Xaa in position 60 is Thr or Glu
  Variant (62)..(62): Xaa in position 62 is any amino acid
  Variant (64)..(64): Xaa in position 64 is Thr, Ser or Met
  Variant (65)..(67): Xaa in position 65 to 67 is any amino acid
  Variant (68)..(68): Xaa in position 68 is Ala or Ser
  Variant (69)..(73): Xaa in position 69 to 73 is any amino acid
  Variant (74)..(74): Xaa in position 74 is Pro, Ala or Ser
  Variant (75)..(75): Xaa in position 75 is any amino acid
  Variant (76)..(76): Xaa in position 76 is Pro, Thr or Ser
  Variant (77)..(77): Xaa in position 77 is any amino acid
  Variant (78)..(78): Xaa in position 78 is Ile, Leu, Val or Met
  Variant (79)..(80): Xaa in position 79 to 80 is any amino acid
  Variant (81)..(81): Xaa in position 81 is Ala or Ser
  Variant (82)..(82): Xaa in position 82 is Val or Leu
  Variant (83)..(84): Xaa in position 83 to 84 is any amino acid
  Variant (86)..(87): Xaa in position 86 to 87 is any amino acid
  Variant (88)..(88): Xaa in position 88 is Ser or Thr
WXXXXXXXXXXXXXXXXXXXXXXXXXXXXXXXXXXXXXXXXXXXXXXXXXXXXXXXXXGXGXWXXXXXXXXXXXXXXXXXXXXXRXXX

SEQ ID NO: 13485 - protein, 582 aa, Artificial sequence
  Consensus
  Variant (2)..(3): Xaa in position 2 to 3 is any amino acid
  Variant (6)..(7): Xaa in position 6 to 7 is any amino acid
  Variant (10)..(10): Xaa in position 10 is any amino acid
  Variant (12)..(14): Xaa in position 12 to 14 is any amino acid
  Variant (16)..(19): Xaa in position 16 to 19 is any amino acid
  Variant (21)..(26): Xaa in position 21 to 26 is any amino acid
  Variant (29)..(63): Xaa in position 29 to 63 is any amino acid
  Variant (65)..(66): Xaa in position 65 to 66 is any amino acid
  Variant (69)..(73): Xaa in position 69 to 73 is any amino acid
  Variant (75)..(75): Xaa in position 75 is any amino acid
  Variant (78)..(80): Xaa in position 78 to 80 is any amino acid
  Variant (82)..(86): Xaa in position 82 to 86 is any amino acid
  Variant (88)..(89): Xaa in position 88 to 89 is any amino acid
  Variant (91)..(93): Xaa in position 91 to 93 is any amino acid
  Variant (95)..(96): Xaa in position 95 to 96 is any amino acid
  Variant (99)..(100): Xaa in position 99 to 100 is any amino acid
  Variant (106)..(109): Xaa in position 106 to 109 is any amino acid
  Variant (111)..(112): Xaa in position 111 to 112 is any amino acid
  Variant (115)..(122): Xaa in position 115 to 122 is any amino acid
  Variant (124)..(127): Xaa in position 124 to 127 is any amino acid
  Variant (129)..(129): Xaa in position 129 is any amino acid
  Variant (131)..(131): Xaa in position 131 is any amino acid
  Variant (135)..(136): Xaa in position 135 to 136 is any amino acid
  Variant (139)..(140): Xaa in position 139 to 140 is any amino acid
  Variant (143)..(144): Xaa in position 143 to 144 is any amino acid
  Variant (146)..(146): Xaa in position 146 is any amino acid
  Variant (149)..(164): Xaa in position 149 to 164 is any amino acid
  Variant (166)..(189): Xaa in position 166 to 189 is any amino acid
  Variant (191)..(194): Xaa in position 191 to 194 is any amino acid
  Variant (196)..(197): Xaa in position 196 to 197 is any amino acid
  Variant (198)..(237): Xaa in position 198 to 237 is any or no amino acid
  Variant (239)..(239): Xaa in position 239 is any amino acid
  Variant (242)..(242): Xaa in position 242 is any amino acid
  Variant (253)..(254): Xaa in position 253 to 254 is any amino acid
  Variant (257)..(257): Xaa in position 257 is any amino acid
  Variant (259)..(259): Xaa in position 259 is any amino acid
  Variant (261)..(261): Xaa in position 261 is any amino acid
  Variant (263)..(299): Xaa in position 263 to 299 is any amino acid
  Variant (301)..(302): Xaa in position 301 to 302 is any amino acid
  Variant (305)..(309): Xaa in position 305 to 309 is any amino acid
  Variant (311)..(311): Xaa in position 311 is any amino acid
  Variant (313)..(313): Xaa in position 313 is any amino acid
  Variant (315)..(316): Xaa in position 315 to 316 is any amino acid
  Variant (319)..(354): Xaa in position 319 to 354 is any amino acid
  Variant (356)..(359): Xaa in position 356 to 359 is any amino acid
  Variant (364)..(364): Xaa in position 364 is any amino acid
  Variant (367)..(369): Xaa in position 367 to 369 is any amino acid
  Variant (371)..(379): Xaa in position 371 to 379 is any amino acid
  Variant (381)..(386): Xaa in position 381 to 386 is any amino acid
  Variant (388)..(389): Xaa in position 388 to 389 is any amino acid
  Variant (391)..(395): Xaa in position 391 to 395 is any amino acid
  Variant (397)..(445): Xaa in position 397 to 445 is any amino acid
  Variant (447)..(474): Xaa in position 447 to 474 is any amino acid
  Variant (478)..(482): Xaa in position 478 to 482 is any amino acid
  Variant (484)..(499): Xaa in position 484 to 499 is any amino acid
  Variant (501)..(576): Xaa in position 501 to 576 is any amino acid
  Variant (578)..(578): Xaa in position 578 is any amino acid
  Variant (581)..(581): Xaa in position 581 is any amino acid
GXXGLXXMGXNXXXNXXXXGXXXXXXNRXXXXXXXXXXXXXXXXXXXXXXXXXXXXXXXXXXXLXXPRXXXXXVXAGXXXDXXXXXIXXLXXXLXXGDXXIDGGNXXXXDXXRRXXXXXXXXGXXXXGXGXSGGXXGAXXGPXXMXGGXXXXXXXXXXXXXXXXAXXXXXXXXXXXXXXXXXXXXXXXXCXXXXGXXXXXXXXXXXXXXXXXXXXXXXXXXXXXXXXXXXXXXXXXXGXGHXVKMVHNGIEYXXMQXIXEXYXXXXXXXXXXXXXXXXXXXXXXXXXXXXXXXXXXXXXFXXWNXXXXXLXSXLXXITXXXXXXXXXXXXXXXXXXXXXXXXXXXXXXXXXXXXDXXXXKGTGXWTXXXAXXXXXXXXXIXXXXXXRXXSXXXXXRXXXXXXXXXXXXXXXXXXXXXXXXXXXXXXXXXXXXXXXXXXXXXXXXXQXXXXXXXXXXXXXXXXXXXXXXXXXXXXGCIXXXXXLXXXXXXXXXXXXXXXXLXXXXXXXXXXXXXXXXXXXXXXXXXXXXXXXXXXXXXXXXXXXXXXXXXXXXXXXXXXXXXXXXXXXXXXXXXXXXDXFGXH

SEQ ID NO: 13486 - protein, 68 aa, Artificial sequence
  Consensus
  Variant (1)..(1): Xaa in position 1 is Val, Leu or Ile
  Variant (2)..(11): Xaa in position 2 to 11 is any amino acid
  Variant (12)..(12): Xaa in position 12 is Val, Ala, Ile, Thr or Leu
  Variant (13)..(14): Xaa in position 13 to 14 is any amino acid
  Variant (16)..(18): Xaa in position 16 to 18 is any amino acid
  Variant (19)..(19): Xaa in position 19 is Ala, Ser or Leu
  Variant (20)..(28): Xaa in position 20 to 28 is any or no amino acid
  Variant (29)..(30): Xaa in position 29 to 30 is any amino acid
  Variant (31)..(31): Xaa in position 31 is Trp or Phe
  Variant (32)..(32): Xaa in position 32 is any or no amino acid
  Variant (33)..(38): Xaa in position 33 to 38 is any amino acid
  Variant (39)..(39): Xaa in position 39 is Arg, Lys or Ile
  Variant (40)..(42): Xaa in position 40 to 42 is any amino acid
  Variant (43)..(43): Xaa in position 43 is Leu, Phe, Ile or Met
  Variant (44)..(44): Xaa in position 44 is any amino acid
  Variant (45)..(45): Xaa in position 45 is Lys, Arg, Gln, Asn, His or Ala
  Variant (46)..(46): Xaa in position 46 is any amino acid
  Variant (47)..(47): Xaa in position 47 is Ala, Gly or Ser
  Variant (48)..(49): Xaa in position 48 to 49 is any amino acid
  Variant (50)..(50): Xaa in position 50 is Met, Leu, Ile, Val, Phe, Tyr or Ala
  Variant (51)..(52): Xaa in position 51 to 52 is any or no amino acid
  Variant (53)..(57): Xaa in position 53 to 57 is any amino acid
  Variant (58)..(58): Xaa in position 58 is Leu, Phe, Ile, Met, Ala or Val
  Variant (59)..(64): Xaa in position 59 to 64 is any amino acid
  Variant (65)..(65): Xaa in position 65 is Glu, Gly, Asp or Asn
  Variant (66)..(66): Xaa in position 66 is any amino acid
  Variant (67)..(67): Xaa in position 67 is Gly, Ser or Ala
XXXXXXXXXXXXXXAXXXXXXXXXXXXXXXXXXXXXXXXXXXXXXXXXXXXXXXXXXXXXXXXXXXXK

SEQ ID NO: 13487 - protein, 69 aa, Artificial sequence
  Consensus
  Variant (2)..(2): Xaa in position 2 is Asn or Cys
  Variant (3)..(4): Xaa in position 3 to 4 is any amino acid
  Variant (5)..(5): Xaa in position 5 is Val, Leu or Ile
  Variant (6)..(6): Xaa in position 6 is any amino acid
  Variant (8)..(8): Xaa in position 8 is Pro or Thr
  Variant (9)..(9): Xaa in position 9 is Ala or Ser
  Variant (10)..(11): Xaa in position 10 to 11 is any amino acid
  Variant (12)..(12): Xaa in position 12 is Thr, Ala, Ser, Gln or Ile
  Variant (13)..(21): Xaa in position 13 to 21 is any amino acid
  Variant (22)..(22): Xaa in position 22 is Leu, Ile, Met, Val, Cys or Lys
  Variant (23)..(23): Xaa in position 23 is Leu, Phe, Met, Ile or Ala
  Variant (24)..(24): Xaa in position 24 is any amino acid
  Variant (25)..(25): Xaa in position 25 is Glu, Gln, Asp or Ala
  Variant (26)..(26): Xaa in position 26 is Ala or Ser
  Variant (28)..(28): Xaa in position 28 is Leu, Val, Phe or Ile
  Variant (30)..(31): Xaa in position 30 to 31 is any amino acid
  Variant (32)..(32): Xaa in position 32 is Val, Ala or Ile
  Variant (33)..(33): Xaa in position 33 is Leu, Val, Ile, Phe or Ala
  Variant (34)..(34): Xaa in position 34 is Asn, Gln, Ala or Ile
  Variant (35)..(35): Xaa in position 35 is Phe, Leu, Ile, Tyr or Val
  Variant (36)..(36): Xaa in position 36 is Val, Leu or Ile
  Variant (37)..(37): Xaa in position 37 is any amino acid
  Variant (38)..(38): Xaa in position 38 is Gly, Ala or Ser
  Variant (39)..(41): Xaa in position 39 to 41 is any or no amino acid
  Variant (42)..(47): Xaa in position 42 to 47 is any amino acid
  Variant (48)..(48): Xaa in position 48 is Leu, Ile, Val, Ala or Met
  Variant (49)..(50): Xaa in position 49 to 50 is any amino acid
  Variant (51)..(51): Xaa in position 51 is His, Asp, Ser, Asn or Ala
  Variant (52)..(53): Xaa in position 52 to 53 is any amino acid
  Variant (54)..(54): Xaa in position 54 is Val, Ile, Thr, Leu or Phe
  Variant (55)..(56): Xaa in position 55 to 56 is any amino acid
  Variant (57)..(57): Xaa in position 57 is Val, Ile or Leu
  Variant (58)..(58): Xaa in position 58 is any amino acid
  Variant (59)..(59): Xaa in position 59 is Phe, Leu or Met
  Variant (62)..(62): Xaa in position 62 is Ser or Gly
  Variant (63)..(64): Xaa in position 63 to 64 is any amino acid
  Variant (65)..(65): Xaa in position 65 is Val or Thr
  Variant (66)..(66): Xaa in position 66 is Gly, Ala or Phe
  Variant (67)..(68): Xaa in position 67 to 68 is any amino acid
  Variant (69)..(69): Xaa in position 69 is Ile, Leu or Met
GXXXXXKXXXXXXXXXXXXXXXXXXXGXPXXXXXXXXXXXXXXXXXXXXXXXXXXXXXXTGXXXXXXXX

SEQ ID NO: 13488 - protein, 44 aa, Artificial sequence
  Consensus
  Variant (2)..(2): Xaa in position 2 is Thr, Leu, Met or Cys
  Variant (4)..(4): Xaa in position 4 is Gly or Ser
  Variant (5)..(5): Xaa in position 5 is any amino acid
  Variant (6)..(6): Xaa in position 6 is Asn, Asp, Ser or Ala
  Variant (7)..(8): Xaa in position 7 to 8 is any amino acid
  Variant (9)..(9): Xaa in position 9 is Ile, Val, Leu, Phe or Met
  Variant (10)..(10): Xaa in position 10 is Val, Ile, Ala or Leu
  Variant (11)..(13): Xaa in position 11 to 13 is any amino acid
  Variant (14)..(14): Xaa in position 14 is Ala, Val, Ser or Ile
  Variant (15)..(15): Xaa in position 15 is any or no amino acid
  Variant (16)..(19): Xaa in position 16 to 19 is any amino acid
  Variant (20)..(20): Xaa in position 20 is Ala, Val, Leu or Ile
  Variant (21)..(26): Xaa in position 21 to 26 is any amino acid
  Variant (27)..(27): Xaa in position 27 is Ser, Gly or Ala
  Variant (28)..(28): Xaa in position 28 is any amino acid
  Variant (29)..(29): Xaa in position 29 is Phe, Met or Tyr
  Variant (30)..(32): Xaa in position 30 to 32 is any amino acid
  Variant (34)..(34): Xaa in position 34 is Gln or Glu
  Variant (35)..(35): Xaa in position 35 is any amino acid
  Variant (37)..(37): Xaa in position 37 is Ser, Ile, Thr, Cys or Val
  Variant (38)..(38): Xaa in position 38 is Ala or Ser
  Variant (39)..(39): Xaa in position 39 is any amino acid
  Variant (40)..(40): Xaa in position 40 is Ser, Arg, Asn, Glu or Gln
  Variant (41)..(41): Xaa in position 41 is Arg, Val, Leu or Ile
  Variant (42)..(42): Xaa in position 42 is any amino acid
  Variant (43)..(43): Xaa in position 43 is Tyr, Phe, Cys, Ile, Val or Leu
  Variant (44)..(44): Xaa in position 44 is Val, Leu, Ile or Ala
EXGXXXXXXXXXXXXXXXXXXXXXXXXXXXXXGXXCXXXXXXXX

SEQ ID NO: 13489 - protein, 28 aa, Artificial sequence
  Consensus
  Variant (1)..(1): Xaa in position 1 is Gly, Pro or Glu
  Variant (2)..(2): Xaa in position 2 is any amino acid
  Variant (3)..(3): Xaa in position 3 is Phe, Tyr or Leu
  Variant (4)..(5): Xaa in position 4 to 5 is any amino acid
  Variant (7)..(7): Xaa in position 7 is any amino acid
  Variant (8)..(8): Xaa in position 8 is Ile, Val, Leu or Ala
  Variant (9)..(9): Xaa in position 9 is Phe, Ile, Val, Leu, Tyr or Lys
  Variant (10)..(11): Xaa in position 10 to 11 is any or no amino acid
  Variant (12)..(21): Xaa in position 12 to 21 is any amino acid
  Variant (23)..(23): Xaa in position 23 is any amino acid
  Variant (25)..(25): Xaa in position 25 is Gly, Leu or Ala
  Variant (27)..(27): Xaa in position 27 is Val, Ile or Leu
  Variant (28)..(28): Xaa in position 28 is Leu, Val, Ile, Gln or Met
XXXXXPXXXXXXXXXXXXXXXEXFXPXX

SEQ ID NO: 13490 - protein, 52 aa, Artificial sequence
  Consensus
  Variant (1)..(1): Xaa in position 1 is Tyr or Phe
  Variant (2)..(2): Xaa in position 2 is Gly or Ala
  Variant (4)..(5): Xaa in position 4 to 5 is any amino acid
  Variant (6)..(6): Xaa in position 6 is Gly, Ala, Ser or Tyr
  Variant (7)..(7): Xaa in position 7 is Val, Ile, Leu or Phe
  Variant (8)..(8): Xaa in position 8 is any amino acid
  Variant (9)..(9): Xaa in position 9 is Thr, Ser or Ala
  Variant (10)..(14): Xaa in position 10 to 14 is any or no amino acid
  Variant (15)..(44): Xaa in position 15 to 44 is any amino acid
  Variant (45)..(45): Xaa in position 45 is Pro, Trp, Tyr or Phe
  Variant (46)..(46): Xaa in position 46 is Phe, His or Tyr
  Variant (47)..(47): Xaa in position 47 is Gly, Thr or Val
  Variant (49)..(51): Xaa in position 49 to 51 is any amino acid
  Variant (52)..(52): Xaa in position 52 is Ser or Thr
XXLXXXXXXXXXXXXXXXXXXXXXXXXXXXXXXXXXXXXXXXXXXXXGXXXX

SEQ ID NO: 13491 - protein, 475 aa, Artificial sequence
  Consensus
  Variant (1)..(475): Xaa in all positions is any amino acid
AXXXXXXXAXXXAXXXXXXXXXXXWXXXXXXXRXXXXXXXAXXXXXXXXXXXXXXXXXXXGKXXXXXXXXXXXXXXXXXXXXXXXXXXXXXXXXXXXXXXXXXXXXXXXXXXXXGXXXXXXPXNXXXXXXXXXXXXXXXXGNXXXXKPXXXXXXXXXXXXXXXXXAGXPXXXXXXXXGXXXXXXGXXXXXXXXXXXXXFTGSXXXXXXXXXXXXXXXXXXXXXXXXXXXXEXGGXXXXXXXXXAXXXXXXXXXXXXXXFXXXGQXCSAXXXXXXXXXXXXXXXXXXXXXXXXXXXXXGXXXXXXXXXXXXXXXXXXGPXXXXXXXXXXXXXXXXXXXXXXXXXXXXXXXXXXXXXXXXXXXGXXXXPTXXXXXXXXXXXXXXEXFGPXXXXXXXXXXXXXXXXXXXXXXXNXXXYGLXXXXXXXXXXXXXXXXXXXXXXXXXXXXXXXXXXXXXXXXXPFGGXXXSXXGXXXXXG

SEQ ID NO: 13492 - protein, 55 aa, Artificial sequence
  Consensus
  Variant (1)..(1): Xaa in position 1 is Gly, Ala or Val
  Variant (2)..(2): Xaa in position 2 is Thr or Ser
  Variant (3)..(3): Xaa in position 3 is Gly or Asn
  Variant (4)..(4): Xaa in position 4 is Ala or Ser
  Variant (5)..(5): Xaa in position 5 is Leu, Cys, Ile or Phe
  Variant (6)..(14): Xaa in position 6 to 14 is any or no amino acid
  Variant (15)..(27): Xaa in position 15 to 27 is any amino acid
  Variant (28)..(28): Xaa in position 28 is Val, Ile or Leu
  Variant (29)..(30): Xaa in position 29 to 30 is any amino acid
  Variant (31)..(31): Xaa in position 31 is Ser, Pro or Thr
  Variant (32)..(34): Xaa in position 32 to 34 is any amino acid
  Variant (35)..(35): Xaa in position 35 is Trp or Tyr
  Variant (36)..(37): Xaa in position 36 to 37 is any amino acid
  Variant (38)..(38): Xaa in position 38 is His or Tyr
  Variant (39)..(40): Xaa in position 39 to 40 is any amino acid
  Variant (41)..(41): Xaa in position 41 is Ile, Val, Leu or Met
  Variant (42)..(51): Xaa in position 42 to 51 is any amino acid
  Variant (52)..(52): Xaa in position 52 is any or no amino acid
  Variant (53)..(53): Xaa in position 53 is Tyr or Phe
  Variant (54)..(55): Xaa in position 54 to 55 is any amino acid
XXXXXXXXXXXXXXXXXXXXXXXXXXXXXXXXXXXXXXXXXXXXXXXXXXXXXXX

SEQ ID NO: 13493 - protein, 93 aa, Artificial sequence
  Consensus
  Variant (1)..(1): Xaa in position 1 is Leu, Val, Ile or Met
  Variant (2)..(2): Xaa in position 2 is Leu, Phe, Ile or Val
  Variant (3)..(3): Xaa in position 3 is His, Leu or Gln
  Variant (4)..(5): Xaa in position 4 to 5 is any amino acid
  Variant (6)..(6): Xaa in position 6 is Cys, Ala or Pro
  Variant (7)..(7): Xaa in position 7 is His or Asn
  Variant (10)..(10): Xaa in position 10 is Thr or Ser
  Variant (12)..(13): Xaa in position 12 to 13 is any amino acid
  Variant (14)..(14): Xaa in position 14 is Pro, Leu, Ile, Met or Phe
  Variant (15)..(18): Xaa in position 15 to 18 is any amino acid
  Variant (19)..(19): Xaa in position 19 is Trp or Val
  Variant (20)..(21): Xaa in position 20 to 21 is any amino acid
  Variant (22)..(22): Xaa in position 22 is Ile, Leu or Val
  Variant (23)..(27): Xaa in position 23 to 27 is any or no amino acid
  Variant (28)..(38): Xaa in position 28 to 38 is any amino acid
  Variant (39)..(39): Xaa in position 39 is Phe, Leu, Ile or Val
  Variant (40)..(40): Xaa in position 40 is any amino acid
  Variant (42)..(42): Xaa in position 42 is any amino acid
  Variant (45)..(45): Xaa in position 45 is Gln, Tyr, Leu or Phe
  Variant (47)..(47): Xaa in position 47 is Phe, Leu or Tyr
  Variant (48)..(48): Xaa in position 48 is any or no amino acid
  Variant (49)..(54): Xaa in position 49 to 54 is any amino acid
  Variant (55)..(55): Xaa in position 55 is Asp, Gln or Glu
  Variant (56)..(67): Xaa in position 56 to 67 is any or no amino acid
  Variant (68)..(77): Xaa in position 68 to 77 is any amino acid
  Variant (78)..(78): Xaa in position 78 is Ala, Cys, Ser, Thr, Ile or Leu
  Variant (79)..(79): Xaa in position 79 is any amino acid
  Variant (80)..(80): Xaa in position 80 is Ser or Gly
  Variant (81)..(81): Xaa in position 81 is Phe, Tyr, Cys, Ala or Leu
  Variant (82)..(82): Xaa in position 82 is Ser, Ala or Thr
  Variant (84)..(84): Xaa in position 84 is Asn, Ser, Ile or Glu
  Variant (85)..(85): Xaa in position 85 is any amino acid
  Variant (86)..(86): Xaa in position 86 is Gly, Ser or Phe
  Variant (87)..(87): Xaa in position 87 is Leu, Met, Ile or Ala
  Variant (88)..(88): Xaa in position 88 is Tyr or Trp
  Variant (89)..(89): Xaa in position 89 is Gly, Asn, Ala, Arg or Ser
  Variant (90)..(90): Xaa in position 90 is any amino acid
  Variant (92)..(92): Xaa in position 92 is Val, Ile, Ala, Thr or Cys
XXXXXXXNPXGXXXXXXXXXXXXXXXXXXXXXXXXXXXXXDXAYXGXXXXXXXXXXXXXXXXXXXXXXXXXXXXXXXXXXXXKXXXXXXXRXG

SEQ ID NO: 13494 - protein, 120 aa, Artificial sequence
  Consensus
  Variant (1)..(1): Xaa in position 1 is Leu, Val, Met, Ile or Thr
  Variant (2)..(5): Xaa in position 2 to 5 is any amino acid
  Variant (6)..(6): Xaa in position 6 is Arg or Gln
  Variant (7)..(9): Xaa in position 7 to 9 is any amino acid
  Variant (10)..(10): Xaa in position 10 is Ser or Thr
  Variant (11)..(11): Xaa in position 11 is Asn, Ser, Met or Thr
  Variant (12)..(12): Xaa in position 12 is Pro, Ala, Ser or Gly
  Variant (13)..(13): Xaa in position 13 is Pro, Ala or Ser
  Variant (14)..(15): Xaa in position 14 to 15 is any amino acid
  Variant (16)..(16): Xaa in position 16 is Gly, Ser or Thr
  Variant (17)..(18): Xaa in position 17 to 18 is any amino acid
  Variant (19)..(19): Xaa in position 19 is Ile, Val, Leu, Ala, Thr or Phe
  Variant (20)..(20): Xaa in position 20 is Val, Ala or Ile
  Variant (21)..(22): Xaa in position 21 to 22 is any amino acid
  Variant (23)..(23): Xaa in position 23 is Ile, Val, Thr, Ala or Leu
  Variant (24)..(24): Xaa in position 24 is Leu, Val, Met or Phe
  Variant (25)..(25): Xaa in position 25 is any or no amino acid
  Variant (26)..(29): Xaa in position 26 to 29 is any amino acid
  Variant (30)..(30): Xaa in position 30 is Leu, Met or Phe
  Variant (31)..(33): Xaa in position 31 to 33 is any amino acid
  Variant (34)..(34): Xaa in position 34 is Trp, Phe, Lys or Ile
  Variant (35)..(36): Xaa in position 35 to 36 is any amino acid
  Variant (37)..(37): Xaa in position 37 is Glu, Asp, Asn, Ser or Lys
  Variant (38)..(38): Xaa in position 38 is Leu, Val, Met or Ile
  Variant (39)..(40): Xaa in position 39 to 40 is any amino acid
  Variant (41)..(41): Xaa in position 41 is Met, Ile, Leu or Val
  Variant (42)..(43): Xaa in position 42 to 43 is any amino acid
  Variant (44)..(44): Xaa in position 44 is Arg, Ser or His
  Variant (45)..(45): Xaa in position 45 is Ile, Leu, Met, Tyr, Val or Ala
  Variant (46)..(47): Xaa in position 46 to 47 is any amino acid
  Variant (48)..(48): Xaa in position 48 is Met, Ile, Leu, Val, Thr or Arg
  Variant (49)..(49): Xaa in position 49 is Arg or Lys
  Variant (50)..(51): Xaa in position 50 to 51 is any amino acid
  Variant (52)..(52): Xaa in position 52 is Leu, Phe, Met, Val or Ile
  Variant (53)..(61): Xaa in position 53 to 61 is any or no amino acid
  Variant (62)..(69): Xaa in position 62 to 69 is any amino acid
  Variant (70)..(70): Xaa in position 70 is Trp, Phe or Leu
  Variant (71)..(72): Xaa in position 71 to 72 is any amino acid
  Variant (73)..(73): Xaa in position 73 is Ile, Leu, Val, Tyr or Phe
  Variant (74)..(77): Xaa in position 74 to 77 is any amino acid
  Variant (79)..(79): Xaa in position 79 is Met, Phe, Tyr or Leu
  Variant (81)..(83): Xaa in position 81 to 83 is any amino acid
  Variant (84)..(84): Xaa in position 84 is Gly, Lys, Pro or Arg
  Variant (85)..(89): Xaa in position 85 to 89 is any or no amino acid
  Variant (90)..(102): Xaa in position 90 to 102 is any amino acid
  Variant (103)..(103): Xaa in position 103 is Ile or Val
  Variant (104)..(104): Xaa in position 104 is Tyr, Gly or Phe
  Variant (105)..(108): Xaa in position 105 to 108 is any amino acid
  Variant (109)..(109): Xaa in position 109 is Gly, Ser or Asn
  Variant (110)..(110): Xaa in position 110 is any or no amino acid
  Variant (111)..(111): Xaa in position 111 is any or no amino acid
  Variant (112)..(112): Xaa in position 112 is any or no amino acid
  Variant (113)..(113): Xaa in position 113 is any or no amino acid
  Variant (115)..(115): Xaa in position 115 is Ile, Met, Val, Ala, Phe or Leu
  Variant (116)..(116): Xaa in position 116 is any amino acid
  Variant (117)..(117): Xaa in position 117 is Val, Met, Leu, Ile or Phe
  Variant (118)..(118): Xaa in position 118 is Ala, Ser, Cys or Asn
  Variant (119)..(119): Xaa in position 119 is Gly, Ala, Cys or Ser
  Variant (120)..(120): Xaa in position 120 is Leu, Ile, Val or Met
XXXXXXXXXXXXXXXXXXXXXXXXXXXXXXXXXXXXXXXXXXXXXXXXXXXXXXXXXXXXXXXXXXXXXXXXXXXXXGXFXXXXXXXXXXXXXXXXXXXXXXXXXXXXXXXXXRXXXXXX

SEQ ID NO: 13495 - protein, 437 aa, Artificial sequence
  Consensus
  Variant (1)..(437): Xaa in all positions is any amino acid
DXXXXXXXXXXXXXXXDXXXXKXNLXXGXYXXXXXXXXXXXXVXXAXXXXXXXXXXXXXXXYXXXXGXXXXXXXXXXLXXXXXXXXXXXXXXXXXXRXXXXQXXXGXGALXXXXXXXXXXXXXXXXXXXXXXXXXXXPXWXNHXXXFXXXGXXXXXXYXYXXXXXXXXXXXXXXXXXXXXXXXXXXXXXXXXXXXLHXCXHNPTGXDXXXXXWXXXXXXXXXXXXXXXXXXXXXDXAYQGFXXGXXXXDAXXXRXXXXXXXXXXXXXXXXXXXSXXKXXXLYXERXGXXXXXXXXXXXXXXXXXXXXXXXXXXXXXXXXXXXXRXXXSXPPXXGXXXXXXXLXXXXXLXXXWXXXXXXMXXRXXXXRXXXXXXLXXXXXXXXXXXXXXXXXXXQXGMFXXXGXXXXQXXXXXXXXXXXXXXYXXXXGXXXXRXXXXG

SEQ ID NO: 13496 - protein, 48 aa, Artificial sequence
  Consensus
  Variant (1)..(1): Xaa in position 1 is Tyr, Phe or Trp
  Variant (2)..(5): Xaa in position 2 to 5 is any amino acid
  Variant (6)..(6): Xaa in position 6 is Ala, Ile or Val
  Variant (7)..(8): Xaa in position 7 to 8 is any amino acid
  Variant (9)..(9): Xaa in position 9 is Leu, Ile or Val
  Variant (10)..(10): Xaa in position 10 is any amino acid
  Variant (11)..(11): Xaa in position 11 is Phe, Leu, Ile or Val
  Variant (12)..(12): Xaa in position 12 is Leu, Val or Tyr
  Variant (13)..(13): Xaa in position 13 is Asp or Asn
  Variant (14)..(14): Xaa in position 14 is Ile, Leu or Val
  Variant (15)..(15): Xaa in position 15 is any amino acid
  Variant (16)..(16): Xaa in position 16 is Ala, Gly or Ser
  Variant (17)..(17): Xaa in position 17 is Ser, Thr, Ala or Phe
  Variant (18)..(21): Xaa in position 18 to 21 is any or no amino acid
  Variant (22)..(30): Xaa in position 22 to 30 is any amino acid
  Variant (31)..(31): Xaa in position 31 is Val, Ile or Leu
  Variant (32)..(33): Xaa in position 32 to 33 is any amino acid
  Variant (34)..(34): Xaa in position 34 is Thr, Val, Ile, Ala, Met or Leu
  Variant (35)..(39): Xaa in position 35 to 39 is any amino acid
  Variant (40)..(40): Xaa in position 40 is Ile, Val, Met or Leu
  Variant (41)..(41): Xaa in position 41 is Pro or Ser
  Variant (42)..(42): Xaa in position 42 is Leu, Phe, Val or Ile
  Variant (43)..(43): Xaa in position 43 is any amino acid
  Variant (44)..(44): Xaa in position 44 is Val, Ile, Tyr or Leu
  Variant (45)..(45): Xaa in position 45 is Gly or Ala
  Variant (48)..(48): Xaa in position 48 is Ile, Val or Leu
XXXXXXXXXXXXXXXXXXXXXXXXXXXXXXXXXXXXXXXXXXXXXGGX

SEQ ID NO: 13497 - protein, 48 aa, Artificial sequence
  Consensus
  Variant (2)..(2): Xaa in position 2 is Ala, Val, Ile or Cys
  Variant (3)..(3): Xaa in position 3 is any amino acid
  Variant (4)..(4): Xaa in position 4 is Lys or Arg
  Variant (5)..(5): Xaa in position 5 is Val or Ile
  Variant (6)..(6): Xaa in position 6 is any amino acid
  Variant (7)..(7): Xaa in position 7 is Ile, Leu, Val or Met
  Variant (8)..(8): Xaa in position 8 is Asn, Gly or Ser
  Variant (9)..(9): Xaa in position 9 is Ser or Thr
  Variant (10)..(10): Xaa in position 10 is any amino acid
  Variant (12)..(12): Xaa in position 12 is Val, Ile or Leu
  Variant (13)..(17): Xaa in position 13 to 17 is any amino acid
  Variant (18)..(18): Xaa in position 18 is Ile, Val, Leu, Tyr or Phe
  Variant (19)..(32): Xaa in position 19 to 32 is any or no amino acid
  Variant (33)..(40): Xaa in position 33 to 40 is any amino acid
  Variant (41)..(41): Xaa in position 41 is Gln, Glu, Gly, Ser, Ala or Asp
  Variant (42)..(42): Xaa in position 42 is any amino acid
  Variant (43)..(43): Xaa in position 43 is Ile, Val, Leu or Thr
  Variant (44)..(44): Xaa in position 44 is any amino acid
  Variant (45)..(45): Xaa in position 45 is Val, Ile, Leu or Ala
  Variant (46)..(46): Xaa in position 46 is any amino acid
  Variant (47)..(47): Xaa in position 47 is Ile, Val or Leu
GXXXXXXXXXAXXXXXXXXXXXXXXXXXXXXXXXXXXXXXXXXXXXXD

SEQ ID NO: 13498 - protein, 41 aa, Artificial sequence
  Consensus
  Variant (1)..(1): Xaa in position 1 is Gly or Lys
  Variant (2)..(2): Xaa in position 2 is Ala, Val, Cys or Ile
  Variant (3)..(3): Xaa in position 3 is Gly, Ala, Glu, Ser or Gln
  Variant (4)..(4): Xaa in position 4 is any amino acid
  Variant (5)..(5): Xaa in position 5 is Ile, Leu, Phe or Val
  Variant (6)..(6): Xaa in position 6 is Leu, Val, Ile, Cys or Phe
  Variant (7)..(7): Xaa in position 7 is Leu, Val, Phe, Tyr or Ile
  Variant (8)..(8): Xaa in position 8 is Thr or Asn
  Variant (9)..(9): Xaa in position 9 is any amino acid
  Variant (10)..(10): Xaa in position 10 is Met, Ile or Val
  Variant (11)..(12): Xaa in position 11 to 12 is any amino acid
  Variant (13)..(13): Xaa in position 13 is Asp or Glu
  Variant (15)..(17): Xaa in position 15 to 17 is any amino acid
  Variant (19)..(19): Xaa in position 19 is any amino acid
  Variant (20)..(20): Xaa in position 20 is Asp, Asn or Glu
  Variant (21)..(26): Xaa in position 21 to 26 is any amino acid
  Variant (27)..(27): Xaa in position 27 is Val, Ile, Leu, Phe, Met or Ala
  Variant (28)..(29): Xaa in position 28 to 29 is any or no amino acid
  Variant (30)..(34): Xaa in position 30 to 34 is any amino acid
  Variant (35)..(35): Xaa in position 35 is Pro, Asn, Ser, Lys or Arg
  Variant (36)..(36): Xaa in position 36 is Val, Leu or Ile
  Variant (37)..(37): Xaa in position 37 is Ile, Val or Thr
  Variant (38)..(38): Xaa in position 38 is Ala, Val, Ile or Tyr
  Variant (39)..(39): Xaa in position 39 is Ser or Leu
  Variant (40)..(40): Xaa in position 40 is Gly or Ser
XXXXXXXXXXXXXGXXXGXXXXXXXXXXXXXXXXXXXXXXG

SEQ ID NO: 13499 - protein, 287 aa, Artificial sequence
  Consensus
  Variant (1)..(287): Xaa in all positions is any amino acid
RXIPXLDXXXXXXXXXXXXXXXXXXGXXVXXXXXXXXXXXXXXXXXXXXGXPXXXAXXXXXXGADEXXXXDXXXXXXXXXXXXXXXXXXXXXXXXXXXPXXVGGGXXXXXXXXXXXXXXXXXXXXXXXXXGXDKXXXXXXAXXXPXXXXXXXXXXXXXXXXXXXXXXXGXQXXVXXXDXXXXXXXXXXXXXXXXXXXXXXXXXXXXXXXXXXXXXXXXXXXGXXXXXXXXXXXXXXXXXXXXXXGAGEIXXXXXXXDGXXXGXXXXXXXXXXXXXXXXPXIASGGXG

SEQ ID NO: 13500 - protein, 108 aa, Artificial sequence
  Consensus
  Variant (1)..(1): Xaa in position 1 is Val or Ile
  Variant (2)..(3): Xaa in position 2 to 3 is any amino acid
  Variant (4)..(4): Xaa in position 4 is Phe or Leu
  Variant (6)..(6): Xaa in position 6 is any amino acid
  Variant (7)..(7): Xaa in position 7 is Ser, Ala or Val
  Variant (8)..(8): Xaa in position 8 is any amino acid
  Variant (10)..(10): Xaa in position 10 is Tyr or His
  Variant (11)..(11): Xaa in position 11 is Ile, Val or Leu
  Variant (12)..(14): Xaa in position 12 to 14 is any amino acid
  Variant (15)..(15): Xaa in position 15 is Arg, His or Ser
  Variant (16)..(17): Xaa in position 16 to 17 is any amino acid
  Variant (18)..(18): Xaa in position 18 is Thr, Lys or Val
  Variant (19)..(19): Xaa in position 19 is any amino acid
  Variant (21)..(21): Xaa in position 21 is Ile, Leu, Val or Ala
  Variant (22)..(24): Xaa in position 22 to 24 is any amino acid
  Variant (25)..(25): Xaa in position 25 is Gly, Ala, Ser or Asp
  Variant (26)..(26): Xaa in position 26 is Glu, Asp, Arg or Asn
  Variant (27)..(27): Xaa in position 27 is any amino acid
  Variant (28)..(28): Xaa in position 28 is Ile, Val or Leu
  Variant (29)..(32): Xaa in position 29 to 32 is any or no amino acid
  Variant (33)..(42): Xaa in position 33 to 42 is any amino acid
  Variant (44)..(44): Xaa in position 44 is Ile, Leu, Val or Phe
  Variant (45)..(45): Xaa in position 45 is any amino acid
  Variant (46)..(46): Xaa in position 46 is Leu or Phe
  Variant (47)..(47): Xaa in position 47 is Leu or Met
  Variant (48)..(49): Xaa in position 48 to 49 is any amino acid
  Variant (50)..(50): Xaa in position 50 is Leu or Met
  Variant (52)..(52): Xaa in position 52 is Ile, Val, Leu, Met or Ala
  Variant (53)..(54): Xaa in position 53 to 54 is any amino acid
  Variant (55)..(55): Xaa in position 55 is Val or Ile
  Variant (56)..(56): Xaa in position 56 is Leu, Val or Ile
  Variant (57)..(57): Xaa in position 57 is Val or Ile
  Variant (58)..(58): Xaa in position 58 is any amino acid
  Variant (60)..(62): Xaa in position 60 to 62 is any amino acid
  Variant (63)..(63): Xaa in position 63 is Gln or Phe
  Variant (64)..(64): Xaa in position 64 is Ile, Val or Leu
  Variant (65)..(67): Xaa in position 65 to 67 is any amino acid
  Variant (68)..(68): Xaa in position 68 is Leu or Ala
  Variant (69)..(69): Xaa in position 69 is any or no amino acid
  Variant (70)..(76): Xaa in position 70 to 76 is any amino acid
  Variant (77)..(77): Xaa in position 77 is Tyr, Phe or Ile
  Variant (78)..(81): Xaa in position 78 to 81 is any amino acid
  Variant (82)..(82): Xaa in position 82 is Arg or Ala
  Variant (83)..(83): Xaa in position 83 is Val, Ile or Pro
  Variant (85)..(85): Xaa in position 85 is Asp or Thr
  Variant (86)..(88): Xaa in position 86 to 88 is any amino acid
  Variant (89)..(89): Xaa in position 89 is Leu or Met
  Variant (90)..(91): Xaa in position 90 to 91 is any amino acid
  Variant (92)..(92): Xaa in position 92 is Val, Ala or Ile
  Variant (93)..(94): Xaa in position 93 to 94 is any amino acid
  Variant (95)..(95): Xaa in position 95 is Ala, Ser, Val or Phe
  Variant (96)..(96): Xaa in position 96 is Ala, Val or Ser
  Variant (98)..(102): Xaa in position 98 to 102 is any amino acid
  Variant (103)..(103): Xaa in position 103 is Ile, Phe or Val
  Variant (104)..(104): Xaa in position 104 is any amino acid
  Variant (105)..(105): Xaa in position 105 is Ala or Ser
  Variant (106)..(106): Xaa in position 106 is any amino acid
  Variant (107)..(107): Xaa in position 107 is Leu or Phe
  Variant (108)..(108): Xaa in position 108 is Ser or Cys
XXXXRXXXPXXXXXXXXXXVXXXXXXXXXXXXXXXXXXXXXXDXXXXXXXGXXXXXXXGXXXXXXXXXXXXXXXXXXXXXXXXTXXXXXXXXXXXXGXXXXXXXXXXX

SEQ ID NO: 13501 - protein, 79 aa, Artificial sequence
  Consensus
  Variant (1)..(1): Xaa in position 1 is Val or Leu
  Variant (2)..(2): Xaa in position 2 is any amino acid
  Variant (3)..(3): Xaa in position 3 is Ser, Thr or Gly
  Variant (4)..(4): Xaa in position 4 is Gly or Ser
  Variant (6)..(8): Xaa in position 6 to 8 is any amino acid
  Variant (9)..(9): Xaa in position 9 is Ala or Ser
  Variant (10)..(10): Xaa in position 10 is Gln, Arg or Lys
  Variant (11)..(11): Xaa in position 11 is Pro or Arg
  Variant (12)..(12): Xaa in position 12 is any amino acid
  Variant (14)..(14): Xaa in position 14 is Val or Ile
  Variant (15)..(16): Xaa in position 15 to 16 is any amino acid
  Variant (18)..(18): Xaa in position 18 is Val, Ile or Thr
  Variant (20)..(22): Xaa in position 20 to 22 is any amino acid
  Variant (23)..(23): Xaa in position 23 is Thr, Ser or Ala
  Variant (25)..(25): Xaa in position 25 is any amino acid
  Variant (26)..(26): Xaa in position 26 is Val or Ile
  Variant (27)..(27): Xaa in position 27 is Arg or Lys
  Variant (28)..(28): Xaa in position 28 is Arg, Lys or Ala
  Variant (29)..(29): Xaa in position 29 is Ile, Val or Thr
  Variant (30)..(30): Xaa in position 30 is Asp or Asn
  Variant (31)..(33): Xaa in position 31 to 33 is any amino acid
  Variant (34)..(34): Xaa in position 34 is Ile, Leu or Val
  Variant (35)..(37): Xaa in position 35 to 37 is any amino acid
  Variant (38)..(38): Xaa in position 38 is Leu or Ile
  Variant (39)..(42): Xaa in position 39 to 42 is any amino acid
  Variant (43)..(43): Xaa in position 43 is Ile, Val or Leu
  Variant (45)..(45): Xaa in position 45 is Leu, Val or Trp
  Variant (46)..(46): Xaa in position 46 is Leu, Ile, Val or Met
  Variant (47)..(47): Xaa in position 47 is any amino acid
  Variant (48)..(48): Xaa in position 48 is Pro or Asn
  Variant (49)..(49): Xaa in position 49 is any amino acid
  Variant (50)..(50): Xaa in position 50 is Gly or Ala
  Variant (51)..(51): Xaa in position 51 is any amino acid
  Variant (53)..(53): Xaa in position 53 is any amino acid
  Variant (54)..(54): Xaa in position 54 is Thr or Ser
  Variant (56)..(57): Xaa in position 56 to 57 is any amino acid
  Variant (58)..(58): Xaa in position 58 is Phe or Leu
  Variant (59)..(59): Xaa in position 59 is Asn or Tyr
  Variant (60)..(60): Xaa in position 60 is Leu or Cys
  Variant (61)..(61): Xaa in position 61 is any or no amino acid
  Variant (62)..(62): Xaa in position 62 is any amino acid
  Variant (63)..(63): Xaa in position 63 is Glu, Tyr or Leu
  Variant (64)..(64): Xaa in position 64 is Glu, Asp, Asn or Gln
  Variant (65)..(65): Xaa in position 65 is any amino acid
  Variant (67)..(69): Xaa in position 67 to 69 is any amino acid
  Variant (70)..(70): Xaa in position 70 is Ala or Ser
  Variant (71)..(72): Xaa in position 71 to 72 is any amino acid
  Variant (73)..(73): Xaa in position 73 is Leu or Ile
  Variant (74)..(74): Xaa in position 74 is any amino acid
  Variant (75)..(75): Xaa in position 75 is Ala or Val
  Variant (76)..(76): Xaa in position 76 is Asp or Glu
  Variant (78)..(78): Xaa in position 78 is Leu or Met
  Variant (79)..(79): Xaa in position 79 is Ile, Leu or Val
XXXXNXXXXXXXGXXXGXDXXXXGXXXXXXXXXXXXXXXXXXXVXXXXXXXSXXGXXXXXXXXXXAXXXXXXXXXXKXX

SEQ ID NO: 13502 - protein, 103 aa, Artificial sequence
  Consensus
  Variant (1)..(1): Xaa in position 1 is Leu or Ile
  Variant (2)..(6): Xaa in position 2 to 6 is any amino acid
  Variant (7)..(7): Xaa in position 7 is Ala or Val
  Variant (8)..(10): Xaa in position 8 to 10 is any amino acid
  Variant (12)..(12): Xaa in position 12 is Val or Ile
  Variant (13)..(13): Xaa in position 13 is any amino acid
  Variant (15)..(15): Xaa in position 15 is any amino acid
  Variant (16)..(16): Xaa in position 16 is His or Gln
  Variant (17)..(17): Xaa in position 17 is Leu or Ile
  Variant (18)..(18): Xaa in position 18 is Ile, Val or Leu
  Variant (19)..(23): Xaa in position 19 to 23 is any amino acid
  Variant (25)..(25): Xaa in position 25 is Ala, Ser or Val
  Variant (26)..(26): Xaa in position 26 is Leu, Ile or Val
  Variant (27)..(27): Xaa in position 27 is Leu or Ile
  Variant (28)..(28): Xaa in position 28 is any amino acid
  Variant (30)..(30): Xaa in position 30 is Leu, His or Ile
  Variant (32)..(34): Xaa in position 32 to 34 is any amino acid
  Variant (36)..(36): Xaa in position 36 is any amino acid
  Variant (38)..(38): Xaa in position 38 is Thr or Ser
  Variant (39)..(39): Xaa in position 39 is any amino acid
  Variant (40)..(40): Xaa in position 40 is Ile, Val, Leu or Met
  Variant (41)..(42): Xaa in position 41 to 42 is any or no amino acid
  Variant (43)..(49): Xaa in position 43 to 49 is any amino acid
  Variant (51)..(51): Xaa in position 51 is any amino acid
  Variant (53)..(55): Xaa in position 53 to 55 is any amino acid
  Variant (57)..(57): Xaa in position 57 is Ile, Val or Leu
  Variant (58)..(59): Xaa in position 58 to 59 is any amino acid
  Variant (60)..(60): Xaa in position 60 is Ile or Leu
  Variant (61)..(62): Xaa in position 61 to 62 is any amino acid
  Variant (63)..(63): Xaa in position 63 is Leu or Ile
  Variant (64)..(64): Xaa in position 64 is Ile or Leu
  Variant (65)..(65): Xaa in position 65 is any amino acid
  Variant (69)..(70): Xaa in position 69 to 70 is any amino acid
  Variant (72)..(72): Xaa in position 72 is any amino acid
  Variant (74)..(74): Xaa in position 74 is Val or Leu
  Variant (75)..(75): Xaa in position 75 is any amino acid
  Variant (77)..(77): Xaa in position 77 is any amino acid
  Variant (78)..(78): Xaa in position 78 is Arg or Asp
  Variant (79)..(80): Xaa in position 79 to 80 is any amino acid
  Variant (81)..(81): Xaa in position 81 is Leu or Ile
  Variant (82)..(82): Xaa in position 82 is Glu or Leu
  Variant (83)..(84): Xaa in position 83 to 84 is any amino acid
  Variant (85)..(85): Xaa in position 85 is Ile, Leu or Val
  Variant (86)..(87): Xaa in position 86 to 87 is any amino acid
  Variant (88)..(88): Xaa in position 88 is Phe or Tyr
  Variant (89)..(89): Xaa in position 89 is any amino acid
  Variant (90)..(90): Xaa in position 90 is Ile, Val or Leu
  Variant (91)..(91): Xaa in position 91 is Ile, Val or Leu
  Variant (92)..(92): Xaa in position 92 is any amino acid
  Variant (93)..(93): Xaa in position 93 is Arg, His or Lys
  Variant (94)..(94): Xaa in position 94 is Asp or Glu
  Variant (95)..(95): Xaa in position 95 is Gly or Asn
  Variant (96)..(98): Xaa in position 96 to 98 is any amino acid
  Variant (99)..(99): Xaa in position 99 is Ala or Gly
  Variant (101)..(101): Xaa in position 101 is Ala, Ser or Val
  Variant (103)..(103): Xaa in position 103 is Leu or Met
XXXXXXXXXXGXXRXXXXXXXXXGXXXXEXFXXXGXGXXXXXXXXXXXXRXAXXXDXXXXXXXXXPLEXXGXLXXRXXXXXXXXXXXXXXXXXXXXXXXCXAX

SEQ ID NO: 13503 - protein, 76 aa, Artificial sequence
  Consensus
  Variant (1)..(1): Xaa in position 1 is Gly, Ala or Cys
  Variant (3)..(3): Xaa in position 3 is Met, Leu, Val, Ile or Phe
  Variant (5)..(5): Xaa in position 5 is Cys or Ala
  Variant (6)..(6): Xaa in position 6 is Val, Leu or Ile
  Variant (7)..(7): Xaa in position 7 is any amino acid
  Variant (8)..(8): Xaa in position 8 is Val or Ile
  Variant (9)..(12): Xaa in position 9 to 12 is any amino acid
  Variant (13)..(13): Xaa in position 13 is Arg or Gln
  Variant (14)..(17): Xaa in position 14 to 17 is any amino acid
  Variant (19)..(20): Xaa in position 19 to 20 is any amino acid
  Variant (21)..(21): Xaa in position 21 is Leu or Ile
  Variant (22)..(22): Xaa in position 22 is Leu or Ile
  Variant (23)..(28): Xaa in position 23 to 28 is any amino acid
  Variant (29)..(29): Xaa in position 29 is Ala or Ser
  Variant (30)..(32): Xaa in position 30 to 32 is any amino acid
  Variant (33)..(33): Xaa in position 33 is Gly, Asn or Arg
  Variant (34)..(36): Xaa in position 34 to 36 is any amino acid
  Variant (37)..(37): Xaa in position 37 is Leu, Ile or Val
  Variant (39)..(39): Xaa in position 39 is Val, Ala or Leu
  Variant (41)..(41): Xaa in position 41 is Thr or Ser
  Variant (43)..(43): Xaa in position 43 is any amino acid
  Variant (44)..(44): Xaa in position 44 is Thr or Ser
  Variant (45)..(46): Xaa in position 45 to 46 is any amino acid
  Variant (49)..(49): Xaa in position 49 is any or no amino acid
  Variant (50)..(50): Xaa in position 50 is any amino acid
  Variant (51)..(51): Xaa in position 51 is Arg, Gln or His
  Variant (54)..(60): Xaa in position 54 to 60 is any amino acid
  Variant (61)..(61): Xaa in position 61 is Leu or Ile
  Variant (63)..(64): Xaa in position 63 to 64 is any amino acid
  Variant (65)..(65): Xaa in position 65 is Lys or Arg
  Variant (66)..(68): Xaa in position 66 to 68 is any amino acid
  Variant (69)..(69): Xaa in position 69 is Tyr or Ile
  Variant (70)..(70): Xaa in position 70 is any or no amino acid
  Variant (71)..(73): Xaa in position 71 to 73 is any amino acid
  Variant (75)..(75): Xaa in position 75 is any amino acid
  Variant (76)..(76): Xaa in position 76 is Ser or Ala
XEXAXXXXXXXXXXXXXGXXXXXXXXXXXXXXXXXXXFXLXTXXXXWFXXXGFXXXXXXXXPXXXXXXXXXXXRXX

SEQ ID NO: 13504 - protein, 528 aa, Artificial sequence
  Consensus
  Variant (2)..(3): Xaa in position 2 to 3 is any amino acid
  Variant (6)..(8): Xaa in position 6 to 8 is any amino acid
  Variant (11)..(13): Xaa in position 11 to 13 is any amino acid
  Variant (16)..(17): Xaa in position 16 to 17 is any amino acid
  Variant (21)..(24): Xaa in position 21 to 24 is any amino acid
  Variant (26)..(42): Xaa in position 26 to 42 is any amino acid
  Variant (44)..(45): Xaa in position 44 to 45 is any amino acid
  Variant (49)..(49): Xaa in position 49 is any amino acid
  Variant (52)..(54): Xaa in position 52 to 54 is any amino acid
  Variant (56)..(56): Xaa in position 56 is any amino acid
  Variant (58)..(58): Xaa in position 58 is any amino acid
  Variant (60)..(60): Xaa in position 60 is any amino acid
  Variant (62)..(62): Xaa in position 62 is any amino acid
  Variant (65)..(67): Xaa in position 65 to 67 is any amino acid
  Variant (69)..(76): Xaa in position 69 to 76 is any amino acid
  Variant (78)..(81): Xaa in position 78 to 81 is any amino acid
  Variant (83)..(83): Xaa in position 83 is any amino acid
  Variant (86)..(88): Xaa in position 86 to 88 is any amino acid
  Variant (90)..(94): Xaa in position 90 to 94 is any amino acid
  Variant (96)..(96): Xaa in position 96 is any amino acid
  Variant (98)..(102): Xaa in position 98 to 102 is any amino acid
  Variant (104)..(104): Xaa in position 104 is any amino acid
  Variant (106)..(106): Xaa in position 106 is any amino acid
  Variant (109)..(117): Xaa in position 109 to 117 is any or no amino acid
  Variant (118)..(123): Xaa in position 118 to 123 is any amino acid
  Variant (125)..(131): Xaa in position 125 to 131 is any amino acid
  Variant (133)..(133): Xaa in position 133 is any amino acid
  Variant (138)..(139): Xaa in position 138 to 139 is any amino acid
  Variant (141)..(141): Xaa in position 141 is any amino acid
  Variant (143)..(143): Xaa in position 143 is any amino acid
  Variant (146)..(147): Xaa in position 146 to 147 is any amino acid
  Variant (149)..(149): Xaa in position 149 is any amino acid
  Variant (151)..(154): Xaa in position 151 to 154 is any amino acid
  Variant (156)..(157): Xaa in position 156 to 157 is any amino acid
  Variant (159)..(159): Xaa in position 159 is any amino acid
  Variant (162)..(164): Xaa in position 162 to 164 is any amino acid
  Variant (166)..(168): Xaa in position 166 to 168 is any amino acid
  Variant (170)..(173): Xaa in position 170 to 173 is any amino acid
  Variant (177)..(178): Xaa in position 177 to 178 is any amino acid
  Variant (180)..(182): Xaa in position 180 to 182 is any amino acid
  Variant (184)..(184): Xaa in position 184 is any amino acid
  Variant (188)..(188): Xaa in position 188 is any amino acid
  Variant (192)..(193): Xaa in position 192 to 193 is any amino acid
  Variant (195)..(196): Xaa in position 195 to 196 is any amino acid
  Variant (199)..(200): Xaa in position 199 to 200 is any amino acid
  Variant (202)..(203): Xaa in position 202 to 203 is any amino acid
  Variant (205)..(205): Xaa in position 205 is any amino acid
  Variant (207)..(207): Xaa in position 207 is any amino acid
  Variant (209)..(209): Xaa in position 209 is any amino acid
  Variant (211)..(216): Xaa in position 211 to 216 is any amino acid
  Variant (218)..(222): Xaa in position 218 to 222 is any amino acid
  Variant (224)..(228): Xaa in position 224 to 228 is any amino acid
  Variant (230)..(311): Xaa in position 230 to 311 is any or no amino acid
  Variant (312)..(330): Xaa in position 312 to 330 is any amino acid
  Variant (332)..(333): Xaa in position 332 to 333 is any amino acid
  Variant (335)..(336): Xaa in position 335 to 336 is any amino acid
  Variant (339)..(340): Xaa in position 339 to 340 is any amino acid
  Variant (343)..(343): Xaa in position 343 is any amino acid
  Variant (345)..(345): Xaa in position 345 is any amino acid
  Variant (347)..(352): Xaa in position 347 to 352 is any amino acid
  Variant (355)..(355): Xaa in position 355 is any amino acid
  Variant (358)..(358): Xaa in position 358 is any amino acid
  Variant (362)..(364): Xaa in position 362 to 364 is any amino acid
  Variant (366)..(366): Xaa in position 366 is any amino acid
  Variant (369)..(376): Xaa in position 369 to 376 is any amino acid
  Variant (378)..(379): Xaa in position 378 to 379 is any amino acid
  Variant (381)..(381): Xaa in position 381 is any amino acid
  Variant (383)..(385): Xaa in position 383 to 385 is any amino acid
  Variant (387)..(388): Xaa in position 387 to 388 is any amino acid
  Variant (390)..(392): Xaa in position 390 to 392 is any amino acid
  Variant (395)..(395): Xaa in position 395 is any amino acid
  Variant (399)..(400): Xaa in position 399 to 400 is any amino acid
  Variant (402)..(402): Xaa in position 402 is any amino acid
  Variant (405)..(405): Xaa in position 405 is any amino acid
  Variant (407)..(407): Xaa in position 407 is any amino acid
  Variant (410)..(410): Xaa in position 410 is any amino acid
  Variant (413)..(417): Xaa in position 413 to 417 is any amino acid
  Variant (419)..(421): Xaa in position 419 to 421 is any amino acid
  Variant (423)..(423): Xaa in position 423 is any amino acid
  Variant (425)..(427): Xaa in position 425 to 427 is any amino acid
  Variant (429)..(429): Xaa in position 429 is any amino acid
  Variant (434)..(434): Xaa in position 434 is any amino acid
  Variant (436)..(439): Xaa in position 436 to 439 is any or no amino acid
  Variant (440)..(446): Xaa in position 440 to 446 is any amino acid
  Variant (448)..(448): Xaa in position 448 is any amino acid
  Variant (451)..(451): Xaa in position 451 is any amino acid
  Variant (454)..(454): Xaa in position 454 is any amino acid
  Variant (456)..(457): Xaa in position 456 to 457 is any amino acid
  Variant (459)..(462): Xaa in position 459 to 462 is any amino acid
  Variant (464)..(465): Xaa in position 464 to 465 is any amino acid
  Variant (468)..(473): Xaa in position 468 to 473 is any amino acid
  Variant (475)..(477): Xaa in position 475 to 477 is any amino acid
  Variant (479)..(481): Xaa in position 479 to 481 is any amino acid
  Variant (484)..(484): Xaa in position 484 is any amino acid
  Variant (488)..(491): Xaa in position 488 to 491 is any amino acid
  Variant (494)..(496): Xaa in position 494 to 496 is any amino acid
  Variant (499)..(505): Xaa in position 499 to 505 is any amino acid
  Variant (508)..(513): Xaa in position 508 to 513 is any amino acid
  Variant (516)..(518): Xaa in position 516 to 518 is any amino acid
  Variant (520)..(520): Xaa in position 520 is any amino acid
  Variant (522)..(527): Xaa in position 522 to 527 is any amino acid
VXXFRXXXPYXXXHRXXTFVXXXXGXXXXXXXXXXXXXXXXXDXXLLHXLGXXXVXVXGXRXQIXXXLXXXXXXXXYXXXXRXTDXXXLXXXXXAXGXXXXXIXAXLSXXXXXXXXXXXXXXXPXXXXXXXVXSGNFXXAXPXGVXXGXDXXXXGXXRXIDXXXIXXXLXXXXIVLXXPXXXSXTGEXFNLXXEXXATXXAXXLXAXKXIXXXXXXGXXXXXGXXXXXLXXXXXXXXXXXXXXXXXXXXXXXXXXXXXXXXXXXXXXXXXXXXXXXXXXXXXXXXXXXXXXXXXXXXXXXXXXXXXXXXXXXXXXXXXXXXXXXXXXXXXLXXAXXACXXGVXRXHXXXXXXDGXLLXELFXXXGXGTXXXXXXXXEXXRXAXXXDXXGXXXLIXPLEXXGXLVXRXREXLEXXXXXFXXXEXDXXXIXCAALXPXXXXXXXXXXXEXACXAVXPXXRXXXXGXXLLXXXXXXAXXXGXXXLFXLTTXXXXWFXXXGFXXXXXXXLPXXXXXXYNXXXRXSXXXXXXL

SEQ ID NO: 13505 - protein, 50 aa, Artificial sequence
  Consensus
  Variant (2)..(2): Xaa in Position 2 is any amino acid
  Variant (4)..(4): Xaa in Position 4 is any amino acid
  Variant (6)..(6): Xaa in Position 6 is any amino acid
  Variant (7)..(7): Xaa in Position 7 is Leu, Ile, Phe, Met or Val
  Variant (9)..(11): Xaa in Position 9 to 11 is any amino acid
  Variant (12)..(12): Xaa in Position 12 is Val, Ile or Leu
  Variant (13)..(13): Xaa in Position 13 is Pro, Ser, Glu or Ala
  Variant (14)..(16): Xaa in Position 14 to 16 is any amino acid
  Variant (17)..(17): Xaa in Position 17 is Tyr, Leu or Phe
  Variant (18)..(18): Xaa in Position 18 is Tyr, Trp, Phe or His
  Variant (20)..(20): Xaa in Position 20 is Ile, Val or Ala
  Variant (21)..(21): Xaa in Position 21 is Gln, His or Asn
  Variant (22)..(22): Xaa in Position 22 is Thr or Ser
  Variant (23)..(23): Xaa in Position 23 is any amino acid
  Variant (25)..(25): Xaa in Position 25 is Ala, Ser or Gly
  Variant (26)..(27): Xaa in Position 26 to 27 is any amino acid
  Variant (29)..(29): Xaa in Position 29 is Phe, Tyr or Val
  Variant (30)..(30): Xaa in Position 30 is any amino acid
  Variant (31)..(31): Xaa in Position 31 is Ile, Leu or Val
  Variant (32)..(32): Xaa in Position 32 is Ser, Thr or Gly
  Variant (33)..(40): Xaa in Position 33 to 40 is any amino acid
  Variant (41)..(42): Xaa in Position 41 to 42 is no amino acid or any amino acid
  Variant (43)..(43): Xaa in Position 43 is Ile, Val or Met
  Variant (44)..(44): Xaa in Position 44 is any amino acid
  Variant (45)..(45): Xaa in Position 45 is Ala, Gly or Ser
  Variant (46)..(48): Xaa in Position 46 to 48 is any amino acid
  Variant (49)..(49): Xaa in Position 49 is Val, Thr, Ile or Leu
RXEXDXXGXXXXXXXXXXGXXXXRXXXNXXXXXXXXXXXXXXXXXXXXXK

SEQ ID NO: 13506 - protein, 57 aa, Artificial sequence
  Consensus
  Variant (1)..(1): Xaa in Position 1 is Gln or Ser
  Variant (2)..(2): Xaa in Position 2 is Gly, Thr or Ala
  Variant (4)..(4): Xaa in Position 4 is Ala or Ser
  Variant (7)..(7): Xaa in Position 7 is Ser, Gln or Thr
  Variant (8)..(8): Xaa in Position 8 is any amino acid
  Variant (9)..(9): Xaa in Position 9 is Asn or His
  Variant (12)..(12): Xaa in Position 12 is any amino acid
  Variant (16)..(16): Xaa in Position 16 is Ile, Leu or Val
  Variant (17)..(17): Xaa in Position 17 is Ala, Ser, Thr or Gly
  Variant (19)..(19): Xaa in Position 19 is Arg, Ile, Leu or Val
  Variant (20)..(20): Xaa in Position 20 is Ala, Gly or Leu
  Variant (21)..(21): Xaa in Position 21 is any amino acid
  Variant (22)..(22): Xaa in Position 22 is Glu, Ile, Gln, Thr or Arg
  Variant (23)..(23): Xaa in Position 23 is any amino acid
  Variant (24)..(24): Xaa in Position 24 is Leu, Met, Arg, Ala or Ile
  Variant (25)..(25): Xaa in Position 25 is Gly, Asn or Pro
  Variant (26)..(27): Xaa in Position 26 to 27 is no amino acid or any amino acid
  Variant (28)..(28): Xaa in Position 28 is Lys, Arg, Ala or Pro
  Variant (29)..(29): Xaa in Position 29 is Gly or Val
  Variant (30)..(30): Xaa in Position 30 is any amino acid
  Variant (31)..(31): Xaa in Position 31 is Tyr, Phe or no amino acid
  Variant (32)..(33): Xaa in Position 32 to 33 is no amino acid or any amino acid
  Variant (34)..(34): Xaa in Position 34 is Leu, Val, Ile or Cys
  Variant (35)..(35): Xaa in Position 35 is His, Asn, Ser or Asp
  Variant (37)..(37): Xaa in Position 37 is Asn, Met, Ile or Leu
  Variant (38)..(38): Xaa in Position 38 is any amino acid
  Variant (39)..(39): Xaa in Position 39 is His or Asp
  Variant (40)..(40): Xaa in Position 40 is Val or Leu
  Variant (42)..(42): Xaa in Position 42 is any amino acid
  Variant (43)..(43): Xaa in Position 43 is Ser, Ala, Cys, Gly or His
  Variant (46)..(46): Xaa in Position 46 is Thr, Ser or Gln
  Variant (48)..(48): Xaa in Position 48 is Asp or Cys
  Variant (49)..(49): Xaa in Position 49 is Ala, Val, Thr or Ser
  Variant (50)..(50): Xaa in Position 50 is Tyr, Phe or Ile
  Variant (51)..(51): Xaa in Position 51 is Pro or Ser
  Variant (52)..(52): Xaa in Position 52 is Thr, Ser or Ala
  Variant (53)..(53): Xaa in Position 53 is Ala, Gly, Val, Ser or Met
  Variant (54)..(54): Xaa in Position 54 is any amino acid
  Variant (55)..(55): Xaa in Position 55 is Arg, His, Lys or Asn
  Variant (56)..(56): Xaa in Position 56 is Ile, Leu, Val or Met
  Variant (57)..(57): Xaa in Position 57 is Ala, Gly, Ser or Thr
XXGXGTXXXMNXNEVXXNXXXXXXXXXXXXXXXXXPXXXXNXXQSXNXXXXXXXXXX

SEQ ID NO: 13507 - protein, 56 aa, Artificial sequence
  Consensus
  Variant (1)..(1): Xaa in Position 1 is Leu, Ile or Val
  Variant (2)..(2): Xaa in Position 2 is Lys or Arg
  Variant (3)..(3): Xaa in Position 3 is any amino acid
  Variant (4)..(4): Xaa in Position 4 is Gly or Ala
  Variant (7)..(7): Xaa in Position 7 is Gln or His
  Variant (8)..(8): Xaa in Position 8 is Leu, Thr or Met
  Variant (9)..(9): Xaa in Position 9 is Gln, Glu or Met
  Variant (11)..(11): Xaa in Position 11 is Ala or Gly
  Variant (12)..(12): Xaa in Position 12 is Val, Thr, Leu, Ala or Pro
  Variant (14)..(14): Xaa in Position 14 is Met, Ile, Leu or Val
  Variant (15)..(15): Xaa in Position 15 is Thr, Arg, Ser, Met or Leu
  Variant (16)..(16): Xaa in Position 16 is Leu, Val, Met, Phe or Tyr
  Variant (18)..(18): Xaa in Position 18 is any amino acid
  Variant (19)..(19): Xaa in Position 19 is Glu or Thr
  Variant (21)..(21): Xaa in Position 21 is any amino acid
  Variant (22)..(22): Xaa in Position 22 is Ala, Gly, Thr or Ser
  Variant (23)..(23): Xaa in Position 23 is Phe, Tyr or Trp
  Variant (24)..(26): Xaa in Position 24 to 26 is any amino acid
  Variant (27)..(27): Xaa in Position 27 is Leu, Val, Ile, Met or Phe
  Variant (28)..(29): Xaa in Position 28 to 29 is any amino acid
  Variant (30)..(30): Xaa in Position 30 is Asp, Glu, Gly, His or Asn
  Variant (31)..(33): Xaa in Position 31 to 33 is any amino acid
  Variant (34)..(34): Xaa in Position 34 is Leu, Ile, Val or Phe
  Variant (35)..(38): Xaa in Position 35 to 38 is any amino acid
  Variant (39)..(39): Xaa in Position 39 is no amino acid or Pro
  Variant (40)..(41): Xaa in Position 40 to 41 is any amino acid
  Variant (42)..(42): Xaa in Position 42 is Leu, Ile, Met, Val or Phe
  Variant (43)..(44): Xaa in Position 43 to 44 is any amino acid
  Variant (45)..(45): Xaa in Position 45 is Val, Ile, Leu or Met
  Variant (46)..(46): Xaa in Position 46 is Asn, Ala, Gly or Ser
  Variant (47)..(47): Xaa in Position 47 is Leu, Met, Ile or Gln
  Variant (49)..(49): Xaa in Position 49 is Ala or Gly
  Variant (50)..(50): Xaa in Position 50 is Thr or Ser
  Variant (51)..(51): Xaa in Position 51 is Ala or Val
  Variant (52)..(52): Xaa in Position 52 is Ile, Val or Ala
  Variant (55)..(55): Xaa in Position 55 is Gly, Arg, Ala, Ser or Lys
  Variant (56)..(56): Xaa in Position 56 is Leu, Ile, Val or Met
XXXXRTXXXDXXPXXXGXXFXXXXXXXXXXXXXXXXXXXXXXXXXXXGXXXXGTXX

SEQ ID NO: 13508 - protein, 105 aa, Artificial sequence
  Consensus
  Variant (1)..(1): Xaa in Position 1 is Lys or Arg
  Variant (2)..(2): Xaa in Position 2 is any amino acid
  Variant (3)..(3): Xaa in Position 3 is Cys, Ala, Ser or Gly
  Variant (4)..(4): Xaa in Position 4 is Asn, Ser, His, Asp or Gly
  Variant (6)..(6): Xaa in Position 6 is Leu or Ile
  Variant (8)..(8): Xaa in Position 8 is Leu, Phe or Ile
  Variant (9)..(9): Xaa in Position 9 is Leu or Met
  Variant (10)..(10): Xaa in Position 10 is any amino acid
  Variant (14)..(15): Xaa in Position 14 to 15 is any amino acid
  Variant (16)..(16): Xaa in Position 16 is Gly or Val
  Variant (17)..(17): Xaa in Position 17 is Leu, Ile or Phe
  Variant (18)..(18): Xaa in Position 18 is any amino acid
  Variant (19)..(19): Xaa in Position 19 is Glu or Asp
  Variant (20)..(20): Xaa in Position 20 is Ile, Leu, Phe or Val
  Variant (21)..(21): Xaa in Position 21 is any amino acid
  Variant (22)..(22): Xaa in Position 22 is Leu, Val or Ile
  Variant (23)..(23): Xaa in Position 23 is Pro or Glu
  Variant (24)..(25): Xaa in Position 24 to 25 is any amino acid
  Variant (26)..(26): Xaa in Position 26 is Gln, Glu or Ala
  Variant (27)..(27): Xaa in Position 27 is Pro, Ala, Asn or Gln
  Variant (34)..(34): Xaa in Position 34 is Gly or Ala
  Variant (36)..(36): Xaa in Position 36 is Val, Ile or Tyr
  Variant (39)..(39): Xaa in Position 39 is Val, Thr or Ser
  Variant (40)..(40): Xaa in Position 40 is Ile, Met, Val, Gln or Leu
  Variant (41)..(41): Xaa in Position 41 is Pro, Cys, Ala or Ser
  Variant (43)..(43): Xaa in Position 43 is any amino acid
  Variant (44)..(44): Xaa in Position 44 is Val, Ile, Leu, Met or Thr
  Variant (45)..(45): Xaa in Position 45 is any amino acid
  Variant (46)..(46): Xaa in Position 46 is Gln, Met, Thr or Leu
  Variant (47)..(47): Xaa in Position 47 is Val, Ile, Thr, Ala or Cys
  Variant (48)..(48): Xaa in Position 48 is Cys, Ala or Ser
  Variant (49)..(49): Xaa in Position 49 is Phe, Tyr, Ala, His or Met
  Variant (50)..(50): Xaa in Position 50 is any amino acid
  Variant (51)..(51): Xaa in Position 51 is Val, Ile or Ala
  Variant (52)..(52): Xaa in Position 52 is any amino acid
  Variant (53)..(53): Xaa in Position 53 is Gly, Ala or Ser
  Variant (54)..(54): Xaa in Position 54 is any amino acid
  Variant (55)..(55): Xaa in Position 55 is Asp, His, Gln or Asn
  Variant (56)..(56): Xaa in Position 56 is any amino acid
  Variant (57)..(57): Xaa in Position 57 is Thr, Ala, Cys, Ser or Ile
  Variant (58)..(58): Xaa in Position 58 is Val, Ile or Leu
  Variant (59)..(60): Xaa in Position 59 to 60 is any amino acid
  Variant (61)..(61): Xaa in Position 61 is Ala, Gly or Ser
  Variant (62)..(62): Xaa in Position 62 is Ala, Ser, Gly, Val or Cys
  Variant (63)..(63): Xaa in Position 63 is Glu, Ser, Gln, Ala or Asp
  Variant (64)..(64): Xaa in Position 64 is any amino acid
  Variant (65)..(65): Xaa in Position 65 is Gly or Ala
  Variant (66)..(66): Xaa in Position 66 is Gln, His or Asn
  Variant (67)..(67): Xaa in Position 67 is Leu, Phe or Met
  Variant (68)..(68): Xaa in Position 68 is Gln or Glu
  Variant (71)..(71): Xaa in Position 71 is Val, Ala or Gln
  Variant (72)..(72): Xaa in Position 72 is Met or Phe
  Variant (73)..(73): Xaa in Position 73 is any amino acid
  Variant (75)..(75): Xaa in Position 75 is any amino acid
  Variant (76)..(76): Xaa in Position 76 is Ile, Leu, Met, Thr or Val
  Variant (77)..(79): Xaa in Position 77 to 79 is any amino acid
  Variant (80)..(80): Xaa in Position 80 is Leu, Met, Ile or Cys
  Variant (81)..(82): Xaa in Position 81 to 82 is any amino acid
  Variant (83)..(83): Xaa in Position 83 is Ser, Gly or Thr
  Variant (84)..(86): Xaa in Position 84 to 86 is any amino acid
  Variant (87)..(87): Xaa in Position 87 is Leu, Met or Ile
  Variant (88)..(89): Xaa in Position 88 to 89 is any amino acid
  Variant (90)..(90): Xaa in Position 90 is Ala, Gly, Thr or Val
  Variant (91)..(93): Xaa in Position 91 to 93 is any amino acid
  Variant (94)..(94): Xaa in Position 94 is Leu or Phe
  Variant (95)..(96): Xaa in Position 95 to 96 is any amino acid
  Variant (97)..(97): Xaa in Position 97 is no amino acid or any amino acid
  Variant (98)..(98): Xaa in Position 98 is Cys, Ala, Tyr or Leu
  Variant (99)..(99): Xaa in Position 99 is Ile, Val or Leu
  Variant (100)..(101): Xaa in Position 100 to 101 is any amino acid
  Variant (102)..(102): Xaa in Position 102 is Ile, Leu, Met or Val
  Variant (103)..(103): Xaa in Position 103 is any amino acid
  Variant (104)..(104): Xaa in Position 104 is Ala, Val, Ile, Pro or Gly
  Variant (105)..(105): Xaa in Position 105 is Asn, Asp or Gln
XXXXDXRXXXSGPXXXXXXXXXXXXXXGSSIMPXKXNPXXXEXXXXXXXXXXXXXXXXXXXXXXXXXXLNXXXPXXXXXXXXXXXXXXXXXXXXXXXXXXXXXXX

SEQ ID NO: 13509 - protein, 550 aa, Artificial sequence
  Consensus
  Variant (1)..(550): Xaa in all Positions is any amino acid
XXXXXXXXXXXXXXXXXXXXXXXXXXXXXXXXXXXXXXXXXXXXXXXXXXXXXXXXXXXXXXXXXXXXRXEXDXXGXXXXPXXXYXGXXTXRAXXNFXIXXXXXXXXXXXXXXXXXXKXAXAXXNXXXXXXXXXXXXXIXXAXXXXXXXXXXXXXXFXXDXXQGGAGTSXNMNXNEVXANXAXEXXGXXXGXYXXXXPNXXVNXXQSTNDXXPTXXXXXXXXXXXXXLXXXXXXLXXXXXXKXXEFXXXXKXGRTXLQDAVPXXXGQEFXXXXXXXXXXXXXXXXXXXXXXXXXNXGXTAXGTGXNXXXXYXXXXXXXLXXXXXXXXXXAXXLXXATXXXXXXXXXXXXLKXXAXXXXKXXNDLRLLXSGPRXGXXEXXLPXXQXGSSIMPXKVNPVXXEXXNQXXXXVXGNDXXXXXAXXXGQLXLNXXXPXXXXXXXXSXXXXXXXXXXXXXXCXXGIXXNXXXXXXXXXXSXXXXTXLNPXXGXXXXXXXXXXXXXXGXXXXXXXXXXXXXXLXXXXXXXXXXXXXXXXPXXXXXXXXXXXXXXXXX

SEQ ID NO: 13510 - DNA, 1818 bp, Escherichia coli
  CDS (1)..(1818)
atgatgttaaatgcatggcacctgccggtgcccccatttgttaaacaaagcaaagatcaactgctcattacactgtggctgacgggcgaagacccaccgcagcgcattatgctgcgtacagaacacgataacgaagaaatgtcagtaccgatgcataagcagcgcagtcagccgcagcctggcgtcaccgcatggcgtgcggcgattgatctctccagcggacaaccccggcggcgttacagtttcaaactgctgtggcacgatcgccagcgttggtttacaccgcagggcttcagccgaatgccgccggcacgactggagcagtttgccgtcgatgtaccggatatcggcccacaatgggctgcggatcagattttttatcagatcttccctgatcgttttgcgcgtagtcttcctcgtgaagctgaacaggatcatgtctattaccatcatgcagccggacaagagatcatcttgcgtgactgggatgaaccggtcacggcgcaggcgggcggatcaacgttctatggcggcgatctggacgggataagcgaaaaactgccgtatctgaaaaagcttggcgtgacagcgctgtatctcaatccggtgtttaaagctcccagcgtacataaatacgataccgaggattatcgccatgtcgatccgcagtttggcggtgatggggcgttgctgcgtttgcgacacaatacgcagcagctgggaatgcggctggtgctggacggcgtgtttaaccacagtggcgattcccatgcctggtttgacaggcataatcgtggcacgggtggtgcttgtcacaaccccgaatcgccctggcgcgactggtactcgtttagtgatgatggcacggcgctcgactggcttggctatgccagcttgccgaagctggattatcagtcggaaagtctggtgaatgaaatttatcgcggggaagacagtattgtccgccactggctgaaagcgccgtggaatatggacggctggcggctggatgtggtgcatatgctgggggaggcgggtggggcgcgcaataatatgcagcacgttgccgggatcaccgaagcggcgaaagaaacccagccggaagcgtatattgtcggcgaacattttggcgatgcacggcaatggttacaggccgatgtggaagatgccgccatgaactatcgtggcttcacattcccgttgtggggatttcttgccaataccgatatctcttacgatccgcagcaaattgatgcccaaacctgtatggcctggatggataattaccgcgcagggctttctcatcaacaacaattacgtatgtttaatcagctcgacagccacgatactgcgcgatttaaaacgctgctcggtcgggatattgcgcgcctgccgctggcggtggtctggctgttcacctggcctggtgtaccgtgcatttattacggtgatgaagtaggactggatggcaaaaacgatccgttttgccgtaaaccgttcccctggcaggtggaaaagcaggatacggcgttattcgcgctgtaccagcgaatgattgcgctgcgtaagaaaagtcaggcgctacgtcatggcggctgtcaggtgctgtatgcggaagataacgtggtggtatttgtccgcgtgctgaatcagcaacgtgtactggtggcaatcaaccgtggcgaggcctgtgaagtggtgctacccgcgtcaccgtttctcaatgccgtgcaatggcaatgcaaagaagggcatgggcaactgactgacgggattctggctttgcctgccatttcggctacggtatggatgaactaa

SEQ ID NO: 13511 - protein, 605 aa, Escherichia coli
MMLNAWHLPVPPFVKQSKDQLLITLWLTGEDPPQRIMLRTEHDNEEMSVPMHKQRSQPQPGVTAWRAAIDLSSGQPRRRYSFKLLWHDRQRWFTPQGFSRMPPARLEQFAVDVPDIGPQWAADQIFYQIFPDRFARSLPREAEQDHVYYHHAAGQEIILRDWDEPVTAQAGGSTFYGGDLDGISEKLPYLKKLGVTALYLNPVFKAPSVHKYDTEDYRHVDPQFGGDGALLRLRHNTQQLGMRLVLDGVFNHSGDSHAWFDRHNRGTGGACHNPESPWRDWYSFSDDGTALDWLGYASLPKLDYQSESLVNEIYRGEDSIVRHWLKAPWNMDGWRLDVVHMLGEAGGARNNMQHVAGITEAAKETQPEAYIVGEHFGDARQWLQADVEDAAMNYRGFTFPLWGFLANTDISYDPQQIDAQTCMAWMDNYRAGLSHQQQLRMFNQLDSHDTARFKTLLGRDIARLPLAVVWLFTWPGVPCIYYGDEVGLDGKNDPFCRKPFPWQVEKQDTALFALYQRMIALRKKSQALRHGGCQVLYAEDNVVVFVRVLNQQRVLVAINRGEACEVVLPASPFLNAVQWQCKEGHGQLTDGILALPAISATVWMN

SEQ ID NO: 13512 - DNA, 1665 bp, Mesorhizobium loti MAFF303099
  CDS (1)..(1665): transl_table=11
atgcaatccgctttgaaagccagttcgaaccccgacctcgccatcgatcgcgactggtggcgaggtgctgtcatctaccagatctacccgcgcagctaccaggattcgaacggcgacggcatcggcgacctcaagggcatcatcgaacggctgccctacatcgcagcgctcggtgcggacgccatctggatctcgcccttcttcaaatcgccgatgaaggatttcggctacgacgtctcggactattgcgacgtcgacccgatgttcggcacgctggccgatttcgacgcgctgacggcggaggcgcaccggctgggtctcaaggtgatgatcgacgaagtgctgtcgcacacggccgacatccatccctggttcaaggaaagccggtcgagccgcagcaatcccaaggccgactggtatgtctgggcggacgcccggcccgacggcaccccgcccaacaactggctgtcgatcttcggcgggtccgcctggcagtgggacaccagccgccagcaatattacctgcacaatttcctggccgagcagcccgacctcaacttccacaaccgcgaagtccaggacgcgctgctcgacgtcacccgcttctggctggaacgcggcgtcgacggcttccgcctcgacacgatcaatttctactttcacagccagggcctggaaaacaatccgccgctgccgccggaagaacgcaacgaccagaccgcgccggcggtcaatccctacaactaccaggaccatctctacgacaagagccgtccggaaaacctcggcttcctcgaacgcttccgcgctttgctcgacgaatatccggcaaccgccgctgtcggcgaggtcggcgattcgcagcgtgggctggaagtcgtggcagcctacactgccggcggcaagcgcgtgcatatgtgttattccttcgacttcctggcgccggaaaagatcagcgccgccaaggtgcgttcggtgctggaggccttcggcaaggtcgccagcgacggctggtcgtgctgggcgttttccaatcatgacgtgatgcgtccggcctcgcgctgggccgccggcgaagccgaccctgtcgcctatctcaaggtcatctcggccttgctgatgtcgctgcgcggctcggtctgcatctaccagggcgaggaactcgggctgggcgaggccgaattgcgcttcgaggatctgcaggatccctatggcatccgcttctggccggaattcaagggccgcgacggctgccgcacgcccatggtgtgggatggcgacgccaagaatggcggcttctcccaggccaagccctggctgccggtgccggccaagcatctggcgcaagcggtcaatgtccagcagggtgaccaggcttcactgctcgagcactatcggcgcttcctcagcttccgccgcgcccatccggcgctggccaagggcgacatcaccttcatcgaaagcgagggcgacaccgtcgccttcacgcgccgcgccggcaacgagcaggttgtctgcgtcttcaacctcggcgccaagccggccaaggttgaccttggcagccgatccctgcaacctttgccgggacacgggttttccgggcaggcgaggcccggttcgatcgagcttggcggttacggcgcctggttcgggcgcatcgactga

SEQ ID NO: 13513 - protein, 554 aa, Mesorhizobium loti MAFF303099
MQSALKASSNPDLAIDRDWWRGAVIYQIYPRSYQDSNGDGIGDLKGIIERLPYIAALGADAIWISPFFKSPMKDFGYDVSDYCDVDPMFGTLADFDALTAEAHRLGLKVMIDEVLSHTADIHPWFKESRSSRSNPKADWYVWADARPDGTPPNNWLSIFGGSAWQWDTSRQQYYLHNFLAEQPDLNFHNREVQDALLDVTRFWLERGVDGFRLDTINFYFHSQGLENNPPLPPEERNDQTAPAVNPYNYQDHLYDKSRPENLGFLERFRALLDEYPATAAVGEVGDSQRGLEVVAAYTAGGKRVHMCYSFDFLAPEKISAAKVRSVLEAFGKVASDGWSCWAFSNHDVMRPASRWAAGEADPVAYLKVISALLMSLRGSVCIYQGEELGLGEAELRFEDLQDPYGIRFWPEFKGRDGCRTPMVWDGDAKNGGFSQAKPWLPVPAKHLAQAVNVQQGDQASLLEHYRRFLSFRRAHPALAKGDITFIESEGDTVAFTRRAGNEQVVCVFNLGAKPAKVDLGSRSLQPLPGHGFSGQARPGSIELGGYGAWFGRID

SEQ ID NO: 13514 - DNA, 1635 bp, Mesorhizobium loti MAFF303099
  CDS (1)..(1635): transl_table=11
gtgatggccgacgacaatgcggggcagggggccgactggtggcgcggctgcgtcatctaccaagtctatccgcgttccttccaggacacgaccggcgacggcagcggcgatcttaggggtatcaccacgcggcttggccacatcgcttcgctcggcgtcgatgccgtctggctgtcgcccttcttcaagtcgccaatggccgacatgggctatgacgtttcggattatcgcgacgtcgatccgatgttcggttcacttgaggatttcgacgctctggtcaccgaggcgcaccggttgggcctgaaggtcgtcatcgaccaggtcttgtcgcactcatccgacaagcacgaatggttcgtccaaagccgcgccagccgcgacaatcccaaggctgactggtacgtctgggccgatacgaaacccgacggcaacgcgcccaacaactggctgtccgtcttcggcggcccggcctgggagtgggattcgacccgccggcaatattacatgcacaatttcctcgcctcgcagcccgatctgaatttccacaatccagaggtccaggatgcgctgctggacacggtgcgcttctggctggagcgtggcgtcgacggttttcggctcgatacggtcaactactatgtccacgaccgctggctgcgcagcaatccgccgctggcgtcgagcgtcgccggcaccaatggcgagaccaacacctacctctaccaggagcatctgttcgacaagacgcagccggaaaacctggctttcctcaggcgtttccgggggttgctagacgaatatcccgaccgcgccgccgtcggcgaaatcggcgatgagggccgctcgctgcagacgctggctgcctacacctccggcggcgacaagctgcagatgtgctacaccttcgacctgctcggcccgcagttttcggcggcgcatgtgcgcggctgcgtcgaggccttcgaacaagcggttaccgacggctgggtctgctgggcgttttccaaccatgacgtggtgcgccatgtcagccgctggactgggccggacggcgatgccgatgcggtagccagattctcgatcatgctgctcgcctgcctgcgcggctcgatatgcctctatcagggcgaggagctcggcctggaggaggcggagcttgcctatgaggatctgcgcgatcccgtcggcatccgcttctggcccggcatgaagggcagggatggctgccgcacgccgatggtctgggaagccggcgccgacaatgcgggtttctcgacggccaggccctggctgccggtcccggccagccatcgcgcccgcgccaccgacgtgcagaacggcagcgagcaatcggtgctgtccgcctaccgctcgacgcttgccttgcgcaggcggcatccggcgctggtcagcggctcgatccgctttctcgacgccgaaggcgatgtgctggccttcatccgcgaaggcgacgggcagaggctgctctgcgtcttcaatttcgccggggagccggggaattggcccttgccaccggatattggcgtcgctgctgtcctggctggcgccgctgttgtcgaggaagaagcgctctcgctgccggctctcggttgcttccttggccggctcgactga

SEQ ID NO: 13515 - protein, 544 aa, Mesorhizobium loti MAFF303099
MMADDNAGQGADWWRGCVIYQVYPRSFQDTTGDGSGDLRGITTRLGHIASLGVDAVWLSPFFKSPMADMGYDVSDYRDVDPMFGSLEDFDALVTEAHRLGLKVVIDQVLSHSSDKHEWFVQSRASRDNPKADWYVWADTKPDGNAPNNWLSVFGGPAWEWDSTRRQYYMHNFLASQPDLNFHNPEVQDALLDTVRFWLERGVDGFRLDTVNYYVHDRWLRSNPPLASSVAGTNGETNTYLYQEHLFDKTQPENLAFLRRFRGLLDEYPDRAAVGEIGDEGRSLQTLAAYTSGGDKLQMCYTFDLLGPQFSAAHVRGCVEAFEQAVTDGWVCWAFSNHDVVRHVSRWTGPDGDADAVARFSIMLLACLRGSICLYQGEELGLEEAELAYEDLRDPVGIRFWPGMKGRDGCRTPMVWEAGADNAGFSTARPWLPVPASHRARATDVQNGSEQSVLSAYRSTLALRRRHPALVSGSIRFLDAEGDVLAFIREGDGQRLLCVFNFAGEPGNWPLPPDIGVAAVLAGAAVVEEEALSLPALGCFLGRLD

SEQ ID NO: 13516 - DNA, 1851 bp, Thermoplasma volcanium GSS1
  CDS (1)..(1851): transl_table=11
atggtagaggtaaaaataattaaatcagatgggttctttaatgaagtgcttatttcttcggacaaaaaaattcactttgacactgcttatgcggaaggtgattttaattgttttggggaagggagtattgtctccgaaacaacagatgatttaaagtttaaaattgcaaatcttatacctggaaagtaccatttcaagatagctatcgatcagtataaaatccttagagaagctgagaatagatccggctcatactcgttttcaatatggttggaaaaaccttatcacaatccagattatgcacagttttgcgcgattattgacaaaaaacttatggacgttcgaatagcagtaccaaaacacagcatttccgtatctatttttacgaaagatactttaaaacctgtatattcccgaagagcatcttttgatacttttgatgcagttgagtatgtttttgatggtatgtcagattattattttgaagtagataattccaggttacctaaggaaggatatttctcaccaaaagtgcacatcgaacacgaaggcggatcaaagatcatttatcacatatttccagataggttttttagagtaggcccgcatctgccaacactatcaagatggggagataaacctactttttcaagcttctttggaggaaatttgagggggataaccgaaaaaataggttatattaaggccctcaatgttgatacgatataccttaatccagtatataaaagcaagtcgaatcataggtacgatgttgacgattacttctctatagacggattgcttggcggtgaacaggattttatcgagttagtcaacgaagctcatgaaaacggtattaaaatagttgcagacatggtgttcaaccatacctcaacggatttcccctattttttggatgcccttaagaacggaaagaactctaaatactggaattggtacatatttcatggtgaaggcgcagcagtatttgatggtagagcaaaaggaaaaacaaaaccattatacgaaacttttatgggagttgggcgcatgcctaagttaaatcacaagaatgcagaggtaaggaagttctgcatagacgttatgaaatactacaagaacaaatttggagtagatggctttagatacgatgttgcacactcaatctaccctgaattctttttagaagctgtcaaagaatttggaaatgagatgctgcacataggggaagcatggtgtcttccatcaatgttcatgctatctggatactggaatagctttacaaattattatctaagaaatgcgattataaagtttgtccgtgaagaaataaatataaccgagttttataatatgattcaaaatatgataatatcttatggtccgcttattcagcagaatgttatgaatatacttgattcacatgatactgaaaggatattaagggcattcaagggaaataaaaaaaaggtcaagcttgcctattcaatattatttatgttcgatggatttgctacgatttactatggggatgaagttggtcttgacgggggccgagatcctgatgacagaagatgttttccttgggacaatatggatgaagatatgcttcaattcctaaaaaaacttggagaaatcagaagaatgtatcacacaggtagtgccggaataataactgtagaagagactcaggaatgcaaatatataactaggttaagcggtgaatcgataataaaggttgcaattgccaagaagccagttactttagaaggtgaaataatcttgagcagttgtggagaaaagacaatttatgagggagattttgctttgtctatagcgaaatatgcatga

SEQ ID NO: 13517 - protein, 616 aa, Thermoplasma volcanium GSS1
MVEVKIIKSDGFFNEVLISSDKKIHFDTAYAEGDFNCFGEGSIVSETTDDLKFKIANLIPGKYHFKIAIDQYKILREAENRSGSYSFSIWLEKPYHNPDYAQFCAIIDKKLMDVRIAVPKHSISVSIFTKDTLKPVYSRRASFDTFDAVEYVFDGMSDYYFEVDNSRLPKEGYFSPKVHIEHEGGSKIIYHIFPDRFFRVGPHLPTLSRWGDKPTFSSFFGGNLRGITEKIGYIKALNVDTIYLNPVYKSKSNHRYDVDDYFSIDGLLGGEQDFIELVNEAHENGIKIVADMVFNHTSTDFPYFLDALKNGKNSKYWNWYIFHGEGAAVFDGRAKGKTKPLYETFMGVGRMPKLNHKNAEVRKFCIDVMKYYKNKFGVDGFRYDVAHSIYPEFFLEAVKEFGNEMLHIGEAWCLPSMFMLSGYWNSFTNYYLRNAIIKFVREEINITEFYNMIQNMIISYGPLIQQNVMNILDSHDTERILRAFKGNKKKVKLAYSILFMFDGFATIYYGDEVGLDGGRDPDDRRCFPWDNMDEDMLQFLKKLGEIRRMYHTGSAGIITVEETQECKYITRLSGESIIKVAIAKKPVTLEGEIILSSCGEKTIYEGDFALSIAKYA

SEQ ID NO: 13518 - DNA, 1422 bp, Thermotoga maritima MSB8
  CDS (1)..(1422): transl_table=11
atgatgtacccgatgccgtcttgggtttacgacagtgtcgtgtatcagatctttccagatagatttttcatcggaaagggaaaaacggtggaagacaaaaaggatctgtacctgaagcggggaggagtcatagagaaatggggagttcctccccgcaaacttcccggtgctcagcacgtgaagatcttctacggaggagatctgtggggaatagccgagaaggtcgattattttgaagaacttggaatcaacgttctgtacctcactcctatctttttgtccgataccaatcacaagtacgacacgatcgattacttcagggtggatccacagttcggcggaaagagggcttttctgcaccttttgagggttctccatgagaggagtatgaaactcattctcgatggtgtgttcaaccacgttgggagtcagcatccgtggttcaaaaaagcgaagaaaaacgatccagagtacgtgaacagatttttcctttacaaagataggcacagatcgtggttcgacgttggaagccttcccgagctgaacgtggaagtcgaagaagtgaaggaatacattttgaaagttgtcgagcactacctgaaactggggatagacggttggaggctggattgtggccacgatcttggacctaccgtcaacctgtggatcaacatgaaagtgaaagagttctcagcggaaaagtacctcgtgagtgagatatggacttacccggcaggatgggatatggttgatggtctgatgaattacaacttcagaaaccttgtgcttagttatgtgaacggcgagacggattccataggttttcacctggaaagagcttacagggagacgaagaacatattcggttgctggaacatgcttgacagtcacgacaccccgagactcgccacaatggttcccgacagagacctgagaaaactcgctgtagttcttcagttcacttatcccggtgttccgctcgtttactatggaacagagataggtctcacaggtggagaagatccagagtgtcgtgccaccatggaatggaacagagagaaatgggatgttgatctgttcgagttctacaagaagatgatcagactgagaaggacggatccaggtttgcgctttggagagtttgtcttgctgaacgactcacctctcgcgtttctcagaaaggctcctcatcctcttcaaaacaccatcgtggtggtgaacccaggagaagagaaggtgctggttctctccattcccgacgggaaaattatgaacaccactccccttgtcgatgtgttcagcggagaaagattccacgttgacggcggggttgtgaagcttccccttctagcgagatctttcagaattctcaagcccgaggatctgagagtgggtaagtacagattgtacaagagagtttga

SEQ ID NO: 13519 - protein, 473 aa, Thermotoga maritima MSB8
MMYPMPSWVYDSVVYQIFPDRFFIGKGKTVEDKKDLYLKRGGVIEKWGVPPRKLPGAQHVKIFYGGDLWGIAEKVDYFEELGINVLYLTPIFLSDTNHKYDTIDYFRVDPQFGGKRAFLHLLRVLHERSMKLILDGVFNHVGSQHPWFKKAKKNDPEYVNRFFLYKDRHRSWFDVGSLPELNVEVEEVKEYILKVVEHYLKLGIDGWRLDCGHDLGPTVNLWINMKVKEFSAEKYLVSEIWTYPAGWDMVDGLMNYNFRNLVLSYVNGETDSIGFHLERAYRETKNIFGCWNMLDSHDTPRLATMVPDRDLRKLAVVLQFTYPGVPLVYYGTEIGLTGGEDPECRATMEWNREKWDVDLFEFYKKMIRLRRTDPGLRFGEFVLLNDSPLAFLRKAPHPLQNTIVVVNPGEEKVLVLSIPDGKIMNTTPLVDVFSGERFHVDGGVVKLPLLARSFRILKPEDLRVGKYRLYKRV

SEQ ID NO: 13520 - DNA, 1671 bp, Thermotoga maritima MSB8
  CDS (1)..(1671): transl_table=11
gtgaaggttgtgaagaagccttttttactgcttgcttttgtgtttttactcttcctcacctcctgctttcaaacgtctatgagtcaatccctcgtttcaagtaatccacattcaaacagcacaaacacagatggtactagctccaaccttgaagaagtaaaataccccgtcgtctacgaaattttcattcgctctttttacgacagagacgggaacggagtgggagatttaaacggtgtttctcagaaagttgattatctgaaggaactcggcgttgacgctgtgtggtttatgcccttcaacgaggctgtttcataccatggatacgacataacagactactacaacgtcgagaaagactacggcaccatggaagatctcgaaaacatgatccaggtgctccatgagaacggaataaaggtaataatggatctcgtgatcaaccacacatccgatgagcatccctggttcaaagacgccgtggaaaacacgaccagctctccgtactgggactactacataatgagtcttgaagatcattctggtcaggatcactggcactggaagatcaactcaaagggtcaaaaagtctggtatttcggactttttggctataacatgccggatctgaaccacgacagtcagaaagtgagagaagaagtaaagaaaatcgtggatttctggatttccaaaggtgttgatggattcagaatagatgctgcaaagcacatatatggctggtcctgggacgatgggatacaggagtcggccgaatattttgaatggttcagagattatgtgctttccaaaaagcccgatgccatacttgtgggagaggtgttcagcggaaacacgtacgatctttctctatatccaattcccgttttcaatttcgccctcatgtacagtataaggaactacccagaagggcaggatggaatgatagaaaacaactgggttgaggagtctttcctgtttcttgagaatcacgatctccacaggttcttctcccatcttcaagaacattacaaaaagttctccgagtccgactacgagttcatcaaaaaacgtgctgctctctggtattttctgatattcacactgaaaggatctcctgttatctactacggcggtgaaattggaacgagaggtttcaagtggcacggtcctgtatatgacgagccggtgagagagccgatgcagtggtacgcaagcggtacaggagaaggtcaaaccttctggacaaaggaagtctacaaaaacgcggggataacctttggaaacgctgatgttgacggatgtatctatgacgatccttacgatggcttttctgtcgaagaacaggaaagcgatccgaagagtcttttgaatttcatcagattcattctcaacttcagaaaagatcacgacgccattttgaatggagatcaaacgatcttcagggactggaaaaacctcatagcgttctacagagaatcctccaacgaaaagctgttggtggtcttgaatccggatccagtctggcaaaacagcttcacttttgaagaaaacatgacgatgattctcgaggtagattttgaaaacttcatctggaacgagtcaaacgtgtctttttcagcgggtgaatccttcactgtggatcccatgaaagcgtacattttcaaaaagtga

SEQ ID NO: 13521 - protein, 556 aa, Thermotoga maritima MSB8
MKVVKKPFLLLAFVFLLFLTSCFQTSMSQSLVSSNPHSNSTNTDGTSSNLEEVKYPVVYEIFIRSFYDRDGNGVGDLNGVSQKVDYLKELGVDAVWFMPFNEAVSYHGYDITDYYNVEKDYGTMEDLENMIQVLHENGIKVIMDLVINHTSDEHPWFKDAVENTTSSPYWDYYIMSLEDHSGQDHWHWKINSKGQKVWYFGLFGYNMPDLNHDSQKVREEVKKIVDFWISKGVDGFRIDAAKHIYGWSWDDGIQESAEYFEWFRDYVLSKKPDAILVGEVFSGNTYDLSLYPIPVFNFALMYSIRNYPEGQDGMIENNWVEESFLFLENHDLHRFFSHLQEHYKKFSESDYEFIKKRAALWYFLIFTLKGSPVIYYGGEIGTRGFKWHGPVYDEPVREPMQWYASGTGEGQTFWTKEVYKNAGITFGNADVDGCIYDDPYDGFSVEEQESDPKSLLNFIRFILNFRKDHDAILNGDQTIFRDWKNLIAFYRESSNEKLLVVLNPDPVWQNSFTFEENMTMILEVDFENFIWNESNVSFSAGESFTVDPMKAYIFKK

SEQ ID NO: 13522 - DNA, 1737 bp, Bacillus halodurans C-125
  CDS (1)..(1737): transl_table=11
ttgaaagctacaatctaccatcgaccaaaaagtgaagacgcttatgcttatgataaaagcacgatgcacattcgtcttcgcacaggtaagaatcacgtgcgaaaagtgaacctgatttatggtgatccttatgactggacgaaaaaccaatgggtaacttctaaaaaagagatgactccaacaggatctgatgcacagcatgatttctggttcgtagaggtgactcctccttatcgacggttgcgttatggtttcgaaattataacaaaaactgaaacgatctactatggagaaagtgggtttctcgatacaccatcaaaagatacgagcgactatttctgctttccatttatgaatccagctgatttgttttcaccacctgagtgggtaaaagacaccgtatggtatcaaatttttcccgaacgctttgcaaatggggatccgagccgtaatcctgaaggtaccttaccgtggggaagcgctgccccaactccaaccaaccatttcggtggagaccttcaagggatcatcgaccatctcgattacttgcaagagttagggattaatggaatctatttaacaccgatctttgaagcgtcttctaatcataaatacgacacgattgattatttaaaagtggaccctcactttggtgataaaacaacatttaaacgtcttgtagatgagtgccacaaacggggaattcgcatcatgcttgatgccgttttcaatcatgcaggcttctactttccaccgtttcaagatgtgctcaaaaaccagcaacactcaaaatatagtgattggtttcatttgcgtgactttcctgttcgtgctgaagagccgcccaactacgatacgtttgccttcacgccatttatgccaaagttcaatacggaaaacgaggaagtgagggaatacttactgaatgtggcaacgtattggatcaaagagtttgacattgacggctggcggttagacgtagctaatgaagtcgatcatgccttctggcgagaatttcgtaaaagagttaaagcattaaagcctgacttatacatccttggtgaagtatggcacaactcccttccttggcttgccggcgatcaatttgatgcggtcatgaattatccactgactaatgcgatcatcgattttgccggaaaacaaaagataggtcaacagcgattcgagcatgtcataacccaattgacgcacatgtacccaattcacgtccaacaagtagcctttaatttgctcggtagtcatgataccccgcgaatattgacgcaaacggacaatgatgtggcacgtgttaaacttcagtttctcttgctcttttcgcagcgcggaacaccgtgtatttattacggtgatgagattggcatgacgggtgggcaagatcctggatgtcgtaaatgcatggtttgggaagaagaagaacaaaatcaagagttactctcctttgtcaaaaggctcattcaacttcgcaagcaagagaaagctttcggaaccgaaggggatttgacgtttgtggagaatgattcttctcttctcatctatcaaaagacatacgaaaatcaacagctcttgtttgtcatcaattcaacagatcaaccagacagtgttcagttacctgttagctggacaaatcgtaacgcaaatgacttgctaacaggtgaaactttctcgctcgcaacagaaattgtcatcccggctaaatccgcgatggttcttaaatag

SEQ ID NO: 13523 - protein, 578 aa, Bacillus halodurans C-125
MKATIYHRPKSEDAYAYDKSTMHIRLRTGKNHVRKVNLIYGDPYDWTKNQWVTSKKEMTPTGSDAQHDFWFVEVTPPYRRLRYGFEIITKTETIYYGESGFLDTPSKDTSDYFCFPFMNPADLFSPPEWVKDTVWYQIFPERFANGDPSRNPEGTLPWGSAAPTPTNHFGGDLQGIIDHLDYLQELGINGIYLTPIFEASSNHKYDTIDYLKVDPHFGDKTTFKRLVDECHKRGIRIMLDAVFNHAGFYFPPFQDVLKNQQHSKYSDWFHLRDFPVRAEEPPNYDTFAFTPFMPKFNTENEEVREYLLNVATYWIKEFDIDGWRLDVANEVDHAFWREFRKRVKALKPDLYILGEVWHNSLPWLAGDQFDAVMNYPLTNAIIDFAGKQKIGQQRFEHVITQLTHMYPIHVQQVAFNLLGSHDTPRILTQTDNDVARVKLQFLLLFSQRGTPCIYYGDEIGMTGGQDPGCRKCMVWEEEEQNQELLSFVKRLIQLRKQEKAFGTEGDLTFVENDSSLLIYQKTYENQQLLFVINSTDQPDSVQLPVSWTNRNANDLLTGETFSLATEIVIPAKSAMVLK

SEQ ID NO: 13524 - DNA, 1704 bp, Streptococcus pyogenes M1 GAS
  CDS (1)..(1704): transl_table=11
atgaatgttgccggaatgctccatattcctgattcgaggtattgctttgccatatctcaaaaggaacttgtcatccgattacgcgtggccaaagaagatagaggtattactgttaatttggtccacgggcctaaatatggttatcatgaattccaagaagaattggaaatgtcagttgcctatacagaccatacgcatgcttattatgaaactactttaacattagacgatgtgaggttggcctacatttttaaaattgaagaagaaggtcaaacctattattttagtgaagatgggttaactactagttacgatttttcaaatgggttttataatttcttccaaatgccttatatcaatgctgttgatgttcatcaagtcattccttggacaaaagacgcggttttttatcaaatctttgttgatcgctttaaccgtggggattgggaaaaaggtgacagttatgtcaacatgggttggttagaaaaaccgactcctaaaagttttgctggtggagatttaaagggaattacagaaaaattagattacctcaaagatttagggattactgtcatctatttaacgccaatttttcaatccattagtaatcacaaatatgatattagtgattactacgctattgatccacaatttggaactaaatatgatttgcaagaattgattgatttagctcacaaaatgggaatcaagattattctagacgctgtctttaaccatgccagcagtgatgccgtggaatttcaggatgtcttgagatacggtaaagagtctaagttttttgattggtttatgactcatgatgaacacccatccatggacctagtaaactatgaaacctttgctggatgtaactatatgcccaaatggaatacctcaaatagagacgtgcaagactatctgattgagattgggcgatactggattaaagaattttgtatcgatggttggcgcctagatgtttctgatgaagtatctcatgatttttggcgacgtttccgtcaggcggttaaagcggaaaaagcagatgccattttaattggggagaactggcatgatgcctatccttatttggcaggggatcagtatgatgggataatgaattatgctttcaccaaagcctgtttggattactttgcttttgaaaccatgacatcaaaacaattggctgagaaattaagcaacattttgatgcgaaacacttggcaagtcaatcgcatgaacttgaatcttttggattctcatgatacgcatcgtttcttcactcaagttaagggttccaaagataaattgttagctgctttagcattgctctttatctttatgggcattccttgcttgtattatgggacagaagtggcaatggaagggggttacgaccctgattcgcgtcgcggttttccttgggatgatgctgagcgggacaaggatttctttagcaaagtaaaagcgattattgctcttcgccaacagccagctcttcaagaaggagctattagcattgattatgacgaagactgcctcattctgaaacgcagcttaggtgagcaaagcatttcacttgttcttaacaatggtgagagtgcttattctattaaggaaggaggacagattttgacaagcaatggggtaactaaaaacaaaaaacaattactccaggatggatatattgtgtttagtaactaa

SEQ ID NO: 13525 - protein, 567 aa, Streptococcus pyogenes M1 GAS
MNVAGMLHIPDSRYCFAISQKELVIRLRVAKEDRGITVNLVHGPKYGYHEFQEELEMSVAYTDHTHAYYETTLTLDDVRLAYIFKIEEEGQTYYFSEDGLTTSYDFSNGFYNFFQMPYINAVDVHQVIPWTKDAVFYQIFVDRFNRGDWEKGDSYVNMGWLEKPTPKSFAGGDLKGITEKLDYLKDLGITVIYLTPIFQSISNHKYDISDYYAIDPQFGTKYDLQELIDLAHKMGIKIILDAVFNHASSDAVEFQDVLRYGKESKFFDWFMTHDEHPSMDLVNYETFAGCNYMPKWNTSNRDVQDYLIEIGRYWIKEFCIDGWRLDVSDEVSHDFWRRFRQAVKAEKADAILIGENWHDAYPYLAGDQYDGIMNYAFTKACLDYFAFETMTSKQLAEKLSNILMRNTWQVNRMNLNLLDSHDTHRFFTQVKGSKDKLLAALALLFIFMGIPCLYYGTEVAMEGGYDPDSRRGFPWDDAERDKDFFSKVKAIIALRQQPALQEGAISIDYDEDCLILKRSLGEQSISLVLNNGESAYSIKEGGQILTSNGVTKNKKQLLQDGYIVFSN

SEQ ID NO: 13526 - DNA, 1614 bp, Streptococcus pyogenes M1 GAS
  CDS (1)..(1614): transl_table=11
atgaacaaccactggtggcataaagctacgatttatcagatttacccaaggtcctttaaagacaccagcggcaatggtattggtgatttaaaaggcattaccagtcaactggactacttgcaaaaacttggcattacagccatttggttatctcctgtttaccaaagtccaatggatgacaatggttatgacatctctgactatgaagcgattgctgatgtttttggagacatggcagatatggatgagctcttagcagcagctaatgagcgaggcattaagattatcatggacttggtggtcaaccatacgtctgatgagcatgcttggtttgttgaagctagagaaaatcccaatagtcctgagcgtgattactatatttggcgtgacgagccaaacaacctcatgtctattttttcaggatctgcttgggaattggatgaggcatcaggacaatattacctgcatttgtttagcaagaaacagcctgatttgaactgggaaaatgctcagctgcgccaaaaaatttacgatatgatgaatttctggattgccaaaggcatcggtggttttcgtatggatgtgattgacctgattgggaaggttcctgacttggagatcacgggtaacgggccgcgcttacacgattacctcaaagaaatgaatcaagcaacctttggcaaccatgacgtgatgacagtcggtgagacttggggagcaacgcctgaaattgctcgccagtattctcgccctgaaaacaaagagttatccatggtcttccaatttgagcatgtgggtcttcaacataaacctgacgctcccaagtgggattatgccaaagaattagacgtgcctgctctgaaagctatttttagcaagtggcagacagaattaaagttaggagaaggctggaattcgcttttttggaataaccatgacttgccacgggtcttatccatttggggcaatgacagcacttaccgagaaaaatcagccaaggctttagctattttactgcatttgatgcgaggaaccccttacatttaccaaggagaagagattggcatgaccaattatccttttaaagacttaaccgaggttaatgatattgagtcccttaactatgctaaggaagctatgggaaatggagtgtcagctgcgcgtgtgatggatagcatccgtaaggtaggacgagacaatgctagaacgccgatgcagtggtctaaggacacacatgctggcttttctgaagcaaaagagacttggttgccggtcaaccccaactaccaagacatcaatgtggccgatgcccttgctgatccagactctattttttacacctaccaaaaattgattgccttgcgtaaggagcaagactggctagttgaagcggattatcacctcttgccaacagctgataaagtgtttgcttatcagcgtcagcttggagaagagacgtatgtgattgttgtcaatgtgtctgatgaggagcaagtctttgccacagacttagcaggtgcacaagtgatcatcgccaatacagatgtggacacggtattagagaccaagcacttacaaccttgggatgccttttgtctcaaactgaaggcctag

SEQ ID NO: 13527 - protein, 537 aa, Streptococcus pyogenes M1 GAS
MNNHWWHKATIYQIYPRSFKDTSGNGIGDLKGITSQLDYLQKLGITAIWLSPVYQSPMDDNGYDISDYEAIADVFGDMADMDELLAAANERGIKIIMDLVVNHTSDEHAWFVEARENPNSPERDYYIWRDEPNNLMSIFSGSAWELDEASGQYYLHLFSKKQPDLNWENAQLRQKIYDMMNFWIAKGIGGFRMDVIDLIGKVPDLEITGNGPRLHDYLKEMNQATFGNHDVMTVGETWGATPEIARQYSRPENKELSMVFQFEHVGLQHKPDAPKWDYAKELDVPALKAIFSKWQTELKLGEGWNSLFWNNHDLPRVLSIWGNDSTYREKSAKALAILLHLMRGTPYIYQGEEIGMTNYPFKDLTEVNDIESLNYAKEAMGNGVSAARVMDSIRKVGRDNARTPMQWSKDTHAGFSEAKETWLPVNPNYQDINVADALADPDSIFYTYQKLIALRKEQDWLVEADYHLLPTADKVFAYQRQLGEETYVIVVNVSDEEQVFATDLAGAQVIIANTDVDTVLETKHLQPWDAFCLKLKA

SEQ ID NO: 13528 - DNA, 1974 bp, Deinococcus radiodurans R1
  CDS (1)..(1974): transl_table=11
ttgaccgcgctgcccttttcccccacactggcttgcaaatccaaaggcaacgcttgccccctccggcacgacctcccagcgcgactttgcgcggcaggccgtgccggagcttcgttttgccccctcatccaaggagttcttatgtaccccaccgccaccctgagtgcccagcacgaccacacccccggttacaccgaacgcctcggtgcgctcctcggcgggcacgtccgcgtgcggctgcggaccaccctgccggtcctgggcgtgcggctcaaagtcgtgcagatcggtgaaatcgagactcttcccgcccgcgaggtgacgggcttgcagggcgaaggccgctggttcgaggccgacctgccgctgcacgaggcccgcgtgcgctacgcctggcacctcgacctgcctggcgaccacctcaacctgacccggctggggctgcaccacgcgcgccggggctttcgctcgtggtttcagtacctcgcgggctatcaggcgcccgagtgggcctggaagtcggtcttttatcagattttccccgaccgctttcgcaacggtgattccacgaacgacgtgcagaccggcgaatacttgtacgaaggccgcccggtggaaaaggtggagtggacgcacccggttgacgcctggggcgatattcacgggcactacggcggcgacctcgcgggcatcacgcaggcggtgccgtatttgcaggcgctcggcgtgaccgggctgtggctcacgccgattttcacctcgccgagcaaccaccgctacgacatcaccgattaccgcgccattgacccccacctcggcggggacgccgcgtgggacgcgctggtgcaggcgacggacgcggcgggcatccgcatcgtccttgacggggtgttcaaccatatgggcaacgaaaacgcgctgtttcaggccgcgctcgctgccgaggacgcccccgagcgggccatgttcacctggcgcgatacgccgggcaagccgccctaccactcctttttcgacgtggcgacgctgcccaaaatcgactacgccaacgagcgggcggtggaggagtttttcagcggcgagcgcagtgtggtccggcactggctgcggcgcggcgcggcgggctggcggctggacgtggcgcacatgctcggcaagggcggcaccgaggaagacaatctggcgctgcaccgcgtgctcaaggcggcggcgcggcaggaaaaggccgacgcctacgtgttcggcgagcgcttctacgaccccgaactcgcgctcgacgggcagggcgaagacggcgcgatgaactaccacggttttggcctcccggtgatgcagtggctggcgggcgcgacctatttcaacgaaccgagccgcctggacggcactgaactcgccgaaattctctgggatgcgtaccacgcgctgccaccgcaggccgcgctgaacatgttcaacctgctcgaatcgcacgacatcgggcgggcgctgtggcggctggggggcgaccgcaccaagtaccgcgccgcactcacgctgctgctcgcctacgcgggcgtgccgtgcctgtactacgggagcgaaatcggcctctcgcagtcgcgcgacggcaacatgccgtggtgccgcgagccgatgccctgggacgaggcgaggtgggacatggagctgctcgcccatgtcaaagctctggtgaaggttcgccgcgagacgcccgtgttgcacaccggggcccttcagttcatccacgccgagccggacgccctcgccttcctgcgcgaagtgaccgggccggacggcgcggcggagcgggtggtcgccctcgccagccgccgggccggggcacatccggtgaccttcaccctcccggcgggcgagtggcaagacgccctgagcggcgagcggctcggcgggggagaggtcacgctggacgcggcgggcgggcagttgctgctcagtttgcctctcagtcgctga

SEQ ID NO: 13529 - protein, 657 aa, Deinococcus radiodurans R1
MTALPFSPTLACKSKGNACPLRHDLPARLCAAGRAGASFCPLIQGVLMYPTATLSAQHDHTPGYTERLGALLGGHVRVRLRTTLPVLGVRLKVVQIGEIETLPAREVTGLQGEGRWFEADLPLHEARVRYAWHLDLPGDHLNLTRLGLHHARRGFRSWFQYLAGYQAPEWAWKSVFYQIFPDRFRNGDSTNDVQTGEYLYEGRPVEKVEWTHPVDAWGDIHGHYGGDLAGITQAVPYLQALGVTGLWLTPIFTSPSNHRYDITDYRAIDPHLGGDAAWDALVQATDAAGIRIVLDGVFNHMGNENALFQAALAAEDAPERAMFTWRDTPGKPPYHSFFDVATLPKIDYANERAVEEFFSGERSVVRHWLRRGAAGWRLDVAHMLGKGGTEEDNLALHRVLKAAARQEKADAYVFGERFYDPELALDGQGEDGAMNYHGFGLPVMQWLAGATYFNEPSRLDGTELAEILWDAYHALPPQAALNMFNLLESHDIGRALWRLGGDRTKYRAALTLLLAYAGVPCLYYGSEIGLSQSRDGNMPWCREPMPWDEARWDMELLAHVKALVKVRRETPVLHTGALQFIHAEPDALAFLREVTGPDGAAERVVALASRRAGAHPVTFTLPAGEWQDALSGERLGGGEVTLDAAGGQLLLSLPLSR

SEQ ID NO: 13530 - DNA, 1497 bp, Deinococcus radiodurans R1
  CDS (1)..(1497): transl_table=11
gtgagccgcccacccgctatcctgcgccccgccatgtccgagcccgtctctgccgttcccctgtctgctcccgtcacccccgagtgggtcgccgacgccgtcttctaccagattttccccgaccgcttcgcccgctcgggccgcgtgaccggcctgcaccttcagccctggggcagcgcgccgaccattcacggctacatgggcggcgacctgtggggcgtggccgagcggctgggcgaccttgccggcctcggcgtgaatgcgctgtatttctgcccggtgtttcagtcggcctccaaccaccgctaccacacccacgactattttcaggtggaccccatgctcggcggcaacgcggcgctgcggcacctgctcgatgaggcgcacgcgcgcggcatccgggtggtgctcgacggggtgttcaaccatgccagccggggcttttttcagttcaacgacctgctcgaacacggtgaggcgagtgcgtaccgcgactggtttcatgtgaccggctggccgctgagcgcctacgacgaggaccgccccgccaactacgcggcgtggtggggcatccgggcgctgcccaagttcaacaccgaccaccccgaggtgcgcgagtttctgctgagcgtggccgaatactggatgcacttcggcatcgacggctggcggctcgacgtgccgaacgagattgacgacgacgccttctggcaggagtttcgccgccgggtcaaggcgattaaccccgacgcctacatcgtgggcgaaatctggggcgacgccggacgctggctggcgggcgaccagttcgacgcggtgatgaactaccacttcacccgcccctgcctgggctttttcggggcgcggacgctcgaccatccgatgaacgaacgcagcggcaccgggcgggtggagccgctggacgccgccgcttttgccgtgcgggtggaagaagtcacccgcatgtaccaccccgccgtcgtgcgcgcgcagctcaatctgctcgactcgcacgacaccgcccgcttcctgacggcggtgggcggcgacgcctcggcgcagcggctcgcgctcgtgtttcagttcagctatgtgggcgcgccctgtctgtactacggcgacgaaatcgggctgcccggcggcgtggaccctgactgccgccgcgcttttccctgggacgagccgcagacctgggaccacgacaccctgaccctcgtgcgcgagttgacggcggcgcggcaccgttcggcggcactgcggcgcggcgactttacggtgctgcacgcgcagggcgagcaggtgtcgttcgctcgcaagcatgacggagaggcggcgtatgtggccttcaactgcgcgctggatgccgccccggttccggtgcccgccacatcgggccgttaccgcgacatgctgacgggcgcggtgcatgacctgaacgaaagctcggtgctgacgctgcctgcccggacggcggcgttgctgctgtgcgaggggtaa

SEQ ID NO: 13531 - protein, 498 aa, Deinococcus radiodurans R1
MSRPPAILRPAMSEPVSAVPLSAPVTPEWVADAVFYQIFPDRFARSGRVTGLHLQPWGSAPTIHGYMGGDLWGVAERLGDLAGLGVNALYFCPVFQSASNHRYHTHDYFQVDPMLGGNAALRHLLDEAHARGIRVVLDGVFNHASRGFFQFNDLLEHGEASAYRDWFHVTGWPLSAYDEDRPANYAAWWGIRALPKFNTDHPEVREFLLSVAEYWMHFGIDGWRLDVPNEIDDDAFWQEFRRRVKAINPDAYIVGEIWGDAGRWLAGDQFDAVMNYHFTRPCLGFFGARTLDHPMNERSGTGRVEPLDAAAFAVRVEEVTRMYHPAVVRAQLNLLDSHDTARFLTAVGGDASAQRLALVFQFSYVGAPCLYYGDEIGLPGGVDPDCRRAFPWDEPQTWDHDTLTLVRELTAARHRSAALRRGDFTVLHAQGEQVSFARKHDGEAAYVAFNCALDAAPVPVPATSGRYRDMLTGAVHDLNESSVLTLPARTAALLLCEG

SEQ ID NO: 13532 - DNA, 1695 bp, Deinococcus radiodurans R1
  CDS (1)..(1695): transl_table=11
ttgaatcccgtgtcttctatttcatataaaaaatattttccggcgtcgcaattctcatctgaaacgattcagtccaccctaaacttgagcatgacttccctgcaaggcgagctgaaatggtggcaaagcggcatcatttaccagatttacccacgttcctatcaggacagcaacggcgacggcgtgggcgacctgcccggtatcacggcgcggctgccgtatgtcgcgagtctgggggtgcaggcggtgtggctctcccccattttcaaaagcccgatgcgcgatttcggatacgacgtggcggattactgcgacattgacccggtgttcggcacgctggagcagttcgatgcgttggtggccgaggcgcaccggctggggctgaaggtcatgctcgactacgtgcccaaccacaccagcagcgaccacgcctggttccaagaggcgctcacgggcaaggccagcgccaaacgcgactggtacgtatggcgcgaccctgccccggacggcgggctgccgaacaactggaaatccttcttcggcggcccggcatggacgctggacgaggcgagcgggcagtattacctgcaccagtttttgccctcacagccggacctcaactggcgcaatcccgacgtgcgggcggcgatgtttgatgtgctgcggttctggatgcgccggggcgtggacggcttccgggtggacgtcatctggctgctggccgaggacgagcggtttctggacgagccggaaaaccccgacgccgaccgcgaagtcgttggcgggcagatcgaacacagtacgctgctgcacatctacacgcaggaccagcccgagacgcacgactatgtgcgcgagatgcgccgggtgatcgacgagttcgacgaccggatgatggtcggtgaaatctacctgccgctcgacaaactgctgccctactccggcacgcccgaggcgccgatggtgcatctgccgttcaactttcacctgattctgctgccgtgggacgcgcaaaccatccggcagttcgccgacgagtacgacgcagcgagcaacgcggcgggggcgtggcccaattgggtgcttggcaaccacgaccagcaccgcttcaagacgcgggtgggcgcggcgcagtaccgggtcgcgcaaacgctgctgctcacgctgcgcggcacgccgacggtgtactacggcgacgagatcggtatggaaaatgtgcccgttcccccggagaagatggtggacccctccggcctgcaacagcccgacagcccggacgccgggcgcgaccccgagcgcaccccgatgcagtgggaggcggcgccgggcgcaggatttacggcggcaggcaccgagccctggctgccgctcaccgacaacttcgcgcaggtgaacgtgcaagttcaggagcaggactcgcagagcgacctgaactacttccgcgccctgacccgcctgcgccaggagcagccggccctggtgggcggcagctaccgcagcctggacagcgggcacgccgacgtatttgccttcgagcgtgaactgaacggcgagcggttgacggtgtggctgaatttccgcggtgaggaacgcgcggtggccgccacggggcaaacgcttctgagcagccgtggcgatcagcccgccgcccaatcgccgctgcgcgggcacgaggcgcgggtggtgctgggttga

SEQ ID NO: 13533 - protein, 564 aa, Deinococcus radiodurans R1
MNPVSSISYKKYFPASQFSSETIQSTLNLSMTSLQGELKWWQSGIIYQIYPRSYQDSNGDGVGDLPGITARLPYVASLGVQAVWLSPIFKSPMRDFGYDVADYCDIDPVFGTLEQFDALVAEAHRLGLKVMLDYVPNHTSSDHAWFQEALTGKASAKRDWYVWRDPAPDGGLPNNWKSFFGGPAWTLDEASGQYYLHQFLPSQPDLNWRNPDVRAAMFDVLRFWMRRGVDGFRVDVIWLLAEDERFLDEPENPDADREVVGGQIEHSTLLHIYTQDQPETHDYVREMRRVIDEFDDRMMVGEIYLPLDKLLPYSGTPEAPMVHLPFNFHLILLPWDAQTIRQFADEYDAASNAAGAWPNWVLGNHDQHRFKTRVGAAQYRVAQTLLLTLRGTPTVYYGDEIGMENVPVPPEKMVDPSGLQQPDSPDAGRDPERTPMQWEAAPGAGFTAAGTEPWLPLTDNFAQVNVQVQEQDSQSDLNYFRALTRLRQEQPALVGGSYRSLDSGHADVFAFERELNGERLTVWLNFRGEERAVAATGQTLLSSRGDQPAAQSPLRGHEARVVLG

SEQ ID NO: 13534 - DNA, 1452 bp, Deinococcus radiodurans R1
  CDS (1)..(1452): transl_table=11
atgcaccacctcatcctcccggcgctgctgctcgcctccgccgccagcgcccaggctgcgcctacatcaaccggccccagctttgaaggccagatcatctatcaggtcatgcccgaccgtttcttcgacggtgacccttccaacaatgccggggtggaccgtgccaacctccgcgcctggcacggcggcgacctcgcggggctgacgcaaaagctgccttacatccagaaacttggggcgacggccatctggatgacgccgatctaccgccagcagaccgccaaatccttcgacaccgccgcttatcacggctactggcccgccgatttccggcaggtggacccgcacttcggctcgatggcgaccttcgatacgttcatgaaggcagcgaaaggcgcggggatgaaggtggtccttgaccaggtcatcaatcactacggctacgaggccccagcggtgaaggccaatccgggctggttcaacggcaaggcgcagtgcgacgcgaccaagaacaaggacgtggactgtcccctcgccggcctacccgacctgcgccagagcgtgcccgccgtgcgccagcagttgttcgggaacggcgacttctggcgggcgcgaggggtggacggcttccgttacgacgcgatcaagcatgtggagcggcctttcctgctcgacctgctgaaaaaagaccgcgccgccggcacctggacgctcggcgagtggtacgacgccgacgcgggcacggtggccgagtggcaaaagcaggggtttgacagcctgtttctcttcagcttgcaagcggcgatgcgcggcagcgtgatgggcgcgtccagcctggtcaacgtgcgcgaggtgctgcgccgctcggacgaacttgcccggcccggcgaggtggcactgtttctcgacaaccacgacgtgccgcgtttctcgcagggcagctttttcgaggacgaagggcaggcccgcaccaaatacggcctgcgggcgctgctcacgctgcggggcgtgccggtcctctaccagggcaccgaaattgccatgcgcggcggagccgaccccgacaaccggcgcgacatgcgctttgaaagccagtggacgcccgccgaaaaagccgtatacaacgtggcccgcgacgccattgccgtccgcaaggcgagcccgcccctcagtcggggcacccagacgctgcttcccgtccccgaccggcaggccgacgacctgctgctgctgacccgcgagcagggcggacagcgggtgctggtggcctggcacaacgggttgaaacgccagagctactcgctgaagctcagtaccctgggaatcaaggcgaacgctcaggatgtgaccaagacgctgtttgccgggcaggacgccaaagtgagcgtgaagggcgggtatttgcacctgagcctaccgcctaaggacgcggcggcgttcgttttgcggtga

SEQ ID NO: 13535 - protein, 483 aa, Deinococcus radiodurans R1
MHHLILPALLLASAASAQAAPTSTGPSFEGQIIYQVMPDRFFDGDPSNNAGVDRANLRAWHGGDLAGLTQKLPYIQKLGATAIWMTPIYRQQTAKSFDTAAYHGYWPADFRQVDPHFGSMATFDTFMKAAKGAGMKVVLDQVINHYGYEAPAVKANPGWFNGKAQCDATKNKDVDCPLAGLPDLRQSVPAVRQQLFGNGDFWRARGVDGFRYDAIKHVERPFLLDLLKKDRAAGTWTLGEWYDADAGTVAEWQKQGFDSLFLFSLQAAMRGSVMGASSLVNVREVLRRSDELARPGEVALFLDNHDVPRFSQGSFFEDEGQARTKYGLRALLTLRGVPVLYQGTEIAMRGGADPDNRRDMRFESQWTPAEKAVYNVARDAIAVRKASPPLSRGTQTLLPVPDRQADDLLLLTREQGGQRVLVAWHNGLKRQSYSLKLSTLGIKANAQDVTKTLFAGQDAKVSVKGGYLHLSLPPKDAAAFVLR

SEQ ID NO: 13536 - DNA, 1659 bp, Deinococcus radiodurans R1
  CDS (1)..(1659): transl_table=11
atgacccaggcacacccggagtggtacaagagcgctgtcttctacgaactgtccgtgcggacctttcaggacggcaacggcgacggcaagggcgattttcccggcctgacctcgcggctggactacctgaaaaacctcggcgtggactgcctgtggttgctgccctggtttcccagcccactgcgcgacgacgggtacgacgtggccgactaccgggggattcaccctgacctcggcacgctcgacgacttcaaggtctttctgcgcgaagcccacgcccggggcctgcgggtcatcggcgacctggtgaccaaccacacgtccagcgaccacccctggtttcaggcggcgcggcgcggcccgaccctgcccgacggctcgcccaacgagtaccacgactactacgtctggagcgacgagggcaaggaatacgccgacacccgcatcatcttcaccgacaccgaggtcagcaactggacgctcgacgagcaggcaggcaagtattactggcaccgctttttcgccagccagccggacctgaactacgacaacccgaaagtggtggaagaacttcacggcgccgcccgcttctggctcgacctcggcctcgacgggttccgggtggacgccgtgccctacctcatcgagcgcgagggcacgagctgcgagaatctgcccgaaacacacgagattctcaagggcttccgggcgatggtggaccgcgagtatccggggcggctgctgcttgccgaggcgaaccagtggcccgaggaagtcgtcgagtacttcggcaccgaagccgagcccgagttccacatgtgcttcaacttcccggtgatgccccggctgtacatgagcctgaaaagggaggacacctccagcatccgcgagatcatgggccgcctgccgaaaatcccgagtttcggccagtggtgcaccttcctgcgcaaccacgacgaactgacgctggaaatggtcaccgacgacgagcgcgccttcatgtatgccgcctacgcgcccgacgcccgcatgaaaatcaacgtgggcatccgccgtcgcctcgcgccgctgctcgacaacgaccggcgccgcatcgagctgctgaacactgtgctcctcgccctgcccggcagccccatcctgtactacggcgacgaaatcggcatgggcgacgacctcggcctgcccgaccgcaacggcgtgcgcaccccgatgcagtggaacgcgggcaccagcggcggtttttccactgcgcagccctccgactgctttttcccgccgattcaggacccggtgtacggcttcgggcgcgtcaacgtgcagagccagctccaagaccccagcagcctgctgaagtggaccgcccggcaactcgaactgcgccgcgcccaccccgcctttgcgcacggcgacctcaccttcatcgaaaccggcaaccccgccatcctcgcctttacccgccagtacgacggcgaaacgctgctcatcgtcagcaacttcgcgggcaacgcccaggccgggctgctcgatctcgcgcccttcgtgggccgcgccccggtcacactttccggggccagcccgctgccggtggtcactggaaacggccagtacccggtggtgatgggcaagtacgactattactggctgcggttgaattga

SEQ ID NO: 13537 - protein, 552 aa, Deinococcus radiodurans R1
MTQAHPEWYKSAVFYELSVRTFQDGNGDGKGDFPGLTSRLDYLKNLGVDCLWLLPWFPSPLRDDGYDVADYRGIHPDLGTLDDFKVFLREAHARGLRVIGDLVTNHTSSDHPWFQAARRGPTLPDGSPNEYHDYYVWSDEGKEYADTRIIFTDTEVSNWTLDEQAGKYYWHRFFASQPDLNYDNPKVVEELHGAARFWLDLGLDGFRVDAVPYLIEREGTSCENLPETHEILKGFRAMVDREYPGRLLLAEANQWPEEVVEYFGTEAEPEFHMCFNFPVMPRLYMSLKREDTSSIREIMGRLPKIPSFGQWCTFLRNHDELTLEMVTDDERAFMYAAYAPDARMKINVGIRRRLAPLLDNDRRRIELLNTVLLALPGSPILYYGDEIGMGDDLGLPDRNGVRTPMQWNAGTSGGFSTAQPSDCFFPPIQDPVYGFGRVNVQSQLQDPSSLLKWTARQLELRRAHPAFAHGDLTFIETGNPAILAFTRQYDGETLLIVSNFAGNAQAGLLDLAPFVGRAPVTLSGASPLPVVTGNGQYPVVMGKYDYYWLRLN

SEQ ID NO: 13538 - DNA, 1824 bp, Mycoplasma pulmonis UAB CTIP
  CDS (1)..(1824): transl_table=4
atgtataaaaaaatatttatctttttaacaccacttttgttacttactcaaacaataactatttcttgtattaataaaaatgaaaaaaattgaggtgacaaaaattttaaaaaaaatattgaaaaagaaaatttaaataatttaacttatgttgataaatcactagaggcaaaaaatgaagcaccttttattgaaaaacaaaaatcaaatgtaatttatcaactaactgtttattcttttgcagatggaaataatgatggaattggtgattttataggacttaaaaataatattgactattttgtaaaacttggaatcaatacactctatctttctcccattcatcctgctagttcatatcatggttatgatgtaattgattatcttgatgttgcccctgaacttggtggtatggaggcttttaaagaatttttaaaagtatctcatgcaaatggtattaaagttgtaatggatttagtgtttaatcactcttcttttgagcatccatgatttcaagaagcactaaatggaaacactaagtatcaaaattattattattttttagatgaaaatatttcaaaggatacacaaggtcttggaattgatagtcaagatctaagaaatcaatttaaaaatcttaaaaataaacaagcaagcaataaaaaatatgttgcacatttttgaccaggaatgcctgatttaaatttaaataattctgatttaattaaagagttaaaagctattcaaagatattgatcaaaaattggagttgatggttttcgttatgatgctttttatcatttttttgatagtaataatcaacataaaccaagagaaaatggtaatcaaaaaattaattcaatttttcaaaaattaagatcaactaataaagaagcaataaatgataatactcaaagatcatctaaagaaccatttttatttggtgagtgatgaaaatctccttttgaagcaaatgactatcttgatattaaaaatcaaggattagatagtgtcattgatggacgtaattgaaaagataatattaatgtttcaattaatgcaaaagaacaaagagcattattggaatttttaaacaaaaataattcaacttgaatgccttttttagacaaccatgatgttgaaagatgaattaacaaagtaagaagacaaattaataaaaatgtagcatcagttgataagcttagtgaattagaaatttcactaatgaaatatgctcttgtatctttgctttcaagagctggaagcccaatcttatataacggaaatgagcttaatttacatggaggacccaaacaagctggagatcattttgtaagagaggcttttccttgaaaagatagaacaaaacaagttgatttttatgaattaagatcaggaaaagaaaatagtagaatttttttgaatttatctaaaaatgaagaaaaaatagaagatgccataaaaaatgaaaattcaacttttaatcttgttaaacaactaaatgaaattagaaataaatatcaatatgttgtttctcaagatcccaatacaattgctgatttagaagagattttgagtgaaagtgaaattagaaaatatcaaaacaacttaaatttaagaaaaaacaatcaaggagaatatttactttatatttttggatgaggaaacaatgatatttcttttaaaatcaaaaacaattttaaaattgatcaaatcttattgcaaaaaaatataaatataaatactcaaacaagagaaatttcttctagtggaataggtacttatgctgttttaaaaattaataaaaaaagtgaggcaatttaa

SEQ ID NO: 13539 - protein, 607 aa, Mycoplasma pulmonis UAB CTIP
MYKKIFIFLTPLLLLTQTITISCINKNEKNWGDKNFKKNIEKENLNNLTYVDKSLEAKNEAPFIEKQKSNVIYQLTVYSFADGNNDGIGDFIGLKNNIDYFVKLGINTLYLSPIHPASSYHGYDVIDYLDVAPELGGMEAFKEFLKVSHANGIKVVMDLVFNHSSFEHPWFQEALNGNTKYQNYYYFLDENISKDTQGLGIDSQDLRNQFKNLKNKQASNKKYVAHFWPGMPDLNLNNSDLIKELKAIQRYWSKIGVDGFRYDAFYHFFDSNNQHKPRENGNQKINSIFQKLRSTNKEAINDNTQRSSKEPFLFGEWWKSPFEANDYLDIKNQGLDSVIDGRNWKDNINVSINAKEQRALLEFLNKNNSTWMPFLDNHDVERWINKVRRQINKNVASVDKLSELEISLMKYALVSLLSRAGSPILYNGNELNLHGGPKQAGDHFVREAFPWKDRTKQVDFYELRSGKENSRIFLNLSKNEEKIEDAIKNENSTFNLVKQLNEIRNKYQYVVSQDPNTIADLEEILSESEIRKYQNNLNLRKNNQGEYLLYIFGWGNNDISFKIKNNFKIDQILLQKNININTQTREISSSGIGTYAVLKINKKSEAI

SEQ ID NO: 13540 - DNA, 1806 bp, Mycobacterium tuberculosis CDC1551
  CDS (1)..(1806): transl_table=11
atgaacgaggcagaacacagcgtcgagcaccctcccgtgcagggcagtcacgtcgaaggcggtgtggtcgagcatccggatgccaaggacttcggcagcgccgccgccctgcccgccgatccgacctggtttaagcacgccgtcttctacgaggtgctggtccgggcgttcttcgacgccagcgcggacggttccggcgatctgcgtggactcatcgatcgcctcgactacctgcagtggcttggcatcgactgcatctggttgccgccgttctacgactcgccgctgcgcgacggcggttacgacattcgcgacttctacaaggtgctgcccgaattcggcaccgtcgacgatttcgtcgccctggtcgacgccgctcaccggcgaggtatccgcatcatcaccgacctggtgatgaatcacacctcggagtcgcacccctggtttcaggagtcccgccgcgacccagacggaccgtacggtgactattacgtgtggagcgacaccagcgagcgctacaccgacgcccggatcatcttcgtcgacaccgaagagtcgaactggtcattcgatcctgtccgccgacagttctactggcaccgattcttctcccaccaaccggatctgaactacgacaaccccgccgtgcaagaggcgatgatcgacgtcatccgcttttggctcggcttgggcatcgacgggtttcggttggacgcggtgccctatctctttgaacgtgagggcaccaactgcgagaacctgccggaaacacacgcttttctcaagcgagtccgcaaggtggtggacgacgaattccccggccgggtgctgctagccgaagccaatcagtggccgggcgatgtcgtcgaatatttcggtgatcccaacaccggtggcgacgagtgccacatggcctttcacttcccgctgatgccgcgcatcttcatggccgtgcgccgggagtcccgttttccgatctcggagatcatcgcccagaccccaccaatccctgacatggcgcaatgggggatatttctgcgcaaccacgacgagctgacgttagaaatggtcaccgacgaagagcgcgactacatgtacgccgagtacgccaaggatccacggatgaaggcgaatgtcggaatccgtcgtcggcttgcgccgctgctcgacaacgaccgcaaccagatcgagctgttcaccgcgctgctgctgtcgctgcccggctcgccggtcctctactacggcgacgagatcgggatgggcgacgtgatctggttgggtgatcgcgacggcgtgcgcatcccgatgcagtggacaccggaccgcaacgcgggtttctccaccgccaacccgggtcggctgtacctgccgcccagccaggacccggtttacgggtatcaggccgtcaacgtcgaggcgcaacgcgacacctcgacgtcgctgctcaacttcactcgcaccatgctggccgtgcgtcgccgacaccccgcgtttgcggtcggcgcattccaggaattgggcgggtccaacccgtcggtgctggcctacgtgcgtcaggtggccggcgatgacggcgacaccgtgctctgtgtcaacaacctgtcgcgattcccgcagcccatcgaattggacttgcagcaatggaccaactacacgccggtcgagctgaccgggcacgtggagtttccacgcatcggccaggtgccctatctgctgacgctgccaggacacgggttctactggttccagttgaccacacatgaggtgggggcacctcccacttgcgggggagagcggcgcctatga

SEQ ID NO: 13541 - protein, 601 aa, Mycobacterium tuberculosis CDC1551
MNEAEHSVEHPPVQGSHVEGGVVEHPDAKDFGSAAALPADPTWFKHAVFYEVLVRAFFDASADGSGDLRGLIDRLDYLQWLGIDCIWLPPFYDSPLRDGGYDIRDFYKVLPEFGTVDDFVALVDAAHRRGIRIITDLVMNHTSESHPWFQESRRDPDGPYGDYYVWSDTSERYTDARIIFVDTEESNWSFDPVRRQFYWHRFFSHQPDLNYDNPAVQEAMIDVIRFWLGLGIDGFRLDAVPYLFEREGTNCENLPETHAFLKRVRKVVDDEFPGRVLLAEANQWPGDVVEYFGDPNTGGDECHMAFHFPLMPRIFMAVRRESRFPISEIIAQTPPIPDMAQWGIFLRNHDELTLEMVTDEERDYMYAEYAKDPRMKANVGIRRRLAPLLDNDRNQIELFTALLLSLPGSPVLYYGDEIGMGDVIWLGDRDGVRIPMQWTPDRNAGFSTANPGRLYLPPSQDPVYGYQAVNVEAQRDTSTSLLNFTRTMLAVRRRHPAFAVGAFQELGGSNPSVLAYVRQVAGDDGDTVLCVNNLSRFPQPIELDLQQWTNYTPVELTGHVEFPRIGQVPYLLTLPGHGFYWFQLTTHEVGAPPTCGGERRL

SEQ ID NO: 13542 - DNA, 1641 bp, Mycobacterium tuberculosis CDC1551
  CDS (1)..(1641): transl_table=11
atggaccaacaccagcgaccggatccaatgggccccggctctcctcgcgccagcgctcgtcgaccggagccagatccgatgggcgagccgtggtggtcgcgagccgtgttctaccaggtctatccccgatcgttcgccgacagcaacggcgacggggtgggcgacctggacgggttggcgagccggcttgaccacctgcaacagctcggtgtcgacgcgatctggatcaacccggtcaccgtctcgccgatggcagaccacggatacgacgtcgccgatccccgcgacatcgacccactcttcggcgggatgccggcgttcgaacggttggtcgctgcggcacaccggcagggcatcaaagtcaccacggacgtggtgcccaaccacaccagttcggcgcacccatggtttcaggccgcgctggctgacctcccgggtagcccggcgcgggatcgctatttctttcgcgacgggcggggccccgacgggtcgctgccgccgaacaactgggagtcggtgttcggcgggccggcctggacccgagtgcgcgaaccggacggcaacccgggccagtggtacctgcaccttttcgacaccgaacagccggacctgaactgggacaacccggaaatccttgacgacttcgagaaaacactgcgcttctggctggaccgcggcgtggatggcttccgcatcgacgtggcgcacggcatggccaagcccccgggcctgccggactcaccggacctgggcatcgaggtgctgcaccaccgcgatgacgacccgcgcttcaaccacccgaatgtgcacgcgattcaccgcgacatccgcacggtgatcgacgagtaccccggagcggtaaccgtcggcgaggtgtgggtacacgacaacgcccgctgggcggagtatctgcggcccgacgaactgcatctcggcttcaatttccggctggcgcgaaccgagttcgacgccgccgagatccgcgacgcggtggcgaactccctggccgccgcggcgctgcagaacgcgaccccaacctggacgctggccaatcacgatgtgggacgggaggttagccgctacggcggcggcgagatcgggctgcgccgggccaaggcgatggcggtggtgatgctcgccctgccgggcgtggtcttcctctacaacggccaggaactgggtttgcccgacgtggacctgcccgacgaggtgctgcaggatccgacgtgggaacgctcgggacgcaccgaacgcggtcgcgatggctgccgggtgccgattccctggtcgggcaacattcccccgttcgggttctcgacgtgtccagacacctggttgccgatgccgccggaatgggcggcgctgaccgccgaaaaacaacgcgctgatgccggctcgaccttgtcgttttttcgacttgcactcagattacgtagggaacgaaatgaattcgacggcgacgtcgactggctggccgcgcccgacgatgcgctgatattccggcgtcacggcgggggtttggtgtgcgcgctcaacgccgctgagcgtccgctggcgctgccggcaggtgaacccatcctggccagcgcaccgttgaccgacgccacgttgccacccaatgccgcggcctggctggtgtag

SEQ ID NO: 13543 - protein, 546 aa, Mycobacterium tuberculosis CDC1551
MDQHQRPDPMGPGSPRASARRPEPDPMGEPWWSRAVFYQVYPRSFADSNGDGVGDLDGLASRLDHLQQLGVDAIWINPVTVSPMADHGYDVADPRDIDPLFGGMPAFERLVAAAHRQGIKVTTDVVPNHTSSAHPWFQAALADLPGSPARDRYFFRDGRGPDGSLPPNNWESVFGGPAWTRVREPDGNPGQWYLHLFDTEQPDLNWDNPEILDDFEKTLRFWLDRGVDGFRIDVAHGMAKPPGLPDSPDLGIEVLHHRDDDPRFNHPNVHAIHRDIRTVIDEYPGAVTVGEVWVHDNARWAEYLRPDELHLGFNFRLARTEFDAAEIRDAVANSLAAAALQNATPTWTLANHDVGREVSRYGGGEIGLRRAKAMAVVMLALPGVVFLYNGQELGLPDVDLPDEVLQDPTWERSGRTERGRDGCRVPIPWSGNIPPFGFSTCPDTWLPMPPEWAALTAEKQRADAGSTLSFFRLALRLRRERNEFDGDVDWLAAPDDALIFRRHGGGLVCALNAAERPLALPAGEPILASAPLTDATLPPNAAAWLV

SEQ ID NO: 13544 - DNA, 1356 bp, Clostridium acetobutylicum ATCC 824
  CDS (1)..(1356): transl_table=11
atgccttggtttaaaaaagcaattttttatcacatctatcctcttggtttatgcggagcacctttaagtaatgacttcacttctaaaccaataccaagacttaaggagatagaaaactggataccttatttaaaatcattaggaataactgctttatatcttggacctgtttttgaatccacatctcatggttatgatacagcagattactatacagtagatagaagactcgggacaaatgacactttaaaaaaacttataaataagcttcataaaaatggcatcaaggtagttttagatggtgtattcaatcatgttggaaggaacttcccccaatttatggatttgattataaataagcaaacttccagctttgctacttggttttctggtgttgattttaacagtaaaagtccttataatgatgatttttcctacgatacctggaatggttgttatgatttagtcaaactaaactttaacaataatgaggtgaaaagttttattttaaatgcaataaacttttggataagtgaattcaagatagatggtatccgccttgatgctgctgactgcatagatataaactttctaagagaaatatccaacttctcaaaaagcatatcagatgatttcttccttttaggggaaattatatttggtgattatacacgctttgcaagtaaaaatatattggactctgttaccaactacgagtgttacaagggactctattcaagtcataattcattaaattactttgagatagcttactctttaaatagacaatttggcgatggcggtatatataaaaatattccattatacaattttgttgataatcatgatgttaaccgtattgccagcactttaattgatgcagctaatatttatcctatatatactattttgtttacaatacctggtatcccatcaatttattacggaagtgattttggtataactggtgtaaaacaaaataactctgataagtatttaagacctagactaaaaattaatgaattaaaaaactctaaagaaaacaaacctttgaataattttataaaaaagctttgccatattcgaataaattctgaagcattaacagaaggtttatacaaacaacttttcatttcaaataaactatttgcttttttaagatataccgatagtgaaaaaataatagtagctttaaattgttctaaagaatgttctcaaatagagttctcaaatgatatgaatgctacttctttatttgatcttatagagaaaaaaagcttaaagctagaacctaatggaactataagtataaccttacaggaaaaccaagcaagaatatttaaagtaagtttctaa

SEQ ID NO: 13545 - protein, 451 aa, Clostridium acetobutylicum ATCC 824
MPWFKKAIFYHIYPLGLCGAPLSNDFTSKPIPRLKEIENWIPYLKSLGITALYLGPVFESTSHGYDTADYYTVDRRLGTNDTLKKLINKLHKNGIKVVLDGVFNHVGRNFPQFMDLIINKQTSSFATWFSGVDFNSKSPYNDDFSYDTWNGCYDLVKLNFNNNEVKSFILNAINFWISEFKIDGIRLDAADCIDINFLREISNFSKSISDDFFLLGEIIFGDYTRFASKNILDSVTNYECYKGLYSSHNSLNYFEIAYSLNRQFGDGGIYKNIPLYNFVDNHDVNRIASTLIDAANIYPIYTILFTIPGIPSIYYGSDFGITGVKQNNSDKYLRPRLKINELKNSKENKPLNNFIKKLCHIRINSEALTEGLYKQLFISNKLFAFLRYTDSEKIIVALNCSKECSQIEFSNDMNATSLFDLIEKKSLKLEPNGTISITLQENQARIFKVSF

SEQ ID NO: 13546 - DNA, 1785 bp, Agrobacterium tumefaciens str. C58
  CDS (1)..(1785): transl_table=11
ttgtcaccatcatcgtgccgcttggcgtcttcttcgcccttcaacgttatctcgtgcgtggcctgctcgcgggctccgtcaagggaggctgatcattccatgaacgcccataccagacaggacacttccatgaccgcttcggtgacttccgctttgacgcctaacaaggactggtggcgtggtgcggtgatctatcagatctacccgcgctcctatcaggactccaatggcgacggcatcggcgatctcaagggcattaccgaccgtctgcatcacatcgccggtctcggtgccgatgcgatctggatttcgccctttttcacctcgccgatgaaggatttcggctacgacgtctcgaactatgtcgatgtcgatccgatgttcggcacgcttgccgatttcgacgggctgattgccgaagcccaccggcttggcatccgcgtgatgatcgacctcgttctgtcgcacacgtctgaccagcatccgtggttcgtggaaagccgcgccagccgcaacaatccgaaatcggactggtatgtctggtcggaagcgaagcccgatggcacaccgcctaacaactggctgtcgatcttcggcggttccggctggcagtgggatcccacccgcatgcaatattacatgcacaacttcctgacctcgcaaccggacctcaacctgcataaccctgaagtgcaggaggaactgcttaatatcacccgcttctggctgaagcgcggcgtcgatggtttccgcctcgacactatcaacttctatttccatgatctggaattacgagacaacccggcgctggcaccggagcgccgcaatgcctcgaccgcgcctgcagtcaatccctacaatttccaggaacatctctacgataagaaccgcccggaaaacatcgccttcctgaagcgcttccgcgcggtgctggacgaattccccgatatcgccgccgttggcgaagtgggcgacagccagcgcggtctcgaaatcgtcggtgaatacacctccggcgatgacaagatgcagatgtgctatgccttcgaattcctcgcacccgatgcgctcaccccccagcgcgttgccgatgtgcaggcggattttgcgcgcgcagcaccagagggctgggcctgctgggccttctccaaccatgatgtcgtgcgccatgtcagccgctggggcgagcatgtcgaggacaaggatgccttcgcgaagctgctgtcggcactgctgatgacgcagcgaggctccgtctgcatctatgagggcgaggaactgggcctcactgaagccgatattgctttcgaggacttacaggacccctatggcatccagttctggccggaattcaagggtcgcgatggttgccgcacgccgatggtgtgggatgcgggccatgcgcaggccggcttttcgacttcggacaagatctggctgcccattccggccgagcacaagcagcgcgccgtcagcgcccagcagggcaacgaggcgtcggtgctggagcattaccgccgcttcctcgccttccgcaaacagcacccggctttcgccaagggcggcatcgaattccagccgcttgagggagacgtgctgagctacacccgcaagctgggcaacgaaaccattctgtgccttttcaatctgtccgcaacgccggcaaatgccacgctgccgaaagggaactgggaggttctcgaaggccatggctttgcaagcggccttgaaggcacaagcgtagaacttccggcatggggcgctttcttcgcccgttacgcctga

SEQ ID NO: 13547 - protein, 594 aa, Agrobacterium tumefaciens str. C58
MSPSSCRLASSSPFNVISCVACSRAPSREADHSMNAHTRQDTSMTASVTSALTPNKDWWRGAVIYQIYPRSYQDSNGDGIGDLKGITDRLHHIAGLGADAIWISPFFTSPMKDFGYDVSNYVDVDPMFGTLADFDGLIAEAHRLGIRVMIDLVLSHTSDQHPWFVESRASRNNPKSDWYVWSEAKPDGTPPNNWLSIFGGSGWQWDPTRMQYYMHNFLTSQPDLNLHNPEVQEELLNITRFWLKRGVDGFRLDTINFYFHDLELRDNPALAPERRNASTAPAVNPYNFQEHLYDKNRPENIAFLKRFRAVLDEFPDIAAVGEVGDSQRGLEIVGEYTSGDDKMQMCYAFEFLAPDALTPQRVADVQADFARAAPEGWACWAFSNHDVVRHVSRWGEHVEDKDAFAKLLSALLMTQRGSVCIYEGEELGLTEADIAFEDLQDPYGIQFWPEFKGRDGCRTPMVWDAGHAQAGFSTSDKIWLPIPAEHKQRAVSAQQGNEASVLEHYRRFLAFRKQHPAFAKGGIEFQPLEGDVLSYTRKLGNETILCLFNLSATPANATLPKGNWEVLEGHGFASGLEGTSVELPAWGAFFARYA

SEQ ID NO: 13548 - DNA, 1608 bp, Streptococcus pneumoniae R6
  CDS (1)..(1608): transl_table=11
atgcaagaaaaatggtggcataatgccgtagtctatcaagtctatccaaagagttttatggatagtaatgaagatggagttggtgatttgccaggaattaccagtaagttggactatctagccaagctaggaatcacagcaatttggctttctcccgtttatgacagccctatggatgataatggctatgatattgctgattatcaagcgattgcggctatttttggaaccatggaggacatggatcagctgattgcagaagctaagaagcgtgatatccgtatcatcatggacttggtggtcaatcatacctcggatgagcatgcctggtttgtagaggcctgtgaaaatcctaatagccctgagcgagactactatatctggcgggatgagcctaacgatttagattctatttttagtggatctgcttgggaatacgatgaaaaatctggtcaatactatctccactttttcagcaagaaacagccggatctcaattgggaaaatgaaaaacttcgccagaaaatttatgagatgatggacttctggattgataaaggtattggtggtttccgtatggatgttattgacatgattggcaaaattcctgacgagaaggtagtcaataatggtcctatgctccatccctatctcaaggaaatgaatcaggcgacctttggagataaggatctcttgacagtaggggagacttggggagcaacgccagagattgccaagctctactctgatccaaaggggcaagaattgtctatggtcttccagtttgaacatatcggtcttcagtatcaggaaggtcagcctaaatggcactatcaaaaagagctgaatatcgctaagttaaaagaaatcttcaacaaatggcagacagagttaggagttgaggacggttggaattccctcttctggaacaatcatgacctccctcgtattgtctcaatctggggaaatgaccaagaataccgcgaaaaatctgccaaagcctttgcaatcttgcttcatcttatgagaggaactccttatatctaccaaggtgaggagattgggatgaccaactatccgtttgaaacactggatcaagtagaagatattgaatctctcaactatgcgcgtgaggctcttgaaaaaggtgttccgattgaagaaatcatggacagtatccgtgttattggacgtgacaatgcccgtacccctatgcaatgggacgagagcaaaaacgctggtttctcaacaggtcaaccttggttggcggttaatccaaattacgagatgatcaacgtccaagaagcgctggcaaatccagattctattttctatacctatcagaaactggtccaaattcgcaaggagaatagctggctaattcgagctgactttgaattgcttgatacggctgataaggtctttgcttatatacgtaaggatggcgaccgtcgcttcctagttgtggctaacttgtccaatgaagagcaagacttgacagtagaaggaaacgtcaaatctgtcttgattgaaaacaccctagctcaagaagtctttgaaaaacaaatcttagttccatgggatgctttctgtgtggaattactataa

SEQ ID NO: 13549 - protein, 535 aa, Streptococcus pneumoniae R6
MQEKWWHNAVVYQVYPKSFMDSNEDGVGDLPGITSKLDYLAKLGITAIWLSPVYDSPMDDNGYDIADYQAIAAIFGTMEDMDQLIAEAKKRDIRIIMDLVVNHTSDEHAWFVEACENPNSPERDYYIWRDEPNDLDSIFSGSAWEYDEKSGQYYLHFFSKKQPDLNWENEKLRQKIYEMMDFWIDKGIGGFRMDVIDMIGKIPDEKVVNNGPMLHPYLKEMNQATFGDKDLLTVGETWGATPEIAKLYSDPKGQELSMVFQFEHIGLQYQEGQPKWHYQKELNIAKLKEIFNKWQTELGVEDGWNSLFWNNHDLPRIVSIWGNDQEYREKSAKAFAILLHLMRGTPYIYQGEEIGMTNYPFETLDQVEDIESLNYAREALEKGVPIEEIMDSIRVIGRDNARTPMQWDESKNAGFSTGQPWLAVNPNYEMINVQEALANPDSIFYTYQKLVQIRKENSWLIRADFELLDTADKVFAYIRKDGDRRFLVVANLSNEEQDLTVEGNVKSVLIENTLAQEVFEKQILVPWDAFCVELL

SEQ ID NO: 13550 - DNA, 1764 bp, Streptococcus pneumoniae R6
  CDS (1)..(1764): transl_table=11
atgaatactttaggagacaaattgatggaattgagtgctatttaccatgggcctgagtcggagtatgcctatctttataaggataagaaactccatattcgaattcgaactaagaaaggggacattgaaagcatcaacttgcactatggggacccttttatctttatggaggagttttatcaggatacaaaagaaatggtcaagataacttctggtaccttatttgaccattggcaggttgaagtgtcagttgactttgcacgtatccagtatctctttgagctcagagatacagaaggtcaaaatattttgtatggcgataaagggtgtgtggaaaattctctagaaaatcttcatgcaattgggaatggatttaagttgccttatcttcatgagattgatgcctgcaaggttcctgactgggtttcaaatacggtatggtatcagatatttcctgaaagatttgccaatggcaatgctctattaaacccagaagggactttagactgggattcatctgtcacacctaagagcgatgatttctttggtggtgatttacaggggattattgatcatatggattacttgcaagacttgggtattactggactatatctttgtcccatctttgaatctacaagcaatcacaagtacaatacgacagattactttgaaattgaccgtcattttggagacaaggagacctttcgggaactggtggatcaagcgcatcatcgtggcatgaaagtcatgctggatgcggtatttaatcatattgcttcgcaatctcttcaatggaaaaatgtcgtcaaaaatggtgaacagtctgcttataaggattggttccatattcaacaattcccagtgacaactgaaaagctagttaataagagagacttaccctatcatgtttttggtttcgaggactatatgcctaagctaaatacagccaatccagaggtcaagaattatcttttaaaggttgcgacttattggattgaagagtttaatatcgatgcttggcgtttggatgtggctaatgagattgaccatcagttctggaaggattttcgtaaggcagttttagctaaaaatcctgatctttatatcctaggagaagtctggcatacatctcagccttggctaaatggagatgagttccatgccgtcatgaattatcctttatctgatagtatcaaggactatttcttacgaggaattaagaagacagaccagttcatcgatgaaatcaatggagagtctatgtattacaagcagcagatttcagaggtcatgtttaatctcttggattcacatgatacagagcgaatcctgtggacggccaatgaagatgttcaactggttaaatcagccttagcctttctctttttacaaaaaggaacaccgtgcatttattacgtaaccgagctagccttgactggaggaccagatccagattgtcgtcgttgtatgccttgggaacgtgtatcaagtgacaatgatatgctgaactttatgaagaggctgattaagattcggaaatacgcgtcagtaatcatttcgcatggcaagtatagccttcaagaaatcaactctgatctagtagctctggaatggaaatacgaaggacggatcctcaaagcaatattcaaccaatcaacagaagattatcttttagagaaagaagcagtagcactagcaagcaattgccaagaattggataatcagcttgtcatctctccagatggatttatgattttctaa

SEQ ID NO: 13551 - protein, 587 aa, Streptococcus pneumoniae R6
MNTLGDKLMELSAIYHGPESEYAYLYKDKKLHIRIRTKKGDIESINLHYGDPFIFMEEFYQDTKEMVKITSGTLFDHWQVEVSVDFARIQYLFELRDTEGQNILYGDKGCVENSLENLHAIGNGFKLPYLHEIDACKVPDWVSNTVWYQIFPERFANGNALLNPEGTLDWDSSVTPKSDDFFGGDLQGIIDHMDYLQDLGITGLYLCPIFESTSNHKYNTTDYFEIDRHFGDKETFRELVDQAHHRGMKVMLDAVFNHIASQSLQWKNVVKNGEQSAYKDWFHIQQFPVTTEKLVNKRDLPYHVFGFEDYMPKLNTANPEVKNYLLKVATYWIEEFNIDAWRLDVANEIDHQFWKDFRKAVLAKNPDLYILGEVWHTSQPWLNGDEFHAVMNYPLSDSIKDYFLRGIKKTDQFIDEINGESMYYKQQISEVMFNLLDSHDTERILWTANEDVQLVKSALAFLFLQKGTPCIYYVTELALTGGPDPDCRRCMPWERVSSDNDMLNFMKRLIKIRKYASVIISHGKYSLQEINSDLVALEWKYEGRILKAIFNQSTEDYLLEKEAVALASNCQELDNQLVISPDGFMIF

SEQ ID NO: 13552 - DNA, 1851 bp, Thermoplasma acidophilum DSM 1728
  CDS (1)..(1851): transl_table=11
atgattgatattgaaatcggcggagatgcgccatttttcaggaagatcaaggtgcatctaggcaaaatagatgcaagtaccgcttatgtcgaaggtacgttcaactgtcagggcgagggcagcatagtcctggaggggaacagcgaatcgacagatgaagtggatggcctcgttccagataaatacgaatttaggatagctctcgatcagtaccggtttctgaggaatagccagtcaagatctaacatgttccaggtatcattatggcttgatgctgtgtatcacgatcctgatctttctcaattttcctgcatacttgacgataggttgatggatattaggatagctgtgcccaagcaggtggtctcggttcgtattttaactgaatcggaggttaaggtggtctattccagaagatcatcccaggcgacctacgacattgttgaatttgttatttcaggagtatctgggtatgcctttgaggtggatcaggtgagatatccggatcatggatactacagatcaaccaaaaggataaactcagagggtaactcgaagataatgtaccatatattcccagatcgtttccatcgttatggtgaagatcgtccgggcctcataaaatggggcgagaagccgtctcgcgactcattcttcggcggtaatctggaaggtataaggcagaagatccagtatatcaaggatctcagggtggatcacatatacctgaatcctctattcaaaagcaaatccaatcacaggtacgatgttgatgattattacagcatcgatgagttgttgggtacggatcaggatctgaagaatctcgtatcagatgcccatgcaagcggtataaaaatagttcttgatatggtcttcaatcacacttcaaccgacttcccggccttcagagatgtaatagagaagggcaggaattcaccttattacagatggtacatattccacagggatgaattcacagtattcaggggaagaggaaagagaggtagttatccgtcctatgagacgttcatggggtacggaggcatgccgaagcttgatcacagaaatcctgaggtgaggcgatactgcataaatgtcctgaaatattatgtgcagaagttcgatgtagatggattccgctacgatgtggcgcattccatatacagcaaattcttcgaggaggtcttcagtgagatcggtaccggaattttgcacataggggaggcgtggtgcctgcccacctaccttgtgaacggatcagcatggcagagctatacaaattatttcctaggcggatccatcatcgattttttgaagggatcgataacgctgggagaattctacgatagggtgcagagaatgctgatcgtcaatggtatagagaaacagcaggccatgatgaatgttttggattctcatgataccccaaggatcttaaggatcctgaatggagacaggaagaaggttaagctggcctactcgatactctatctgttcgatggtatagcaacaatctactatggcgatgaggttggtctggatggcggaaaggatccggacgacaggagatgcttcccgtgggattctatggatgaagatatgcacagcttcttcatgaacttgggtgatctgagagaaaaatacagtcttggatcagctggcgtgataacggtctttgaggacgaagcatcattcgtcatagagaaggtcaaggctggcagatccatatccgtacatatggcaaagaatgggcgcatgaaatttccgaaagactcattaatcgctgtgagggagaatcagaaagaagtcaagccatgggatttctatatatatctccgtacagtctaa

SEQ ID NO: 13553 - protein, 616 aa, Thermoplasma acidophilum DSM 1728
MIDIEIGGDAPFFRKIKVHLGKIDASTAYVEGTFNCQGEGSIVLEGNSESTDEVDGLVPDKYEFRIALDQYRFLRNSQSRSNMFQVSLWLDAVYHDPDLSQFSCILDDRLMDIRIAVPKQVVSVRILTESEVKVVYSRRSSQATYDIVEFVISGVSGYAFEVDQVRYPDHGYYRSTKRINSEGNSKIMYHIFPDRFHRYGEDRPGLIKWGEKPSRDSFFGGNLEGIRQKIQYIKDLRVDHIYLNPLFKSKSNHRYDVDDYYSIDELLGTDQDLKNLVSDAHASGIKIVLDMVFNHTSTDFPAFRDVIEKGRNSPYYRWYIFHRDEFTVFRGRGKRGSYPSYETFMGYGGMPKLDHRNPEVRRYCINVLKYYVQKFDVDGFRYDVAHSIYSKFFEEVFSEIGTGILHIGEAWCLPTYLVNGSAWQSYTNYFLGGSIIDFLKGSITLGEFYDRVQRMLIVNGIEKQQAMMNVLDSHDTPRILRILNGDRKKVKLAYSILYLFDGIATIYYGDEVGLDGGKDPDDRRCFPWDSMDEDMHSFFMNLGDLREKYSLGSAGVITVFEDEASFVIEKVKAGRSISVHMAKNGRMKFPKDSLIAVRENQKEVKPWDFYIYLRTV

SEQ ID NO: 13554 - DNA, 1527 bp, Synechocystis sp. PCC 6803
  CDS (1)..(1527): transl_table=11
gtgccccaccattacgacagggtaaatattaacaaattattaacaaggactagaatcaccatggttacaaccccagattgggtgaaaaaagccgttttctatcaaatttttcctgaccgttttgccatcggccaacaacaggcgatcgccgtcgctcaacaaccaaagctagaaccatgggaggccccgccaacggtgcagggttataaggggggcaacctgtggggagtgatcgaacatttggattatctccaggattcgggcattaccgctttatacttgacccccattttccagtccgcctgtaatcaccgttatcacacccatgactattaccaagtggatcctctactggggggcaacgaggcgttgcaggctttactaacccaggcccaccgccgggagatgaaagtagtcttggatggagtgtttaaccatgccagcaggggtttctactttttcaacgacattttggaaaatggcccccattctccttggttagattggtttcacattgaagattggcccctatcagcctatgacggttctctgccagctaactatcggggctgggtagatttgcgggccctgccccagtttaaccatgaccatcccgacgtacgggaatatttgatgcgggtgggggagtattggattgcccagggcattgatggttggcgtttggatgtgcccgattgtgtcaaagcggaaggtttttggcaagaattccgctgcagggtcaaggccattaatccagaagcctacattgtgggggaaatttggtgtgatgctagcccctggttagccggagatcaattcgatggggtgatgaactatcgctttaccgaacctaccgtagcttttgccattggcgatcgcctgcaaaaagaacatctacggggggaagaatatcgtccttacccagccctaactgcagaagcctatggggaaagaattagccaactgctgcaacaacatccctgggaaattcagttaacccaattaaatttactcaacagccacgacaccgcccgcttattaaccctagccaatggcgatcggcccagcgttaacctcgctcttttactgatgtttactttccccggtgctccctgtgtttactacggagacgaagtgggtttgcctggggaggccgaccccgattgtcgccgagtttttcctgctaaaactgactgggacttggattgttgggaattctaccgccaattgattgccctgcgccatcgctatcaatgtttgcaattgggggattacaaaattatcgccacggcaggtatgggctatgtttttcaacggcaatacggcgatgaaaccctaatggttgccgttaatagtggtgacaacataatagaaattatattatctccagacataataaatttggataaaatagacatagctgaacctgtatttagcgctaatggtgagaccgtaattgaccggaacaccgcagggttacttttgaccatggcccctcaatcaggagcagctttcgccatcatttga

SEQ ID NO: 13555 - protein, 508 aa, Synechocystis sp. PCC 6803
MPHHYDRVNINKLLTRTRITMVTTPDWVKKAVFYQIFPDRFAIGQQQAIAVAQQPKLEPWEAPPTVQGYKGGNLWGVIEHLDYLQDSGITALYLTPIFQSACNHRYHTHDYYQVDPLLGGNEALQALLTQAHRREMKVVLDGVFNHASRGFYFFNDILENGPHSPWLDWFHIEDWPLSAYDGSLPANYRGWVDLRALPQFNHDHPDVREYLMRVGEYWIAQGIDGWRLDVPDCVKAEGFWQEFRCRVKAINPEAYIVGEIWCDASPWLAGDQFDGVMNYRFTEPTVAFAIGDRLQKEHLRGEEYRPYPALTAEAYGERISQLLQQHPWEIQLTQLNLLNSHDTARLLTLANGDRPSVNLALLLMFTFPGAPCVYYGDEVGLPGEADPDCRRVFPAKTDWDLDCWEFYRQLIALRHRYQCLQLGDYKIIATAGMGYVFQRQYGDETLMVAVNSGDNIIEIILSPDIINLDKIDIAEPVFSANGETVIDRNTAGLLLTMAPQSGAAFAII

SEQ ID NO: 13556 - DNA, 1818 bp, Salmonella typhimurium LT2
  CDS (1)..(1818): transl_table=11
atgttgaatgcctggcacttaccggttgccccatttgtgaagcaacataacgataaattaaccattacgctgtggctgagcggagaaaatccgccgtctcgcgtgacgttgcgctcagaattcgataatgaagaaatctcactggcgatgcgcaaacagcgccgccagccgcagccgggcgtgacggcgtggcgagcgacgctcaatatcgcgttagggcaaccccgtcgccgttacagctttaaattgctttggcatgaccgccagctttggtttacgccacagggatttagccgttttccgcctgcgcgtctggaacaatttgcggttgatgtgccggatagcggcccgcagtgggtcgccgatcaaattttttatcagatcttcccggatcgttttgcccgcagccagtctcgtgaagccgggcaggaccgggtgtactaccatcatgccgcaggtcaggagattgtgctgcgcgactgggacgatcctttaaccccccaggcgggcggttccaccttttacggcggctgtctgaatggcatttgtgagaagctgccgtatctgaaaaaactgggcgtcacagcgctatatctgaatccggtatttaccgcgccgagcgtccataagtacgatacggaagattatcgccatgtcgatccgcaatttggcggcgatcgggcgctgctacgcctgcggcgtaaaacccaggtgcagggcatgaggctggtgctggatggcgtgtttaatcatagcggcgactcgcatgtgtggtttgacaggcataaccgcagcactggcggcgcgtgccatcacccggactcgccgtggcgcgactggtactccttttcaccacaaggcgtggcgctggactggctgggttatccgagcctgccgaaactcgattatcaatcagaaacgctggtcgatgagatctatcgcggtgaggacagtatcgttcgtcactggctaaaggctccgtggaatatggacggctggcggctggatgtcgtacatatgctgggcgaggcgggcggggcgcgtcataatttgcagcacgtcgccggtattacccgggcggcaaaagaggcgcagcccgaagcctatattgtgggggaacatttcggcgatgcgcggcagtggctacaggccgatgcggaagatgccgccatgaattatcgcggcttcaccttcccgctatggggatttctcgccaatactgatatcgcttacgaaccacagcatattgatgcccggacctgtatcgcgtggatggataactaccgcgccgggctgtcacatcagcaacaactgcgcatgtttaatcaactcgacagccatgatactgcgcgctttaaaactctgctgggtaaagacgcggcgcgcctgccgctggcggtggtctggctgtttacctggcccggcgtgccatgtatttattacggcgatgaagtcggcgtggacggcgcaaatgaccccatgtgccgcaaaccgttcccatgggatgaacgcaagcaggacggcaacttgctggcgctgtaccagcgtatggcgaaactgcgccagagcagtctggcgctgcgtcgtggcggatgccaggcgctgtatgccgaaggtgacgtagtggtattcgtgcgagtttatcagcagcagcgggcgctggtggcgattaaccggggcgaggcctgtgaagtggcgctggaagcgttgccgttgctgaacgtggccggatggcaatgtaaaacgggaagcggtgatatccgcgagggaagacttagtttacccgcgatttccgcgacggtatggatgaatcgttga

SEQ ID NO: 13557 - protein, 605 aa, Salmonella typhimurium LT2
MLNAWHLPVAPFVKQHNDKLTITLWLSGENPPSRVTLRSEFDNEEISLAMRKQRRQPQPGVTAWRATLNIALGQPRRRYSFKLLWHDRQLWFTPQGFSRFPPARLEQFAVDVPDSGPQWVADQIFYQIFPDRFARSQSREAGQDRVYYHHAAGQEIVLRDWDDPLTPQAGGSTFYGGCLNGICEKLPYLKKLGVTALYLNPVFTAPSVHKYDTEDYRHVDPQFGGDRALLRLRRKTQVQGMRLVLDGVFNHSGDSHVWFDRHNRSTGGACHHPDSPWRDWYSFSPQGVALDWLGYPSLPKLDYQSETLVDEIYRGEDSIVRHWLKAPWNMDGWRLDVVHMLGEAGGARHNLQHVAGITRAAKEAQPEAYIVGEHFGDARQWLQADAEDAAMNYRGFTFPLWGFLANTDIAYEPQHIDARTCIAWMDNYRAGLSHQQQLRMFNQLDSHDTARFKTLLGKDAARLPLAVVWLFTWPGVPCIYYGDEVGVDGANDPMCRKPFPWDERKQDGNLLALYQRMAKLRQSSLALRRGGCQALYAEGDVVVFVRVYQQQRALVAINRGEACEVALEALPLLNVAGWQCKTGSGDIREGRLSLPAISATVWMNR

SEQ ID NO: 13558 - DNA, 1662 bp, Listeria monocytogenes EGD-e
  CDS (1)..(1662): transl_table=11
atgaaagaaaaagattggtggaaaaaaagcgtagtgtaccaaatctatccaaagagttttaatgattcgaatggtgatggagttggtgatattcaaggaattatcgagaaattagattatttaaaagagcttggtgtagacgttatctggttgtccccggtgtacgattcgccgcaagatgacaatggttacgatattcgcgattatcaaaaaatttacgaagaatatggtgacatggcgacttttgatcaattgcttcaaggtttacacgaccgcgatatgaaactcgtgatggacttagttgttaaccatacttctgatgaacataagtggtttgaagaatctcggaaatccaaagataacccatatcgcgattactatttctggcgcgaggaaaacgaaatcaacaactggggttccattttcagcggtccagcatgggaattagacgaaaaaacaggcgagtactatttacacctgttctccaaaaaacaacctgatttaaactgggaaaaccctaaattacgccaagatgtatataatatgatgaaattctggctagataaaggcattgatggtttccgcatggacgtaattaattttatttccaaaaacaccgatttcccagatggtccagtgccagatggtcaaatttacggcgatgctggcaatgatttctgcaatggaccgcggattcatgagttcttgcaagaaatgaaccaagaagttacttccaaatacgatgtgatgactgttggtgaaatgcctggtgctagtacaactgacgcgcagatttatacgaatccagcaaataacgaagtcgatatgatttttacatttgaacatatgaacttagattccgatagcgacaataaatgggatttgaaaccaatttacttaccagatttaaaagaaaacatgtccgaatggcaagtggcgcttcaagaaaatggctggaacagcttatactggaacaatcatgaccaaccacgaatcgtttctcgcttcggaaatgacaatcgtttccgcgttcgttcagcgaaaatgctcgcaacttgtctgcatatgatgaaaggaacgccgtacatttatcaaggtgaagaaatcgggatgacgaatgttcattttgaaacgctagatgattatcgtgatatcgaaacgctaaacatgtacaaagaacgcaaagagcaaggccacagtcacgaaagtatcatgcagtcgatttacacaaaaggtcgcgacaatgcgagaaccccttatcagtgggataatagcgagaatgctggcttcacaaccggaacgccttggcttaaagtcaacccgcgctatacagaaatcaacaacgaagaagcgctgaaaaacccagattccattttctactactaccaaaatcttattaagttacgaaaaacgactgaaatcatcacaacaggtaattatcgcctgttattacctaaagatgaagcgattttcgcatatgaacgctacacagaaaatgaaaaattagttgttttatgtaatttcacagaagaagaacaagttatttctgatgaaaccattttgaacgaaatccaaaaaggttccgttcttgtaaacaatgttcctaatattatagaaggaactttacgaccttacgaagcaatcgtttatcaaatcaagtaa

SEQ ID NO: 13559 - protein, 553 aa, Listeria monocytogenes EGD-e
MKEKDWWKKSVVYQIYPKSFNDSNGDGVGDIQGIIEKLDYLKELGVDVIWLSPVYDSPQDDNGYDIRDYQKIYEEYGDMATFDQLLQGLHDRDMKLVMDLVVNHTSDEHKWFEESRKSKDNPYRDYYFWREENEINNWGSIFSGPAWELDEKTGEYYLHLFSKKQPDLNWENPKLRQDVYNMMKFWLDKGIDGFRMDVINFISKNTDFPDGPVPDGQIYGDAGNDFCNGPRIHEFLQEMNQEVTSKYDVMTVGEMPGASTTDAQIYTNPANNEVDMIFTFEHMNLDSDSDNKWDLKPIYLPDLKENMSEWQVALQENGWNSLYWNNHDQPRIVSRFGNDNRFRVRSAKMLATCLHMMKGTPYIYQGEEIGMTNVHFETLDDYRDIETLNMYKERKEQGHSHESIMQSIYTKGRDNARTPYQWDNSENAGFTTGTPWLKVNPRYTEINNEEALKNPDSIFYYYQNLIKLRKTTEIITTGNYRLLLPKDEAIFAYERYTENEKLVVLCNFTEEEQVISDETILNEIQKGSVLVNNVPNIIEGTLRPYEAIVYQIK

SEQ ID NO: 13560 - DNA, 1776 bp, Listeria monocytogenes EGD-e
  CDS (1)..(1776): transl_table=11
atggaaaaagcagggatttaccatcaaccggcgagtagctatgcatatagttatgacgctaaaacactacatattcggattagaactaaacgcttggatattagcaaggttactctaattgctgccgacccttacttatggaaagatggaaaatggcaaagtgaatcgtatacaatgcgcaaaatcgcagaaacagaagagcatgattattggttttttgcaattacaccagaacatagacgccttcaatatggatttttattaaccgatactgaaggagaaacaacattttatggcggacgtggtttttttgagccgaccgaggcgaatttagctacgatggattattactttaaatttccgtttatccatgcagtagatacatttgaggcacctgaatgggttagaaataccatttggtaccaaattttcccagaacgttttgcgaatggtaatccagctatttctccggaaaataccttgccgtgggggagtaaagatccgaatacaacagacttttttggtggagatattgaagggattatcgagcacttagattatttagcagagcttggtatcaatggggtttatttaacgcctgtttttgaagcaccgaccaaccacaaatacgacacaattgattataaaaaaattgatccgcactttggagacaaggaaacttttagaaaattagttaaagaagcgcataaacgtggtattcgcattatgctagatgcggtgttcaatcatattggggatacttctccagagtggcaagatgttgttgaaaaagaagaaaaatcagcgtatcgcgactggttccatattcatagtttcccagttcgtcaaaatgaaaatggcaatatcgaaggagaaccaacactttcttatgatacatttgctttcacaacgcatatgccaaaattaaatacggctaacccagaagttcagaagtatttactggatattgcgacttactggattcgtgagtttgatattgacggttggcgtttagacgttgctaatgaagtggatcacgctttttggaaagagtttaagaaggcggctcaagcggaaaaagaagacatttatattcttggtgaaatttggcatgattcatggatttggctacttggagatgaattccacgccgtaatgaattatccatttacacaaacgattattgagaactttattgaagaaaaaattaccccagagcaaatggtttctggcattaatgaacaatatatgcgctacccaaatcaagtgaatgaagtgatgtttaacatgcttgatagccatgatacagcgcgtattttaacacgtgctaataacgatgaggataaagtgaaacaagcgcttgccttcatgttcgcgcacactggttcgccgtgtatttattatggaacagaaatcggcatggacggcggaaatgacccaggttgccgtaagtgtatggaatgggacgaagcaaaacaaaatcaagatatgctagcatttacaaaacaactaatcgctctaagaaaagataatcaagctattatcacatccggtgagttaacttggttagaggcaagcagcgaaacgggcattactgcattttctaaagaattaaatggtgaaaaactacatttccttttcaatcaaacgaaaaaagatcaggatttcacaatttcatttgctaataccgcgatagatatttggaataaccaagctgtatctgataatctaactatcccggcaaaaggatttcttgttattaaagaaaacagctaa

SEQ ID NO: 13561 - protein, 591 aa, Listeria monocytogenes EGD-e
MEKAGIYHQPASSYAYSYDAKTLHIRIRTKRLDISKVTLIAADPYLWKDGKWQSESYTMRKIAETEEHDYWFFAITPEHRRLQYGFLLTDTEGETTFYGGRGFFEPTEANLATMDYYFKFPFIHAVDTFEAPEWVRNTIWYQIFPERFANGNPAISPENTLPWGSKDPNTTDFFGGDIEGIIEHLDYLAELGINGVYLTPVFEAPTNHKYDTIDYKKIDPHFGDKETFRKLVKEAHKRGIRIMLDAVFNHIGDTSPEWQDVVEKEEKSAYRDWFHIHSFPVRQNENGNIEGEPTLSYDTFAFTTHMPKLNTANPEVQKYLLDIATYWIREFDIDGWRLDVANEVDHAFWKEFKKAAQAEKEDIYILGEIWHDSWIWLLGDEFHAVMNYPFTQTIIENFIEEKITPEQMVSGINEQYMRYPNQVNEVMFNMLDSHDTARILTRANNDEDKVKQALAFMFAHTGSPCIYYGTEIGMDGGNDPGCRKCMEWDEAKQNQDMLAFTKQLIALRKDNQAIITSGELTWLEASSETGITAFSKELNGEKLHFLFNQTKKDQDFTISFANTAIDIWNNQAVSDNLTIPAKGFLVIKENS

SEQ ID NO: 13562 - DNA, 1467 bp, Nostoc sp. PCC 7120
  CDS (1)..(1467): transl_table=11
atgcaaattcaaacaccaaactgggtgaaaaacgctgtattctaccaaatcttccccgatcgttttgctagaagtaaacagccccacaagcgcctgttgcgtgatgcgcgttgggaagactgggatgcgatgcctacgctacaaggatacaaaggcggtgatttatggggcatcatggagcagttagactacattcaagacttaggcattgatgccatttactttacacccatctttcaatctgccagcaatcaccgctatcatacccacgactattatcaagtagacccgatgttgggtgggaatgccgcttttaaggaattactagacgcatcccacgaacgcaatattaaagttgtcctcgatggcgtatttaatcattccagtcgaggatttttctttttccacgacgttttggaaaatggccctcattccccttgggtaaattggttcaagattgaaggctggcctctggcaccatatacaggtgagttgccggcaaattatgtaggttgggctgataatcgcgccttgccagtatttaatcatgacaacccagaagtgcgggaatatattatggaaattgccgaatattggattaaattcggcatcgacggctggcggttggatgtaccatttgaaattaaaactcctggcttttggcaagaattccgcgatcgcgttaaagccattaaccccgaagcttatattgtgggggaagtgtggggagattccagcgagtggctagatgggacgcaattcgacggtgtgatgaattacttatttgccgggccgaccattgcctttgccgcaggcgatcgcgtagtcttagaacaagtccaaagccgcgattatcaaccatatccgcccctattcgctgccgaatacgccaccaaaattcaggaagtactgcaactttacccttgggacattcaacttacccaactcaacttattagcgagtcacgatacagcccgactcctgaccattgctggcggtgatcaagccagtatacaattagctaccctattactacttacctttcctggcgcgccaagtatctactacggcgatgaagtgggtttaccaggaggtatcgaccccgattctcggcggggctttcctttagaagctaactgggatagagaaatttatcagacccaccgtcaattaatagccttacgccgtacttacccagccttacgcacaggtgactatcaagttatttgggcgcaaggtgcattgtatatttttgcccgcaccttaggcaaagaagaattaattattgccgtaaatgtaggtacagcaacagcccaggctaatgtagatgttgctagtttgcagactcagccaaataaaatcctgtacggtcaagcagaatttcactggcacaatacagaagaaacaaaacaactgttcttaagtctccccccacgtagtggctgcattctgggtttaggggattag

SEQ ID NO: 13563 - protein, 488 aa, Nostoc sp. PCC 7120
MQIQTPNWVKNAVFYQIFPDRFARSKQPHKRLLRDARWEDWDAMPTLQGYKGGDLWGIMEQLDYIQDLGIDAIYFTPIFQSASNHRYHTHDYYQVDPMLGGNAAFKELLDASHERNIKVVLDGVFNHSSRGFFFFHDVLENGPHSPWVNWFKIEGWPLAPYTGELPANYVGWADNRALPVFNHDNPEVREYIMEIAEYWIKFGIDGWRLDVPFEIKTPGFWQEFRDRVKAINPEAYIVGEVWGDSSEWLDGTQFDGVMNYLFAGPTIAFAAGDRVVLEQVQSRDYQPYPPLFAAEYATKIQEVLQLYPWDIQLTQLNLLASHDTARLLTIAGGDQASIQLATLLLLTFPGAPSIYYGDEVGLPGGIDPDSRRGFPLEANWDREIYQTHRQLIALRRTYPALRTGDYQVIWAQGALYIFARTLGKEELIIAVNVGTATAQANVDVASLQTQPNKILYGQAEFHWHNTEETKQLFLSLPPRSGCILGLGD

SEQ ID NO: 13564 - DNA, 3483 bp, Ralstonia solanacearum GMI1000
  CDS (1)..(3483): transl_table=11
atgacgcgcaacccgaccgtgctgctggtggacgacgcgctctggtacaaggacgcggtcatctatcagctgcacgtcaaatcgttctgcgactcggacaacgacggcgtaggggacttcccgggcctgatctccaagctcgactacatcgccgagctgggcgtggatgcgatctggctgctgccgttctacccctcgccgcgccgcgacgacggctacgacatcgccgaataccgcggcgtgcaccccgactacggcaccatggccgacgcgcgccgcttcattgccgaggcgcacgcgcgcggcctgcgcgtcattaccgagctggtcatcaaccacacctcggaccagcacccgtggttccagcgcgcgcggcgcgccaaggcgggctccgcgctgcgcgacttctacgtgtggtcggaccacgacaagaaatacgccggcacgcgcatcatcttcatcgacaccgagccctccaactggacctgggacccggtggccgacgcctactactggcaccgcttctattcgcaccagcccgacctgaacttcgacaacccgcgcgtgctcaaggccgtgctgggcgtgatgaagttctggctcaacctgggcgtggacggcctgcggctcgatgccgtgccctacctggtggagcgcgagggcaccgccaacgagaacctgcccgagacgcacgccgtgctgcgcaagatccgcgcggcgatggacgcggaattcaagaaccgcctgctgctggccgaagccaaccagtggcccgaagacacacaggaatacttcggcaacggcgacgagtgccacatggccttccactttccgctgatgccgcgcatgtacatggcgatcgcgcgggaggaccgcttcccgatcaccgacatcatgcggcagacgcccgaggtgccgcccacctgccagtgggccatcttcctgcgcaaccacgacgagctgacgctggagatggtgaccgacgcggagcgcgactacctgtgggaggtctacgccagcgaccgccgcgcgcggctcaatctcggcatccgccggcgcctggcgccgctgctggagcgcgaccgccgccgcgtggagctgatgaacagcctgctgttctcgatgcccggcacgccggtgatgtattacggcgacgagatcggcatgggcgacaacatccacctgggcgaccgcgacggcgtgcgcacgccgatgcagtggtcgcccgaccgcaacggcggcttctcgcgcgccgatccggagcagctggtgctgccggccatcatgggctcgctgtacggctatgaatcggtcaacgtggaggcgcagacgcgcgacgcgcattcgctgctgaactggacgcgccggctgctggccacgcgcaagcgccaccgcgtgttcgggcgcggcagcatccagttcctgcagccggccaaccgcaaggtgctggcctatgcgcgcgcgctggaaggcgaggcccccatcctgtgcgtggcgaatctgtcccgggcctcgcaggcggtggagctggacctggccgcctatgcgcagcgcgtgccggtggagttgatcggcgggacggccttcccgccgatcggccagttgccctatctgctgacgctgccgccctatgcgttctactggctggagctgcgcgagaacgagcccggcccgtcgtgggcgcagccggccgcggagcagttgcccgagttcaccacgctggtgctgcgcgcggggctcgatgcgctggccgacacacgccagcgcgaggcgcaccgccagctggtcgagcgcgagatcctgccgacctacctgcccaagcgccgctggttcgcggccaaggacagcgtgctgcgcggcgcgcacttcgcctggggcaccgagctgccggtggatgcggcctccaccaaccggccgctggcgggggcgacccggcccgaggtgttcatcaacgagatcgccgtcacgctgggcgacgcggacggcaccgagcgcaccgagcgctacctgctgccgctgtcgatcgcgtgggagagcgccacgctgcccgcgctgccgatccagctggcgctggcgcgcgtgcggcgcggccgccatgtcggctacctgaccgatgccttcaccaccgagaccttcgcccgtgtgctgctggccaacctggtgcgcggcgtcacgctggaggccagcgacggccgcgtgcatttcgagcccgagccgcacctggccgaactggccgagccgccggtggccgccgaaaccgcggcggtgcgcccggcgccgctgccgctggcgcccgacgcgccggtgcagtggctggcggcggagcagtccaacagctcgctggtgatcggcgaatcggtcatcgtcaagctgatccgccgggtggcggcgggtgtgcatccggaagtggagatgacgcgccacctcacgcgcatcggctatgccaacacggccgcgctgatcggcgagatcgcgcacgagggcgcggacggcgagcgcagcacgctggccgtgctccagagcttcgtgcccaaccagggcgatgcgtggacatgggcactcgactacctgcgccgcaccattgatgagctggcggtgctgacggaggccgtctcggccggcgacggcgacgcggcgcccaccgccgtctcggaagcgcgcaccgataccgacgaagcgctggcgggctacctggccttcatcggcgcgatcggcacgcggctaggcgagctgcacgtcgcgctggccgggccgtcggacgatccggccttcggcacccgcgccgccgacgccgacgacgcagccttctggaccgcgcgcgtggacgaggagctggcccgcgcgctcgaccacctcgcggcatggcaggcggccaacggaccgcgcgccgaggtcggctggctgctgtcgcagcgcgatgccctgctggaagccgcccgcgaacgcgcacagggcggcctgggcgcgatgctggcgcgcgtccacggcgacttccacctcggccaggtgctggtggcgcagggcgatgcctacctgatcgacttcgagggcgagccgtcgcggccggtggacgagcgccggcgcaagaccagcccgctgcgcgacgtggccgggctggtgcgctcgctcgactacgtggtgggcgccatgcggcagggccccgagcatgtggccggaccggcgcaggagcggcgcgaccagctgctcgaacgcttccgcaatgcgtccaccgagcgcttcctggaggcctacgcggccgccatcctggcctccggttccgatgacggcgcctgcatgctcgatctggacctgctcgacctgttcctgttggagaaggcggcctacgaggtcaactacgaagcggccaaccggccgacgtggctgccgatcccgctggcgggcctggcgcgggtggcgcgccggctgctgccagcggacgtggcaccgcccgtggcgcgggatccgctcggaggcccgccgtga

SEQ ID NO: 13565 - protein, 1160 aa, Ralstonia solanacearum GMI1000
MTRNPTVLLVDDALWYKDAVIYQLHVKSFCDSDNDGVGDFPGLISKLDYIAELGVDAIWLLPFYPSPRRDDGYDIAEYRGVHPDYGTMADARRFIAEAHARGLRVITELVINHTSDQHPWFQRARRAKAGSALRDFYVWSDHDKKYAGTRIIFIDTEPSNWTWDPVADAYYWHRFYSHQPDLNFDNPRVLKAVLGVMKFWLNLGVDGLRLDAVPYLVEREGTANENLPETHAVLRKIRAAMDAEFKNRLLLAEANQWPEDTQEYFGNGDECHMAFHFPLMPRMYMAIAREDRFPITDIMRQTPEVPPTCQWAIFLRNHDELTLEMVTDAERDYLWEVYASDRRARLNLGIRRRLAPLLERDRRRVELMNSLLFSMPGTPVMYYGDEIGMGDNIHLGDRDGVRTPMQWSPDRNGGFSRADPEQLVLPAIMGSLYGYESVNVEAQTRDAHSLLNWTRRLLATRKRHRVFGRGSIQFLQPANRKVLAYARALEGEAPILCVANLSRASQAVELDLAAYAQRVPVELIGGTAFPPIGQLPYLLTLPPYAFYWLELRENEPGPSWAQPAAEQLPEFTTLVLRAGLDALADTRQREAHRQLVEREILPTYLPKRRWFAAKDSVLRGAHFAWGTELPVDAASTNRPLAGATRPEVFINEIAVTLGDADGTERTERYLLPLSIAWESATLPALPIQLALARVRRGRHVGYLTDAFTTETFARVLLANLVRGVTLEASDGRVHFEPEPHLAELAEPPVAAETAAVRPAPLPLAPDAPVQWLAAEQSNSSLVIGESVIVKLIRRVAAGVHPEVEMTRHLTRIGYANTAALIGEIAHEGADGERSTLAVLQSFVPNQGDAWTWALDYLRRTIDELAVLTEAVSAGDGDAAPTAVSEARTDTDEALAGYLAFIGAIGTRLGELHVALAGPSDDPAFGTRAADADDAAFWTARVDEELARALDHLAAWQAANGPRAEVGWLLSQRDALLEAARERAQGGLGAMLARVHGDFHLGQVLVAQGDAYLIDFEGEPSRPVDERRRKTSPLRDVAGLVRSLDYVVGAMRQGPEHVAGPAQERRDQLLERFRNASTERFLEAYAAAILASGSDDGACMLDLDLLDLFLLEKAAYEVNYEAANRPTWLPIPLAGLARVARRLLPADVAPPVARDPLGGPP

SEQ ID NO: 13566 - DNA, 1821 bp, Clostridium perfringens str. 13
  CDS (1)..(1821): transl_table=11
atgggaaaagcttatatttatcatgattctcaagataccttttatagggaaccttttggagctgtttctataggttctaaggtaagtttaagattagaatgcgaagagtgtggagaagtttttatagaggtaataaagtttgatggaagtagatattcaatacctatgacaattgaagagcgaagaaatgaatgcataatttataaagggattatagacactacaaactccttaggagtaataaattattactttaaatacattaaggacggatttactaagtattatggaaataatgatgaatgtttaggaggagagggaaagatatattatgattttcctaattattatcaaataacagtttatgaagataataaaattcctagttggtataaggaaggtattatttatcaaatatttgtggatagattttttaatgggaataagaatagtgtgatattaaataaaaagaaaaatagctttatatatggtaattggtatgatgagccaatgtatataagagataataatggaagtattaaacggtggggtttttatggaggtaatttaaggggagtaattgaaaaattagattatataaaatctttaggtgtaaatattatatacatgaatccaatctttgatgctgtgagttgtcataaatatgatactggagattatgaaaatattgataagatgtatggaactaacagtgattttaaggaattgtgccaaaaagctgaggaaaaaggtataaggataatattagatggagtttttagtcatacaggatcagatagtaggtactttaataaatacggaaactatggagagcttggagcctatgaatctaaatactctaaatattataagtggtataggttttatgactatcctaatagttatgaatgttggtgggggtttgaaaatcagcctaatgtagaggaattagaaaagacatattcagattatatagttaatagtgaaaattcaataatagcaaagtggcttagattaggagcaagtggttggaggctagatgtagcagatgaacttccggatgaattcatacaaatgattaaggaaaggatgaaaaatgagaaagaagatagtgtgcttataggagaggtttgggaagatgcttcaaataaggttagctattcaaaaagaagaaaatatttattaggagatgaattagattctgtaacaaattacccttatagagatataatttctaattttttaaatgaagaaataagttcaaaggatttttataaagtaataatgagcataaaagaaaattatccaagagaaaacttttatgcaaatatgaatattctagggaaccatgacacagaaagaatacttacagtattaaaagagaatttaaataagttaaaattagctctatgtcttcaaatgactttacctggagttcccttaatttattatggcgatgaggcaggacttttaggaaataaggatcctgaaaatagaaagacctatccttggggacgagaaaataaggaaatattaagttattatagctttttcggaaactttagaaagaatgaagaggttttaagaaagggagatttttatatttttaaggatacacctgaggatgttattgcttttaagagagtttataaagataaagaaatgataattatagtaaacaggagtaattctagaaaaaccataaccttagatagcgagaaaggaagatataaagataaattttctaaggaagaattttatggtgatggtagcattactttagaagtagaaagagaaaattataaaattttaactaattag

SEQ ID NO: 13567 - protein, 606 aa, Clostridium perfringens str. 13
MGKAYIYHDSQDTFYREPFGAVSIGSKVSLRLECEECGEVFIEVIKFDGSRYSIPMTIEERRNECIIYKGIIDTTNSLGVINYYFKYIKDGFTKYYGNNDECLGGEGKIYYDFPNYYQITVYEDNKIPSWYKEGIIYQIFVDRFFNGNKNSVILNKKKNSFIYGNWYDEPMYIRDNNGSIKRWGFYGGNLRGVIEKLDYIKSLGVNIIYMNPIFDAVSCHKYDTGDYENIDKMYGTNSDFKELCQKAEEKGIRIILDGVFSHTGSDSRYFNKYGNYGELGAYESKYSKYYKWYRFYDYPNSYECWWGFENQPNVEELEKTYSDYIVNSENSIIAKWLRLGASGWRLDVADELPDEFIQMIKERMKNEKEDSVLIGEVWEDASNKVSYSKRRKYLLGDELDSVTNYPYRDIISNFLNEEISSKDFYKVIMSIKENYPRENFYANMNILGNHDTERILTVLKENLNKLKLALCLQMTLPGVPLIYYGDEAGLLGNKDPENRKTYPWGRENKEILSYYSFFGNFRKNEEVLRKGDFYIFKDTPEDVIAFKRVYKDKEMIIIVNRSNSRKTITLDSEKGRYKDKFSKEEFYGDGSITLEVERENYKILTN

SEQ ID NO: 13568 - DNA, 1665 bp, Clostridium perfringens str. 13
  CDS (1)..(1665): transl_table=11
atgaataaaaagtggtggaaagaattaattgcttaccagatttaccctaagagctttatggattctaatggtgatggtataggtgatattcaaggtataatatctaaattagattatttaaaagatttaggtattgatttaatctggttatgtccaatgtataaatcaccgaatcatgataatggttatgacattagtgattataaagatatcttagatgaatttggaactatggatgattttaatgaattgcttaatgaggttcataatagagggatgaagcttattatagatttagtaataaatcacactagtcatgaacatccatggtttatagaatcaagatcttctagggataatcctaaaagagattggtatatttggagagaaggtaaaggggatgaggaacctaataactgggaaagtatatttaaaggttcagcttgggaattctgtgagaatagtgaagagtattacctacatttatttgctaaagagcaaccagatttaaactgggagaataaagaggtaagaaatgaactatataaaatgataaactggtggcttgataagggtattgatgggtttagagttgatgccataagtcacataaaaaaagaagagggtcttaaggatatggataatccagagggacttaaatatgtttcatcctttgaaaagcatatgaatgtagagggaataaattctcatcttaaagaactaaaagaagaaactttttcaaagtataatatagttacagttggagaagcaaatggagttagtgccaatgaagctgatcactgggtagctgaagatgagggaacatttaatatgatattccaatttgagcatcttaatctttggaattatgaagagggacaaggatttgatgtgaaggcatacaaagatgttttaacaaattggcaaaattctttagaaggtaaaggatggaatgcacttttcattgaaaatcatgatatacctagagttgtttcaacttggggaaatgacaaggaatatttaactgaatgtgcaaaagcttttggagcaatttatttcttacaaaagggaacccctttcatataccaagggcaagaacttggtatgacaaatgttaaatatcatagcatatctgagtataatgatgttaaaactataaatacttacaatgaaagaattgaaagtggtgtttcagaggaaatagcattaaaagaagcttgggtaacttcaagagataattcaagaacacctatgcaatggaattcaagtgagaatgcagggtttacttgtggaaaaccttggataggagttaatgaaaattataaaacaataaatgtagaagttgaagaaagggatgaaaattcagttttaaacttctataaaaagcttataaaacttaaaaagtctaatgaagctttaatctatggtgtatatgatttaatccttgaagaggatgaaaatatctttgcttatacaagaactttaaataatgaaaagttcttgataatggctaatttaactggagaaaatgccaagtacatgtatgagaaagaaaaacttaattctaaggatttaattcttaacaattatgaggtttgtgaacataaaaacttaacagagtttacattaaaaccttatgaatgcagagtatataagctttcttaa

SEQ ID NO: 13569 - protein, 554 aa, Clostridium perfringens str. 13
MNKKWWKELIAYQIYPKSFMDSNGDGIGDIQGIISKLDYLKDLGIDLIWLCPMYKSPNHDNGYDISDYKDILDEFGTMDDFNELLNEVHNRGMKLIIDLVINHTSHEHPWFIESRSSRDNPKRDWYIWREGKGDEEPNNWESIFKGSAWEFCENSEEYYLHLFAKEQPDLNWENKEVRNELYKMINWWLDKGIDGFRVDAISHIKKEEGLKDMDNPEGLKYVSSFEKHMNVEGINSHLKELKEETFSKYNIVTVGEANGVSANEADHWVAEDEGTFNMIFQFEHLNLWNYEEGQGFDVKAYKDVLTNWQNSLEGKGWNALFIENHDIPRVVSTWGNDKEYLTECAKAFGAIYFLQKGTPFIYQGQELGMTNVKYHSISEYNDVKTINTYNERIESGVSEEIALKEAWVTSRDNSRTPMQWNSSENAGFTCGKPWIGVNENYKTINVEVEERDENSVLNFYKKLIKLKKSNEALIYGVYDLILEEDENIFAYTRTLNNEKFLIMANLTGENAKYMYEKEKLNSKDLILNNYEVCEHKNLTEFTLKPYECRVYKLS

SEQ ID NO: 13570 - DNA, 1833 bp, Clostridium perfringens str. 13
  CDS (1)..(1833): transl_table=11
atgggtaaaattacaagagaggcaatacatcatatagctcaaagcaattattcttatggatatgataatgaaactttgcatttaagagttaagactaaaaaaggtgaagttaataaagtggaaataagaattggagatccttacatatgggatgaaggtggttgtgatggaggaaatatgaatgccactggaggacgatggacaggtggaaaaagttatcctatgagaaaggaatgcgaaacaaaatactttgatcactggatagtagggtataaaccattaaccaaacgttcaagatatggatttatattatatggagatgaggaaactcttttatgcacagaaaaaagaatagaggagttagatggaaagtatgatgaagaaaaattaagtgctataggaaacttttattgttttccatatttaaatgccatagatgttgctaaaacaccacaatgggtaaaggatactgtttggtatcaaatattcccagatagattttgcaatggagataaatcaatagatccagaaaatgttgagccatgggggacagagcctactagggataattttatgggaggagatttacagggagttttagataaattagattacttatgcgatcttggaattaatggactatatttttgtccagtatttgaagctactgagaatcataggtatgaaactatagattattttaaagtagatccagcacttggtgggaatgaagtctttaaaaaacttgtaagtgaagctcacaaaagaggcatgaaaataatgttagatgcagtatttaatcatataggttatttttcaccaaaatggcaagatgtattaaagaataatgaaaaatcaagatataaggattggttttgtataaagaagttcccagtgcttgaaaatggcttagaaaatgttgatggaaataatttgaattatgaaacctttggaagaatagccacaatgcctaaactaaatactgaaaacccagaggttgtagaatatttattaaaagtcgctaagttctgggttgaagaaatggatatagatggttggagacttgatgtatgtaatgaagtagaccatgtattttggagaaaatttagggaagtagtaaagggaactaataaagaagtttatatattaggagaagtttggcatgatggacttccatggcttatgggagatcagtttgattcagttatgaattaccctgttacagatgcagtaaaagaatatttttgtttaaatcaatctaatccagaagattttaaatatatgatagaagctaataaggttagctatttaagacaaataggagaaacaatatttaacttgttagatagtcatgatactccaagaatattaactgtagctggaggaaataaggataagatgaaactagcttatctgtttatgtttactcaagctggctctccatgtatatattatggagatgaagttggtatggaaggaaatcaaggaatgggtatggaattccatagaagatgtatgatttgggatgaaaataaacaagacaaagatatgcttaagtttatgaaacaaataataaaaataagaaaagaaaataaggaattaaatttattagataataattggataagagctaataaggatgaaaatatacttatttattcaaaggaaaatatatttataattatgaacaattcagagaatgaagaaaagatatatttacctaaggagcttaaaaataataagattaatgatttatttgaagaaaaaattgaactcttaaaagaagatatagacttaaagccctttgcatttaaagtttataaaaagctttaa

SEQ ID NO: 13571 - protein, 610 aa, Clostridium perfringens str. 13
MGKITREAIHHIAQSNYSYGYDNETLHLRVKTKKGEVNKVEIRIGDPYIWDEGGCDGGNMNATGGRWTGGKSYPMRKECETKYFDHWIVGYKPLTKRSRYGFILYGDEETLLCTEKRIEELDGKYDEEKLSAIGNFYCFPYLNAIDVAKTPQWVKDTVWYQIFPDRFCNGDKSIDPENVEPWGTEPTRDNFMGGDLQGVLDKLDYLCDLGINGLYFCPVFEATENHRYETIDYFKVDPALGGNEVFKKLVSEAHKRGMKIMLDAVFNHIGYFSPKWQDVLKNNEKSRYKDWFCIKKFPVLENGLENVDGNNLNYETFGRIATMPKLNTENPEVVEYLLKVAKFWVEEMDIDGWRLDVCNEVDHVFWRKFREVVKGTNKEVYILGEVWHDGLPWLMGDQFDSVMNYPVTDAVKEYFCLNQSNPEDFKYMIEANKVSYLRQIGETIFNLLDSHDTPRILTVAGGNKDKMKLAYLFMFTQAGSPCIYYGDEVGMEGNQGMGMEFHRRCMIWDENKQDKDMLKFMKQIIKIRKENKELNLLDNNWIRANKDENILIYSKENIFIIMNNSENEEKIYLPKELKNNKINDLFEEKIELLKEDIDLKPFAFKVYKKL

SEQ ID NO: 13572 - DNA, 1938 bp, Pyrococcus furiosus DSM 3638
  CDS (1)..(1938): transl_table=11
atgtataagctcgtcagtttcagagatagcgagatctttggaagagttgcagaggtggaattttccctaataagagaaggaagctatgcatacctccttggtgactttaatgcatttaatgagggaagttttagaatggagcaagaaggaaagaattggaagattaaaatcgcccttccagaaggggtatggcactatgctttttcaatagatgggaaattcgtcttagatccagataatcctgaaagaagagtatatactagaaagggttacaaattccacagagaagttaatgttgcaagaattgtcaaaagtgacgatttggttttccatactccttctctcctgtatctgtatgaaatttttgggagggttcacgttcttttaaggacacaaaagggggtaataaaaggggcaactttcctgggggagaagcatgttcctatgaggaagaaggcttctgatgagctatttgattactttgaggttatcgtagaaggaggagataagaggttaaattattcatttgaagtattaacaatggaaggagcgaaatttgagtatggtcaatttaaggcgagacccttcagtatcgaatttccaacctgggttattgacagggtattctatcaaataatgccagacaaatttgctaggtctaggaaaattcaaggaattgcctatccaaaagataaatattggggaggagatctaatcggaattaaggaaaagatagaccaccttgtgaaccttggaataaatgcaatatatttaactccaatcttcagttccctcacatatcatggatatgacatagttgattatttccacgttgcaaggagacttggaggagacagggcctttgtggatttgttatctgagcttaaaaggtttgatataaaggttatccttgatggggtatttcaccatacgagctttttccacccatatttccaagatgttgtaaggaagggggaaaatagcagctttaaaaacttttacaggattattaaatttccagtagtctcaaaagaatttcttcaaatcctccattcaaaatcttcctgggaagaaaagtacaaaaagataaaatcccttggctggaattacgagagctttttctcagtttggataatgccgagattaaaccacgataatccaaaggttagagagtttatcaagaatgtgattcttttctggacaaataagggggtcgatggatttagaatggatgttgctcatggggttcctccagaagtgtggaaagaagttagagaagcattgccaaaagaaaagtacttaattggagaagttatggatgatgcaaggttatggctgtttgataaattccatggagtcatgaactatcggctctatgatgcaatcttaaggttttttggatatgaggagattacagccgaggaattcttaaatgaactagagctcttaagctcgtattatggcccagcagagtatctaatgtataattttttagacaatcatgatgttgagagatttttggatatagttggggataagaggaagtacgtgtgtgctttggtcttcttgatgacttacaaaggtattccatctctcttctacggagatgaaatagggttgagagggattaatctccaaggaatggaatcttccagagcaccaatgttgtggaatgaagaagagtgggatcaaaggattttggagataacaaagacactagtaaagattaggaaaaacaataaagccctcctttttggtaattttgtcccggtgaagtttaaaagaaaattcatggtatacaagagggaacacatgggagagagaactatcgttgccattaactactcaaattcacgcgttaaagaactaggaataacaattcctgaatattcgggcgtgataattaatgaagataaagtgaaattgataaagtactaa

SEQ ID NO: 13573 - protein, 645 aa, Pyrococcus furiosus DSM 3638
MYKLVSFRDSEIFGRVAEVEFSLIREGSYAYLLGDFNAFNEGSFRMEQEGKNWKIKIALPEGVWHYAFSIDGKFVLDPDNPERRVYTRKGYKFHREVNVARIVKSDDLVFHTPSLLYLYEIFGRVHVLLRTQKGVIKGATFLGEKHVPMRKKASDELFDYFEVIVEGGDKRLNYSFEVLTMEGAKFEYGQFKARPFSIEFPTWVIDRVFYQIMPDKFARSRKIQGIAYPKDKYWGGDLIGIKEKIDHLVNLGINAIYLTPIFSSLTYHGYDIVDYFHVARRLGGDRAFVDLLSELKRFDIKVILDGVFHHTSFFHPYFQDVVRKGENSSFKNFYRIIKFPVVSKEFLQILHSKSSWEEKYKKIKSLGWNYESFFSVWIMPRLNHDNPKVREFIKNVILFWTNKGVDGFRMDVAHGVPPEVWKEVREALPKEKYLIGEVMDDARLWLFDKFHGVMNYRLYDAILRFFGYEEITAEEFLNELELLSSYYGPAEYLMYNFLDNHDVERFLDIVGDKRKYVCALVFLMTYKGIPSLFYGDEIGLRGINLQGMESSRAPMLWNEEEWDQRILEITKTLVKIRKNNKALLFGNFVPVKFKRKFMVYKREHMGERTIVAINYSNSRVKELGITIPEYSGVIINEDKVKLIKY

SEQ ID NO: 13574 - DNA, 1614 bp, Streptococcus pyogenes MGAS8232
  CDS (1)..(1614): transl_table=11
atgaagaaacactggtggcataaagctacgatttatcagatttacccgagatcctttaaagacaccaatggcaatggtattggtgatttaaaaggcattaccagtcaactggactacttgcaaaaacttggcattacagccatttggttatctcctgtttaccaaagtccaatggatgacaatggttatgacatctctgactatgaagcgattgctgatgtttttggagacatggcagatatggatgagctcttggcagcagctaatgagcgaggcattaagattatcatggacttggtggtcaaccatacgtctgatgagcacgcttggtttgttgaagctagggaaaactctaatagtcctgagcgtgatttttatatttggcgagatgaacctaacgatttgacttctatttttagtggctcagcttgggaatatgataatgcatcagggcaatattatttgcacctttttagcaaacgtcagccagatctcaactgggagaatgaagctttgcgtcataaaatttacgatatgatgaatttctggattgccaaaggcataggtggttttcggatggacgtgattgacctgattgggaaggttcctgacttggaaatcacaggtaacgggccgcggttacacgattacctcaaagaaatgaatcaagcaacctttggcaatcatgacgtgatgactgtcggtgagacttggggagcaacgcctgaaattgctcgccagtattctcgccctgaaaataaagagttatccatggtcttccaatttgagcatgtgggtcttcaacataaacctgacgctcccaagtgggattatgcggaagaactggatgttcctgctctgaaagctatttttagcaagtggcagacagaattaaagttgggagaaggctggaattcacttttttggaataaccatgacttgccacgggtcttatccatttggggcaatgacagcacttaccgagaaaaatcagccaaggctttagctattttactgcatttgatgcgaggaaccccttacatttaccaaggagaagagattggcatgaccaattatccttttaaagacttaaccgaggttaatgatattgagtcccttaactatgctaaagaagctatgggaaatggagtgtcagctgcgcgtgtgatggatagcatccgtaaggtaggacgagacaatgctagaacgccgatgcagtggtctaaggatacacatgctggcttttctaaagcccaagagacttggttgccggtcaaccccaactaccaagacatcaatgtggccgatgcccttgctgatccagattctattttttacacttaccaaaaattgattgccttgcgtaaggagcaagactggctagttgaagcggattatcacctcttgccaacagctgataaagtgtttgcttatcagcgtcagcttggagaagagacatatgtgattgttgtcaatgtgtctgatcaagagcaagtctttgccaaagatttagcgggtgcagaagtggtcatcaccaatacagatgtggacaaagtgttagagaccaagcacttacaaccttgggatgccttttgtctcaaactgaaggcctag

SEQ ID NO: 13575 - protein, 537 aa, Streptococcus pyogenes MGAS8232
MKKHWWHKATIYQIYPRSFKDTNGNGIGDLKGITSQLDYLQKLGITAIWLSPVYQSPMDDNGYDISDYEAIADVFGDMADMDELLAAANERGIKIIMDLVVNHTSDEHAWFVEARENSNSPERDFYIWRDEPNDLTSIFSGSAWEYDNASGQYYLHLFSKRQPDLNWENEALRHKIYDMMNFWIAKGIGGFRMDVIDLIGKVPDLEITGNGPRLHDYLKEMNQATFGNHDVMTVGETWGATPEIARQYSRPENKELSMVFQFEHVGLQHKPDAPKWDYAEELDVPALKAIFSKWQTELKLGEGWNSLFWNNHDLPRVLSIWGNDSTYREKSAKALAILLHLMRGTPYIYQGEEIGMTNYPFKDLTEVNDIESLNYAKEAMGNGVSAARVMDSIRKVGRDNARTPMQWSKDTHAGFSKAQETWLPVNPNYQDINVADALADPDSIFYTYQKLIALRKEQDWLVEADYHLLPTADKVFAYQRQLGEETYVIVVNVSDQEQVFAKDLAGAEVVITNTDVDKVLETKHLQPWDAFCLKLKA

SEQ ID NO: 13576 - DNA, 1725 bp, Thermoanaerobacter tengcongensis MB4
  CDS (1)..(1725): transl_table=11
atgataaaagaggctatattccacaaaagcgatataccttatgcatatcctgtaaataaagaccaattaaaaatagtcttgagaacggcagttttcgatgtggatagggtatacattctttttaaagacaggtatgactggctgggcaaatttaaaataaagcctatgaccttagttcacactaacgagctttttgactattatgagactactcttgaattaaataagaggtttttgtactttttttatttagtttcagaaacgggagaaaaactttattacacagaagctggttttttcaaaaagaggccagaggatagcttctggggttttttccactatccctatataagggaaaaggatatattttctcctccggattgggcaaacgagtgcatagtgtatcagatatttccagacagattcaacaatggagacagaactaatgaccccgaaaacgtaaagccatggggggaaaagccgactgcagattctttttttggaggggatttacagggaataatcgacaaaatagattatttaaaagagttagggataaatgccatttatttaactccaatatttttgtctccttctactcacaaatacgacaccacggattattacacgatagaccctcattttggtgacacggaaaaagctaaagaattggtgaggaagtgtcatgacaatggcataaaagttatattcgatgcagtgttcaaccactgtggatacgacttttttgcatttcaggatgtggttaaaaatgggccgaagtcaaagtactgggattggttcaatgtgtacgaatggcccattaaaacgcatcccaaacctacttacgagacttttggcgagaatgtgtggagaatgcctaagcttatgactaaaaacccggaagtgcaaaagtacctactggaagtggctgaatactggattaaagaagtagacattgacggctggcgattggacgttgccaacgaaatagaccatcacttctggagaaagtttagagaggttgtaaaaaatgccaaaaaagatgccataatagtaggagaagtgtggcatgatgcttctccgtggttaagaggggaccagtttgactctgtcatgaattatccttttagaaatgcagttgtagacttttttgcgaagaggaaaataagtgctgtaaaattcaacacactgataactgagcagcttatgagacacatggatagcgttaatagagtcatgtttaacctcataggtagtcacgacactgaaaggtttttgactctcgcaaatggcatggtggcgcggatgaaattagctttggttttccagtttacatttgtgggagtgccgtacatctactatggagacgaagctggaatggtgggaggatttgaccctgactgcagaaggtgcatgatatgggaggaggaaaagcagaacaagggactttttgagttttacaaaaagctcatccgcataagaaaggagcatgaagaacttaagtatggcaatttcaccactttgtacgctgttggaagggtgtttgcttttagaagggaatataaaggaaattcaattgtggtgattataaacaacagcagcaaagaggaagtgatatttttagaagaggcgggaggaaaagaggatatattaaaaatgggagaattaaaaaggagtggcaatttgctgtatcttaagcctaacactgcctatattttgaagtag

SEQ ID NO: 13577 - protein, 574 aa, Thermoanaerobacter tengcongensis MB4
MIKEAIFHKSDIPYAYPVNKDQLKIVLRTAVFDVDRVYILFKDRYDWLGKFKIKPMTLVHTNELFDYYETTLELNKRFLYFFYLVSETGEKLYYTEAGFFKKRPEDSFWGFFHYPYIREKDIFSPPDWANECIVYQIFPDRFNNGDRTNDPENVKPWGEKPTADSFFGGDLQGIIDKIDYLKELGINAIYLTPIFLSPSTHKYDTTDYYTIDPHFGDTEKAKELVRKCHDNGIKVIFDAVFNHCGYDFFAFQDVVKNGPKSKYWDWFNVYEWPIKTHPKPTYETFGENVWRMPKLMTKNPEVQKYLLEVAEYWIKEVDIDGWRLDVANEIDHHFWRKFREVVKNAKKDAIIVGEVWHDASPWLRGDQFDSVMNYPFRNAVVDFFAKRKISAVKFNTLITEQLMRHMDSVNRVMFNLIGSHDTERFLTLANGMVARMKLALVFQFTFVGVPYIYYGDEAGMVGGFDPDCRRCMIWEEEKQNKGLFEFYKKLIRIRKEHEELKYGNFTTLYAVGRVFAFRREYKGNSIVVIINNSSKEEVIFLEEAGGKEDILKMGELKRSGNLLYLKPNTAYILK

SEQ ID NO: 13578 - DNA, 1575 bp, Thermoanaerobacter tengcongensis MB4
  CDS (1)..(1575): transl_table=11
atgagaaaaaatttaaaagcatttgtggcgctttttgcagcaattttgctgttctttagtgggtgcagtagcaagcaagaggcaaaagccccaaagtcagaagtcatatatcaggttatggtggataggttttacaacggagacccttcaaatgacgacccagaagtgagcaaaggaatgtttgaccccacccataccaactggaggatgtactggggaggggatttgaaaggactgacagaaaaaatcccttatataaaggggatgggggtcactgctatctggatttctccagtagtggataatataaataaaccagccgtatataatggcgagattaatgccccctatcacggatactgggcaagagatttcaaaagagtagaagaacactttggtacatgggaggactttgacaattttgtaaaggttgcgcatgagaatggaataaaagtgattttagattttgcgccaaatcacacgagccctgccgatgaagaaaatcctgattttgcagaaaatggcgcattatatgacgatgggaagctattaggtacttacagtaatgattcacttaagctttttcaccacaatggcagcataagcaactggaataatttaaaggaacttcaggataaaaatttgtttgatttggcagatttggaccagagcaaccctattgttgataaatacttaaaagactctattaagttatggtttaatcatgaaattgatggagtaaggctggatgctgcaaagcatatgcctatggagtgggtgaaaagctttgctaacactatttacagtattaaaaaggatgtgcttctttttggtgaatggatgttaagcggtcctactgacccgttgtatgggtataatatacagtttgctaatactaccggcttttctgtcctggattttatgttaaacggtgctataagagatgtatttggcaaggggtacggatttgagaggttaaatgacacgttagaggataccaataaagattacgaaaatccttataagctggttgcttttatagacaaccatgacatgcctagatttctgtccttgaacaatgacaaggataaattacacgaagctattgcttttgtaatgacgactcgagggatacctgtaatatactatggcactgagcagtaccttcataacgacacaaatggcggtaatgacccgtataatagaccaatgatggaaaagttcgatgagagcacaaaggcttatacattgataaaagagctgtcaaggttaaggcagctcactccagccctacagtatggaactactacggcaaggtatatttctgacgatgtgtatatttatgaaaggcagtatggaaaagatgtggtgctggttgcgataaataaaggagagaaaactactgttaaggcagtaaaaacatctttgaggaagggaatttataaagactaccttaaaggtctgttggagggtgttgagttaaaagtcacaaaaggcaatggagaaaacctagtgcaaggtttgactttacctggggacagcgtaagtgtgtggacaaatgtgaaagcgaagtaa

SEQ ID NO: 13579 - protein, 524 aa, Thermoanaerobacter tengcongensis MB4
MRKNLKAFVALFAAILLFFSGCSSKQEAKAPKSEVIYQVMVDRFYNGDPSNDDPEVSKGMFDPTHTNWRMYWGGDLKGLTEKIPYIKGMGVTAIWISPVVDNINKPAVYNGEINAPYHGYWARDFKRVEEHFGTWEDFDNFVKVAHENGIKVILDFAPNHTSPADEENPDFAENGALYDDGKLLGTYSNDSLKLFHHNGSISNWNNLKELQDKNLFDLADLDQSNPIVDKYLKDSIKLWFNHEIDGVRLDAAKHMPMEWVKSFANTIYSIKKDVLLFGEWMLSGPTDPLYGYNIQFANTTGFSVLDFMLNGAIRDVFGKGYGFERLNDTLEDTNKDYENPYKLVAFIDNHDMPRFLSLNNDKDKLHEAIAFVMTTRGIPVIYYGTEQYLHNDTNGGNDPYNRPMMEKFDESTKAYTLIKELSRLRQLTPALQYGTTTARYISDDVYIYERQYGKDVVLVAINKGEKTTVKAVKTSLRKGIYKDYLKGLLEGVELKVTKGNGENLVQGLTLPGDSVSVWTNVKAK

SEQ ID NO: 13580 - DNA, 1719 bp, Streptomyces coelicolor A3(2)
  CDS (1)..(1719)
atgaccgtcaacgagcccgtacctgacaccttcgaggacacccccgcgggggaccggcacccggactggttcaaacgagccgtcttctacgaggtcctcgtccgctccttccaggacagcaacggcgacggcatcggtgatctcaagggcctgaccgccaagctggactacctgcaatggctcggcgtggactgcctgtggctcccgcccttcttcaagtcaccgctgcgcgacggcggttacgacgtctccgactacaccgccgtgctgccggagttcggcgacctggccgacttcgtggagttcgtggacgcggcgcaccagcgcggcatgcgcgtgatcatcgacttcgtcatgaaccacaccagcgaccagcacccgtggttccaggagtcccgcaagaacccggacggcccctacggcgactactacgtctgggccgacgacgacacccggtacgccgacgcccgcatcatcttcgtcgacaccgaggcctccaactggacccacgacccggtccgcggccagtactactggcaccggttcttctcccaccagccggacctcaactacgagaacccggccgtgcaggaggagatgctcgccgccctgaagttctggctggacctgggcgtggacggctaccgtctcgacgccgtgccctacctgtacgccgaggagggcaccaactgcgagaacctgcccgcctcccacgcgttcctcaagcgggtgcgccgcgagatcgacgcgcagtacccggacaccgtactgctggccgaggccaaccagtggccggaggacgtggtcgactacttcggcgactactccacgggcggcgacgagtgccacatggccttccacttccccgtcatgccccgcatcttcatggccgtgcgccgcgagtcccgctacccggtctccgaaatcctcgccaagacccccgcgatcccgtccggctgccagtggggcatcttcctgcgcaaccacgacgagctgaccctggagatggtcaccgacgaggaacgcgactacatgtacgcggagtacgccaaggacccgcgcatgcgcgccaacatcggcatccgccggcggctggccaccctgctggacaacgaccgcgaccagatcgagctgttcaccgccctgctgctcgccctcccgggatccccgatcctctactacggcgacgagatcggcatgggcgacaacatctggctcggcgaccgcgacgccgtgcgcacccccatgcagtggacgcccgaccgcaacgccggcttctcgacctgtgacccgggccgcctctacctgcccgcgatcatggacccggtctacggctaccaggtgacgaatgtcgaggcgtccatggcctcgccctcctccctgctgcactggacccggcgcatgatcgagatccgcaagcagaaccccgccttcggcctcggcacctacaccgaactgccctcctccaacccggcggtgctcgccttcctgcgggagtacgaggacgacctggtgctgtgcgtgaacaacttcgcacggttcgcccagcccaccgagctggatctgcgcgagttcgccggacgccatccggtcgagctgttcggcggggtccgcttccccgccatcggcgaactgccgtacctgctgaccctcgggggccacggcttctactggttccggctcacccgagtcgcatcccgcatcggccgccgcgcttga

SEQ ID NO: 13581 - protein, 572 aa, Streptomyces coelicolor A3(2)
MTVNEPVPDTFEDTPAGDRHPDWFKRAVFYEVLVRSFQDSNGDGIGDLKGLTAKLDYLQWLGVDCLWLPPFFKSPLRDGGYDVSDYTAVLPEFGDLADFVEFVDAAHQRGMRVIIDFVMNHTSDQHPWFQESRKNPDGPYGDYYVWADDDTRYADARIIFVDTEASNWTHDPVRGQYYWHRFFSHQPDLNYENPAVQEEMLAALKFWLDLGVDGYRLDAVPYLYAEEGTNCENLPASHAFLKRVRREIDAQYPDTVLLAEANQWPEDVVDYFGDYSTGGDECHMAFHFPVMPRIFMAVRRESRYPVSEILAKTPAIPSGCQWGIFLRNHDELTLEMVTDEERDYMYAEYAKDPRMRANIGIRRRLATLLDNDRDQIELFTALLLALPGSPILYYGDEIGMGDNIWLGDRDAVRTPMQWTPDRNAGFSTCDPGRLYLPAIMDPVYGYQVTNVEASMASPSSLLHWTRRMIEIRKQNPAFGLGTYTELPSSNPAVLAFLREYEDDLVLCVNNFARFAQPTELDLREFAGRHPVELFGGVRFPAIGELPYLLTLGGHGFYWFRLTRVASRIGRRA

SEQ ID NO: 13582 - DNA, 3351 bp, Xanthomonas campestris pv. campestris str. ATCC 33913
  CDS (1)..(3351): transl_table=11
atgaatgcagttccagcccttcaggctgacgcagaacaatcggcagtggttgccgaccagctttggtacaaggacgcgatcatctaccaggtgcacgtcaagtcgttcttcgactccaatgacgatggcatcggcgatttccccggcctgatttccaagctcgactacatcgccgaactgggcgtggacacgatctggttgctgccgttctaccccagcccgcgccgcgacgacggctacgacatcgccgaatacatggcggtgcatccggactacggcaccatcgccgacttcgagcagctggtggcgcaggcgcatgcgcgcggcatccgcatcgtcaccgagttggtgatcaaccacacctccgatcagcatccgtggtttcagcgcgcccgcaacgcgccggctggttcgccggagcgcgacttctacgtctggtcggacaccgaccaggaatacgaaggcacgcgcatcattttctgcgataccgaaaagtccaactggacctgggacccggtggccggccagtacttctggcaccggttctattcgcaccagcccgatctcaacttcgacaacccggcggtgctggaatcggtgctggaagtgatgcgcttctggctggaccgcggcgtggacggcctgcgcctggatgcggtgccgtatttgatcgagcgctcgggcacctcgaatgaaaacctgccggaaacccacgccatcctgcgcaagatccgcgccacgctggatgccgaatacccggaccgcatgctgctggccgaggccaacatgtggccggaagacacccagcaatacttcggccaaaacgccgacgaatgccacatggcgttccacttcccgctgatgccgcgcatgtacatggcgatcgcgcgcgaagaccgcttccccatcaccgacatcatgcggcagacaccggagatcccggagacctgccagtgggcgatcttcctgcgcaaccatgacgagttgacgctggaaatggtcaccgattcggagcgcgattacctgtggcagacctatgcctcggaccgccgcgcgcgcatcaacttaggcatccgccgccgcctggcgccgctgctggagcgcgaccgccgccgcatcgaattgatgacctcgttgctgctgaccatgcccggcacgccggtgctgtattacggcgatgagatcggcatgggcgacaacatccatctgggcgaccgtgatggtgtgcgtaccccgatgcagtggtcgatcgaccgcaacggtggcttctcgcgtgccgacccggctgcactggtgctgccgccggtcatggacccgctgtacggcttccaggcggtgaacgtggaagcgcagatccgcgaccagcattcgctgctgacctggacccgccgcgtgctcagcgtgcgcaagcgctaccaggcgttcggccgcggcacgctgcgctttttgtacccgggcaaccgccgcatgctggcctacctgcgctgctatcaggacgaaaccgtgctgtgcgtggccaacctctcgcacaccttgcaggcggtggagttggacctgtccgagttcgaaggccgcgtgccggtggacatcatcggcggtggcagcttcccgccgattggccggctgacctatctgctgaccgtgccgccatttggtttctatgcgttccagctggtcagcgaaggcacgctgccggactggcatgtgcccagcccggtgccgttgccggattaccgcacgctggtgctgcgcagcgacaccgaagagagcgccgcactgctgccgcatctggccacgctggaaggcgagatcctgccggcgtggttatcggcacgccgctggttctcggccaaggaccaggcgctcaagagcgtgcgcatttctcggcgcacaccgttgccgggcgatgagccgatgagcctgctggagctggatgtggagctggaagacggccaccacgagtgctacatgctgccggtgggcatcgtctgggagcgcgagcacccgagcacgctggccgagcagctggcgctggcgcgcgtgcgccagggccgcgaggtggggtatctcaccgacgcgttcgcgctcaagccgatggtgcgcggcgtgatcgatgcactgcgccacgacgcggcgctggatttccacgacggcgacgatgcctcgcaacaaggccaggtgcgtttcgaatcgaccccggcgctggccgcgctggagattccggacgacccggagatccgctggttgtcggccgaacagagcaacagctcgctggtcgttgcggacaaggcggtgttcaagctgctgcgccacgtggccaccggtgccaatccggaaatcgagatcggccgccgcctcaccgagatgggctacgccaatgcggcgccgctgctgggcagcgtgagccgggtggacgcgcagggcaccatcaccaccatcgcactgttgcagggcttcatccgcaaccagggcgatgcctggcgttggacgctcgatcacctggcgcgcagtttcgacgaatacgccaccgcgcagaccgacgaagcccgcaacgaagcggtggccggctacgacgcgtttgccgcagtggtgggcaagcgcctggccgagttgcacgaggcactctcgcgcagcaccgacgatgccgacttcgcaccacagcgtatcgacctgcccacagccaacgatgtggtgggcggcgtggcacgccaggtggaggaaatgtgggaaacagtgcacgcccgcctgggcgccaccgacgatgcggccgaacgcgaggcgctggaatcggtgctggccgaacgcccgcagctggatgcgctgctggccaaggcgccaagcgtgctggccgaatcgctgttgacccgcgtgcatggcgacttccacctgggccagatcctggtggcgttcgacgacgtggtgctgatcgacttcgaaggcgagcccgccaagccgctggccgagcgccgcgccaaggccagcccgttgcgcgatgtggccggtttcctgcgctcgctcgattacgccagcgaagtgtctgcgcgtggcgaagagggcaccgccgcacgtgccggtgtgggggtggatgcgcacctggatgacttcctggtggaattccgccgccgctccacgcaatcgttcctggacgcttaccatgccgtgctcgacgccagcgcgcatccgtggatcgcgccggcggcgttcaatgcggccaccttgctgttcctggtggagaaggcctgctacgaggtgcgctacgaagcggcgaaccggccgggctggttgatggtgcccatccagggcttgcgacgcatcctgcaacgcgcgcgcgctggtgcgggagacacatga

SEQ ID NO: 13583 - protein, 1116 aa, Xanthomonas campestris pv. campestris str. ATCC 33913
MNAVPALQADAEQSAVVADQLWYKDAIIYQVHVKSFFDSNDDGIGDFPGLISKLDYIAELGVDTIWLLPFYPSPRRDDGYDIAEYMAVHPDYGTIADFEQLVAQAHARGIRIVTELVINHTSDQHPWFQRARNAPAGSPERDFYVWSDTDQEYEGTRIIFCDTEKSNWTWDPVAGQYFWHRFYSHQPDLNFDNPAVLESVLEVMRFWLDRGVDGLRLDAVPYLIERSGTSNENLPETHAILRKIRATLDAEYPDRMLLAEANMWPEDTQQYFGQNADECHMAFHFPLMPRMYMAIAREDRFPITDIMRQTPEIPETCQWAIFLRNHDELTLEMVTDSERDYLWQTYASDRRARINLGIRRRLAPLLERDRRRIELMTSLLLTMPGTPVLYYGDEIGMGDNIHLGDRDGVRTPMQWSIDRNGGFSRADPAALVLPPVMDPLYGFQAVNVEAQIRDQHSLLTWTRRVLSVRKRYQAFGRGTLRFLYPGNRRMLAYLRCYQDETVLCVANLSHTLQAVELDLSEFEGRVPVDIIGGGSFPPIGRLTYLLTVPPFGFYAFQLVSEGTLPDWHVPSPVPLPDYRTLVLRSDTEESAALLPHLATLEGEILPAWLSARRWFSAKDQALKSVRISRRTPLPGDEPMSLLELDVELEDGHHECYMLPVGIVWEREHPSTLAEQLALARVRQGREVGYLTDAFALKPMVRGVIDALRHDAALDFHDGDDASQQGQVRFESTPALAALEIPDDPEIRWLSAEQSNSSLVVADKAVFKLLRHVATGANPEIEIGRRLTEMGYANAAPLLGSVSRVDAQGTITTIALLQGFIRNQGDAWRWTLDHLARSFDEYATAQTDEARNEAVAGYDAFAAVVGKRLAELHEALSRSTDDADFAPQRIDLPTANDVVGGVARQVEEMWETVHARLGATDDAAEREALESVLAERPQLDALLAKAPSVLAESLLTRVHGDFHLGQILVAFDDVVLIDFEGEPAKPLAERRAKASPLRDVAGFLRSLDYASEVSARGEEGTAARAGVGVDAHLDDFLVEFRRRSTQSFLDAYHAVLDASAHPWIAPAAFNAATLLFLVEKACYEVRYEAANRPGWLMVPIQGLRRILQRARAGAGDT

SEQ ID NO: 13584 - DNA, 1617 bp, Xanthomonas campestris pv. campestris str. ATCC 33913
  CDS (1)..(1617): transl_table=11
atgtcgcagacaccatggtggcgcggggccgtcatttatcagatttatccgcgtagttttctggattccaatggcgatggcgtaggcgatctgccgggcatcattgccaagctcgactacatcgccgggctgggagtagatgcgatctggatttcgccttttttcaagtcgccgatggccgatttcggctatgacatcgcagactatcgcgcggtggacccgttgttcgggtcgttggtcgatttcgatcgcttgctcgaaaaggcacatggccttgggttgaaagtgatgatcgatcaggtactgagccattcctcgatcgcgcatgtgtggtttcaggagagccgacaggaccggagcaacccgaaggctgattggtacgtgtgggccgatccgcgcgaggatggaacgccgccgaacaactggctgtcgttgtttggtggggtcgcatggcagtgggagccgcggcgtgagcagtactacctgcacaactttctggtggaccagcccgatctcaatttccacaacgccgaggtgcagcaggcaacgctcgataacgtgcggttctggctcgatcgcggtgtggatgggttccgtctggatgcgatcaacttctgctttcacgacgcgcaactgcgcgataacccggccaagccggcagacaagcgggtggggcgcggcttcagcgcggacaatccttacgcctaccagtatcattacttcaacaacacgcagccggaaaatctagcgttcctcgagcgcctgcgcgggctgctggatctttatccgaatgcagtgagccttggcgagatctcgtcggaagattcgctggccaccaccgccgaatacaccgcccagggccgcttgcatatgggctacagcttcgagctgctggtgcaggattacagcgctgcctacatccgcgacaccgtaagccggctcgaggccaccatgttggagggctggccatgctgggccatttccaatcacgacgtagtgcgcgcggtaacgcgctggggtggggcgcatgcgacgccggcgttcgcgcggatggtggtggcgctgctgtgttcgctgcgtggatcgatctgcctatatcagggcgaagagctcgggctcagtgaggcagaggtggcgttcgaggacctgcaggatccgtatggaataactttctggccgaccttcaagggccgggatggctgccgtacgccgatgccatggaccgacgcgccatctgccggattcaccagcggcaagccttggctgccgttagctgcgtcgcatcgtgccgctgctgtgagcgtgcaacaggatgatgcgcattccgtgttgagtgcagtacgggattttctagcttggcgcaaagagatgccggcgctgcgtgagggatccatcgctttctacgacacggccgaaccggtgctgatgttccgccgcgaacacgccggccaggttgtgctgttggcattcaatctgtccgccgatcctgccgacctggctttgcctgcaggcgagtgggagcaggtcgatgtacctggtgtcgagcttggggcgatggatggcggacacctaaggctggccgggcatgcggtcgttgctgctgtcggtcgtggctga

SEQ ID NO: 13585 - protein, 538 aa, Xanthomonas campestris pv. campestris str. ATCC 33913
MSQTPWWRGAVIYQIYPRSFLDSNGDGVGDLPGIIAKLDYIAGLGVDAIWISPFFKSPMADFGYDIADYRAVDPLFGSLVDFDRLLEKAHGLGLKVMIDQVLSHSSIAHVWFQESRQDRSNPKADWYVWADPREDGTPPNNWLSLFGGVAWQWEPRREQYYLHNFLVDQPDLNFHNAEVQQATLDNVRFWLDRGVDGFRLDAINFCFHDAQLRDNPAKPADKRVGRGFSADNPYAYQYHYFNNTQPENLAFLERLRGLLDLYPNAVSLGEISSEDSLATTAEYTAQGRLHMGYSFELLVQDYSAAYIRDTVSRLEATMLEGWPCWAISNHDVVRAVTRWGGAHATPAFARMVVALLCSLRGSICLYQGEELGLSEAEVAFEDLQDPYGITFWPTFKGRDGCRTPMPWTDAPSAGFTSGKPWLPLAASHRAAAVSVQQDDAHSVLSAVRDFLAWRKEMPALREGSIAFYDTAEPVLMFRREHAGQVVLLAFNLSADPADLALPAGEWEQVDVPGVELGAMDGGHLRLAGHAVVAAVGRG

SEQ ID NO: 13586 - DNA, 1617 bp, Xanthomonas axonopodis pv. citri str. 306
  CDS (1)..(1617): transl_table=11
atgttgcagacaccatggtggcgcggggccgtcatctatcagatctatccgcgtagctttccggattccaatggcgatggggtcggcgatctgccgggcatcatcgccaagctcgactacatcgctgggctgggcgtggatgccatctggatctcgccgtttttcaagtcgccgatggcagatttcggctatgacatcgcggactaccgtgcggtggatccgttgttcggaacgctggacgatttcgaccgtctgctcgacagggcgcatgcgcttggcctgaaggtgatgatcgatcaggtgttgagccacacctcgatcgaacatgcgtggttccaggaaagccggcaggaccggaccaatgcgaaggcggattggtatgtgtgggccgatccgcgcgaggacggaacgccgcccaacaactggttgtcgctgttcggtggtgtggcgtggcagtgggagccgcggcgcgagcagtactacctgcataacttcctggtcgatcagccggacctcaatttccataatgcggaggtgcagcaggcaaccctggacaatgtgcggttctggttggatcgtggagtagatggctttcgcctggacgcgatcaacttctgcttccatgacgcgcagctgcgcgataacccggccaagccggccgacaagcgggtggggcgtggctttagcgcggacaatccgtacgcctatcagtaccactacttcaacaacacgcagccggagaacctggcgttcctggagcgcctgcgtgcgctgctcgatcgctatccggatgcggtaagcctgggcgaaatctcttcggaagactcgctggcgaccacggccgaatacaccgccaagggccgcttgcacatgggctacagcttcgagctgttggtgcaggattacagcgcggcgtacatccgcggaacggtcagcaggctcgaggccaccatgttggaaggatggccgtgctgggccatttccaaccacgatgtggtgcgtgcggtgacgcgttggggcggtgaagatgcgtcgcctgcgttcgctcgcatggtagttgcgctgctatgttcgttgcgtggctcggtttgcctgtaccagggcgaggagcttgggctaggcgaggcggatgtggcgttcgaggatctgcgggatccgtacggcatcacgttctggccgaccttcaagggccgcgatggatgccgtacgccgatgccgtggaccgatgcgccgtcggcgggtttcaccagcggcaagccgtggttgccgttgtccgagccgcatcgtctggctgcagtgagtgtgcagcaggacgatgcccagtctgtgctgcgcgcagtgcgggcatttctgagttggcgcaggagcatgccggccctgctcgaaggggcgatcgcgttctacgacatcgcagagccggtgctgatgttccggcgtgagcatgcgggccaggtcatgctgttggcgttcaatttgtctgcagacatcaccgagctggcactgcctgcgggtgcatggcgccagatcgatgtgccgggggtggagcgtggcgtgatcgagcatggccgcgtgcgcttgccggggcatgctgtggtttgcgcaatgggcgggcagtga

SEQ ID NO: 13587 - protein, 538 aa, Xanthomonas axonopodis pv. citri str. 306
MLQTPWWRGAVIYQIYPRSFPDSNGDGVGDLPGIIAKLDYIAGLGVDAIWISPFFKSPMADFGYDIADYRAVDPLFGTLDDFDRLLDRAHALGLKVMIDQVLSHTSIEHAWFQESRQDRTNAKADWYVWADPREDGTPPNNWLSLFGGVAWQWEPRREQYYLHNFLVDQPDLNFHNAEVQQATLDNVRFWLDRGVDGFRLDAINFCFHDAQLRDNPAKPADKRVGRGFSADNPYAYQYHYFNNTQPENLAFLERLRALLDRYPDAVSLGEISSEDSLATTAEYTAKGRLHMGYSFELLVQDYSAAYIRGTVSRLEATMLEGWPCWAISNHDVVRAVTRWGGEDASPAFARMVVALLCSLRGSVCLYQGEELGLGEADVAFEDLRDPYGITFWPTFKGRDGCRTPMPWTDAPSAGFTSGKPWLPLSEPHRLAAVSVQQDDAQSVLRAVRAFLSWRRSMPALLEGAIAFYDIAEPVLMFRREHAGQVMLLAFNLSADITELALPAGAWRQIDVPGVERGVIEHGRVRLPGHAVVCAMGGQ

SEQ ID NO: 13588 - DNA, 3327 bp, Chlorobium tepidum TLS
  CDS (1)..(3327): transl_table=11
atgcctaaaaaacaagctgtaacaagctatcagccggagtcgctctggtacaaggatgccattatttatgaactacatgtcaaaaccttctgtgacagcgataacgatggcatcggtgattttcgcggcctgaagagccgcctcggctaccttgaaagcctcggagtgacggcgatctggattctgccgttctacccctcgccactgcgcgacgacggctacgacatcgccgattacaagtcggtcaatcccgactacggcacgatcgaggatttccgcgacttcctcgaagaggcgcatcggcgcggcatcaaggtgattaccgagctggtggtgaaccacacctccgaccagcacgagtggttcaaaaaagcccgcaaggctccgaaagggtcgccggagcgcgacttttacgtctggagcgacgacccgacgaagtatggcgaggcgcgcattattttccaggacttcgaggcttcgaactggacctgggatcccgtggctggccagtactactggcaccgctttttccatcaccagcccgacctgaacttcgagaatcccgccgtgcaccaggcgctgttcgacgtgctcgatttctggctcggcatgggagtggatggcctgcggcttgatgccgtaccctacctctacgaggctgaaggcaccaactgtgagaacctgccgcagaccttcgagttcctgcgcaagctgcgctcttatgtggacgagcattatcccaaccggatgcttcttgccgaggctaaccagtggccggaggactccgccgcctatcttggcaagggggacatgtgccacatgaacttccatttcccgctcatgccgcgcatgtatatggcgctggctaccgaggatcgttttccgatcatcgacattctcgcccagacgcccgaaattccggagagctgccagtgggcgtcgttcctgcgcaaccacgacgagctgacgcttgaaatggtgaccgacgaggagcgcgactacatgcgccgcgtttatgcccacgatgtcaaggcgcgcatcaacctcggcatccgccgccgcctcgcgccgctcatgtcgaacgaccgccgccgcatcgagctgatgaacatcatgctgctctccctgcccggtactccggtgctctattacggcgacgagatcggcatgggcgacaactactacctcggcgaccgtgacggcgtgcgcaccccgatgcagtggaacgccgaccgcaacgcgggcttttcgcgtgccaatccgcagcgcctgcttctgccggtgatcatcgaccccgagtaccactatgaagcggttaacgtcgaggtgcaggagtccaatcccaactcgctgctctggtggatgcgccacaccatcgccacggcccgccgcttccgagcgttcagccgcggcaccatcgagttcctcaacgccaacaaccccaaggtgctgatgtttatccgctcgtacgaagatgaaaccatcctcaccgtgatcaacctgtcccgcaacgcacaggtgatcaacgtcgatctttccgcttatgagggatgcgtgccggaggagattttcagcatgaaccgcttcccgagagtgcacaaaacaccatatatggtcgcgctcggaccatacggctatttctggcttcggctgatccgcgaggagtcgccggcggacaggtctgccctgcttgaaaaggttgcccttcgtgccggaagctggcaggagctgtttgttggccgcagtctcgaccagttcgaaaccgctattctgccaccctattacaagagcgtgcgctggttcgggggcaaagcccgcaatatcatcagaatcagggtgaccgataccgtgccggtcgccggaatggagaacactgcgtttgcgatgactgaagtgaactatccgagtggcgagaatgaacgctaccagcttccgctgaccttcgtgccagtggagcgaggtaaccttgcggatgagttgttctaccgtcatgccatagcaagggttgaacttgatggccttgaagggttcctcatcgacgcttcagccgacgagaccttccgttcaaggctgctcgatcttatcctgcacagagagacctggtccggcgcagctggcaagatcaccgcggatgccggcaagatgctcgaaaacagttgcctctcgaccgccggcgaagagccgcccgcctcgcatctgatgggcctggaacagagcaatacctcgattcgctacggtgagcagctctgcctgaagctctaccgcaagatcgacagcggcatggcacccgaaatcgaaatctcccgcgtgctgaccgatcagacagagtaccggaacattccggtctatctcggctcgtttgactacggcaaaagctaccgggagcgctgttcgctcggcattctccagaatttcgttccgaatgaatccgacggctggcagttgagtctcggccatgtccgccggtactatgaggatgtattgtcgcgctgttcgcagggcgtgcttccgccaacgctgccggaactttctggcaccacaagcaaactgccggagcttatccatgagctgatcggcgagttctatttccagatggtcggcaagcttgctgagcgcacggccggtatgcatcgtgcgctcggctctgtcgataccgatgctgctttctcgcccgagccgttcacgacgctctaccagcgctccatctatcaggcgatgactgaccaggtcaagcgcagcatgatcttcctgcgtgaatccatacacgccgttcccaaggaggcccgtccgcttgcccataagctgctcgatatgcagaaggagattctcgaacagttcgagccgatccgcaaggagaagatcgacacggtcaagatcaggattcacggtgactaccatctcggccaggtgctctacaccggtaatgacttcgtgattctcgatttcgagggcgagccggcccgctcactctcggagcgcaagatcaaacgctcggtctaccgcgacctcgcgggtatgctgcgttcgttcgactacgcggccttcaacgtgctgatgcagaaccaggctatccggcccgaagatcgcaaggcgctcgagccgtgggccgagctttggagctactatgttggtcagcattttatcgatgtctatacgcagcaaaccgaaggttcgggcctgattcccaaagagccgcgccagcgtgagctgctcctgcgcagctacctgatgaacaaggcgatctacgagctgaactacgagctgaacaaccgccccgagtggctgccgattccaatgaacggcatcctgcgcctcatccgtaactga

SEQ ID NO: 13589 - protein, 1108 aa, Chlorobium tepidum TLS
MPKKQAVTSYQPESLWYKDAIIYELHVKTFCDSDNDGIGDFRGLKSRLGYLESLGVTAIWILPFYPSPLRDDGYDIADYKSVNPDYGTIEDFRDFLEEAHRRGIKVITELVVNHTSDQHEWFKKARKAPKGSPERDFYVWSDDPTKYGEARIIFQDFEASNWTWDPVAGQYYWHRFFHHQPDLNFENPAVHQALFDVLDFWLGMGVDGLRLDAVPYLYEAEGTNCENLPQTFEFLRKLRSYVDEHYPNRMLLAEANQWPEDSAAYLGKGDMCHMNFHFPLMPRMYMALATEDRFPIIDILAQTPEIPESCQWASFLRNHDELTLEMVTDEERDYMRRVYAHDVKARINLGIRRRLAPLMSNDRRRIELMNIMLLSLPGTPVLYYGDEIGMGDNYYLGDRDGVRTPMQWNADRNAGFSRANPQRLLLPVIIDPEYHYEAVNVEVQESNPNSLLWWMRHTIATARRFRAFSRGTIEFLNANNPKVLMFIRSYEDETILTVINLSRNAQVINVDLSAYEGCVPEEIFSMNRFPRVHKTPYMVALGPYGYFWLRLIREESPADRSALLEKVALRAGSWQELFVGRSLDQFETAILPPYYKSVRWFGGKARNIIRIRVTDTVPVAGMENTAFAMTEVNYPSGENERYQLPLTFVPVERGNLADELFYRHAIARVELDGLEGFLIDASADETFRSRLLDLILHRETWSGAAGKITADAGKMLENSCLSTAGEEPPASHLMGLEQSNTSIRYGEQLCLKLYRKIDSGMAPEIEISRVLTDQTEYRNIPVYLGSFDYGKSYRERCSLGILQNFVPNESDGWQLSLGHVRRYYEDVLSRCSQGVLPPTLPELSGTTSKLPELIHELIGEFYFQMVGKLAERTAGMHRALGSVDTDAAFSPEPFTTLYQRSIYQAMTDQVKRSMIFLRESIHAVPKEARPLAHKLLDMQKEILEQFEPIRKEKIDTVKIRIHGDYHLGQVLYTGNDFVILDFEGEPARSLSERKIKRSVYRDLAGMLRSFDYAAFNVLMQNQAIRPEDRKALEPWAELWSYYVGQHFIDVYTQQTEGSGLIPKEPRQRELLLRSYLMNKAIYELNYELNNRPEWLPIPMNGILRLIRN

SEQ ID NO: 13590 - DNA, 1668 bp, Yersinia pestis KIM
  CDS (1)..(1668): transl_table=11
atgaataatccaatcccttggtggcaacatggtgtcatctatcagatttacccgaagagctttcaggacagtaccggtaatggctatggtgacctggcaggcgttgcgcagcggctggattatctgcaaaagctgggcgttgatgccatttggctgacaccggtgtatgtctcgccacaagtggataacggttatgacgtggcggattactgcgccattgaccccgcttatggcacattggatgactttaaacgtttggtcgcgggtgctcatcagcgaggcatacgcatcatcatggatatggtgttcaatcacacctccacagaacatgcctggtttaaagcttcgcaggatcgtaatagcccttatcggcaattttatatttggcgtgacggtgacggtggagacggcagtttaccgaataactggcgctcgaaattcggtggtcacgcatggcagtggcacgcggccagcggccagtattatctgcatttgtttgccccagagcaggctgatctgaattgggaacaccaaccggtacgcgatgagctcaaaaaggtgtgtgaattttgggccgatctgggggttgatggtctgcgtttggatgtcatcaatctggtgtccaaacagcaggatttccctaatgatctggacggcgatggccgccgtttttataccgatggcccacgcattcatgagtttttgcaggaactgagccgcgatgtgttccagccacgccgcctgatgacggtaggcgagatgtcatccacccgtctcgagcattgtcagcgatatgcggcattaggcggtgatgagttatccatgacctttaatttccatcacctgaaagtggattatcttaacggtgaaaagtggtcattgatgccgccgaatcgggtggagttgaaacacatttttaatcagtggcagcaagggatgcacaaccgagcatggaacgcactattttggtgtaatcacgatcaaccacgcattgtctcgcgttttggtcatgaaggcgcactacgtttgccagcggcaaagatgctggcgatggtactgcacggtatgcagggcacgccttatatttatcagggggaagaaattggcatgacgaaccccaatttcactgatatcactcaataccgtgatgttgaaagcctgaatatgtttgccgaactgagtgtggcaggccgcgaacccgatgagttattggcgattctggcagctaaatcccgtgataatagccgtacccccatgcaatgggatagcagcgataatgcgggtttcagccaaggcactccctggattgccccttgcagcaattatcatgagattaacgttaatgccgcattggccgacgctgactcggtgttttatgcctatcaatacctgatagccctgcgtaaacaatacgatattttcactttcggtgattatcaggatctttgcccacagcaccctgatttatggtgctatttgcgcagttggcaagggaagcaactgttggtagtcgctaacctgagtgaagagccccagcgatggcaacccgagggcctcacgctggacggtaattggcaattattgatgagcagctacgaccaaagcgccttccaaccgcaagatatgatattacgcggatatgaggggatttattgggtatgtgagtaa

SEQ ID NO: 13591 - protein, 555 aa, Yersinia pestis KIM
MNNPIPWWQHGVIYQIYPKSFQDSTGNGYGDLAGVAQRLDYLQKLGVDAIWLTPVYVSPQVDNGYDVADYCAIDPAYGTLDDFKRLVAGAHQRGIRIIMDMVFNHTSTEHAWFKASQDRNSPYRQFYIWRDGDGGDGSLPNNWRSKFGGHAWQWHAASGQYYLHLFAPEQADLNWEHQPVRDELKKVCEFWADLGVDGLRLDVINLVSKQQDFPNDLDGDGRRFYTDGPRIHEFLQELSRDVFQPRRLMTVGEMSSTRLEHCQRYAALGGDELSMTFNFHHLKVDYLNGEKWSLMPPNRVELKHIFNQWQQGMHNRAWNALFWCNHDQPRIVSRFGHEGALRLPAAKMLAMVLHGMQGTPYIYQGEEIGMTNPNFTDITQYRDVESLNMFAELSVAGREPDELLAILAAKSRDNSRTPMQWDSSDNAGFSQGTPWIAPCSNYHEINVNAALADADSVFYAYQYLIALRKQYDIFTFGDYQDLCPQHPDLWCYLRSWQGKQLLVVANLSEEPQRWQPEGLTLDGNWQLLMSSYDQSAFQPQDMILRGYEGIYWVCE

SEQ ID NO: 13592 - DNA, 1830 bp, Yersinia pestis KIM
  CDS (1)..(1830): transl_table=11
atgcttagtggttggcaccttccggtctcgccttttgttcgtttggcagacgacgcattacatatcacgctctggttgcaaggtgatagtttacctgcgcaagtctttctgcgttgtgagccagataatgaagagtggctgctcactatggaggggcatgagagccatgatcgttggcgctatagcgtttctttaccgttatatgaggggcagccaacccggcgctactgcttcaaactattatgggatgaccgccaacagtggtttggcccgttggggttctcggtgattcctccagcacagttggcacagtttgctgtagatgtacccgatagcgggcctgattgggtcgcggaccaagttttttatcagatcttccccgatcgctttgccagtagtcaggcagatcatggtgtgcaggaggggagttatattcatcatgcggccggttgcccggtatctcgccgcgagtggcagcagccattggatgatgtgcatgccgcatcgacattttatggtggcgatctggccggtattagtcagaaaatcccttactttcaacaactgggggttacggcactgtatttgaaccctatttttaccgctcccagtgtgcataaatatgatactgaagattattatcaggttgatccctacttggggggagagcgtgatttcttgcaattgcgagccgctacccgtgaagtaggaataaagttggtgctcgatggcgtgtttaaccacacgggtgattctcatcgctggtttgatcgctatcaacaaggggaaaacggcgcctgccatcacgaagattcgccttatcgtggttggtttacgttcctccctgatggacgagcattagattggaaaggtaatgccagtttgccaaaacttaattttgccaatgaagaggtcgctgaacgaatctatcgcagtgatgacagcgtcgtgcgttattggttacggccaccatacagtattgatggctggcgtctggatgtcgtacacatgctcggggaagatggcggcgctaaagggaatttgcaccatctgcacggtatctatcaggcagcaaaagaagaaaatccgcaggcttatattctgggcgaacattttggcgatgcacgtaattggttgcacgctggagtggaagacgcggcaatgaattatatgggttttgctttgccggtccgcagttttctcgccgagctagatgtggcttgccatcctataaaattggatgctgcggattgcgcctactggatggatgagtaccgcgcaggattgccccatagccagcaactccgtttatttaatcaattagatagccatgatactgcccgttttcttaccttattaaagggtgataaaacccgtatgcaaatggcgctaatatggttgtttagttggattggtgtgccttgcctattttatggtgatgagattgggctggatggagggaatgatccgttctgccgcaaaccgttcccgtgggatgaggctcagtgggatcatgacctattatcactgtgtcaacgtatggcggctttacgccacaaaagcatagcgttgcggcgcggggggtgtcaggtgatccatgccagtggtgattccctggtctttattcgtagctatcaaactgagcgtgtgatggtggcgatacaacgttccgatgatgcggatattttcctgcccgcctctcctttactcaatgtggctgagtggcagcgtctggaaggtggaggagacctggctgtcagtgagactggggtaaacatggggctggagggtaagagtgttaccttgtggtgtggtgttggtgagtgctaa

SEQ ID NO: 13593 - protein, 609 aa, Yersinia pestis KIM
MLSGWHLPVSPFVRLADDALHITLWLQGDSLPAQVFLRCEPDNEEWLLTMEGHESHDRWRYSVSLPLYEGQPTRRYCFKLLWDDRQQWFGPLGFSVIPPAQLAQFAVDVPDSGPDWVADQVFYQIFPDRFASSQADHGVQEGSYIHHAAGCPVSRREWQQPLDDVHAASTFYGGDLAGISQKIPYFQQLGVTALYLNPIFTAPSVHKYDTEDYYQVDPYLGGERDFLQLRAATREVGIKLVLDGVFNHTGDSHRWFDRYQQGENGACHHEDSPYRGWFTFLPDGRALDWKGNASLPKLNFANEEVAERIYRSDDSVVRYWLRPPYSIDGWRLDVVHMLGEDGGAKGNLHHLHGIYQAAKEENPQAYILGEHFGDARNWLHAGVEDAAMNYMGFALPVRSFLAELDVACHPIKLDAADCAYWMDEYRAGLPHSQQLRLFNQLDSHDTARFLTLLKGDKTRMQMALIWLFSWIGVPCLFYGDEIGLDGGNDPFCRKPFPWDEAQWDHDLLSLCQRMAALRHKSIALRRGGCQVIHASGDSLVFIRSYQTERVMVAIQRSDDADIFLPASPLLNVAEWQRLEGGGDLAVSETGVNMGLEGKSVTLWCGVGEC

SEQ ID NO: 13594 - DNA, 1608 bp, Streptococcus agalactiae 2603V/R
  CDS (1)..(1608): transl_table=11
atgaagaaacactggtggcataaagctacgatttatcaaatttacccacgttcatttatggattcagatggtgatggtgtgggggacattaaagggattactagcaaactagactaccttgaaaaattagggattactgctatctggttatcacctgtttatcaaagtccaatggatgacaatggttatgatatttcagattatcaagccattgcagatatttttggtgatatgaatgatatggaccaactgttacaagaggcaaatcaacgcgggattaaaatcatcatggatttggtagtgaatcatacctctgatgaacatgcttggttcgtagaagcgcgagaaaaccctaatagtcctgaacgtgatttttatatttggcgagatgaacctaacgatttgacttctatttttagtggctcagcttgggaatatgataaagtatcaggtcaatattatttgcacctttttagcaaacgtcagccagatctcaactgggagaatgaagctttacgtcataaaatttatgatatgatgaatttctggattgataagggtattggtggtttccgtatggatgtcattgatttaattgggaaaattccagataagggcattactggtaatggaccaaaacttcatgattatcttaaagaaatgaacagagctagttttggaaagcatgacttattgacggtgggtgaaacttggggagcaacgccagacattgcaaaacaatactcaaatcccgataatgaagaattatctatggtctttcaatttgaacatgtaggtcttcaacataaacctgacgctcctaagtgggattacagtgacggattagatgttccagcattgaaagatatttttacaaaatggcaaacacaattggagcttggccaaggttggaattctttattctggaataatcatgaccttcctcgagtgctctcgatctggggaaatgatagtgataacagaaaacaatctgccaaggctctagcaatcctactacatttgatgcgtggaacgccttatatctatcaaggtgaagaaattggtatgactaattatccatttgagtgtttagcagatgtagatgatattgaatcccttaactatgctaaagaagccatggataatggggtatctgaagcaacaattttagatagtattcgtaaagtcggtcgtgataatgctcgtactccaatgcagtggagtcaagaacatcaagctggttttactaaaggtaccccatggctagcagtcaatcccaattatcaggaaattaatgtggaggcagcgttaaatgatacggaaagtattttttatacttatcaaaaattagttgctttacgtaaagaacacgactggttagttgatgctgattttaaacttttggaaacagcagataaggtatttgcttatgttcgtcaaacagataaagaacgttatttaatagttgcgaacttatccgatcaaaaccaatcttttgaatttccagaagctgttaaagaaactattatttcaaatacagaggttcaagaagtactatcaagtaacactctcaagccgtgggatgccttctgcatagagctattctaa

SEQ ID NO: 13595 - protein, 535 aa, Streptococcus agalactiae 2603V/R
MKKHWWHKATIYQIYPRSFMDSDGDGVGDIKGITSKLDYLEKLGITAIWLSPVYQSPMDDNGYDISDYQAIADIFGDMNDMDQLLQEANQRGIKIIMDLVVNHTSDEHAWFVEARENPNSPERDFYIWRDEPNDLTSIFSGSAWEYDKVSGQYYLHLFSKRQPDLNWENEALRHKIYDMMNFWIDKGIGGFRMDVIDLIGKIPDKGITGNGPKLHDYLKEMNRASFGKHDLLTVGETWGATPDIAKQYSNPDNEELSMVFQFEHVGLQHKPDAPKWDYSDGLDVPALKDIFTKWQTQLELGQGWNSLFWNNHDLPRVLSIWGNDSDNRKQSAKALAILLHLMRGTPYIYQGEEIGMTNYPFECLADVDDIESLNYAKEAMDNGVSEATILDSIRKVGRDNARTPMQWSQEHQAGFTKGTPWLAVNPNYQEINVEAALNDTESIFYTYQKLVALRKEHDWLVDADFKLLETADKVFAYVRQTDKERYLIVANLSDQNQSFEFPEAVKETIISNTEVQEVLSSNTLKPWDAFCIELF

SEQ ID NO: 13596 - DNA, 1497 bp, Oceanobacillus iheyensis HTE831
  CDS (1)..(1497): transl_table=11
atgttaaatagaaataaattgcttctattgcttacagtgatttttgttttattgcctgtaactaatgtaaacgcagaagaaccaatcaatatacataatgaaattatttatgatattttagttgatcgttttaataatggagattctgaggaaacggaagaaattgctgtggatgacccgaatgcataccacggtggcgatattaaaggtataattgatcaactagatcgactaaaggaaatggggattactaccatttcattatcccctttaatgactaatcaacagaatggttatcacggatattgggtccttgattattttgaaatagacgagcaattaggaaccatggaagatcttaatcagttgattgaacaagcacatcaacgtgatatgaaagtagttatggatatggtaatcaattatgctgcagcatcacatgaagtaacagaagacgaaactaaagctgattggtggacggaaccttcttacacagctgcatcttggtctgctaatgcacttcaatggaatttgaatcaacctgaagttgcggagaatatgataaatgttgcagactactggatggaagagacggagatagatggttttacgttacatgctgttgatcaagcgccaattgactttcttcaagaatatacacaacatataaaagaaacagatgaagaattttatttaataggagatatattagatccagaatctgctaacattcaagaattagaagaaacacctctggatattgtagctaatcctatgctgcatgaacggttaaaacaagtattctctgatgtggataatccagtttctgaggtgtaccatcaatgggagaatttagagacagactctccgttaattacaattgataattttacagaagaacgttttaccaatgcatattcgaagaaccaacgaaattcactgacagcatggacactagcattgacatatatgtatactacaccaggaacacctctaattgttcaaggtacggagttgccaatgtatggtggagatgaagaggagtctcagcgacttgtaccatttaatagtggggacccagaattgaaagaatttcatactagaatagcgtctttacgaaatgaatttcctgcactacgacaaggtgacattgaactagtcgataccgttgattcgatgatagtctataaaagaagttatgaaggccaaacgatgtatgttgcgattaacaatggaagtgagtctgcttatgtagatgtaactgatgttgatgctaataaagagttacgcggccacttacaagataatttggttcgtgaaaaccaagaagggaatcatcgaattggaataccacgtgaatctgtagaagtgtatgaagtacaggatgatcatggtcttaactggtggtttattggatttattgttatggttattttggcctttattgctggagttatctatttgacaataaaacaacgcaagagagaaaagaaataa

SEQ ID NO: 13597 - protein, 498 aa, Oceanobacillus iheyensis HTE831
MLNRNKLLLLLTVIFVLLPVTNVNAEEPINIHNEIIYDILVDRFNNGDSEETEEIAVDDPNAYHGGDIKGIIDQLDRLKEMGITTISLSPLMTNQQNGYHGYWVLDYFEIDEQLGTMEDLNQLIEQAHQRDMKVVMDMVINYAAASHEVTEDETKADWWTEPSYTAASWSANALQWNLNQPEVAENMINVADYWMEETEIDGFTLHAVDQAPIDFLQEYTQHIKETDEEFYLIGDILDPESANIQELEETPLDIVANPMLHERLKQVFSDVDNPVSEVYHQWENLETDSPLITIDNFTEERFTNAYSKNQRNSLTAWTLALTYMYTTPGTPLIVQGTELPMYGGDEEESQRLVPFNSGDPELKEFHTRIASLRNEFPALRQGDIELVDTVDSMIVYKRSYEGQTMYVAINNGSESAYVDVTDVDANKELRGHLQDNLVRENQEGNHRIGIPRESVEVYEVQDDHGLNWWFIGFIVMVILAFIAGVIYLTIKQRKREKK

SEQ ID NO: 13598 - DNA, 1752 bp, Oceanobacillus iheyensis HTE831
  CDS (1)..(1752): transl_table=11
atgctaaaagaagcagtatttcatcgaccaaagaataattatgcttacctttacaaagagaatacgttacacattcgtttacaaacaaagaaagatgatgtagtaaaagccacacttatctatgcagatccttataattgggatgattcaggatggatttataacaaggcagacatgcgtctcatagcttccgatcagctattcgattattggcaaattgaaatttattgtaaaacacgtcgaataagatatggatttcaattatctgatactaaagaaactcttatttatacagagaaaggattttataaagaaattccaaatgatgacactgcttattacttctgcttcccttttttaaacccaatagatcaatttcaagcaccagaatgggtaaaggaaactgtatggtatcaaatttttcctgaacgatttgcgaacggaaatgaaacaattaatcctcctggaactttaccttggggaagcactacccctacacctacagatttttttggtggtgactttcaaggtataatcaatcacttggattatcttgtagatttaggtatttccggtatttattttacgcctatatttaaagcattttctaaccataaatacgatacgattgactatatggaaatcgatcctcaatttggggataaacagacatttcgaaagttagttaaagcttgtcatcaacgaggaattcgcattatgcttgatgctgtatttaatcatagtggctatttctttgaaccatttcaggatgtgttaaaaaaccaagagaagtctatttataaggaatggtttcatatcgagagttttcctttgagaacagacccagcaccaaactatgacacctttgcatatgtaggttcaatgccaaaactaaatacagagcacccggaagtgaaatcatatttacttaaagtagcatcatattggattgaagagtttgatatcgatgggtggcgattagacgtagctaatgaagtggatcaccaattttggagagatttccgtagacaagtgaaatccataaagccagatgtctatattctcggagaaatatggcatgattcgatgccctggttacaaggagatcaatttgacgcagtaatgaactatccacttaccagtgctgcacttgattttattgcaaaggaaaaaatagatgttaaagaatttgtccaacaaatttctaatgttctactttcttatccacagaacgtgaatgaagtagcatttaatctattaggcagtcatgatactcccagagttttaacacattgcaacaatcaagtcgaaaaagcaaaacttctatatatattattattaacgatgccaggttctccttgtatttattatggagatgaaattggaatgactggagaaggggatcctggttgcagagaatgtatggtttgggacgagaatgaacaaaatgtagaattaaaatctttccttaaaaaattaattcatgtgcggaaaacggaaaaggctgttgcaaatcaaggagaattttcatttgtaaaaactagtgataattatttcatttataaactttttcaacagcatatggaaatttatattattataaacccaagtaatcaggctctcgaagtatcacttccggtaaccaagtggaacagtgccttcgatttatgggaggaagatgatttcaatattaacactccaataaaatgtgaggaaaatagtttcaaaataatcaaagtaaattattcataa

SEQ ID NO: 13599 - protein, 583 aa, Oceanobacillus iheyensis HTE831
MLKEAVFHRPKNNYAYLYKENTLHIRLQTKKDDVVKATLIYADPYNWDDSGWIYNKADMRLIASDQLFDYWQIEIYCKTRRIRYGFQLSDTKETLIYTEKGFYKEIPNDDTAYYFCFPFLNPIDQFQAPEWVKETVWYQIFPERFANGNETINPPGTLPWGSTTPTPTDFFGGDFQGIINHLDYLVDLGISGIYFTPIFKAFSNHKYDTIDYMEIDPQFGDKQTFRKLVKACHQRGIRIMLDAVFNHSGYFFEPFQDVLKNQEKSIYKEWFHIESFPLRTDPAPNYDTFAYVGSMPKLNTEHPEVKSYLLKVASYWIEEFDIDGWRLDVANEVDHQFWRDFRRQVKSIKPDVYILGEIWHDSMPWLQGDQFDAVMNYPLTSAALDFIAKEKIDVKEFVQQISNVLLSYPQNVNEVAFNLLGSHDTPRVLTHCNNQVEKAKLLYILLLTMPGSPCIYYGDEIGMTGEGDPGCRECMVWDENEQNVELKSFLKKLIHVRKTEKAVANQGEFSFVKTSDNYFIYKLFQQHMEIYIIINPSNQALEVSLPVTKWNSAFDLWEEDDFNINTPIKCEENSFKIIKVNYS

SEQ ID NO: 13600 - DNA, 1398 bp, Bifidobacterium longum NCC2705
  CDS (1)..(1398): transl_table=11
gtgagcttggccacatgttcacggactgcgtttcatgccgattacccgggattcgcaccgcgatgtgcgaaaatggacacggtatcaatcaggaggtgcacagtggttgtaagcacggattcgagccgcacaatgcccgattgggtgaagtacggggtgttctggcacgtgtatccgctgggcttctgcggtgccgatatcaggcccgccggcccgcgccggttccatggccgcggccttgacgcgataattccctggctggagtacgtgcgcgatctaggcgcgtccggcctgctgctgggtccggtgttcgagtcggcgacgcatggatacgacacgctcgaccatatgcatatcgatgtgcgattgggcggggatgccgcgttcgatcagcttgtcgcggcctgccgggacatgggattgcaggtgatgctggatggcgtgttcaatcacgtgagccgcaatcatccggccgttcaggcggcgcttgacgagaccgccggacgcttgaatccggccgacaacccgtggcatggtctggtccgcgcgcatgtcggtgataatggcgaacccgctttggatgtgttcgaggggcacggggatctggtggcgctggaccattcggctgacgagaccgttgactatgtggtccatgtgatgagccattggctggatcgcggagccgccggctggcgcctcgacgccgcgtatgccgtgccgagcccgttctgggcgcgcgtgttgccgcaggtcaaagccgcacacccgtattcgtggattttcggcgaggtgatccatggcgattacccgcgcatcatcgaggaatccacgatggattcgatcacgcaatacgagctatggaagtcgatccagcatgcgctggagacggagaacttcttcgagctggattggaacttgaagcggcacaacgcgttcctggattccttcgtgccgcagacgttcatcggcaaccatgacgtgacgcgtatcgcatcgcagattggcccggccaaggcggcgttggcattggcggtgctcatgacggtcggcggcgtgccaagcatctattacggcgacgaacagggctatgtgggcgtcaagcaggagcgtttcggcggcgatgacgacgtacgtccgaagttccccggctcccctgccgaactgtccacgctgggagagccgacataccggctgcatcaggcgctgatcgcgctgcgccgtcgcaacccatggctgctggatgcgcgtaccgaggccgtgaagctggaaaacaagcacttcgtctatcgttcgacgagcgccgacgcccagcattccctgaccgtggacctcaacatcgagcaatcccccactttcaccatccgcaacgccgatggcagtacagcgtatcaatggtga

SEQ ID NO: 13601 - protein, 465 aa, Bifidobacterium longum NCC2705
MSLATCSRTAFHADYPGFAPRCAKMDTVSIRRCTVVVSTDSSRTMPDWVKYGVFWHVYPLGFCGADIRPAGPRRFHGRGLDAIIPWLEYVRDLGASGLLLGPVFESATHGYDTLDHMHIDVRLGGDAAFDQLVAACRDMGLQVMLDGVFNHVSRNHPAVQAALDETAGRLNPADNPWHGLVRAHVGDNGEPALDVFEGHGDLVALDHSADETVDYVVHVMSHWLDRGAAGWRLDAAYAVPSPFWARVLPQVKAAHPYSWIFGEVIHGDYPRIIEESTMDSITQYELWKSIQHALETENFFELDWNLKRHNAFLDSFVPQTFIGNHDVTRIASQIGPAKAALALAVLMTVGGVPSIYYGDEQGYVGVKQERFGGDDDVRPKFPGSPAELSTLGEPTYRLHQALIALRRRNPWLLDARTEAVKLENKHFVYRSTSADAQHSLTVDLNIEQSPTFTIRNADGSTAYQW

SEQ ID NO: 13602 - DNA, 1818 bp, Shigella flexneri 2a str. 301
  CDS (1)..(1818): transl_table=11
atgatgttaaatgcatggcacctgccggtgcccccatttgttaaacaaagcaaagatcaactgctcattacactgtggctgacgggcgaagacccaccgcagcgcattatgctgcgtacagaacacgataacgaagaaatgtcagtaccaatgcataagcagcgcagtcagccgcagccaggcgtcaccgcatggcgtgcggcgattgatctctccagcggacaaccccggcggcgttacagtttcaaactgctgtggcacgatcgccagcgttggtttacaccgcagggcttcagccgaatgccgccggcacgactggagcagtttgccgtcgatgtacctgatatcggcccacaatgggctgcggatcagattttttatcagatcttccctgatcgttttgcgcgtagtcttcctcgtgaagctgaacaggatcatgtctattaccatcatgcagccggacaagagatcatcttgcgtgactgggatgaaccggtcacggcgcaggcgggcggatcaacgttctatggcggcgatctggacgggataagcgaaaaactgccgtatctgaaaaagcttggcgtgacagcgctgtatctcaatccggtgtttaaagctcccagcgtacataaatacgataccgaggattatcgccatgtcgatccgcagtttggcggtgatggggcgttgctgcgtttgcgacacaatacgcagcagctgggaatgcggctggtgctggacggcgtgtttaaccacagtggcgattcccatgcctggtttgacaggcacaatcttggcacggggggagcttgtcacaactctgaatcgccctggcgcgactggtactcgtttagtgatgatggcacggcgctcgactggcttggctatgccagcttgacgaagctggattatcagtcggaaagtctggtgaatgaaatttatcgcggggaagacagtattgtccgccactggctgaaagcgccgtggaatatggacggctggcggctggatgtggtgcatatgctgggggaggcgggtggggcgcgcaataatatgcagcacgttgcagggatcaccgaagcggcgaaagaaacccagccggaagcgtatattgtcggcgaacattttggcgatgcacggcaatggttacaggccgatgtggaagatgctgccatgaactatcgtggcttcacattcccgttgtggggatttcttgccaataccgacatctcttatgatccgcagcaaattgacgcccaaacctgtatggcctggatggataattaccgcgcagggctttctcatcaacaacaattacgtatgtttaatcagctcgatagccacgatactgcgcgatttaaaacgctgctcggtcgggatattgcgcgcctgccgctggcggtggtctggctgttcacctggcctggtgtaccgtgcatttattacggtgatgaagtgggactggatggtaaaaacgatccgttttgccgtaaaccgttcccctggcaggtggaaaagcaggatacggcgttattcgcgctgtaccggcgaatgattgtgctgcgtaagaaaagtcaggcgctgcgtcgtggcggctgtcaggtgctgtatgcggaagataacgtagtggtatttgtccgcgtgctgaatcagcaacgtgtactggtggcaatcaaccgtggcgaggccagtgaagtggtgctacccgcgtcaccgtttctcaatgccgtgcaatggcaatgcaaagaagggcatgggcaactgactgacgggattctggctttgcctgccatttcggctacggtatggatgaactaa

SEQ ID NO: 13603 - protein, 605 aa, Shigella flexneri 2a str. 301
MMLNAWHLPVPPFVKQSKDQLLITLWLTGEDPPQRIMLRTEHDNEEMSVPMHKQRSQPQPGVTAWRAAIDLSSGQPRRRYSFKLLWHDRQRWFTPQGFSRMPPARLEQFAVDVPDIGPQWAADQIFYQIFPDRFARSLPREAEQDHVYYHHAAGQEIILRDWDEPVTAQAGGSTFYGGDLDGISEKLPYLKKLGVTALYLNPVFKAPSVHKYDTEDYRHVDPQFGGDGALLRLRHNTQQLGMRLVLDGVFNHSGDSHAWFDRHNLGTGGACHNSESPWRDWYSFSDDGTALDWLGYASLTKLDYQSESLVNEIYRGEDSIVRHWLKAPWNMDGWRLDVVHMLGEAGGARNNMQHVAGITEAAKETQPEAYIVGEHFGDARQWLQADVEDAAMNYRGFTFPLWGFLANTDISYDPQQIDAQTCMAWMDNYRAGLSHQQQLRMFNQLDSHDTARFKTLLGRDIARLPLAVVWLFTWPGVPCIYYGDEVGLDGKNDPFCRKPFPWQVEKQDTALFALYRRMIVLRKKSQALRRGGCQVLYAEDNVVVFVRVLNQQRVLVAINRGEASEVVLPASPFLNAVQWQCKEGHGQLTDGILALPAISATVWMN

SEQ ID NO: 13604 - DNA, 1746 bp, Leptospira interrogans serovar Lai str. 56601
  CDS (1)..(1746): transl_table=11
ttgttggaatacagccttgacagtcttcattcttatatttttgattccattaaagctcgagtaaatatgacttctaaaaaatcaacttccaaaaaaaaatcacccaatcaattggataagtggtggcaaaaaacaacgatttaccagatttatccccgctcttttgcagatagtaatcgggatggtgttggagacattccagggatcatttctaaattggattatcttcaagatcttgggtttgaaacaatttggatatctcctttgtataaaagtccacaaatggatcacggttacgatgtaagtgattattactcgatcgctccagaatatggaactataaaagatgcagaaaagttaataaaggaagttcataagcgcgggatgaaaatcgtttttgatatggtgatgaatcatacttctattgaacacgattggtttatacaatcccgttctagtcgagataatcctaaaagagattggtatatttggaaagacggaagaggaaaaaataaacctcctaataattggagttcgtttgtgacacccaaggcctggcattatgattccaatacggatcaatggtatcttgcgagttttctagattttcaaccagacttaaattattacaatccagaagtcaaaaaggcaatgttcgacgttttgcgtttttggcttaagaagggagtagatggtttccgtttggatatttttcacgcgatttataaggataaatatttcagagacaatccgtttcgatttaaatatatcgtttcggaaaatgatcacgatggttattttcagagtagggttcatactgtaaaccatccaaataactttgcttttgcgaaagagctaagatccgttttagatgagtttgatggagatcgttttgcggtaggagaggtggccggagatgatcatatcatcaaacgctacttaggcgaaaaaaaagatggcctgaatctaatctttttattcgaaactttgttgttaaagttcaagactagtttttttaagggaatcgtaaaaaaaatggaacaagtatatccgtatccaaacgttcccacatacgtttttggaaaccatgaccaaagacgttacatgatgaaaatcaataataatctcgaaaaaggaaaattgattgctctgtttcagtttaccgcgaggggggttccagtcacttattacggagaagaaattggaatgaccaatgagacgatcaaattaactgaggcacaggatccgcttgcaagaatctatcgctggttaggtgattcgctttccgaattgttgggactcgcagacgttatcattcgggatcgagcaaggtcgccgatgcaatgggacgactcgccaaacgcaggttttacggttcaagaagcaaaaccatggattcgggttcacggaaattatagagaacgtaacgttttgatcgagtccgaagattcggattctcttttaaatacttataaaagtgttcttcgcattcgaaatggaagttttgctcttaaagagggttctttgagattaattgaagaaaacgttccaaaagatatgttagtttatttaagggaatttggtaaggaacgtaaactgatcgtttttaattttggtaaaaaaaccaaatttttttctaatcctaccgattgtagaaaatattttttctctacggtttctttcgatcataacgaatttgatcaatttaaaatacctccttgttctggagttatattaggtaattag

SEQ ID NO: 13605 - protein, 581 aa, Leptospira interrogans serovar Lai str. 56601
MLEYSLDSLHSYIFDSIKARVNMTSKKSTSKKKSPNQLDKWWQKTTIYQIYPRSFADSNRDGVGDIPGIISKLDYLQDLGFETIWISPLYKSPQMDHGYDVSDYYSIAPEYGTIKDAEKLIKEVHKRGMKIVFDMVMNHTSIEHDWFIQSRSSRDNPKRDWYIWKDGRGKNKPPNNWSSFVTPKAWHYDSNTDQWYLASFLDFQPDLNYYNPEVKKAMFDVLRFWLKKGVDGFRLDIFHAIYKDKYFRDNPFRFKYIVSENDHDGYFQSRVHTVNHPNNFAFAKELRSVLDEFDGDRFAVGEVAGDDHIIKRYLGEKKDGLNLIFLFETLLLKFKTSFFKGIVKKMEQVYPYPNVPTYVFGNHDQRRYMMKINNNLEKGKLIALFQFTARGVPVTYYGEEIGMTNETIKLTEAQDPLARIYRWLGDSLSELLGLADVIIRDRARSPMQWDDSPNAGFTVQEAKPWIRVHGNYRERNVLIESEDSDSLLNTYKSVLRIRNGSFALKEGSLRLIEENVPKDMLVYLREFGKERKLIVFNFGKKTKFFSNPTDCRKYFFSTVSFDHNEFDQFKIPPCSGVILGN

SEQ ID NO: 13606 - DNA, 1839 bp, Corynebacterium efficiens YS-314
  CDS (1)..(1839): transl_table=11
atgcagggtcgacgagacgtggaaaatgtctctacccttgtgggtatgactgacactaccccgttgagttcggacctgatcccagagagcaccgcccgcccggtagtcgatgccgagggcttcatcattgagcatgagtcggaggagtaccacactcccacccccgcccccggtgaacagccctgggagaaacatgaccgcgaatggtacaaggacgctgtgttctatgaggtgctggtgcgtgccttctacgacccggacaacaccggttcgggcaccctgaagggtctgacggagaagctggattacatccagtggctgggtgtggactgcatctgggtgccgcccttctacgactctcccctgcgtgatggtgggtatgacatccggaacttccgtgagatcctgccggagttcggcacggtggaggatttcgtggagctggttgaccaggcccaccgccgtggtctgcgtgtgatcaccgacctggtgatgaaccacacctccgatcagcatccgtggttccagcagtcccggacggatccggatggcccctatggtgacttctacgtctggggggatgatccggagatgtacaaggaagcccgcatcatcttcgtcgataccgaggaatccaactggacctacgacccggtgcgcaagcagtactactggcaccggttcttctcccaccagccggacctgaactatgacaacccggcggtgcaggaggcgatgctcgatgtgctgcggttctggctggatctgggtctggatgggttccgtctggatgccgtgccctacctgttcgagcgtgagggtaccaacggtgagaacctgccggagacccacgagtttctcaagcggtgccgtcgggtgatcgatgaggagtacccgggccgcatcgtcctggcggaggccaaccagtggccccatgatgtggtggagtacttcggtgagaaggagaagggcgatgagtgccacatggccttccacttcccgctcatgccccgcatcttcatgggtgtgcgccaggggtcccgcaccccggtcagtgagatcctcgagcacaccccggacatccccaagaccgcccagtggggtatcttcctgcgcaaccatgacgagctgaccctcgagatggtgtccgaagaggaacgcgcctacatgtaccagcagttcgcccccgagcctcggatgcgcgcgaacgtgggtatcaggcgtcgactagcaacgcttgtcgacggcgaccgcaaccagctcgaactcctgcacgggctgttgctgtccctcccgggttcccccgtgctgtactacggcgatgagatcggcatgggcgacaacatctggctgccggaccgtgatggcgtgcgcacccccatgcagtggtccaatgaccgcaacgggggtttctccaaggcagatcccgagcgtctttatctgccagcgatccagaatgaccgcttcggttatgcccaggtcaatgtggaaacccagctcaagcaggagaactccctgctgcagtggatccgcaaccagatcatgatccgcaagcagtacaaggccttcggcaagggcacctaccgggagatcgactccaccaacgaggcggtgctgaccttcctccgtgagtacaaaggccagaccattctgtgtgtcaacaacatgtcgaagctgccacaggcggtggccctggatctcagcgagttcgccggcatcaccccgcgtgaggtctccggcggccagtacttccccaccatcggtgagcgccagtgtgtgttcaccctggcaccgcatgggttcttctggctcgatctcaccggtgaggaggaggaatga

SEQ ID NO: 13607 - protein, 612 aa, Corynebacterium efficiens YS-314
MQGRRDVENVSTLVGMTDTTPLSSDLIPESTARPVVDAEGFIIEHESEEYHTPTPAPGEQPWEKHDREWYKDAVFYEVLVRAFYDPDNTGSGTLKGLTEKLDYIQWLGVDCIWVPPFYDSPLRDGGYDIRNFREILPEFGTVEDFVELVDQAHRRGLRVITDLVMNHTSDQHPWFQQSRTDPDGPYGDFYVWGDDPEMYKEARIIFVDTEESNWTYDPVRKQYYWHRFFSHQPDLNYDNPAVQEAMLDVLRFWLDLGLDGFRLDAVPYLFEREGTNGENLPETHEFLKRCRRVIDEEYPGRIVLAEANQWPHDVVEYFGEKEKGDECHMAFHFPLMPRIFMGVRQGSRTPVSEILEHTPDIPKTAQWGIFLRNHDELTLEMVSEEERAYMYQQFAPEPRMRANVGIRRRLATLVDGDRNQLELLHGLLLSLPGSPVLYYGDEIGMGDNIWLPDRDGVRTPMQWSNDRNGGFSKADPERLYLPAIQNDRFGYAQVNVETQLKQENSLLQWIRNQIMIRKQYKAFGKGTYREIDSTNEAVLTFLREYKGQTILCVNNMSKLPQAVALDLSEFAGITPREVSGGQYFPTIGERQCVFTLAPHGFFWLDLTGEEEE

SEQ ID NO: 13608 - DNA, 1839 bp, Vibrio vulnificus CMCP6
  CDS (1)..(1839): transl_table=11
atgaccctaccttttctttttcatgcgcaaacgccggattatttccgcgttgagaatcaaatcgctcacgttaccttaagaactcagcctgaaggaattcaagccgtctacctgcggcacgagcctgacaatgaagagtacttagtagaaatgcagcgagtctctaagttaggggaactcgatggctggcaagcgtcattccctttgaataaagaccgagagatcacccagtacgttttcaaagtgatcacagaaggtgccactgtctggttagacgctcgtggcgtacagaaacggatgccaggcagcgagtaccatttcaaatacaaccaatctcatcagccgccagagtgggtgagtgagcagattttctaccaaattttccctgatcgattctgtaatggtaacccagagatcagcgttaaaagtggcgaatactcggtaaaaaatggcacacgccctgtggtcgcaaaagagtggggagcggccgttgacaaacacaatggctatgggggttgtgagttttatggcggggacttggctggcattcgcagcaaattggattacctgcaaaccttgggcgtgacagcgctctatctcaatccgattttttcggcgccgagcaatcacaagtacgacaccactgattacttaaccattgatccgcatttgggaagcaatcaagagtttgcagagttgagcgaagcgcttcatcaacgcggtatgaaaattgtgcttgatgccgttttcaatcacacctcatgtgagcacccttggtttgacaaaaatggggtaggtgagataggggcctatcaccacatcgaatcgccttatcgccactattattttttcgaagacggtagccaaaattatattggctggaagggcgttgacagtttaccagtactgaattttgaaaatgcggaggtacgtaattacatttatgccagcgaacacgcggccattcgccactggttgaaagcaccctatcgaatcgatggttggcgttttgacgtgatccacatgcttggagaaggtgaaggggcgcgcaacaatgcctactatgttaagcagttccgcaatgcgactaaacaagaaaaccctcaagcttatgtattaggggagcatttcttcgaggcgagcaagtggctccaaggcgatcaagaagacggctcgatgaattactacggctttgcccatccagtgagagcattattggcccaaaaagacattgcctaccatcctattgagatcgactgcatcgattttgttgattggctaaatgaatcacgcgctaaagtaccttggcttaaccagctcagccagttcaatcaacttgacagccacgataccgcacgttttattaccttgttggaaaatgaccaagcgcgcatgaacattgctctcggcttgctgttcacttatgtcggaaccccttgtatctattatggtagtgaagttggactggaaggtgagaatgacccagataaccgccgctgtttcccgtgggagcgtgttggtcatgtggagacgttccaatatcaccaacgtctcattgaacttcgcaaaacgtctaaggcgctgcagcaagggtcgatccaatttttgcatgttgagccaacgtcgttcagttttgctcgtcagtatggtgaagacactctgcttgtgatggtcaacttagattcgaaggcatgctctatgacgctgccaatttggcaacttggaaagccgcaaggacgtctggtttccctattgggtaatgaaagtgctttgcaagtaaatagtaaagttgtggttaatatctcttctgaatccattcaaatttggaaacttgagtga

SEQ ID NO: 13609 - protein, 612 aa, Vibrio vulnificus CMCP6
MTLPFLFHAQTPDYFRVENQIAHVTLRTQPEGIQAVYLRHEPDNEEYLVEMQRVSKLGELDGWQASFPLNKDREITQYVFKVITEGATVWLDARGVQKRMPGSEYHFKYNQSHQPPEWVSEQIFYQIFPDRFCNGNPEISVKSGEYSVKNGTRPVVAKEWGAAVDKHNGYGGCEFYGGDLAGIRSKLDYLQTLGVTALYLNPIFSAPSNHKYDTTDYLTIDPHLGSNQEFAELSEALHQRGMKIVLDAVFNHTSCEHPWFDKNGVGEIGAYHHIESPYRHYYFFEDGSQNYIGWKGVDSLPVLNFENAEVRNYIYASEHAAIRHWLKAPYRIDGWRFDVIHMLGEGEGARNNAYYVKQFRNATKQENPQAYVLGEHFFEASKWLQGDQEDGSMNYYGFAHPVRALLAQKDIAYHPIEIDCIDFVDWLNESRAKVPWLNQLSQFNQLDSHDTARFITLLENDQARMNIALGLLFTYVGTPCIYYGSEVGLEGENDPDNRRCFPWERVGHVETFQYHQRLIELRKTSKALQQGSIQFLHVEPTSFSFARQYGEDTLLVMVNLDSKACSMTLPIWQLGKPQGRLVSLLGNESALQVNSKVVVNISSESIQIWKLE

SEQ ID NO: 13610 - DNA, 2064 bp, Vibrio vulnificus CMCP6
  CDS (1)..(2064): transl_table=11
atgaaactgaacgccataaccctaactctgcttctcagctcgacagcggcgattgccgagccgaatttaaccatttcaaccaccaccaacagccgagattttccgctcagtgccgagcagccattagtggtgccgctggtcaaagagagctatcaactgaaaatcactgggctggaaggtgattgccaagcgccagatgcgcaggtgattaagttcaatcaacccattgcgctgaattgtggcaaagtgaccgaacttccgcttaaaatccgctttacgggtgactacagctttgaactagacgcgaacgccaacacgctgacattcaaacgtgagccgaaaaaggtcgctaaaaccgaattcaaacgcccattgccgcaggtgacttgtgaagtttaccaaggcggtgaagtgacgattgaactgggcgacagtttcaaagacggcacctcactgcgtgacgcctacagcggccaagtggtgagcgtgaaaaaaggcaaagtgagcttaacgccatcagcgcaatctggcggtttggtgctgctggaaccggttaaacaaaacaaaaaagcgcgccctttcgattaccgcaacgccaatatttacttcgtgatggtggatcgctttaacaatggcgacaccagcaatgaccaaagttatggtcgtcagaaggatggtaaagaggaaatcggcaccttccacgggggcgatcttaaaggggtgattgaaaagctcgactacattcaacgtctcggcactgatgcgatttggttgtcgccgattgtggagcaagtgcacggttttgttggtggtggcgacagcggctctttcccattttatgcctatcacggctattggacgcgtgattttaccaagatcgatgagaactttggccgcgatgaagatttgaaaactctggtggaagaggcgcataaacgcggcatcaaagtcctgctcgatgcggtgatcaaccattccgggtattcaacactggcggatctgcaatttgatggcatgcaagtgacgacaaaagaagcgaacttgccagaaaaatgggccaactggcagccaacatcgggtgaaaactggcatagctaccactctgcgatcgactatcaaagccaaaactggtcacagtggtggggggcagattgggtgcgaactgggcttccgggttaccaacaaccgggcagcagcgacattactttgtctctcgctgggttgcctgattttcgcaccgagtcgacccaagcggtgacgccaccacagtggctgctagagaaccccggtacgcgcgtggtggcgcgtgacaactacaccgtcagcgactatttgattgagtggcaaaccgattgggtgaaacgctttggtattgacggctatcgggtagatacggtcaaacacgttgaaggcgaagtgtggaagcgcctgaaacaagaagcgacgaaaagcctcgatgcgtggcgcaaagccaatggccaatcgggtgcgccattttggatgatgggggaagtgtggggccactcagcctaccgcagcccttattttgacgacggttttgatgcgctgatcaacttcgatatgcagaagaaactcgataaaggcgcagcctgttttagccaaatggccgatacctatcgcgattacgccaacaccatcgcgcagcagagtgattttaatccagtgagctacatgtcctcgcacgatactgagctgttctttagccgatttaaagactatgccgtgcagcgcaacgccgcgaacgcattgctgctcagccctggtgcggtgcagatttactatggtgatgaagtagggcgcaatattggcccatacgcggatgatttccatcaaggcactcgctcggacatggtatggcaattgagcgcagagcaacaaacattgctcaatcattggcagaaactgggccagttccgccgggcgcatcccgcgattggcgctggtgtgcatcaggagattgaacaaactggcgcgtacgttttctcccgcaccttaggggatgacaaagtggttgtggcgtttgttggtcacgccgtgcaatag

SEQ ID NO: 13611 - protein, 687 aa, Vibrio vulnificus CMCP6
MKLNAITLTLLLSSTAAIAEPNLTISTTTNSRDFPLSAEQPLVVPLVKESYQLKITGLEGDCQAPDAQVIKFNQPIALNCGKVTELPLKIRFTGDYSFELDANANTLTFKREPKKVAKTEFKRPLPQVTCEVYQGGEVTIELGDSFKDGTSLRDAYSGQVVSVKKGKVSLTPSAQSGGLVLLEPVKQNKKARPFDYRNANIYFVMVDRFNNGDTSNDQSYGRQKDGKEEIGTFHGGDLKGVIEKLDYIQRLGTDAIWLSPIVEQVHGFVGGGDSGSFPFYAYHGYWTRDFTKIDENFGRDEDLKTLVEEAHKRGIKVLLDAVINHSGYSTLADLQFDGMQVTTKEANLPEKWANWQPTSGENWHSYHSAIDYQSQNWSQWWGADWVRTGLPGYQQPGSSDITLSLAGLPDFRTESTQAVTPPQWLLENPGTRVVARDNYTVSDYLIEWQTDWVKRFGIDGYRVDTVKHVEGEVWKRLKQEATKSLDAWRKANGQSGAPFWMMGEVWGHSAYRSPYFDDGFDALINFDMQKKLDKGAACFSQMADTYRDYANTIAQQSDFNPVSYMSSHDTELFFSRFKDYAVQRNAANALLLSPGAVQIYYGDEVGRNIGPYADDFHQGTRSDMVWQLSAEQQTLLNHWQKLGQFRRAHPAIGAGVHQEIEQTGAYVFSRTLGDDKVVVAFVGHAVQ

SEQ ID NO: 13612 - DNA, 1464 bp, Bradyrhizobium japonicum USDA 110
  CDS (1)..(1464)
atggcacagggcgaggtgaattggtggcgcgacggcatcttctaccaggtctatccgcgctcgtttcaggacagcgacggtgacggcgtcggcgatctcgccggcatcttgcggcggctgccttatgtgaagtcgctcggcgtcgacgcgatctggctgtcgccgatcttcccctcgccgatggccgatttcggctacgacatttccgaccataccggcatcgatccgctgttcggcacgatggcggatttcgacgcgctgctcacggccgcgcatgagcatggtctcaagctgatcctcgacctcgtgcccaaccacacctcggaccagcatccctggtttgtcgagagccggtcctcgcgcgacaatcccaagcgcgactggtacgtctggcgcgatccggcgcccgatggcggcgtgccgaacaactggctgtccgagttcggcggcagcgcgtggcagttcgacgagacgacgggtcaatattactatcacgccttcctcgcccagcagccggacctcaactggcgcaacccggacgtccgcgcggcgatctacgacgcgatgcggttctggctggacaagggcgtcgacggctttcgcgtcgacgtgatctggcacctgatcaaggacgccgaattccgcgacaatccgctcaatcctcactacgtcgagggccgtccgccgaacgagaagatcctgacgcaatattccaccgaccagccgccgttcaacttcgcgctgctctcgacgttctggagcgcgcgctcgatcgagacgatcatcgacgactacgagaaggcgctgccgaaaggcgcctggccgaactgggtgctcggcaatcacgaccgcccgcgggtcgccagccgtgtcgggcccgagcaggcccgcgtcgccgccatgctgctgctgacgctgcgcggcacgccgacgctctattacggcgacgagatcggcatgcatcagctcgcgatcgcgcccgaggacgtgcgcgatcccttcgagaagaacgtgcccggcatcggcgtcggccgcgacggttgccgcacgccgatgcagtgggattcctcgaacttcgccggcttctcgaacgtcaggccgtggctgccgctgcctgaggatcatatccacgagaatgtcgtcaatctcgaagccgacacgcgctcgatcctcagcctgtacaggcggctcatcgtgctgcgaaagagcagcccgcccctggtggccggcaactatcatccgatcgctgcgcagggcgatctcctgatctaccgccgcgaggccgagggcagggcggtgatcgtggccctcaatctcggccccgacccgatcgccgtcaccaccagcgcgatccgcttcggcagcgagatcctgctgtcgacgttcctggatcgtgagggtgagcggctggaaggggtgctggatctgcgcgggaatgaaggggtgatcgtgcagccgccctaa

SEQ ID NO: 13613 - protein, 487 aa, Bradyrhizobium japonicum USDA 110
MAQGEVNWWRDGIFYQVYPRSFQDSDGDGVGDLAGILRRLPYVKSLGVDAIWLSPIFPSPMADFGYDISDHTGIDPLFGTMADFDALLTAAHEHGLKLILDLVPNHTSDQHPWFVESRSSRDNPKRDWYVWRDPAPDGGVPNNWLSEFGGSAWQFDETTGQYYYHAFLAQQPDLNWRNPDVRAAIYDAMRFWLDKGVDGFRVDVIWHLIKDAEFRDNPLNPHYVEGRPPNEKILTQYSTDQPPFNFALLSTFWSARSIETIIDDYEKALPKGAWPNWVLGNHDRPRVASRVGPEQARVAAMLLLTLRGTPTLYYGDEIGMHQLAIAPEDVRDPFEKNVPGIGVGRDGCRTPMQWDSSNFAGFSNVRPWLPLPEDHIHENVVNLEADTRSILSLYRRLIVLRKSSPPLVAGNYHPIAAQGDLLIYRREAEGRAVIVALNLGPDPIAVTTSAIRFGSEILLSTFLDREGERLEGVLDLRGNEGVIVQPP

SEQ ID NO: 13614 - DNA, 1698 bp, Bradyrhizobium japonicum USDA 110
  CDS (1)..(1698)
atgatcgacgatctctggtacaagaacggcgtgatctactgcctgtccgtcggcacctatatggatgccgacggcgacggcgtcggcgacttcaagggcctgctgcggcggctcgactatctgcacggcctcggcatcaccacgatctggctgatgccattccagacctcgcccggccgcgacgacggctacgacatcgccgactattacagcgtcgattcccgctacggcacgctcggcgacttcgtcgaattcgcccatggctgcaagcagcgcggcatccgcatcatcatcgacctcgtcgtcaaccacacctcggaccagcatcgctggttcaaggacgcgcggcgcgacaagaactcgccctatcgcgactggtacgtctggtccgacacgaagcccgccaatgccaacaagggcatggtgtttcccggcgtgcagaaatcgacctggacgcgcgacaaggacgccggcgcctggtattttcatcgcttctacgattttcagcccgacctcaacacctcgaacccgcacgtgcaggccgagatcttgaagatcatgggcttctggatccagctcggcgtctccggattccgcatggacgccgtgcccttcgtgatcgcgaccaagggcgccaaggtgaagaagccggtcgagcaatacgacatgctgcgcgcgttccgcgaattcctgcaatggcgccagggtgacgccatcatcctcgccgaagccaatgtgctgccggaaaccgacatggaatatttcggccgcgatgccgaccgcatgcacatgatgttcaacttccacgtcaaccagcatctgttctatgcgctggcgtcggccgactcgcgaccgctggcaaaggcgctgaaggcgaccaagccgcggccgggctcggcgcaatggggcctgttcctgcgcaatcacgacgagctcgatctcgggcgcttgaccccggcgcagcgcgacaccgtgttcaagagcttcggccccgacaaggacatgcagctctacgaccgcggcattcgccgccgcctcgcgccgatgctcggcggcgaccgcaggcggctcgagcttgcctacagcctgatgtgcacgctgccgggaacgcccgtgatccgctatggcgacgagatcgggatgggcgacgatctctcattgccggagcgcaattgcgcgcgcacgccgatgcaatggtcgaccgagccgcatggcggcttcaccaagaacgacaagccggcctgtcccgtcatcgacaagggcccttatggctttccgcacgtcaacgtcgccaagcagcggcgcgatgccaattccatgctgaactggaccgaacgcatcgtccgcatgcgcaaggaggtgccggagatcggctggggcgatttcgcggtcattgcgacgcgtgatccggccgtcttcatcatgcgctatgactggcgcaacaattcggtgctgttcgtgcacaatctcgatgagaagccacgcgagatcgcgttctcgacggggctgcctgatgatgccggcgcgcacctgatcaatctgctcgcggaagaccacagccacgccgacaagcgcggccagcaccgcgtcgtgctggagccgtatggctatcgctggtatcgggtcggcgggttggattatctcttgaagcggagcgatatcgacggggatactgcgggtaacaagcatccggggtag

SEQ ID NO: 13615 - protein, 565 aa, Bradyrhizobium japonicum USDA 110
MIDDLWYKNGVIYCLSVGTYMDADGDGVGDFKGLLRRLDYLHGLGITTIWLMPFQTSPGRDDGYDIADYYSVDSRYGTLGDFVEFAHGCKQRGIRIIIDLVVNHTSDQHRWFKDARRDKNSPYRDWYVWSDTKPANANKGMVFPGVQKSTWTRDKDAGAWYFHRFYDFQPDLNTSNPHVQAEILKIMGFWIQLGVSGFRMDAVPFVIATKGAKVKKPVEQYDMLRAFREFLQWRQGDAIILAEANVLPETDMEYFGRDADRMHMMFNFHVNQHLFYALASADSRPLAKALKATKPRPGSAQWGLFLRNHDELDLGRLTPAQRDTVFKSFGPDKDMQLYDRGIRRRLAPMLGGDRRRLELAYSLMCTLPGTPVIRYGDEIGMGDDLSLPERNCARTPMQWSTEPHGGFTKNDKPACPVIDKGPYGFPHVNVAKQRRDANSMLNWTERIVRMRKEVPEIGWGDFAVIATRDPAVFIMRYDWRNNSVLFVHNLDEKPREIAFSTGLPDDAGAHLINLLAEDHSHADKRGQHRVVLEPYGYRWYRVGGLDYLLKRSDIDGDTAGNKHPG

SEQ ID NO: 13616 - DNA, 1626 bp, Lactobacillus plantarum WCFS1
  CDS (1)..(1626): transl_table=11
atgcaagcacattggtggcaacgcgcaacggtttatcagatttacccacgtagctttcaagatagtaacggggatggaattggtgacatccctgggattatcagtcggctcgattacttggcaacccttggtgtggatgcgctgtggttaagcccggtatacaaaagtccgaatactgataacggctatgacattgcggattatcaggcgattgacccagcatatggcacgatggccgatatggatcagttgatcgctcaagcggctcagcgtggcataaaaatcgtgatggatttggtcgtgaatcataccagtgatgagcatctgtggtttgtggatgcttgtcagaatccagatagtccgacgcgcgattattatgtatgggcggatgctgttgatgggcatgcgcctaatgatctgacatctggtttcagtggcggttcagcttgggagctagatgaactaacgggccaatactttttgcacttgttttcaaaaaagcagattgatttgaattggcagaatccagacttacgacgcgcaatttatcgtatgatgaatttctggatcgataagggaatcgaagggtttcggatggacgtcatagatatgattgccaaggagccacgtgcaaaaattttagtgaatgggccgcatctgcatgaatatttacatgaaatgaatcgtcagacttggcggaaccgtgattttttaacagtcggtgaagcctggagtgcaagtccagaagatgcgcgacagtacagtgatgagcagcgcgaagaattaagtatggtcttccaattcggccacttatgggctgatcgccaggttggcggcgaaaagtgggaacagcgaccacttgatgttgcacaactgaaacaagcgctctatgcttgccaaacgacgatggcgactcacgggtggaatagtttattctggagtaaccatgacctgccccgcgccgtttcacgctttggggctacgggtcagtaccgagagctgagtgcgaagatgttagccattgctttacacggactaaaaggcacaccttttgtctatcaaggggaagagattggtatgactgattgcccagttgcaactatcgatcaagttaacgatgttgaagcccggacaatttatcgacaattacgagcacagggtgatgatgctggtaccgccatgcagaaaatcaatatctttaatcgtgataatgcgcggacgcccatgcaatggacggctaagcaacacgcgggatttacaacgggcaaaccatggttggcaatcaatgccaattatccgaggatcaatgttgcggccgcccaagcggactaccaatcgatatggtggacgtatcagcggctaattagattacgcaaacagtcggcggtgttgcaacagggtgagtttaccgagttatcagcggtaccggcaccaatcgttgcctacactcggacttggcaacaaacccaatggctaatttgcgctaattttgctgatacacttattacggtagatctaccaaagcgagcatctgagttaatcatcagtaactatcaagattatcctgagcaactggggcgggtggtattacgaccgtatgaagcgtttatccttgcattaagctag

SEQ ID NO: 13617 - protein, 541 aa, Lactobacillus plantarum WCFS1
MQAHWWQRATVYQIYPRSFQDSNGDGIGDIPGIISRLDYLATLGVDALWLSPVYKSPNTDNGYDIADYQAIDPAYGTMADMDQLIAQAAQRGIKIVMDLVVNHTSDEHLWFVDACQNPDSPTRDYYVWADAVDGHAPNDLTSGFSGGSAWELDELTGQYFLHLFSKKQIDLNWQNPDLRRAIYRMMNFWIDKGIEGFRMDVIDMIAKEPRAKILVNGPHLHEYLHEMNRQTWRNRDFLTVGEAWSASPEDARQYSDEQREELSMVFQFGHLWADRQVGGEKWEQRPLDVAQLKQALYACQTTMATHGWNSLFWSNHDLPRAVSRFGATGQYRELSAKMLAIALHGLKGTPFVYQGEEIGMTDCPVATIDQVNDVEARTIYRQLRAQGDDAGTAMQKINIFNRDNARTPMQWTAKQHAGFTTGKPWLAINANYPRINVAAAQADYQSIWWTYQRLIRLRKQSAVLQQGEFTELSAVPAPIVAYTRTWQQTQWLICANFADTLITVDLPKRASELIISNYQDYPEQLGRVVLRPYEAFILALS

SEQ ID NO: 13618 - DNA, 1827 bp, Vibrio parahaemolyticus RIMD 2210633
  CDS (1)..(1827): transl_table=11
atgtctttgccatttctctttcatagccagacggttgatggtttagccttcgatggtaaacgcgtgaaggtctgtctaaaaacagaagcgttaacatttgatgctgtttatgtgcgtattgagccagacaacgaagaataccttgtcgccatggtgcaatgcggtagagctggagagttactgctgtgggaagtatcgttcgagccgaatagagatcgagacatcacccactatgtatttaaagtcgttagaaatggtcagcaatattggctagacgcacgtggagtgcaaaaacgtattccgcccaaagaatttcatttcaaattgaatgtaaaccatcaaccgccaaagtgggttcaagaacaagttttctatcagatttttcctgatcgttttgccgcgagtcaaagtgagtctgcgattcgtgaagcgtactacgagtacgatcctgatgctgagattaaaatgtggggagaaccagtagggaatcaccaaaactctggggcacgtgagttcttcggtggtgatctaaaaggcgttgagcaaaagcttggataccttgaacaattgggtgtgaccgcactgtacttcaatccgattttttcctcgccaagtaaccataagtacgacaccacggattatttcacgattgatcctatgctcggcaccaacgagcattttgcgtcattgtgcgaaaaaatccgcagcaaaaacatgaagatcgtattggatgcggtctttaaccatacttctgtgcatcacccttggtttgatattcagcagaaagggaaaggcgcgtacgggaatcctaaatccgattttcgcgactattacttctttgatggggagagtaatcactatattggctggaaaggtatcgacaatctgccggtattgaattttgagaatcacgaagtcagagaatatatctaccaaggtgaggcgtcggttatcaaacattggctgaagccaccatattccgtggatggctggcgttttgatgtcattcatatgctaggtgaaggggagggggcgaaaaataatgctcactacgtgaaagcatttcgccaagcgaccaaatccgttaatccgaatgcttatgtgttaggtgagcatttttttgaggcgactcaatggttgcaaggggagcaagaagatggcgcgatgaactactacggttttgcccatcctgttcgagcgtttattgcgcatcaagacatcacgtacgacccaattgatatagatggttttgagttcaaagcgtggttggatgaagccagagcaaaagttccttttgccaatcagctctcacaactcaatcaacttgatagccatgacacggcgcgttttctcaccttggtgaatggggatgagaaaaaaatgaaaatcgcgttggccttactcatgacttatgtcggtgcgccatgcatttattatggtagtgaagtcggtcttgagggaagctttgacccagataacagacgttgtttcccttggcatttagttcagggttcgccttggctccacctgtaccaacagtggattgaaattcgcaaacagttccaagctctacaatctggcagcatgcaatggctgtattgtgacgaaagggcatttgcttatgcaagacagcttggtgaagagacgatcattgttgcagtcaatattggtctacaagaaagcacgattgacctaccattgtggcagttaggcttgaatgcgaaacacttgcatcaattattagataagtgtgaaataattgattatgaaggtcatgtttctgtcaatatggcagcattaagtatcaatttgtggcaagtgaagtga

SEQ ID NO: 13619 - protein, 608 aa, Vibrio parahaemolyticus RIMD 2210633
MSLPFLFHSQTVDGLAFDGKRVKVCLKTEALTFDAVYVRIEPDNEEYLVAMVQCGRAGELLLWEVSFEPNRDRDITHYVFKVVRNGQQYWLDARGVQKRIPPKEFHFKLNVNHQPPKWVQEQVFYQIFPDRFAASQSESAIREAYYEYDPDAEIKMWGEPVGNHQNSGAREFFGGDLKGVEQKLGYLEQLGVTALYFNPIFSSPSNHKYDTTDYFTIDPMLGTNEHFASLCEKIRSKNMKIVLDAVFNHTSVHHPWFDIQQKGKGAYGNPKSDFRDYYFFDGESNHYIGWKGIDNLPVLNFENHEVREYIYQGEASVIKHWLKPPYSVDGWRFDVIHMLGEGEGAKNNAHYVKAFRQATKSVNPNAYVLGEHFFEATQWLQGEQEDGAMNYYGFAHPVRAFIAHQDITYDPIDIDGFEFKAWLDEARAKVPFANQLSQLNQLDSHDTARFLTLVNGDEKKMKIALALLMTYVGAPCIYYGSEVGLEGSFDPDNRRCFPWHLVQGSPWLHLYQQWIEIRKQFQALQSGSMQWLYCDERAFAYARQLGEETIIVAVNIGLQESTIDLPLWQLGLNAKHLHQLLDKCEIIDYEGHVSVNMAALSINLWQVK

SEQ ID NO: 13620 - DNA, 1818 bp, Salmonella enterica subsp. enterica serovar Typhi Ty2
  CDS (1)..(1818): transl_table=11
atgttgaatgcctggcacttaccggttgccccgtttgttaagcaacataacgataaattaaccattacgctgtggctgagcggagaaaatccgccgtctcgcgtgacgttgcgctcagaattcgataacgaagaaatctcactggcgatgcgcaaacagcgccgccagccgcagccgggcgtgacggcgtggcgagcgacgctcaatatcgcgttagggcagccccgtcgccgttacagctttaaattgctttggcatgaccgccagcgatggtttacgccgcagggatttagctgctttccacccgcgcgtctggaacaatttgcggttgatgtgccggatagcggcccgcagtgggtcgccgatcaaattttttatcagatcttcccggatcgttttgcccgcagcgcgacgcgtgaagccgatcaggaccgagtgtattaccatcatgccgcgggtcaggagattgtgctgcgcgactgggacgatcctttaaccccccaggcgggcggttccaccttttacggcggctgtctgaatggcatttgtgagaagctgccgtatctgaaaaaactgggcgtcacagcgctatatctgaatccggtatttaccgcgccgagcgtccataagtacgacacggaagattatcgccatgtcgatccgcaatttggcggcgatcgggcgctgctacgcctgcggcgtgaaacgcaagcacagggcatgaggctggtgctggatggcgtgtttaaccatagcggcgactcgcatgcgtggtttgacaggcataaccgcagcactggcggcgcgtgccatcacccggactcgccgtggcgcgactggtactccttttcaccacaaggcgtggcgctggactggctgggttatccgagcctgccgaaactcgattatcaatcagaaacgctggtggatgagatctatcgcggtgaggacagtatcgttcgtcactggctaaaggcaccgtggaatatggacggctggcggctggatgtcgtacatatgctgggcgaggcgggcggggcgcgccacaatttgcagcacgtcgccggcattacccgggcggcaaaagaggcgcagcctgaagcctatattgtgggggaacatttcagcgatgcgcggcagtggctacaggccgatgcggaagatgccgccatgaattatcgcggcttcaccttcccgctgtggggatttctcgccaatactgatatcgcttacgaaccacagcatattgatgcccggacctgtatcgcgtggatggataactaccgcgccggattatcgcaccagcagcaactgcgcatgtttaatcaactcgacagccatgatactgcgcgctttaaaaccctgctgggtaaagacgcggcgcgcctgccgctggcggtggtctggctgtttacctggcccggcgtgccatgtatttattacggcgatgaagtcggcgtggacggcgcaaatgaccccatgtgccgcaaaccgttcccatgggatgaacgcaagcaggacggcaacttgctggcgctgtaccagcgtatggcgaaactgcgccagagcagtctggcgctgcgtcgtggcggatgccaggcgctgtatgccgaaggtgacgtagtggtattcgtgcgagtttatcagcagcagcgggcgctggtggcgattaaccggggcgaggcctgtgaagtggcgctggaagcgttgccgttgctgaacgtggccggatggcaatgtaaaacgggaagcggtgacatccgcgagggaagacttagtttacccgcgatttccgcgacggtatggatgaatcgttga

SEQ ID NO: 13621 - protein, 605 aa, Salmonella enterica subsp. enterica serovar Typhi Ty2
MLNAWHLPVAPFVKQHNDKLTITLWLSGENPPSRVTLRSEFDNEEISLAMRKQRRQPQPGVTAWRATLNIALGQPRRRYSFKLLWHDRQRWFTPQGFSCFPPARLEQFAVDVPDSGPQWVADQIFYQIFPDRFARSATREADQDRVYYHHAAGQEIVLRDWDDPLTPQAGGSTFYGGCLNGICEKLPYLKKLGVTALYLNPVFTAPSVHKYDTEDYRHVDPQFGGDRALLRLRRETQAQGMRLVLDGVFNHSGDSHAWFDRHNRSTGGACHHPDSPWRDWYSFSPQGVALDWLGYPSLPKLDYQSETLVDEIYRGEDSIVRHWLKAPWNMDGWRLDVVHMLGEAGGARHNLQHVAGITRAAKEAQPEAYIVGEHFSDARQWLQADAEDAAMNYRGFTFPLWGFLANTDIAYEPQHIDARTCIAWMDNYRAGLSHQQQLRMFNQLDSHDTARFKTLLGKDAARLPLAVVWLFTWPGVPCIYYGDEVGVDGANDPMCRKPFPWDERKQDGNLLALYQRMAKLRQSSLALRRGGCQALYAEGDVVVFVRVYQQQRALVAINRGEACEVALEALPLLNVAGWQCKTGSGDIREGRLSLPAISATVWMNR

SEQ ID NO: 13622 - DNA, 2079 bp, Bacteroides thetaiotaomicron VPI-5482
  CDS (1)..(2079): transl_table=11
atgaataaacatctccactttttatctcttttgtggttgtcaatgctcatggcattcatgaccgcttgcagcgatgacaaaaatatcaccgaccctgctccggaacccgaaccgcccgtcgaagggcaatggaccgcacttaccgcctctcccgacacatgggacgagaccaaacgggcagacatctcctaccaattactgctctattccttcgccgacagcgacggagacggatatggagacctgaatggcgtcacccaaaagctggactatctcaaccaactaggcgtgaaagccctctggctctctcccatccacccctgtatgtcttatcacggatatgacgtcacagactacaccaaagtcaatccgcagctcggcacagaaagcgacttcgaccgtctggttacagaagcccacaaccgaggcatcaagatttatctggactacgtaatgaaccacaccggcactgcccacccgtggttcaccgaagctagttcatcatccgaaagcccgtatcgcaattattattctttctctgaagacccgaaaacagatatcgcagcaggcaaaatcgccatgatcacccaagaaggagcagccggatacaatgccgcagaatggtttcaggtttctgacgagaccgctgccgtgaaaggactgctgaaatttacactggactggagcaacgcaccttcccccatccttgtcgtttccacaggcaccaaagcagacgaggataatccagacacaggtaccgacaacgccaaatacttatactacggagaagacatctgtaaaaagttttatgacaaaggaaacaacatctatgaactcaccgtcgactttgagtccacttgggggcttctgatccgtactagcaatgcttctttctggccatccggaacaaaatacggcgcctcttcctcgtccgagaaactcgcgctgaacaaggatttcaaactgaccaacgccggcaaccctgccaacatcatgttcgacagccagcagatcacctatttccattctcatttctgcaccgactggtttgccgaccttaactacggccctgtagaccaggcaggcgaatcaccggcatatcaggcaatagcagacgccgccaaaggatggatcgcccgtggtgtggacggcctccgcctcgacgccgtgaagcacatctaccacagtgagaccagcgaagaaaatcctcgtttcctgaaaatgttctatgaagatatgaacgcctattacaaacaaaaaggacatacggacgacttctatatgataggcgaagtgttatcggaatacgataaagtagctccttattataaaggtctgcccgccctttttgaattttccttctggtatcgtctggaatggggaatcaataatagtaccggatgttattttgccaaagacatcctttcttaccaacagaaatacgccaactatcgaagcgattacatcgaagcaacgaaactgagtaaccatgacgaagaccgtacatcgtccaagttgggtaaatccgccgacaaatgcaaactggccgccgccgtcttactcacttccgccggacatccttacatctattacggtgaagaactgggactttacggaacaaaggataacggagacgaatatgtgcgcagcccgatgctatggggagatagctacactaccaactacacagacaagacggatgccaccgtttcgaaaaatgtgaaaacggtagcggaccaacaagccgatacccattcacttctgaacatatatttctccctcacccgattgcgcaacacctatccggcactggcagaaggaaatatgaccaaacattccgtctacaacgaatcacaggagaaagactataagccgattgccgcctggtatatgaccaaggacaacgagaaactgcttgtcatccataatttcggcggaacggccatgcaacttccgctgacagacaagattgagaaagtattgtttgtgaatggcgaaactcaacaaaatacagacagcgacagttacaccttgaaactgggaggatacgcctctgtagtattcaagttgggcaactaa

SEQ ID NO: 13623 - protein, 692 aa, Bacteroides thetaiotaomicron VPI-5482
MNKHLHFLSLLWLSMLMAFMTACSDDKNITDPAPEPEPPVEGQWTALTASPDTWDETKRADISYQLLLYSFADSDGDGYGDLNGVTQKLDYLNQLGVKALWLSPIHPCMSYHGYDVTDYTKVNPQLGTESDFDRLVTEAHNRGIKIYLDYVMNHTGTAHPWFTEASSSSESPYRNYYSFSEDPKTDIAAGKIAMITQEGAAGYNAAEWFQVSDETAAVKGLLKFTLDWSNAPSPILVVSTGTKADEDNPDTGTDNAKYLYYGEDICKKFYDKGNNIYELTVDFESTWGLLIRTSNASFWPSGTKYGASSSSEKLALNKDFKLTNAGNPANIMFDSQQITYFHSHFCTDWFADLNYGPVDQAGESPAYQAIADAAKGWIARGVDGLRLDAVKHIYHSETSEENPRFLKMFYEDMNAYYKQKGHTDDFYMIGEVLSEYDKVAPYYKGLPALFEFSFWYRLEWGINNSTGCYFAKDILSYQQKYANYRSDYIEATKLSNHDEDRTSSKLGKSADKCKLAAAVLLTSAGHPYIYYGEELGLYGTKDNGDEYVRSPMLWGDSYTTNYTDKTDATVSKNVKTVADQQADTHSLLNIYFSLTRLRNTYPALAEGNMTKHSVYNESQEKDYKPIAAWYMTKDNEKLLVIHNFGGTAMQLPLTDKIEKVLFVNGETQQNTDSDSYTLKLGGYASVVFKLGN

SEQ ID NO: 13624 - DNA, 1854 bp, Bacteroides thetaiotaomicron VPI-5482
  CDS (1)..(1854): transl_table=11
atgaaaaggaatttattattcattatcttactattattattacccggtcttcaccaggtattcgcaacaagcactataaagaaagtagccccgaccttttggtgggcaggaatgaagaatcccgaattgcagatactattatatggtgaccgcatatcatccgcagacgtcagtctttctgccgataatatcacgctgcaagaagtggtgaagcaggagaatcctaattatctggttctgtatttagacctttcgaaggctgctccacagaactttgacatcatcctgaaacaaggcaaaaagcagacaaaaatcccttacgagcttaaacagcgccggccgaatgcttcggcagtagaaggttttgattcgagcgacgtgctttatcttattatgccggaccgttttgccaatggcaacccctccaacgacatcattcccggaatgctggaaggaaatgtagaccgtaatgagcctttcgcacgtcatggcggtgatttgaaaggaatagagaatcatctggattacatagcagacctcggagtcaccagtatatggctcaacccgattcaggaaaatgacatgaaagaaggatcgtatcacggttatgccattaccgattattatcaggtagaccgccgcttcggcagtaacgaagagttccgcaaacttactcaggaagctaatgccaaagggctgaaagtcgtaatggacatgatcttcaaccattgcggttcggacaactatctgtttaaagatatgccctccaaagactggtttaactttgaaggcaactacgtgcagaccagcttcaagactgccactcaaatggacccgtatgcttccgattacgaaaagaaaatcgctatcgacggttggttcacactgaccatgccggacttcaaccaaagaaaccgtcatgtagctacttatctgatacagagcagtatctggtggattgaatacgccggtatcaacggcatccgtcaggatacacacccttatgccgacttcgatatgatggcacgctggtgcaaagcggtcaatgaagaatatcccaagttcaacattgtaggtgaaacatggctgggcaacaatgtactcatctcctactggcagaaagacagcagactcgcttatccgaagaacagcaatctcccgactgtcatggacttcccgctaatggaagagatgaacaaggctttcgacgaagagactaccgaatggaacggaggacttttcagactctacgaatatctatcacaggacatcgtctacagccatccaatgagcctgctgaccttcctcgacaatcacgatacttcccgcttctaccgttcggaagcagatacaaagaatctggaccgatacaagcaagccctgacgttcttactgacaacccgcggaataccgcagatatattatggaactgaaatcctgatggcagccgacaaggcgaatggagacggcctgctccgctgcgacttccccggaggctggccgaacgatacaaaaaactgctttgacgcagccaaccgcactccacagcaaaatgaagcattctcctttatgcaaaaactgctccaatggagaaaaggaaacgaagtcattgccaaaggtcagctcaaacatttcgcaccgaataaaggtgtctacgtttacgaacgcaaatacggtgataaatcagtcgttgttttcctgaatggaaacgaccgggaacagaccattgacctggttccttaccaagaaatacttcctgcctcatctgctttcgatttattgacagagaaaaaggttgaattaagaaatgaattaacacttccaagtcgtgaaatataccttttatccttttaa

SEQ ID NO: 13625 - protein, 617 aa, Bacteroides thetaiotaomicron VPI-5482
MKRNLLFIILLLLLPGLHQVFATSTIKKVAPTFWWAGMKNPELQILLYGDRISSADVSLSADNITLQEVVKQENPNYLVLYLDLSKAAPQNFDIILKQGKKQTKIPYELKQRRPNASAVEGFDSSDVLYLIMPDRFANGNPSNDIIPGMLEGNVDRNEPFARHGGDLKGIENHLDYIADLGVTSIWLNPIQENDMKEGSYHGYAITDYYQVDRRFGSNEEFRKLTQEANAKGLKVVMDMIFNHCGSDNYLFKDMPSKDWFNFEGNYVQTSFKTATQMDPYASDYEKKIAIDGWFTLTMPDFNQRNRHVATYLIQSSIWWIEYAGINGIRQDTHPYADFDMMARWCKAVNEEYPKFNIVGETWLGNNVLISYWQKDSRLAYPKNSNLPTVMDFPLMEEMNKAFDEETTEWNGGLFRLYEYLSQDIVYSHPMSLLTFLDNHDTSRFYRSEADTKNLDRYKQALTFLLTTRGIPQIYYGTEILMAADKANGDGLLRCDFPGGWPNDTKNCFDAANRTPQQNEAFSFMQKLLQWRKGNEVIAKGQLKHFAPNKGVYVYERKYGDKSVVVFLNGNDREQTIDLVPYQEILPASSAFDLLTEKKVELRNELTLPSREIYLLSF

SEQ ID NO: 13626 - DNA, 1767 bp, Enterococcus faecalis V583
  CDS (1)..(1767): transl_table=11
atgaacactgctgcaatctaccatcgtccagaaagtgaatttgcttatctttatacagaagaaaccatgcatattcgtttgcgtacggcaaaaggcgacattgcctctgtccaattagtgcaaggagatccttatcttttagggaaagaaaagtggtaccaacagtcgttaaccatggagaagttagtatctacggagttatatgattactggtttattgcattaagtgcaaaatttaaacgcctttcatatgcttttactttagtaggggcggatggtttgagggcgttttatggcgaacacggcatttatcctttagaagaaaagtatttagagatggcgaataattattttcggatgccgtattttcatgaaatcgatcgttttaaagcacctgaatgggtaaaagaaacggtttggtatcaaatatttccagagcgttttgcaaatggtgatctcgccaatgatcctgaagggacgttgccgtggggatctaaaagaccagatcgacaagatttttttggtggggatttgcaaggggtgctagatcatcttgattacattgaagatttaggtgttaacggcttatatttttgcccaatttttgaagcgttttctaatcacaaatatgatacgattgattatttaaaaattgacccagcttttggtgatggtgctacctttaagcgtttagtcgaagagtgtcatcgacggggcatcaagattatgttggacgccgtttttaaccatatgggggacacttcgcctcaatggcaagatgtgttaaaaaatggccaggactcaatttatgccgattggttccacgtaaatgagtttccagctagctatgaagaaagtgctgattttgaagaagcaagcaacattacctatgatacttttgcattcactccgcatatgcctaaattaaatacagcaaatccagaagtgcaagcctatcttttagaaattgctcgttattggattgaggaatatgatattgacgcctggcgtttagatgtggcaaacgaagtggatcatgcgttctggaaaaaattccggcaaacatgtgatgacgcaaaagaagatttttatattttaggagaaatttggcactcgtcgcaaagctggctccaaggagacgaatttcatgcagtgatgaattatgcatacacagatgcgattatgggctactttgtcaagcaagaactgtccttggaaaagatgctttctgaaatgaacaaccagttaatgctctatcgacaacaaacgaatcaaatgcagtttaatgttttagattcccacgatacaccacgcttattgcatgaaacgaaagaggataaagagctgatgcgccaagtattagcgtttacgtatattcaaccaggtgtcccttgtctttactatggtgatgaaattggtatgacaggtgatatggatcctgattgtcgtcgttgtatggtttgggaggaaaatcagcaagatttggatttgaaggaatttgtaaaatcattgattgcccttcgcaaaaagtatgcggctgttttttctggtggaacaatcgattggacaggaacttcttttgaaacggggttgattagactcgcttgtcgtttggaggaacagacgatttatgggatttttaatactggccaagagacacaatttgtcgatagaactgatcgagaagttttgctaagttcttctatcgaaattgcttcagaacagataatggttttaccaaaaggttttcttttatatcaagcataa

SEQ ID NO: 13627 - protein, 588 aa, Enterococcus faecalis V583
MNTAAIYHRPESEFAYLYTEETMHIRLRTAKGDIASVQLVQGDPYLLGKEKWYQQSLTMEKLVSTELYDYWFIALSAKFKRLSYAFTLVGADGLRAFYGEHGIYPLEEKYLEMANNYFRMPYFHEIDRFKAPEWVKETVWYQIFPERFANGDLANDPEGTLPWGSKRPDRQDFFGGDLQGVLDHLDYIEDLGVNGLYFCPIFEAFSNHKYDTIDYLKIDPAFGDGATFKRLVEECHRRGIKIMLDAVFNHMGDTSPQWQDVLKNGQDSIYADWFHVNEFPASYEESADFEEASNITYDTFAFTPHMPKLNTANPEVQAYLLEIARYWIEEYDIDAWRLDVANEVDHAFWKKFRQTCDDAKEDFYILGEIWHSSQSWLQGDEFHAVMNYAYTDAIMGYFVKQELSLEKMLSEMNNQLMLYRQQTNQMQFNVLDSHDTPRLLHETKEDKELMRQVLAFTYIQPGVPCLYYGDEIGMTGDMDPDCRRCMVWEENQQDLDLKEFVKSLIALRKKYAAVFSGGTIDWTGTSFETGLIRLACRLEEQTIYGIFNTGQETQFVDRTDREVLLSSSIEIASEQIMVLPKGFLLYQA

SEQ ID NO: 13628 - DNA, 1614 bp, Enterococcus faecalis V583
  CDS (1)..(1614): transl_table=11
atggaccaatggtggaaaaatgctgtcggttatcaaatttatcctcggagttttaaagatagcaacggggatggcattggtgatttgcagggaattattgagaaattaccgtatttaaaagaactaggggtcgattttttatggttaaatccgatttacacttcgccaaacgttgacaatggttatgatattgcggattatcaagggattcagccagagtttggtacgatggaagattttcaagaacttttggaccaagcgcatcaattaggtttgaagattattcttgatttagtggtcaatcataccagtgatcaacatccgtggtttgttgaagcgaaaaaaagtttagataatccgtatcgtgagtattatttatgggccgatgcgacaccagatcgtatgccgaatgaatggcaaagcttttttggtggctcgacttggacgtatgacgaaggtacaaagcaagcatattttcatgtgtttgcaaaagagcaacctgatttgaactggaaaaatcctaaagttcgtgaagagatttatgcgatgattcgctggtggttagatttgggaattgatggtttccgattggatgcgattagtcatatccaaaaagaaccttgggattttaaaattaccacgaatccgtgggctccatttatgaatgtaaaaggcattgaagactatatgctggatttgaaagttatttttgctgagtatgacatcatgacagtgggggaagctagtggcgtttcaagtaaaaaagcggtggaatggaccaatgatgcgggctatctgaatatgatttttgaattagagcacaatgttcgagaaggaaagccaggagaagaacggttaaatattttaggctataaaaaagtaatggctcgctggcaaaagcatttagggacagaaggctggaatgcattatatgtagaaaatcatgataatcccagaatcaattcaattttaggcaatgaaacctctcattctgctaaggcgattggaacaatcgccttgctcttgcgaggaacaccgtttatttatcaaggacaggaaatcggcatggttaattatccgtttcaacagattgacgagttagatgctaaagattctcataaccattatcgtttgcttatagaaagtggctacgatgcgaaacaagcattaaaagaagtggcgcattggacgcgggaccattcgcgtacgcctatgcagtggacgagtcaagaggcaagttcattcacctcggggcatccgtggttagcaattcatcccaatttcaaagaaataaatgtggctgaccaagaaacggatgcgcaatccgtattgaattattataaaaagttaattgcgttgcggaaagacaatccggtctttacagatggacagtttgaactattagcgcccaatcatccgtctgtttttgcttttttaagaaaaacaactgaggcaacagcgttagtgattgtcaatttaagtggagaaaagtgccaatttgacttgccgaataaattactaggcagaaagtggcaacaattattagggaatcaagattttacggtgaagaaacggatgcagttagcaccttatcaggcaggcgtcttccaataa

SEQ ID NO: 13629 - protein, 537 aa, Enterococcus faecalis V583
MDQWWKNAVGYQIYPRSFKDSNGDGIGDLQGIIEKLPYLKELGVDFLWLNPIYTSPNVDNGYDIADYQGIQPEFGTMEDFQELLDQAHQLGLKIILDLVVNHTSDQHPWFVEAKKSLDNPYREYYLWADATPDRMPNEWQSFFGGSTWTYDEGTKQAYFHVFAKEQPDLNWKNPKVREEIYAMIRWWLDLGIDGFRLDAISHIQKEPWDFKITTNPWAPFMNVKGIEDYMLDLKVIFAEYDIMTVGEASGVSSKKAVEWTNDAGYLNMIFELEHNVREGKPGEERLNILGYKKVMARWQKHLGTEGWNALYVENHDNPRINSILGNETSHSAKAIGTIALLLRGTPFIYQGQEIGMVNYPFQQIDELDAKDSHNHYRLLIESGYDAKQALKEVAHWTRDHSRTPMQWTSQEASSFTSGHPWLAIHPNFKEINVADQETDAQSVLNYYKKLIALRKDNPVFTDGQFELLAPNHPSVFAFLRKTTEATALVIVNLSGEKCQFDLPNKLLGRKWQQLLGNQDFTVKKRMQLAPYQAGVFQ

SEQ ID NO: 13630 - DNA, 1674 bp, Enterococcus faecalis V583
  CDS (1)..(1674): transl_table=11
atgaacagaaattggtggcaaaaagaagtggcctatcaaatttatccacgtagcttttcggatagtaataatgacggaattggtgatttacaaggcattattcaaaaactggattacttagaaaatttaggaattacgctgatttggctgagtccaatgtacccgtcgccaatggctgacaatggatatgatatttcagactattatggtatttctagcgattttggtacaatggcagacttcgatgaactcattgaagaagcaaaaaaacgaaacataaaagttattttagatttggtggtaaaccatacatctgatgaacatgcttggtttcaagatgttttaaaaaatcctcaaagtcgttttcgagacttttatattataaaagaaggacgagaagcacctacaaattggcggtctaacttcggtggtagtgtttgggaaaaattacctggggaagatgcctactactttcatgcctttcataaaaaacagccggatttaaattgggaaaatcctgaactacgcaaagaaatctatcaaatgattcgtttttggttaaacaaaggaattgctggttttcgtgtagatgcgattaattttattaagaaagatttgacttggacaaacttacctgctgatggggcagatcaattagccaaagtaacaaaagctagtagaaacatgccaggaatgagtgactttctgaacgaattaaaagaaaaagcttttgctggctttgatattgtcacagttgccgaagcggccggcgtcaattatctaaatttatcagaatttattggagaaacagggtatttcgacatgatttttgacttcaaatgggctgatttggatgtgaaatcaggaagcgaatggttttatagaatcgattggtcttggaatgatttacgcacattaattttcaaacagcaagaagccatgcaagaggctggttggagtgcaaattttattgaaaatcatgatcaacctcgagcgacaacgaaatatttaaaagaacaggctcaacagccaaatgcggttaaaacattcggcgccatgtatttctttttaaggggcacgccttttatttaccaaggacaagaattaggaatgaccaattttgaaaggggttcgattgatgaattcgatgatatttctagcattgatcaatactatcgagcaataaaagaaggatttacgcccaaagaagccttgtcacttgtcaatttgcgtagtcgagacaatgcccgcacgccttttccatggaatgattctatgtatggcggtttttcaagcgtcaagccttggttaggaatggtggataattataaagaaatcaatgccgaagcagaaataaaaaatagtcaaagtatttttcatttctataagcggatgattgcatttcgtcaaaagagtccctatacagacatcttactttatggaacatttgagggtctgtcaaatcttccagataatgttattgcttataaacgcaaattaaatgaaaaaacgatttacgccttttttaattttggtgaggcggttccaatccctcattatttagttaatggcacagttatttttgatacacagtctgaagaacgagagcaattagttcagcagggaacattattaaaaagctatcaaggactattgattactataaatgagtag

SEQ ID NO: 13631 - protein, 557 aa, Enterococcus faecalis V583
MNRNWWQKEVAYQIYPRSFSDSNNDGIGDLQGIIQKLDYLENLGITLIWLSPMYPSPMADNGYDISDYYGISSDFGTMADFDELIEEAKKRNIKVILDLVVNHTSDEHAWFQDVLKNPQSRFRDFYIIKEGREAPTNWRSNFGGSVWEKLPGEDAYYFHAFHKKQPDLNWENPELRKEIYQMIRFWLNKGIAGFRVDAINFIKKDLTWTNLPADGADQLAKVTKASRNMPGMSDFLNELKEKAFAGFDIVTVAEAAGVNYLNLSEFIGETGYFDMIFDFKWADLDVKSGSEWFYRIDWSWNDLRTLIFKQQEAMQEAGWSANFIENHDQPRATTKYLKEQAQQPNAVKTFGAMYFFLRGTPFIYQGQELGMTNFERGSIDEFDDISSIDQYYRAIKEGFTPKEALSLVNLRSRDNARTPFPWNDSMYGGFSSVKPWLGMVDNYKEINAEAEIKNSQSIFHFYKRMIAFRQKSPYTDILLYGTFEGLSNLPDNVIAYKRKLNEKTIYAFFNFGEAVPIPHYLVNGTVIFDTQSEEREQLVQQGTLLKSYQGLLITINE

SEQ ID NO: 13632 - DNA, 1719 bp, Streptomyces avermitilis MA-4680
  CDS (1)..(1719)
atgatcgtcaacgagcccgtcccggacaccttcgaggacacgcccgccaaggaccgcgatccggagtggttcaaacgcgccgtcttctacgaggtcctggtccgctccttccaggacagcaacggcgacggtgtcggcgacctgaagggcctgaccgccaagctggactatctgcagtggctgggcgtggactgcctgtggctgccgccgttcttcaagtcccccctgcgcgacggcggctacgacgtctccgactacaccgcggtgctgcccgagttcggtgacctggccgacttcgtcgagttcgtggacgcggcccaccagcgcggcatgcgcgtgatcatcgacttcgtgatgaaccacaccagcgacctgcacccgtggttccaggagtcccgcagcaaccccgacggcccctacggcgactactacgtgtgggccgacgacgacaagcagtaccaggacgcccggatcatcttcgtcgacaccgaggcctccaactggaccttcgacccggtccgcaagcagtactactggcaccgcttcttctcccaccagcccgacctcaactacgagaacccggcggtgcaggaggagatcgtctccgccctgcggttctggctcgacctcggcatcgacggcttccgcctcgacgcggtgccgtacctgtaccagcaggaaggcaccaactgcgagaacctgccggcgacgcacgagttcctgaagcgggtgcgcaaggagatcgacacgcactatccggacacggtgctgctcgcggaggcgaaccagtggccggaggacgtggtcgactacttcggcgacttcccctcgggcggcgacgagtgccacatggcgttccatttcccggtcatgccgcggatcttcatggcggtgcggcgtgagtcgcggtatccggtgtcggagatcctggcgaagacgccggcgatcccgtcgagctgccagtggggcatcttcctgcgcaaccacgacgagctgaccctggagatggtcaccgacgaggaacgcgactacatgtgggcggagtacgccaaggatccgcggatgcgggccaacatcggcatccgccggcgtctggcgccgctgctggacaacgaccgcaaccagatcgagctgttcaccgcgctgctgctgtcgctgcccggctcgccgatcctctactacggcgacgagatcggcatgggggacaacatctggctcggtgaccgggacgcggtgcgcactccgatgcagtggacgccggaccgcaacgcgggtttctcgtcctgcgacccggggcgtctgtatctgcccacgatcatggatccggtctacgggtaccaggtcacgaacgtggaggcgtcgatgtcgtcgccgtcctcgctgctgcactggacccggcggatgatcgagatccgtaagcagaacccggcgttcggcctcggctcgtacaccgaactccagtcctcgaacccggccgtcctcgcgttcctgcgggaggccccctcgaccggggggaacggggacgacctggtgctgtgcgtgcacaacttctcccggttcgcgcagcccacggagctggatctgcgggcgttcagcggccgtcatccggtcgagctgatcggcggtgtccgcttcccggccatcggggaactcccgtatctgctgaccctggcaggccacggcttctactggttccggctccgcaaggacgccgtctag

SEQ ID NO: 13633 - protein, 572 aa, Streptomyces avermitilis MA-4680
MIVNEPVPDTFEDTPAKDRDPEWFKRAVFYEVLVRSFQDSNGDGVGDLKGLTAKLDYLQWLGVDCLWLPPFFKSPLRDGGYDVSDYTAVLPEFGDLADFVEFVDAAHQRGMRVIIDFVMNHTSDLHPWFQESRSNPDGPYGDYYVWADDDKQYQDARIIFVDTEASNWTFDPVRKQYYWHRFFSHQPDLNYENPAVQEEIVSALRFWLDLGIDGFRLDAVPYLYQQEGTNCENLPATHEFLKRVRKEIDTHYPDTVLLAEANQWPEDVVDYFGDFPSGGDECHMAFHFPVMPRIFMAVRRESRYPVSEILAKTPAIPSSCQWGIFLRNHDELTLEMVTDEERDYMWAEYAKDPRMRANIGIRRRLAPLLDNDRNQIELFTALLLSLPGSPILYYGDEIGMGDNIWLGDRDAVRTPMQWTPDRNAGFSSCDPGRLYLPTIMDPVYGYQVTNVEASMSSPSSLLHWTRRMIEIRKQNPAFGLGSYTELQSSNPAVLAFLREAPSTGGNGDDLVLCVHNFSRFAQPTELDLRAFSGRHPVELIGGVRFPAIGELPYLLTLAGHGFYWFRLRKDAV

SEQ ID NO: 13634 - DNA, 1752 bp, Streptomyces avermitilis MA-4680
  CDS (1)..(1752)
atgatcgtcaacgagcccgtcccggacaccttcgaggacacgcccgccaaggaccgcgatccggagtggttcaaacgcgccgtcttctacgaggtcctggtccgctccttccaggacagcaacggcgacggtgtcggcgacctgaagggcctgaccgccaagctggactatctgcagtggctgggcgtggactgcctgtggctgccgccgttcttcaagtcccccctgcgcgacggcggctacgacgtctccgactacaccgcggtgctgcccgagttcggtgacctggccgacttcgtcgagttcgtggacgcggcccaccagcgcggcatgcgcgtgatcatcgacttcgtgatgaaccacaccagtgacctgcatccgtggttccaggagtcccgcagcaaccccgacggcccctacggcgactactacgtgtgggccgacgacgacaagcagtaccaggacgcccggatcatcttcgtcgacaccgaggcctccaactggacgtacgacccggtccgcaagcagtactactggcaccgcttcttctcccaccagcccgacctcaactacgagagtgccgccgtccaggaggagatcctggcggcgctgcggttctggctcgatctgggcatcgacggcttcaggctggacgccgtcccctacctgtacaacgaagaggggacgaactgcgagaacctgccggcgacgcacgagttcctgaagcgggtgcgcaaggagatcgacacgcactatccggacacggtgctgctcgcggaggcgaaccagtggccggaggacgtggtcgactacttcggcgacttcccctcgggcggcgacgagtgccacatggcgttccatttcccggtcatgccgcggatcttcatggcggtgcggcgtgagtcgcggtatccggtgtcggagatcctggcgaagacgccggcgatcccgtcgagctgccagtggggcatcttcctgcgcaaccacgacgagctgaccctggagatggtcaccgacgaggaacgcgactacatgtgggcggagtacgccaaggatccgcggatgcgggccaacatcggcatccgccggcgtctggcgccgctgctggacaacgaccgcaaccagatcgagctgttcaccgcgctgctgctgtcgctgcccggctcgccgatcctctactacggcgacgagatcgggatgggggacaacatctggctcggtgaccgggacgcggtgcgcacgccgatgcagtggacgccggaccgcaacgcgggtttctcgtcctgcgacccggggcgtctgtatctgcccacgatcatggatccggtctacgggtaccaggtcacgaacgtggaggcgtcgatgtcgtcgccgtcctcgctgctgcactggacccggcggatgatcgagatccgtaagcagaacccggcgttcggcctcggctcgtacaccgaactccagtcctcgaacccggccgtcctcgcgttcctgcgggaggccccctcgaccggggggaacggggacgacctggtgctgtgcgtgcacaacttctcccggttcgcgcagcccacggagctggatctgcgggcgttcagcggccgtcatccggtcgagctgatcggcggtgtccgcttcccggccatcggggaactcccgtatctgctgaccctggcaggccacggcttctactggttccggctccgcaaggacgtcacccaggtcaccaaggtgagcttgttcgtgagctcttga

SEQ ID NO: 13635 - protein, 583 aa, Streptomyces avermitilis MA-4680
MIVNEPVPDTFEDTPAKDRDPEWFKRAVFYEVLVRSFQDSNGDGVGDLKGLTAKLDYLQWLGVDCLWLPPFFKSPLRDGGYDVSDYTAVLPEFGDLADFVEFVDAAHQRGMRVIIDFVMNHTSDLHPWFQESRSNPDGPYGDYYVWADDDKQYQDARIIFVDTEASNWTYDPVRKQYYWHRFFSHQPDLNYESAAVQEEILAALRFWLDLGIDGFRLDAVPYLYNEEGTNCENLPATHEFLKRVRKEIDTHYPDTVLLAEANQWPEDVVDYFGDFPSGGDECHMAFHFPVMPRIFMAVRRESRYPVSEILAKTPAIPSSCQWGIFLRNHDELTLEMVTDEERDYMWAEYAKDPRMRANIGIRRRLAPLLDNDRNQIELFTALLLSLPGSPILYYGDEIGMGDNIWLGDRDAVRTPMQWTPDRNAGFSSCDPGRLYLPTIMDPVYGYQVTNVEASMSSPSSLLHWTRRMIEIRKQNPAFGLGSYTELQSSNPAVLAFLREAPSTGGNGDDLVLCVHNFSRFAQPTELDLRAFSGRHPVELIGGVRFPAIGELPYLLTLAGHGFYWFRLRKDVTQVTKVSLFVSS

SEQ ID NO: 13636 - DNA, 1665 bp, Bacillus anthracis str. Ames
  CDS (1)..(1665): transl_table=11
atgaataagacatggtggaaagaagcggttgcttatcaaatttatccacgtagctttatggattcaaatggtgatggtattggagatttacaaggtattattgcgaaactggattatttaaaagatttaggaatagatgtaatttggatttgtccaatgtataagtcacctaatgatgataatggttatgacattagtgattatcaagatattatggatgagtttgggacgatggaagactttgatgctttactagatgaagttcataaacgtgatatgaagcttattattgatttagttattaatcatacaagtgatgaacatccatggtttattgagtctcgttcatctaaagacaatccgaagcgtgattggtatatttggcatgatggtaaagatggtgcagaaccaaacaactgggaaagtatttttaatggttcggcatgggagtatgatgaagtaacaggacaatattatttacacttattctcgcgtaaacaaccagatttaaactgggagaataaagaagttcgagaagtgctatacgatacagttaattggtggcttgataaaggaattgatggtttccgagtagatgcaatcagccatattaaaaaagaagatggctttaaagatatgccaaatccaaaaggactaaagtatgttccatcttttgataaacatatgaatgtggatggtattcaacctttattagaagaattaaaagaaaatacgttttctaagtacgatattatgactgttggtgaagcgaatggcgttaagattgaagatgctgagctttgggttggagaagagcaaggtaagttcaatatggtattccaattcgaacatttaagtttatgggatgcagaaaagaagaaagatcttgatgttgtagggctgaaaaaggtattaacgaaatggcaaaaagggttagaaaataaaggatggaatgctttatatattgagaatcacgataagccgcgtatcgtttcaacttggggagatgataaacaatattggcgtgaaagtgcgacagctttaggagcaatgtatttctttatgcacggtacaccgtttatttatcaaggacaagaaattgggatgacaaatgttcaattcccaaacattgaagattacgatgatgtagcaattaaaaatttatatcgcgagaaaattgcagagggcgtatcccatcaagatatgatggaaattatatgggcttcttgccgcgataattcacgtacgcctatgcattgggacgatgagataaatgctggtttcacaacaggtacgccttggtttggtatgaatcaaaactacaaagaaatcaatgttgcaaagcaaaagaatgaagagaactctattttcaatttctataagaaaatgattgccctgaaaaaagagcatgatgtactgaattatggtacgtacgatttacttttagaagatgacccgcaaatttatgcatatactcgtacactaaacgatgaaaaaatagtcgtaattagtaatatctcaaaagaggaagctgtgtataatgaggatttatttgcactagaacgcaaacgtttgcttttaaataactatgaagttgcggaacatgaacaattaactacaatcacgttaaagccttatgaaacaagggtttatcgcatttcataa

SEQ ID NO: 13637 - protein, 554 aa, Bacillus anthracis str. Ames
MNKTWWKEAVAYQIYPRSFMDSNGDGIGDLQGIIAKLDYLKDLGIDVIWICPMYKSPNDDNGYDISDYQDIMDEFGTMEDFDALLDEVHKRDMKLIIDLVINHTSDEHPWFIESRSSKDNPKRDWYIWHDGKDGAEPNNWESIFNGSAWEYDEVTGQYYLHLFSRKQPDLNWENKEVREVLYDTVNWWLDKGIDGFRVDAISHIKKEDGFKDMPNPKGLKYVPSFDKHMNVDGIQPLLEELKENTFSKYDIMTVGEANGVKIEDAELWVGEEQGKFNMVFQFEHLSLWDAEKKKDLDVVGLKKVLTKWQKGLENKGWNALYIENHDKPRIVSTWGDDKQYWRESATALGAMYFFMHGTPFIYQGQEIGMTNVQFPNIEDYDDVAIKNLYREKIAEGVSHQDMMEIIWASCRDNSRTPMHWDDEINAGFTTGTPWFGMNQNYKEINVAKQKNEENSIFNFYKKMIALKKEHDVLNYGTYDLLLEDDPQIYAYTRTLNDEKIVVISNISKEEAVYNEDLFALERKRLLLNNYEVAEHEQLTTITLKPYETRVYRIS

SEQ ID NO: 13638 - DNA, 1761 bp, Bacillus anthracis str. Ames
  CDS (1)..(1761): transl_table=11
atgcttaaagaagccatttatcataggccaaaagataattacgcatacgcttacgatgaaaaaacgattcacatccgaatacgtacgaaaagagacgatgttcaaagcaccactcttatttatggtgatccttatgaatggaaagacgggaagtggatttcttcaagtacaccgatgaaaaaaactggttctactgcattgtttgattattggttcatttccatcgagccgaaatttaagcgcttacgttatggatttgaattaaaaaacgatacagacactcttatttatgcagagcgaggatttttttctaccactccaaatgatgacgttggtaactttttctgttttccatttattcatgcaaatgatgtattcaaagcaccttcttggattaaagatactgtttggtatcaaattttcccagaacggttcgctaatggagatcatacgctgaatccagaaaacacccttccttggggcagcgctgagccaactccaactaattttttcggtggagattttgctggtattattcaaaaccttgattaccttgttaagcttggaatttcaggaatatatttcacacctattttcaaagcacattcaaaccataaatatgacacaattgactacatggaaatcgatccacaatttggtacaaaagaaacattcaaagaactcgttcaggcatgtcatacacacggtataaaagtaatgctcgatgctgtattcaatcacagtggatactttttcgataaatttcaagacgtactacaaaatggtgagcagtcagcatataaagaatggttccatattcatgagttcccaattagaactgagccactcccgaattatgatactttcgcgtttacaccgtatatgccgaaattaaacacagcgcacccggatgtaaaagaatacttacttgaagtagggcgttattgggtgagagaattcaatatagacggttggcgccttgatgtagcaaatgaagtcgaccataacttttggagagaatttcgaagtgagataaaagcattaaattctgaagtatatattttaggagaaatttggcacgatgcacttccatggctacaaggagatcaattcgatgctgtcatgagctatcctgttacaaacgccctactgtcttactttgctaacgattccattaaggcaaatgaatttatgaaacaaattacagaatctctacattcctactctatgaatgtaaatgaagcagcatttcatttattagatagccatgatacaccaagaattttgacaacatgtaacggagataaaaataagttaaaattactttatgtattccatctttctttcatcggctctccttgtatttattatggagacgaaattggtatggacggcggtatggacccagattgtcgcaaatgtatggtttgggatacggaagaacaagatcatacattatttacacatgtacaaacattaatttcattacgaaagcaatataaagcatttggaggacatggtactttccaattcattgaagcaaatgatgaatataattatatttcttatacgaaaacatatgaagatgaaacgatctttttcgttttaaatccgactaatagtgatattacagcttcactccctctccatgttactggaaagaaaatcattaatatttatacaaacgaagaattttcagcggaagcaagtgtattacaagttacacttcctccatatggattctccatattaaaatggtaa

SEQ ID NO: 13639 - protein, 586 aa, Bacillus anthracis str. Ames
MLKEAIYHRPKDNYAYAYDEKTIHIRIRTKRDDVQSTTLIYGDPYEWKDGKWISSSTPMKKTGSTALFDYWFISIEPKFKRLRYGFELKNDTDTLIYAERGFFSTTPNDDVGNFFCFPFIHANDVFKAPSWIKDTVWYQIFPERFANGDHTLNPENTLPWGSAEPTPTNFFGGDFAGIIQNLDYLVKLGISGIYFTPIFKAHSNHKYDTIDYMEIDPQFGTKETFKELVQACHTHGIKVMLDAVFNHSGYFFDKFQDVLQNGEQSAYKEWFHIHEFPIRTEPLPNYDTFAFTPYMPKLNTAHPDVKEYLLEVGRYWVREFNIDGWRLDVANEVDHNFWREFRSEIKALNSEVYILGEIWHDALPWLQGDQFDAVMSYPVTNALLSYFANDSIKANEFMKQITESLHSYSMNVNEAAFHLLDSHDTPRILTTCNGDKNKLKLLYVFHLSFIGSPCIYYGDEIGMDGGMDPDCRKCMVWDTEEQDHTLFTHVQTLISLRKQYKAFGGHGTFQFIEANDEYNYISYTKTYEDETIFFVLNPTNSDITASLPLHVTGKKIINIYTNEEFSAEASVLQVTLPPYGFSILKW

SEQ ID NO: 13640 - DNA, 1641 bp, Mycobacterium bovis AF2122/97
  CDS (1)..(1641): transl_table=11
atggaccaacaccagcgaccggatccaatgggccccggctctcctcgcgccagcgctcgtcgaccggagccagatccgatgggcgagccgtggtggtcgcgagccgtgttctaccaggtctatccccgatcgttcgccgacagcaacggcgacggggtgggcgacctggacgggttggcgagccggcttgaccacctgcaacagctcggtgtcgacgcgatctggatcaacccggtcaccgtctcgccgatggcagaccacggatacgacgtcgccgatccccgcgacatcgacccactcttcggcgggatgccggcgttcgaacggttggtcgctgcggcacaccggcagggcatcaaagtcaccatggacgtggtgcccaaccacaccagttcggcgcacccatggtttcaggccgcgctggctgacctcccgggtagcccggcgcgggatcgctatttctttcgcgacgggcggggccccgacgggtcgctgccgccgaacaactgggagtcggtgttcggcgggccggcctggacccgagtgcgcgaaccggacggcaacccgggccagtggtacctgcaccttttcgacaccgaacagccggacctgaactcggacaacccggaaatccttgacgacttcgagaaaacactgcgcttctggctggaccgcggcgtggatggcttccgcatcgacgtggcgcacggcatggccaagcccccgggcctgccggactcaccggacctgggcatcgaggtgctgcaccaccgcgatgacgacccgcgcttcaaccacccgaatgtgcacgcgattcaccgcgacatccgcacggtgatcgacgagtaccccggagcggtaaccgtcggcgaggtgtgggtacacgacaacgcccgctgggcggagtatctgcggcccgacgaactgcatctcggcttcaatttccggctggcgcgaaccgagttcgacgccgccgagatccgcgacgcggtggcgaactccctggccgccgcggcgctgcagaacgcgaccccaacctggacgctggccaatcacgatgtgggacgggaggttagccgctacggcggcggcgagatcgggctgcgccgggccaaggcgatggcggtggtgatgctcgccctgccgggcgtggtcttcctctacaacggccaggaactgggtttgcccgacgtggacctgcccgacgaggtgctgcaggatccgacgtgggaacgctcgggacgcaccgaacgcggtcgcgatggctgccgggtgccgattccctggtcgggcaacattcccccgttcgggttctcgacgtgtccagacacctggttgccgatgccgccggaatgggcggcgctgaccgccgaaaaacaacgcgctgatgccggctcgaccttgtcgttttttcgacttgcactcagattacgtagggaacgaaatgaattcgacggcgacgtcgactggctggccgcgcccgacgatgcgctgatattccggcgtcacggcgggggtttggtgtgcgcgctcaacgccgctgagcgtccgctggcgctgccggcaggtgaacccatcctggccagcgcaccgttgaccgacgccacgttgccacccaatgccgcggcctggctggtgtag

SEQ ID NO: 13641 - protein, 546 aa, Mycobacterium bovis AF2122/97
MDQHQRPDPMGPGSPRASARRPEPDPMGEPWWSRAVFYQVYPRSFADSNGDGVGDLDGLASRLDHLQQLGVDAIWINPVTVSPMADHGYDVADPRDIDPLFGGMPAFERLVAAAHRQGIKVTMDVVPNHTSSAHPWFQAALADLPGSPARDRYFFRDGRGPDGSLPPNNWESVFGGPAWTRVREPDGNPGQWYLHLFDTEQPDLNSDNPEILDDFEKTLRFWLDRGVDGFRIDVAHGMAKPPGLPDSPDLGIEVLHHRDDDPRFNHPNVHAIHRDIRTVIDEYPGAVTVGEVWVHDNARWAEYLRPDELHLGFNFRLARTEFDAAEIRDAVANSLAAAALQNATPTWTLANHDVGREVSRYGGGEIGLRRAKAMAVVMLALPGVVFLYNGQELGLPDVDLPDEVLQDPTWERSGRTERGRDGCRVPIPWSGNIPPFGFSTCPDTWLPMPPEWAALTAEKQRADAGSTLSFFRLALRLRRERNEFDGDVDWLAAPDDALIFRRHGGGLVCALNAAERPLALPAGEPILASAPLTDATLPPNAAAWLV

SEQ ID NO: 13642 - DNA, 1761 bp, Rhodopirellula baltica SH 1
  CDS (1)..(1761): transl_table=11
ttgcatgggcggaacatggcgactgtcgagtacgaaatgcagcaacaggcaatcgccccgcgttttgccaattcgaattttacgcctcacaaccgaccaaggcatcccttcactatcaaaacgcattcacaaaaatctgctccgtcgaaaccagccgaacgtcgctggtgggaaaccggtgtgatctatcaaatctatccgcggtctttccaagacagcaatgccgacggtgtgggcgatctggcaggtatcaagcaacggctggactatctggttcgcctcggagttgacgcggtatggctttcaccgatttatccttcgccgatgttcgatttcggttacgacgtctcggactactgcggcattgatccgttgttcggtgatctgacagccttcgatcggttgctcaccgccatgcattcgcgtggtctcaagcttctgatggactttgttccgaaccactcatcagatcaacatccatggtttgtccagagccgttcatctcgcgacaatcccaagcgggattggtacatctggcgagatgcatcagctgacggcggtccacctaacaattggatcagcgatttcggtggctcgtcttggcaatgggacgcaacgacccggcaatactatttgcacgcctttcttccgcagcaacccgatctcaactggcgtcatcccgaactgcgtgaggcgatgatgaatgtcctgcggttctggttggatcgcggtgtcgatggatttcgcatggacgtgctttggcacatcgtcaaagacgccgctcttcgagacaatccgatcaatccggactggacgtctgaccgtacacagcgtgaccagctgattcagctgcactccaccgaccaaccagaagcccattcaatcgcggctgagtttcgcactttggcggacaactacggtgatcgcgttttgattggtgagatcagcctgcccaatgatcgactcgcgcgatggtttgggacggaagaacgaccggaggtacatctgccgaccaactttcatctcatcgaatgcgagtggaacgctccaaccctccgacgtgtgatcgctaactacgaagcgtcccttccaaactttggatggccgaactgggttttgggcagtcacgatgctcctcgcattgccgcccgacttggtgacgctcaatcccgagtcgccgccatgctgctgctaaccctgcgtggcacgcccacgctctatcaaggcgacgaaattgggattggtgaggtccccattcctcgcgatcaaattcgcgaccctcaggatttacggcaacctgaactgaatatcggacgagatcgatctcgcacgccgatgccttgggacgattccgccttcgccggtttcagcgtcaacgacacgtggctcccgctcaatcctgattggcgtcaaagaaacgttgcgacgcaggaggctgatccacagtcaattttgaatttgtacagaacactgctctcgcttcggcgaagccacgctgcgttatcgaacggcgacttcacacttctcgattccgacgatgatgtgctcgctttcgaaagaagacacggcgacgaacacctgttgatcgcgctgaacctcagtgagcaaacccgatcgttgccggtgccgtcgaaagctgccctcgtcacggtgctctgttccaccgtgtctcctcgagcaatcgatggaactctcgtaccaaacgaagggctgcttctgcaattggtagacaacgaagatcaatccgggcaagtttcatga

SEQ ID NO: 13643 - protein, 586 aa, Rhodopirellula baltica SH 1
MHGRNMATVEYEMQQQAIAPRFANSNFTPHNRPRHPFTIKTHSQKSAPSKPAERRWWETGVIYQIYPRSFQDSNADGVGDLAGIKQRLDYLVRLGVDAVWLSPIYPSPMFDFGYDVSDYCGIDPLFGDLTAFDRLLTAMHSRGLKLLMDFVPNHSSDQHPWFVQSRSSRDNPKRDWYIWRDASADGGPPNNWISDFGGSSWQWDATTRQYYLHAFLPQQPDLNWRHPELREAMMNVLRFWLDRGVDGFRMDVLWHIVKDAALRDNPINPDWTSDRTQRDQLIQLHSTDQPEAHSIAAEFRTLADNYGDRVLIGEISLPNDRLARWFGTEERPEVHLPTNFHLIECEWNAPTLRRVIANYEASLPNFGWPNWVLGSHDAPRIAARLGDAQSRVAAMLLLTLRGTPTLYQGDEIGIGEVPIPRDQIRDPQDLRQPELNIGRDRSRTPMPWDDSAFAGFSVNDTWLPLNPDWRQRNVATQEADPQSILNLYRTLLSLRRSHAALSNGDFTLLDSDDDVLAFERRHGDEHLLIALNLSEQTRSLPVPSKAALVTVLCSTVSPRAIDGTLVPNEGLLLQLVDNEDQSGQVS

SEQ ID NO: 13644 - DNA, 3342 bp, Bordetella pertussis Tohama I
  CDS (1)..(3342): transl_table=11
atgcctgccacccatcccgctcccgacccgctctggtacaaggacgccgtcatctaccagttgcacgtcaagtccttcttcgacgccaacgacgacggcgtgggcgacttcgccggcctgctggccaagctggactacatcgtcgagctgggcgtcaataccatctggctgctgccgttctatccgtcgccgcgccgcgacgacggctacgacatcgccgactatcgcggggtgcaccccgactatggctcgctggccgacgcccggctgctggtgcgggcggcccacgcgcgcggcctgcgcgtcatcaccgagctggtcatcaaccacacctccgaccagcacccttggttccagcgcgcccgcgccgcgcggccgggttcggcgcaccgcgcctattacgtctggtcggacgacgacaaggcctatgccggcacgcgcatcatcttctgcgacacggaaaagtccaactggacctgggacccggtggccggcgcctatttctggcaccgcttctattcgcaccagcccgacctgaactacgacaatccgcaggtgctgcgcgaagtgctgggcgcgatgcgctactggctggacatgggcgtggacggcctgcgcctggacgcggtgccctacctggtcgagcgggaaggcaccaacaacgagaacctgccggaaacccacgccatcctgcggcgcatccgccgcgtcatcgacagcgagtatcccggcaggatgctgctggccgaggccaaccagtggcccgaggacgcgcaagagtacttcggcgccggcgacgaatgccacatggcgttccactttcccctgatgccgcgcatgtacatggccatcgcgcaggaggaccgcctgcccgtcaccgacatcatccgccagacgccgtccatcgcgccgcaatgccaatgggccattttcctgcgcaaccacgacgagctgaccctggagatggtgaccagccgcgaacgcgactacctgtggaacgtctacgcggccgagccgcgcgcgcgcatcaacctgggcatccggcgccgcctggcgccgctgctcgagcgcgaccggcgccgcatcgaactgatgaacagcctgctgctgtccatgccgggcacgccggtgctgtactacggcgacgagctgggcatgggcgacaacatccacctgggcgaccgcgacggcgtgcgcacgcccatgcaatggtcgcccgaccgcaacggcggcttctcgcgcgccgaccccgagcgcctgccgctgccgctgctgatggggccgctgtacggctacgaggcggtcaacgtggaggcgcagcagcgcgacccgcattcgctgctgaactggacccgccgcatgctggccaagcgccgccagagccatgtgttcggccgtggcgaactgtcgttcctgtatccgggcaaccgcaagatcctggcctatctgcgcacctgggaagacacggtggtgctgtgcgtggccaacctttcgcaggcggcccagccggtcgaactgcacctgtccgagtacgccggccgcgtaccggtggaaatgctgggcggcaccgcctttccgcagatcggcgagctgccctatctgctgacgctgccgcctttcggcttctactggctggacctgagcgccggcgccgcgccgcccgcgtggcacagcgagctgccgccgcaaatgccggaatcgatcaccctggtgtcgcgcggcgcgggcgcggcgctgcgcctgaccgaggcatcgcgccgccagctggaagcggacgtgctgccggcctacctgcagcggcagcgctggtatgccgcgcgccgcaagcccggcgtcatgcggctggcctacagcgtgccgctgaacgacgacgtggaaagctattacgaagccgagatcgaagtcagcgacgacggaccgccgcgccgcttccatacgccggtggcgctggcctggcaggacgataccgccgcccagtatccgctggcgcgcgtgcggcgcggcgcgcagctgggcacgctcaccgacgcctcgctgcagcccggctatgcgcgcgtgctgctggcggccctgacggccggccgcgatatccaggccggcggcgagcccgccgtgcggctgcgcttcctgcccgagccgggcctggccgacctggcgctgcgcgatgacagcgaggtgcgcgcgctcagcgccgaccagtccaacagttcgctgctggtcggcgagcgcgtcgtgttcaagctgctgcgcgagctgcatgccggcccgcaccccgaagccgagatgacgcgctacctcacccaggccggctacgcgcatacgccggcgctgctaggcgaggtcgtgcgcgtgcagggcgaccaggcgccccatacgctggcgctggcccacgcctacgtcgtcaacgaaggcgatgcgtggaactggaccgtggcctacctgaaacgcacgctcgacgccgccatactgaccggcgccagcgccgacgactaccagcaggaactggccggctacgaagtgctggccggcaccatcgggcaacgcctggctcagatgcactcggtgctggcgcgcgccggcgaactgccgggcttcgcgccgcggccggccagcgagcgcgacgccgccctggcgggcgagcgcgcggtggcgcagctggaccgcgcgctgcaggccttgcgggcgtgcgagagcgggctcgcccctgcatcgcacgcctgcgcgcaatggctgttcgagcatcgcgaccggctggcggcccacatcatgacactggcgcaggccgaaaccggcgcgctgcgcatccgcgtgcacggcgacttccatctcggccagatcctggtcgcgcagaccgacgcctacctgatcgatttcgagggcgagccggcccggcccatggccgagcgccggcaactgagcagcccgttcaaggacgttgccggtattctgcgctcgttcgactatgcggtggccgaactcagccgcgacgatccgctgggcggcgcgccgcgcgacttcaacaccggcgtggccgagccggccgacccggccagcgcgccccgggaaacgcgcgaggcgctgctggcgcgcttccggcagcgcgccggcgcggccctgctggccagctatggcaatgccatcgaccccgtgctggccttgccgcccgagcgtgcccaggcgcttacctgcctgtacctgctggagaaggccgcctacgaaatctgctacgagtcggcctaccggcccgagcgcctgccggtgcccatccatggcctggccgaaaccgcccgcgccgcgctgctggcggccgccgtcgaccacgatgaaggaccggcgccatga

SEQ ID NO: 13645 - protein, 1113 aa, Bordetella pertussis Tohama I
MPATHPAPDPLWYKDAVIYQLHVKSFFDANDDGVGDFAGLLAKLDYIVELGVNTIWLLPFYPSPRRDDGYDIADYRGVHPDYGSLADARLLVRAAHARGLRVITELVINHTSDQHPWFQRARAARPGSAHRAYYVWSDDDKAYAGTRIIFCDTEKSNWTWDPVAGAYFWHRFYSHQPDLNYDNPQVLREVLGAMRYWLDMGVDGLRLDAVPYLVEREGTNNENLPETHAILRRIRRVIDSEYPGRMLLAEANQWPEDAQEYFGAGDECHMAFHFPLMPRMYMAIAQEDRLPVTDIIRQTPSIAPQCQWAIFLRNHDELTLEMVTSRERDYLWNVYAAEPRARINLGIRRRLAPLLERDRRRIELMNSLLLSMPGTPVLYYGDELGMGDNIHLGDRDGVRTPMQWSPDRNGGFSRADPERLPLPLLMGPLYGYEAVNVEAQQRDPHSLLNWTRRMLAKRRQSHVFGRGELSFLYPGNRKILAYLRTWEDTVVLCVANLSQAAQPVELHLSEYAGRVPVEMLGGTAFPQIGELPYLLTLPPFGFYWLDLSAGAAPPAWHSELPPQMPESITLVSRGAGAALRLTEASRRQLEADVLPAYLQRQRWYAARRKPGVMRLAYSVPLNDDVESYYEAEIEVSDDGPPRRFHTPVALAWQDDTAAQYPLARVRRGAQLGTLTDASLQPGYARVLLAALTAGRDIQAGGEPAVRLRFLPEPGLADLALRDDSEVRALSADQSNSSLLVGERVVFKLLRELHAGPHPEAEMTRYLTQAGYAHTPALLGEVVRVQGDQAPHTLALAHAYVVNEGDAWNWTVAYLKRTLDAAILTGASADDYQQELAGYEVLAGTIGQRLAQMHSVLARAGELPGFAPRPASERDAALAGERAVAQLDRALQALRACESGLAPASHACAQWLFEHRDRLAAHIMTLAQAETGALRIRVHGDFHLGQILVAQTDAYLIDFEGEPARPMAERRQLSSPFKDVAGILRSFDYAVAELSRDDPLGGAPRDFNTGVAEPADPASAPRETREALLARFRQRAGAALLASYGNAIDPVLALPPERAQALTCLYLLEKAAYEICYESAYRPERLPVPIHGLAETARAALLAAAVDHDEGPAP

SEQ ID NO: 13646 - DNA, 3342 bp, Bordetella bronchiseptica RB50
  CDS (1)..(3342)
atgcctgccacccatcccgctcccgacccgctctggtacaaggacgccgtcatctaccagttgcacgtcaagtccttcttcgacgccaacgacgacggcgtgggcgacttcgccggcctgctggccaagctggactacatcgtcgagctgggcgtcaataccatctggctgctgccgttctatccgtcgccgcgccgcgacgacggctacgacatcgccgactatcgcggggtgcaccccgactatggctcgctggccgacgcccggcggctggtgcgggcggcccacgcgcgcggcctgcgcgtcatcaccgagctggtcatcaaccacacctccgaccagcacccttggttccagcgcgcccgcgccgcgcggccgggttcggcgcaccgcgcctattacgtctggtcggacgacgacaaggcctatgccggcacgcgcatcatcttctgcgacacggaaaagtccaactggacctgggacccggtggccggcgcctatttctggcaccgcttctattcgcaccagcccgacctgaactacgacaatccgcaggtgctgcgcgaagtgctgggcgcgatgcgctactggctggacatgggcgtggacggcctgcgcctggacgcggtgccctacctggtcgagcgggaaggcaccaacaacgagaacctgccggaaacccacgccatcctgcggcgcatccgccgcgtcatcgacagcgagtatcccggcaggatgctgctggccgaggccaaccagtggcccgaggacgcgcaagagtacttcggcgccggcgacgaatgccacatggcgttccactttcccctgatgccgcgcatgtacatggccatcgcgcaggaggaccgcctgcccgtcaccgacatcatccgccagacgccgtccatcgcgccgcaatgccaatgggccattttcctgcgcaaccacgacgagctgaccctggagatggtgaccagccgcgaacgcgactacctgtggaacgtctacgcggccgagccgcgcgcgcgcatcaacctgggcatccggcgccgcctggcgccgctgctcgagcgcgaccggcgccgcatcgaactgatgaacagcctgctgctgtccatgccgggcacgccggtgctgtactacggcgacgagctgggcatgggcgacaacatccacctgggcgaccgcgacggcgtgcgcacgcccatgcaatggtcgcccgaccgcaacggcggcttctcgcgcgccgaccccgagcgcctgccgctgccgctgctgatggggccgctgtacggctacgaggcggtcaacgtggaggcgcagcagcgcgacccgcattcgctgctgaactggacccgccgcatgctggccaagcgccgccagagccatgtgttcggccgtggcgaactgtcgttcctgtatccgggcaaccgcaagatcctggcctatctgcgcacctgggaagacacggtggtgctgtgcgtggccaacctttcgcaggcggcccagccggtcgaactgcacctgtccgagtacgccggccgcgtaccggtggaaatgctgggcggcaccgcctttccgcagatcggcgagctgccctatctgctgacgctgccgcctttcggcttctactggctggacctgagcgccggcgccgcgccgcccgcgtggcacagcgagctgccgccgcaaatgccggaatcgatcaccctggtgtcgcgcggcgcgggcgcggcgctgcgcctgaccgaggcatcgcgccgccagctggaagcggacgtgctgccggcctacctgcagcggcagcgctggtatgccgcgcgccgcaagcccggagtcatgcggctggcctacagcgtgccgctgaacgacgacgtggaaagctattacgaagccgagatcgaagtcagcgacgacggaccgccgcgccgcttccatacgccggtggcgctggcctggcaggacgataccgccgcccagtatccgctggcgcgcgtgcggcgcggcgcgcagctgggcacgctcaccgacgcctcgctgcagcccggctatgcgcgcgtgctgctggcggccctgacggccggccgcgatatccaggccggcggcgagcccgccgtgcggctgcgcttcctgcccgagccgggcctggccgacctggcgctgcgcgatgacagcgaggtgcgcgcgctcagcgccgaccagtccaacagttcgctgctggtcggcgagcgcgtcgtgttcaagctgctgcgcgagctgcatgccggcccgcaccccgaagccgagatgacgcgctacctcacccaggccggctacgcgcatacgccggcgctgctgggcgaggtcgtgcgcgtgcagggcgaccaggcgccccatacgctggcgctggcccacgcctacgtcgtcaacgaaggcgatgcgtggaactggaccgtggcctacctgaagcgcacggtcgacgccgccatgctgaccggcgccagcgccgacgactaccagcaggaactggccggctacgaagtgctggccggcaccatcgggcaacgcctggctcagatgcactcggtgctggcgcgtgccggcgaactgccgggcttcgcgccgcggccggccagcgagcgcgacgccgccctggcgggcgagcacgcggtggcgcagctggaccgcgcgctgcaggccttgcgggcgtgcgagagcgggctcgcccctgcatcgcacgcctgcgcgcaatggctgttcgagcatcgcgaccggctggcggcccacatcatgacactggcgcaggccgaaaccggcgcgctgcgcatccgcgtgcacggcgacttccatctcggccagatcctggtcgcgcagaccgacgcctacctgatcgatttcgagggcgagccggcccggcccatggccgagcgccggcaactgagcagcccgttcaaggacgttgccggcatcctgcgctcgttcgactatgcggtggccgaactcagccgcgacgatccgctgggcggcgcgccgcgcgacttcaacaccggcgtggccgagccggccgacccggccagcgcgccccgggaaacgcgcgaggcgctgctggcgcgcttccggcagcgcgccggcgcggccctgctggccagctatggcaatgccatcgaccccgtgctggccttgccgcccgagcgtgcccaggcgcttacctgcctgtacctgctggagaaggccgcctacgaaatctgctacgagtcggcctaccggcccgagcgcctgccggtgcccatccatggcctggccgaaaccgcccgcgccgcgctgctggcggccgccgtcgaccacgatgaaggaccggcgccatga

SEQ ID NO: 13647 - protein, 1113 aa, Bordetella bronchiseptica RB50
MPATHPAPDPLWYKDAVIYQLHVKSFFDANDDGVGDFAGLLAKLDYIVELGVNTIWLLPFYPSPRRDDGYDIADYRGVHPDYGSLADARRLVRAAHARGLRVITELVINHTSDQHPWFQRARAARPGSAHRAYYVWSDDDKAYAGTRIIFCDTEKSNWTWDPVAGAYFWHRFYSHQPDLNYDNPQVLREVLGAMRYWLDMGVDGLRLDAVPYLVEREGTNNENLPETHAILRRIRRVIDSEYPGRMLLAEANQWPEDAQEYFGAGDECHMAFHFPLMPRMYMAIAQEDRLPVTDIIRQTPSIAPQCQWAIFLRNHDELTLEMVTSRERDYLWNVYAAEPRARINLGIRRRLAPLLERDRRRIELMNSLLLSMPGTPVLYYGDELGMGDNIHLGDRDGVRTPMQWSPDRNGGFSRADPERLPLPLLMGPLYGYEAVNVEAQQRDPHSLLNWTRRMLAKRRQSHVFGRGELSFLYPGNRKILAYLRTWEDTVVLCVANLSQAAQPVELHLSEYAGRVPVEMLGGTAFPQIGELPYLLTLPPFGFYWLDLSAGAAPPAWHSELPPQMPESITLVSRGAGAALRLTEASRRQLEADVLPAYLQRQRWYAARRKPGVMRLAYSVPLNDDVESYYEAEIEVSDDGPPRRFHTPVALAWQDDTAAQYPLARVRRGAQLGTLTDASLQPGYARVLLAALTAGRDIQAGGEPAVRLRFLPEPGLADLALRDDSEVRALSADQSNSSLLVGERVVFKLLRELHAGPHPEAEMTRYLTQAGYAHTPALLGEVVRVQGDQAPHTLALAHAYVVNEGDAWNWTVAYLKRTVDAAMLTGASADDYQQELAGYEVLAGTIGQRLAQMHSVLARAGELPGFAPRPASERDAALAGEHAVAQLDRALQALRACESGLAPASHACAQWLFEHRDRLAAHIMTLAQAETGALRIRVHGDFHLGQILVAQTDAYLIDFEGEPARPMAERRQLSSPFKDVAGILRSFDYAVAELSRDDPLGGAPRDFNTGVAEPADPASAPRETREALLARFRQRAGAALLASYGNAIDPVLALPPERAQALTCLYLLEKAAYEICYESAYRPERLPVPIHGLAETARAALLAAAVDHDEGPAP

SEQ ID NO: 13648 - DNA, 1452 bp, Prochlorococcus marinus str. MIT 9313
  CDS (1)..(1452): transl_table=11
atgcaatggggcatgcagcagatcgatgggctgaccaacactccccgctgggttgcccaggcggtggtgtatcagatcttccctgatcgttttcgttgtagtggccgtgtcttagctcatcagcatttggctttgcgctgctggggcagtgacccttctgagcagggttttcaggggggagatctctacggggtgatcgaggcccttgatcatctccaggcgcttggtatcagctgcctttacttgacacccgtctttagttctgccgctaatcatcgctatcacgcttatgactacttgcaggtggatccgcttctcggtggcaatgcagcgctagaggctttgattgaggcggtgcatcgccgcgggatgcgcatcattttggatggcgtgtttaatcactgtggtcgcgggttctgggcttttcatcatcttttggaaaatggtgaggcttcgccctatcgcgattggtttgaggtgcggcaatggccgcttcatccctatccacggcgtgggcaggattgtggttacagctgctggtggaacgatccagccttgccaaagttcaatcatgcccatgcccctgtgcgtgagtatttgattgccgtagcccgctattggctcgagcagggaatcgatggttggcgacttgacgttgctgatgaggtgcctgctgagttttggctggagtttcggcacatggttaaggcagtgaatccagacgcttggatcttggctgagatctggggtgatgcgagaccgtggctacaggggcagcactttgatggggtgatgaattatcggatgggttggagcagcctttgctgggttgctggtaagcgattacgccgtcggtatcgcaatcctgcctatccccttgaccctctgagtggggaggcttttgttgagctattggcaacaacgctgggttggtatcgacctgaggtgaaccgcagccagttgaacttgcttgatagccacgatgtgccgagagctttgcacacacttcagggggatcttgcggcgttgaagttggccttgctgttgttgtttttgcaaccaggggcgccttgcatctactacggcacagaggcgggtttgcagggtggccctgaaccaggttgccgagaagggttcccttggcatacgccttggcctgcagacctgcgcgatttcattcagtcgttgagtgatctgcgccaacgttgcccagcgttgagtgatggcggtttgcaatggcaaccgattggagctgatgcacttcatgcttggctgatgcagcccgagccaggcacaacacaaaaggagacgccgattcaggtgtgggtcaatcgcagtcgcaggtcatggttgcggatgaaaggctcatcgacagaccctctttggctggaaggagcattggaatgcaatggccggggattaggccctcaatcagcagtgttgtttcactga

SEQ ID NO: 13649 - protein, 483 aa, Prochlorococcus marinus str. MIT 9313
MQWGMQQIDGLTNTPRWVAQAVVYQIFPDRFRCSGRVLAHQHLALRCWGSDPSEQGFQGGDLYGVIEALDHLQALGISCLYLTPVFSSAANHRYHAYDYLQVDPLLGGNAALEALIEAVHRRGMRIILDGVFNHCGRGFWAFHHLLENGEASPYRDWFEVRQWPLHPYPRRGQDCGYSCWWNDPALPKFNHAHAPVREYLIAVARYWLEQGIDGWRLDVADEVPAEFWLEFRHMVKAVNPDAWILAEIWGDARPWLQGQHFDGVMNYRMGWSSLCWVAGKRLRRRYRNPAYPLDPLSGEAFVELLATTLGWYRPEVNRSQLNLLDSHDVPRALHTLQGDLAALKLALLLLFLQPGAPCIYYGTEAGLQGGPEPGCREGFPWHTPWPADLRDFIQSLSDLRQRCPALSDGGLQWQPIGADALHAWLMQPEPGTTQKETPIQVWVNRSRRSWLRMKGSSTDPLWLEGALECNGRGLGPQSAVLFH

SEQ ID NO: 13650 - DNA, 1407 bp, Synechococcus sp. WH 8102
  CDS (1)..(1407): transl_table=11
atggcgtcctccacgcccttccacgacccaccggcctgggtggcggatgccgtggtgtatcagatctttccggatcgattccgccgcagtggtcaggtgaaggctcagcaacatcttgagctgaagccctggggcagtgatccccgtgagcagggctttcaagggggggatctctacggggtgatcgaggcgttggatcagctgcaggccatgggcatcagctgcctgtacctcacgccgatcttcagctccgccgccaatcaccgctatcacgcctacgactatttcgaggtggatcccctgctgggggggaatgacgctctggatacgttgatcgcagccttacaccagcggggcatgcggctggtgctcgatggtgtgttcaaccactgcggccgtggcttctgggcctttcatcacctggtggaaaacggccaggactccccctaccgggattggttcaatgtgcaccgctggcctgtaaagccgtatccggccgagggcgaggactgcggctacgattgctggtgggctgtgcctgatctgcccaagttcaaccatgccaatcccgcagtgcgggaccatctgttggaggtgggtcgtttctggctggaacggggcatcgatggttggcgtctggatgtgcccgcggaagtgccagccgagttctgggtggatttccgtcgcgtggtgcgggaggtcaaccctgacgcctggatcgtgggtgagatctggggtgatgcccgggagtggctgcggggcgagcactttgatggggtgatgaattaccgcctcggctggagcagcctcggctgggtggcaggagatcggttgaggcagggataccgcaatccggagtacccactgaatcccctcagtagcgaggatttgatcgaaatctggagcaccacgtccggttggtaccgcccagccgtgaatcgagctcagatgaacctgctcgatagccacgatgttcctcgggcactccacagcctcgatggagatgtgaaggctctgaagctcgccctgctgctgatctttctgcagcaaggggccccatgcgtgtactacggcaccgaatctggattgtgcggtggcccggaacccgcctgtcgtgaagcctttccctggggtgaaccctggcctgcggatctgagctcaaccattgcggccttggctgatctccggcgaaatcaacccaatctcattcgcggcgatctgaagtgggagccgatcggacgcgacggactgctgggaagcacccctggcggtttaagcgtctgggttaaccgcagcaccacgacctcgctgcagattgatcctgggatttccagaatctggagttgtggcgcctgcgatggacaagctctagagccgcaatctgcagtggtgcatctgcagggataa

SEQ ID NO: 13651 - protein, 468 aa, Synechococcus sp. WH 8102
MASSTPFHDPPAWVADAVVYQIFPDRFRRSGQVKAQQHLELKPWGSDPREQGFQGGDLYGVIEALDQLQAMGISCLYLTPIFSSAANHRYHAYDYFEVDPLLGGNDALDTLIAALHQRGMRLVLDGVFNHCGRGFWAFHHLVENGQDSPYRDWFNVHRWPVKPYPAEGEDCGYDCWWAVPDLPKFNHANPAVRDHLLEVGRFWLERGIDGWRLDVPAEVPAEFWVDFRRVVREVNPDAWIVGEIWGDAREWLRGEHFDGVMNYRLGWSSLGWVAGDRLRQGYRNPEYPLNPLSSEDLIEIWSTTSGWYRPAVNRAQMNLLDSHDVPRALHSLDGDVKALKLALLLIFLQQGAPCVYYGTESGLCGGPEPACREAFPWGEPWPADLSSTIAALADLRRNQPNLIRGDLKWEPIGRDGLLGSTPGGLSVWVNRSTTTSLQIDPGISRIWSCGACDGQALEPQSAVVHLQG

SEQ ID NO: 13652 - DNA, 1662 bp, Synechococcus sp. WH 8102
  CDS (1)..(1662): transl_table=11
atgagccaaaccatgccgtggtggaccggcacggtcatctatcaactgatcgtgcgcagcttcgccgatggcaacggtgatggcatcggcgatttcaagggtctggcttcgcgcttgccctatctgcgctggctcggggtgaagacgctctggctgacacccacgtacccatctcccttacgggatggtggctacgacatcaccgacttcaaggacattcaccctgatctgggcgatctggcgtcgttccatcggtttctgacggcagcccacagccagggcatgcgcgtgattctcgatctggtgctgaaccacaccagcgaccttcacccctggttccagcgagcccgctgggcccccaagggcagcactgaacgggatgtgtacgtctggagcgacgacccatcccgctacagcgacgccccggtgctgttccggcactttgaagcgtccaactgggagtgggacccagtggcggagcagtactacctgcaccgtttcctgagccatcagcccgacctcaactacgccaacccgtgggtgcaggaggccatgctcgaggtggttgacttctggctggagcgtggggtcgacggctttcgccttgatgcggtgccgtttctgtttgaggaggagggcacccggtgtgaagggttgccggagacccatgccttcctgcggcgtctgcgggcccgtgtggatgccatgggacgagaggtgctgttgctgggggaagcgatccaacccgtgcaggaggcagccccctatctggcgaaggacgaactgcacggagccttcaacttcgtgctcacagcccatctgttcgctgctgtggcctccggcagcactcgccagctcggggactgtctcaacgaggcggaacacgcggttgatggcccgcgctgggccctgccgctccgcaaccacgacgagctctggctgggggatgggcacctgatccccgacgaggtgatccagtcgatccgggtgggcttgccccaggggcaggggcattggctcaactggggcatcaaccgtcgattggcaccgctgctcaatggcgacccccgctccaaccgactgcttcacggactgatttacagccttccaggcatgccctgcctgtattacggcgacgagctggggatgggggattggccggggttacgggatcgggatccgaaccgcacacccatggcctggacacctgcccgcaacggtggcttctcctcggctcccgaccctttgctggtgcttccgccgatcacagctcctgggtacgactaccgagtcgtgaacgttgaggtacagaaacagctgccgggttccttgctgaactggcaccgccgcatgctcacttgccggcgtttgctgccggccctcgcccatggatcattgcagctgttgccgtgcagccatcccggtgccttggtttacgtccgcgcgactgaggccatgacggtgttggtggcgggcaatgtcacggccgccggagcctccttcagcctggatctcacggcctgggagggcttgcggactcgcgaggtgatgtggggctgtgaattcccgctggccagccgcgaatggtttgtgaatctgtctccttacggcatcaactggtggttgatcggcgaggtggataccgctgtgcccgtgagctga

SEQ ID NO: 13653 - protein, 553 aa, Synechococcus sp. WH 8102
MSQTMPWWTGTVIYQLIVRSFADGNGDGIGDFKGLASRLPYLRWLGVKTLWLTPTYPSPLRDGGYDITDFKDIHPDLGDLASFHRFLTAAHSQGMRVILDLVLNHTSDLHPWFQRARWAPKGSTERDVYVWSDDPSRYSDAPVLFRHFEASNWEWDPVAEQYYLHRFLSHQPDLNYANPWVQEAMLEVVDFWLERGVDGFRLDAVPFLFEEEGTRCEGLPETHAFLRRLRARVDAMGREVLLLGEAIQPVQEAAPYLAKDELHGAFNFVLTAHLFAAVASGSTRQLGDCLNEAEHAVDGPRWALPLRNHDELWLGDGHLIPDEVIQSIRVGLPQGQGHWLNWGINRRLAPLLNGDPRSNRLLHGLIYSLPGMPCLYYGDELGMGDWPGLRDRDPNRTPMAWTPARNGGFSSAPDPLLVLPPITAPGYDYRVVNVEVQKQLPGSLLNWHRRMLTCRRLLPALAHGSLQLLPCSHPGALVYVRATEAMTVLVAGNVTAAGASFSLDLTAWEGLRTREVMWGCEFPLASREWFVNLSPYGINWWLIGEVDTAVPVS

SEQ ID NO: 13654 - DNA, 1863 bp, Gloeobacter violaceus PCC 7421
  CDS (1)..(1863): transl_table=11
atggcaatcaccatcgaagagaaagctccccgcaagctcagcgaagcggatctgcggccgcgcggccaagtgcatccgagcccggcaagctggcgcgatcagtttctctaccagctgttgccggaccgcttcagcgacggccgcgaggcggatcggccgctttttgacccggccgatccggcccgattccaggtcaaagacagaggagcctggatggcggcggggaagcgattcgtaggtggaaccctcaaaggcgtcatcagcaagctcgactatctgcaggggctcggggtgacgacgctgtggctcaacccaccctggaagcagcgagcggatctggagacttatcacggctacggtattcagaactttttcgacatcgatccgcgcttcgggacccgccaggatctgcgcgacttggtcgatgccgcccacgcacggggcctgtacgtcatcctcgatgtgatctataaccacagcggcaacaactggttctaccgagacgaatgggacggcagcccgcaatcgatgcgcccctaccgctatgcgcccggctatccggtgcacggttggcgctccggcgacgggcgcagcgtgggtgagattgtttctctcgacgacggcgtctggcccgaggagtttcaaaactttgactggtacacccgcgccgggcggatcatcaactggagcgaagcggcctgggaggattatctgagcccccaggtcgaatttcgccggggcgatttttttgatctcaaagacttcaacctggccaatcccgccaccatcgccggtttggcccgcgtctaccagtactggattgccctcagtgactgcgacggatttcgtgtcgatgcggtcaagcacgtctcccctgtcgaatcgcgcaagttctgcgcggccatcaacgagtatgcccagtcgatcggcaaggacaattttttgctcaccggtgaactcaccgacgaccgcatgctgcttgcctacctcgacatcgtcgggcgcaacctggatgcggccctcgacatcgtcagcgcgccgattcagctgaccgccgcagccaagggccttgctcacccgggcgccttcttcggtctttacgacgagaacaccctggcgggcgcctaccgccagagcgggctttatcatgtctcggtcctcgacgatcacgacatgtcctcgcgcagctacaaatcgcgctttgccgcccacggcgaaggggtgcccaacctttaccggcaggtggcccacgcggtcggcgtgcaactgacgatgcccggtattccttcgatttactacggcaccgaacaggccctggacggctccgagagcaaccacgactacggcatcgatgggtcgcacgaatatgtcgatcgctacgtgcgcgaagcgatgttcgggggtgcctttggtgcctttcgcaccgagggttgccactttttcaacccggatcaccctacctatctgcgcatcgccgccatcgcccgcctgcgcaaccgtctggacgccgtcggcaaaaccctgcgccgggggcatcactacctgcgggagacctcgtttgtccaccgaccctttgtcctcccgggggccggcgagctggtggcctggtcgcaaattctgttcgagacggaggcgctgatggtcctcaacacccacggcctggagaatcgaggtgccgaggtgaccgtcgagacctcgctgcacccggaaggttcgtcgatggccgtcctgtaccacagcgaatggagcgacgaccagctgcgtcagccgccgtcggctcagaccgtgcctgtcgagtatggccacggtcgcgccacggtgcgcatcgacctgcccccctgcggcatggtgattctgagctga

SEQ ID NO: 13655 - protein, 620 aa, Gloeobacter violaceus PCC 7421
MAITIEEKAPRKLSEADLRPRGQVHPSPASWRDQFLYQLLPDRFSDGREADRPLFDPADPARFQVKDRGAWMAAGKRFVGGTLKGVISKLDYLQGLGVTTLWLNPPWKQRADLETYHGYGIQNFFDIDPRFGTRQDLRDLVDAAHARGLYVILDVIYNHSGNNWFYRDEWDGSPQSMRPYRYAPGYPVHGWRSGDGRSVGEIVSLDDGVWPEEFQNFDWYTRAGRIINWSEAAWEDYLSPQVEFRRGDFFDLKDFNLANPATIAGLARVYQYWIALSDCDGFRVDAVKHVSPVESRKFCAAINEYAQSIGKDNFLLTGELTDDRMLLAYLDIVGRNLDAALDIVSAPIQLTAAAKGLAHPGAFFGLYDENTLAGAYRQSGLYHVSVLDDHDMSSRSYKSRFAAHGEGVPNLYRQVAHAVGVQLTMPGIPSIYYGTEQALDGSESNHDYGIDGSHEYVDRYVREAMFGGAFGAFRTEGCHFFNPDHPTYLRIAAIARLRNRLDAVGKTLRRGHHYLRETSFVHRPFVLPGAGELVAWSQILFETEALMVLNTHGLENRGAEVTVETSLHPEGSSMAVLYHSEWSDDQLRQPPSAQTVPVEYGHGRATVRIDLPPCGMVILS

SEQ ID NO: 13656 - DNA, 1443 bp, Gloeobacter violaceus PCC 7421
  CDS (1)..(1443): transl_table=11
atgcagattcacacaccgaactgggtaaagcacgctatcttctatcagatctttccggaccgcttctcccgcacccagcagttaaaacaaaagctgttgcaggcggtctccttcgaggattgggcagccgccccgaccctctacggctataaaggcggcgatctgtggggggtaatcgaaagactcgattacctgtcggatttgggcatcaacgccatctatttcactccgatatttcaatcggcgagtaaccaccgctaccatacccacgattactatagagtcgatccgctgctgggaggaaacgaggcgttcaaggcattgctcgatgccgcccacgcccgcgacatcaaagtggtgctcgacggtgtatttaaccacgcgagccgcggttttttcttcttccacgacatccttgaaaatggtcaactctccccgtggctcgactggttcaagatcgaaggctggcccctctcgccctacaatgtcgagcagcccgccaactatgcctgctgggacaacaaccgtgccctgccccagttcaaccatgccaatccgatggtgcgcgagtacattatggagattgccgaatactggatcaaagcgggtatcgacggctggcgcctcgatgtgcccgcctgtgtagaggcggaaggtttctggcaggaatttcgcgagcgcgtcaaggcaatcaatcctgaagcctacatcgtcggcgaaatctgggaggatgcccgccagtggctcgacggcacccagttcgacggggtgatgaattatctgtttgccgccccgaccatcgcctttacggccggggatcgcgtccaggtgcagtacgtgcaggaccgttcctacaggccctacccggcgctgttcgccgttgagtacaaagaggcaatcgacaaattgttggggctgtacgactgggagatccagctggcgcaactcaacttgctcgatagccacgacacggccagggtactgaccatcgccgggggcgaccgcgcgagtgtagaactggcgacactgctgttgctcacctttcccggggcgcccagcatctactacggcgacgaggtgggcctgcccggcggcatcgaccctgattcgcgccagggttttcctcccgaatcgcagtggaacggcgaactgctcgcgctgcaccgcgacttgatcgccctgcgccaccgccacgaagcgctgcgcatcggcaaatacaaaagcgtctatgcctccggccagtgctatgtcttcgagcgccgcctggaggcggaagtgctgttggtggccgtcaacgccgggaccgaaccggcgcgcgtcaccctcgaagcgcctggggaaacctacccgcgcaaagtgctcttcggtcccggccaggtggaagccgccgaagggcatctggaattgagcctgccggcccgcagcggtctggtgctggggtag

SEQ ID NO: 13657 - protein, 480 aa, Gloeobacter violaceus PCC 7421
MQIHTPNWVKHAIFYQIFPDRFSRTQQLKQKLLQAVSFEDWAAAPTLYGYKGGDLWGVIERLDYLSDLGINAIYFTPIFQSASNHRYHTHDYYRVDPLLGGNEAFKALLDAAHARDIKVVLDGVFNHASRGFFFFHDILENGQLSPWLDWFKIEGWPLSPYNVEQPANYACWDNNRALPQFNHANPMVREYIMEIAEYWIKAGIDGWRLDVPACVEAEGFWQEFRERVKAINPEAYIVGEIWEDARQWLDGTQFDGVMNYLFAAPTIAFTAGDRVQVQYVQDRSYRPYPALFAVEYKEAIDKLLGLYDWEIQLAQLNLLDSHDTARVLTIAGGDRASVELATLLLLTFPGAPSIYYGDEVGLPGGIDPDSRQGFPPESQWNGELLALHRDLIALRHRHEALRIGKYKSVYASGQCYVFERRLEAEVLLVAVNAGTEPARVTLEAPGETYPRKVLFGPGQVEAAEGHLELSLPARSGLVLG

SEQ ID NO: 13658 - DNA, 1635 bp, Vibrio vulnificus YJ016
  CDS (1)..(1635): transl_table=11
atggaaaacaaatggtggcacgatgcggtggtctatcaaatctacccgcgtagtttttgcgattcaaacaacgacggcatcggcgatttaaatggcatcatcagcaaactcgattacctgaaaacacttggcgtaaacgtgctttggctctcgcccgtatataagtcgcctatggatgacaacggttacgacatttctgattatcaagatatcgctgcggaatttggcaccatggctgatatgcaaaacttacttgatcaagcaaaagcgcgtgatatccgcatcgtaatggatcttgtcgtcaaccatacctcagatgaacacccttggtttgtagaagctcgtaaatcaaaagacaacccttatcgtgactactatatttggcgtgatgcaaaaccagatggcagtgtgcccgatgaccaaggttcgatttttggaggcagtgcttggcaatgggatgaagcaacacaacagtattacttccatctattttctaagcgacagccggatctcaattgggagaatcctaaagtccagcaggaagtacacaagatgatgaactggtggattgaccaaggcatcggtggatttaggctcgacgttatcgacttgattggcaaagagatcgacaaaggcattactggtaatggcccaaggctgcatccactattgcaggaaatgaacagagcgacgtttggcgacaaagatctgctgaccgttggtgaaacatggggagcaaccccagaaattgcaaaattgtatagcgatcctgagcgtcatgaactctccatggtgttccaatttgagcacatcacgctcacttggcaacacggtgacaaatggaaccctattcctcttgatctcaaacaattcaaacacgtactgaccaagtggcaaactgaattatcgaaccaaggttggaactcgttgttttggaacaaccacgatttaccacgcgtagtctcgaaatacggtgatgaccaacgctatcgtgttgagtcagcgaaaatgctggcaacggcgttgcatttcctcaaaggcacgccttacgtctaccaaggtgaagagatcggtatgaccaatgtcgcgtttgagtcgttagagcaatacaaagacattgaaacgctgaacttctacaaagtgaaaacagaatcaggggtgtcacatcaacatatgatggacgcgatacatgagaacagccgtgacaatgctcgcaccccaatgcagtggtccgcatctcagaatggtggctttagtcaggcgaaaccttggattgaagtgaatccgaactatccagagatcaacgtggaacaagcattggcagattcagattccattttctatcactaccaaaagctgattgaactgcgcaaacagcacccagcgatcgtctatggcgatttcaccccactgtttgcagagcacgatagtgtgtttgcttatgtccgctcacatcaagatgagcaactgctggtcatcaacaactttagcgatcaagatgtttcattagcgttgccggataacttgcaaaacaaagaagttaactgtctgatttataactacgattcgttggatatgctcggagtgacattgtcactaaaaccgtatcagtgctacgcatttaaacttagataa

SEQ ID NO: 13659 - protein, 544 aa, Vibrio vulnificus YJ016
MENKWWHDAVVYQIYPRSFCDSNNDGIGDLNGIISKLDYLKTLGVNVLWLSPVYKSPMDDNGYDISDYQDIAAEFGTMADMQNLLDQAKARDIRIVMDLVVNHTSDEHPWFVEARKSKDNPYRDYYIWRDAKPDGSVPDDQGSIFGGSAWQWDEATQQYYFHLFSKRQPDLNWENPKVQQEVHKMMNWWIDQGIGGFRLDVIDLIGKEIDKGITGNGPRLHPLLQEMNRATFGDKDLLTVGETWGATPEIAKLYSDPERHELSMVFQFEHITLTWQHGDKWNPIPLDLKQFKHVLTKWQTELSNQGWNSLFWNNHDLPRVVSKYGDDQRYRVESAKMLATALHFLKGTPYVYQGEEIGMTNVAFESLEQYKDIETLNFYKVKTESGVSHQHMMDAIHENSRDNARTPMQWSASQNGGFSQAKPWIEVNPNYPEINVEQALADSDSIFYHYQKLIELRKQHPAIVYGDFTPLFAEHDSVFAYVRSHQDEQLLVINNFSDQDVSLALPDNLQNKEVNCLIYNYDSLDMLGVTLSLKPYQCYAFKLR

SEQ ID NO: 13660 - DNA, 3303 bp, Rhodopseudomonas palustris CGA009
  CDS (1)..(3303): transl_table=11
atgaataaaatgacatcgatcgccccgagcgacagaccggacgcggaaacttccgacgaactctggtacaaagacgccatcatctaccagttgcacgtcaaggcgttcgccgacagcaacaatgacggcatcggcgacttcgcgggtctcaccgagaagctggattatctgcaggagctcggcgtcaacacgctgtggctgctgccgttctatccgtcgccgcagcgcgacgacggatacgacatcgccgactacggatcgatcaatcccgacttcggcacgatgaaggacttccgccgcttcatcgtcgaggccaagaagcgcaatctccgggtcatcaccgagctggttatcaaccacacctcggatcagcacgcctggttcaagcgggcgcggcgcagcccgaaagactccagcgcgcgcgactggtacgtctggagcgacaccgaccagaaatatctcggcacccggatcattttcaccgacaccgagaaatcgaactggacctgggatcccgaggccggccagtattactggcaccggttcttctcgcaccagcccgatctcaacttcgacaatccgcgcgtcgtcagcgccgtggtcaaggtgatgaaacgctggctcgacaccggcgtcgacggcttccggctcgacgcgatcccgtatctgtgcgagcgcgacggcaccaacaacgagaaccttcccgagacccacgccgtcatcaagcggctgcgcgccgagctcgacgcctacgccaagggcaagctgctgctcgccgaggccaaccaatggccggaggacgtgcagcagtatttcggcgatggcgacgagtgccacatggcctaccacttcccgctgatgccgcggatctatatggcgatcgcgcaggaagaccgcttcccgatcaccgacatcatgcggcagacgccggagattcccgcgaactgtcagtgggcgatgttcctgcgcaaccacgacgagctgacgctcgaaatggtcaccgacgtcgagcgcgactatctgtggaagacctacgcggccgatccgcgagcgcggatcaacgtcggcatccgtcgccgcctcgcgccgctgatggacaatgatcgccgcaagatcgaactgatgaactcgctgctgatgtcgttccctggcacgccgatcatctactatggcgacgaaatcggcatgggcgacaacatctatctcggcgaccgcaacggcgtgcggacgccgatgcagtggtcgcccgaccgcaacggtgggttttcgcgggccgacccggcacggctgtacgcaccgccgatcatggaccccgtgtacggctacgcctcggtcaacgtcgaagcccagcagcgcagcctttcgtcattgctgagcgcgatgaagcgcttgatcgcggtgcgcaaatcgacgccggcgttcggccgcggcagcatcaccttcatccgtccgagcaaccgcgcggtgatcgcctacgttcgccaatacaaggacgaggtcattctgtgcgtcgccaatctgtcgcgtgccgcgcaggcgaccgaactcgacctgtcgccgtggaaggaccgcgtgccgcaggagatgctcggccgcaccaaattcccgccgatcggcgatccggcctacatgatcacgctggcgcccttcggcttctactggttcaagctgcaggagcccggcacggctgcgcatgtcgcgccggtctccaccgtgcctgaattcgtcacgctggtggtgccgctcggttcgacctggatgacgctcggccgcacccgctcgatgttcgagcacgaggtgctgccgaccttcctgtcccgcacccgctggtttccggagcgcaatccgcgggcgatccatccgcggctcacctcggcgattccgttcgccaatgacggcgacaaccgtccgtggctggcgttcttcgaggccacgcagcgggggacgacggcgcgctatctgctgccgatgcagatcgactgggtgcggttcgaccgcgaacgctacaatccgcgggcctatgcggcggtgcgccagggcgcccgcgaaggtaccctgctcgatgtcgccgccgatccctcgttcatcgacctgctgctggagaacgtccgcgacgccgtcaccgtgaccggcgataacggcgaccgactggaattccgccctgggtccaagctcgcggaacggcccgccgggccattccagaacattcgcgcggtcgaaaccgagcagtcgaattcgaccgcactggtcgacggcgactacgtcgtcaaactgtatcggcggctgcagatcggcatcaatcccgagctggagatgggacgcttcctcaccgaggtcgccggctatgccaacaccccggccctgctcggcagcgtcgagctgatcgaaggcgacaagaccagcgcggtcgcggtggtgcacgaatttgcccgcaatcagggcgacggctggaccgtcacctccggctatctcgatcgctacatcgacgaacaacgcgtgctgagccgcgccgaggaaaagaccgagagcgatcagctcgcgccctatctgcatttcatgcagcagaccggcaagcgggtcgcggagatgcacatcgcgctcgccagccatcccgaggtgccggacttcgccccggagccgatcaccctcgacgcctcgcgcgactgggccgaaaccgttgcggcatccgccgaccggatgctcgacgaactgcggcgccggcgcgacacgctgaaggaaggcgaccggacgctggtcgacgaactgctggcggcccgcgacgtgctgatgtcccgcatccacggcctgctcggcgacgacggcggcctgaacatccgccatcacggcgacttccatctcggacagatgttgatcgtcaaggacgacatctacatcatcgacttcgaaggtgagccgcgccgcaccttggacgaacgccgcgccaaagcaccggcggctcgcgacgtggctgggctgatccggtcgatcgactattcgacgaccgccgcactcgagcgagcgctgaaagcagcctccgacgagccaggccgactgaccgaggcgctcgacctgtggcggatccgcgccacaggcgcgttcctggacgcctatcgccaaaccatgggcgacagcccggtgtggccggcggatatcgcggccgccgaccgggtgctcgacttcttcctgattgaaaaggcgctgtacgagatcgactacgagatcgcgcatcgtcccgactgggtgcatgtgccgctggtcggcattctccgtatcctgtcgccgcctcccgaggagcttccatga

SEQ ID NO: 13661 - protein, 1100 aa, Rhodopseudomonas palustris CGA009
MNKMTSIAPSDRPDAETSDELWYKDAIIYQLHVKAFADSNNDGIGDFAGLTEKLDYLQELGVNTLWLLPFYPSPQRDDGYDIADYGSINPDFGTMKDFRRFIVEAKKRNLRVITELVINHTSDQHAWFKRARRSPKDSSARDWYVWSDTDQKYLGTRIIFTDTEKSNWTWDPEAGQYYWHRFFSHQPDLNFDNPRVVSAVVKVMKRWLDTGVDGFRLDAIPYLCERDGTNNENLPETHAVIKRLRAELDAYAKGKLLLAEANQWPEDVQQYFGDGDECHMAYHFPLMPRIYMAIAQEDRFPITDIMRQTPEIPANCQWAMFLRNHDELTLEMVTDVERDYLWKTYAADPRARINVGIRRRLAPLMDNDRRKIELMNSLLMSFPGTPIIYYGDEIGMGDNIYLGDRNGVRTPMQWSPDRNGGFSRADPARLYAPPIMDPVYGYASVNVEAQQRSLSSLLSAMKRLIAVRKSTPAFGRGSITFIRPSNRAVIAYVRQYKDEVILCVANLSRAAQATELDLSPWKDRVPQEMLGRTKFPPIGDPAYMITLAPFGFYWFKLQEPGTAAHVAPVSTVPEFVTLVVPLGSTWMTLGRTRSMFEHEVLPTFLSRTRWFPERNPRAIHPRLTSAIPFANDGDNRPWLAFFEATQRGTTARYLLPMQIDWVRFDRERYNPRAYAAVRQGAREGTLLDVAADPSFIDLLLENVRDAVTVTGDNGDRLEFRPGSKLAERPAGPFQNIRAVETEQSNSTALVDGDYVVKLYRRLQIGINPELEMGRFLTEVAGYANTPALLGSVELIEGDKTSAVAVVHEFARNQGDGWTVTSGYLDRYIDEQRVLSRAEEKTESDQLAPYLHFMQQTGKRVAEMHIALASHPEVPDFAPEPITLDASRDWAETVAASADRMLDELRRRRDTLKEGDRTLVDELLAARDVLMSRIHGLLGDDGGLNIRHHGDFHLGQMLIVKDDIYIIDFEGEPRRTLDERRAKAPAARDVAGLIRSIDYSTTAALERALKAASDEPGRLTEALDLWRIRATGAFLDAYRQTMGDSPVWPADIAAADRVLDFFLIEKALYEIDYEIAHRPDWVHVPLVGILRILSPPPEELP

SEQ ID NO: 13662 - DNA, 1617 bp, Rhodopseudomonas palustris CGA009
  CDS (1)..(1617): transl_table=11
atggaaagcgtgacgagcgtgtcgtggtgggcggcgggtgtgctgtaccagatctatccgcgctcgtttcaggacagcaacagcgacggcatcggtgatctgcgcgggatcatcgatcggctcggctatctgtccgatctcggcgtcgacgcgatctggctgtctccgatctttccgtcaccgatggcggactttggctacgatgtcgccgactatgtcggcatcgatccaatcttcggcacgatggacgatttcgacgcgctggtgctcacggcccatgcccgcgggctcaaggtcattctcgatctggtgccgaaccattcatccgaacagcatccctggttcatcgagagccggtcgtcgcggcacaaccccaagcgcgattggtacatctggcgcgaccccgcaccgggcggcggaccgccgaccaattggctgtcggaattcggcggcagcggctgggagtacgacgacgcgaccgggcagtattactatcacgcctttctgaagcagcagccggacctcaactggcgcaatccggaggtgcgggccgcgatctatgacgcgatgcggttctggctgcggaagggcgtcgatggcttccgggtcgacgtgatctggcacctgatcaaggacgaccaatttcgcgacaacccgcccaatccggattttcgccccggcatgccgccgcacgccgcgctgatcccgatttactccgcggatcggccagagacgttggaggtggttgccgagctgcgccgtgtcgtcgacgaattcgatcatcggctgctgattggcgagatctatctgccggtggagcggctggtcgcgtattacggagcggagctgaagggtgcgcagctgcctttcaacttcgcgctgctgtcgacgccgtggcgcgcccgggagattgcgacgctgatcgaacgctacgagcaggcgttgccggccggcgcgtggccgaattgggtgctgggcaatcacgaccggccgcgggtggcgagccgggtcgggccggcacaggcccgcgtcgccgcgatgctgctgctgacgctgcgcggcactccgacgatgtattacggcgacgagctcggcatggagcaggtcgagatcgcgcccgaggacgtgcaggatccgttcgagaagaacgtacccggcatcggtgtcggccgcgatggctgccgcacgccgatgcagtgggacgcgtcggaccaggccggattctcggatgtccggccgtggctgccgctggccccgaacgccacccaggataacgtcgctaatctgcgcgccgacgcgcagtcgatcctaaacctctatcgcgctctgctgcggctgcggcgcgcgctgccccagctggcgctcggcgcttaccagccgctcgcggcggagggcgagctgttgctgtatcgccggcatcatcaggggcagtcgatcttggtggcgctcaatcttggcccggatccgatctcggcggcgtccgacgcgatcgggctcgacggcgaggtgctgctgtcgaccatgctcgatcgcgccggcgaacgcatcggtgccacgctcgacctgcgcggcaacgaaggcatcatcgtcggccgggcgccggaggacgtggtttag

SEQ ID NO: 13663 - protein, 538 aa, Rhodopseudomonas palustris CGA009
MESVTSVSWWAAGVLYQIYPRSFQDSNSDGIGDLRGIIDRLGYLSDLGVDAIWLSPIFPSPMADFGYDVADYVGIDPIFGTMDDFDALVLTAHARGLKVILDLVPNHSSEQHPWFIESRSSRHNPKRDWYIWRDPAPGGGPPTNWLSEFGGSGWEYDDATGQYYYHAFLKQQPDLNWRNPEVRAAIYDAMRFWLRKGVDGFRVDVIWHLIKDDQFRDNPPNPDFRPGMPPHAALIPIYSADRPETLEVVAELRRVVDEFDHRLLIGEIYLPVERLVAYYGAELKGAQLPFNFALLSTPWRAREIATLIERYEQALPAGAWPNWVLGNHDRPRVASRVGPAQARVAAMLLLTLRGTPTMYYGDELGMEQVEIAPEDVQDPFEKNVPGIGVGRDGCRTPMQWDASDQAGFSDVRPWLPLAPNATQDNVANLRADAQSILNLYRALLRLRRALPQLALGAYQPLAAEGELLLYRRHHQGQSILVALNLGPDPISAASDAIGLDGEVLLSTMLDRAGERIGATLDLRGNEGIIVGRAPEDVV

SEQ ID NO: 13664 - DNA, 3336 bp, Geobacter sulfurreducens PCA
  CDS (1)..(3336): transl_table=11
atggctcgcaggacaccgctgtcggacgacacccccctctggtaccgggacgccgtcatctaccaactccacgtgaaggccttcgccgattccgacggcgacggcgtgggggacttccggggcctcatggggaagctcgattatctccagtccctggggatcaccgccatctggatacttcccttctacccgtcccccttgcgcgacgacggctacgacattgccgactactacaacgtcaaccccagctacaacaccctgcgcgaattccgggaattcctcagggaggcccatgcccgccgcatccgggtcatcaccgagctggtcctcaaccacacctcggaccagcacccctggttccagcgtgcccgccgggcaaaaccgggctcggtccaccgggactactacgtctggagcgatacccccgaccggtaccgggaaacccggatcatcttccaggacttcgagacgtccaactggagttgggacccggtggccaaggcctactactggcaccggttctattcccaccagcccgacctcaatttcgacaacccccgggtccagtcggaagtgctccggatcatcgactactggctggggatgggtgtggacggcgtccggctggatgccgtcccctacctcttcgagcgggaaggaaccaactgcgaaaacctgcccgaaacccatgacttcctgaaaaggctccggggacacatggacgcctcgttccccaaccggatgctgctgggcgaggccaatcaatggcccgaggacgcggtggcctatttcggcgagggggacgagtgcaacatgctcttccacttcccgctgatgccccgcatgtacatggccatcgagatggaggaccgcttcccggtggtcgacatcctcgaccagacccccgcgatccccgagggatgccagtgggccatctttctccgcaaccacgacgagctgaccctggagatggtgaccgacgaggagcgggactacatgtaccggatctacgcctcggaccccaaggccaggatcaacctgggaatccggcggcggctggcgcccctcctcggcaaggaccggcggcggatcgaactcatgaacgccctgctcttctccctgcccggcacccccgtcatctactacggcgatgagatcggcatgggggacaactactacctgggggaccgcaacggcgtccgtacccccatgcagtggagccccgaccgcaatgccggtttttccggcgccaacccccagcgcctcttcctgccggtcatcatcgatcccgaataccactacgaagcggtaaacgtggacatccaggagcgcaaccccacctcgctgctctggtggatgcggcgcatcatcgccgtgcgccgccgctaccgggccttcagccgcggcgccatggagatgctctatccggccaaccacaaggtcctggcctttctccgccgccacgaggatgaagtgatcctcgtggtggtcaacctctcccgcttcgcccaggccatcaacctggaccttcaggaattcgccggcatatcccccgaagacctcttcagccggaatcgcttcccggtcatccgcgaagccacctatcccctcaccctgggcccccacgaccacttctggttcctgctgcggcgcagggaagcgccgcttcaggccgaggaagaactgccgcggatcaggcttcggggagaactcccctggtgggagactctccgccagaccaggggcgacgctcacctggaacgggtgaccaccgattacctcaagcgaagcggttggttccggggaaaagcgagggcaatcatcggctacgtgctgcgcgacaccgtgctcctgcggcagggggaacgggtgttccccatcttcttccttgaggtacgctaccaggacggcccgccggaaacctacctgattcccgtggcgttcctcaccggtgccggagcgaaacgggtaagcgccgaatccccccgggcggccatagccgctctttccgtgggggacgaagagggcattctctgcgatgcggtccatgaccgggaattcagggacgcgctccttgccctggcactcggccgtcgccggctccatggcgaggaaaacagtctcatcgtgccggttcacgccggagcaggacgcatcggctccagggaagagatgcgtcatctcgcctccgaactccccaaggcggaacagaccaacagcatcatcacctacggcgatcgccacgtgctcaagctctaccgcaaggtggagccgggcatcaattccgaggtggagatggcgcggttcctcaccgcaaaatcgagctaccccaacgttgcccccttccaggggagcctggaattgcggcatcccggcgtcgagccgggcgctatcggcctgctccagggatacgtacagaaccagggcgacggctggcgactctccctccacctcctgggccagtacttcgagcggattctctcgtgccggggcgagctgccaccgccgccgtcgcgtttttcgagcctcatggacggcagcgcctgcaccgtgccggaaccggcggcggagctcatcggcggcttttatttggagatggctggacttctcggccgccggaccgccgagctccacttggccctcgccgccgggggaaacgacccggcttggcggcccgaggagtattccaccctctaccagcgctccgtgtaccagtccatgcgcaaccaggcccgacgcagcctccagctcctggcccagcaccacaaggacctgcccgcagaggcgttggcatcggccgacaggattctgagcgcggaaaaggaacttctcgcctgtctgcgtcccatcgtcggccggcggattcaggccatgaagagccgcatccacggcaacttcaggttggaaaaggttctcttcaccggcaaggacttcatgataatcgacctggagggcgagccggaccggcccctcggcgagcgccgcatcaaacgctcccccctgcgggatgtggcgggaatgatccgctccttccacaacgccaccctgacggcccttgcccgccacggcgctggccatcccggcgacatcccgctcctggagccctgggcggaggcctgctggtatcacgtgagctgccgctatctggccggctacctggagcagatgggcacaagccccctcgtcccgacggagcggagcgacctcgagaccctcctccgctcgttcctgctggacaatgccctccacgaactcggctatgccctcgccaaccgccccgaacgggtttcctcttacctgcgcggggtcgagacggtgctgcgggagttccggtaa

SEQ ID NO: 13665 - protein, 1111 aa, Geobacter sulfurreducens PCA
MARRTPLSDDTPLWYRDAVIYQLHVKAFADSDGDGVGDFRGLMGKLDYLQSLGITAIWILPFYPSPLRDDGYDIADYYNVNPSYNTLREFREFLREAHARRIRVITELVLNHTSDQHPWFQRARRAKPGSVHRDYYVWSDTPDRYRETRIIFQDFETSNWSWDPVAKAYYWHRFYSHQPDLNFDNPRVQSEVLRIIDYWLGMGVDGVRLDAVPYLFEREGTNCENLPETHDFLKRLRGHMDASFPNRMLLGEANQWPEDAVAYFGEGDECNMLFHFPLMPRMYMAIEMEDRFPVVDILDQTPAIPEGCQWAIFLRNHDELTLEMVTDEERDYMYRIYASDPKARINLGIRRRLAPLLGKDRRRIELMNALLFSLPGTPVIYYGDEIGMGDNYYLGDRNGVRTPMQWSPDRNAGFSGANPQRLFLPVIIDPEYHYEAVNVDIQERNPTSLLWWMRRIIAVRRRYRAFSRGAMEMLYPANHKVLAFLRRHEDEVILVVVNLSRFAQAINLDLQEFAGISPEDLFSRNRFPVIREATYPLTLGPHDHFWFLLRRREAPLQAEEELPRIRLRGELPWWETLRQTRGDAHLERVTTDYLKRSGWFRGKARAIIGYVLRDTVLLRQGERVFPIFFLEVRYQDGPPETYLIPVAFLTGAGAKRVSAESPRAAIAALSVGDEEGILCDAVHDREFRDALLALALGRRRLHGEENSLIVPVHAGAGRIGSREEMRHLASELPKAEQTNSIITYGDRHVLKLYRKVEPGINSEVEMARFLTAKSSYPNVAPFQGSLELRHPGVEPGAIGLLQGYVQNQGDGWRLSLHLLGQYFERILSCRGELPPPPSRFSSLMDGSACTVPEPAAELIGGFYLEMAGLLGRRTAELHLALAAGGNDPAWRPEEYSTLYQRSVYQSMRNQARRSLQLLAQHHKDLPAEALASADRILSAEKELLACLRPIVGRRIQAMKSRIHGNFRLEKVLFTGKDFMIIDLEGEPDRPLGERRIKRSPLRDVAGMIRSFHNATLTALARHGAGHPGDIPLLEPWAEACWYHVSCRYLAGYLEQMGTSPLVPTERSDLETLLRSFLLDNALHELGYALANRPERVSSYLRGVETVLREFR

SEQ ID NO: 13666 - DNA, 1335 bp, Mycobacterium avium subsp. paratuberculosis str. k10
  CDS (1)..(1335): transl_table=11
gtggccagtgtcgtgaccggacccgactgggtccagcacgtcatctggtggcaggtctacccgctggggttcgtcggcgcgtacccgctaccgcagtccagcgagccgccgcaaccggaacaacaccggttgcggcggctcgtcgactggttcgaccacgcgatcgaactcggcgcctccggcatcgccctgggcccgatcttcgcctcccggacccatggctacgacaccaccgaccactaccgcatcgatccccggctcggcgacgacaccgacttcgaccacctcatcgcgcaagcgcaccggcgcggcctgcgggtgctgctcgacggcgtgttcaaccacgtcggtgtggacttcccgcggtatcgcgccgccatcgactctgacgatcacgccgccgcccgctggtttcgcggtagtcgcgggcgttttcacaccttcgagggccacgacggcctgatcaccctcaaccacgacaatcccgaggtcgtcgactacaccgtcgacgtcatggcgcactggctgggacgcggcgccgacggctggcgtctggacgcggcttacgctgtgccggaaacgttttgggcggccaccctgccccgggtgcgcgaccgctacccgcaggcctggttcgtcggcgaattgatccacggcgactacgccgcggtggtgcgggccgccggcttcgactctgccacccagtacgagctgtggaaggcgatctggagcagcctcaacgacggcaacttctatgaactggactgggcgctgcagcggcacaacgcatttctgggccggttctcgccgctgaccttcatcggcaaccacgacgtcacccggatcgccagccagctgaacaaccccgcgcacctggcgcacgccctggtgctgctgctgacggtcggcggggtgcccagcgtgtacgccggcgacgagctcggctttcgcggggtcaaggaggaacggttcggcggcgacgacgcggtacggcccgagttcggctctcccccaataccattggatgacttcggcacagaggtgtggaggctgcaccaatacctgatcgggctgcgccgccgccatccctggctgcacggggccaccaccaccgcgctgctgctgcaaaaccggcactacgtgtacgagacccgcagcggcgatgaggccctgctgatcgtgctcaacatcggcgatgagccgctgcgggtttcgctccgcgagctgggcggccggcgcgggcgggtgatcggcggctcggcggccccaccgccggaggtgctcgacacggtggtcgtcgagccgcagggctggcggatcctgagcccgatttag

SEQ ID NO: 13667 - protein, 444 aa, Mycobacterium avium subsp. paratuberculosis str. k10
MASVVTGPDWVQHVIWWQVYPLGFVGAYPLPQSSEPPQPEQHRLRRLVDWFDHAIELGASGIALGPIFASRTHGYDTTDHYRIDPRLGDDTDFDHLIAQAHRRGLRVLLDGVFNHVGVDFPRYRAAIDSDDHAAARWFRGSRGRFHTFEGHDGLITLNHDNPEVVDYTVDVMAHWLGRGADGWRLDAAYAVPETFWAATLPRVRDRYPQAWFVGELIHGDYAAVVRAAGFDSATQYELWKAIWSSLNDGNFYELDWALQRHNAFLGRFSPLTFIGNHDVTRIASQLNNPAHLAHALVLLLTVGGVPSVYAGDELGFRGVKEERFGGDDAVRPEFGSPPIPLDDFGTEVWRLHQYLIGLRRRHPWLHGATTTALLLQNRHYVYETRSGDEALLIVLNIGDEPLRVSLRELGGRRGRVIGGSAAPPPEVLDTVVVEPQGWRILSPI

SEQ ID NO: 13668 - DNA, 1773 bp, Mycobacterium avium subsp. paratuberculosis str. k10
  CDS (1)..(1773): transl_table=11
atgaacgacgcaagagaagctgtcgaacaccatcccgaggaaggcagtcacgtccaggacggtgtcgtcgagcaccccgaggccgaggacttcgacaacgccgccgcgctgcccaccgacccgacgtggttcaagcacgccgtgttctacgaggtgctggtccgcgcgttcttcgacgccaacgccgacggcgccggcgacctgcgcggtctgctggcgcagctggactacctgcagtggctgggcatcgactgcatctggctgcccccgttctacgactcgccgctgcgcgacggcggttacgacatccgggatttctacaaggtgctgccggagttcggcacggtcgaggatttcgtggcgctgctcaacgccgcgcacgagcggggcatccgggtgatcaccgacctggtgatgaatcacacgtcggagtcgcacccctggttccaggagtcccggcacgaccccgacggaccgtacggcgacttctacgtgtggagcgacaccagcgaccgctacgccgatgcccgcatcatcttcgtcgacaccgaggagtccaactggacgttcgacccggtgcgccgccagttttactggcaccggttcttctcccaccagcccgacctgaactacgacaacccggccgtgcaggaagccatgatcgacgtgatccggttctggctcgggctgggaatcgacgggttccggctggacgcggtgccctacctgttcgagcgggagggcaccaactgcgagaacctgccggagacgcacgccttcctcaagcgggtccgcaaggtcgtcgacgacgagttcccgggccgggtgttgctggccgaggccaaccagtggccggccgacgtggtcgagtatttcggcgaccccagcaccggcggcgacgaatgccacatggcgttccacttcccgctgatgccgcgcatcttcatggccgtgcgccgcgagtcgcgattcccgatctcggagatcctggcccagacgccgcagatccccgagatggcgcagtgggggatcttcctgcgcaaccacgacgagttgacgctggagatggtcaccgacgaagagcgcgactacatgtacgccgagtacgccaaggatccgcggatgaaggccaacgtcggcatccgccgccggctggcgccgctgctggacaacgaccgcaaccagatcgagctgttcaccgccctgctgctgtccctgcccggctcgccggtgctctactacggcgacgagatcggcatgggcgacgtgatctggctgggggatcgcgacggggtgcgcacgccgatgcagtggacgccggaccgcaacgccggcttctccaaggccaaccccggccggctgtatctgccacccagccaggacccggtgtacggctaccaggcggtcaacgtggaggcgcaacgcgacacctcgacgtcgctgctcaacttcacccgcaccatgctcgccgtgcggcgccggcacgaggccttcgcgatcggcacgttcgaggagctcggcggatccaacccgtcggtgctggcgttcgtgcggcaggtgtccaacgacggggacaccgtgctgtgcgtcaacaacctgtcgcggttcccgcagccgatcgagctgaatctgcagcactggagcgggtgcatcccggtcgagctgaccgggcacgtggaattcccccgcatcgggcacctgccctacctgctgacgctgccggggcacggtttctattggttccagctgaccgcatgcgaggaggacacatga

SEQ ID NO: 13669 - protein, 590 aa, Mycobacterium avium subsp. paratuberculosis str. k10
MNDAREAVEHHPEEGSHVQDGVVEHPEAEDFDNAAALPTDPTWFKHAVFYEVLVRAFFDANADGAGDLRGLLAQLDYLQWLGIDCIWLPPFYDSPLRDGGYDIRDFYKVLPEFGTVEDFVALLNAAHERGIRVITDLVMNHTSESHPWFQESRHDPDGPYGDFYVWSDTSDRYADARIIFVDTEESNWTFDPVRRQFYWHRFFSHQPDLNYDNPAVQEAMIDVIRFWLGLGIDGFRLDAVPYLFEREGTNCENLPETHAFLKRVRKVVDDEFPGRVLLAEANQWPADVVEYFGDPSTGGDECHMAFHFPLMPRIFMAVRRESRFPISEILAQTPQIPEMAQWGIFLRNHDELTLEMVTDEERDYMYAEYAKDPRMKANVGIRRRLAPLLDNDRNQIELFTALLLSLPGSPVLYYGDEIGMGDVIWLGDRDGVRTPMQWTPDRNAGFSKANPGRLYLPPSQDPVYGYQAVNVEAQRDTSTSLLNFTRTMLAVRRRHEAFAIGTFEELGGSNPSVLAFVRQVSNDGDTVLCVNNLSRFPQPIELNLQHWSGCIPVELTGHVEFPRIGHLPYLLTLPGHGFYWFQLTACEEDT

SEQ ID NO: 13670 - DNA, 1725 bp, Lactobacillus johnsonii NCC 533
  CDS (1)..(1725): transl_table=11
atgcaacttgcagctttaaaacacagaactgaaagtgaaaattgttttgttattgatcattcacacgttaaaattagacttcatacggcaaaagatgatgtggaaaaagtaattgttcattacacggataactatctcccaccaaaacaagctaaagaacttgaaatggagaaaataggtagtggtcaagttaatgattactggggagcaaccttaactgctccatatcaccgaattaaatatacttttgaagtgataggcaaagacggaagtcatgtgatcttcggtgatcgtagtattgaaaaatttagcgataaaaagttaagagaagatggaatgtattttaaagttccgtacttccatgatattgatcgcatcaagactccaaaatggcttaaagatattgtttggtatcaaatttttccagagcgttttgctaatggcgataaaagtaatgacccagcaaatgttaaagaatggaatccagaagatcatccaggcagagaagatttttatggtggagacttacagggagttttagatcatctagatgatctacagaaattaggagttacgggattatatttctgcccaatttttaaggcaagttctaatcataaatatgacacaattgattatttacaagtagatccagcttttggagacaaggatttgtttgcaaaagtagttaatgaagcacataagcgtgggatgaaagtgatgcttgatgctgtatttaatcacttaggtgatcaatcaatgcagtggcaagatgtcgttaaaaatggcgaaaaatcacgttttaaagattggttccacattaattcatatcctgttgaaccatatcgggacccaagtaaaggtgaaaataatccaccatatgaaacttttgccttcgaaaaacatatgcctaagttaaatacggctaacccagaagtacaggactttttattagaaattgcgacctactgggtaaaatattttgatattgatgcttggcggctagatgttgcaaatgaagttgaccaccatttctggaagagattccatgatgaattagttaaaataaagcctgatttttatattgctggggaaatatggcattcagctcgtccatggcttcagggggatcaatttacaggtgtaatgaattatccatatactttacaaattgaagaccacttctttaaacataaaatggatgctaaagaccttagtgaacacctaactgatcagttaatgatgtatccagatatggttgaccaggctatgatgaatatgcttgattcccacgatacggctagaattttaactttagcaaaagacaatcaagatttagctttgcaagcagttgcgtatgaatttgttcaacctggagtgccatgtatttactatggaacagagatggggatgagcggtgataatgatccggattgtcgtaaaccaatggattggagtaagataaatggtccggtatggcaaagagttcatgaattagtgaaattcagactagatcatagtgataccttaaataaaggtactgttaagttaacggtaacagaaaaaggacttctaaaagttgaacgaacaggcaaagaaacaataaaggcctactataataccggtaaacataatgtaaaaattgataaaacagcagctcttagtcagaattataaagcgggagtgttagcgccaaatggctttttgattgaggttaaagcttaa

SEQ ID NO: 13671 - protein, 574 aa, Lactobacillus johnsonii NCC 533
MQLAALKHRTESENCFVIDHSHVKIRLHTAKDDVEKVIVHYTDNYLPPKQAKELEMEKIGSGQVNDYWGATLTAPYHRIKYTFEVIGKDGSHVIFGDRSIEKFSDKKLREDGMYFKVPYFHDIDRIKTPKWLKDIVWYQIFPERFANGDKSNDPANVKEWNPEDHPGREDFYGGDLQGVLDHLDDLQKLGVTGLYFCPIFKASSNHKYDTIDYLQVDPAFGDKDLFAKVVNEAHKRGMKVMLDAVFNHLGDQSMQWQDVVKNGEKSRFKDWFHINSYPVEPYRDPSKGENNPPYETFAFEKHMPKLNTANPEVQDFLLEIATYWVKYFDIDAWRLDVANEVDHHFWKRFHDELVKIKPDFYIAGEIWHSARPWLQGDQFTGVMNYPYTLQIEDHFFKHKMDAKDLSEHLTDQLMMYPDMVDQAMMNMLDSHDTARILTLAKDNQDLALQAVAYEFVQPGVPCIYYGTEMGMSGDNDPDCRKPMDWSKINGPVWQRVHELVKFRLDHSDTLNKGTVKLTVTEKGLLKVERTGKETIKAYYNTGKHNVKIDKTAALSQNYKAGVLAPNGFLIEVKA

SEQ ID NO: 13672 - DNA, 1668 bp, Lactobacillus johnsonii NCC 533
  CDS (1)..(1668): transl_table=11
atgaatgattggaaaaagaaagctgtagtgtatgaggcatatgtacaaagttttaaagattcaaatggagatggaattggagatattcagggactaatagaaaagctagactatataaaaaatttaggtgccaatgttatctggttaactccaatttttaaatctcctttagtagacaatggttatgatattgcagattatcaggccattaatccaatttatgggacaatggatgattttaagaaattattgagtaaggctcatgaaaaagggttgagaattgtcctggatttggttgttaatcatacttctgaccaacataaatggtttaaagaatcccaaaaaaacaaagaaaataagtattctgattattatatttggcgtgatccaaaagaagatggaagtgcacctactaatttaggctcagcttttggtggttcagcttggacctatgttccagaaagaaatcaatattatttacacctttttgcaaaacaacagccagatttgaactgggataatccagaagtaagaaatgatatttataaaataatgatgttttggttagacatgggagttgatggctttagaatggattccattagctttatatccaaaccaagtaaatttgaagatgcgcctttagaagataataaagagtatggcgcttattactatggatcagctaacggtccacatattcatcaatatttacaagagatgaacagagaagtactaagtaaatatgatgtaattgctattggagaaacgccacatacaagtgctaaagaagcaagattatttgttgaacctgaacgacatgaattagatatggtatttcaatttgaacatatgcatgttgattatggaaaatatggaagatactctgatgtaacttttaagatgagtgatctgcgcaattctatgtcgagttggcaaaatagtctttcttggaattcaaattatcttggaaatcatgatcaacccagaattgtctctagatttggaaatgataataagtatcgaaaagaatcagcaaaaatgttggctatagtatctttattacaaaagggtactccatttatttttcaaggtgaagaaattggaatgaccaatttacatattaagaaaatagatgagttaaaggaccttgaagcacataatatatataattttttaagatcaaaaggtattagtgaagatgacgcattgaatatggtcaacaggaaaactagagataatgcccgtacaccaatgcaatgggatgaatcggaacaaggtggtttttcaagtgaaacgccatggatggaagttaatccaaattataaagaaattaatgtgaagaaagatttgaaagatccagactcgatatatcatttttatcaaaagattttgaaattaagaaataataatcaagtattgttagatggaaagtatgagctagtttcttctgatgattctgcagtttttgcctatactcgaagtacggggaaagaaaaattggcagttatttgttcttttgtcccatataaggttaaatataatttgcctactgattttgtaaatagaaatgaattgcttttatctagctatggtgacaataaagcaaaagcctcaaatgttatgtatttaaggccttatgaaggagttgtgattagacgtgagtag

SEQ ID NO: 13673 - protein, 555 aa, Lactobacillus johnsonii NCC 533
MNDWKKKAVVYEAYVQSFKDSNGDGIGDIQGLIEKLDYIKNLGANVIWLTPIFKSPLVDNGYDIADYQAINPIYGTMDDFKKLLSKAHEKGLRIVLDLVVNHTSDQHKWFKESQKNKENKYSDYYIWRDPKEDGSAPTNLGSAFGGSAWTYVPERNQYYLHLFAKQQPDLNWDNPEVRNDIYKIMMFWLDMGVDGFRMDSISFISKPSKFEDAPLEDNKEYGAYYYGSANGPHIHQYLQEMNREVLSKYDVIAIGETPHTSAKEARLFVEPERHELDMVFQFEHMHVDYGKYGRYSDVTFKMSDLRNSMSSWQNSLSWNSNYLGNHDQPRIVSRFGNDNKYRKESAKMLAIVSLLQKGTPFIFQGEEIGMTNLHIKKIDELKDLEAHNIYNFLRSKGISEDDALNMVNRKTRDNARTPMQWDESEQGGFSSETPWMEVNPNYKEINVKKDLKDPDSIYHFYQKILKLRNNNQVLLDGKYELVSSDDSAVFAYTRSTGKEKLAVICSFVPYKVKYNLPTDFVNRNELLLSSYGDNKAKASNVMYLRPYEGVVIRRE

SEQ ID NO: 13674 - DNA, 1665 bp, Bacillus cereus ATCC 10987
  CDS (1)..(1665): transl_table=11
atgaataaaacatggtggaaagaagcggttgcttatcaaatttacccacgtagctttatggattcaaatggtgatggtattggggatttacaaggtattattgcaaaactggattatttaaaagatttaggtatagatgtaatttggatttgtccaatgtataagtcacctaatgatgataatggttatgacattagtgattatcaagatattatggatgagtttggtacgatggaggacttcgatgctttactagatgaagttcataagcgtgatatgaagcttattattgatttagttattaatcatacaagtgatgaacatccatggtttattgagtctcgttcatctaaagacaatccgaagcgtgattggtatatttggcatgatggtaaagatggtgcggaaccaaacaactgggaaagtatttttaatggttcggcatgggaatacgatgaagtaacaggacaatattatttacacttattctcacgtaaacaaccagatttaaactgggagaataaagaagttcgcgaagtgttatacgatacagttaattggtggcttgataaaggaattgatggtttccgtgtggatgcgatcagccatattaaaaaagaggatggctttaaagatatgccaaatccaaaagaactaaagtatgtaccatcttttgataaacatatgaatgtggatggtattcaacctttattagaagagttaaaagaaaatacattttctaagtacgatattatgactgtcggtgaagcgaatggtgttaagattgaagatgctgagctttgggttggagaagaacaaggtaagttcaatatggtattccaattcgaacatttaagcttatgggatgcagaaaagaagaaagatcttgatgttgtagggttgaaaaaagtattaacgaaatggcaaaaaggtctagaaaataaagggtggaatgctttatatattgagaatcacgataagccacgtatcgtttcaacttggggagatgataaacaatattggcgtgaaagtgcgacagctcttggagcgatgtatttctttatgcatggtacaccgtttatttatcaaggacaagaaattgggatgacaaatgttcaattcccaaatattgaagattacgatgatgtagcaattaaaaatttatatcgtgagaaaattgcagagggtgtatctcatcaagatatgatggagattatatgggcttcttgccgcgataattcacgtacacctatgcagtggaacgatgagatgaatgctggcttcacaacaggtgccccttggtttgggatgaatccaaactataaagaaattaatgttgaaaagcaaaagagtgaagagaactctattttcaatttctataagaaaatgattgctttgaaaaaagagcacgatgtactgaattatggtacgtacgatttacttttagaagatgatccgcaaatttatgcatatactcgtacattaagcgatgaaaaaatcgttgtaattagtaatatctcaaaagaggaagctgtatataatgagggttcattcgcgatagaacgcaaacgtttgcttttaaataactacgaagttgcggaacatgaacaagtaactacaatcacgttaaagccttatgaaacaagggtttatcgtatttcataa

SEQ ID NO: 13675 - protein, 554 aa, Bacillus cereus ATCC 10987
MNKTWWKEAVAYQIYPRSFMDSNGDGIGDLQGIIAKLDYLKDLGIDVIWICPMYKSPNDDNGYDISDYQDIMDEFGTMEDFDALLDEVHKRDMKLIIDLVINHTSDEHPWFIESRSSKDNPKRDWYIWHDGKDGAEPNNWESIFNGSAWEYDEVTGQYYLHLFSRKQPDLNWENKEVREVLYDTVNWWLDKGIDGFRVDAISHIKKEDGFKDMPNPKELKYVPSFDKHMNVDGIQPLLEELKENTFSKYDIMTVGEANGVKIEDAELWVGEEQGKFNMVFQFEHLSLWDAEKKKDLDVVGLKKVLTKWQKGLENKGWNALYIENHDKPRIVSTWGDDKQYWRESATALGAMYFFMHGTPFIYQGQEIGMTNVQFPNIEDYDDVAIKNLYREKIAEGVSHQDMMEIIWASCRDNSRTPMQWNDEMNAGFTTGAPWFGMNPNYKEINVEKQKSEENSIFNFYKKMIALKKEHDVLNYGTYDLLLEDDPQIYAYTRTLSDEKIVVISNISKEEAVYNEGSFAIERKRLLLNNYEVAEHEQVTTITLKPYETRVYRIS

SEQ ID NO: 13676 - DNA, 1710 bp, Anopheles gambiae str. PEST
  CDS (1)..(1710)
atggactggtggcaaaggacggtgttctatcagatctacccgcgctcgttcatggactcgaacggggacggggtgggcgatctgcgcggcataacgagccggttggagcatctgaaggatgccggcattggtgcgacctggctatcgcccatcttccgatcgccgatggttgacttcgggtacgacattgcggactataccgccatccagccggagtacgggacgatggaggactttgaggcgctgctggcggaagcgaagcggctcggcatcaagatcatcctggactttgtgcccaatcacacgagcgaccagtgcgaatggttccggcggtcggtggcgcgcgaacacccgtacaccgattactacgtgtggcaggatgggcgcgtcgacccaaacggtaatgggacggcccgtttgccaccgaacaattggcaatcggtattctacggttccgcctggacgctgcatccggaccgcggtcagtactatttgcatcagtttaccgcccagcagccggatctgaactttcgcaacccggccgtggtggacgagatgcgcgaggtgctgcggttctggctgcgcaagggtgtggccggctttcgcatcgacgccgttaatcatctgttcgaggcggacggctttccggacgagccggaaacgggcacggaccgggatccactgtcctacggctttacgcaccacatctacacgaaggatttgctcgaagactacgacatggtgtaccagtggcgagcgctgctggacgactggagccgcgagcatggaggcgacgctcgcatcataatgaccgaagcgtacgccaacattaccttcaccatgaagtactaccacgcggaggaggacgacggcgaccagccggacggtcaaccgcgagccgctgcgggttcacacatgcccttcaactttctgctcatcaccgacctgaaccgtgactcgagtgcgcaggactttgtgtacacgatacagaagtggctcacgtacatgccgcgggtgggggccaccgccaactgggtgctgggcaatcacgatcagccgcgctggctgaacgcgatgccggccggcgcccgggcgaactgggtgctgggcaatcacgatcgtccgcgcattgcctcgcggtacgggcgcgatcttgcctcgagcctggccgtgctggagatgacactgcccggcattgcggtcgtgtactatggtgaggagatcggtatggaggacaaccgggacattacgttcgaggagacgcaggacccgcaggccgccaacacgaacccggacgtgtatcagcagtttacgcgcgatcccgtccgcacaccgttccagtgggatgcgacggcgtacgctgggtttaccgtagctagcgcccagaagacgtggctgccggtacatccgaactatcgggaggtgaatctggccgcccagaaggcggcgagcaacagtatgttcaagctgtaccagcggctgatcaagctgcgcaaggagcacacgttcatgcacggtgatttcgagtcgaaggtgctgctgaacaatgtgtttggctatacgcgcacgctcgagggcgagcagtcgtacgcggtcgtggtcaatctgaacgataacgatgtgaatgtgaacctgcaggagctgcacgaggacattgacacggcccgggtggcgcttacgtcgctcgacgctcgcatgaaggagggctag

SEQ ID NO: 13677 - protein, 569 aa, Anopheles gambiae str. PEST
MDWWQRTVFYQIYPRSFMDSNGDGVGDLRGITSRLEHLKDAGIGATWLSPIFRSPMVDFGYDIADYTAIQPEYGTMEDFEALLAEAKRLGIKIILDFVPNHTSDQCEWFRRSVAREHPYTDYYVWQDGRVDPNGNGTARLPPNNWQSVFYGSAWTLHPDRGQYYLHQFTAQQPDLNFRNPAVVDEMREVLRFWLRKGVAGFRIDAVNHLFEADGFPDEPETGTDRDPLSYGFTHHIYTKDLLEDYDMVYQWRALLDDWSREHGGDARIIMTEAYANITFTMKYYHAEEDDGDQPDGQPRAAAGSHMPFNFLLITDLNRDSSAQDFVYTIQKWLTYMPRVGATANWVLGNHDQPRWLNAMPAGARANWVLGNHDRPRIASRYGRDLASSLAVLEMTLPGIAVVYYGEEIGMEDNRDITFEETQDPQAANTNPDVYQQFTRDPVRTPFQWDATAYAGFTVASAQKTWLPVHPNYREVNLAAQKAASNSMFKLYQRLIKLRKEHTFMHGDFESKVLLNNVFGYTRTLEGEQSYAVVVNLNDNDVNVNLQELHEDIDTARVALTSLDARMKEG

SEQ ID NO: 13678 - DNA, 1800 bp, Anopheles gambiae str. PEST
  CDS (1)..(1800)
atggccctctactactggctagctttactactgttgggctggtctactgtgaccgcccagaaggattggtgggaaagtgcgagcttctatcaaatctatccgcgatcgtttcaagatagtaacggcgatggaataggcgatcttaatggcatcaaaagtcggttgccgtatctgaagtcactcggtatgactgcattttggctttccccgatctacccttcgccgatggccgactttgggtatgatatctccaactttatggacattcatccgagctttggaacgttggctgactttaagcagctggtggaagaagcgaaaaaactgcaattacgcatcatcctcgacttcgtgcctaaccattcgagcgacgagcatgagtggttcaagaaaagcgttcagcgagtaagtgggtacgaagactattacgtgtggcaggatcccaaaccgggcacggaacgcgaccctccaaacaactgggttgcagcatggtacggttcggcgtgggaatggaatgacgaaagaaagcaattttatttgcaccagtttcacaagaagcagcccgatctgaactaccgcaacccggccgtggtgcaggctatgaaggatgtgttgcgcttctggttggaccagggcgtcgacggcttccgtattgatgcggtcccgtggctgttcgagacggtgggtttcccggacgaacctgttagcggtcattccaccgatccgttaagtcagaactaccttacccacatttatacgctcgatcaaccggaaaccgttgacatggtgtatcaatggcgggaattgatggatcagtacaaacaagagcacaataccaccaccaaagtgctcatgaccgaggcatggtcctcgttggatgttgtaaaaacgtacttcaacgacagtaacaaccggcaaggatcgcaaatgccgttcaacttccagttaatcatgcggctggatcaaaattctaaagcatccgattttcagacggttattaactcgtggctggatatcattcctcctggccacacgcccaactgggtgcttggtaatcacgacaaacgtcgtgtttcgtcacgaatgggtggagaccatatggtagacataatggctatgatcgagctcaccttacccggcataacggtcacttaccagggagaagaaattggaatgcatgacgttgatatctcgtgggcggacactcaagatcctgctgcatgccagctgaccgaagagacgtatcaggaaggtacacgcgacccagccagaacaccgttccagtgggattctactgcaaacgcaggttttacgaacgcttctgtaaaaccgtggcttccgctagctaccgattatccgctggtgaacgtaaaaacacaacaagaatcagcccaaaacagtcatataaaggtgttcaaggagctgatgaacttacgcggcacgaacacgcttatctggggctcgtttaagtcactggtacttggcgaaaatgtgtacgctatactgcgttctttccccaacgacaaacgaacatatgtcgtgctggcaaacattggctccaagagcgaaataattgacgctacaaaactggacaacagtttaccgaacgagcttgtgtttcgcgtggtaagcgtatcgtcaaatcatatcaccggagaatcggtcgcaacaaacaacattcttttacagccttacgaagccgtagttttggctaaccatgcaattcgactggcgcagcagctttatgtattgatcggtgcttttggtatgttggtgggtgtgcaattgtttaaggcgtaa

SEQ ID NO: 13679 - protein, 599 aa, Anopheles gambiae str. PEST
MALYYWLALLLLGWSTVTAQKDWWESASFYQIYPRSFQDSNGDGIGDLNGIKSRLPYLKSLGMTAFWLSPIYPSPMADFGYDISNFMDIHPSFGTLADFKQLVEEAKKLQLRIILDFVPNHSSDEHEWFKKSVQRVSGYEDYYVWQDPKPGTERDPPNNWVAAWYGSAWEWNDERKQFYLHQFHKKQPDLNYRNPAVVQAMKDVLRFWLDQGVDGFRIDAVPWLFETVGFPDEPVSGHSTDPLSQNYLTHIYTLDQPETVDMVYQWRELMDQYKQEHNTTTKVLMTEAWSSLDVVKTYFNDSNNRQGSQMPFNFQLIMRLDQNSKASDFQTVINSWLDIIPPGHTPNWVLGNHDKRRVSSRMGGDHMVDIMAMIELTLPGITVTYQGEEIGMHDVDISWADTQDPAACQLTEETYQEGTRDPARTPFQWDSTANAGFTNASVKPWLPLATDYPLVNVKTQQESAQNSHIKVFKELMNLRGTNTLIWGSFKSLVLGENVYAILRSFPNDKRTYVVLANIGSKSEIIDATKLDNSLPNELVFRVVSVSSNHITGESVATNNILLQPYEAVVLANHAIRLAQQLYVLIGAFGMLVGVQLFKA

SEQ ID NO: 13680 - DNA, 1509 bp, Anopheles gambiae str. PEST
  CDS (1)..(1509)
atgcttgctggggcactctctttagtggcatgtttagatcttaccgtaccaacgtcccgcgattggtgggaaaaggctgccttctatcaaatctatccccgatcgttcatggacagtgatggggatggtgtgggcgatcttaacggaattgcttcgaagctgccgtacctgaagtcgatcggagtgaaggcgttctggatgtcaccgatctacaaatcaccgatggtcgattttggctatgatatttctgactttcgggacattcacgaggagtttggaacgatggctgactttgagcggttggtggagcaggcgcacgggctcggcctgaaggtgatcatggactttgtgccgaaccattcgagcaatctgcacgagtggttcgtaaagtcggaacagcgagagccgggctatgaggactattacgtgtggcatgatgggaaggttaatccggcgggcggtaggaacttaccaccaaacaattggattcaagccttccgtggcagtgcatggcagtggagtgatcagcggcaacagtactacctacaccagttcaccgtcgagcaaccggacttaaactaccgaaatccgacggtcgttcaggagatgaaagatgtgctgctgttctggctgggcaagggcgtggacgggttcaggatcgatgccgtgccgacgctgtacgaagatacgcagctgcgcgacgagccagtgagcgggctgacggatgatcccgaagataccaactacctgcgacacatctacacgcaggatctgccagaaacggtcgagatggtgtacgaatggcgggaactgatcgatgcattccaggcagagcatggcggcgagacgcgcgtcatcatgacggaggcctactcaacgctagatgtgatcaagacgtattacgcgagcagtacaggacggttgggatcccatatgccgttcaactttcgactcattaccgaagtggacaagcaatcgacggctgcggactacgtgaaggtggtcaaggattggatgagcatactgcctgccggacaggtgccaaactgggtgatgggcaatcatgatcgtccacgcgttgccacgcgtctcggggaggaacgaattgacgcactgaacatggtgctgctgtccctctccggcgcaagtgtcacataccaaggggaagagattggcatgaccgatgtgtacatctcctgggaggacaccgtcgatccggcggcctgcaatgcaggcaaagacctatacgcggaaaagtcacgcgatccgtgccgcacaccgttccagtgggatgatacggcaatggctgggtttactaccggctccaaaacctggctacccgtcggcgaccggtacagggaagtgaacgtgcaggcgcaacttgcggccgaaaaaagtcacctcaaagtgtaccaatcgatgatggaattgcgcaagacgaaaacttaccagctcggtacggtgaaagcagttgcgctcggcgattccgtgctggcggttgtgcgatag

SEQ ID NO: 13681 - protein, 502 aa, Anopheles gambiae str. PEST
MLAGALSLVACLDLTVPTSRDWWEKAAFYQIYPRSFMDSDGDGVGDLNGIASKLPYLKSIGVKAFWMSPIYKSPMVDFGYDISDFRDIHEEFGTMADFERLVEQAHGLGLKVIMDFVPNHSSNLHEWFVKSEQREPGYEDYYVWHDGKVNPAGGRNLPPNNWIQAFRGSAWQWSDQRQQYYLHQFTVEQPDLNYRNPTVVQEMKDVLLFWLGKGVDGFRIDAVPTLYEDTQLRDEPVSGLTDDPEDTNYLRHIYTQDLPETVEMVYEWRELIDAFQAEHGGETRVIMTEAYSTLDVIKTYYASSTGRLGSHMPFNFRLITEVDKQSTAADYVKVVKDWMSILPAGQVPNWVMGNHDRPRVATRLGEERIDALNMVLLSLSGASVTYQGEEIGMTDVYISWEDTVDPAACNAGKDLYAEKSRDPCRTPFQWDDTAMAGFTTGSKTWLPVGDRYREVNVQAQLAAEKSHLKVYQSMMELRKTKTYQLGTVKAVALGDSVLAVVR

SEQ ID NO: 13682 - DNA, 1716 bp, Gibberella zeae PH-1
  CDS (1)..(1716)
atgggtagtacaggtcaaactctacgagcttggtggaaagagagctcggtatatcaaatataccctgcgtcttaccaagactccacaggctctggtgttggtgacctcaaaggtatcatctctcgagttgactacctcaaagacttgggcgttgatatcatatggctttctcccatcttcaagagtccccaggttgatatggggtacgatatcagcgactactacaccgttgatcctccgtatggcaacgtctctgatgttgatgttctcaaagacaaactacatgagcgaggaatgaaacttgttctcgatttggtgatgaaccacaccagcgaccaacacgagtggttcaaggagtctcgcaagtccaaggacaacccctaccgagactggtatatctggaagcctgcaaagtacgatgcagacggaaacagacacccccccaacaactgggatgctcacttccagggaagtgcctgggagtacgacgagatcacagatgagtactacctctgcctcttctgcaagcagcagccagatctcaactgggagaacccagcggtcagaaaacaggtccaccaggtaatgcgcttctggcttgaccgaggcgtcgatggtttccgcatggacgtcatcaactttgtcagcaaggaccaagcattccccgactcagacaagactgtcctccgtgggacagagtactatgcatgtggtcctaggtgtcatgagttcctcaaggaaatcggtagcattctccaggagtacgatgcctttagtgttggtgaaatgccttgtgttcatgatgagagggagttgatcaaggctgtgcacggtgaccgaggagagctgagcatgatcttccattttgagctgatggatcttgatcacggcgtcgaaggcaagttcacgcccagatcctggaaactatcagagctgaaggctacaaccctcaagtggcagaggttcatgtacgacaacgaaggctggaacgcgctgtacctggagaaccacgatcagccacgagctgtcagccgcttcgtccacgatgatcctgagcatcgcgttgccagcgcgaaactgatcgcactcttcctcggcttccagtcaggcacacccttcatctaccaaggccaggagattggtatgaccaatgttccgaaggactgggacttggaagagtacaaggaccttgactgtcttaaacattgggatcttcacaagaatgatgatgttgcagcccagaattcctacaaggtcgagtatcaaaggaagtctcgtgacaacgctcgtacccctatgcaatgggatgcaagcccaaacgcaggcttcaccactgctgatgccaacccgtggatgcgcgtcaacgacaactataccgacatcaacgctgcttcacagacatcagattccaactctgtgtacagctgttatcgtcaagtacttgggaagcgcaaggagtacaaggatatctttgtctatggtaacttccaactcgtggacgagtccaacgacaagatctttgcgtactcacgacgggctgatagcggggagacggctctcgtcgtgtgcaacttctcagtggattccgttgcatggaagttacctggcgaggctcgagaggtgctgactagtccagcgggaaggacactcaatgacttgaacagtggtgagatcaagctagcaccctgtgaggctttcgctgtcctcctgaaatga

SEQ ID NO: 13683 - protein, 571 aa, Gibberella zeae PH-1
MGSTGQTLRAWWKESSVYQIYPASYQDSTGSGVGDLKGIISRVDYLKDLGVDIIWLSPIFKSPQVDMGYDISDYYTVDPPYGNVSDVDVLKDKLHERGMKLVLDLVMNHTSDQHEWFKESRKSKDNPYRDWYIWKPAKYDADGNRHPPNNWDAHFQGSAWEYDEITDEYYLCLFCKQQPDLNWENPAVRKQVHQVMRFWLDRGVDGFRMDVINFVSKDQAFPDSDKTVLRGTEYYACGPRCHEFLKEIGSILQEYDAFSVGEMPCVHDERELIKAVHGDRGELSMIFHFELMDLDHGVEGKFTPRSWKLSELKATTLKWQRFMYDNEGWNALYLENHDQPRAVSRFVHDDPEHRVASAKLIALFLGFQSGTPFIYQGQEIGMTNVPKDWDLEEYKDLDCLKHWDLHKNDDVAAQNSYKVEYQRKSRDNARTPMQWDASPNAGFTTADANPWMRVNDNYTDINAASQTSDSNSVYSCYRQVLGKRKEYKDIFVYGNFQLVDESNDKIFAYSRRADSGETALVVCNFSVDSVAWKLPGEAREVLTSPAGRTLNDLNSGEIKLAPCEAFAVLLK

SEQ ID NO: 13684 - DNA, 1635 bp, Leptospira interrogans serovar Copenhageni str. Fiocruz L1-130
  CDS (1)..(1635): transl_table=11
ttggataagtggtggcaaaaaacaacgatttaccagatttatccccgctcttttgcagatagtaatcgggatggtgttggagacattccagggatcatttctaaattggattatcttcaagatcttgggtttgaaacaatttggatatctcctttgtataaaagtccacaaatggatcacggttacgatgtaagtgattattactcgatcgctccagaatatggaactataaaagatgcagaaaagttaataaaggaagttcataagcgcgggatgaaaatcgtttttgatatggtgatgaatcatacttctattgaacacgattggtttatacaatcccgttctagtcgagataatcctaaaagagattggtatatttggaaagacggaagaggaaaaaataaacctcctaataattggagttcgtttgtgacacccaaggcctggcattatgattccaatacggatcaatggtatcttgcgagttttctagattttcaaccagacttaaattattacaatccagaagtcaaaaaggcaatgttcgacgttttgcgtttttggcttaagaagggagtagatggtttccgtttggatatttttcacgcgatttataaggataaatatttcagagacaatccgtttcgatttaaatatatcgtttcggaaaatgatcacgatggttattttcagagtagggttcatactgtaaaccatccaaataactttgcttttgcgaaagagctaagatccgttttagatgagtttgatggagatcgttttgcggtaggagaggtggccggagatgatcatatcatcaaacgctacttaggcgaaaaaaaagatggcctgaatctaatctttttattcgaaactttgttgttaaagttcaagactagtttttttaagggaatcgtaaaaaaaatggaacaagtatatccgtatccaaacgttcccacatacgtttttggaaaccatgaccaaagacgttacatgatgaaaatcaataataatctcgaaaaaggaaaattgattgctctgtttcagtttaccgcgaggggggttccagtcacttattacggagaagaaattggaatgaccaatgagacgatcaaattaactgaggcacaggatccgcttgcaagaatctatcgctggttaggtgattcgctttccgaattgttgggactcgcagacgttatcattcgggatcgagcaaggtcgccgatgcaatgggacgactcgccaaacgcaggttttacggttcaagaagcaaaaccatggattcgggttcacggaaattatagagaacgtaacgttttgatcgagtccgaagattcggattctcttttaaatacttataaaagtgttcttcgcattcgaaatggaagttttgctcttaaagagggttctttgagattaattgaagaaaacgttccaaaagatatgttagtttatttaagggaatttggtaaggaacgtaaactgatcgtttttaattttggtaaaaaaaccaaatttttttctaatcctaccgattgtagaaaatattttttctctacggtttctttcgatcataacgaatttgatcaatttaaaatacctccttgttctggagttatattaggtaattag

SEQ ID NO: 13685 - protein, 544 aa, Leptospira interrogans serovar Copenhageni str. Fiocruz L1-130
MDKWWQKTTIYQIYPRSFADSNRDGVGDIPGIISKLDYLQDLGFETIWISPLYKSPQMDHGYDVSDYYSIAPEYGTIKDAEKLIKEVHKRGMKIVFDMVMNHTSIEHDWFIQSRSSRDNPKRDWYIWKDGRGKNKPPNNWSSFVTPKAWHYDSNTDQWYLASFLDFQPDLNYYNPEVKKAMFDVLRFWLKKGVDGFRLDIFHAIYKDKYFRDNPFRFKYIVSENDHDGYFQSRVHTVNHPNNFAFAKELRSVLDEFDGDRFAVGEVAGDDHIIKRYLGEKKDGLNLIFLFETLLLKFKTSFFKGIVKKMEQVYPYPNVPTYVFGNHDQRRYMMKINNNLEKGKLIALFQFTARGVPVTYYGEEIGMTNETIKLTEAQDPLARIYRWLGDSLSELLGLADVIIRDRARSPMQWDDSPNAGFTVQEAKPWIRVHGNYRERNVLIESEDSDSLLNTYKSVLRIRNGSFALKEGSLRLIEENVPKDMLVYLREFGKERKLIVFNFGKKTKFFSNPTDCRKYFFSTVSFDHNEFDQFKIPPCSGVILGN

SEQ ID NO: 13686 - DNA, 1251 bp, Thermus thermophilus HB27
  CDS (1)..(1251): transl_table=11
ctggacctgggggtggaggccatctacctcaaccccgtcttcgcctccaccgccaaccaccgctaccacaccgtggactacttccaggtagaccccatcctggggggaaacgaggccttaaggtacctcctggaggtggcccacgcccacggggtgagggtcatcctggacggggtcttcaaccacacgggccggggcttcttcgccttccagcacctcatggaaaacggcgagcaaagcccctaccgggactggtaccacgtcaagggcttccccctaaaggcctacaccgcccaccccaactacgaggcctggtggggcaaccccgagctccccaagctcaaggtggagaccccggcggtgcgggaatacctcctcgccgtggccgagcactggatccgcttcggcgtagacggctggcgtctggacgtgcccaacgaaatccccgaccccaccttctggcgggagttccgccaaagggtcaagggggcaaaccccgaggcctacatcgtgggggagatctgggaggaggcggacccttggctccagggggacatgtttgacgcggtgatgaactaccccctcgcccgggccgtcctgggcttcgtgggcggggaggccctggaccgggacctcgcggcgcagacgggcctaggccgcatagaacccctccaggctctggccttcagccatcggctggaggacctcttcggccgctaccgccccgaggtggtccgggcccagatgaacctcctcacctcccacgacacccccaggctcctcagcctgatgcgggggagcgtggagcgggcccggctggccctggccctcctcttcctcctcccggggaaccccaccgtctactacggggaggaagtggggatggcggggggcaaggacccggaaaaccggggcgggatggtctgggaggaggcccgctggcagaaggacctcctggagacggtcaagcgcctggcccggctcaggaaggaacaccccgcgctccgcaccgccccctacctgcggatctacgcccaggacggccacctggccttcgcccgggggccccacctggcggtggtgaacgcctctccccaccccttccgccaggacttccccctgcacggggtcttcccccgggggggaagggcggtggacctcctctccggggaggtctgcacgccccagggggggaggctctgcggccccgtgctcccgcccttctccctggccctgtggcgggaggcctaa

SEQ ID NO: 13687 - protein, 416 aa, Thermus thermophilus HB27 [sequence omitted]

SEQ ID NO: 13688 - DNA, 1662 bp, Listeria monocytogenes str. 4b F2365
  CDS (1)..(1662): transl_table=11
atgaaagaaaaagattggtggaaaaaaagcgtagtgtaccaaatctatccaaagagttttaatgattcaaatggtgatggagttggtgatattcaaggaattatcgagaaattagattatttaaaagagctaggtgtggacgttatctggttgtccccagtatacgattcgcctcaagatgacaatggttacgatattcgcgattatcaaaaaatttacgaagagtatggagatatggcgacttttgatcaattacttcaaggtttacacgaccgcgaaatgaaacttgtaatggatcttgttgttaaccatacttctgatgaacacaagtggtttgaggaatccagaaaatccaaagacaacccgtacagagattactatttctggcgcgaggaaaacgaaatcaataactggggctcgattttcagcggtccagcatgggaattggacgaaaaaacaggtgagtactatttacacctattctccaaaaaacaacctgatttaaactgggaaaaccctaaattacgccaagatgtatataatatgatgaaattctggctagataaaggcattgatggcttccgcatggatgtaattaattttatttccaaaaatactgatttcccagatggtccagtaccagatggtcaaatttatggcgatgctggcaatgatttttgtaatggaccgcggattcatgagttcttgcaagaaatgaaccaagaagttacttctaaatacgatgtgatgactgttggcgaaatgcctggtgctagtacaaccgacgcgcaaatttacacgaatccagcaaataatgaagtcgatatgatttttacatttgaacatatgaacttagattccgatggcgacaataaatgggatctaaaaccaatctacttaccagatttaaaagaaaatatgtctgaatggcaagtggcgcttcaagaaaacggttggaatagcttatattggaataatcatgaccaaccgcgtatcgtttctcgttttgggaatgacaatcgtttccgtgttcgttcagcgaaaatgcttgcaacttgtttgcatatgatgaaaggaacgccatatatttatcaaggtgaagaaattgggatgacgaatgttcattttgaaacgctagatgattaccgtgatatcgaaacgctaaacatgtacaaagaacgcaaagagcaagggcacagccacgaaagcatcatgcagtcgatttacacaaaaggccgtgacaatgcgagaacgccgtaccagtgggataatagcgagaatgctggcttcacaaccggaacgccttggcttaaagtcaacccgcgctatacagaaatcaacaacgaagaagcgctgaaaaacccagattccattttctactactaccaaaatcttattaagttacgaaaaacgactgaaatcatcacaactggtaattatcgtttgttattacctaaagatgaagcgattttcgcatatgaacgctacacagaaaatgaaaaattagtggttttatgtaatttcacagaagaagaacaagttatttctgatgaaaacattttgaacgaaatccaaaaaggttccgtgcttgtaaacaatgttcctaatattatagaaggaactttacgaccttacgaagcaatcgtttatcaaatcaagtaa

SEQ ID NO: 13689 - protein, 553 aa, Listeria monocytogenes str. 4b F2365
MKEKDWWKKSVVYQIYPKSFNDSNGDGVGDIQGIIEKLDYLKELGVDVIWLSPVYDSPQDDNGYDIRDYQKIYEEYGDMATFDQLLQGLHDREMKLVMDLVVNHTSDEHKWFEESRKSKDNPYRDYYFWREENEINNWGSIFSGPAWELDEKTGEYYLHLFSKKQPDLNWENPKLRQDVYNMMKFWLDKGIDGFRMDVINFISKNTDFPDGPVPDGQIYGDAGNDFCNGPRIHEFLQEMNQEVTSKYDVMTVGEMPGASTTDAQIYTNPANNEVDMIFTFEHMNLDSDGDNKWDLKPIYLPDLKENMSEWQVALQENGWNSLYWNNHDQPRIVSRFGNDNRFRVRSAKMLATCLHMMKGTPYIYQGEEIGMTNVHFETLDDYRDIETLNMYKERKEQGHSHESIMQSIYTKGRDNARTPYQWDNSENAGFTTGTPWLKVNPRYTEINNEEALKNPDSIFYYYQNLIKLRKTTEIITTGNYRLLLPKDEAIFAYERYTENEKLVVLCNFTEEEQVISDENILNEIQKGSVLVNNVPNIIEGTLRPYEAIVYQIK

SEQ ID NO: 13690 - DNA, 1533 bp, Listeria monocytogenes str. 4b F2365
  CDS (1)..(1533): transl_table=11
ttggaattttggcgtcgtagtgtgttttatgaaatttatatgaaatcatttcaagacagtaatggcgatggtttaggtgattttaaaggtttaacgagcagattagattatctagtggatttgggaattgatggtatttggttgactccattttatccttcaccgcaagtggataatggttatgatgtgtctgattactgcgatattaacccggattacggcgatatgactgattttcgagtgtttatgaaagcggcagatgctcgaggaataaaagttattatcgacttagtattaaatcattcgtcaacagagcatgcttggtttaaggagtcgcgtagtagtaagacgaatcctaaacgagattattatatttggcgagaaaaaccaaataattgggaatcgttttttggtggttctgcttgggaaatggatgaacttactggcgagtattactatcatagttttgcaaaagaacaggctgacttaaactgggcgaatgaagctgttcgcgcagaaatggagcaagttttagcgttttggttgaatgagggagtggcgggattcaggttagatgttatcaataatttaacgctcgtacttgaatttacggataatccagtcacatctggtgaaatggagcatgtgtatgaccgtaatcagagtggcttagaacaagcgttagaggatatcgcttccttttgtcgaaaagagcgcgacgtgtttctagtaggcgaaattagctcggaccaattagctgaaattgctagatatagctcgaaaaaaatgctagatgtcacatttaattttaattttggcagtgttgatcagctagatgcaaaatctgtatttacgacattgaatgagatggaaacggcattaaatgaagggcagtggccgacgcttttctttggaagtcatgatatgagcaggttcagaagtcgcctcgcatctggaggcttagtaaagacccagttgctcgcatttttaatgttaactgcgaaaggcgtgccgtttatatactacggagaagaggtgggtatgcctgatttaacgttttcttccgtaaaagagatgcgcgatattcaagggacagccgcgtactatcaagctttacaaactgggacagatgaaaaacaagcactcgaaattgctattgaaaaaacgcgtgacaaagcacgtgggccgatgattttcccagatggaaagccatttactctaggtgaaccatggattaaaatggcgactttgccggaaaaagaagcacgaacgatgtggcgattttatcaaggattactcgcatttcgtaaagaaaatgattttaaagagatggaatatacttttttgaagttggatggagaagtactcagttatcagcgaggtgaatttatctttttacttcattttggtgaggaagaggtaacttatccgcttcaggggaactatcagcttgtttttggagaagcagtgatggtaggaaatggcattagaatgggcgcgcatactggaattgcgcttagagtggaggaatag

SEQ ID NO: 13691 - protein, 510 aa, Listeria monocytogenes str. 4b F2365
MEFWRRSVFYEIYMKSFQDSNGDGLGDFKGLTSRLDYLVDLGIDGIWLTPFYPSPQVDNGYDVSDYCDINPDYGDMTDFRVFMKAADARGIKVIIDLVLNHSSTEHAWFKESRSSKTNPKRDYYIWREKPNNWESFFGGSAWEMDELTGEYYYHSFAKEQADLNWANEAVRAEMEQVLAFWLNEGVAGFRLDVINNLTLVLEFTDNPVTSGEMEHVYDRNQSGLEQALEDIASFCRKERDVFLVGEISSDQLAEIARYSSKKMLDVTFNFNFGSVDQLDAKSVFTTLNEMETALNEGQWPTLFFGSHDMSRFRSRLASGGLVKTQLLAFLMLTAKGVPFIYYGEEVGMPDLTFSSVKEMRDIQGTAAYYQALQTGTDEKQALEIAIEKTRDKARGPMIFPDGKPFTLGEPWIKMATLPEKEARTMWRFYQGLLAFRKENDFKEMEYTFLKLDGEVLSYQRGEFIFLLHFGEEEVTYPLQGNYQLVFGEAVMVGNGIRMGAHTGIALRVEE

SEQ ID NO: 13692 - DNA, 1761 bp, Bacillus thuringiensis serovar konkukian str. 97-27
  CDS (1)..(1761): transl_table=11
atgcttaaagaagccatttatcataggccaaaagataattacgcatacgcttatgatgaaaaaacgattcacatccgaatacgtacgaaaagagacgatgttcaaagcaccactcttatttatggtgatccttatgaatggaaagacgggaagtggatttcttcaagtacaccgatgaaaaaaactggttctactgcattgtttgattattggttcatttccatcgagccgaaatttaagcgcttacgttatggatttgaattaaaaaacgatacagacactcttatttatgcagagcgaggatttttttctaccactccaaatgatgacgttggtaactttttctgttttccatttattcatgcaaatgatgtattcaaagcaccttcttggattaaagatactgtttggtatcaaattttcccagaacggttcgctaatggagatcatacgctgaatccagaaaacacccttccttggggcagcgctgagccaactccaactaattttttcggtggagattttgctggtattattcaaaaccttgattaccttgttaagctcggaatttctggaatatatttcacacctattttcaaagcacattcaaaccataaatatgacacaattaactacatggaaatcgatccgcaatttggcacaaaagaaacattcaaagaactcgttcaggcatgtcatacacatggtataaaggtaatgctcgatgccgtattcaatcacagtggatactttttcgataaatttcaagacgtactacaaaatggtgagcagtcagcatataaagaatggttccatattcatgagttcccaattagaactgagccactcccgaattatgatactttcgcgtttacaccatatatgccaaagttaaacacagcgcacccggatgtaaaagaatacttacttgaagtagggcgttattgggtgagagaattcaatatagacggttggcgccttgatgtagcaaatgaagtcgaccataacttttggagagaatttcgaagtgagataaaagcattaaattctgaagtatatattttaggagaaatttggcacgatgcacttccatggctacaaggagatcaattcgatgctgtcatgagctatcctgttacaaacgccctactgtcttactttgctaacgattccattaaggcaaatgaatttatgaaacaaattacagaatctctacattcctactctatgaatgtaaatgaagcagcatttcatttattagatagccatgatacaccaagaattttgacaacatgtaacggagataaaaataagttaaaattactttatgtattccatctttctttcatcggctctccttgtatttattatggagacgaaattggtatggacggcggtatggatccagattgtcgcaaatgtatggtttgggatacggaagaacaagatcatacattatttacacatgtacaaacattaatttcattacgaaagcaatataaagcatttggaggacatggtactttccaattcattgaagcaaatgatgaatataattatatttcttatacgaaaacatatgaagatgaaacgatctttttcgttttaaatccgactaatagtgatattacagcttcactccctctccatgttactggaaagaaaatcattaatatttatacaaacgaagaattttcagcggaagcaagtgtattacaagttacacttcctccatatggattctccatattaaaatggtaa

SEQ ID NO: 13693 - protein, 586 aa, Bacillus thuringiensis serovar konkukian str. 97-27
MLKEAIYHRPKDNYAYAYDEKTIHIRIRTKRDDVQSTTLIYGDPYEWKDGKWISSSTPMKKTGSTALFDYWFISIEPKFKRLRYGFELKNDTDTLIYAERGFFSTTPNDDVGNFFCFPFIHANDVFKAPSWIKDTVWYQIFPERFANGDHTLNPENTLPWGSAEPTPTNFFGGDFAGIIQNLDYLVKLGISGIYFTPIFKAHSNHKYDTINYMEIDPQFGTKETFKELVQACHTHGIKVMLDAVFNHSGYFFDKFQDVLQNGEQSAYKEWFHIHEFPIRTEPLPNYDTFAFTPYMPKLNTAHPDVKEYLLEVGRYWVREFNIDGWRLDVANEVDHNFWREFRSEIKALNSEVYILGEIWHDALPWLQGDQFDAVMSYPVTNALLSYFANDSIKANEFMKQITESLHSYSMNVNEAAFHLLDSHDTPRILTTCNGDKNKLKLLYVFHLSFIGSPCIYYGDEIGMDGGMDPDCRKCMVWDTEEQDHTLFTHVQTLISLRKQYKAFGGHGTFQFIEANDEYNYISYTKTYEDETIFFVLNPTNSDITASLPLHVTGKKIINIYTNEEFSAEASVLQVTLPPYGFSILKW

SEQ ID NO: 13694 - DNA, 1710 bp, Leifsonia xyli subsp. xyli str. CTCB07
  CDS (1)..(1710): transl_table=11
gtgagtttcaccgcaccgatcacgcttcccgggctcaccctcgacccgcagtggtatcgccgatccgtcttctacgaggtgatggtccgctccttcgtcgacagcaacggcgacggctccggcgatctcgcgggtctgacctccaaactcgactacctgcagtggctcggcatcgacgcgctctggctcccgccgttcttccagtcccccctgcgcgacggcggctacgacgtgagcgacttccgcgcgatcctgcccgagttcggaaccatcgacgagttccgcgacctggtcaccaaggcgcacgagcgcaacatgcggatcatcatcgacctgccgatgaaccacacctccgaccagcacgagtggttccagcaatcgcggtccaacccggaagggcccttcggcgatttctatgtctggaacgagaccgacgacaagtacccggacatccgcatcatcttcgtggacaccgaggactccaactgggccttcgacgaggcgcgtcgccagtactactttcaccggttcttctcgcaccagccggacctcaacttcgagaaccccgccgtacacgacgcaatgttcgacatcgtccggttctggctcgacctcggcgtcgacggcttccggctcgacgctatcccctacctctacgagtcggacgagggcaacggcgagggcgagccgcccacgcacgagttcatcaagaggctccgcgaggtggtcgatcgggagtacccgggccggatgatggtcgccgaggccaaccagtggccgcgcgaagtcgctgccttcttcggcagcgaggaggagccggagtgtcacatggccttcgacttcccggtgatgccgcgtatcttctacgcgctccgctcgcaacaggcctccgagctcatccacgtgctctccgagaccacggacgtgcccgatgggtacgcctggggcgtgttcctgcgcaaccacgacgagctgacgctggaaatggtaagcgaggagtaccgccaggccatgtacggctggtatgcctacgacccgcgcatgcgcgccaacatcggcatccgccggcggctcgcgccgctcctggacaactcgcgcgccgaactcgaactcgcccacgccctcctcttctccctcgccggcagcccgtttctctactacggcgacgagatcgggatgggcgacaacatctggctgcccgatcgcgacagctcgcgcacgccgatgcagtggacccccgaccgcaacgccggtttctccagcgccgacccgggcaaactcttcctcccggtcgtccagtcgctcgtctatcactacaaccaggtgaatgtggaggcgcagctcgcgcagtcgcgctcgctgctgcactgggtgcgcaacgtcatccatgtgcggaaagcgcatcccgtgttcggtctgggcgacatgcgtgtgctgccgaccaaccacgagtcggtgctggccttcgtgcggacgtacgagggcagcggcagccacttcggcgaccagccggaggatgtgctgtgcgtgttctcgttcgcgcacaatccggtctccgtcaccctcgaagcgccggagttcgccggtcggacactgtacgatctgttcggcggcgcagagttcccgaccgtcgccgaggacggccgcttcaccctgaccctcggcacccagagcttctactggctgcacatcgaaccgcgccgcgattaa

SEQ ID NO: 13695 - protein, 569 aa, Leifsonia xyli subsp. xyli str. CTCB07
MSFTAPITLPGLTLDPQWYRRSVFYEVMVRSFVDSNGDGSGDLAGLTSKLDYLQWLGIDALWLPPFFQSPLRDGGYDVSDFRAILPEFGTIDEFRDLVTKAHERNMRIIIDLPMNHTSDQHEWFQQSRSNPEGPFGDFYVWNETDDKYPDIRIIFVDTEDSNWAFDEARRQYYFHRFFSHQPDLNFENPAVHDAMFDIVRFWLDLGVDGFRLDAIPYLYESDEGNGEGEPPTHEFIKRLREVVDREYPGRMMVAEANQWPREVAAFFGSEEEPECHMAFDFPVMPRIFYALRSQQASELIHVLSETTDVPDGYAWGVFLRNHDELTLEMVSEEYRQAMYGWYAYDPRMRANIGIRRRLAPLLDNSRAELELAHALLFSLAGSPFLYYGDEIGMGDNIWLPDRDSSRTPMQWTPDRNAGFSSADPGKLFLPVVQSLVYHYNQVNVEAQLAQSRSLLHWVRNVIHVRKAHPVFGLGDMRVLPTNHESVLAFVRTYEGSGSHFGDQPEDVLCVFSFAHNPVSVTLEAPEFAGRTLYDLFGGAEFPTVAEDGRFTLTLGTQSFYWLHIEPRRD

SEQ ID NO: 13696 - DNA, 1683 bp, Bacillus licheniformis ATCC 14580
  CDS (1)..(1683): transl_table=11
atggcaagggcatggtggaaagaggcagtcgtttatcaagtgtatccgcgcagttttatggattcgaacggggatggcgtcggagatatcaacgggatcagagagaagcttccgtatatcagggagctcggggcagatgccatttggatttgtccggtctttgattctcccaatgcagataacggctacgacatcagggattatcaaagcatcatgccggaatttggcacgatggacgactttgacgaactattaactgaagcgcatcagctcggaatgaaactgatcatcgatcttgtcatcaatcatacgagcgatgaacatccttggtttatcgaatcaagagcagagcggaattccgggaaacgggactggtatatttggcatgacggaaaggacggaagcgaaccgaacaactgggaaagcatattcggcggctcagcctggacttatgacgaaaaaacagagcaatattatctgcacctttttcacgaaaagcagcctgatctgaattgggaaaacagtgatatgcgaagcgctctttatgacatgatcaactggtggcttcaaaaaggaatcgacggattcagggttgacgcgatttcgcacattaagaaaaaagaagggctgccggatctgccgaatccggaagggcgccctttcgtgccttcatttgcttatcatatgaatgtcgaagggattatggcgttattgcaggatgtaaaagagaatacgttcgccgggtatccacatatcatgacagtcggcgaagcaaacggtgtcagcgctgaagaagcggaggactgggttggagaaccaaacggtatattcagcatgatttttcaatttgaacacctcgggctttgggatattgaaggcggagaacccgatatccccgaactcaagcggattttgtcaaactggcaatctgctcttgaaggaaaaggctggaacgcgctttttatcgaaaatcatgatcagccccgggccgtttcagtttggggagatgacgggaaatacagaacagtcagcgcgaaggccttagctgcaatgtattttttgatgaaaggcaccccgtttatttatcaagggcaggaaatcggaatgacaaacgcgattttcttagatatagacgattatgatgacgtctcgattaaaaattattaccggattcaaaaagaaaagggccgctcacacgaagacatcatgaaggcggtatggaaaaagagcagggatcacgcgcgcacgcctatgcaatggactgatcggccaaatgccggctttaccaaaggggaaccgtggctgcgcatgaacgaaaattacaagctgatcaatgtcgttcatcagcagcatgacccccggtcggtctatcatttttataaacggttaatcgcaatcagaaaacggtatgacgtcttcatcgacggatcatataaactgcttctggctgaggatcggcagatttttgcatacttgcgaaagcttgaagaagaaaccgccatcgtgatcgtgaacctcagcgcacgccaggcgttttaccatcatcccgcatatccgttatgttcgaacggactgctgctgtcaaacttggatatcaacgcgcacaagcacctcacatctttcatgatgagaccctatgaggcgcgcgtttatttgatcagacaggaaatcggcgatttgtaa

SEQ ID NO: 13697 - protein, 560 aa, Bacillus licheniformis ATCC 14580
MARAWWKEAVVYQVYPRSFMDSNGDGVGDINGIREKLPYIRELGADAIWICPVFDSPNADNGYDIRDYQSIMPEFGTMDDFDELLTEAHQLGMKLIIDLVINHTSDEHPWFIESRAERNSGKRDWYIWHDGKDGSEPNNWESIFGGSAWTYDEKTEQYYLHLFHEKQPDLNWENSDMRSALYDMINWWLQKGIDGFRVDAISHIKKKEGLPDLPNPEGRPFVPSFAYHMNVEGIMALLQDVKENTFAGYPHIMTVGEANGVSAEEAEDWVGEPNGIFSMIFQFEHLGLWDIEGGEPDIPELKRILSNWQSALEGKGWNALFIENHDQPRAVSVWGDDGKYRTVSAKALAAMYFLMKGTPFIYQGQEIGMTNAIFLDIDDYDDVSIKNYYRIQKEKGRSHEDIMKAVWKKSRDHARTPMQWTDRPNAGFTKGEPWLRMNENYKLINVVHQQHDPRSVYHFYKRLIAIRKRYDVFIDGSYKLLLAEDRQIFAYLRKLEEETAIVIVNLSARQAFYHHPAYPLCSNGLLLSNLDINAHKHLTSFMMRPYEARVYLIRQEIGDL

SEQ ID NO: 13698 - DNA, 1764 bp, Bacillus licheniformis ATCC 14580
  CDS (1)..(1764): transl_table=11
atgatggaatatgcagcgatacatcatcagcctttcagctctgatgcctattcttacaatggacggacattgcacatcaagatccgtacaaaaaaggatgatgccgaacacgtccgcttggtttggggcgatccttacgaatacaccggcggcacatggaaagcgaacgagcttgcgatggcgaaaattgccgcaacaagcacccatgattactggtttgccgaagtggcgcctccattcaggcgtctgcaatacggatttatcctgacaggcgctgatgatcgagacactttttacggaagcaatggtgcatgtccgtttgccgggaaagcggcggatataggcaaacactgttttaaatttccgtttgttcatgaggcagacacgtttgatgcacctgactgggtcaaatcaaccgtctggtatcaaatttttccggagcgctttgccagcgggcgggaagatttgtctccggaaaacgctttgccatggggaagcaaagatcctgaggcgcacgattttttcggaggggatttgcaggggatcatggacaagctggactatttggaagacttgggggtaggcggaatctatttgacgccgatctttgccgcgccttccaaccataaatacgacacattggactattgctccatcgatccgcattttggcgatgaggagctctttcgcacgctggtcagccggattcacgagcggggaatgaaaatcatgcttgatgctgtttttaaccacattggcagcgcttcgcaagagtggcaggatgttgtcaaaaacggtgaaacgtcccgctataaagactggttccatattcattctttccctgttaaagaaggcagctatgatacatttgcgtttactcccgagatgccgaagctcaatacggccaacccggaagttcaggcttatttgcttgatattgcgctgtactggatccgcgaatttgatatcgacggctggcgtttggatgtggcaaatgaagttgatcatgcgttttggaagaaattccggcaagccgtcacggcagaaaagcccgacatttttatattgggcgaaatctggcatcaggctgatccgtggcttagaggagacgaatttcattcggtcatgaactacccgttcacagaaccgatgattgactattttgcagacggatcgatttcagcttcgcaaatggccagccgcatcaattcgcatttaatgagcgggatgaagcaggtcaatgaggtgatgtttaatttgctggacagtcatgacacgaagcggattttgacaagatgcggaggagatgacaaaaaggtgcgctctcttttggcattcatgtttgctcagacaggctcgccgtgcatttattacggaacggaagtcgggcttgacggcggcgatgatccattgtgccggaagtgcatggtttgggaagaggaaaaacagaatcaagagatgctcgcatttatgaaacggctgatcgctttgcgaaaacaagagaatgatgtattgacttatggcgcgcttgagtggaagctggttgatgaccaaaacgattttgtcagtttttctcgaacgcatgaaggaaaagagctgatctacttcttccaccagggcagcgaggtgcgccgtgtcagattgcgggatttgaagattgcaagcgataaaagaatatacgatgcgtggacggaagaagcgcttcagcatgatgatgtggtcgacattcagccaggcggatttttcattttgggggcggtctaa

SEQ ID NO: 13699 - protein, 587 aa, Bacillus licheniformis ATCC 14580
MMEYAAIHHQPFSSDAYSYNGRTLHIKIRTKKDDAEHVRLVWGDPYEYTGGTWKANELAMAKIAATSTHDYWFAEVAPPFRRLQYGFILTGADDRDTFYGSNGACPFAGKAADIGKHCFKFPFVHEADTFDAPDWVKSTVWYQIFPERFASGREDLSPENALPWGSKDPEAHDFFGGDLQGIMDKLDYLEDLGVGGIYLTPIFAAPSNHKYDTLDYCSIDPHFGDEELFRTLVSRIHERGMKIMLDAVFNHIGSASQEWQDVVKNGETSRYKDWFHIHSFPVKEGSYDTFAFTPEMPKLNTANPEVQAYLLDIALYWIREFDIDGWRLDVANEVDHAFWKKFRQAVTAEKPDIFILGEIWHQADPWLRGDEFHSVMNYPFTEPMIDYFADGSISASQMASRINSHLMSGMKQVNEVMFNLLDSHDTKRILTRCGGDDKKVRSLLAFMFAQTGSPCIYYGTEVGLDGGDDPLCRKCMVWEEEKQNQEMLAFMKRLIALRKQENDVLTYGALEWKLVDDQNDFVSFSRTHEGKELIYFFHQGSEVRRVRLRDLKIASDKRIYDAWTEEALQHDDVVDIQPGGFFILGAV

SEQ ID NO: 13700 - DNA, 1620 bp, Methylococcus capsulatus str. Bath
  CDS (1)..(1620): transl_table=11
atgacggacgggaacggcacgctggcctggtggcagaccggcatcatctaccagatctatcccctttccttccaggacagcgacggcgacggcaggggtgatcttcccggcatcctccaccggctcgactacctggccgacctgaacatcgccgccgtctggctgtcgcccgtcttcgcctcgccgatgcgggacttcggctatgacgtggctgactacacgtccatccatccctggttcggaaccctgagcgatttcgaccggctgctggccggcttgcacggccgtggcatcaagctgatcctggacctggtgccgaaccacacctccgaccggcacccctggttcctggaaagccgaagttcgcgcgacaaccctagacgcgactggtacctctggcgcgatccggcaccgggcggcgggccacccaacaactggctgagctttttcggtggcccggcctggacctacgacgagaccaccggacaatactatctgcaccagttcacgccggagcagccggagctgaacctgcgccacccggccgtgctggaggcgatgctggaggtgatgcggttctggctggatcgaggcgtggacggcttccgggtcgacgtgccctggctgctgatcaaagacgccgggttccgagacgaaccggaaaatccggcctgggacggcatcgatccgcacggccggctgctccacatccatacggcgcatcagcccgaactgcaccgcatcatccgggccatgcgcgcggtcgtcgacggctatcccggcgagcgggtcttgatcggggagacaaacgtgccggaggaagaactcgtcaagtactatggcgcggcacgggacgaattccacctacccttcaacttccggctgatccatgccccctgggacgcgcggaaaatccggcagatggtcgaaacttacgaagcgatcctcccccaaagggcctcgcccgcctgggtgctcggcaaccatgaccagccccgcatcgccagccgcttcggtcccgacgcggcccgtgtcgccaccatgctgctgctgaccctgcgtggcacaccgacctgctattacggcgacgagttggggatggagaacggggtgatcccaagggaccgcatccgtgatccgcaggcattgaatcagcccgggatttcgggcgtgttcaatcgcgatgaggcacggaccccgctgccttgggacacctcgcccaatgccggcttcgcgcccgaaggcgtcgacccctggctgccgttgggggaggactggcccatgagaaacgttgcccggcaggcggcggacccccgctccatgctggcgctcttcagggctctgaccagactgcgccaatgccacccggccttgagccatggcagttacgaaagcgtggacacgaaggccgacggcgtcttcgcctacaagcggacggccggcgccgaacgcctcctcatcgtgctcgatttcgccggcagtgaacatctcctggactcgggcgaactcgccgatggcgcggagattctgctgagcaccggcatgcggcgcaccggccgggtcgatctgcggcggctccgtttgctctccaatgaaggtctcatactgaaaatatcttga

SEQ ID NO: 13701 - protein, 539 aa, Methylococcus capsulatus str. Bath
MTDGNGTLAWWQTGIIYQIYPLSFQDSDGDGRGDLPGILHRLDYLADLNIAAVWLSPVFASPMRDFGYDVADYTSIHPWFGTLSDFDRLLAGLHGRGIKLILDLVPNHTSDRHPWFLESRSSRDNPRRDWYLWRDPAPGGGPPNNWLSFFGGPAWTYDETTGQYYLHQFTPEQPELNLRHPAVLEAMLEVMRFWLDRGVDGFRVDVPWLLIKDAGFRDEPENPAWDGIDPHGRLLHIHTAHQPELHRIIRAMRAVVDGYPGERVLIGETNVPEEELVKYYGAARDEFHLPFNFRLIHAPWDARKIRQMVETYEAILPQRASPAWVLGNHDQPRIASRFGPDAARVATMLLLTLRGTPTCYYGDELGMENGVIPRDRIRDPQALNQPGISGVFNRDEARTPLPWDTSPNAGFAPEGVDPWLPLGEDWPMRNVARQAADPRSMLALFRALTRLRQCHPALSHGSYESVDTKADGVFAYKRTAGAERLLIVLDFAGSEHLLDSGELADGAEILLSTGMRRTGRVDLRRLRLLSNEGLILKIS

SEQ ID NO: 13702 - DNA, 1866 bp, Photobacterium profundum SS9
  CDS (1)..(1866): transl_table=11
atgaaaacgccatttctttaccatggacaggatagcgcctggcttactcctacagacaacacgcttaacgtaacaatggtcagtgatgttgatacactgatatcagctatctttattcgatgtgaacccgataatgaagaactattaattgatatggaacgcggtagaacccaaggtcgcctgcaatactggcacgggaaattaccgttcaattcagataaagacaccactttttatacctttaaagtgatgcaaaacagtcgtcaatggtggctacacggttgtggcgtgtcaccgcgagtaccgggtaaagaaaagcacttcaaattcaataaccagcatcaaccgccagcttgggttaaagaacagattttctatcaagttttcccagaccgtttttcaaatgcaaacccatcaatcagtgttcaatctaatgaatactgtttacgtggcacagaaaaaccgacaatagcaaaagcatggggtgaatcagcatcaaaccatgattcgagtggaccaagcgaattcttcggaggcgacttacaaggtattcacaataagattgattacttacaagaattaggtgtaaccgcactctatttgaatccgatatttaccgcgcccagtaatcataaatacgatacaacggattacctcaatatcgatcctcatttaggcacgaatgagcaatttgccaacatggtggcagatctgcatcaacgtaatatgaagattatgctagatgccgtgtataaccatacctcagtcgaccacccttggttcgatatgtatcaacgtaataccgcagaccaagctgtgggcgcatacgatcatcctaactctacttaccgtcagtattatcaatttaccgataacagtaacgaatacgttggctggaatggtatatcaacgctacctaaactgaatttttctaatcctgaagtacaggattatatctatgcgggtgacgacgcggtaatcaaacactggctaaaaccaccctataatatagatgcatggcgtttcgatgttatccatatgctaggtgaaggcaaaggcgcacgtaataatgctcattttgttaaatccttccgcaatgcagccaagtcggtcaatcctgagtgctatgtgttaggcgaacatttctttgaagcgtctaactggcttcaaggtgatcaagaagacggtgctatgaactattacggttttgctcaccctcttcgtgcttttttttctcaaaaagacattgcctatcacgcatgccaaatcaatgctgtagaattagtagaatggctaaacgaagcgcgtacaaaattaccgtggttgaatcagctctctcagcttaaccagctagatagccacgatacaatgcgttttttaaccatggtggataacaacacagaaacgatgcacctagcattaatgatgctttttgcttatgtaggcacaccgtgtgtttactacggtacagaagttgaattacaaggcggtcaagatccagataaccgtcgttgtttcccgtgggaaagaacagagcaagaacaaaaaccacaaacattcagttatttgcagcaactcattgctgtcagaaaatcatcaaccgcccttcaatccggcagtgttcagtggttattggctgagaaccaatattttgcttttgctagaacgacagaaacagagcatgttatttgccttattaataacagtgaatcagctaaaacacttcatttaccggtttggcaattaggcattgagtcgggttctttacgcgacctgttaactgatgatgaatggcatattagcgaaggaagtgtatctgtcacattggcaggcaaagaaggaatattactgactgtcagcgaataa

SEQ ID NO: 13703 - protein, 621 aa, Photobacterium profundum SS9
MKTPFLYHGQDSAWLTPTDNTLNVTMVSDVDTLISAIFIRCEPDNEELLIDMERGRTQGRLQYWHGKLPFNSDKDTTFYTFKVMQNSRQWWLHGCGVSPRVPGKEKHFKFNNQHQPPAWVKEQIFYQVFPDRFSNANPSISVQSNEYCLRGTEKPTIAKAWGESASNHDSSGPSEFFGGDLQGIHNKIDYLQELGVTALYLNPIFTAPSNHKYDTTDYLNIDPHLGTNEQFANMVADLHQRNMKIMLDAVYNHTSVDHPWFDMYQRNTADQAVGAYDHPNSTYRQYYQFTDNSNEYVGWNGISTLPKLNFSNPEVQDYIYAGDDAVIKHWLKPPYNIDAWRFDVIHMLGEGKGARNNAHFVKSFRNAAKSVNPECYVLGEHFFEASNWLQGDQEDGAMNYYGFAHPLRAFFSQKDIAYHACQINAVELVEWLNEARTKLPWLNQLSQLNQLDSHDTMRFLTMVDNNTETMHLALMMLFAYVGTPCVYYGTEVELQGGQDPDNRRCFPWERTEQEQKPQTFSYLQQLIAVRKSSTALQSGSVQWLLAENQYFAFARTTETEHVICLINNSESAKTLHLPVWQLGIESGSLRDLLTDDEWHISEGSVSVTLAGKEGILLTVSE

SEQ ID NO: 13704 - DNA, 1656 bp, Thermus thermophilus HB8
  CDS (1)..(1656): transl_table=11
gtggagcttttcctggaaaccgaggcgcgggaaggggttctcctttacgagcgggacggggagttgcagaaaaagcccatggcgccttgggagcggggcctaaaggcgcgggtgcccgtccacgcgagccccttccgctactgcttccgcctcccccaaggctacctgggcagccacggcctggagaggaccctgccccgctacgaccgcttcttccacctcctcgccaagccccttcccccggagtgggccctgggggcggtcttctaccagatctttcccgaccgcttccgccaagggcgcccggagcttgcccccaaggagggggcctggctttacggggggaggcccatccgcaagaaggcctggcacgagccccccggggaggacggggcccgggagttctacgggggggacctctttggggtcctcgaggccctcccctacctggaggccctgggggtggaggccctctacctcacccccatcttccaaagcccctccagccaccgctacgacaccgaggactaccaccgggtggaccctcatctaggcggggaggaggcgcttagggcgctttacgaggccctcgaggcccgggggatgaagctcatcctggacggggtcttcaaccacgtgggggcgacccacccctggttccagaaggcccttgaggacccctcctcccccgagcgggggatgttcaccttttatccggacgggagctacgccagcttctggggcgtgaagcacatgcccaagctggactacgcttccgccctcacccaggagcgcttcgtcttcggaaaggaggcccccgtccgctactggatgcgcctcgcccatggctggcggctggacgtggcccactccatcggggaaggggggacgaaccggaagaacgcccgctggctcagggccctggcccgggccgccaaggaggagcgggaggacgccctcgtcttcggggagctctcctacgacaccgtccccacgctgagggcccacaccctggacggggccatgcactacgccggcttcgcccacccggtgatggagtggctctcggggcgggacctccacggaaaccccgtggagctggaggccgaggacctttggcgggccctctttgaccactacgccgcccttcccctccagctccgccacgcgatgtacaccctcctctcctcccacgacatcccccgggccctctggcgcctcaggggggacaaggagcgcttcaagaccgcctacgccctcctctttgccttccccggaagccccgccgtctactacggggacgaggtgggcctctcccagcccaacccctacgaggtctggcggggagacccctactgccgcgcccccttcccctgggacgaggccctttgggacaaggacctcctcgccttcctccggcgcctcatcctcctcaagaagacccaccccgccttgaggctcggggggctcctccccctcaaggcccctccgggggtcctggccttcaggcggcgccaccgggggagggaggtctgggcctttttcgccaaggaagaggtgcgcctttcccttccccggggggtggacctcctttcgggaagggaggtggcgggggaggtggaggcgcggtacctcctcctggagcctttagaatga

SEQ ID NO: 13705 - protein, 551 aa, Thermus thermophilus HB8
MELFLETEAREGVLLYERDGELQKKPMAPWERGLKARVPVHASPFRYCFRLPQGYLGSHGLERTLPRYDRFFHLLAKPLPPEWALGAVFYQIFPDRFRQGRPELAPKEGAWLYGGRPIRKKAWHEPPGEDGAREFYGGDLFGVLEALPYLEALGVEALYLTPIFQSPSSHRYDTEDYHRVDPHLGGEEALRALYEALEARGMKLILDGVFNHVGATHPWFQKALEDPSSPERGMFTFYPDGSYASFWGVKHMPKLDYASALTQERFVFGKEAPVRYWMRLAHGWRLDVAHSIGEGGTNRKNARWLRALARAAKEEREDALVFGELSYDTVPTLRAHTLDGAMHYAGFAHPVMEWLSGRDLHGNPVELEAEDLWRALFDHYAALPLQLRHAMYTLLSSHDIPRALWRLRGDKERFKTAYALLFAFPGSPAVYYGDEVGLSQPNPYEVWRGDPYCRAPFPWDEALWDKDLLAFLRRLILLKKTHPALRLGGLLPLKAPPGVLAFRRRHRGREVWAFFAKEEVRLSLPRGVDLLSGREVAGEVEARYLLLEPLE

SEQ ID NO: 13706 - DNA, 1767 bp, Geobacillus kaustophilus HTA426
  CDS (1)..(1767): transl_table=11
atgaggaaagaagccatccaccaccgctcaaccgaccatttcgcttatgcttatgacagcgagacgctccatctccggcttcaaacaaagaaacatgatgtcgaccacgtcgagctgctttttggcgacccgtacgaatggcacgatggcgcctggcagtttcaaacgatgccgatgcggaaaacgggaagcgacgggttgtttgactattggctcgccgaagtcaaaccgccatatcgacggctgcgctatgggtttgtgcttcgagctgggggcgagaaactggtctatacggaaaaaggattttaccatgaagctccgagcgacgacaccgcttactacttttgcttcccctttcttcatcgggtcgacctattccaagcgccgggctgggtaaaagacacagtatggtatcaaattttccccgagcggttcgccaacggcaacccggccatcagtccgaaaggggcgcggccgtggggaagcgaggacccgacgccgacgagctttttcggcggcgacttgcaaggaatcatcgatcaccttgactatttggctgatctcggtattaccggcatttacttgacgccgattttccgcgcaccgtccaatcataaatacgacaccgctgattattttgaaatcgacccgcactttggggacaaagagacattgaaaacacttgtcaaacgctgccatgaaaaaggaatccgcgtcatgctcgatgcggtcttcaatcattgcggctatgagtttggcccgtttcaagatgtgttaaaaaacggcgcagcgtctaggtataaagattggttccatattcgcgagtttccgctccaaacggagccgcgcccgaattacgacacgtttgcgttcgtgccgcaaatgcccaagctcaacaccgcccatccggaagtgaagcgctacttgcttgatgtcgcgacgtactggattcgcgagtttgatattgacggctggcggctcgatgtggcaaacgaaatcgatcaccaattttggcgcgaattccgtcaggcggtgaaggcgctaaagcccgatgtgtacattctcggcgagatttggcatgatgccatgccttggctgcgcggcgaccagtttgacgccgtcatgaactacccgttggcggacgcggcgctccgctttttcgcgaaagaggaaatcagcgcccgccagtttgccgatatcatgatccgacttcttcattcgtatccgaaacaggtgaacgaagcggcattcaacttgcttggcagccatgatacaccaaggctgctcactgtttgcggcggcgacgtccgcaaagtgaagttgttgtttttgttccagctcacgttcactggttcgccgtgtatttactatggcgatgagatcggcatgacgggtggaaacgatccggaatgccggaaatgtatggtgtgggatccggagcaccaaaaccgcgaactgttggcgcatgtcaagcggctgattgcgctaaggaagcagcaccgggcgctccggcgcggagatgtctcctttctttccgccgacgacaaccctaaccatctcgtgtatgaaaaaattgacggcgctgaaaccgtgctcgtcatcatcaaccgaagcaatgatgccgccgacattccgctcccgctcgaccttcgcggaaaatggcttgttgacctcttgaccggagagcggtttgcggccgaggcggaaacgctttgcgcctctttgcctccgtatgggtttgtgctctataaagttgaaagctggtaa

SEQ ID NO: 13707 - protein, 588 aa, Geobacillus kaustophilus HTA426
MRKEAIHHRSTDHFAYAYDSETLHLRLQTKKHDVDHVELLFGDPYEWHDGAWQFQTMPMRKTGSDGLFDYWLAEVKPPYRRLRYGFVLRAGGEKLVYTEKGFYHEAPSDDTAYYFCFPFLHRVDLFQAPGWVKDTVWYQIFPERFANGNPAISPKGARPWGSEDPTPTSFFGGDLQGIIDHLDYLADLGITGIYLTPIFRAPSNHKYDTADYFEIDPHFGDKETLKTLVKRCHEKGIRVMLDAVFNHCGYEFGPFQDVLKNGAASRYKDWFHIREFPLQTEPRPNYDTFAFVPQMPKLNTAHPEVKRYLLDVATYWIREFDIDGWRLDVANEIDHQFWREFRQAVKALKPDVYILGEIWHDAMPWLRGDQFDAVMNYPLADAALRFFAKEEISARQFADIMIRLLHSYPKQVNEAAFNLLGSHDTPRLLTVCGGDVRKVKLLFLFQLTFTGSPCIYYGDEIGMTGGNDPECRKCMVWDPEHQNRELLAHVKRLIALRKQHRALRRGDVSFLSADDNPNHLVYEKIDGAETVLVIINRSNDAADIPLPLDLRGKWLVDLLTGERFAAEAETLCASLPPYGFVLYKVESW

SEQ ID NO: 13708 - DNA, 1542 bp, Geobacillus kaustophilus HTA426
  CDS (1)..(1542): transl_table=11
atggaaatggggaaccggctctttatgctgctcgtccttccgttccttcttttttatgcctggccggtgcaggcggcggaaaaagaagaacggacgtggcaagatgaagccatttatttcattatggtcgaccggtttaacaatatggatccgacaaacgaccagaacgtgaatgtgaacgatccgaaagggtatttcggcggcgacttgaaaggggtgacggcgaaactcgattacatcaaggagatgggatttaccgccatttggctgacgccgatttttaaaaacatgccgggcggttatcatggctattggattgaagatttttatcaagtcgatccgcactttggcacgctgggcgatttgaaaacactcgtcaaagaagcgcataagcgcgacatgaaagtcattttggattttgtcgccaaccatgtcggttacaatcacccatggttacatgacccaacgaaaaaagattggtttcacccgaaaaaagagattttcgactggaacgaccaaacacagcttgaaaacggctgggtgtatgggttgcctgatttggcgcaggaaaatccagaggtcaaaacgtatttaattgacgctgccaaatggtggatcaaagaaacggacattgacggctatcgcctcgatacggtgcgccatgtgccaaaatcattttggcaggagttcgccaaagaagtgaaatcggtgaaacaagactttttccttcttggcgaagtgtggagcgacgatccgcgctatattgccgagtacggccaatacggcatcgacggttttgtcgattatccgctgtatggcgcggtgaagcagtcgcttgctaggcgcgatgcgtcactgcgcccgctgtatgacgtctgggaatacaacaaaacgttttacgaccgcccgtacttgctcgggacgtttttggacaatcacgataccgtgcggtttacgaaactttcgattgacaaccgcaacaatccgatttcacgcatcaagctggcgatgacgtatttgttcaccgcccccggcatcccgatcatgtattacggaacggaaatcgccatgaacggcggcgaagacccggacaaccgccgcttgatggatttccgcgccgatccggagatcatcgattacttgaaaaaaatcggcccgctccgccaacagctgccgtctttgcggcgcggcgattttacgctcctgtatgaaaaagacggcatggcggtgtggaaacggcaatatgaagatgaaacaacggttatcgccatcaacaacacgggcgaaacgcagcacgttcacctaacgaacgaccagctgccaaaaaacaaggaactgcgcggctttttattggacgatctcgtccgcggcgatggcgacggatacgatcttgtgctcgaccgcgaaacggcggaagtgtacaaactgcgggaaaaaacagggatcaacgttccgtttatcgccgccatcgtatcggtttacgtgttgtttcttttgtttttgtatttggtgaaaaaacgggcgaagcggatgccggaatag

SEQ ID NO: 13709 - protein, 513 aa, Geobacillus kaustophilus HTA426
MEMGNRLFMLLVLPFLLFYAWPVQAAEKEERTWQDEAIYFIMVDRFNNMDPTNDQNVNVNDPKGYFGGDLKGVTAKLDYIKEMGFTAIWLTPIFKNMPGGYHGYWIEDFYQVDPHFGTLGDLKTLVKEAHKRDMKVILDFVANHVGYNHPWLHDPTKKDWFHPKKEIFDWNDQTQLENGWVYGLPDLAQENPEVKTYLIDAAKWWIKETDIDGYRLDTVRHVPKSFWQEFAKEVKSVKQDFFLLGEVWSDDPRYIAEYGQYGIDGFVDYPLYGAVKQSLARRDASLRPLYDVWEYNKTFYDRPYLLGTFLDNHDTVRFTKLSIDNRNNPISRIKLAMTYLFTAPGIPIMYYGTEIAMNGGEDPDNRRLMDFRADPEIIDYLKKIGPLRQQLPSLRRGDFTLLYEKDGMAVWKRQYEDETTVIAINNTGETQHVHLTNDQLPKNKELRGFLLDDLVRGDGDGYDLVLDRETAEVYKLREKTGINVPFIAAIVSVYVLFLLFLYLVKKRAKRMPE

SEQ ID NO: 13710 - DNA, 4983 bp, Geobacillus kaustophilus HTA426
  CDS (1)..(4983): transl_table=11
ttggccaaacaaaggagaagggagcgggggatgatcaagagggcaaggagaatgctatcattggttttggcatcggtgttgttgctggcattgactcctttccaggcggttgccgctgcgaacgaggcaggaagttctagcgctctagggaatggagcgcatcggtggacggccgaatccacggcctcgcaaccacggacgatcacgctcgtcggcacgctacaagatgaattgggccatacggcggaatgggatccgggggcattggcgacgaggatgcatgatgaagggaatgggctttatacattcaccgggacgctgccggctgggacgtatgagtacaaaattgcggtcaatggcagctgggatgaaaactacggagccggcggccgcaatggcgacaatctggtgttgaagctggatcggcaaaccgaggtgacgttttattaccatgaccggacgcatgcgatcgcggattcgacatggtatacggcgattgcgaaggagaaacagccgcgcctcgtcgggacggtgctgccggccatcggctatgagggggagaacgatggatggaccccggggacatcgacggcgctgttgaccgatgacgatttcgactcggtgtacacgtttacggcgcaggtgccgaaagggtcgtatgaatataaaatcgtcctcggaaacaattggaacgagagctacccacaagagaatgcacgcttaaccgttttggaaacgacgaccattacattcttcttcaatgcgaaaacaaaagaggtgtacaccgactacaaccccaatggctctgacggtgttgttcagaaagaccgattaaaacacaatacatgggatacgctgtaccgccagccgtttggtgcggtgaaagcgggaacgaaggtgacgcttcgtctggcggcgaaaaaaggcgatttgacgaaggcggatgtgtatgtgaaaaatgcgacgaccggaaccgccaaagtctacacgatggaaaaagtcagcgtgctcggggatgatgaatattgggaggtggcgttcaccccttcgacgcccggggtgtacgggtataaatttatagcgcaagatgccggaacgaaagtggaatacggcgaagatacgcaagaagggcaatgggggaaagcggtggacagccgcgcggagctgtttcaactgacggtgtatgatccggattacaggacgcccgactggatgaaagaagcggttgtgtatcaaattttcccggatcggttctttaatggcaacccttcaaatgataacagcaagcagcaggcacgcggggcgcagccgattgagcatcgcgattggtcggatttgcccgataatccgcgcctgaaagggacgagcggctacgatggcgacggcgaatggtcgaatgactttttcggcggagatgtggccgggattgaacagaagttggattacttgcagtcgcttggggtgaacacgatttacttaaacccgatcgccaatgcaccgtcaaaccataaatacgatgcaagcaattacaaagaattggatccgatgtttgggtctccggaagagtttcaatcatttgttcaggaactggcgaaacgggggatgcatctcatcttagacggcgtgttcaaccacgtatccgatgattcgatttactttgaccgctatcaccgttatccgacggtcggcgcctatgaatattgggaagcggtttacgatttgatgaacgaaaaaggattgagcgaggaggaagcgcggaaacaggcggaagagaagttcaaacaacaagagcaaacgttcagcccgtatgggtttcatctttggttcaatattgaaaacgaaaaagtcgatggtcgttataagtatcagtcatggtggggctatgacagtctgccggagtttaagtcggtgacgggggaaaaagtgccgaatccgagtgaattgaacaacgatgcgctcgcaaattacattttccgtgaatcggattcggtggcgaaaagctggattgcccgcggcgcctctgggtggcggttggatgtagcgaatgaggtggatccggcgttttggcgcgagtttcgccaagagttgcttcaaggatcgtacgaccgcggcccgacgttaaaagaaggggagcagccgctcattttaggggaaatttgggatgacgcatcgaaatattttctaggcgaccagtacgattccgtgatgaactaccggttccgcggggcggtgcttgactttttgcgaaatgggaatgcagaagaggccgatcagcgactgacggccataagggaagactacccgagcgaagcgttttatgcgctgatgaatttgatcggttcgcatgacacggcgcgggcggtctttctgcttgggaacggaacggattcattcgagcgggcggagtttgatccgaattataatgaagaacttggaaaaaagcggctcaagctagcggcgattttgcagatgggatatccgggggcgccgacgatttattacggtgatgaagcaggggtaagcggctccaaagatccggacaaccgtcgtacgtatccgtggggtaaagaagatcaaaatctgttggcgcactatcggaaagtcggtcaaattcgccagcaccatcaaacgctgttggcccatggcgacatcaagacgttgtatgcgcaaggggatgtatacgtctttgcccgccaatacggtcgtgacgtggcgatcattgccgtcaaccgtggcaatgaggacagaacggtggcgcttgacgtcgcttcgtggctgcccaacggcaccgtgctgacggatgagttgcatgatggcgggaaagctacggtcgctgacggaacgttgacggtcacgattccggccttggacggacggatgatgtttgggacggtgacggcagaaatgcctgccgcggtcagaaatttgcaggcaagcgccgtggttggtggcgtgacgcttacttgggaagggcaagcgtcgaagtatcgggtgtaccaatcaaccattcaaggggctggttatacgttagcggcggaaacgaacgggacttccgtgacgatcgattcgttggcgaacgggaccgcgtattactttgccgttaccgccgtcgatgagaacgggaatgagtcgccaaaggtggaaacgaatcgcgtcgttcctcattatccgctgacgagcgacaatgtccagttcgtgaccacgttaagcgatgccacactcgacttgtcccagccgcaaccaatcgatgtcaaagtgaacatcgacggtgtgacaagcaaaggagcagccgatggattgcaagcggtgttgcaagtgaaagggccgcatgacgaagcatggaaagaatatagagcggtttaccaagggcaagatggcgacgctaatgtgttccgtgccgccttcaccccgcttgtggcagggacgtatacgtatcgctatgcgctgacgaccaaccttggcgaggattgggtgtatacggaagccaaacaagtgacgtttgcggccgactccagcgaccaaaaagcgccggccgaggcgattgcgctgacgccgccgcctgttgagtcagggcaagttcatttgtcatggcagtttgtaggaaaaaatgatgcggatgcatacttgctagtcatcgaacgcaatggaacagtcattcatatgacgacatccatcagcacatcgttcgttgattacggggtcgaaaacggcaccgagtatgcgtacgttgtcaagctgtatgaccgcgctggaaatgtcaccgcgtccaacacggtcaaagtgaagccggacattgtgatggtgaaagtcatttttaaagtcaaagccccagactatacgccgttagatgcccgaattacgattccgaacagtttgaacggctggaacacaggggcatgggaaatgtcgcgcaatggagcggtgacgcctgattggcaatttacaactgaagtgcaagaaggggaaacgatcacgtataagtatgtgaaaggcgggtcgtgggatcaggaagggctggctgatcatacgcctgcagacgttggggatgatgatgtcagttattatggatacggctcgatcggcacggatttgaaagtgaccgttcacaatgaaggaaacaatacgatggttgtggaagaccgcattttgcgctggattgatatgccggtggtcatcgaagaggtgaaaaaacaagggagtcaagtgacgatcaagggcaatgccattaaaaatggcgttttgacgatcaacggtgagcgggtgccgattgatgaccggatgtcattctcgtacacgtttgcgccggccagccatcaaaaagaagtgtcgattcatattgaaccatcggctgaaagcaaaacagccattttcaacaacgacggcggagcgattgcgaaaaacacgaaagattatgtgttgaatttagaaacgaagcaattgcgcgaagggaagttgacaacgccgccaagcaacggcgattctccgggaagcgaaacgccgtcccatgacggaggggcaacaccaggcaacggcacctctccgggcagcggtggtccatcggatggcgcatcccctggggggagcgttccgccgggcggcacagctccaccgggaaacgaagcgcctccatccagaccgccgcaaaaaccgtctccatcgaaaccaaaagagaaaccgagaaagccaaccactcctccaggccaagtgaaaaaagtgtactgggatggcgtggagttgaaaaaagggcaaatcggccgcttgacggtgcaaaagccgatcaatctatggaaacggacgaaggatgggcgccttgtgttcgtccgcatcttacagcctggggaagtataccgcgtctacgggtatgatgcgcgcttcggcgggcagtacgcagtcggcggcgggtattacgtgaccgacatcgacacgcacatccgctatgaaacgccgtcaaaggagaagttgaagttggtgaatggggagtaa

SEQ ID NO: 13711 - protein, 1660 aa, Geobacillus kaustophilus HTA426
MAKQRRRERGMIKRARRMLSLVLASVLLLALTPFQAVAAANEAGSSSALGNGAHRWTAESTASQPRTITLVGTLQDELGHTAEWDPGALATRMHDEGNGLYTFTGTLPAGTYEYKIAVNGSWDENYGAGGRNGDNLVLKLDRQTEVTFYYHDRTHAIADSTWYTAIAKEKQPRLVGTVLPAIGYEGENDGWTPGTSTALLTDDDFDSVYTFTAQVPKGSYEYKIVLGNNWNESYPQENARLTVLETTTITFFFNAKTKEVYTDYNPNGSDGVVQKDRLKHNTWDTLYRQPFGAVKAGTKVTLRLAAKKGDLTKADVYVKNATTGTAKVYTMEKVSVLGDDEYWEVAFTPSTPGVYGYKFIAQDAGTKVEYGEDTQEGQWGKAVDSRAELFQLTVYDPDYRTPDWMKEAVVYQIFPDRFFNGNPSNDNSKQQARGAQPIEHRDWSDLPDNPRLKGTSGYDGDGEWSNDFFGGDVAGIEQKLDYLQSLGVNTIYLNPIANAPSNHKYDASNYKELDPMFGSPEEFQSFVQELAKRGMHLILDGVFNHVSDDSIYFDRYHRYPTVGAYEYWEAVYDLMNEKGLSEEEARKQAEEKFKQQEQTFSPYGFHLWFNIENEKVDGRYKYQSWWGYDSLPEFKSVTGEKVPNPSELNNDALANYIFRESDSVAKSWIARGASGWRLDVANEVDPAFWREFRQELLQGSYDRGPTLKEGEQPLILGEIWDDASKYFLGDQYDSVMNYRFRGAVLDFLRNGNAEEADQRLTAIREDYPSEAFYALMNLIGSHDTARAVFLLGNGTDSFERAEFDPNYNEELGKKRLKLAAILQMGYPGAPTIYYGDEAGVSGSKDPDNRRTYPWGKEDQNLLAHYRKVGQIRQHHQTLLAHGDIKTLYAQGDVYVFARQYGRDVAIIAVNRGNEDRTVALDVASWLPNGTVLTDELHDGGKATVADGTLTVTIPALDGRMMFGTVTAEMPAAVRNLQASAVVGGVTLTWEGQASKYRVYQSTIQGAGYTLAAETNGTSVTIDSLANGTAYYFAVTAVDENGNESPKVETNRVVPHYPLTSDNVQFVTTLSDATLDLSQPQPIDVKVNIDGVTSKGAADGLQAVLQVKGPHDEAWKEYRAVYQGQDGDANVFRAAFTPLVAGTYTYRYALTTNLGEDWVYTEAKQVTFAADSSDQKAPAEAIALTPPPVESGQVHLSWQFVGKNDADAYLLVIERNGTVIHMTTSISTSFVDYGVENGTEYAYVVKLYDRAGNVTASNTVKVKPDIVMVKVIFKVKAPDYTPLDARITIPNSLNGWNTGAWEMSRNGAVTPDWQFTTEVQEGETITYKYVKGGSWDQEGLADHTPADVGDDDVSYYGYGSIGTDLKVTVHNEGNNTMVVEDRILRWIDMPVVIEEVKKQGSQVTIKGNAIKNGVLTINGERVPIDDRMSFSYTFAPASHQKEVSIHIEPSAESKTAIFNNDGGAIAKNTKDYVLNLETKQLREGKLTTPPSNGDSPGSETPSHDGGATPGNGTSPGSGGPSDGASPGGSVPPGGTAPPGNEAPPSRPPQKPSPSKPKEKPRKPTTPPGQVKKVYWDGVELKKGQIGRLTVQKPINLWKRTKDGRLVFVRILQPGEVYRVYGYDARFGGQYAVGGGYYVTDIDTHIRYETPSKEKLKLVNGE

SEQ ID NO: 13712 - DNA, 1689 bp, Azoarcus sp. EbN1
  CDS (1)..(1689): transl_table=11
atgaggacggcaggcgacaacgcgggtggcagggcatggtggaaggaggccgtcgtgtatcagatctatccgcgcagcttcatggattcgaacggcgacgggatcggcgatctgaacggcatcaccgtgcggctcgactacttgaagtcgctcggcgtcgacgtgatctggatctgcccggtgttcagctcgccgaacgatgacaacgggtacgacatcagcgactaccgggcgatcatggacgacttcggcacgatggcggatttcgactgcctgctcgccgaagtccaccgccgcggcatgcggctgatcctcgatctcgtcgcgaaccacaccagcgacctgcacccgtggtttctcgaatcgcgcgcgtcgctgaacaacccgaagcgcgactggtacttgtggcgcgacggcaaggacgggcgcgagccgaacaactgggagagcattttcaagggctcggtgtggaaatacgacgacaagaccggccagtatttcctgcacctgttctcggagcggcagccggacctgaactgggacaacccggaagtgcggaccgcgatctacgaaatggtgcgctggtggctcgacaagggcgtcgacggcttcaggctcgacgccgtcagccacaagaagaaggagccggggctgcccgacatgccgaatccgcacggcctcgattacgtgccgtcgttcgagaagcacatgaacgtcgatggcgtgctcgactacctggacgagttgtgccgccacacgttcgaccactacgacgtgatgaccgtcggcgaagccaacggcgtgtcgccggagcaggccagagcctgggtgggcgaggagcaccggcggctcaacatgatcttccagttcgagcattccgcgctgtggaagaaggcgccgcgcaacgggctcgaccttccggcgctcagggccgtgctgacgaaatggcagaagagtctcgacggcaccggctggaatgcgctgttcctcgaaaaccacgatctgccccgggtcgtttcgcgctggggcgacaccggccgctactggcgtgagagcgcgactgcgctggcaacgatgtatttcctgatgcagggcacgccgttcatctaccaggggcaggaactcggcatgacgaacagccgctttgcggcgctcgatgatttcaacgacgtcctgacgaaaaatcgcttcgcgtcgatgaagcgtgaagggctcgccgagggcgacatcatcgacctgttgtcgatcgtctcgcgcgacaacgcacgcacgccgatgcagtgggacgggtcggcgaacggcgggttcagctccggcacgccgtggctgcgcgttaatccgaacttcaacgagatcaacgccgagctgcaggagcgcaactccgcgtcggtgctgaaccattaccgccgcctcatcgcgctgcgcaaacgcgagcccgggctcgtccatggccactgcgagctgctgatggaggacgacgcgcagatctatgcctacagccgaacgcatggttcgcagcgctacgtgatcatcacgaacatgacgcgcgacgaagcccgataccaccagccggacctgctgctggacggcggcggattgctgctcgcgaaccagccggtcgagccgcacaccccgaccgacagtctgctgctcgagccgtacgaggcgcgcgtgtaccgttttcgctga

SEQ ID NO: 13713 - protein, 562 aa, Azoarcus sp. EbN1
MRTAGDNAGGRAWWKEAVVYQIYPRSFMDSNGDGIGDLNGITVRLDYLKSLGVDVIWICPVFSSPNDDNGYDISDYRAIMDDFGTMADFDCLLAEVHRRGMRLILDLVANHTSDLHPWFLESRASLNNPKRDWYLWRDGKDGREPNNWESIFKGSVWKYDDKTGQYFLHLFSERQPDLNWDNPEVRTAIYEMVRWWLDKGVDGFRLDAVSHKKKEPGLPDMPNPHGLDYVPSFEKHMNVDGVLDYLDELCRHTFDHYDVMTVGEANGVSPEQARAWVGEEHRRLNMIFQFEHSALWKKAPRNGLDLPALRAVLTKWQKSLDGTGWNALFLENHDLPRVVSRWGDTGRYWRESATALATMYFLMQGTPFIYQGQELGMTNSRFAALDDFNDVLTKNRFASMKREGLAEGDIIDLLSIVSRDNARTPMQWDGSANGGFSSGTPWLRVNPNFNEINAELQERNSASVLNHYRRLIALRKREPGLVHGHCELLMEDDAQIYAYSRTHGSQRYVIITNMTRDEARYHQPDLLLDGGGLLLANQPVEPHTPTDSLLLEPYEARVYRFR

SEQ ID NO: 13714 - DNA, 1770 bp, Bacillus clausii KSM-K16
  CDS (1)..(1770): transl_table=11
atgaaagtagcgatctaccatcgcccgaaaagtgaagatgcctacgcgtatgacaaagatacgatccacattcgtctgcgcacgcgcaaagacgatgctcacgaggtcatgcttatttatggagatccttacgattgggcgggaaacgaatgggtgactgccaaaaaaacaatgacacaagcaggggccgatggagaatatgattattggtttgtggaagtgaagccgccctaccatcgccttcgttacgggttcgaaattaaggcaaaagatgagacgatttactatggagaaagtgggttttgcgatacgcctgcaaaagacattagcgattatttctgttttccgtttatgaatcaagccgatttgtttacaccgcctgaatgggttaaagaaacgatctggtatcaaatctttcctgaacgttttgccaatggcgatcattcccgtgaccctgaaaatacattggcttggggaagtgcaccaccgactgcaaccaattatttcggcggtgaccttcaagggattgtcgatcatcttgattatttgcagaagctaggaattaacggcatttatttaacaccaatctttaaagcgttttccaaccataaatacgatacgattgattatttaaaagtagatccccaatttggagatgaaacgacacttaaactgcttgtcgatgaatgccataagcgcggcattcgtgtcatgcttgatgccgtcttcaaccatgcaggcctgtattttccaccttttcaagatgtactaaaacaccagcaggaatcagaatatagggattggtttcatatccgccaatttcctgttcgagcagaggaaccacctaattacgatacgttcgccttcacgcctttaatgccgaaactaaatacagcaaatgaagcagtaaaggactatttattgaacgtagctacgtattggattaaggagtttgacattgacggttggcgtttagatgtcgccaatgaagtcgaccatgccttctggcgtgagtttcgcaacagagtcaaagcattaaaaccagatttgtatattctcggtgaaatatggcataacgcttacccttggctgcaaggcgaccaattcgatggggtcatgaactacccgctcactgacgcgatttttgactttgtccaacacggcaaaagcgcaaccacttttcaatacgcggtcacaaaacatttgtacagttacccaaaattggtgaacgaagtccagttcaatttgctcggcagccatgacacaccaagaattttaactgtaagtgggggcaacaaaaaattagtcaaactttcctacttattgctgttttcctttcctggctcaccttgtatttattacggggatgaaatcggcatggccggagaaaatgaccctggttgccgcgcgtgcatggtgtgggaggaagaccaacaagatcaggagctattccaatttctgcaaaaactaattaagatccgcaaaactcaccaagcaatgggcacctataacaccttaaaattttatgactctggcactgaggatgtgctgttgtattccacatccgctggcggagagcttcttttatttgcggttaaccgcagtaaacaagaagcaacggtcaaactccctgattcactaaagagccttgcatttgtcgatgtcatttgcgaaagcccattgcaaagcgaagagctccacgttgaaggcgagtgctttttgttccttcattctgtcgacgccaacaaatgcggccaagtagacaagtaa

SEQ ID NO: 13715 - protein, 589 aa, Bacillus clausii KSM-K16
MKVAIYHRPKSEDAYAYDKDTIHIRLRTRKDDAHEVMLIYGDPYDWAGNEWVTAKKTMTQAGADGEYDYWFVEVKPPYHRLRYGFEIKAKDETIYYGESGFCDTPAKDISDYFCFPFMNQADLFTPPEWVKETIWYQIFPERFANGDHSRDPENTLAWGSAPPTATNYFGGDLQGIVDHLDYLQKLGINGIYLTPIFKAFSNHKYDTIDYLKVDPQFGDETTLKLLVDECHKRGIRVMLDAVFNHAGLYFPPFQDVLKHQQESEYRDWFHIRQFPVRAEEPPNYDTFAFTPLMPKLNTANEAVKDYLLNVATYWIKEFDIDGWRLDVANEVDHAFWREFRNRVKALKPDLYILGEIWHNAYPWLQGDQFDGVMNYPLTDAIFDFVQHGKSATTFQYAVTKHLYSYPKLVNEVQFNLLGSHDTPRILTVSGGNKKLVKLSYLLLFSFPGSPCIYYGDEIGMAGENDPGCRACMVWEEDQQDQELFQFLQKLIKIRKTHQAMGTYNTLKFYDSGTEDVLLYSTSAGGELLLFAVNRSKQEATVKLPDSLKSLAFVDVICESPLQSEELHVEGECFLFLHSVDANKCGQVDK

SEQ ID NO: 13716 - DNA, 2298 bp, Thermococcus kodakarensis KOD1
  CDS (1)..(2298): transl_table=11
atgaaaaaaggtggtctgctgctcattctcctgattctggtctcaatcgccagcggatgtatctcggagagcaacgaaaatcaaactgcaacggcttcgaccgttccaccgacttcagtgacaccctcacagtcttccactcccacaacctcgacctcgacgtacggcccttccgaaagaacggagcttaaacttccttcggttaactacactcccatctacgtcggcatagagaaaggctgtccctccggaagagtcccggtgaagttcacgtacaaccccggaaacaagaccgtaaagtctgtcagcctccgcgggagcttcaacaactggggagagtggccgatggagctgaagaacggcacgtgggagacgaccgtctgtctccgccctggaaggtatgagtataagtacttcatcaacggccagtgggtcaaggacatgtccgacgacgggacgggaaggccctacgaccccgatgcagacgcctatgcccccgatggctacgggggaaagaacgccgtgagggtagttgagggccgcgaagcgttctacgtggagttcgatccaagagacccagcctacctcagcatcgcggacaaaagaaccgtggtcaggttcgaggctaagagagacaccgtcgagtctgcggttctcgttacggatcacgggaactacacgatgaagcttcaggtctggtgggacttcggcgaaacctggcgcgccgagatgccagttgaacccgctgattattacattctcgtaacctcctccgacggcgggaagtttgccgtcctaaacacaagcgaaagcccgttcttccactttgatggcgttgaggggttcccccagctggagtgggtgagcaacgggataacctaccagatattccccgacaggttcaacaacggcaataaaagcaacgatgccctagctttggatcacgacgagctaattttgaaccaggttaatccagggcagccaatcctctccaactggagcgacccgataacgcccctccactgctgccaccagtacttcggcggcgacataaagggaataacggagaagctcgactaccttcagagcctaggtgttactataatctacatcaacccgattttcctctcgggaagcgcccacggctacgacacctacgactactaccggctcgaccccaagttcgggaccgaggatgagctgagagagttcctcgatgaggcccacaggaggggaatgagggtaatcttcgatttcgtgcccaaccactgcggcatagggaatccagccttcctcgacgtctgggagaagggcaacgaaagcccatactgggactggttcttcgtcaagaagtggcccttcaagctcggcgatgggagcgcctacgtcggctggtggggctttgggagccttccgaagctcaacactgccaaccaggaggtcagggagtacctgataggagcggccctccactggatagagttcggctttgacggcattagggtggatgtgccgaacgaagtcctcgacccggggacgttcttcccggagctgagaaaggcagttaaggagaaaaagcccgacgcgtacctcgtcggcgagatatggacgctctccccggagtgggtgaagggagaccgcttcgactccctcatgaactacgccctcgggagggacatcctcctgaactacgctaagggcctgctcagcggagaaagtgcaatgaaaatgatgggacgttactacgcttcctacggcgagaacgtagttgcgatgggcttcaacctcgttgattcgcacgacacttcgagggttctcactgacctcggtggtggcaaactgggagacacaccgtcaaacgagtcaattcagaggctcaagctcctctcaacgctcctctatgccctgcccggaactcccgtcaccttccagggggacgagaggggactgctcggagacaagggacactacgatgagcaacgctatccgatacagtgggatactgtgaacgaggacgtcctgaaccactacagggcactggcggagctcagaaaaagagttcccgcattgaggagcagcgcaatgaggttctacactgccaaaggcggcgttatggccttcttcaggggacatcatgacgaggttctcgtcgttgccaacagctggaagaagccagccctactggagcttcccgagggagagtggaaagtaatctggcctgaggatttcagcccggaactgcttcgcggcacagttgaagtgccagccatagggataatcatccttgagcggggttga

SEQ ID NO: 13717 - protein, 765 aa, Thermococcus kodakarensis KOD1
MKKGGLLLILLILVSIASGCISESNENQTATASTVPPTSVTPSQSSTPTTSTSTYGPSERTELKLPSVNYTPIYVGIEKGCPSGRVPVKFTYNPGNKTVKSVSLRGSFNNWGEWPMELKNGTWETTVCLRPGRYEYKYFINGQWVKDMSDDGTGRPYDPDADAYAPDGYGGKNAVRVVEGREAFYVEFDPRDPAYLSIADKRTVVRFEAKRDTVESAVLVTDHGNYTMKLQVWWDFGETWRAEMPVEPADYYILVTSSDGGKFAVLNTSESPFFHFDGVEGFPQLEWVSNGITYQIFPDRFNNGNKSNDALALDHDELILNQVNPGQPILSNWSDPITPLHCCHQYFGGDIKGITEKLDYLQSLGVTIIYINPIFLSGSAHGYDTYDYYRLDPKFGTEDELREFLDEAHRRGMRVIFDFVPNHCGIGNPAFLDVWEKGNESPYWDWFFVKKWPFKLGDGSAYVGWWGFGSLPKLNTANQEVREYLIGAALHWIEFGFDGIRVDVPNEVLDPGTFFPELRKAVKEKKPDAYLVGEIWTLSPEWVKGDRFDSLMNYALGRDILLNYAKGLLSGESAMKMMGRYYASYGENVVAMGFNLVDSHDTSRVLTDLGGGKLGDTPSNESIQRLKLLSTLLYALPGTPVTFQGDERGLLGDKGHYDEQRYPIQWDTVNEDVLNHYRALAELRKRVPALRSSAMRFYTAKGGVMAFFRGHHDEVLVVANSWKKPALLELPEGEWKVIWPEDFSPELLRGTVEVPAIGIIILERG

SEQ ID NO: 13718 - DNA, 2724 bp, Xanthomonas oryzae pv. oryzae KACC10331
  CDS (1)..(2724): transl_table=11
gtgggagctgggcctgcccgatcacgccaccgttgccgtggacgatctgtgggacgggcatcgcttcgcgtggcacggcaaataccaacacatccgtctagaggcgaggcggccgttcgcgttatggcgcatccgcgcaggagaggtcgcatgaatgcagtggcatcgttacaagccgacgcggagccatccgccgtggtcgccgaccagcgttggtacaaggacgcgatcatctaccaagtgcacgtcaagtcgttcttcgactccaacgacgatggcatcggcgattttcccggactgatttccaagctggattacatcgccgaactcggcgtggacaccatctggttgttaccgttctaccccagcccgcgccgtgacgatggctacgacattgccgaatacatggcggtgcatccggattacggcagcatcgaagattttgaacagttggtcgcgcaggcgcacgcgcgcggtatccgcatcgtcacagagctggtgatcaaccacacctcggatcagcatccctggtttcagcgcgcacgcactgcgccagccggctcgcccgggcgcgacttctacgtgtggtcggataccgatcaggagtacgaaggcacgcggatcatcttctgcgataccgaaaaatccaactggacctgggatccggtggccgggcagtacttttggcaccgcttctattcgcatcagccggatctgaacttcgataacccggccgtgctggaagctgtgctggaagtgatgcgcttctggctggatcgcggcgtggatggcctgcgtctggatgcagtgccgtatctgatcgaacgcgccggcacctccaacgaaaatctgccggaaacccatgccattttgcgcaagatccgcgccaccctggatgccgaatacccggaccgcatgctgctggccgaagccaacatgtggccggaagacacccagcaatacttcggccagaacgccgacgaatgccacatggcattccacttcccgctgatgccgcgcatgtacatggcaatcgcgcgcgaagaccgcttccccatcacggacatcatgcgccagaccccggagattcccgagagctgccagtgggcgatattcctgcgcaaccacgatgagttgaccctggaaatggtcaccgattcggaacgcgattatctgtggcagacctatgccgccgatcgccgcgcgcgtatcaatctgggtatccgccgccgcctggcgccgttgctggagcgcgaccgccgccgtatcgagttgatgacctcgttgttgctgaccatgcctggcacgccggtgctgtattacggcgacgaaatcgggatgggcgacaacatccatctgggcgaccgcgatggcgtgcgtacgccgatgcagtggtcgatcgaccgcaacggcggcttttcccgtgccgacccagcgcagctggtgctgccaccggtgatggacccgctgtacggcttccaggcggtgaatgtggaagcgcagatccgcgaccagcattcactgctgacctggacgcgccgcgtgctcagcgtgcgcaagcgctaccaggccttcggccgcgggacgctgcggttcctgtatccgggcaaccgccgcatgcttgcgtacctgcgctgttatcaggacgaaaccgtgctgtgtgtggccaatctctcgcacacgctacaagcggtagaactggatctgtccgagttcgaagggcgcgtgccggtggacatcatcggcggcggcagcttcccgccgatcgggcggctgacctacctgctcacggtgccgccgttcggcttttatgcgttcgagctggtgagcgaaggcaccttgccggattggcatgtgcccagcccggtgccgttgccggactaccgcacgctggtgctgcgcagcgatgccgacggaagtgcggcgctgctgccgcatttgcctacgttggaaggcgaaatcctgccggcatggctgtcggcacggcgctggttttcagccaaggatcaggcgctgcgcagtgtgcgcatcgcgcgtcgcacaccgctgccgggcgaccaaccgatgacgctgctggagctggaggtggagctggaggacggccgccgcgagcgctacatgttgccggtgggcatcgtgtgggagcgcgagcaacccagcacgctggctgagcagctggcgctggcgcgcgtgcgtcaaggacgcgaggtgggctacctgaccgacgcgtttgcgctcaagccgatggtacgcggcgtgatcgatgcgctgtgcagcaacgcagcgctaaagttctgcgatggcgaggaggcatcgcaacaaggccaggtacgtttcgaagccaccccggcgctggcgatgctggatatcccgcacgacccggagatccgctggttgtcggccgaacagagcaacagctcgctggtgatcgccgacaaggccgtgttcaagctgctacggcacgttgcggtgggcgcgaacccggagatcgaaatcggccgccggttgaccgagatgggctacgccaacgccgcgccgctgctgggcagcatcagccgcgtcgacgggcagggcacggtcaccaccatcgcgttgttgcagggcttcatccgcaatcaaggcgatgcgtggcgctggacgctcgaccatctggcacgtagcttcgacgaatacgtcgaccgcgcagacagacgaagcgcgcgccgaagccgtcgctggctatga

SEQ ID NO: 13719 - protein, 907 aa, Xanthomonas oryzae pv. oryzae KACC10331
MGAGPARSRHRCRGRSVGRASLRVARQIPTHPSRGEAAVRVMAHPRRRGRMNAVASLQADAEPSAVVADQRWYKDAIIYQVHVKSFFDSNDDGIGDFPGLISKLDYIAELGVDTIWLLPFYPSPRRDDGYDIAEYMAVHPDYGSIEDFEQLVAQAHARGIRIVTELVINHTSDQHPWFQRARTAPAGSPGRDFYVWSDTDQEYEGTRIIFCDTEKSNWTWDPVAGQYFWHRFYSHQPDLNFDNPAVLEAVLEVMRFWLDRGVDGLRLDAVPYLIERAGTSNENLPETHAILRKIRATLDAEYPDRMLLAEANMWPEDTQQYFGQNADECHMAFHFPLMPRMYMAIAREDRFPITDIMRQTPEIPESCQWAIFLRNHDELTLEMVTDSERDYLWQTYAADRRARINLGIRRRLAPLLERDRRRIELMTSLLLTMPGTPVLYYGDEIGMGDNIHLGDRDGVRTPMQWSIDRNGGFSRADPAQLVLPPVMDPLYGFQAVNVEAQIRDQHSLLTWTRRVLSVRKRYQAFGRGTLRFLYPGNRRMLAYLRCYQDETVLCVANLSHTLQAVELDLSEFEGRVPVDIIGGGSFPPIGRLTYLLTVPPFGFYAFELVSEGTLPDWHVPSPVPLPDYRTLVLRSDADGSAALLPHLPTLEGEILPAWLSARRWFSAKDQALRSVRIARRTPLPGDQPMTLLELEVELEDGRRERYMLPVGIVWEREQPSTLAEQLALARVRQGREVGYLTDAFALKPMVRGVIDALCSNAALKFCDGEEASQQGQVRFEATPALAMLDIPHDPEIRWLSAEQSNSSLVIADKAVFKLLRHVAVGANPEIEIGRRLTEMGYANAAPLLGSISRVDGQGTVTTIALLQGFIRNQGDAWRWTLDHLARSFDEYVDRADRRSARRSRRWL

SEQ ID NO: 13720 - DNA, 1260 bp, Vibrio fischeri ES114
  CDS (1)..(1260): transl_table=11
atgattacaaaagcagcgatttatcatcgatctcactctagttattcttatgcatatgataaggatacgcttcatttgcgaattcgtaccgcaaaaggagaagtagacaatgcgacgctaagaattggcgacccatacgattggacttttggtggcggtggcggcaatttaaatgctgaagacgcaagcggctggacaggtggaaccaacttacccatgataaaagagtgtgaaacagaactgtttgactactggttttgtgaagcacaacctcgcttttatcgtgcacgttacgctttccttcttgaaggcaaagacagtgaaaaattactggtaagcgaaaaactcatcacccaaataaccgatgacgccgatccaatactcagtcaattactgaatttttattgcttcccatacatgaacccaactgatgtgtttaacgcaccagaatgggttaaagaaaccatttggtatcaaattttcccagagcgttttgctaatggtgacccatctatctcaccaaaaaatgtactgccttggggatctgaagatccaaaaaccaacagtttctttggtggcgatttacaaggggttattgatcatcttgattacctgcaagatctcggtattactggtatttatttcacacctatcactcaaggtgaaacgaaccataaatacgacaccaccgattatttaaaagtagaccccgcttttggtagtgatgaaacggttcatactttaatagatgaagcacataaacgtggcatgaaagtcatgctagatgcggtatttaatcatatcggtgctaattcaattcagtggcaagatgtcattaaacatggaaaagactctcaatacatcgattggttttatgtcgagcaatttccactgattgatgagtcaaaaaaagcgtaccacagtaaagagcaattaaattatcgtgcctttgcttttgcgcaaaacatgccaaaactcaatacagaaaatccagaagtgattgaatacctaattgaagttggccgctactgggtgaaaaactttgacattgatgcatggcgtttagatgtagcaaacgaagttgatcaacgtttttggcgacgcttccgtgatgaactaaaagccatcaaacctgagttatatattttaggtgaagtgtggcacgactcaatgaactggctaggtggtgatcagtttgatggcgtaatgaattacccattagcggatgccatgttaggcttttttgcccatgacacctaa

SEQ ID NO: 13721 - protein, 419 aa, Vibrio fischeri ES114
MITKAAIYHRSHSSYSYAYDKDTLHLRIRTAKGEVDNATLRIGDPYDWTFGGGGGNLNAEDASGWTGGTNLPMIKECETELFDYWFCEAQPRFYRARYAFLLEGKDSEKLLVSEKLITQITDDADPILSQLLNFYCFPYMNPTDVFNAPEWVKETIWYQIFPERFANGDPSISPKNVLPWGSEDPKTNSFFGGDLQGVIDHLDYLQDLGITGIYFTPITQGETNHKYDTTDYLKVDPAFGSDETVHTLIDEAHKRGMKVMLDAVFNHIGANSIQWQDVIKHGKDSQYIDWFYVEQFPLIDESKKAYHSKEQLNYRAFAFAQNMPKLNTENPEVIEYLIEVGRYWVKNFDIDAWRLDVANEVDQRFWRRFRDELKAIKPELYILGEVWHDSMNWLGGDQFDGVMNYPLADAMLGFFAHDT

SEQ ID NO: 13722 - DNA, 1815 bp, Corynebacterium glutamicum ATCC 13032
  CDS (1)..(1815): transl_table=11
atgactgatacctctccgttgaattctcagccgagtgcagatcaccaccctgatcacgcggctcgcccagttcttgatgcccacggcttgatcgttgagcacgaatcggaagagtttccagtccccgcacccgctcccggtgaacagccctgggagaagaaaaaccgcgagtggtacaaagacgccgttttctacgaagtgctggttcgtgccttctacgatccagaaggcaacggagtcggatcgttgaaaggcctgaccgaaaaactggattacatccagtggctcggcgtggattgcatttggatcccaccgttttatgattccccactgcgcgacggcggttacgatatccgcaacttccgtgaaatcctgcccgaattcggcaccgtcgatgacttcgtggaactcgttgaccacgcccaccgccgtggcctgcgtgttatcaccgacttggtcatgaatcacacctccgaccagcacgcatggttccaagaatcccggcgcgacccaaccggcccctacggagatttctatgtgtggagcgatgatcccaccctgtacaacgaagcccgcatcatctttgtagatacagaagaatccaactggacctatgatccggtgcgtggccagtacttctggcaccgcttcttctcccaccaaccagacctcaactacgacaaccccgcagtccaagaggccatgctagatgtcttgcgtttctggctggacctgggacttgatggtttccgactagatgccgttccttatctttttgaacgcgaaggcaccaacggcgaaaacctcaaagaaacccacgatttcctcaaactgtgtcgctctgtcattgagaaggaataccccggccgaatcctgctcgcagaagccaaccaatggccccaagatgtggtcgaatacttcggtgaaaaagacaaaggcgatgaatgccacatggccttccacttccctttgatgccgcgcatcttcatgggagttcgccaaggttcacgcaccccgatcagtgagatcctggccaacaccccggagattcccaagactgcccaatggggtattttcctgcgtaatcatgatgagctcacccttgaaatggtctccgatgaggaacgcagctacatgtactcccaattcgcctccgaacctcgcatgcgcgccaacgtaggaatccgcaggcgcctttccccactgcttgaaggcgaccgcaaccagctggaactccttcacggtttgttgctgtctctacctggctcacccgtgttgtattacggtgatgaaattggcatgggcgacaatatctggctccacgaccgcgacggagtgcgcacccccatgcagtggtccaacgaccgcaacggtggtttctccaaagctgatcctgaacgcctgtaccttccagcgatccaaaatgatcaatacggctacgcccaagtaaacgtggaaagccaactcaaccgcgaaaactccctgctgcgctggctccgaaaccaaatccttatccgcaagcagtaccgcgcatttggtgccggaacctaccgtgaagtgtcctccaccaatgagtcagtgttgacatttttacgagaacacaagggccaaaccattttgtgtgtcaacaacatgagcaaatatcctcaggcagtctcgcttgatttgcgtgaatttgcaggacacacccctcgagagatgtcgggcgggcagctgttccctaccattgctgaacgggagtggattgtcactttagcccctcacggattcttctggtttgatctcaccgccgatgaaaaggacgatatggaatga

SEQ ID NO: 13723 - protein, 604 aa, Corynebacterium glutamicum ATCC 13032
MTDTSPLNSQPSADHHPDHAARPVLDAHGLIVEHESEEFPVPAPAPGEQPWEKKNREWYKDAVFYEVLVRAFYDPEGNGVGSLKGLTEKLDYIQWLGVDCIWIPPFYDSPLRDGGYDIRNFREILPEFGTVDDFVELVDHAHRRGLRVITDLVMNHTSDQHAWFQESRRDPTGPYGDFYVWSDDPTLYNEARIIFVDTEESNWTYDPVRGQYFWHRFFSHQPDLNYDNPAVQEAMLDVLRFWLDLGLDGFRLDAVPYLFEREGTNGENLKETHDFLKLCRSVIEKEYPGRILLAEANQWPQDVVEYFGEKDKGDECHMAFHFPLMPRIFMGVRQGSRTPISEILANTPEIPKTAQWGIFLRNHDELTLEMVSDEERSYMYSQFASEPRMRANVGIRRRLSPLLEGDRNQLELLHGLLLSLPGSPVLYYGDEIGMGDNIWLHDRDGVRTPMQWSNDRNGGFSKADPERLYLPAIQNDQYGYAQVNVESQLNRENSLLRWLRNQILIRKQYRAFGAGTYREVSSTNESVLTFLREHKGQTILCVNNMSKYPQAVSLDLREFAGHTPREMSGGQLFPTIAEREWIVTLAPHGFFWFDLTADEKDDME

SEQ ID NO: 13724 - DNA, 3327 bp, Pseudomonas syringae pv. syringae B728a
  CDS (1)..(3327)
atggccaaaaagcccggtgacgcgacatttatcaaagacccgctctggtacaaggatgcggtgatttatcaggttcacgtgaaatcgttctttgattccaataacgacggaatcggcgatttcgcgggcttgatcgaaaagctcgactacattgccgcgctgggcgtcaacaccatctggttgttgccgttttatccgtcgccacgccgggacgatggctacgacatttccgaataccgggatgtgcacagcgactacggcaccatggccgatgccaagcgtttcatcgcccaggcacacaagcgcggcctgcgagtgatcagcgagctggtcatcaatcatacttccgaccagcatccctggttccagaaagcccgcaatgccaagcccggttccaaggcgcgggacttctatgtgtggtcggacaccgatcagaagtacgacggtacgcggatcatctttctcgataccgagacgtccaactggacctgggacccggttgccggccagtacttctggcaccgtttctactcgcaccagccggatctgaatttcgacaacccgcacgtgctggatgcggttctggaagtcatgcgcttctggctggatctgggcatcgacggtttgcgtctggatgccattccgtatctcatcgagcgggacggcaccaacaacgagaacctgccggaaactcatcaggtgctcaagcgcatccgtgccgagatcgacgcgaactatccggaccgcatgctgctggccgaggccaaccaatggccggaagatacccagctgtattttggtgacagcaaaggcccggacggcgatgaatgccacatggcctttcactttccgttgatgccacgcatgtacatggcgctggcccaggaagatcgttttccgatcaccgatattttgcggcagacgccggagatcccggaaaattgccaatgggcgattttcctgcgcaaccacgatgaactgaccctggaaatggtcaccgatcgtgagcgtgattacctgtggaattactacgcggccgaccgccgtgcacggatcaacctgggcatccgtcggcgcctggcacccttggtggatcgcgatcgtcgccgggtcgagttgctgaacagcatgctgttgtcgatgcccggcacaccgacgctgtattacggcgacgagatcggcatgggcgataacatctacctgggcgaccgggacggtgtgcgcacaccgatgcaatggtccatcgaccgcaacggcggtttttcgcgcgccgacccggccagcctggtgttgccaccgatcatggacccgatgtacggcttccagtcggtcaacgtcgaaatccaggagcgtgacccgcattcgctgctgaactggaaccggcgcatgctcgccgtgcgcaaacagcagaaggcattcggacgtggcacgctgaaaatgctctcgccgtcgaaccgccgcattctggcgtatacccgcgaatacacagcacctgacggacacagtgaagtggtgctgtgtgtcgccaacgtttccagcgccgctcaggctgcagagcttgagttgtctgcctacgcaggcacggtaccggtggaaatgctcggcggcagcgcattcccgcccatcggccagttgagctacctgctgacgctgccgccgtacggcttttactggtttttactggcttcggagaatcaaatgcccagttggcacgttgaacccgcgcagagcatgccggacttcccgactctggtgctcaagaagcgtctggaagagttgctcgaagagccactgcgcagcaccatggaaaacacctcgctggcggtttacctgcccaaacggcgctggttcgcgggcaaggacaaggcgatcgagaaggtcagcattgcctacgccgtgcgcttcggcgaagaagcgaatccggtgctgctcagcgaaatagaagtcaccgcaggcgggcagaccgatcgctatcaattgccgttcggcttgctggccgaagacgacatcagcagtgcactgccgcagcaactggcgctcgcccgagtgcgtcgcaatcgcgatgtcgggctgatcacggatgcatttaccctggaaactttcatccgcgcagtgattcagggcatgcagtcggatacggtcataccctgtgccgacggcgagttgcgtttcgagcaaagttcgcagctggcacccctcggcctgaacgccgagtcggaagtgcgctacctgtctgccgagcaatcgaacagttcggtggtggtcggcagcagcctggtgctcaagctgattcgcaaagtcagcgccgggacgcaccccgagctggaaatgggcgcgttcctgacccgtgccggcttcaagaacatttcgccgctgctgggctctctggtacgcgtcggcaaggacggtcagcccaacctgctgatgatcgctcagggctatctgagcaaccagggcgatgcgtgggagtggacccagaacaatctcgagcgtgcggtacgtgacgagctggcacatggtgtttccggtcaggaacagcattacaacgcgctgctcgagctcgcggacttctcgcgcagtcttggccagcgtctgggtgagatgcaccagattctcgcgtcgcccaccgacaatgcggattttgccgtcgaagtcaccagcagccaggacagcaaggcctccggggtcagcgtcaacgctcagctcgagcgcgccttgcagctgctggaacagcgcatcggcgagctggacaaggacgatcagcaactggtcaacgatctgctcgcgcagcgcaagcagatccgccagcgcgtcgaaggcctggccaagcgctccgccggtggcctgcgcattcgtgtgcatggcgatctgcatctggggcaagtactggtggtcaagggtgatgcctacctgatcgatttcgagggtgaaccggcccgcgcacttgaagagcgccgtgccaagcacagcccgttcaaggatgtcagcggtgtcctgcggtcctttgactacgctgcggccatggctgtacgcagtgcgcagagcgtcgacacgtctcccgaggcagccggcgcgcgcaaacgtgttgccgatacctacctggcgcaggcgcgagaaacctttatcgagggttatcgctcggcgaccaccggcattgcccatgcctggaaagatgcaaaaggggaggacgctgcactcgagctgttcacccttgaaaaagctgcttatgaagtgatctacgaagccgagaaccgtccagcctggctggccgttcccttgcaaggcttgcgtgggttgctgcaaccgtctgatggagagtcaatatga

SEQ ID NO: 13725 - protein, 1108 aa, Pseudomonas syringae pv. syringae B728a
MAKKPGDATFIKDPLWYKDAVIYQVHVKSFFDSNNDGIGDFAGLIEKLDYIAALGVNTIWLLPFYPSPRRDDGYDISEYRDVHSDYGTMADAKRFIAQAHKRGLRVISELVINHTSDQHPWFQKARNAKPGSKARDFYVWSDTDQKYDGTRIIFLDTETSNWTWDPVAGQYFWHRFYSHQPDLNFDNPHVLDAVLEVMRFWLDLGIDGLRLDAIPYLIERDGTNNENLPETHQVLKRIRAEIDANYPDRMLLAEANQWPEDTQLYFGDSKGPDGDECHMAFHFPLMPRMYMALAQEDRFPITDILRQTPEIPENCQWAIFLRNHDELTLEMVTDRERDYLWNYYAADRRARINLGIRRRLAPLVDRDRRRVELLNSMLLSMPGTPTLYYGDEIGMGDNIYLGDRDGVRTPMQWSIDRNGGFSRADPASLVLPPIMDPMYGFQSVNVEIQERDPHSLLNWNRRMLAVRKQQKAFGRGTLKMLSPSNRRILAYTREYTAPDGHSEVVLCVANVSSAAQAAELELSAYAGTVPVEMLGGSAFPPIGQLSYLLTLPPYGFYWFLLASENQMPSWHVEPAQSMPDFPTLVLKKRLEELLEEPLRSTMENTSLAVYLPKRRWFAGKDKAIEKVSIAYAVRFGEEANPVLLSEIEVTAGGQTDRYQLPFGLLAEDDISSALPQQLALARVRRNRDVGLITDAFTLETFIRAVIQGMQSDTVIPCADGELRFEQSSQLAPLGLNAESEVRYLSAEQSNSSVVVGSSLVLKLIRKVSAGTHPELEMGAFLTRAGFKNISPLLGSLVRVGKDGQPNLLMIAQGYLSNQGDAWEWTQNNLERAVRDELAHGVSGQEQHYNALLELADFSRSLGQRLGEMHQILASPTDNADFAVEVTSSQDSKASGVSVNAQLERALQLLEQRIGELDKDDQQLVNDLLAQRKQIRQRVEGLAKRSAGGLRIRVHGDLHLGQVLVVKGDAYLIDFEGEPARALEERRAKHSPFKDVSGVLRSFDYAAAMAVRSAQSVDTSPEAAGARKRVADTYLAQARETFIEGYRSATTGIAHAWKDAKGEDAALELFTLEKAAYEVIYEAENRPAWLAVPLQGLRGLLQPSDGESI

SEQ ID NO: 13726 - DNA, 1659 bp, Lactobacillus gasseri
  CDS (1)..(1659)
atgagacattggtatgaccgagcaattatttatcaaatttatcctaagtccttccaggattctaacggtgatggtattggcgacttaaatggtattagaaaaagaataccgtatttgaaggaactaggagttaatgctgtctggctgaatccagtctttgtttcaccacaagttgataatggctatgatgtatcaaactattttgccattgaccccaaaatgggaaccatggaagatatggatgacttaatcaaagaaatgcatgaagctggaattcatgtaattatggattttgttttaaaccatacttctgatcaacatccgtggtttcaagatgcaattaaaaaccctgatagtatttatcgagactactatatttttgctggtaaaaataatcagagaccaaataattggggaagtttttttggaggtagtgtttgggagaaagatcctgctggaacagggcaattttattttcatctttttgataaaagaatgcccgatttgaactggaaaaatcctgaagtcagacatgcaatgagtgaaattgcaaaatattggctagaaaagggaattgacggcttgagattagatgcctttatccatattgctaaagcagatttaaggcaaaatttcccagttaatagtgaaaatgaagaacccgtgatagctgagccattttttgcaaacttaccacaagtacaaaaatggatgcgacctttctgtgaggaaataaagcaagattatcctgatgcactattgttaggagaagcagcaagcgcgaatgttaatttagcagttgattatacaaataaagataatcacttgatggatagtgtaattacatttagatactttacagaggatcaaagtcagattgatcctagtttttcagctcaataccagccgaaatcattagatttagtaaaatttaagcaaaatcaggctgtttggcaacaaactttaagtggtgtttctaagccaaccttgtactggaataatcatgatatggctagaatagcgactagaattgctaaaaatgatattcaagctcggagcttagccatgctcatgtatttacaaaatgggttgccgattatttattatggcgaagaactcggaatgaaaaatttggagtttgaagacgcaacacaatttgaagatgagacagttaaagaatttattgaaagcgccaaaaaagctggaaaaactagtcaagaagcattactaatggcaagtaaaacccataaattgccagctagagggccaatgccatggaataatgaaaaaaataatggctttagtgatggaaatccttggcttaaaggaaagaaagttgattatgctaatgcggctgatgaaatagcagataaccatagcatgtttaatttctacaaaaaattgatcgccctaaagaaagaagcattgtttgaagatggtggctactatttattaccaacgtcaaatgacagctatgtttatgagcgtaatttagaagatcaaaaagcattagtcgctgtttctttaagtaaagatcctattgagcttgacgtagatcctgaatttaagcaggaaaaattagtagcaggcaactatcaattgaaagatggaaaattaaaattagctccgtatgcgggagtagtattagaaaaagactaa

SEQ ID NO: 13727 - protein, 552 aa, Lactobacillus gasseri
MRHWYDRAIIYQIYPKSFQDSNGDGIGDLNGIRKRIPYLKELGVNAVWLNPVFVSPQVDNGYDVSNYFAIDPKMGTMEDMDDLIKEMHEAGIHVIMDFVLNHTSDQHPWFQDAIKNPDSIYRDYYIFAGKNNQRPNNWGSFFGGSVWEKDPAGTGQFYFHLFDKRMPDLNWKNPEVRHAMSEIAKYWLEKGIDGLRLDAFIHIAKADLRQNFPVNSENEEPVIAEPFFANLPQVQKWMRPFCEEIKQDYPDALLLGEAASANVNLAVDYTNKDNHLMDSVITFRYFTEDQSQIDPSFSAQYQPKSLDLVKFKQNQAVWQQTLSGVSKPTLYWNNHDMARIATRIAKNDIQARSLAMLMYLQNGLPIIYYGEELGMKNLEFEDATQFEDETVKEFIESAKKAGKTSQEALLMASKTHKLPARGPMPWNNEKNNGFSDGNPWLKGKKVDYANAADEIADNHSMFNFYKKLIALKKEALFEDGGYYLLPTSNDSYVYERNLEDQKALVAVSLSKDPIELDVDPEFKQEKLVAGNYQLKDGKLKLAPYAGVVLEKD

SEQ ID NO: 13728 - DNA, 1467 bp, Nostoc punctiforme PCC 73102
  CDS (1)..(1467)
atgcaaattcaaacaccagattgggtaaagcacgctgttttctaccaaattttcccagatcgctttgccagaagcaaacagccgcgcaaacggttattgcaagaagcccgttgggaagattgggactctatgccaaccctccagggttataaaggtggggatttatggggcatcatggaggatttagactacatccagaatttggggattaacgcgatttatttcacacccatctttcaatccgccagtaatcaccgctatcatacccacgattattatcaagttgacccgatgttagggggcaacgaggcttttaaagaattgcttgatgcagcccatcaacggaatatcaaagtcgttctggatggggtgtttaaccattccagccgtggctttttctttttccacgacgttttagaaaatggcccccattcaccttgggtaaattggttcaaaatagaaggctggcccctttcaccttataacggtgaattccctgcaaactacgtgggttgggcgggaaatcgcgccttgccagaatttaaccacgataatccagaagtacgagaatatattatggaaattgccgaatattggcttaaattcggcatcgacggttggcgattagatgtcccatttgaaataaaaactccgggtttttggcaggaattccgcgatcgcactaaagccatcaatcccgaagcatatattgtgggcgaagtgtggggagattcccgccagtggttggatggaacgcaatttgacggcgtaatgaattatttatttgctgggccgacaattgcttttgcagctggcgatcgcgtagtcttagaacaagtccaaagccgcgactatcaaccctacccacccttatttgctgccgagtacgccaccaaaatccaagaagtactgcaactttacccttgggaaattcagctaactcaactcaatttgttagcaagtcacgatacagcccgattgatgaccattgcaggcggtgatatagcgagtgtagaattatcgactttactgttactcacctttcccggtgcccccagcatttactatggtgatgaagtcggtttacctggtggcatagatcccgactcaaggcgtggctttcctttagaggctaactggaatcaagaaattttcaatactcatcgtcaattaattaccatccgccaaacatacccagccttgcgtacaggtgattaccaagtcctctatgctcaagggcaactttatctctttgcacgaactttaggcacagaagaattgataattgctataaacgctggcacaagttcggcaaccgcaaatgtagatgtggctagtttgcatactcaacccaacaagctgttatatggtactgctgaagctgagtggaatggtgaagaaggaactcagcaattgtcattaactcttcccgcacgcagtggctgcatcctggggactggggactag

SEQ ID NO: 13729 - protein, 488 aa, Nostoc punctiforme PCC 73102
MQIQTPDWVKHAVFYQIFPDRFARSKQPRKRLLQEARWEDWDSMPTLQGYKGGDLWGIMEDLDYIQNLGINAIYFTPIFQSASNHRYHTHDYYQVDPMLGGNEAFKELLDAAHQRNIKVVLDGVFNHSSRGFFFFHDVLENGPHSPWVNWFKIEGWPLSPYNGEFPANYVGWAGNRALPEFNHDNPEVREYIMEIAEYWLKFGIDGWRLDVPFEIKTPGFWQEFRDRTKAINPEAYIVGEVWGDSRQWLDGTQFDGVMNYLFAGPTIAFAAGDRVVLEQVQSRDYQPYPPLFAAEYATKIQEVLQLYPWEIQLTQLNLLASHDTARLMTIAGGDIASVELSTLLLLTFPGAPSIYYGDEVGLPGGIDPDSRRGFPLEANWNQEIFNTHRQLITIRQTYPALRTGDYQVLYAQGQLYLFARTLGTEELIIAINAGTSSATANVDVASLHTQPNKLLYGTAEAEWNGEEGTQQLSLTLPARSGCILGTGD

SEQ ID NO: 13730 - DNA, 1674 bp, Nostoc punctiforme PCC 73102
  CDS (1)..(1674)
atggcaaatttaactgactttaaattgtttgctcctcgcaacaaaggagcagctttaattgggtctttttcggattggaaagaaattccaatgtctaaaagtgaagatggttattttcgcactaaaatcaaactggaagacggcgtttatcaatataaatttcgcattcaaactaaaagtccaaattttgcacctgatgaatggatcgatgtcattgatcctaaagcaacagaagttaatgaaacagaaaaatatggcatagttcgtattcaagatgggcaacgcattgttgatagttacttttggcaacacgatgaaatgccgttgcctgataaccgggaattagtcatatatgaaatgcacgttgctgattttactggtgatgaagttgattctaacgagcgaggcaaatatctagggataattgctaagttagattatctttgcgaactgggaattaatgcaattgaattaatgccagttaatgagtaccctggtgattatagctggggctataaagttcgccacttctttgctacagaatctagttacggttcaacagaagatttaaagcgattgattgacgagtgtcatggtagaggtattcgcgtctttatggatggaatttataaccacacagatgaagaatgcccattaatactaattgaccgcaattactggtactacgaacataaacattatcctgaagacccagctaattactgggggccagagtttaactatgatttttacgacaaaaacttaaatattcaacctgcatgggaatacatcggcgatgtggtaaggttttggattcaggaatatcacattgatggaattcgctttgatgcagtacggcaattggctaactttgaatttctcaactggctgactaagcaagcgaaaaaccatgctgcacccaagcagttttacaacattgctgaacacattcccgatacaaacactgtagtcaagccagatgggccattagatgcttgttggcatgagagctttcgctactttttagttccatatatttgtggaaaatcatttgaattagaacaactcaagcaaattttagaccccaaacagcagggttatgcgatcgctaccaatgtgataaattatttggcaacccacgatcgcgaacgtctattacgagaattaggcaattgcggcatctttgacgcagccgcatttgaacgagccaagttagcagctgttttgttaatgacagcgatgggtataccgatgctgtggatggcagaagagtttggcgaataccagcaaaaaagtgaagatgtgactaagccgcagaaaattacttggtctttgttgttagacgaccaaaattatgatttatttgagtattatcaaaagctgattactctacgccagcaaactccagctttgcaaagtgacaatattaagtttttctacgaaaatgcagatgataaagtgttggcttacagccgttgggatgagcaaaattctcatgtcgtcgttgtggtaaatttttccgatcggagtctaaatcaatataaaatttccgacttcccaactactgaagattggcgagattgggttggtaatcgggaagtgaaatctggagaagatggtttagtcactgacttgccaagctatacagctaaaatatttgttttgcaaacatga

SEQ ID NO: 13731 - protein, 557 aa, Nostoc punctiforme PCC 73102
MANLTDFKLFAPRNKGAALIGSFSDWKEIPMSKSEDGYFRTKIKLEDGVYQYKFRIQTKSPNFAPDEWIDVIDPKATEVNETEKYGIVRIQDGQRIVDSYFWQHDEMPLPDNRELVIYEMHVADFTGDEVDSNERGKYLGIIAKLDYLCELGINAIELMPVNEYPGDYSWGYKVRHFFATESSYGSTEDLKRLIDECHGRGIRVFMDGIYNHTDEECPLILIDRNYWYYEHKHYPEDPANYWGPEFNYDFYDKNLNIQPAWEYIGDVVRFWIQEYHIDGIRFDAVRQLANFEFLNWLTKQAKNHAAPKQFYNIAEHIPDTNTVVKPDGPLDACWHESFRYFLVPYICGKSFELEQLKQILDPKQQGYAIATNVINYLATHDRERLLRELGNCGIFDAAAFERAKLAAVLLMTAMGIPMLWMAEEFGEYQQKSEDVTKPQKITWSLLLDDQNYDLFEYYQKLITLRQQTPALQSDNIKFFYENADDKVLAYSRWDEQNSHVVVVVNFSDRSLNQYKISDFPTTEDWRDWVGNREVKSGEDGLVTDLPSYTAKIFVLQT

SEQ ID NO: 13732 - DNA, 1266 bp, Bifidobacterium longum DJO10A
  CDS (1)..(1266)
atgcccgattgggtgaagtacggggtgttctggcacgtgtatccgctgggcttctgcggtgccgatatcaggcccgccggcccgcgccagttccatggccgcggccttgacgcgataattccctggctggagtacgtgcgcgatctaggcgcgtccggcctgctgctgggtccggtgttcgagtcggcgacgcatggatacgacacgctcgaccatatgcatatcgatgtgcgattgggcggggatgccgcgttcgatcagcttgtcgcggcctgccgggacatgggattgcaggtgatgctggatggcgtgttcaatcatgtgagccgcaatcatccggccgttcaggcggcgcttgacgagaccgccggacgcttgaatccggccgacaacccgtggcatggtctggtccgcgcgcatgtcggtgataatggcgaacccgctttggatgtgttcgaggggcacggggatctggtggcgctggaccattcggctgacgagaccgttgactatgtggtccatgtgatgagccattggctggatcgcggagtcgccggctggcgcctcgacgccgcgtatgccgtgccgagcccgttctgggcgcgcgtgttgccgcaggtcaaagccgcacacccgtattcgtggattttcggcgaggtgatccatggcgattacccgcgcatcatcgaggaatccacgatggattcgatcacgcaatacgagctatggaagtcgatccagcatgcgctggagacggagaacttcttcgagctggattggaacttgaagcggcacaacgcgttcctggattccttcgtgccgcagacgttcatcggcaaccatgacgtgacgcgtatcgcatcgcagattggcccggccaaggcggcgttggcattggcggtgctcatgacggtcggcggcgtgccaagcatctattacggcgacgaacagggctatgtgggcgtcaagcaggagcgtttcggcggcgatgacgacgtacgtccgaagttccccggctcccctgccgaactgtccacgctgggagagccgacataccggctgcatcaggcgctgatcgcgctgcgccgtcgcaacccatggctgctggatgcgcgtaccgaggccgtgaagctggaaaacaagcacttcgtctatcgttcgacgagcgccgacgcccagcattccctgaccgtggacctcaacatcgagcaatcccccactttcaccatccgcaacgccgatggcagtacagcgtatcaatggtga

SEQ ID NO: 13733 - protein, 421 aa, Bifidobacterium longum DJO10A
MPDWVKYGVFWHVYPLGFCGADIRPAGPRQFHGRGLDAIIPWLEYVRDLGASGLLLGPVFESATHGYDTLDHMHIDVRLGGDAAFDQLVAACRDMGLQVMLDGVFNHVSRNHPAVQAALDETAGRLNPADNPWHGLVRAHVGDNGEPALDVFEGHGDLVALDHSADETVDYVVHVMSHWLDRGVAGWRLDAAYAVPSPFWARVLPQVKAAHPYSWIFGEVIHGDYPRIIEESTMDSITQYELWKSIQHALETENFFELDWNLKRHNAFLDSFVPQTFIGNHDVTRIASQIGPAKAALALAVLMTVGGVPSIYYGDEQGYVGVKQERFGGDDDVRPKFPGSPAELSTLGEPTYRLHQALIALRRRNPWLLDARTEAVKLENKHFVYRSTSADAQHSLTVDLNIEQSPTFTIRNADGSTAYQW

SEQ ID NO: 13734 - DNA, 3333 bp, Desulfovibrio desulfuricans G20
  CDS (1)..(3333)
atgagcattatgattgagccggcgggccttgatccgcagtggtacagggatgccatcatatacgaattgcacatcaaatcgtttcatgattccgacggcgacggcatgggcgatatggcggggctgattgaaaaactggactatctgcaggatctcggggtcacggcgctgtggctgctgcccttttacccctctccgctgcgtgatgacggctacgatattgccgactacatgagcatcaaccccgactacggcagcatggctgacttccgcaagctgctgcgcgaggctcattcccgcgggttgcgcgtcattacagaactggtgctcaaccacacctcagaccagcatgcctggttccggcgggcgcggcgggcccctgccggttcggaagagcgcgatttttacgtgtggagcgatacctcggacaggtacaaggacgcccgcatcattttcaaagacttcgagccttcaaactggtcatgggaccctgtggcacgggcatattactggcatcgtttctatcatcaccagcctgatctcaattatgaaaatccggccgtgcacaaggccatgttccgggtcatcgacttctggctggacatgggggtggacggagtgcggctggatgctgtgccctatctgtacgaagaagaaggcacaaactgcgaaaatctgccgcggacccatgattttcttaaagcgttgcgcagccacatagacagcagatttcagggccgcatgctgctggccgaggcgaaccagtggccggaagacgcggcccgttatttcggcgacggtgattcgtgtcatatggcatttcattttccgcttatgccgcgcatgtttatggccattgaaatggaagaccgtcatccggtcattgatataatggagcagactccggaactgccggacggttgccagtgggctatttttctgcgtaaccatgacgaactgacgctggagatggtgacggacgaagagcgcgactacatgtaccgcatgtatgcccgtgatccgcgtgcgcggataaatctcggcatccgccgccgccttgccccgctgctgggcaacgaccgccgcagagtggagctgcttaacgtgctgcttttcaccatgccggggacaccggtgctttattatggtgacgagataggcatgggggacaactactatctgggcgaccgcgacggtgtgcgtacccccatgcaatggagtgcggacagaaacgccggtttttcacgctccaatccgcagcgtctttttctgccggtggtcatcgatccggaataccactacgaggctgtgaatgtggaaacgcagcagtccaacaaaagttcgctgctgtggtggatgaagcgcatcatcgccatgcgcagaagatatacggctttcagccggggcggcatttcgtttctccggccggaaaactcccgtgtgcttgcctacatgcgcagctctggtgaagaacatgtgctggtggtgactaacctgtcgcggcacgcacaggcagcttcgctggatttaagcggctgggaaggctaccggccggtggaagtcttcagcaacacgcgctttcccgctgtcaggcaaccggcgtatacaattacgctcaatccttacggctactatattttccacatgcgcagagaggaggcggcggaagcgcttaccggattattttcgccgcctatgctcatgccggtgtccggagcgcgttttcttgatgtggaagtacgcgaggcgctgcagcgcagagttctgcccggctatctgacacgtcgcggattgctgggaacaagcgccgtgcagctgcgcgaggctgtcattctggaagcggtgcccgtgggcggcaagggtgcccccagctggttgctgattgtggaagcacggtatcaggagcgccagccggaatggttcggcatgcttgtatcgttgctggctggtgaacctgcccggcagacggtgcgtgaagcgcctgtgcatctcatgtgcacttttggtgaagacgcgccggaagccgtacttgtggaatcctttgatgccagctgccgttgcggcgcgttgctgcagcttgtctcgcgcacgcagacagtgaagggcaggcacggcgagctggcagtggcccccgccggcggtacccgcggcagagtgcgggcggcctgcgccgaagatgctcctgccctgtggaagccccatatccacgccaccagcgttgtctgcggtgaaagtgtgcttttcaaggtgtaccgccgcatggacgaaggtgtgaatccggatgtggaactgctgcgctttctgaccgaagaggcggggtatcctcatgtgcccgcgtatatgggcgttgtggagtacagacggtcgcgcacatcgtccatggctgtggccatgctgcatgaatatgtgcaggcgcagggcgacgcacaggaaatgtgccgcgatatggtacgcaggttctttgacagggtgctggccgcacggggcgagatggatatccgtccccggctgtatgcccgttctcccgtggaagccgcaggaagacctttgccgcaggaataccgtgaacttatgggcgatatggattttgccggcatgcagctgctgggcaggcgtgtgggcgaactgcaccgcgcgctggcgttcagctctgaagactctgcttttgctccggagccgttttccaccctgtatcaacggtctgtgtatcagggtatgcaaagccgggtaaagcaggtcctgacccgtctggaacgttcgcttgctttgctgccggaatcggccagagacgatgctgcgcgggtgctggaactgcgcgaagaagctttgcggcgcatgcgcggttttcttacgcgcaaacttgattgtctgaaaatcagggtgcatggcaacctgcatctgggcaatgtgctgcgcagcggcagagagtatgtgatcgtgaactttgagggcaggccggacaagtctctttccgaacggaggctgaagcgttcacccctgcgcgatgtggcagatctggtacggtcggtgcattacaccgtgctcacggtgctgatgcatgaatcggttctccggcctgaagaccgcgcgtttcttgaaccctgggccgatttgtggcgcatagaagcctcaggagctttcatgaccacatatcttgaagccgtgggcggcagcaggctggtgcccgaaaatgaacaaggcgttcaggtgctgctggaagcgtttttgctggaaaaagcgtttatggagcttgatgcagaactgaaagcgccttccggcatggtgggactgccgctggctgccattatcaccctgctgggagcagagggctga

SEQ ID NO: 13735 - protein, 1110 aa, Desulfovibrio desulfuricans G20
MSIMIEPAGLDPQWYRDAIIYELHIKSFHDSDGDGMGDMAGLIEKLDYLQDLGVTALWLLPFYPSPLRDDGYDIADYMSINPDYGSMADFRKLLREAHSRGLRVITELVLNHTSDQHAWFRRARRAPAGSEERDFYVWSDTSDRYKDARIIFKDFEPSNWSWDPVARAYYWHRFYHHQPDLNYENPAVHKAMFRVIDFWLDMGVDGVRLDAVPYLYEEEGTNCENLPRTHDFLKALRSHIDSRFQGRMLLAEANQWPEDAARYFGDGDSCHMAFHFPLMPRMFMAIEMEDRHPVIDIMEQTPELPDGCQWAIFLRNHDELTLEMVTDEERDYMYRMYARDPRARINLGIRRRLAPLLGNDRRRVELLNVLLFTMPGTPVLYYGDEIGMGDNYYLGDRDGVRTPMQWSADRNAGFSRSNPQRLFLPVVIDPEYHYEAVNVETQQSNKSSLLWWMKRIIAMRRRYTAFSRGGISFLRPENSRVLAYMRSSGEEHVLVVTNLSRHAQAASLDLSGWEGYRPVEVFSNTRFPAVRQPAYTITLNPYGYYIFHMRREEAAEALTGLFSPPMLMPVSGARFLDVEVREALQRRVLPGYLTRRGLLGTSAVQLREAVILEAVPVGGKGAPSWLLIVEARYQERQPEWFGMLVSLLAGEPARQTVREAPVHLMCTFGEDAPEAVLVESFDASCRCGALLQLVSRTQTVKGRHGELAVAPAGGTRGRVRAACAEDAPALWKPHIHATSVVCGESVLFKVYRRMDEGVNPDVELLRFLTEEAGYPHVPAYMGVVEYRRSRTSSMAVAMLHEYVQAQGDAQEMCRDMVRRFFDRVLAARGEMDIRPRLYARSPVEAAGRPLPQEYRELMGDMDFAGMQLLGRRVGELHRALAFSSEDSAFAPEPFSTLYQRSVYQGMQSRVKQVLTRLERSLALLPESARDDAARVLELREEALRRMRGFLTRKLDCLKIRVHGNLHLGNVLRSGREYVIVNFEGRPDKSLSERRLKRSPLRDVADLVRSVHYTVLTVLMHESVLRPEDRAFLEPWADLWRIEASGAFMTTYLEAVGGSRLVPENEQGVQVLLEAFLLEKAFMELDAELKAPSGMVGLPLAAIITLLGAEG

SEQ ID NO: 13736 - DNA, 1467 bp, Anabaena variabilis ATCC 29413
  CDS (1)..(1467)
atgcaaattcaaacaccagactgggtgaaaaacgctgtattctaccaaatctttccagaccgttttgctataagtaaacagtcccggaagcggctgttgcgtgatgtgcgttgggaagactgggacgcaatgccaacactgcaaggatacaaaggcggtgatttatggggcattatggagcagttggactatattcaagatttgggcatcgatgccatctactttacgcccatctttcagtctgccagcaatcaccgctatcatacccacgactattatcaagtagacccgatgttgggtgggaatgccgcttttaaggagttactagacgcggcccacgaacgcaatattaaagttgtcctcgatggcgtatttaatcattccagtcgaggatttttctttttccatgacgttttggaaaatggcccccattctccttgggtaaattggttcaaaatagaaggctggcctcttgcaccatatacaggtgagttaccggcaaattacgtaggttgggctgataatcgtgccttgcccgtatttaatcacgataacccagacgtacgggaatatattatggaaattgccgaatattggcttaaattcggcatcgacggctggcgattggatgtaccatttgaaattaaaactcctggcttttggcaagaattccgcgatcgcgttaaagccattaaccccgaagcttatattgtgggggaagtgtggggagattcccgtgagtggctagatgggacgcaattcgacggcgtgatgaattacttatttgccgggccgaccattgcttttaccgcaggcgatcgcgtagtcttagaacaagtccaaagccgcgactatcaaccgtatccgcccctattcgccgccgaatacgccaccaaaattcaggaagtactgcaactttatccttgggaaattcaacttacccaactcaacttattagccagtcacgatacagccagactaatgaccattgctggcggtgatcaagccagtatagaattagctaccctattactacttacctttcctggtgcgccgagtatctactacggtgatgaagtgggtttaccgggaggtatagaccccgattctcgccggggttttcccttagaagccaactgggatagagaaatttaccagactcaccgtcaattaatagccttacgccacgcttacccagccttacgcacaggtgagtatcaagttatttgggcgcaaggtgcattgtatgtatttgcccgtactttaggtaaggaagaactgattattgctgtaaatgtaggtacagcaccagcccaggctaatgtagatgttgctagtttgcagactcagccagataaaatcctgtatggcgaagcagaatttagctggcacaatacagaagaaacaaaacaactttccttaaatctccccccacgtagtggctgcattttgggtttaggggattag

SEQ ID NO: 13737 - protein, 488 aa, Anabaena variabilis ATCC 29413
MQIQTPDWVKNAVFYQIFPDRFAISKQSRKRLLRDVRWEDWDAMPTLQGYKGGDLWGIMEQLDYIQDLGIDAIYFTPIFQSASNHRYHTHDYYQVDPMLGGNAAFKELLDAAHERNIKVVLDGVFNHSSRGFFFFHDVLENGPHSPWVNWFKIEGWPLAPYTGELPANYVGWADNRALPVFNHDNPDVREYIMEIAEYWLKFGIDGWRLDVPFEIKTPGFWQEFRDRVKAINPEAYIVGEVWGDSREWLDGTQFDGVMNYLFAGPTIAFTAGDRVVLEQVQSRDYQPYPPLFAAEYATKIQEVLQLYPWEIQLTQLNLLASHDTARLMTIAGGDQASIELATLLLLTFPGAPSIYYGDEVGLPGGIDPDSRRGFPLEANWDREIYQTHRQLIALRHAYPALRTGEYQVIWAQGALYVFARTLGKEELIIAVNVGTAPAQANVDVASLQTQPDKILYGEAEFSWHNTEETKQLSLNLPPRSGCILGLGD

SEQ ID NO: 13738 - DNA, 3366 bp, Ralstonia eutropha JMP134
  CDS (1)..(3366)
atgaaacgcctgaccgaacccgccaacgccctgctgctcaacgcggatccgctctggtacaaggacgcggtggtctaccagcttcatatcaagtccttctacgacgcgaacggcgacggcgtgggggacttcgcgggcctgctggccaagctggactacctggtcgacctcggcattgacacgatctggctgctgccgttctacccgtctccgcggcgcgatgacggctacgacattgcggattaccgcaacgtgcatcccgactacggcacgctcgccgaagcccgccgcttcgtcggggctgcgcatgcgcgcggcatccgcgtcatcacggaactggtcatcaaccacacctcggaccagcatccgtggttccagcgagcgcgcaaggccaagccgggctccgccgcgcgccgctactacgtgtgggccgacaatgaccaggcctatgccggcacccgcatcatcttctgcgacaccgagaaatcgaactggagctgggaccctgtcgccggcgcgtacttctggcaccgcttctattcgcaccagcccgacctgaacttcgacaacccgcaggtcatgaacgaggtgctgtcggtcatgcggttctggctggacatcggcgtggacgggctgcggctggacgctgtgccttacctcgtcgaacgcgaaggcaccacgaacgagaacctgcccgagactcataccgcgatccggcatatccgctcgcatctcgattcccactaccagggacgcgtgctgctcgccgaggccaacatgtggccagaagatgcgcagcagtacttcgggcgcagcagcaccggcgacaagggcgacgaatgccatatggccttccacttcccgctcatgccgcgcatgtacatggccatcgcacgcgaagaccgcttcccgatcaccgacatcatgcgccagacgccggagctgccgaccgactgccagtgggcgatcttcctgcgcaaccatgacgaactgacgctcgagatggtcaccagcagtgagcgcgactacctgtgggaagtctatgcgtcggaccggcgcgcacgcatcaaccttggcatccggcgcaggctggcgccgctgatggaacgcgaccggcgtcgcatcgaactgatgaacagcctgctgttttccatgccgggcacgccagtgatctactacggcgacgagatcggcatgggcgacaacatccaccttggcgaccgggacggcgtgcgcacgccgatgcagtggtcgcccgaccgcaatggcggcttctcgcacgcggaccccgagcgcctggtgctgccgccgctgcagggccccctgtacggctacgaggccgtcaacgtcgaagcgcaggcgcgcgatccgcattcgctgctcaactggatgcgccgcatgctggcgctgcggcgcaagcaccgcgcgttcgggcggggcacgctgcgcttcctgtttccgggaaaccgcaagatcctggcctatctgcgcgagtacgaaggcgagcacatcctgtgcgtcgcgaacctgtcgcgggcgccgcaggccgtggaactcgatctttcggccttcaacgggcgcgtgccggtggagatgatgggcgccacgccgttccccgcgatcggcacgctgacctacctgctgacgctgcccccctatggcttctactggttcgtgctcagcgaggatgcccatccgcctgcctggcacgtctcggccccggaacagatgcccgaccagatcacgctcgtgctgcagaacaaggggcggcccgaactgacggaggccgcgcgccgcatgctcaacgatgaagtgctgccgccctatatccgccgccggcgctggttcggcgcgaaggacgacagcatccagcgcgccacactcgcctacatggccccgttcaccaaaggcaccacaggcgaggaaatctatctcggcgaagtggaagtcaggctttccggcggccgtaccgagcgctaccagcttccgcttggggtgctgtgggaccgcgagagtgccgatagcgtgtcccagctggcgcacgggctgtcgatggcgcgcgtacgccagggcagccgggtaggactggccacggatggcttcgtgctggaaccgttcgcgcgcgaggtcatccgcgcgctgcgtgcagacgccgaactgcaggggccacaggagaccatccgcttccgctccgagcccgggctgtccgcggtacagcccgagcaggaggaaatccagtggatgtcagcggagcagtccaacagctcgctggcgtacaacaacacggccgtgctcaagctggtgcggcgcctctccggcggcacacatccggaagtggagatgacgcgctacctgacggcgcagggttatccgcattcccctcccctgctgggcgaggtggtccggaccggcgcggacggcgtgccccatacgctgatgatggtgcagggctacatcctgaaccagggcaacggctgggactggacgctcgactacctcagtcgcgtgatcgatgacgcgctgcccgcgcaggaaagcgcggacgagttcgccgaagcgatgaacggctacgccaccatggccggcacgctcggccgacggctggccgagttgcatgcagtgctcgcgcgtcccaccgacgatcccgcctttgccccgcggccggctaccgatgctgaaacgcggcagtgggccgagcaggccatggcggctatcacgcatgcactggcattgctggaaaagcgcgcgcagaacgacccgaaatccgcaagcaagcgcttcatggccgacgtcgatacgctgctgaaggcgcgcgacgccctgcccgcactggtcaaccggcttgccgcagccgcgcccggcagcctgcagacacgattccacggcgacttccacctgggccaggtgctgattgcgcagaacgacacctacctggtggatttcgaaggcgagccgggtcagccactcgactggcgccggcgcaaaacctcgccactgcgcgatgttgcggggctgctgcgttcgatcgactacgccgctgcgaccgttggcacggaccggcaggaacgcacccacgcggagttgccgcccgcgctggcggagcgccgcggcggcttgctcgaacgcttccgcgaaaccgccagcgacgccttcctgggctgctaccggcgtcatatggaggcctccggcacgccgtgggccgacaacgcgcagtttcagccgctactcgatctgttcctgctggaacgcgctgcgtacgaagtcgaatatgaagcggccaatcgcgtcgcctggatcgaccttccggccagcgggctcgcgcgcatggtgcgcaagctcatggccggaaacctggaggcgcaatga

SEQ ID NO: 13739 - protein, 1121 aa, Ralstonia eutropha JMP134
MKRLTEPANALLLNADPLWYKDAVVYQLHIKSFYDANGDGVGDFAGLLAKLDYLVDLGIDTIWLLPFYPSPRRDDGYDIADYRNVHPDYGTLAEARRFVGAAHARGIRVITELVINHTSDQHPWFQRARKAKPGSAARRYYVWADNDQAYAGTRIIFCDTEKSNWSWDPVAGAYFWHRFYSHQPDLNFDNPQVMNEVLSVMRFWLDIGVDGLRLDAVPYLVEREGTTNENLPETHTAIRHIRSHLDSHYQGRVLLAEANMWPEDAQQYFGRSSTGDKGDECHMAFHFPLMPRMYMAIAREDRFPITDIMRQTPELPTDCQWAIFLRNHDELTLEMVTSSERDYLWEVYASDRRARINLGIRRRLAPLMERDRRRIELMNSLLFSMPGTPVIYYGDEIGMGDNIHLGDRDGVRTPMQWSPDRNGGFSHADPERLVLPPLQGPLYGYEAVNVEAQARDPHSLLNWMRRMLALRRKHRAFGRGTLRFLFPGNRKILAYLREYEGEHILCVANLSRAPQAVELDLSAFNGRVPVEMMGATPFPAIGTLTYLLTLPPYGFYWFVLSEDAHPPAWHVSAPEQMPDQITLVLQNKGRPELTEAARRMLNDEVLPPYIRRRRWFGAKDDSIQRATLAYMAPFTKGTTGEEIYLGEVEVRLSGGRTERYQLPLGVLWDRESADSVSQLAHGLSMARVRQGSRVGLATDGFVLEPFAREVIRALRADAELQGPQETIRFRSEPGLSAVQPEQEEIQWMSAEQSNSSLAYNNTAVLKLVRRLSGGTHPEVEMTRYLTAQGYPHSPPLLGEVVRTGADGVPHTLMMVQGYILNQGNGWDWTLDYLSRVIDDALPAQESADEFAEAMNGYATMAGTLGRRLAELHAVLARPTDDPAFAPRPATDAETRQWAEQAMAAITHALALLEKRAQNDPKSASKRFMADVDTLLKARDALPALVNRLAAAAPGSLQTRFHGDFHLGQVLIAQNDTYLVDFEGEPGQPLDWRRRKTSPLRDVAGLLRSIDYAAATVGTDRQERTHAELPPALAERRGGLLERFRETASDAFLGCYRRHMEASGTPWADNAQFQPLLDLFLLERAAYEVEYEAANRVAWIDLPASGLARMVRKLMAGNLEAQ

SEQ ID NO: 13740 - DNA, 2586 bp, Rhodobacter sphaeroides 2.4.1
  CDS (1)..(2586)
atgaatcagaatgtctctccctccaccgttgccgtccgccgcacggacggcatcgatcgcagccaaaccgactggtacaaggacgcgatcatctatcagctgcacatcaaggcgtttcaggacgccaatggcgacgggatcggtgacttcgcgggcctgatgcagcggctggattatgtgcaggcgctgggcgtgaccgcgatctggctgctgcctttctatccctcgccgctccgcgacgacggctacgacatctcggactatcgctcgatcaacccgtcctacggcgcgatgcgcgacttcaagctgttcgtgcaggaagcgcacaagcgcgggctgcgcgtcatcaccgagctggtcatcaaccacacctccgaccagcatccctggttccagcgggcccggcgggcgaagaagggatcggccgcgcgcgactggtacgtctggagcgataccgaccagaaattccccgaaacgcggatcatcttcctcgatacggaaaagtcgaactggacctgggatccggtggcaggcgcctattactggcaccgcttctattcgcaccagcccgacctgaacttcgacaatccccgtgtgctcgaggaagtgctcaagatcatgcgcatgtggctcgagatgggcgtcgacgggctccggctcgacgcgatcccctatctggtcgagcgcgagggcaccaacaacgagaacctccccgagacgcacgatgttctcaagaagatccgggccaacctcgaccagcatttccccgacaggatgctgctcgccgaggcgaaccagtggccggaggacacgcgcccctatttcggcgagggcgacgaatgccacatgggcttccatttcccgctgatgccgcggatgtacatggcgctggcgcaggccgaccggcatccgatcaccgacatcatccgccagacgcccgagatcccggaaggctgccaatggggcatcttcctccggaaccacgacgagctgacgctcgagatggtgacggccgaagagcgcgactacatgtggcgcttctacgccgaagattcgcgggcgcggatcaatctcggcatccggcgcaggctggcgccgctgatgaagaacgaccggcgcaagatcgagcttctgaaccagatgctgatgtcgatgcccggcacgcccatcgtttattacggcgacgagatcggcatgggcgacaactactatctcggcgaccgggatggcgtgcggacgcccatgcaatggtcggccgaccgcaacggcggcttctcgcgctgcaatccgcagcagctctacctgccgacgatcctcgatccggtctacggccatcaggcgatcaacgtcgaggcgcaggcggcggacccgtcgtcgctcctgaactggacgcgccgcctgatcgcggtgcgcaagcagcatccggccttcgggcgcggctcgatgagcctgctctatccgcgcaaccgcaaggtgctggcctatgtccgcagccacgagggcacggacatcctctgcgtggcgaacctctcggacacggcgcaggcggtcgagctggatctcgggcggttccgcggcgcggtgccggtcgagctcacgggccggtcggagtttccgccggtgggcgatctgccctacatgctgacgctgccgccctacggcttctactggttcatcctctccgaccagcaggcgctgccgagctggcaccagccgatgcccgagacgctgccggatttcatcacgctcacgacgcgcgacgggcgggccgagacggcgctcaccgggcgcgagacgcgccagctcgaggccgacgtgctgccgaactggctgccgctgcaacgctggttcggggccaaggaggagaagatcagcgcggtgaaactggccgttctgggctcgctgtcggccgatcatgccctcgtccggctcgaggccgatgtgggcggcgaggtgcagcagtatttcctgcccgcctccgcactctggggcgaggagcagctccgggccggggcgcccaagctgagcttcaccctggccaaggtccggcgcgggccgcaggtgggcgcgctcatcgacggggcctatgacgagcagatggcgcaggcgatgctcgaggcgctgcgcgacggtcgcagactgtctggtgccgggggcgaggtggtgttcgagccgggctcgggactggccgagatcgccgacccgggcgagccgcgctatctcggggccgagcagtcgaacatttccatcgccttcggcgaccgcctgatcctgaagctctaccgacgcctgcgggccggcgagcagccggacgtcgaggtggcgcgcttcctgacggaagtggcgggctacacccatacgccccgctatctcggcgtcgtgagcctgcgcccggcggagggcgaggcgaccgtcctcgccgcgggcttcgccttcgtggccaaatggggcaacgctggcgcggctcttcgacgcgctagtcggaactggcgaatccgggatgagacggccagcgccgaatggaaaggaggtaacatccggaacaaacgggcacttatgaagagaggaagtatagtgcacccatag

SEQ ID NO: 13741 - protein, 861 aa, Rhodobacter sphaeroides 2.4.1
MNQNVSPSTVAVRRTDGIDRSQTDWYKDAIIYQLHIKAFQDANGDGIGDFAGLMQRLDYVQALGVTAIWLLPFYPSPLRDDGYDISDYRSINPSYGAMRDFKLFVQEAHKRGLRVITELVINHTSDQHPWFQRARRAKKGSAARDWYVWSDTDQKFPETRIIFLDTEKSNWTWDPVAGAYYWHRFYSHQPDLNFDNPRVLEEVLKIMRMWLEMGVDGLRLDAIPYLVEREGTNNENLPETHDVLKKIRANLDQHFPDRMLLAEANQWPEDTRPYFGEGDECHMGFHFPLMPRMYMALAQADRHPITDIIRQTPEIPEGCQWGIFLRNHDELTLEMVTAEERDYMWRFYAEDSRARINLGIRRRLAPLMKNDRRKIELLNQMLMSMPGTPIVYYGDEIGMGDNYYLGDRDGVRTPMQWSADRNGGFSRCNPQQLYLPTILDPVYGHQAINVEAQAADPSSLLNWTRRLIAVRKQHPAFGRGSMSLLYPRNRKVLAYVRSHEGTDILCVANLSDTAQAVELDLGRFRGAVPVELTGRSEFPPVGDLPYMLTLPPYGFYWFILSDQQALPSWHQPMPETLPDFITLTTRDGRAETALTGRETRQLEADVLPNWLPLQRWFGAKEEKISAVKLAVLGSLSADHALVRLEADVGGEVQQYFLPASALWGEEQLRAGAPKLSFTLAKVRRGPQVGALIDGAYDEQMAQAMLEALRDGRRLSGAGGEVVFEPGSGLAEIADPGEPRYLGAEQSNISIAFGDRLILKLYRRLRAGEQPDVEVARFLTEVAGYTHTPRYLGVVSLRPAEGEATVLAAGFAFVAKWGNAGAALRRASRNWRIRDETASAEWKGGNIRNKRALMKRGSIVHP

SEQ ID NO: 13742 - DNA, 3417 bp, Burkholderia cepacia R18194
  CDS (1)..(3417)
atgatgaaacgcgaagattccctcgacgacgtacgccgcgcgcaattcccgtcgctcgcgccgggcggcacaccacgccggcgccgtgcacgccgccgcgcgccggcgctctgcgcggacgatccgctgtggtacaaggacgcgatcatctaccaggtgcacgtgaagtcgttctacgactcgaacaacgacggcatcggcgatttccccggcctgatcgcgaaactcgactacatcgccgaactcggcgtcgacacgatctggctgctgccgttctacccgtcaccgcgccgcgacgacggctacgacatcgccgattaccgcgacgtgcatcccgactacggcacgctggccgacgtgcggcgcttcatccgcgaagcgcatgcgcgcggcatccgcgtgatcaccgagctggtgatcaaccacacgtcggaccagcatccgtggttccagcgcgcgcgccgcgcgaaaccgggttcgacgcaccgcgactattacgtgtggtccgacaccgacacgaaatacgcgggcacgcggatcatcttcctcgatacggaaacgtcgaactgggcgcacgacccggtcgccggccagtactactggcaccgcttctattcgcaccagccggacctgaacttcgacaacccggccgtcgtgcgcgaggtgatgcaggtgatgcgcttctggctcgatctcggcatcgacgggctgcggctcgacgcggtgccgtatctcgtcgcgcgcgagggcaccaacaacgagaacctgcccgagacgcacgcgatcctgaagcggatccgcgcgacgatcgacgccgagtacccgaaccggatgctgctcgcggaggcgaaccagtggccggaagacgtgcaggaatatttcggcgacgaggacgaatgccacatggcgttccacttcccgctgatgccgcgcatctacatgtcgatcgcgagcgaggatcgcttcccgatcgtcgacatcatgcggcagacaccggaactcgcaccgagcaaccagtgggccgtgttcctgcgcaaccacgacgagctgacgctcgagatggtcaccgactccgagcgcgatctgttgtggcagacctatgcgagcgaccggcgcgcgcggctgaacctcggcatccggcgccggctcgcgccgctgatggaacgcgaccggcgccgcatcgagctgatcaactcgctgctgctgtcgatgccgggcacgccggtgatctactacggcgacgaactcgggatgggcgacaacatccacctcggcgaccgcgacggcgtgcgcacgccgatgcagtggtcgtcggatcgcaacggcggcttctcgcgcgccgacccggaactgctcgtgctgccgccggtgatgggttcgctgtacggctatgacgcggtcaacgtcgaggcgcagacacgcgacccgcattcgctgctgaactggacgcgccgcatcctgtcgacgcgccgcgcgtcgcaggcgttcggacgcggcacgatccgcttcctgcgcccggagaaccgcaaggtgctcgcgtacctgcgcgagctggacggcgacgatccggtgctgtgcgtcgcgaacctgtcgcgcgcgtcgcaggccgtcgagctcgacctgtccgaattcgcgggccgcgtgccgatcgagatgacgtcggattcgccgtttccgccgatcggccagctcccgtatctcctcaccttcccgccgtacggattcctgtggttcgtgctcgccgagcatggccgcgagccgtcgtggcggcagccccatgcggagccgctgcccgaatacgtgacgctcgtgatgcggcgcggcgatgcgcggccggacatcgaacagctgcacgtgctcgcgcacgatgcgttgccgtcgtggctcgcgcggcggcgctggttcgcgtcgaaggaccgtgcgatcggcgcggcccggctgaacgtcgtcacgccggtgccgggcgaaccgttccagtatgcggaggcgtgggtcgaatccgatgagccaggcgacgtcgaacgctacgtcgtgccgctcgcggccgcgtggggcggtgaaacctcgcagccgctgttcgcgcagctcgcgctggcgcgtgtgcggcgcggccattcggtcggctacctgaccgacgcgttcgcgctgccggcgttcgcacacgggatgctgcgcaagctgcgcgacggcgcgacggtgccgacctccgatgacggccggctcgcgttcctgccggaagacgcgctcgccgcgctcgatcccggcgacaacgccgacgtgcgctggctcgcggccgagcagagcaacagctcgctcgtgatcggcgacgcgatcgtgctgaaactggtgcgcaaggtcgcgcacggcgtgcatccggaagcggaaatgagccgctacctgacgcggatcggctacccgaacaccgcgacgctcgccggtgaagtcgtgcacgtcgatccggacggcacgccgcatacggtcgcgatcctgcagcgctacgccgacaaccagggcgatgcgtggacgcgctcgttcgatttcctgcgccgcgcagtggacgagctcgcgctgccggccgcggacgaagaagagcccgacgatacggacgaggaacccgacgcgctgctcggctatgcggcgttcgcggggatcatcggcacgcggctcggccagttgcacgtcgcgctcgcgcagccgtccgacgatccggcgttcgcgccggagcacgcgacgcccgaacacgtcgacggctggtgcgcggacgcgatcgcatcgttcgaacacgcgctcgacgtgctgcacacgcggctcgatgcgctcgatcccgcgacgcgcgcggcggccgacacgctgctcgcgtcgcgcgatgcggccgtgcgcgcgctcggcgagctcgtgccgcgcacgctcgatgcgcaatgcatccggatccacggcgatttccatctgggccaggtgctcgacgtgcagggcgacgcgctactgatcgacttcgaaggcgagccggcacgcccgctcgagcggcgccgcgcgaaatcgcatccgctgcgcgacgtggccggcctgctgcggtcactgtcgtatgtgagcgcaatcgcgcaattcgcgatcgagaaggcgccaccgcaggcggccggccgcaagcgcgcgctgttcgaccgcttcgggcaggccgccgccgaccgcttcgtcgactgctatcgcgcggccgccgaactcgcccccgcgcgtttcgtcgacccgcgctacgcctatcgcctgctcgcgctgttcctgatcgacaaggcgtcgtacgagctgtgctacgaagccgcgaaccggcccgactggctaagcgtgccggtcggcgggctcgcggcgctggtcgaacggctgctcgatggcggcgccgcctccgacgacggagacacgccatga

SEQ ID NO: 13743 - protein, 1138 aa, Burkholderia cepacia R18194
MMKREDSLDDVRRAQFPSLAPGGTPRRRRARRRAPALCADDPLWYKDAIIYQVHVKSFYDSNNDGIGDFPGLIAKLDYIAELGVDTIWLLPFYPSPRRDDGYDIADYRDVHPDYGTLADVRRFIREAHARGIRVITELVINHTSDQHPWFQRARRAKPGSTHRDYYVWSDTDTKYAGTRIIFLDTETSNWAHDPVAGQYYWHRFYSHQPDLNFDNPAVVREVMQVMRFWLDLGIDGLRLDAVPYLVAREGTNNENLPETHAILKRIRATIDAEYPNRMLLAEANQWPEDVQEYFGDEDECHMAFHFPLMPRIYMSIASEDRFPIVDIMRQTPELAPSNQWAVFLRNHDELTLEMVTDSERDLLWQTYASDRRARLNLGIRRRLAPLMERDRRRIELINSLLLSMPGTPVIYYGDELGMGDNIHLGDRDGVRTPMQWSSDRNGGFSRADPELLVLPPVMGSLYGYDAVNVEAQTRDPHSLLNWTRRILSTRRASQAFGRGTIRFLRPENRKVLAYLRELDGDDPVLCVANLSRASQAVELDLSEFAGRVPIEMTSDSPFPPIGQLPYLLTFPPYGFLWFVLAEHGREPSWRQPHAEPLPEYVTLVMRRGDARPDIEQLHVLAHDALPSWLARRRWFASKDRAIGAARLNVVTPVPGEPFQYAEAWVESDEPGDVERYVVPLAAAWGGETSQPLFAQLALARVRRGHSVGYLTDAFALPAFAHGMLRKLRDGATVPTSDDGRLAFLPEDALAALDPGDNADVRWLAAEQSNSSLVIGDAIVLKLVRKVAHGVHPEAEMSRYLTRIGYPNTATLAGEVVHVDPDGTPHTVAILQRYADNQGDAWTRSFDFLRRAVDELALPAADEEEPDDTDEEPDALLGYAAFAGIIGTRLGQLHVALAQPSDDPAFAPEHATPEHVDGWCADAIASFEHALDVLHTRLDALDPATRAAADTLLASRDAAVRALGELVPRTLDAQCIRIHGDFHLGQVLDVQGDALLIDFEGEPARPLERRRAKSHPLRDVAGLLRSLSYVSAIAQFAIEKAPPQAAGRKRALFDRFGQAAADRFVDCYRAAAELAPARFVDPRYAYRLLALFLIDKASYELCYEAANRPDWLSVPVGGLAALVERLLDGGAASDDGDTP

SEQ ID NO: 13744 - DNA, 1776 bp, Listeria monocytogenes str. 4b H7858
  CDS (1)..(1776): transl_table=11
atggaaaaagcagggatttatcatcaaccagcgagtagctatgcttatagttatgacgctaaaacactacatattcggattagaacgaaacgcttggatattagcgaggttactctaattgctgccgacccttacttatggaaagatggaaaatggcaaagtgaatcttatacaatgcgcaaaatcgcagaaacagaagagcacgattattggttttttgcaattacaccagaacatagacgtcttcaatatggctttttactaacagatacagaaggagaaacaacattttacggcggacgtggtttctttgagccaactgaggctaatttagctacgatggattattactttaaatttccatttatccatgcggtggatacttttgaggcgcctgaatgggttgggaatactatttggtaccagattttcccagaacgttttgcaaatgggaatccggctatttctccggaaaatgccttgccgtggggaagtaaagatccgaacacaacagactttttcggcggggatatagaaggaattatcgagcatttagattatttagcagagcttggtattaatggggtttatttgacacctgtgtttgaagcaccaaccaatcataaatacgatacggttgattataaaaaaattgatccacattttggagataaagaaacgtttagaaaattagttcaggaagcgcataaacgtgggattcgcattatgttagatgcggtgttcaatcacattggcgatacttcagcagagtggcaagatgttgtcttaaatgaagaaaaatctgcatatcgtgattggttccacatccatagtttccctgttcgtcaaaatgaaaatggcaatattgaaggagaaccaacactttcttacgatacatttgctttcacgacgcatatgccaaaattaaatacggctaacccagaagttcagaagtatctactggatattgcaacttactggattcgcgaatttgacattgatggttggcgcttagatgttgctaatgaagtagatcatgctttctggaaagaatttaaaaaggctgtccaagcggaaaaagaagatatttatattcttggtgaaatttggcatgattcgtggatttggttacttggagatgaattccacgccgtaatgaactatccatttacacaaacgattattgagaactttattgaagaaaaaatcacaccggagcaaatggtttctggtattaatgaacaatatatgcgctacccaaatcaagtgaatgaagtaatgtttaatatgcttgatagccatgatacggcgcgtattttaactcgtgctaataatgatgaggataaagtgaaacaagcgcttgccttcatgttcgcgcacactggttcgccgtgtatttattacggaactgaaatcggcatggacggaggaaatgacccaggttgccgtaagtgtatggaatgggatgaaacgaagcaaaaccaagatatgctagcgtttacgaaacaattaattgccctaagaaaagataaccaagcaattatcacatccggcgaattaacttggctaggtgcaagtagcgaaacgggcattacagcattttctaaagaattaaatggtgaaaaactgcatttccttttcaatcaagcaaaagaagataaagatttcacaatttcatttgaaaatacagcgacagatatttggaacaaccgagctgtaacagaaaatcttgttgtcccagcaaaaggatttcttgttgttaaagaaaacagctaa

SEQ ID NO: 13745 - protein, 591 aa, Listeria monocytogenes str. 4b H7858
MEKAGIYHQPASSYAYSYDAKTLHIRIRTKRLDISEVTLIAADPYLWKDGKWQSESYTMRKIAETEEHDYWFFAITPEHRRLQYGFLLTDTEGETTFYGGRGFFEPTEANLATMDYYFKFPFIHAVDTFEAPEWVGNTIWYQIFPERFANGNPAISPENALPWGSKDPNTTDFFGGDIEGIIEHLDYLAELGINGVYLTPVFEAPTNHKYDTVDYKKIDPHFGDKETFRKLVQEAHKRGIRIMLDAVFNHIGDTSAEWQDVVLNEEKSAYRDWFHIHSFPVRQNENGNIEGEPTLSYDTFAFTTHMPKLNTANPEVQKYLLDIATYWIREFDIDGWRLDVANEVDHAFWKEFKKAVQAEKEDIYILGEIWHDSWIWLLGDEFHAVMNYPFTQTIIENFIEEKITPEQMVSGINEQYMRYPNQVNEVMFNMLDSHDTARILTRANNDEDKVKQALAFMFAHTGSPCIYYGTEIGMDGGNDPGCRKCMEWDETKQNQDMLAFTKQLIALRKDNQAIITSGELTWLGASSETGITAFSKELNGEKLHFLFNQAKEDKDFTISFENTATDIWNNRAVTENLVVPAKGFLVVKENS

SEQ ID NO: 13746 - DNA, 1533 bp, Listeria monocytogenes str. 1/2a F6854
  CDS (1)..(1533): transl_table=11
ttggagttttggcgtcgtagtgtgttttatgaaatttatatgaaatcatttcaagatagtaatggtgatggtttgggtgattttaaaggtttaacgagcagattagattatctggtggatttgggaattgatggtatttggctgactccattttatccttcaccgcaagtagataatggctatgatgtttcggattactgtgacataaatccggattacggcgatatgactgattttcgagcgtttatgaaagcggcggattcacgaggaataaaagttattatcgacttagtgttaaatcattcatcaacagagcatgcttggtttaaggaatcgcgtagtagtaagacgaattctaaacgagattattatatttggagagaaaaaccaaataattgggagtcgttttttggtggttctgcttgggaaatggatgaacttactggcgagtactactatcatagttttgcaaaagaacaggctgacttaaactgggcgaatgaagctgttcgcgcagaaatagaggaagttttagcgttttggttgaatgaaggagtggcggggttcaggttagatgttatcaataatttaacgctcgcacttgaatttccggataatccagtcgcatctggtgaaatggagcatgtttatgaccgtaatcagaatggattagaacaagcgttagaggatatcgcttccttttgtcgaaaagagcgcgacgtgtttttagtaggcgaaattagctcggataaattacctgaaattacgcgatatagctcgaaaaaaatgctagatgtcacgtttaattttaattttggcagtgttgatcagctagatgcagaatctgtatttacgacattgaatgagatggaaacggcattaaacgaagggcagtggccgacgcttttctttggaagtcatgatatgagcaggttcagaagtcgcctcgcatctggagacttagtaaagacccaattgctcgcatttttgatgttaactgcgaaaggcgtgccgtttatatactacggagaagaggtgggtatgcctgatttaacgttttcttccgtaaaagagatgcgcgatattcaaggaacagccgcgtactatcgagctttacaaactggtacagataaaaaacaagcactcgaaatcgctattgaaaaaacgcgtgacaaagcacgtgggccgatgattttcccagatggaaagccatttactctaggtgaaccatggattaaaatggctactttgccggaagaagaagcacggatgatgtgggatttttatcgagctttactcgcatttcgtaaagaaaatgattttaaagagatggaatatacttttttgaagttggatggagaagtactcagttatcagcgaggtgaatttatctttttacttcattttggtgaggaagaggtaacttatctgcttcaggggaactatcagcttgtttttggagaagcgatgatggtagaaaatggtattagaatgggcgcgcatactggaattgcgcttagagtggaggaataa

SEQ ID NO: 13747 - protein, 510 aa, Listeria monocytogenes str. 1/2a F6854
MEFWRRSVFYEIYMKSFQDSNGDGLGDFKGLTSRLDYLVDLGIDGIWLTPFYPSPQVDNGYDVSDYCDINPDYGDMTDFRAFMKAADSRGIKVIIDLVLNHSSTEHAWFKESRSSKTNSKRDYYIWREKPNNWESFFGGSAWEMDELTGEYYYHSFAKEQADLNWANEAVRAEIEEVLAFWLNEGVAGFRLDVINNLTLALEFPDNPVASGEMEHVYDRNQNGLEQALEDIASFCRKERDVFLVGEISSDKLPEITRYSSKKMLDVTFNFNFGSVDQLDAESVFTTLNEMETALNEGQWPTLFFGSHDMSRFRSRLASGDLVKTQLLAFLMLTAKGVPFIYYGEEVGMPDLTFSSVKEMRDIQGTAAYYRALQTGTDKKQALEIAIEKTRDKARGPMIFPDGKPFTLGEPWIKMATLPEEEARMMWDFYRALLAFRKENDFKEMEYTFLKLDGEVLSYQRGEFIFLLHFGEEEVTYLLQGNYQLVFGEAMMVENGIRMGAHTGIALRVEE

SEQ ID NO: 13748 - DNA, 1662 bp, Listeria monocytogenes str. 1/2a F6854
  CDS (1)..(1662): transl_table=11
atgaaagaaaaagactggtggaaaaaaagcgtagtgtaccaaatctatccaaaaagttttaatgattcgaatggcgatggagtcggtgatattcaaggaattatcgagaaattagattatttaaaagagcttggcgtggacgttatctggttgtcccctgtatacgattcgccacaagacgacaatggttacgatattcgtgattatcaaaaaatttacgaagaatatggcgacatggcgacttttgatcagttacttcaaggtttacacgaccgcgatatgaaactcgtaatggacttagttgtaaaccatacttctgatgaacataagtggtttgaagaatctcggaaatccaaagataacccatatcgcgattactatttctggcgcgaggaaaacgaaatcaacaactggggttccattttcagcggtccggcatgggaattagacgaaaaaacaggcgagtactatttacacctgttctccaaaaaacaacctgatttaaactgggaaaaccctaaattacgccaagatgtatataatatgatgaaattctggctagataaaggcattgatggtttccgcatggacgtaattaattttatttccaaaaacaccgatttcccagatggtccagtgccagatggtcaaatttacggcgatgctggcaatgatttctgcaatggaccgcggattcatgagttcttgcaagaaatgaaccaagaagttacttccaaatacgatgtgatgactgttggtgaaatgcctggtgctagtacaactgacgcgcagatttatacgaatccagcaaataacgaagtcgatatgatttttacatttgaacatatgaacttagattccgatggcgacaataaatgggatttgaaaccaatttacttaccagatttaaaagaaaacatgtccgaatggcaagtggcgcttcaagaaaatggctggaacagcttatactggaacaatcatgaccaaccacgaatcgtttctcgcttcggaaatgacaatcgtttccgcgttcgttcagcgaaaatgctcgcaacttgtctgcatatgatgaaaggaacgccgtacatttatcaaggtgaagaaatcgggatgacgaatgttcattttgaaacgctagatgattatcgtgatatcgaaacgctaaacatgtacaaagaacgcaaagagcaaggccacagtcacgaaagcatcatgcagtcgatttacacaaaaggtcgcgacaatgcgagaaccccttatcagtgggataatagcgagaatgctggcttcacaaccggaacgccttggcttaaagtcaacccgcgctatacagaaatcaacaacgaagaagcgctgaaaaaccctgattccattttctactactaccaaaatcttattaagttacgaaaaacgactgaaatcatcacaaccggtaattatcgcctgttattacctaaagacgaagcgattttcgcatatgaacgctacacagaaaatgaaaaattagttgttttatgtaatttcacagaagaagaacaagttatttttgatgaaaacattttgaacgaactccaaaaaggttccgtgcttgtaaacaatgttccaaatattatagaaggaactttacgaccttacgaagcaatcgtttatcaaatcaagtaa

SEQ ID NO: 13749 - protein, 553 aa, Listeria monocytogenes str. 1/2a F6854
MKEKDWWKKSVVYQIYPKSFNDSNGDGVGDIQGIIEKLDYLKELGVDVIWLSPVYDSPQDDNGYDIRDYQKIYEEYGDMATFDQLLQGLHDRDMKLVMDLVVNHTSDEHKWFEESRKSKDNPYRDYYFWREENEINNWGSIFSGPAWELDEKTGEYYLHLFSKKQPDLNWENPKLRQDVYNMMKFWLDKGIDGFRMDVINFISKNTDFPDGPVPDGQIYGDAGNDFCNGPRIHEFLQEMNQEVTSKYDVMTVGEMPGASTTDAQIYTNPANNEVDMIFTFEHMNLDSDGDNKWDLKPIYLPDLKENMSEWQVALQENGWNSLYWNNHDQPRIVSRFGNDNRFRVRSAKMLATCLHMMKGTPYIYQGEEIGMTNVHFETLDDYRDIETLNMYKERKEQGHSHESIMQSIYTKGRDNARTPYQWDNSENAGFTTGTPWLKVNPRYTEINNEEALKNPDSIFYYYQNLIKLRKTTEIITTGNYRLLLPKDEAIFAYERYTENEKLVVLCNFTEEEQVIFDENILNELQKGSVLVNNVPNIIEGTLRPYEAIVYQIK

SEQ ID NO: 13750 - DNA, 3342 bp, Pseudomonas fluorescens PfO-1
  CDS (1)..(3342)
atggcgaagaaacccaaggcagccaccttcatcaaggacccgctctggtacaaggacgcggtcatctatcaagttcacgtcaaatcctttttcgattcgaataacgacggaatcggcgactttcccggcctgatcgccaaactcgattacatagccgatcttggcgtcaacaccatctggctgttgccgttctacccctcgccacgccgcgacgacggttacgacatcgccgagtaccgaggcgtgcacagcgattacggaacgatggccgacgccaagcgtttcattgccgaggcgcataaacgcgggttgagggtcatcaccgagctggtcatcaaccacacgtccgatcagcacccgtggtttcagcgcgcgcgcaaggccaagcccggttcggccgcgcgggacttctatgtgtggtcggatgacgaccagaaatacgacggcacccggatcatttttctcgacaccgaaaagtccaactggacctgggatccggtggccggtcagtacttctggcaccgcttctattcgcaccagccggatctcaacttcgataacccgcaagtcatgaaagccgtgctgtcggtcatgcgctactggctggacatgggcatcgacggcctgcgactggatgcgattccgtacctgatcgaacgcgacggcaccaacaacgaaaacctcccggaaacccacgacgtcctcaagcagatccgtgccgagatcgacgccaactaccccgatcgcatgctgctggccgaagccaatcaatggccggaagacacccagctgtacttcggcgacaccgacgccgagggcgtgaatggtgacgagtgtcacatggcgttccacttcccgttgatgccgcgcatgtacatggcgctggcccaggaagatcgcttcccgatcaccgacatcctgcgtcagaccccggaaatcccggccaactgccaatgggcgattttcctgcgcaaccacgatgagctgacgctggagatggtgaccgacaaggagcgcgactacctgtggaactactacgccgctgaccgtcgtgcgcggatcaaccttggcatccgccgccgtctggcgccgttgatggagcgtgaccgccgccgcatcgagctgctgaacagtctgctgttgtcgatgcccggcacgccgaccctgtattacggcgatgaaatcggcatgggcgacaacatctacctcggcgaccgcgacggtgtacgcacgccgatgcaatggtcgatcgaccgcaacggcggtttctcccgcgccgatccagccagtctggtactgccgccgatcatggacccgcaatacggttatcaatcggtcaacgtcgaaacccaggccggtgacccgcattcgctgctgaactggactcgccgcctgctggcggtgcgcaagcaatccaaggcattcgggcgcggcacgctgaaaatgctttcgccagccaaccgccgggtgctggcctacacccgtgaatacaccgggccggacggcaagcacgaaatcattctgtgcgtggccaacgtgtcacgcagtgctcaggcagtggagctcgacctgtcggcctacgttggcatggtgccggtggagatgctcggcggtaacgccttcccgcccatcggccagttgagtttcctgctgaccctgccgccttacggtttttactggttcggcctggcggcggaaaaccagatgccgagctggcacgtcgaaccggcgcagagcctgccggacttcaccacgctggtactgaaaaaacgcatggaagagctgctcgaagcgccgtcccgggccaccctcgagcaggcgattctgccgagctggctgcagaaccgccgctggttcgccggcaaggatgctgatatcgaacaggtgaaactggcctacggcgtgcgcttcggcgatgcacagcatccggtgctgttcagcgaaatcgaagtgcagagcggcgggcagaccagtcgttatcaattgccgttcggctttatttcggaagatcaggtcgggccggcgttgccgcaacaactggctttggcgcgggtacgccgggtgcgtcaggtcgggttgattaccgatgccttcagtcttgaagcgtttattcgcgctgtgctgcaaggcatgcagggcggcacggtgctcgaatccattgagggcgagatccgtttcgaggcaacgccgcaactggaaaaacttggcctgggcgcagagtccgaagtgcgctatctgtccgccgagcaatccaacagttcggtggtgatcggcaacagtctggtgctcaagctgatccgcaaagtcgcttctggcgtacacccggaactggagatgagcgcttacctgaccgctgctggatttgccaatatctctccgctgctgggctcggtgattcgccgcgacgggaagggcgaggacaacttgctgatgattgcgcagggctatctgagcaatcagggcgacgcctgggaatggacgcagaacaacctcgaacgggcgctgcgcgacgagctggccgacgccgtgtccgagcaggcgcagcactacaacgccttgggtgaactgaaggatttcgccgggatgctcggccagcgtctgggggaaatgcatcaggtgctggcagcgccgagcgacaaccaggacttcgcgccgcaagtcagttcggccaaggatgcgcaggcgacgggtaaggatgtcgcggcgcaggtcgagcatgccctgaagctgctcaaacagcatcagggcgagctcgatgcggcggatcagaagctggtcggtcggctactcgaccacaagaaagccatccttgcccacgtgcaggaactggccaagcaatccgccggcggtctacggattcgtgtgcacggcgacctgcatttgggacaggtgctggtaatcaagggcgatgcctacctgatcgacttcgagggcgaaccggcgcggccactggccgagcgccgtggcaagcacagtccgtacaaggacgtcagcggagtgctgcgctccttcgactatgccgccgcgatggcgctgaatgtacacaacgtcgacaacagccccgaggccgaagccgcgcgtcggcgggtcacggagcgttacctgcgtgaagcccgggaagcatttctccaggcatatcgccaagcggcagctagtcttgatcatgcctggcaagatcctgaaggtgccgacgccgcactggcgttgttcggtctggagaaagcggcctacgaagtggcctatgaagccgaaaatcgccccacctggctgcccgtgccgctgcacggtctgtatgggttattgacggggctcaaacccttttccgatcttggtggagagtag

SEQ ID NO: 13751 - protein, 1113 aa, Pseudomonas fluorescens PfO-1
MAKKPKAATFIKDPLWYKDAVIYQVHVKSFFDSNNDGIGDFPGLIAKLDYIADLGVNTIWLLPFYPSPRRDDGYDIAEYRGVHSDYGTMADAKRFIAEAHKRGLRVITELVINHTSDQHPWFQRARKAKPGSAARDFYVWSDDDQKYDGTRIIFLDTEKSNWTWDPVAGQYFWHRFYSHQPDLNFDNPQVMKAVLSVMRYWLDMGIDGLRLDAIPYLIERDGTNNENLPETHDVLKQIRAEIDANYPDRMLLAEANQWPEDTQLYFGDTDAEGVNGDECHMAFHFPLMPRMYMALAQEDRFPITDILRQTPEIPANCQWAIFLRNHDELTLEMVTDKERDYLWNYYAADRRARINLGIRRRLAPLMERDRRRIELLNSLLLSMPGTPTLYYGDEIGMGDNIYLGDRDGVRTPMQWSIDRNGGFSRADPASLVLPPIMDPQYGYQSVNVETQAGDPHSLLNWTRRLLAVRKQSKAFGRGTLKMLSPANRRVLAYTREYTGPDGKHEIILCVANVSRSAQAVELDLSAYVGMVPVEMLGGNAFPPIGQLSFLLTLPPYGFYWFGLAAENQMPSWHVEPAQSLPDFTTLVLKKRMEELLEAPSRATLEQAILPSWLQNRRWFAGKDADIEQVKLAYGVRFGDAQHPVLFSEIEVQSGGQTSRYQLPFGFISEDQVGPALPQQLALARVRRVRQVGLITDAFSLEAFIRAVLQGMQGGTVLESIEGEIRFEATPQLEKLGLGAESEVRYLSAEQSNSSVVIGNSLVLKLIRKVASGVHPELEMSAYLTAAGFANISPLLGSVIRRDGKGEDNLLMIAQGYLSNQGDAWEWTQNNLERALRDELADAVSEQAQHYNALGELKDFAGMLGQRLGEMHQVLAAPSDNQDFAPQVSSAKDAQATGKDVAAQVEHALKLLKQHQGELDAADQKLVGRLLDHKKAILAHVQELAKQSAGGLRIRVHGDLHLGQVLVIKGDAYLIDFEGEPARPLAERRGKHSPYKDVSGVLRSFDYAAAMALNVHNVDNSPEAEAARRRVTERYLREAREAFLQAYRQAAASLDHAWQDPEGADAALALFGLEKAAYEVAYEAENRPTWLPVPLHGLYGLLTGLKPFSDLGGE

SEQ ID NO: 13752 - DNA, 1629 bp, Rhodospirillum rubrum
  CDS (1)..(1629)
atgtcgggtcaggaatggtggaaacgggccgttatctatcaaatctatccgcgcagtttccaggatgccgatggcgatggcatcggcgatttggccggcatcgcccaacgcctggattacctgtcgtggctgggggtggacgcgatctggatctcgcccttctatacctcgccgatgaaggatttcggctacgacattcaagactaccgcgatgtcgatccgatcttcggcaccctggccgatttcgacgccctggcggcgcgggcccgcgcgctggggctgaagctgatcttggatttcgttcccaaccacacctctgatcggcatccgtggtttctcgaatcccgccaatcgcccgccagcgccaagcgcgactggtacatctggcgcgacccggccgccgatggcggcccgccgaccaactggctggccgaattcggcggcagcgcctgggaatacgacgaagccagcggccagtattactaccacgccttcctcaaggagcagcccgacctcaattggcgcaatccagaagtccgcgcggcgatgtatgacgccatgcgcttttggctcgagcgcggggtggatggcttccgcgtcgatgtgatgtggcatctgatcaaggacgaccagttccgcgacaatccgcccaatccggcccgcccgcccaatgccggtccggccaatgccctgatcccgctctacaccgccgatcgccccgaagtgcacgacatcgtgcgcgagatgcgcgccgtggtcgacgcctatcccgaacgcgtgctgatcggcgagatctggctgcccaccgatcgcctggtcacctattacggccatgatctgcgcggtgcccatctgccctttaatttccaattgatcggcgccgcctgggacgccggcgtcatcaaagagatcgtcggcgactacgaaaaggccctgccccggggcggctggcccaattgggtgatgggcaatcacgacaagggccgcatcgccagccgcctgggcccccggcaggcccggctggccatgctgctgctgctcaccctgcgcggcacccccaccctttactatggcgacgagatcgccatgcgcgacgtgccgatcccccccgaccgggtctgcgatccttacgaaaagaacgtgcccggcctgggtctggggcgcgacccccagcgcacgccgatgcaatgggaggacgctccccaggccggcttcacccgcgcttcccgatcctggttgccgatcgccgccgatgcctcaacggtcaatgtcgccgcccaacgcgcggcgccggcctcgatgctgaccctcgtccaccgcctgatcgccctgcgcaaagccgaagcggccctaactatcggcgattatggggcgctcgacgctcccgagcgggtggtgatgttcctgcgccgcgttcccgggcgccgcctgctcatcgccctcaatctgggggaaagcgcccaaagcctgagcctgcccggcgacagccgccaagccaccaccctgctgtccaccgacccggagcgcccgctgggcgatctggccccggccttcacccttggcgggggcgagggcatcgtcgttttgctggccgaccgggaaacggcccccccgtccccggcggcgtaa

SEQ ID NO: 13753 - protein, 542 aa, Rhodospirillum rubrum
MSGQEWWKRAVIYQIYPRSFQDADGDGIGDLAGIAQRLDYLSWLGVDAIWISPFYTSPMKDFGYDIQDYRDVDPIFGTLADFDALAARARALGLKLILDFVPNHTSDRHPWFLESRQSPASAKRDWYIWRDPAADGGPPTNWLAEFGGSAWEYDEASGQYYYHAFLKEQPDLNWRNPEVRAAMYDAMRFWLERGVDGFRVDVMWHLIKDDQFRDNPPNPARPPNAGPANALIPLYTADRPEVHDIVREMRAVVDAYPERVLIGEIWLPTDRLVTYYGHDLRGAHLPFNFQLIGAAWDAGVIKEIVGDYEKALPRGGWPNWVMGNHDKGRIASRLGPRQARLAMLLLLTLRGTPTLYYGDEIAMRDVPIPPDRVCDPYEKNVPGLGLGRDPQRTPMQWEDAPQAGFTRASRSWLPIAADASTVNVAAQRAAPASMLTLVHRLIALRKAEAALTIGDYGALDAPERVVMFLRRVPGRRLLIALNLGESAQSLSLPGDSRQATTLLSTDPERPLGDLAPAFTLGGGEGIVVLLADRETAPPSPAA

SEQ ID NO: 13754 - DNA, 3303 bp, Rhodospirillum rubrum
  CDS (1)..(3303)
atgagcgacttcctatggtacaaggacgccatcgtctatcagcttcatgtaaaagccttttttgattcgaacggtgacgggttcggcgatttcaaggggctgaccgaaaagctggattacctctccgatcttggggtgacggcggtgtggatcttgccgttctatccctcgccgctgcgcgatgacggctatgacatcgccgattacaaggccatccaccgcgcctatggcaccatgggcgatttccgccgcttcgtgcgcgaggcccatgagcgcgggttgaaggtcatcaccgaactggtgatcaatcacaccagcgatcagcacgcctggttccagcgcgcccgcgaagccaagcccggcagcaaggcccgcgacatgtacgtgtggtccgacaccgaccagcgctatttggatacgcgcatcattttcaccgataccgaaacctcgaactgggcctgggatccgctggccaaggcctattactggcaccgcttcttcgcccatcagcccgatctcaactgggacaatccgcgaattttcgaggagatcacccgggtgatgaagttctggcttgattgcggcgtcgatggcatgcgcctggacgccattccttatttggtcgaacgcgacggcacgaataacgaaaacctgcccgaaacccatgtcgtcctcaagcggctgcgcgcttggcttgatgcccattatgaagaccggatgttcctggccgaggccaatcaatggcccgaggacgtgcgcgagtatttcggcgaagccggcgacgaatgccacatggccttccactttccggtgatgccgcgcatctatatggccgtggcccaggaagaccgccatccgatcaccgatatcatgcgccagaccccggagatcccagcggcttgccaatgggcgatcttcctgcgcaatcacgatgaactgacgctcgaaatggtcaccgaccgcgagcgcgactatatgaacaccttctatgccaatgattcgcgggcccgaatcaacgtcggcatccgtcggcgcctggcgcctttgcttgataacgatcgccgcaagatcgaattgctcaacagccttttgatgtcgatgccgggtacgccgatcatctattacggcgacgagatcggcatgggcgacaatattttcctgggcgatcgcgatggcgtgcgcacgcccatgcaatggtcgcccgaccgcaacggcggcttttcgcgggccgatcccgcctcgctttatctgccgacgatcatggatgcggtctatggcttcttcgccgtcaatgtcgaggcccagtcgcgctcgccatcctcgctgctcaactggatgcgccggctgatcgccgtgcgcaagcgccacccctccttcgggcgcggcaccttgcgctttctctatcccggcaaccgcaagatcctggcttacttgcgggaattcgagggcgaggtgatcttgtgcgtggccaatctgtcgcgtgccccgcagccggccgaattggggctggccgagttttccgggcgggttccggtcgagatgctgggcaacagcgtctttccgccgatcggcgagttgcactatttcatcaccctgccggcctatggcttctattggttccgcctgtcgaagggcgaggggccgagctggcatgaaccgccggtcgagcccttgcccgatctttcgaccctggttcttccccgtatctgggacagcctgggcagcgatgggcccttgcgccagatccagggggatatcctgccggccttcctgcccaagcaacgctggttctctggcaaggagcattccctgcgcggcgtcgagatgaccgaccacgcggtgatttcggcccccggcgccgcttcgggctggatgctcgccctgtggcgcgccgattacaaggatggcgccccggggcaaaccttccaattgccccttgatatcgcctgggaaagtcgcgaggacgatcccttgtcccggctgctgccctttaccttggcccgggtgcggcgggtcaaccgcgttggcgccctctatgacgccatggccggcccggctttcccgctcgccttggtgcaggcgatggccgaaggcgcgaacgtgacgacggccaagggcggcggtttgcgcttcacccggacccaggccttccccgccggcccgcttcccggccccgaagcggtggcccgcctggggcgtgagcaatccaacacctcgatcaaacttggcgaggatatggttctcaagctctatcgccgggtcgaggccgggattcatccagaaatcgaaatcggccgcttcctgaccgatgtcgccggcttcgccaacgccccgccgctgcttggcgcgctcgagcatatcgatgctaagggcgccatctcggccctggcggtgctgcagggcttcgtgcgcaatcagggcgatggctgggactacatgctggcctatctcgaccgcttcctcgacgacagggcccaggcgccggccgaggtcggcgagggcggcgggccggccggctcgccccatggcatcatccacgcccaggccgatatccttggccagcgcgtcgccgagcttcaccacgccttcgccaccccgaccgaggacccggccttttccgccgaagccgtcgggccggaggatctggcgagctggcgcgagcaagtgcgcacccaggcggcccaggcccgtcaggcccttgacaccgccttgcccgggctgtccgcagaggtggcggggctggtcacccgactgctggactgctgggagcggatcgacgcccgcgtcgacgcgccgatttctttggccgaggggctggtcaaaacccgcatccatggcgaccttcatctggggcaggtggtggtggtgcgcgatgacttccatattctcgatttcgagggcgagccggtgaagggactgagtgagcggcgcgacaaacactgcccgttgaaagacgtggccggcatgcttcgctcgttcgattacgcggcgtggtcggcggcgctgagcttccgccaaacccatgccgaggtgcggatcgacgtactgcccgcgcttggcgtttggcaggaggaaatccgcgaggctttcctcgccggctatgaccgggccatcgccggatgtccctcggttccggcccttgaggaggggcgaagggacctcctttcactattcatgctggaaaaagccctctatgaggtatcttacgaagccgccaatcgtccggactggttacgaattcccatcggcggcgttttgcgcctgcttggagaggggccatcggacgagatcaaaccgcgttga

SEQ ID NO: 13755 - protein, 1100 aa, Rhodospirillum rubrum
MSDFLWYKDAIVYQLHVKAFFDSNGDGFGDFKGLTEKLDYLSDLGVTAVWILPFYPSPLRDDGYDIADYKAIHRAYGTMGDFRRFVREAHERGLKVITELVINHTSDQHAWFQRAREAKPGSKARDMYVWSDTDQRYLDTRIIFTDTETSNWAWDPLAKAYYWHRFFAHQPDLNWDNPRIFEEITRVMKFWLDCGVDGMRLDAIPYLVERDGTNNENLPETHVVLKRLRAWLDAHYEDRMFLAEANQWPEDVREYFGEAGDECHMAFHFPVMPRIYMAVAQEDRHPITDIMRQTPEIPAACQWAIFLRNHDELTLEMVTDRERDYMNTFYANDSRARINVGIRRRLAPLLDNDRRKIELLNSLLMSMPGTPIIYYGDEIGMGDNIFLGDRDGVRTPMQWSPDRNGGFSRADPASLYLPTIMDAVYGFFAVNVEAQSRSPSSLLNWMRRLIAVRKRHPSFGRGTLRFLYPGNRKILAYLREFEGEVILCVANLSRAPQPAELGLAEFSGRVPVEMLGNSVFPPIGELHYFITLPAYGFYWFRLSKGEGPSWHEPPVEPLPDLSTLVLPRIWDSLGSDGPLRQIQGDILPAFLPKQRWFSGKEHSLRGVEMTDHAVISAPGAASGWMLALWRADYKDGAPGQTFQLPLDIAWESREDDPLSRLLPFTLARVRRVNRVGALYDAMAGPAFPLALVQAMAEGANVTTAKGGGLRFTRTQAFPAGPLPGPEAVARLGREQSNTSIKLGEDMVLKLYRRVEAGIHPEIEIGRFLTDVAGFANAPPLLGALEHIDAKGAISALAVLQGFVRNQGDGWDYMLAYLDRFLDDRAQAPAEVGEGGGPAGSPHGIIHAQADILGQRVAELHHAFATPTEDPAFSAEAVGPEDLASWREQVRTQAAQARQALDTALPGLSAEVAGLVTRLLDCWERIDARVDAPISLAEGLVKTRIHGDLHLGQVVVVRDDFHILDFEGEPVKGLSERRDKHCPLKDVAGMLRSFDYAAWSAALSFRQTHAEVRIDVLPALGVWQEEIREAFLAGYDRAIAGCPSVPALEEGRRDLLSLFMLEKALYEVSYEAANRPDWLRIPIGGVLRLLGEGPSDEIKPR

SEQ ID NO: 13756 - DNA, 3465 bp, Burkholderia fungorum LB400
  CDS (1)..(3465)
atgaagcgtgacgatccagcccaaaccacgtcgcaagcccactcgagcgccgccaccggcggcgtcgcgaaagcgcgcacgcatcggcgcggcaaacccgcggccttgagcgacgatccgctctggtacaaagacgcgatcatttaccaggtgcacatcaagtcattcttcgacgcgaacaacgacggcgtcggcgactttcccggcctgatcgcgaagctcgactacatcgccgaactcggtgtgaacgcgatctggctgctgccgttctatccgtcgccacggcgcgacgatgggtatgacattgccgattaccgcaacgtgcatccggactacggcaatctgtccgacgtaaagcgcttcattcaggaagcgcacgcacgcggcattcgtgtgattaccgaattggtgatcaaccacacgtcggaccagcatccgtggtttcagcgcgcgcgccgcgcgaagccgggttcgaaccaccgtaactactacgtgtggtccaacaccgatcagaagtatctggaaacgcggatcatcttcatcgattcggagccgtccaactggacgcacgatccggtagcgggcgcgtattactggcaccgcttctactcgcatcagcccgatctgaatttcgacaatccggccgtgttgagggaggtgctgcaggtcatgcgcttctggctcgatatgggcatcgacgggttacggctcgacgcggtgccgtatctggtggaacgtgaaggcaccaacaacgagaacctgccggaaacgcacgcggtgctcaagaagattcgcgccacgatcgacgccgaatatccgaaccggatgctgctcgccgaagccaaccagtggccggaagacgtgaaggaatatttcggcgacgaagacgaatgccacatggcgttccacttcccgctgatgccgcgcatctacatgtcgattgcgagcgaagaccgcttcccgatcaccgacatcatgcggcaaacaccggacctcgccgaaacgaaccagtgggcgattttcctgcgcaatcacgacgaactgacgctggaaatggtcacggattccgagcgcgactatctgtggaacacctacgcgagcgatcgccgcgcgcgcctgaatctcggcattcgccgccgtctcgcgccgttgatggaacgcgaccgccgccgtatcgagctgatcaattcgctgctgctctccatgcccggcacgcccgtgatctattacggcgacgaactcggcatgggcgacaacattcacctcggcgaccgcgacggcgtgcgcacgccgatgcaatggtcatcggaccgcaacggcggtttttcgcgcgccgaccctgagcaactcgtgctgccgccggtcatgggctcgctgtatggtttcgacgcggtgaatgtggaagcgcaaagccgcgacccgcattcgctgctgaactggacccggcgcatgctcgccacgcgtcgcgcgaagcagactttcgggcgcggcacgatccgtttcctgaagccggaaaaccgcaagattctcgcgtacctgcgcgagatgccgggcgagccgccgattctctgcgtggcgaatctctcgcgcgcgccgcaagcggtggagctcgatctgtccgaattcgacggctccgtgccgatcgaaatgaccgcggactccgtgttcccgccgatcggccaactgacgtatctgctgacgttcccgccgtacggcttcctgtggttcatgctgtgccccggcggccaacgtcctacctgggctcaagcgccttctgagccgctgcctgaattcgtcacgatcgtgattcgcgaaggccaggtcggtccgacgccggagaacgtgcgcctgctcgaatcggaagtgctgccttcatggctgagccggcgccgctggtttgcgtcgaaggatcagaagctcaatgcggtgcggctcgcggcattgaccacgattccgaacggcggctttgcgttcaccgaaatcgaagcggacgtgggcaagcataccgaacgctacgtggtgccgatcgcgattacgtggggcggcgaaaccactttcccgctgttcaagcaactggcgttggctcgcgtgcgacgcggccgcaatgtcggtcatctgacggacgcgttcgccctgccgatcttcgctcatggcgtgatgcgcaagctgcgcgaacgcgccgtggtgccgaccgtgcagaagagcgaaatcaggttcctgccgaccgaacgtttcgccgaactcgaaggactcggcgaacggcccgagatccgctggctcgcggcggagcagagcaacagttcgctgatcatcgcggacgccgcggtgctgaaactggtgcgccgtctcgtgagcggcattcatccggaagccgaaatcagccgctatctgacgcaattgggctatgcgaacaccgcgccgctgtatggcgaagtggtgcgcgtggatccggaaggcgtgccgcacaccctctgcattctgcaaggctatatcgacaatcagggtgacgcgtggaactggtcgctcgactatctgcgccgctcggtggacgaactcgccattgccgtcgataccgaaacgcagtcggtgccggaccgttccaacgaggcgattctggtggaaggctacagcacgctggccggcatcatcggcagacgcctgggcgaactgcacgtggcgctcgcctcgccgacggacgacccggcattcgcgccggaacccgccagcgcggagcaggtgaaggcatgggtcgacggcacgcaggccatgctcgccagcgcgctggatctgctcgcgccgcgtatcgagcagatgagcgatacggaaacccgggcgctggcgcagagcctgatagaccgtcgtgcggcattggttgccgctgtcgactcgctggtttccgccaacgcgggcgcgctgcgcattcgcattcacggcgatttccacctcggccaggtgctggtcgcgcagggcgacgcgtatctgatcgactttgaaggcgagccggcacggacgctcgaacaacgtcgtcagaaatcgagcccgttgcgcgacgtggccggtctgctgcgctcgctctcatatgccagcgcggccgcgcaatccaccacggaagccgcgccgcaacagaccgccgatcgcaagcgcgcgctgttcgaccgtttccgcgcgcatgccgcggagaagttcctcaacgagtaccgcgcggccgctgcggaagcggcaacgccgctcgtcgcgcccgaagccgaacaggccttgctcgatctgttcctgatcgaaaaagccgcgtacgaaatccgttacgaagcggccaaccgcccgacgtggctcagcctgccggtacgcggccttgccgcgctcaccagccgcctgctcggcgataccggcgcgccgggccacgattcctcaaaccaggcgccaggcgccgccacaccgcctaatccggccgagggcgactatgagtga

SEQ ID NO: 13757 - protein, 1154 aa, Burkholderia fungorum LB400
MKRDDPAQTTSQAHSSAATGGVAKARTHRRGKPAALSDDPLWYKDAIIYQVHIKSFFDANNDGVGDFPGLIAKLDYIAELGVNAIWLLPFYPSPRRDDGYDIADYRNVHPDYGNLSDVKRFIQEAHARGIRVITELVINHTSDQHPWFQRARRAKPGSNHRNYYVWSNTDQKYLETRIIFIDSEPSNWTHDPVAGAYYWHRFYSHQPDLNFDNPAVLREVLQVMRFWLDMGIDGLRLDAVPYLVEREGTNNENLPETHAVLKKIRATIDAEYPNRMLLAEANQWPEDVKEYFGDEDECHMAFHFPLMPRIYMSIASEDRFPITDIMRQTPDLAETNQWAIFLRNHDELTLEMVTDSERDYLWNTYASDRRARLNLGIRRRLAPLMERDRRRIELINSLLLSMPGTPVIYYGDELGMGDNIHLGDRDGVRTPMQWSSDRNGGFSRADPEQLVLPPVMGSLYGFDAVNVEAQSRDPHSLLNWTRRMLATRRAKQTFGRGTIRFLKPENRKILAYLREMPGEPPILCVANLSRAPQAVELDLSEFDGSVPIEMTADSVFPPIGQLTYLLTFPPYGFLWFMLCPGGQRPTWAQAPSEPLPEFVTIVIREGQVGPTPENVRLLESEVLPSWLSRRRWFASKDQKLNAVRLAALTTIPNGGFAFTEIEADVGKHTERYVVPIAITWGGETTFPLFKQLALARVRRGRNVGHLTDAFALPIFAHGVMRKLRERAVVPTVQKSEIRFLPTERFAELEGLGERPEIRWLAAEQSNSSLIIADAAVLKLVRRLVSGIHPEAEISRYLTQLGYANTAPLYGEVVRVDPEGVPHTLCILQGYIDNQGDAWNWSLDYLRRSVDELAIAVDTETQSVPDRSNEAILVEGYSTLAGIIGRRLGELHVALASPTDDPAFAPEPASAEQVKAWVDGTQAMLASALDLLAPRIEQMSDTETRALAQSLIDRRAALVAAVDSLVSANAGALRIRIHGDFHLGQVLVAQGDAYLIDFEGEPARTLEQRRQKSSPLRDVAGLLRSLSYASAAAQSTTEAAPQQTADRKRALFDRFRAHAAEKFLNEYRAAAAEAATPLVAPEAEQALLDLFLIEKAAYEIRYEAANRPTWLSLPVRGLAALTSRLLGDTGAPGHDSSNQAPGAATPPNPAEGDYE

SEQ ID NO: 13758 - DNA, 1821 bp, Thermobifida fusca
  CDS (1)..(1821)
atgaccacacagccggctcctggtgcgcgcccgacgccgaccgggtccgttcccgacacgttcacccacgcaaagccgcgcgacccctactggtacaagcacgcggtgttctacgaagtcctcgtccgcggcttctacgactccaacggggacggcaccggcgacttgcggggcctcatcgaaaaactggactacctgcagtggctcggcatcgactgcctctggctgctgccgatctacgagtccccgctccgcgacggcggctacgacgtctccgactacatgaagatcctgcccgagttcggccggatctccgacttcgtggaactcgtcgaaaaagcccaccagcggggcatccgggtcatcaccgacctggtcatgaaccacaccagcgaccagcacccgtggttccaagcctcccggcacgaccccgacggaccgtacggcaacttctacgtctggtcggacaccacggaacgctacagcgacgcgcgcatcatcttcatcgacaccgagcagtccaactggacctacgacgaagtgcgcggacagtactactggcaccgcttcttctcccaccagcccgacctcaacttcgagaacccggacgtccaggacgccatcctcgaagtgatgcggttctggctggaccttggcatcgacggtttccgcttggacgccgtgccctacctgtacgagcgggaaggcacgaactgcgagaacctcaaggagacccacgagttcctcaaacgcatccgcgccgaagtcgaccggctctaccccgaccgggtcctgctcagcgaagccaaccagtggcccgccgacgtcgtcgactacttcggcgactacgaatccggcggcgacgaatgccacatgaacttccacttcccgctgatgccgcgcatgttcatggcggtccggcgcgaacagcgctaccccatctcggaaatcctcgcgcagaccccgcctattccgcgcaactgccagtgggcgatcttcctgcgcaaccacgacgagctgaccttggagatggtcagcgatgaagagcgggactacatgtactccgaatacgccaaagacccgcggatgcgcgccaacatggggatccgccgccggctggcacccctcctggaaaacgacctcaaccagatcaaactgttcaccgcgctgctgctgtcgctgcccggctccccggtgctctactacggcgacgagatcgggatgggcgacaacatctggctgggggaccgcgacagcgtgcgcacccccatgcagtggaccccggaccgcaacgccggattctcccgctgcgacccgggccgcctctacctgccggtgatcatggacccgatctacgggtaccaggcgatcaacgtcgaagcacagcagaacaacccgaactcgctgctgaactggacccgcaacatgatccagatccgcaagcagcacccggtgttcgggacgggggacttcaccgaactccacgcgagcaaccccagcgtgttcgcgttcgtgcgcgaatacggcgacgaccggatgctgtgcgtcaacaacctgtcccggtttccccaaccggtggaactggacctccgccgcttcgaagggatcaccccgatcgaatgcacggggggagtgcacttcccgcccatcggggaactgccctacctgctgactctccccgggcacggcttctactggttccagcttccgcccgtcgccgaagagcagccgctcgcccagcccgtcaccaccgtccccgcagccccgcagcctcctgctccggcagaccgtcccgcgtccgacccgacccagcggtcctga

SEQ ID NO: 13759 - protein, 606 aa, Thermobifida fusca
MTTQPAPGARPTPTGSVPDTFTHAKPRDPYWYKHAVFYEVLVRGFYDSNGDGTGDLRGLIEKLDYLQWLGIDCLWLLPIYESPLRDGGYDVSDYMKILPEFGRISDFVELVEKAHQRGIRVITDLVMNHTSDQHPWFQASRHDPDGPYGNFYVWSDTTERYSDARIIFIDTEQSNWTYDEVRGQYYWHRFFSHQPDLNFENPDVQDAILEVMRFWLDLGIDGFRLDAVPYLYEREGTNCENLKETHEFLKRIRAEVDRLYPDRVLLSEANQWPADVVDYFGDYESGGDECHMNFHFPLMPRMFMAVRREQRYPISEILAQTPPIPRNCQWAIFLRNHDELTLEMVSDEERDYMYSEYAKDPRMRANMGIRRRLAPLLENDLNQIKLFTALLLSLPGSPVLYYGDEIGMGDNIWLGDRDSVRTPMQWTPDRNAGFSRCDPGRLYLPVIMDPIYGYQAINVEAQQNNPNSLLNWTRNMIQIRKQHPVFGTGDFTELHASNPSVFAFVREYGDDRMLCVNNLSRFPQPVELDLRRFEGITPIECTGGVHFPPIGELPYLLTLPGHGFYWFQLPPVAEEQPLAQPVTTVPAAPQPPAPADRPASDPTQRS

SEQ ID NO: 13760 - DNA, 1563 bp, Microbulbifer degradans 2-40
  CDS (1)..(1563)
atggataccaatgccgatggtgtgggtgatattccaggaattgtgcaaaagctcgattacatagccagtttaggtgttgatgcgatatggatatcgccattttttaaatcgcctatgcacgactttggctacgacattagcgactatcgcgacgtagacccattatttggcaccttggatgacttcgatctacttatcgatgaagcgcataagcgcggcattaaagtaatgatcgaccaagtgctaagccacacttctgccgagcatgaatggtttaaagagagccgccaatcacgcgataaccccaaagccgattggtatgtttgggccgaccctaatgaagatggcacgccccctaataactggctcgctatttttggcggcagcgcttgggaatgggattcgcgtcgcggtcagtactacctgcataactttttgaaaagtcagccagatttaaacttccactgcgaagatgtacaaaaccaaattttgcaggaagtagagttttggctaaaacgcggtgtagatggcctgcgtttggatgctattaacttttgtttccacgataagcagttgcgcaacaacccgcctaaaagtgcaagtgagcgcaaagcgcgcgggtttagtgaagataacccctacgcttttcagtggcatacctacaacaacacccagccagaaaacctcgcgtttttgcagcgcctgcgcagcttgatggataagtaccccaataccgttaccttgggcgaaatatcttcagacgattcgctggcaacaatggctgagtacaccgccgataacgacaagttacatatggcttacagctttgagctactagccgatgagttttctgcggcttatattcgcgaaaccgttggcacacttgagtcgcgcttaaacgatggctggccctgttggtctattggcaatcacgatgtaccacgtgtggctagtcgctggggcaaagaagatgcatgcgatgcgctttctattgtactcaacgccatgttgctctctttgcgtggcagcgtatgttgttatcagggtgaagagctgggtttgaaagaagccgagctaaccttcgagcaattacaagacccatacggcattaccttctggcccaagtttaaaggtcgcgatggctgccgcacacctatgccgtgggatagccagcaacatgcaggctttagtaacggcgcgccatggctgccagttgcagacgatcacaaagccaaaaacgtgaccgttcagcagcaagcggatttatcggtactacaggcgtacaaacaatttattgcttggcgaaaaacgcagccagaaattttgtacggcgatatcgcgttcctttcgtcgcatgaatccaccttggcgtttacgcgcagctacgaaggcagcacattatttgccgcgtttaatttatctaacaccgaacaagtagtaaacctacctgcaggtgagtggaccgcactggaaggccacggccttagcgccgcagtgagtgccactcaaatcacattacctccttttggcggttttttcgccaagcaggcaagcaacagttag

SEQ ID NO: 13761 - protein, 520 aa, Microbulbifer degradans 2-40
MDTNADGVGDIPGIVQKLDYIASLGVDAIWISPFFKSPMHDFGYDISDYRDVDPLFGTLDDFDLLIDEAHKRGIKVMIDQVLSHTSAEHEWFKESRQSRDNPKADWYVWADPNEDGTPPNNWLAIFGGSAWEWDSRRGQYYLHNFLKSQPDLNFHCEDVQNQILQEVEFWLKRGVDGLRLDAINFCFHDKQLRNNPPKSASERKARGFSEDNPYAFQWHTYNNTQPENLAFLQRLRSLMDKYPNTVTLGEISSDDSLATMAEYTADNDKLHMAYSFELLADEFSAAYIRETVGTLESRLNDGWPCWSIGNHDVPRVASRWGKEDACDALSIVLNAMLLSLRGSVCCYQGEELGLKEAELTFEQLQDPYGITFWPKFKGRDGCRTPMPWDSQQHAGFSNGAPWLPVADDHKAKNVTVQQQADLSVLQAYKQFIAWRKTQPEILYGDIAFLSSHESTLAFTRSYEGSTLFAAFNLSNTEQVVNLPAGEWTALEGHGLSAAVSATQITLPPFGGFFAKQASNS

SEQ ID NO: 13762 - DNA, 1671 bp, Oenococcus oeni PSU-1
  CDS (1)..(1671)
atgtcaaaaaaacaatggtttaaagatacagtagtttatcaagtatacccaatgagtttccaggatagcgataacgatggaattggcgacctgccggggattacaaaacgacttgactatatcaaaaaactaggtgccgatgtcatttggttaaacccgatttatgagtcacccaacaaagacaacggatatgatattgccaattatcgagctatcaacccggagtacggatcgatgaatgattttgatgatttacttaacaaagctcaccaattaaaccttaaaattatgatggatctagtcgttaaccatacttccgatcaacatcattggttccaggaaagtaaaaaaaccaaagacaatccgttttccgatttttatatttggagagatccggtagatggtcacgaacctaataattggttggccgcatttggtggttcagcatggacttatgttccggaacgcaaacaatattatttgcatttgtttgcaaccggtcaaccggatctcaattgggagaatccggatgttcgccaagcagtctttgatatagaacgtttttggctcgataaaggggttgatggttttagaatggacgttattaatcttatttcaaaaccaaagggtctgcctgatgttccggaacctgccaccgcaggaaagacgatggatttcgtagcggatgggcatcgcctaaatgagtttttgagtcaaatgaacagcgaagtattgtccaaatatgacactataacggttggtgaaatgcctggatcaactactgaagacgctattaaatacacgggccttaacagccatgaactgaatatggtatttcagtttgagcatgtcggtttaagtcccaatccggatgttagattgggaaagtggaatgaccagcctgttaaactgactgaattaaaagcctcgttgaacagatggcaaactggtcttgacggcaaaggatggaacagcctttactggaacaatcacgatcaacctcgggcagtatcccgttttggaaatgacgatcctaagtatcgtgttctatcggccaaaatgctggctacaactcttcacttgatgcagggcactccttatgtatatcagggtgaggagcttggaatgacaaatgctcacttcacaaaattaaatcaatacgaggatatcgaatctattaatttttatcatgagttggtcgaacaagaaaaaattgtcgatgggccaacaatgctaaaatatctggcaaatatttcacgtgataatgcccgtacgccaatgcaatggaacgataaaaacaatgccggattctcaagtgcaaaaccatggtttgcccttaaccctaattacaaatcaattaacgttgaggattcattggctgacaaaaattccgtattctattattatcaaaaattaattaagcttcgtcacaataatgaaataatcaaatatggaagcttcgaggaaatagaccccgatgacgatcaagtatacgcatatcgtcgtcattacgaaggaaaaactttgttacttataagcaattttaccgataaaatcgtaagtcgcgattacggtcaatcgaacgcttcaagtttgcttatagataattatgaagatgataaagtaaacgagttaagaccgtatgaggcgaaagcttatctatttaaatga

SEQ ID NO: 13763 - protein, 556 aa, Oenococcus oeni PSU-1
MSKKQWFKDTVVYQVYPMSFQDSDNDGIGDLPGITKRLDYIKKLGADVIWLNPIYESPNKDNGYDIANYRAINPEYGSMNDFDDLLNKAHQLNLKIMMDLVVNHTSDQHHWFQESKKTKDNPFSDFYIWRDPVDGHEPNNWLAAFGGSAWTYVPERKQYYLHLFATGQPDLNWENPDVRQAVFDIERFWLDKGVDGFRMDVINLISKPKGLPDVPEPATAGKTMDFVADGHRLNEFLSQMNSEVLSKYDTITVGEMPGSTTEDAIKYTGLNSHELNMVFQFEHVGLSPNPDVRLGKWNDQPVKLTELKASLNRWQTGLDGKGWNSLYWNNHDQPRAVSRFGNDDPKYRVLSAKMLATTLHLMQGTPYVYQGEELGMTNAHFTKLNQYEDIESINFYHELVEQEKIVDGPTMLKYLANISRDNARTPMQWNDKNNAGFSSAKPWFALNPNYKSINVEDSLADKNSVFYYYQKLIKLRHNNEIIKYGSFEEIDPDDDQVYAYRRHYEGKTLLLISNFTDKIVSRDYGQSNASSLLIDNYEDDKVNELRPYEAKAYLFK

SEQ ID NO: 13764 - DNA, 1482 bp, Trichodesmium erythraeum IMS101
  CDS (1)..(1482)
atgcaaattcaaacaccagaatgggttaaacaggctgtattttaccaaatttttccagatcgttttgctaaagctcaaccaacgactgaaactggaaaaggaatagacaaaggttggtatcccagcagtctagaaccttgggatgaatatcctactcctcaaggttataaaggagggaacctctggggtgtcattaaaaaacttgactatcttcaggaacttggtatcacagctatttactttacaccaatttttcagtcaacctgtaaccaccgctatcatactcatgactattatcgagtcgatccaattttaggaggtaatgaggctttaagggtattaatagatactgctcacgatcgcaatattaaagtggttcttgatggagttttcaaccacgctagccggggtttttatttctttaacgatatcctggaaaacggtccttattctccctggttgcattggttcaaaatagaaaattggcctctgtctgcttacgatggtagtttacctgctaattatgtgggttggttagataaccgtgctttacctgtttttaatcatgacaacccagaggtcaaagaatacattatggaaattggagaatattggttaaaatttggtattgatggttggcggttggatgtaccttttgaagtgaagactcccgggttttggcaagaatttcgcgatcgcgttaaggctattaacccagaagcatatattgtgggtgaagtctggagtaactgcgcacaatggttggatggtactcagtttgatggagtgatgaattacttatttactggtccaactattgcttttactgtaggcgatcgtgtggatcttgagcaaattgaaggccgtgactatgtagcttatccggctatatctgctgttgaatacggtcaaaaaatgcaggagttactgcaactttacccttgggaaattcaattaactcaactcaatttattagatagtcatgatacagctagagttttgagtattgctaaaggggataaagcaagtgttgaattagcgactctgttgttaatgacttttcccggagcaccaagtatttattatggtgatgaggtaggtttaccgggtaagtttgaccctgactgtcgtcgtagttttcctactactgaaaaatgggatcgtgaagttctggaatatcataaacagttaattgctattagaaaagaatattcagctttgcgcactggtaattacgaagtgttgtttgccgagggaaatgtttatatttttgctcgtattttagaagaggaagaaattattgtagctgttaacattggtatagaagcagcaaaagtaaatgttatttttaataagcttaaatctcaacctaataaagttgtttatggtagttgtaaaatttcctggcaaggaggagatgaagctagtaaattagagttatatttgccaggaagaaaaggttgtattttggttaaagattaa

SEQ ID NO: 13765 - protein, 493 aa, Trichodesmium erythraeum IMS101
MQIQTPEWVKQAVFYQIFPDRFAKAQPTTETGKGIDKGWYPSSLEPWDEYPTPQGYKGGNLWGVIKKLDYLQELGITAIYFTPIFQSTCNHRYHTHDYYRVDPILGGNEALRVLIDTAHDRNIKVVLDGVFNHASRGFYFFNDILENGPYSPWLHWFKIENWPLSAYDGSLPANYVGWLDNRALPVFNHDNPEVKEYIMEIGEYWLKFGIDGWRLDVPFEVKTPGFWQEFRDRVKAINPEAYIVGEVWSNCAQWLDGTQFDGVMNYLFTGPTIAFTVGDRVDLEQIEGRDYVAYPAISAVEYGQKMQELLQLYPWEIQLTQLNLLDSHDTARVLSIAKGDKASVELATLLLMTFPGAPSIYYGDEVGLPGKFDPDCRRSFPTTEKWDREVLEYHKQLIAIRKEYSALRTGNYEVLFAEGNVYIFARILEEEEIIVAVNIGIEAAKVNVIFNKLKSQPNKVVYGSCKISWQGGDEASKLELYLPGRKGCILVKD

SEQ ID NO: 13766 - DNA, 3288 bp, Thiobacillus denitrificans ATCC 25259
  CDS (1)..(3288)
atggaagaaaatgacccgctctggtacaaggacgcaattgtctacgaactgcacgtcaaggcgttcttcgacgccaacggcgatggcgcgggcgacttccggggcctgatcagcaagctcgactatctccaggaactcggcgtcaacgcgctctggctgttgccgttctacccgtctccgggccgcgacgacggctacgacatctcggattaccacaacctccacccctcgttcggcgacatggccgacttccgcaggttcatccgcgaagcgcaccagcgcggactgcgtgtcatcaccgagctcgtcgtcaaccacacctccgaccagcatccgtggttccaggcggcgcggcgcgcgccgcctggttcggtcaagcgcaactattacgtgtggagcgataccgacacgcgcttcagcgaaacgcgcatcatcttttcggataccgagaaatcgaactgggcgtgggatgaagtcgcgcaggcctactactggcatcgcttcttctcccaccagcccgatctcaacttcaacaacccgcacgtcttcaaggccatcatgcgcacgatgcgcttctggttcgatgcgggcgtcgatggcatgcggctcgacgccgttccctacctgtgcgagcgcgacggcacgagcaacgaaaatctgcccgagacgcacgcggtcatccgaaggatgcgcgccgaactcgacgcgcgctacagcaaccgcatgttcctcgccgaagccaaccagtggcccgaggacgtgcgcgagtatttcggcaacggcgacgagtgccacatggcctaccacttcccgctgatgccgcgcatgtacatggcgatcgcgcaggaggatcgccacccgatcgtcgaaatcatggaacagacaccggacatccccgacctttgccagtgggccgtgtttctgcgcaaccatgacgaactgacgctcgagatggtgaccgaccgcgaacgcgactatctctatcaggcctacgcgagcgacccgcaggcccgcctcaatctcggcatccgccgccgcctggcgcccttgctcgacaacgaccgccaccgcatcgagttgatgaatctgctgctgatgacgatgccgggctcgccgatcgtctattacggcgacgagatcggcatgggcgacaacctcctgctcggcgaccgcaacggcgtgcgcacgccgatgcaatgggacggcggccccaacggcggattctcgtccgcgccgaccgagcgtctgttcctgccgccgatcaccgatccggtctacggctacggcgcggtaaacgtcgaggcgcagcagcgcaatccctcgtcgctgctgaactggacccggcggctgatcgcaatgcgcaaggcgcaccgcgcgctcggtcgcggcacgctgcgcttcctgcggcctggcaaccgcaaggtgctcgcctatctccgcgaatacgagggcgagacgattctgtgcgtggccaacgtcgcgcgtgcgccgcaggccgtcgaactcgatctctcgcccttcaagggacacgtgccggtcgaactgatggggcgcagcagcttcccgccgatcggcgagttgccctatctgctgacgctcggcggatacggctgtttcgtgttccggctcgcgaccgacgtcgaggcgccggcctggcacgaagaaaggccggtgccgcccgatctgcccgtgctcgttttggtcgacgcgggctggcgcacgctcttcgcgcggaccgacgaaggcgtgaaccagctcatggtgcggcgtgcacgcgagcagctcgagcgccagatcattccgcgctacttccggacgcagccgtggttcgtctacagcgaggccgcgctcgagaaattcgagttcgggaccttgcgcgagtgggggaccgacagcggaacctggctgctcgcgaccgtcaccgtcacgctcctcgacggcagcatttatcactacgcgctgccgctgggcctcgcctgggaagacgaagacgaaggccgcgtcgccgccctgctgcacgtgacgctcgccaaggtgcggcggctggcgcgggtcggcatcctgttcgacgccttctgggacgacggcttctgttgcgcgatcgtctccgccatggagcgcggcgagacgcttgcctacggcgacggccacctgacgttccgcacggccagcgcctaccccggattcttctgtccgcttgtcacgtcgtcgatcacccgtacggtctccgaacacgggcgtctgcgcgtgaatctcaacgaccagctggtcctgaaaagctatccgcgacaaatgcagggcacgcatcccgagctcgagatgtcccggttcctcaccgagaccgcgaagtttgcgcacatcccgcaactcggcggcacggtcgaatacgtcgcgagcagcggcaggcactccacgctcgcgatcctcgagcgctatgcgcccaaccagggcgacgcctgggcctacacgctcaactacctcgaacgttttctcgatctcagccgcacgacgggcgagcaggcgcccgacggccggcacggtcgctacatggggctgatgaagacgctcggcgagcgcacggccgagttccatcgcgcgctcgcgaccccggatcgctcgggcgacttcggcagcgagccgatcgcgccgccggatattctggagtgggtcaacaaggtacggcacgagatgggcgtgatgtacgagctgctcgaacgtgccttgccggctttgccggagcccgtggccgtcgccgcgcagcagctttttctcgttcgccccaagctctaccggcgcgtcatccgcgcctcgcgcgtgcgtgtcgacgcgagcaagacgcgctgccacggaaactatcacctcggtcaggtctggctcgtgcaaaacgatttcctgatcgcgaattacggcggcatacccggccgcagctgggaagaacgccgcgcaaagcacgcgccgctgcgcgacgtcgctagcatgctgctttcgctgtcgcaggcgggcgcggccgcgctcgcgcgtgtcgccggcgactccgtcgatgtgatggcggccctgcagccccatgtcgacgcatgggagctggcggcgcgcaaggcgttctaccgcggttaccgcaagggcatggacggtcatgccgcgtacccgacggacgcgaccgcggccgaggccttgctgactttgttcctggctgaaaaagcgattgcggagctgaccgaggcgctcgaacgccgcgccgtcggcagcgctgctgcaatgcgtcggctggttcaggtgacacgccgttga

SEQ ID NO: 13767 - protein, 1095 aa, Thiobacillus denitrificans ATCC 25259
MEENDPLWYKDAIVYELHVKAFFDANGDGAGDFRGLISKLDYLQELGVNALWLLPFYPSPGRDDGYDISDYHNLHPSFGDMADFRRFIREAHQRGLRVITELVVNHTSDQHPWFQAARRAPPGSVKRNYYVWSDTDTRFSETRIIFSDTEKSNWAWDEVAQAYYWHRFFSHQPDLNFNNPHVFKAIMRTMRFWFDAGVDGMRLDAVPYLCERDGTSNENLPETHAVIRRMRAELDARYSNRMFLAEANQWPEDVREYFGNGDECHMAYHFPLMPRMYMAIAQEDRHPIVEIMEQTPDIPDLCQWAVFLRNHDELTLEMVTDRERDYLYQAYASDPQARLNLGIRRRLAPLLDNDRHRIELMNLLLMTMPGSPIVYYGDEIGMGDNLLLGDRNGVRTPMQWDGGPNGGFSSAPTERLFLPPITDPVYGYGAVNVEAQQRNPSSLLNWTRRLIAMRKAHRALGRGTLRFLRPGNRKVLAYLREYEGETILCVANVARAPQAVELDLSPFKGHVPVELMGRSSFPPIGELPYLLTLGGYGCFVFRLATDVEAPAWHEERPVPPDLPVLVLVDAGWRTLFARTDEGVNQLMVRRAREQLERQIIPRYFRTQPWFVYSEAALEKFEFGTLREWGTDSGTWLLATVTVTLLDGSIYHYALPLGLAWEDEDEGRVAALLHVTLAKVRRLARVGILFDAFWDDGFCCAIVSAMERGETLAYGDGHLTFRTASAYPGFFCPLVTSSITRTVSEHGRLRVNLNDQLVLKSYPRQMQGTHPELEMSRFLTETAKFAHIPQLGGTVEYVASSGRHSTLAILERYAPNQGDAWAYTLNYLERFLDLSRTTGEQAPDGRHGRYMGLMKTLGERTAEFHRALATPDRSGDFGSEPIAPPDILEWVNKVRHEMGVMYELLERALPALPEPVAVAAQQLFLVRPKLYRRVIRASRVRVDASKTRCHGNYHLGQVWLVQNDFLIANYGGIPGRSWEERRAKHAPLRDVASMLLSLSQAGAAALARVAGDSVDVMAALQPHVDAWELAARKAFYRGYRKGMDGHAAYPTDATAAEALLTLFLAEKAIAELTEALERRAVGSAAAMRRLVQVTRR

SEQ ID NO: 13768 - DNA, 1815 bp, Chloroflexus aurantiacus
  CDS (1)..(1815)
atgtatctgcgcttcagtggcagaccaggtgacacagcggtatttcggctccgtatggccgcagacgcaccggtcagtggggtcttcctccgcacctgcccggatggggaacagcattttacgccactgcgcgatctgggagtgcgcggggtgtgccggtggtgggaaggtgagctaccgatccgcatgctccgcaccaattaccgcttcctgatccgcgcagatgactgttcgcgctggtacagcgctggtggcatcacccgtcactaccccaccgacgcaaatgatttcgtggtactggccaactatcacgcgccagcctgggtacgtgatgcggtcttctaccagatttttccggatcggtttgccgatggcgacccgacgaataatgtccgcgatggtgcgtatctctaccacggacgaccggttgttgcgcgccgctgggatgaacgacccaaccgggcgaccggatcgatagagttctacggtggcgatttgcaagggatcgcgcagcgcatcgactatctgaccgatctgggagtctcggcactgtatctcaatcctatcttccgagcaccatcgaaccacaaatacgatgtcgaagactataccagcattgatccacacctgggaggtgaagcagggttactccgcttacgtgaggtactcgacgagcgagccatgaagctggtgcttgacatcgtaccgaaccattgtggagtgacccatccgtggtttgtcgctgcccaggccaacccacgagcaccaacagccgagttcttcatgttccgtcgtcatcccgacgactacgagagctggctgggggtcaagaccctgcccaaactcaattaccgcagtgtccgcctccgcgacgtgatgtacgcaggccaggatgcgattatgcgctactggttacgaccaccctatcggatcgacggctggcggattgatgttgccaatatgctggggcggttggggacagacaaccttggccacaagattggacgcgggatttggcgggcagtgaaggcagagcaaccggaagcctatctgctgggtgaacacttcttcgacggtactccccatctgcaaggtgaagagcttgatgccacaatgaattatcaaggcttcacctttcccatctggcgctggttgggagggtttgagttcaatccgcagcggcctgaagccgatccacgaccgattgcaaccgagacggtcgttgcgcaatggacggcatttcgggcagcgataccgtggcagatcgccagtcagcaattcaacctgttgggaagtcatgacaccccgcgtctacggacaatcgtaggcgatgatctggcgcgagtgcgggtagcgatgacgttactcttctgctatccgggggtgccgtgtatctactacggtgacgaaattggactgacgggcggcggtgatcctgattgtcggcgaccgatgccgtgggatgaacgagagtgggatcacgacctgcgggcgttcgtgcaacggctggcacgcttacggcgtcagtcgccggcgttgcgctggggcggctttcagcagctctacgcaaacggggaaacgattgccttccagcgcgaagcacctgaggagcgcatgatcattgtggtacggcgcagtgatgatgggcaacgcctgctgccggtgcgtcacggcgggctggctgatggggttcacctgcgggaactcttcagtggtgccgagacggttgtacgcaacgggatgctggacattgggaatttgccggccaccggtgcgcaaatctggcaaaccacagacaaagacaacgtgttctga

SEQ ID NO: 13769 - protein, 604 aa, Chloroflexus aurantiacus
MYLRFSGRPGDTAVFRLRMAADAPVSGVFLRTCPDGEQHFTPLRDLGVRGVCRWWEGELPIRMLRTNYRFLIRADDCSRWYSAGGITRHYPTDANDFVVLANYHAPAWVRDAVFYQIFPDRFADGDPTNNVRDGAYLYHGRPVVARRWDERPNRATGSIEFYGGDLQGIAQRIDYLTDLGVSALYLNPIFRAPSNHKYDVEDYTSIDPHLGGEAGLLRLREVLDERAMKLVLDIVPNHCGVTHPWFVAAQANPRAPTAEFFMFRRHPDDYESWLGVKTLPKLNYRSVRLRDVMYAGQDAIMRYWLRPPYRIDGWRIDVANMLGRLGTDNLGHKIGRGIWRAVKAEQPEAYLLGEHFFDGTPHLQGEELDATMNYQGFTFPIWRWLGGFEFNPQRPEADPRPIATETVVAQWTAFRAAIPWQIASQQFNLLGSHDTPRLRTIVGDDLARVRVAMTLLFCYPGVPCIYYGDEIGLTGGGDPDCRRPMPWDEREWDHDLRAFVQRLARLRRQSPALRWGGFQQLYANGETIAFQREAPEERMIIVVRRSDDGQRLLPVRHGGLADGVHLRELFSGAETVVRNGMLDIGNLPATGAQIWQTTDKDNVF

SEQ ID NO: 13770 - DNA, 4140 bp, Chloroflexus aurantiacus
  CDS (1)..(4140)
atgtttctccgcctgatgcacctcatccttgcgattggggtgctctttggtgcaacgattgcaccactctcctcggttgcgttcgccgatcacacgccattaccagcgtcagttaacctggcaggtgatttacagtcggaagcgaccggcggcgcctgtggcgattgggatccgggatgtgccgcagcggccttcagcgctcagggtaacggtgtctatctgttcgtctcgcagacgattccagcagggagctacgaatacaagatcgcaatggggagctgggctgaaaactatggggctaattttcagcagaatggccccaacatcccggtgacgctcggcagtgcacagagtgtacggttctactacgatcacaaaacccattatatcgccgacagcgtgcgtaacactatctacaccgtaccgggtaacttcaacgacgagatcgggtgcagtggtgactggcaaccagattgtctgcgcacgttcatgagtgatgttgatggtgatggtgtctttacatttgccactgacgccattccacccggcaattatgagttcaagattgccacaaatgagagctgggcaaacccaaattatggcgcatttgggaacaatgttccctttacagttaccggcccggcaaccgtcatttttagcttcaatacggcaactacgtatgttggtgtggaagtacgtagtgcactcccgcagcctgacaacaatgtggagtgggacggcgtttaccacaactcgcgcgatcctctttatcgcacgccgggaggtgctgtacctgccggtacaccggtgacaattcggctccgcaccttccacaatgatgtcacggcggtaaccctgcgggtgtacgatgtcaatgccggggcacagcggttcattccgatgagtgtcgtcgctgccaataccgactgttacggcgattatgggccacgtcggtgcgatttctgggcggctacgctgaatgaggcgcaaccgaacaacctctggtaccgctttattgtcaccgatggcagtgataccgactattacgccgataacaccgcagcgctcgatggcggcagcggacgtatgacggatgatgtcgttgacttcagttatgccttgatgttctacgatccggcattcacctcgccaaactgggcacgaacggcagtcatctaccagattttccctgatcgttttcgcaatggcgatccgcataacgatccgcaagacggtgacatccggtacgatgatccggtgattacgttgggttggggtgaattacctgaaggctattgccgtcactatgccgacgcaaccaccaattgtccgtggcggtttgacacgaccccaccggcctggagtccaactatcgaagggccacggggacgtgattactacggcggtgatttggccggcgtgatcgagcaacttgactacctccagcaattgggcatcacgaccatctacttcaatcccatctttgccgccggatcgaaccatcgctacgatacccgtgattactatcgcatcgatccctatcttggcaataacggcacctttgcgcacctggttcaggaggcgcggcggcgtgggatgcgagtgatcctcgatagcgtcttcaatcacatgtcgtcggatagccccttcttcgaccgctatagccattacacgaccctgggtgcctgcgagtcactggcctcgccatatcgcacctggttcaacttccgcacgaataatgttccgtgtacgagcgacgattatgtcggctggtttggcttcgactccatccccgaaatcaacaaatcaaacccggatgtgcagagctacttcttaaccggagccaacagtgtgacacgcttctggctacgacgcggtgccgccggttggcgcctggatgtgatgggagatgccagcttcccggcaggctattgggagacattccgcaccgtcgtgcgccagaccaaacgagacggtctgattattggtgagttgtggcagaaggactcaacattgctgcgccacctccgtgggcagactgccgatacaacgatgaactaccgtctgcgtgatgcggtgatcggcttgctcctgcctgggggaacgtttgacagcaaagggtttggtgacagtggccgggtcatcagtccatcagaattcttgagtcgactggcctcgatccgtgaagactacccggatgcagcctactacacgctcatgaatctgctcggcagccacgatacggagcggattctgtggacgcttacgcctggacaggagacacgcgccgataaggaattcaatgccgctaatctggcagaaggtaagcggcgtgtccaactggcctctctgatccaattcaccgtacccggtgcaccgaccgtgtattacggcgatgaagtaggagtcaccggcgatgatgatccagatgaccgccgcacctatccctggcctgatcagggtggtacacccgacaccaaccttctgaaccattaccgcagcctgaccgagctgcgcaaccgttatccggtgctggcgaagggtgatttcacaccgctgctggccgacgatgccgcaggcgttgtggcctatggtcgaaagtatcgcaataaagccgcgttggtgctgatcaatcgcagctcaacaacgcagacgatcacggtacccgtacagggctttctgcccaatggggtagaactctgcgcgctgtttaccgttggcaatcagctcgacgagacggtacaggtcgtgaacgggagcatccagatcacgctgaacccgctgagcggtacggtgctgatcagcgagccgggagccgatctcacgccaccggcggcccccaccaacctccaggtcaccgaagagggtgatcggtcggtaagcctgagctggcagcggcccagtggtggagcacaggcgtacaacatctaccgcagcccggttagtggcggtggttgggtcaaggtcaatactgcgccggtaagcggtctgagctttaccgacaccacggtagagaacgggcgaacctactacttcgttgtccgtgcgcttgacgccgtcgggaacgaagggccagcttcggcggaagtgagcgctctgccgcactaccggattgggtgggccaatttgcaatggccaccggcgatctcacacaccgtgtcggccatcaacaccaccccggatatttacgggcaggtctggatcgacggtgtaaccagtcagcccggcgcgacacctggcctgcgtgctcaggtgggatacggcccgcagggcagtgatccccgtgggagcaactgggtgtgggtggaggctaccttcaacgttgatgccggcaacaacgacgaattcaaggcgcaactccagcccgaaacggttggcaccttcgattacgtcttccgctacagcaccaccaacggacgcgactggctctacgccgacagcagtgggccgttcagtggcttaccgccacaaccaggcgtactcaccgttctttccagtggtgacacaacaccgccggcagtcccaaccggcctgcaagtgatcagcgcgtccccggcaggaatcgtcttgagctggaatgccgtcggtgatgcctatgcctacgaagtacgccgtatcgatggcaacggcaatgaactcatctttgcccgtacaactgcaaccaccttcaccgacaccggtgtcatgcagggggcaacgtacacctatgacgtgcgttctttagacatctccttcaaccgttcagccttcagcgcaccggtaacggctaccgccgaactccgcacggttacgctggtgatgaatgtgacggtaccgaccccggttgaagacgcgattgggcgcagcgtctacattgccggcttccttgaccggctcgacggtggtttaccgcagtggaatccgggtggtgtggtgatgacgcaggtctcggcaacacagtggacaatcaccttcaccggacgcgagggcacgcaactcgaatacaagtacaccctcggatcgtgggactacgttgagaagggtgcgacttgtgaagagctggccaaccggcaattgacgctgacctacggtacgagtggcgtgcagacggtcaatgacactgtgctcaactggcgaaatgtagacccgtgtgggaattag

SEQ ID NO: 13771 - protein, 1379 aa, Chloroflexus aurantiacus
MFLRLMHLILAIGVLFGATIAPLSSVAFADHTPLPASVNLAGDLQSEATGGACGDWDPGCAAAAFSAQGNGVYLFVSQTIPAGSYEYKIAMGSWAENYGANFQQNGPNIPVTLGSAQSVRFYYDHKTHYIADSVRNTIYTVPGNFNDEIGCSGDWQPDCLRTFMSDVDGDGVFTFATDAIPPGNYEFKIATNESWANPNYGAFGNNVPFTVTGPATVIFSFNTATTYVGVEVRSALPQPDNNVEWDGVYHNSRDPLYRTPGGAVPAGTPVTIRLRTFHNDVTAVTLRVYDVNAGAQRFIPMSVVAANTDCYGDYGPRRCDFWAATLNEAQPNNLWYRFIVTDGSDTDYYADNTAALDGGSGRMTDDVVDFSYALMFYDPAFTSPNWARTAVIYQIFPDRFRNGDPHNDPQDGDIRYDDPVITLGWGELPEGYCRHYADATTNCPWRFDTTPPAWSPTIEGPRGRDYYGGDLAGVIEQLDYLQQLGITTIYFNPIFAAGSNHRYDTRDYYRIDPYLGNNGTFAHLVQEARRRGMRVILDSVFNHMSSDSPFFDRYSHYTTLGACESLASPYRTWFNFRTNNVPCTSDDYVGWFGFDSIPEINKSNPDVQSYFLTGANSVTRFWLRRGAAGWRLDVMGDASFPAGYWETFRTVVRQTKRDGLIIGELWQKDSTLLRHLRGQTADTTMNYRLRDAVIGLLLPGGTFDSKGFGDSGRVISPSEFLSRLASIREDYPDAAYYTLMNLLGSHDTERILWTLTPGQETRADKEFNAANLAEGKRRVQLASLIQFTVPGAPTVYYGDEVGVTGDDDPDDRRTYPWPDQGGTPDTNLLNHYRSLTELRNRYPVLAKGDFTPLLADDAAGVVAYGRKYRNKAALVLINRSSTTQTITVPVQGFLPNGVELCALFTVGNQLDETVQVVNGSIQITLNPLSGTVLISEPGADLTPPAAPTNLQVTEEGDRSVSLSWQRPSGGAQAYNIYRSPVSGGGWVKVNTAPVSGLSFTDTTVENGRTYYFVVRALDAVGNEGPASAEVSALPHYRIGWANLQWPPAISHTVSAINTTPDIYGQVWIDGVTSQPGATPGLRAQVGYGPQGSDPRGSNWVWVEATFNVDAGNNDEFKAQLQPETVGTFDYVFRYSTTNGRDWLYADSSGPFSGLPPQPGVLTVLSSGDTTPPAVPTGLQVISASPAGIVLSWNAVGDAYAYEVRRIDGNGNELIFARTTATTFTDTGVMQGATYTYDVRSLDISFNRSAFSAPVTATAELRTVTLVMNVTVPTPVEDAIGRSVYIAGFLDRLDGGLPQWNPGGVVMTQVSATQWTITFTGREGTQLEYKYTLGSWDYVEKGATCEELANRQLTLTYGTSGVQTVNDTVLNWRNVDPCGN

SEQ ID NO: 13772 - DNA, 3363 bp, Chloroflexus aurantiacus
  CDS (1)..(3363)
atgaaccgtgtacgcccggccaagacgccgactctgttagccgatgatccgctctggtacaaagatgcggtcatctacgaattgcacgtgcgcgctttttgcgatagcaatggtgatggtatcggagattttcccggtctgaccagcaagctcgactatctgcaagatttgggcgtaacggcaatctggctgctccccttctatccctcaccgctgcgcgatgatggctacgatatagccgattatacgaacattcatcccaattacggcacgctggccgattttaaggtgtttattcgcgaagcccatcggcgtgggctgcgcgtcatcaccgagcttgtctgtaaccacacctctgaccagcacccctggtttcaacgtgcccggcgggctaagcccggtacttcagcccgcaacttttatgtctggtcggatacacccgaccgctacaaggacgcccggatcatcttcaaagattttgagaccagtaactggacgtgggatccagtggcgcaggcgtactactggcaccgcttctacagccatcaacccgatctcaactttgaaaatccggctgtccagcgggctgtcttcaaggcgatggagttctggctcgatctgggagtcgatggcatgcgtctcgatgccatcccctacctctacgaagcagagggcaccaattgcgagaacctgccggaaacccacgcctttctcaaacgcttacgtaagcatatggacgaaaagtaccaggggcgtatgtttctcgccgaggccaatcaatggccagaagacgcggttgcctatttcggggatggcgatgagtgccatatggcctttcacttcccggtgatgccccgcctctttatgtcggttcaccttgagaatcgctatccgatcattgatattatgcggcaaacgccgccaatacccgacaattgccagtgggcaatctttctgcgcaatcacgatgaactgaccctcgaaatggtcaccgatgaagagcgcgactatatgtaccgggtctacgctcgcgatccccaggcccggattaatctcggcattcgccgacgactggcaccattgctcggcaaccatcgccgcaagatcgagttaatgaacggattgctcttctcgctgcccggtacgccggtgatctattacggtgatgagatcgggatgggcgataacatctacctcggcgaccgcaacggtgtgcgcacgccgatgcagtggagcggtgatcggaatgccggtttttcgcgggctaatcctcagcaactctatctgccggtaattaccgatccggagtatcactacgagacggtcaacgtcgagacgcaaagcgccaatcagcattcattgttatggtggacgaaacgcctgattgcactacggaagcgttacgccgcatttggccggggcacgctcgaatttctctatcccgaaaatcgtaaggtgctctgtttcctgcgcaaaaccgaggatcagattctcctggccgttttcaatctgtcgcggtttgttcagggtgtcgaactcgatctctcgccgtaccgtggcctgatgccggttgagctattcggtcaggtggaatttccaccgattggcgatcagccctatttcctgacccttggcccacacagcttctactggtttacgctaacaccgcaacggattgaaggagtacgcttgcccacaccccaacctgaaaccgaactggttgagattccggttgatgcgattgagtgggatgcgatcttctacgatggccggcaggcgcggcttgagcgagtcttacccgattacctgcgttatcggcgctggtttggggccaaaacacgcaagatcaaacaggtgcaggtaagcgagtttgcccgtctcgattatgccggtggcccagcctacctgacactgttgcaggtcacctatgttgaaggcgccccagaaacctacttgttgccgatggcgtatgccgaaggcgagcgcgccgaccagatactggccgatcaacgccacatggtgattgcccgcctacgggttggccgtcgacctgaagccggtatcctgtacgacccactcggtgagcgtcgctttgcgtcggcgctcctggaactgataatcggacgacgccgtctacggggtgaagccggtggagagctggtgggtggcacgacccgtgcgctccgcaagcttctcggcggtagtgatggcctggaaccgagtttgatgcgtggcgagcagagcaattcatcgatcaattttggtggtcggctcattatgaagctcttccgtaagatcgagctgggccgcaatcccgatctggaactgggacgtttcctgaccgaagaggttgggttcccccatacaccaccggtagccggctacattgaatatctgcgcggcaaagatgaaccgttgacgctggcaatcgttcagggctatgtgcagaacgaaggtgatgccttcgattacgcgctcgatgtcgtgcgccgctactatgatacggtgctcacccgtaccgatgtcgtgccaccggttgtgaaggcaagcgttgccggcatgctcgcggctgcgcatcagccaccgccagccctggttgaggaattgatcggtggttacctcgagtcggcacgcctgctcggtcagcggactgcggagatgcatcaggctctggccaaaggaagtggaccggcaatggcacctgaacccttctcgaccctctaccagcgctcaatctaccagagtattcggagtctgatcgggcaaaccctgcaagatttgcggaaactgctgccgtcgttgccggcaaccgttcgtccggcggcagagcgtgttacccagagtgaagaggcgctcctggcgcggttgcaacggattaccggtgacaagatcgagacggtgcgtattcgcattcacggtgactaccatctcgaacaggtgctcttcaccggcaaagattacatgattatcgacttcgagggtgaaccactgcgcccaatcagcgagcggcggatcaaacgctcaccgttgcgtgatgtggccggcatgttgcgctcataccagtatgtcgcctatgccgctctatatgcccataatggtgcaagcagaagcgctgaagagatcgagcgacttcagcgctgggctgatatgtggagtttctgggtctgtgcagcctttcttaatggctatctgaccacagccggccatgaagcattcgtcccccaggatcaggccgatctcgaagccctgctcgagacgtttgtcgtcgaaaaagccgtctacgaactgggttacgagatgaacaatcgccctgactggctgccgatcccgatcaacggcatcttacgccagattgaagaatga

SEQ ID NO: 13773 - protein, 1120 aa, Chloroflexus aurantiacus
MNRVRPAKTPTLLADDPLWYKDAVIYELHVRAFCDSNGDGIGDFPGLTSKLDYLQDLGVTAIWLLPFYPSPLRDDGYDIADYTNIHPNYGTLADFKVFIREAHRRGLRVITELVCNHTSDQHPWFQRARRAKPGTSARNFYVWSDTPDRYKDARIIFKDFETSNWTWDPVAQAYYWHRFYSHQPDLNFENPAVQRAVFKAMEFWLDLGVDGMRLDAIPYLYEAEGTNCENLPETHAFLKRLRKHMDEKYQGRMFLAEANQWPEDAVAYFGDGDECHMAFHFPVMPRLFMSVHLENRYPIIDIMRQTPPIPDNCQWAIFLRNHDELTLEMVTDEERDYMYRVYARDPQARINLGIRRRLAPLLGNHRRKIELMNGLLFSLPGTPVIYYGDEIGMGDNIYLGDRNGVRTPMQWSGDRNAGFSRANPQQLYLPVITDPEYHYETVNVETQSANQHSLLWWTKRLIALRKRYAAFGRGTLEFLYPENRKVLCFLRKTEDQILLAVFNLSRFVQGVELDLSPYRGLMPVELFGQVEFPPIGDQPYFLTLGPHSFYWFTLTPQRIEGVRLPTPQPETELVEIPVDAIEWDAIFYDGRQARLERVLPDYLRYRRWFGAKTRKIKQVQVSEFARLDYAGGPAYLTLLQVTYVEGAPETYLLPMAYAEGERADQILADQRHMVIARLRVGRRPEAGILYDPLGERRFASALLELIIGRRRLRGEAGGELVGGTTRALRKLLGGSDGLEPSLMRGEQSNSSINFGGRLIMKLFRKIELGRNPDLELGRFLTEEVGFPHTPPVAGYIEYLRGKDEPLTLAIVQGYVQNEGDAFDYALDVVRRYYDTVLTRTDVVPPVVKASVAGMLAAAHQPPPALVEELIGGYLESARLLGQRTAEMHQALAKGSGPAMAPEPFSTLYQRSIYQSIRSLIGQTLQDLRKLLPSLPATVRPAAERVTQSEEALLARLQRITGDKIETVRIRIHGDYHLEQVLFTGKDYMIIDFEGEPLRPISERRIKRSPLRDVAGMLRSYQYVAYAALYAHNGASRSAEEIERLQRWADMWSFWVCAAFLNGYLTTAGHEAFVPQDQADLEALLETFVVEKAVYELGYEMNNRPDWLPIPINGILRQIEE

SEQ ID NO: 13774 - DNA, 1803 bp, Lactococcus lactis subsp. cremoris SK11
  CDS (1)..(1803)
atgtattactataatccatggaatttagattataagcaaccttttggtgcagtaaaagtagggcaagccattttattgaaatttgacgcaaatcaaactcaagtagaagtgaagtgcattattcgacgtgattttggaaaaagatatgaattccttatgagcagagatgagtcaggtttttttacagtcactatcccatttgatgaaaatgctggtctttatttttactattttgaaattttggagggctcagattgggaacaaaacaagcgtttttatgggagttctggaataggtggggaagggctgctctatactaacgaaaatgatattaaaccctatcagctgacagtttttgaaaaagaggacaaggcaccagcttggtatcgtgacgctgttttttaccagatttttcctgatcgtttccataatggaaatgaaaatgggcaagtcagccatccaaaaccgaattcttttatttatggaactaaatctgatacccctttttatgtgaaagaggaaaatggtgatattgctcgttgggatttctttggtggaaacctaagaggaatcattaacaaaatttcatatttaaaagaacttggaatcaatgccatttatcttaatccagttttttctgggacaagtaaccatcgttatgacaccaacgattatctaaaaatagattccatgttaggaactcaagaagattttcaagaattaatcaatttacttcatcaagaacaaatgcatttagttttggacggtgtcttttcacatgtaggtaaaaattcactttacttcaatatcaatggagattatggagatgatgaaggagcggcgaaaaatcctgactctccttattttgactggttcaagtttgaaaattatccttttgattataaatcttggtggggaattaaagatttacctgaaattgataaagataatgaatcctttcgtgattttatttatggtaggaaaaactctgttttatcaaagtggaatgacttgggaatagatggttggcgattagatgttgctgatgaattgcctgattcatttattaaagggattcgtgagaatcttgaccgttattcagaaaaaattctaataggagaaatttgggaggatgcttctaataagatttcttatggaacaagacgcaaatatattcttggcgggagcttacaggcttgtatgaactatccgtttcgtgatttaatcatcaatttattaaacggaaatcgctcatgtcaggatgtagctcatcaattgatgactttgcaggaaaactatcccaaagatattttttataacaacttaaataatttggggacccatgatacggaacgtattttaacaatggtcggaaaagaaaatctgccattagctgtttcactcttatttgttttaccaggaatcccttgtatttattatggtgacgaagcgggactttctggaggaaaggatccagaaaatcgtaaatattttccttgggatgatatttcaccagaaatatatgattattataagagttggacgaaaaagcgtctattagaaaatagtttgaaagaaggagaattttctagcttttatagtgacagactactaggaattttgcgctatacagattcagaagtttttgtcgaggtgattaatcccagtgaagatgaaatcaagatagattattcagaaattacttttttacaaaagtttgattttatgccaaaactaaaagatttactgacagagcaagtgattagtggaaaatcaaacatagatttgaaaatagaaagataa

SEQ ID NO: 13775 - protein, 600 aa, Lactococcus lactis subsp. cremoris SK11
MYYYNPWNLDYKQPFGAVKVGQAILLKFDANQTQVEVKCIIRRDFGKRYEFLMSRDESGFFTVTIPFDENAGLYFYYFEILEGSDWEQNKRFYGSSGIGGEGLLYTNENDIKPYQLTVFEKEDKAPAWYRDAVFYQIFPDRFHNGNENGQVSHPKPNSFIYGTKSDTPFYVKEENGDIARWDFFGGNLRGIINKISYLKELGINAIYLNPVFSGTSNHRYDTNDYLKIDSMLGTQEDFQELINLLHQEQMHLVLDGVFSHVGKNSLYFNINGDYGDDEGAAKNPDSPYFDWFKFENYPFDYKSWWGIKDLPEIDKDNESFRDFIYGRKNSVLSKWNDLGIDGWRLDVADELPDSFIKGIRENLDRYSEKILIGEIWEDASNKISYGTRRKYILGGSLQACMNYPFRDLIINLLNGNRSCQDVAHQLMTLQENYPKDIFYNNLNNLGTHDTERILTMVGKENLPLAVSLLFVLPGIPCIYYGDEAGLSGGKDPENRKYFPWDDISPEIYDYYKSWTKKRLLENSLKEGEFSSFYSDRLLGILRYTDSEVFVEVINPSEDEIKIDYSEITFLQKFDFMPKLKDLLTEQVISGKSNIDLKIER

SEQ ID NO: 13776 - DNA, 1755 bp, Lactococcus lactis subsp. cremoris SK11
  CDS (1)..(1755)
atgaacaaagctgcaatttatcatcgtcctgagtcggaatttgcttatctttatgcaaaaaatctgatgcatgttcgtcttcaaacacaaaagtctgatgtggaaaaagtcgaattattttatggcgatccttattcgtgggaagggcttgacaaccctgaaacacagtattgggctagtcaaaaagtagagatgaaaaagtatctttctactaatattagcgattattttgaggccgaaattactgttgcaacgaaacgagttgattacttatttgtcattacaggtttggatggagaaaaagtagtttacacagaccaaggaatgtttgattatgatgagagcttggtgactaaaaaatatggggctttccgtttgccttatttccatgaaagtgatcgttttaaagcacctgaatgggtcaaagaaacggtttggtatcaaattttccctgaacgttttgccaatggggatacaagcaatgaccctgaaggaacgaaagcttggaatacccaagatgttcccgaccgtcaagatttttatgggggagatttgcaaggggtgattgatcatctggaacatttgactgaacttggtgtgaatggtatttactttacccctattttccaagctttttctaatcataaatatgatacagaagattatatggaaattgataagcaatttggggataaggaattgtttaaaactttggtgaaagaagcacatgcgcgtggtattaaagtcatgttagatgcggtctttaatcacatcggagatacgtctgctcaatggcaagatgtattgaaaaatcaagaaaaatcaaaatttgcggattggttccatgttaatagttggccagcaacttatactccgactgatgattttgaaaatgctgagaatgcaacttatgatacttttgcctttactccacacatgccaaaactgaatacggctaacccagaggttgaagcttatcttttgaaagtagctgattattggatttctgagtttgatattgatgcatggcgtttggatgtggcggatgaagtggatcatactttctggaaaaaattccgcacaacttgtgatgcggaaaaagatgatttttatattttaggtgaggtttggcattctgcacaaccttggttagttggtgacgaattctctgccgttatgaactatgcttatactgatgcgattaaagatggtttgattacgaagaagatttctttggaacaaatggtttctaatattaatacgcaactgacattataccgtaagcaagtgaatcaactgatgtttaatgttttagattctcatgatacacccagaattttgactgttgcaaaaaataataaaaatttgatgaaattggtggaaacgttcaccttcatgcaaccaggtgtgccttgtatttattatggagatgagtatgcgttgacaggtggaatggatcctgagtgtcgtaaggtgatgccttgggaagaaaaagatcaagatttagagatgtttgacttctttaaaaatctgattgctctacgcaaacaatatcaaggaattttaagtgattcagaagtagaatggaaaatcgtagattcagaaaatggcattgtgaaatttgaacgtggatctttgaaagctattttcaatattggcgaaaaaccggcttatttttcggctgatgaagtgattttctctaatttggttgaccaaaataatattttacaatatggttttgtaatctataaatag

SEQ ID NO: 13777 - protein, 584 aa, Lactococcus lactis subsp. cremoris SK11
MNKAAIYHRPESEFAYLYAKNLMHVRLQTQKSDVEKVELFYGDPYSWEGLDNPETQYWASQKVEMKKYLSTNISDYFEAEITVATKRVDYLFVITGLDGEKVVYTDQGMFDYDESLVTKKYGAFRLPYFHESDRFKAPEWVKETVWYQIFPERFANGDTSNDPEGTKAWNTQDVPDRQDFYGGDLQGVIDHLEHLTELGVNGIYFTPIFQAFSNHKYDTEDYMEIDKQFGDKELFKTLVKEAHARGIKVMLDAVFNHIGDTSAQWQDVLKNQEKSKFADWFHVNSWPATYTPTDDFENAENATYDTFAFTPHMPKLNTANPEVEAYLLKVADYWISEFDIDAWRLDVADEVDHTFWKKFRTTCDAEKDDFYILGEVWHSAQPWLVGDEFSAVMNYAYTDAIKDGLITKKISLEQMVSNINTQLTLYRKQVNQLMFNVLDSHDTPRILTVAKNNKNLMKLVETFTFMQPGVPCIYYGDEYALTGGMDPECRKVMPWEEKDQDLEMFDFFKNLIALRKQYQGILSDSEVEWKIVDSENGIVKFERGSLKAIFNIGEKPAYFSADEVIFSNLVDQNNILQYGFVIYK

SEQ ID NO: 13778 - DNA, 1695 bp, Lactobacillus casei ATCC 334
  CDS (1)..(1695)
atgacgatgatgaatgaaataccatggtggaaaaagagcgttgtctatcaggtttatccgaaaagcttcaatgatagtaacggtgatggcgtcggggacttaaatggtatcagtgaaaaattggattatttagccgatttgggcgtagatgtgctctggctgaatccgatttaccgatcgccacaggttgataacggctacgatatttcgaattatcgcgatgttgaaccacaattagggacaatggccgattttgaacacttgttgcaggcagcacatgatcgacatctaaagattatcttggacttggttgtgaatcacacgtctgatcaacatccgtggttcaaagccgccaaatcatcagtgagcgatccgcatcacgattactacatctggaagaagccagttgacgatcatgagcctaataattggggctcaagctttggtggttcagcttgggaatacaaaaaagatctgggcgagtattacctgcatctttttgccaagcaacaaccggatctcaactgggaaaatcctaaggtacgccaagaagtttatgatctcatgcgcttttggctagataagggagttgatggcttccggatggatgtcatatcactgatttctaaagatccggcttatccagatggcccgctcattcaaggcaaggcatacggtagttattatgccggagcggcaaatggccctaaggttcatgattacttgcaggaaatgcacgagcaagtgttgtcgcactacaatatcatgacggtcggcgagacgccccatacaacggcacagcaggcgcaattatacacggcggcagatcgtcacgagttggatatggtttttcattttgaccatatgcatcttgactatggccaatatggcaagttctcgacaaatcgatttaaattagttgatctcaaagaagtcttggcacgttgggagaacacattagcgcaagtcgatggctggaacagcctttactggagcaaccacgatcagccacggcctgtgacacgatttggagatgaaggccagtatcgaattcgatcagccaaaatgctggggactgtgctgcacatgttgcagggaacgccttatatttttgagggagaagaactcggtctgaagaatgttcattttgatcaattaagcgattataacgatcttgagaccaagaacattttcaaagaactcacccaacagcatcatgaaagtcctgaggcggccatgaaggccatttatctgcattcgcgcgataatgctcgtacgccgatgccttgggatggcagtgaaaaaggtggtttcaccaccggacaaccatggctgggactaaatccagatcacaaagacattaatgcagctgaagacttggcagatagtgacggtgtttaccactattatcaacacctgattaaattacgacatgaagagccattgattaccactggtgtatttgagctacttgctcctgatgatccgaacttgtttatttacctgcgcaaaggggaacatgagaccttgctggtggcaggtaacttctcaagtgaggaacgcacatggtcagtgccggatgacttgcaagctaaggatgtggatgtgttgattcggaatagtgaaatttccgattcactagagaaaacactgacattaccaccatttggcgcagtggtgtacaagcttcaatag

SEQ ID NO: 13779 - protein, 564 aa, Lactobacillus casei ATCC 334
MTMMNEIPWWKKSVVYQVYPKSFNDSNGDGVGDLNGISEKLDYLADLGVDVLWLNPIYRSPQVDNGYDISNYRDVEPQLGTMADFEHLLQAAHDRHLKIILDLVVNHTSDQHPWFKAAKSSVSDPHHDYYIWKKPVDDHEPNNWGSSFGGSAWEYKKDLGEYYLHLFAKQQPDLNWENPKVRQEVYDLMRFWLDKGVDGFRMDVISLISKDPAYPDGPLIQGKAYGSYYAGAANGPKVHDYLQEMHEQVLSHYNIMTVGETPHTTAQQAQLYTAADRHELDMVFHFDHMHLDYGQYGKFSTNRFKLVDLKEVLARWENTLAQVDGWNSLYWSNHDQPRPVTRFGDEGQYRIRSAKMLGTVLHMLQGTPYIFEGEELGLKNVHFDQLSDYNDLETKNIFKELTQQHHESPEAAMKAIYLHSRDNARTPMPWDGSEKGGFTTGQPWLGLNPDHKDINAAEDLADSDGVYHYYQHLIKLRHEEPLITTGVFELLAPDDPNLFIYLRKGEHETLLVAGNFSSEERTWSVPDDLQAKDVDVLIRNSEISDSLEKTLTLPPFGAVVYKLQ

SEQ ID NO: 13780 - DNA, 1779 bp, Lactobacillus casei ATCC 334
  CDS (1)..(1779)
atgtttcaatttgattcatttaccgatcgccgaccttttggcgcggtgcaaaaaggcacggctgtcacattgacggcacaggctgatggtgcggtgacacaagccacacttgtcattatgccagatgaacattgcgatcaaacgcagtccttgccgatgacgaaaagccctaacggctacacagtgacgtttacgcctcctaatgccggtctttggttttatcattttgagttgcaaagcgacaatggccgcgaacgctttggtgcggtcggcggtggttttggcgggctaggtcagctttaccctgaaaatgtggatgtggttaattatcagatgaccgttgtgaccgcatttgatccggttccggcgtggtatcaaaatgcccgtttttatcatatcttcgtagatcgcttcaataatgggaatgctgacggtcacgtgaatgctccgaaggaaaactcttttctgtatgggcgaaaaaccgatcggcccatgtatattcgcgggaacgatggcgagatcattcgctgggatttttacggcggtaatctgactggcattcaacaaaagctgccattattggcagcccgtggcatcaacgccttatatttaagtccaatttttcaggcgcggagcaatcatcggtatgacaccggcgattattttgcaattgatgaagtcttaggttcgctgcatgactttaagcagtttttggcggcagcgcatcagttggggatgcatgtcattctggatggcgtgtttaaccacgtcggcgctgatagccgctacttcaatgccgtcaatgaatattcagacgtgggtgcggctaatagcttggattccccatatgcctcgtggttttcattcaagcgatttcctgatgactacaatagctggtggggcgtgaaggatctgccagccatcaataaggataatcaagattttcatgacttcattgcggctaaaaaaggttcggtgatcagttattggactgacttaggcgttgatggctggcgcttagatgttgccgatgaattgatggacgattttatccggcagattcgcagcacgcttgatcaatttccggagcgggtgctgatcggcgaagtctgggaggatgcctccaataaacaggcttatggcaagcggcggcaatattttgaaggcggcgaattgaatgcagtcatgaattatccgttgcgatccatgttgattgacctgacaaatgggcaattaaacgcggcaggattcgttcgtcaattgatgacgttgaaggagaattatccaacaaatgcgtttgcgttcaatttcaacaacattggcagtcatgatacaccacggattttaacgatgttggatggtgatcggcgtaagttgcagtttatcgtctcgctattttactggctgcctggggtgccgtgcctttactacggggatgaggccgggttaactggcggtaaagacccggataaccgcgccttttatccatggggccatgaagatcaggctgttttggatatttatcaaatcgcgcttcagacccgcatcgaccagcccgccttagcagccggcgccgcttttttcccatttacgtttgaagacagttttggcttcgtccgccaaaatgatacccaaacgctggtggttctggccaatccaactggatcaccacaagtgttacaggatccgcatgctgaattagtgccaaaaagtttgcgcgctttattgccagtaggcacgatggtaccggcaggcggtgtgatttggcagcagatttaa

SEQ ID NO: 13781 - protein, 592 aa, Lactobacillus casei ATCC 334
MFQFDSFTDRRPFGAVQKGTAVTLTAQADGAVTQATLVIMPDEHCDQTQSLPMTKSPNGYTVTFTPPNAGLWFYHFELQSDNGRERFGAVGGGFGGLGQLYPENVDVVNYQMTVVTAFDPVPAWYQNARFYHIFVDRFNNGNADGHVNAPKENSFLYGRKTDRPMYIRGNDGEIIRWDFYGGNLTGIQQKLPLLAARGINALYLSPIFQARSNHRYDTGDYFAIDEVLGSLHDFKQFLAAAHQLGMHVILDGVFNHVGADSRYFNAVNEYSDVGAANSLDSPYASWFSFKRFPDDYNSWWGVKDLPAINKDNQDFHDFIAAKKGSVISYWTDLGVDGWRLDVADELMDDFIRQIRSTLDQFPERVLIGEVWEDASNKQAYGKRRQYFEGGELNAVMNYPLRSMLIDLTNGQLNAAGFVRQLMTLKENYPTNAFAFNFNNIGSHDTPRILTMLDGDRRKLQFIVSLFYWLPGVPCLYYGDEAGLTGGKDPDNRAFYPWGHEDQAVLDIYQIALQTRIDQPALAAGAAFFPFTFEDSFGFVRQNDTQTLVVLANPTGSPQVLQDPHAELVPKSLRALLPVGTMVPAGGVIWQQI

SEQ ID NO: 13782 - DNA, 1668 bp, Lactobacillus casei ATCC 334
  CDS (1)..(1668)
atgacgaacgaaactagccgtacttggtggcaacaagaaattttctaccaaatctatccggcctcattcaaagatagcaataatgacggcataggcgatctgcctggcatcactgccgaattaccgaagttaaaagaattaggcattaccacgatttggttatcgccggtttataagagccccatggttgacaatggttatgacattgccgactatcaggcgattgatccgcgctttgggaccatgactgactttgatcagctcatggcaactgccaaagatctcggtatcaaagtggtaatggatttggtggtcaaccatacgtccgatcagcaccggtggtttcaagcggcgctcaagaatccggcctcaccatatcgggacttctatattttccgccaaggtcatgatggtcagccgccgaacaactggcgctcaaacttcggcgctggctcgtcatggacggcggttcccggtgagcccaacacctattatcaccacgtcttttccccacaacaaccggacctgaattgggaaaatccgaagttgcggcaagccatttatagcatgatcaactggtggctagccaaaggcctcgccgggttccgggttgacgccattacgtttatcaaaaaggatcaggattttgcttccatcacgccagatggcagcgatgggttaggcaaagttaagcgcaaaacggaaaatcgaccgggtctggatcaatttctcaaagagttgaacgttgccacctttaagccggccaatgccgtcacgatcggggaagcgtctggcgttgcatacgatcaactcggcgacttcattggcgaaaacggctacttctcaatgatttttgattttcattacgccgacattgacgtcgcttctgggtctgagtggttcaagcaaaccaactggacgccaaaaatgcttggcaaggcgattgccaaaagccagctggcaattcaaaaagttggctggggggctaatttccttgaaaatcatgatcaaccgcgaagcctaagcaagtatatccgtgagccgcaatatcgcaatgcgatcggggcaaaagcattagcactgttatacttcggtttacgtggctgcccgtttatctatcaaggccaagaactcggcatggtcaatgcggtgcgaaccaacattgatcaattcaacgacctttccgcgcacgacaactatcgccgtgcattggcagaaggttactccgaagctgatgcccttgcttgtgtcaaccgacgctcacgtgacaatgcccgtacgccatacccatgggacgacagccaaaatggcggcttcaacgctggtcatgaaccttggttaccgctggccaagcaagctgctggcgtgaactggcaggcagaacacgatgatcccaattcggtctggacgttttatcaaacgctctgccgcctgcggaatgcatcaccattgcgcgccgatttgatcgaaggcgactttgccccgctggatgcacacaacgacaacgtgattgcctatgcccgcgggcaacatgtccaaatttttgtgaatcttagctcgaagccagccgcagttgacttaccagccggtcacgtttggctgaacaattactcggatgttggaacgagcttacaaccctatcaagcgattcttattgaggtgaaatga

SEQ ID NO: 13783 - protein, 555 aa, Lactobacillus casei ATCC 334
MTNETSRTWWQQEIFYQIYPASFKDSNNDGIGDLPGITAELPKLKELGITTIWLSPVYKSPMVDNGYDIADYQAIDPRFGTMTDFDQLMATAKDLGIKVVMDLVVNHTSDQHRWFQAALKNPASPYRDFYIFRQGHDGQPPNNWRSNFGAGSSWTAVPGEPNTYYHHVFSPQQPDLNWENPKLRQAIYSMINWWLAKGLAGFRVDAITFIKKDQDFASITPDGSDGLGKVKRKTENRPGLDQFLKELNVATFKPANAVTIGEASGVAYDQLGDFIGENGYFSMIFDFHYADIDVASGSEWFKQTNWTPKMLGKAIAKSQLAIQKVGWGANFLENHDQPRSLSKYIREPQYRNAIGAKALALLYFGLRGCPFIYQGQELGMVNAVRTNIDQFNDLSAHDNYRRALAEGYSEADALACVNRRSRDNARTPYPWDDSQNGGFNAGHEPWLPLAKQAAGVNWQAEHDDPNSVWTFYQTLCRLRNASPLRADLIEGDFAPLDAHNDNVIAYARGQHVQIFVNLSSKPAAVDLPAGHVWLNNYSDVGTSLQPYQAILIEVK

SEQ ID NO: 13784 - DNA, 570 bp, Lactobacillus delbrueckii subsp. bulgaricus ATCC BAA-365
  CDS (1)..(570)
atggtctaccagatattcccggactgcttcaacaacggcaacccgcatggggagatccagggccgcaagaaggacagtttcatctacgcgaccaaggaagacagtccttactatattaaggatgagcatggcgatatagcccgctgggacttttttggcggcaacctcgaaggtatccggcaaaagattccctatttaaaggatttgggagtgacggccatctacttgaacccgatcttccaggcttccagcaaccaccgctatgacacccaggacttcatgaagatcgaccccatgctggggaccgaggaggacttcaagaacttgatcaaggacctgcacaaaaacaggattgccttgatcttagacggggtcttcaaccatgtcggggccgacagcaagtacttcttgagcgcggtcactgacaagacgggcccttactactcctggttcaacttcatcaattatccgactaagtaccagtcctggtggggggaaccacgcttcctgaagtcaacaagagtaatgctgactaccagaacttcatctgcgggcccgacggcgttttag

SEQ ID NO: 13785 - protein, 189 aa, Lactobacillus delbrueckii subsp. bulgaricus ATCC BAA-365
MVYQIFPDCFNNGNPHGEIQGRKKDSFIYATKEDSPYYIKDEHGDIARWDFFGGNLEGIRQKIPYLKDLGVTAIYLNPIFQASSNHRYDTQDFMKIDPMLGTEEDFKNLIKDLHKNRIALILDGVFNHVGADSKYFLSAVTDKTGPYYSWFNFINYPTKYQSWWGEPRFLKSTRVMLTTRTSSAGPTAF

SEQ ID NO: 13786 - DNA, 1827 bp, Deinococcus geothermalis DSM 11300
  CDS (1)..(1827): transl_table=11
atgaacatcatctttgccgacctgcccgcgacccacgaccacacgcccgcctacacctctcggctcggtgccgctgtgggtgagctggtgacgctgcgcctcaagacgacgctgccggtgatcgcagtgtttctcaaactgctcgaacacggtgaaatcacgacccaccctgcccgcgagatcgggccgctcgacggcgagggccgctggttcgagttcgacctgcgcctgcacgcccgccgggtgcattatgcctggcaactccagaccgctgaagacaactggcacttcaccatggcgggcctgcaccacacccgccgaccctaccgcgactggtttcactacgtggcggactaccaggcgcccacctgggtctggaaaagcgtcttctatcagatctttcccgaccgcttccgcaacggaaaccctgcaaacgacgtgcagaccggcgagtatgtctacagcggtgccccggtggttcacgtgccctgggacgtgccacccacccgcgaactcgacattcacgcccactacggcggcgacttggagggggtcgcccaggccatgccctacctggccgatctcggcgtcaacgcgctgtggctgacccccatcttcgtgagtcccagcgcccaccgctacgacatcaccgactaccgcaccattgatccacacctgggcggcgaggcggcctttggcgagatgctgcgcgcggcgaatgcatacgggatccggatcgtgttggacggcgtgtttaaccataccggcagcgagcatgcgcttttccaacgggcgctccatgacgcctcggctcccgagcgcgagctgttcaccttccgcgaggccacaggcggcaagcctccctacgcggcctttttcgacgtgcccaccctgcccaagatcgactaccgctcggcagtcgccgtgaacgagttcctggcgggcgaggagagcgtggtgcgcttctggctgcggcggggggcggcgggctggcggctggatgtggcgcagcagatcgggcggggcggcaccgacgagggcaacctcgaactgcatcgccagcttaagcaggccgcccgcgaggaacggcctgacgcctacatcttcggagagcgcttctttgattcagaagcggcgctgaccggcgagggcgaggacggcgtgatgaattatcacggtttcggcctgccgctgatggagtggtttgcaggcgaacattacctgggctttcgctcgcgcatgacgacggcagaactgctcgacctgctgtgggacgcttaccacgtgttggcgccgcagctggcgctgaaccagttcaacctgctcgactcgcacgacatcccgcgtgccctctcgcggctgggggagaacaagaccaagctgcgcgccgccctcacgctgctgatgggttatcccggcgtgccctgcctctactacggcaccgagatcggcctctcgcagctcgagcgcggcctgatgccctttaaccgcgctccaatgccctgggacgaaacccgctgggaccttgacctgcgcggctttgtgcaggccctgatccgggttcgccgctccgcacgggtcttgcaggagggagcactgcgctttttgttggaggagtcggacgctctcgggtatctgcgagcctacacccaccctgacggacggcgtgaactggccgccgtgctgggcagccgccgagggagccagcacgaggtcaccgtcacattgcctcggggtgactggcgggacgcgctgaccggcgagcttgtctcccggggcggtgagacgcggctcgacgtggcccaggggcggttgctgttggcctga

SEQ ID NO: 13787 - protein, 608 aa, Deinococcus geothermalis DSM 11300
MNIIFADLPATHDHTPAYTSRLGAAVGELVTLRLKTTLPVIAVFLKLLEHGEITTHPAREIGPLDGEGRWFEFDLRLHARRVHYAWQLQTAEDNWHFTMAGLHHTRRPYRDWFHYVADYQAPTWVWKSVFYQIFPDRFRNGNPANDVQTGEYVYSGAPVVHVPWDVPPTRELDIHAHYGGDLEGVAQAMPYLADLGVNALWLTPIFVSPSAHRYDITDYRTIDPHLGGEAAFGEMLRAANAYGIRIVLDGVFNHTGSEHALFQRALHDASAPERELFTFREATGGKPPYAAFFDVPTLPKIDYRSAVAVNEFLAGEESVVRFWLRRGAAGWRLDVAQQIGRGGTDEGNLELHRQLKQAAREERPDAYIFGERFFDSEAALTGEGEDGVMNYHGFGLPLMEWFAGEHYLGFRSRMTTAELLDLLWDAYHVLAPQLALNQFNLLDSHDIPRALSRLGENKTKLRAALTLLMGYPGVPCLYYGTEIGLSQLERGLMPFNRAPMPWDETRWDLDLRGFVQALIRVRRSARVLQEGALRFLLEESDALGYLRAYTHPDGRRELAAVLGSRRGSQHEVTVTLPRGDWRDALTGELVSRGGETRLDVAQGRLLLA

SEQ ID NO: 13788 - DNA, 1491 bp, Deinococcus geothermalis DSM 11300
  CDS (1)..(1491): transl_table=11
atgccgccctctacaccctcttccgaagcacaccctctcacgcccgaatgggtcgcggacgccgtcttctatcagattttccccgaccggttcgcacgcagcgggcgagtgccgggcctgaaccttcagccctggggcagcccgccgcaggtgcacgggtatatgggcggcgacctgtggggggtcacccagcatctggaccacatcggggcactgggggtaaacgcgatctacttttgcccggtatttcagtcggcttccaaccaccgctaccacacccacgactactaccgggtagatcccatgctggggggcaacgaggcgctgcgggcgctgatcgaggcggcgcatgcgcggggcatccgcatcgtgctggacggcgtctttaaccatgccagccggggcttttttcagttcaacgacctcttggaacagggcgaggcgagcgcctaccgtgactggttccatgtggagggatggcccctgcacgcctacgacgacacccgaccggcgaactatcaggcgtggtggggccttcgcgcgctgccgaaattcaacaccggcaacccggccgtccgcgagttcttgtgggacgtgggcacgtattggatggagtttgggattgacggctggcggctcgacgtacccaacgaaatcgatgacgacgagttctggcgcgagttccgccgccgcgtgaaggccatcaatcccgacgcctacatcgtgggcgaaatctggggcgacgcgcaccgctggcttgccggggaccagttcgacgcggtgatgaattatcacttcacccggccctgtctggcgttttttgcggcgcgaaccctcgcacaggcggccaacgagtccaccggcctaggccgtgtggagccactcgacgctgccgccttcgcccgccgcatgaccgagatcacagcgctgtatcaccccgagatcgtccgcgcgcagctcaacctgctcgactcacacgacacagcccgcttcctgaccgccgcgggcggcgacgcgaccgcctttcgcctcgccagcatctttcagatgacctacgtgggggcgccgtgcatctactacggtgatgagatcggtcttcccggcggccctgaccccgactgccgccgcgctttcccctggcacgacgaggcgagctgggacaaagagacgctgagcctgctgcaaaagctcaccgccacccgccacgccacccccgccctgcgccggggagcattccgcttcacccacgcggaaggcgaggcgctggtctacgtccgcgaacacgccgccggcaacgcctacatcgccatcaatgccgcccaagcccccgcccgcctgcccctcagcgacgtgcagcccggccgataccgcgacgccctgagcgggcagcgtcacgagttgagcggagaaacggaggtcgaggttccggggcgcgcggcggtggtgctggtccgggcggaggaggattcgcggcacaccgcgcggcactga

SEQ ID NO: 13789 - protein, 496 aa, Deinococcus geothermalis DSM 11300
MPPSTPSSEAHPLTPEWVADAVFYQIFPDRFARSGRVPGLNLQPWGSPPQVHGYMGGDLWGVTQHLDHIGALGVNAIYFCPVFQSASNHRYHTHDYYRVDPMLGGNEALRALIEAAHARGIRIVLDGVFNHASRGFFQFNDLLEQGEASAYRDWFHVEGWPLHAYDDTRPANYQAWWGLRALPKFNTGNPAVREFLWDVGTYWMEFGIDGWRLDVPNEIDDDEFWREFRRRVKAINPDAYIVGEIWGDAHRWLAGDQFDAVMNYHFTRPCLAFFAARTLAQAANESTGLGRVEPLDAAAFARRMTEITALYHPEIVRAQLNLLDSHDTARFLTAAGGDATAFRLASIFQMTYVGAPCIYYGDEIGLPGGPDPDCRRAFPWHDEASWDKETLSLLQKLTATRHATPALRRGAFRFTHAEGEALVYVREHAAGNAYIAINAAQAPARLPLSDVQPGRYRDALSGQRHELSGETEVEVPGRAAVVLVRAEEDSRHTARH

SEQ ID NO: 13790 - DNA, 2097 bp, Deinococcus geothermalis DSM 11300
  CDS (1)..(2097): transl_table=11
atgcctgccgtgcagttcctacggtgggggaatggagcctgccacgatcagcgccttccgcgtccgacgcaagcggctcgggccaagcctcgacttcggaagtttctttctgttcttcggcatctcgggaaccgacgagggccggggagaacgcctgcaaaaacgcttcgagggcgagtactaccgccacctcgtgacgctgaagctctcggggagcgtcccgccgggccggtactggttgcgcgacctgacggaggaagcgaacaaacggggctggacggttcgggcggacggcagagccaccagcgacctgagcgacgagggtctccgcgacctgaacacctggctggcgagtggcgcgcgccaggttcacctggacccgctgaacgagtcatccccgcgccgataaggcacggccttcgccggaggccgtcggggaaccgatcgggaactgaatcgattcagtcgcctgcttttcctgctacgctttcaggtatgacccagcccagcgaactgaagtggtggcagcgcggcatcatctaccagatttacccccggtcgtttcaggacgcctccggagacggagtaggggacctgcgcgggatcacctccaggctgccctacgtggcgggcctgggggtggaggcggtgtggctctcccccatcttccgcagcccgatgcgcgacttcggctatgacgtggccgattactgcgacatcgaccccctcttcggcacgctggaggacttcgatgcgctggtggccgaggcgcaccggttggggctgaaggtgatgctcgactacgtgcccaaccacacctcctcagaccatccctggttccaggaggcccttgcgggcaaggacagtccgaagcgggactggtacgtctggcgcgatccggcaccagacggcgggccgcccaacaactggaagtcatttttcgggggggacgcctggaccttcgatccccacagcggccagtattacctgcatcagtttctgccggggcagccggacctgaactggcgcaaccccgaggtgcgcgcggcaatggcggacgttctgcgcttctggatgcgccggggcgtggacggcttccgggtggacgtgatctggctgctggccgaggacgccgagtttcgcgacgagccggaaaatcctgagtggcagccggggcagatcgaacacgcccgtctgctgcacatctacacccaggaccaaccggagacgcacacctatatccgcgagctgcggcaggtgctcgacgagttcgacgaccgcatgatggtgggagaaatttacctgccgctgaagcagctgttgccctacgcgggcacgccggacgcgccgatggtgcatctccccttcaacttccacctgatcctgctgccctgggatgcccgcgagattcgcgccttcgcggacgagtacgacgcggcctgccgggcggcgggcacctggccgaactgggtgctcggcaaccacgaccagccccgcttcaagtcgcgggtgggcgcagaccagtaccgggtcgcacagacgctgctgctcaccctgcgcggcacccccactgcctactacggcgacgaaatcggcatgcacgatgtccccatcccccccgagcggcggatggacccggcgggcctccagcagcccgacgtgccgagtgcgggccgcgatcccgagcgcaccccgatgcagtgggacagcggccccaacgcgggcttcacagcccccgacgtgcaaccctggcttcccctggcagacgacgctgaccgggtgaacgtgcaggtggaggaggcagaccccaccagcgacctgaactacttccgggcactcacagcgctgcgccgcgcccatccggcgctggtggccggtgactaccgctcgctggatacggaacacgcggacgtcttcgccttcgagcggacgctggcgggggaacagctggtcgtgctgctgaatttcggcggggaggaacgcgcgttggggcctcttgtgggcgagggacagaccctcctgagcagccggaatgactccccggcaagcaccgctcccctgcgccccaatgaggcgcgcatcatccgccgccagtag

SEQ ID NO: 13791 - protein, 698 aa, Deinococcus geothermalis DSM 11300
MPAVQFLRWGNGACHDQRLPRPTQAARAKPRLRKFLSVLRHLGNRRGPGRTPAKTLRGRVLPPPRDAEALGERPAGPVLVARPDGGSEQTGLDGSGGRQSHQRPERRGSPRPEHLAGEWRAPGSPGPAERVIPAPIRHGLRRRPSGNRSGTESIQSPAFPATLSGMTQPSELKWWQRGIIYQIYPRSFQDASGDGVGDLRGITSRLPYVAGLGVEAVWLSPIFRSPMRDFGYDVADYCDIDPLFGTLEDFDALVAEAHRLGLKVMLDYVPNHTSSDHPWFQEALAGKDSPKRDWYVWRDPAPDGGPPNNWKSFFGGDAWTFDPHSGQYYLHQFLPGQPDLNWRNPEVRAAMADVLRFWMRRGVDGFRVDVIWLLAEDAEFRDEPENPEWQPGQIEHARLLHIYTQDQPETHTYIRELRQVLDEFDDRMMVGEIYLPLKQLLPYAGTPDAPMVHLPFNFHLILLPWDAREIRAFADEYDAACRAAGTWPNWVLGNHDQPRFKSRVGADQYRVAQTLLLTLRGTPTAYYGDEIGMHDVPIPPERRMDPAGLQQPDVPSAGRDPERTPMQWDSGPNAGFTAPDVQPWLPLADDADRVNVQVEEADPTSDLNYFRALTALRRAHPALVAGDYRSLDTEHADVFAFERTLAGEQLVVLLNFGGEERALGPLVGEGQTLLSSRNDSPASTAPLRPNEARIIRRQ

SEQ ID NO: 13792 - DNA, 1662 bp, Anaeromyxobacter dehalogenans 2CP-C
  CDS (1)..(1662): transl_table=11
atggcgatctcgcagcgcaggcgggcggtcgatccgctctggttcaaggacgcggtcatctacgagacgcacgtgaagtcgttctacgactccaacggcgacggcgtgggcgacctgcgcgggctcgtggagaagctcgactacctccaggacctcggcatcacctgcctgtggctgctgccgttcttcccgtcgccgctgcgcgacgacggctacgacatcgccgactacaagggcatccaccccgactacggcacggtggacgacttccgccagctggtcgcggcggcccacgcccgcggcatccgggtggtggtggagctggtggtgaaccacacctccgaccagcacccctggttccagcgggcgcgccgcgcgccggccggctccccggagcgcgcctactacgtgtggagcgacaccgacgagcgctaccgcgacgcccgcatcatcttcaccgacaccgagaagtcgaactggacctgggaccccgaggccaagcagtactactggcaccgcttcttctcgcaccagccggacctcaacttcgagaacgcggtggtgctgggcgaggtgctggacgcgctgcgcttctgggcggagatgggcgtggacggcttccggctcgacgcggtgccgtacctgatcgagcaggacgggacgagctgcgagaacctgcccggcacgcacgaggtcatccggaagatccgggcctacgtggaccagcacttccccgggcgcatgctgctcgccgaggcgaaccagtggccggccgacgtgcgcccctacttcggcgagggcgacgagtgccacatggcgttccacttcccgctcatgccgcgcatcttcatggcgctgcggctcgaggacgtggagccgatcgtcgagatcatgcggcgcaccccggccatcccggacacctgccagtgggcgctgttcctgcgcaaccacgacgagctgacgctggagatggtgaccgccgacgagcgcgactacatgtacctcgcgtacagccaggatccgcgcatgaagctgaacgtcgggatccggcgccgcctcgcgccgctggtggacaacagccgccggcgcatggagctgctcaactcgctcctgttctccttccccgggacgcccatcgtctactacggcgacgagctcggcatgggcgacaacatctacctgcacgaccgcaacggcgtgcgcacgcccatgcagtggagcccggaccgcaacgccggcttctcccgcgccgaccccggccggctctactccgcgcccatctccgacgcggtgtacggctaccaggcggtgaacgtcgaggcccagctccgcgacccctcctcgctgctgcactggatgcgcaacaccatcgcgctgcgcaagctgttccgggcgttcgggcggggcaccatggagttcctgccggtgcagaaccgcaaggtcctcgcctacgtgcgccgccacgacgaggacgtgatcctgtgcgtggcgaacgtgtcgcgcttcgcgcagccggcgcagctcgacctctcccacctcgagggctacgtgccggtggagatggtcggctacaccgagttcccgcgcatcgggcggcagccctacgcgctcacgctcgcgccctacggctacttctggttcgagctgcgcaagcccgcctga

SEQ ID NO: 13793 - protein, 553 aa, Anaeromyxobacter dehalogenans 2CP-C
MAISQRRRAVDPLWFKDAVIYETHVKSFYDSNGDGVGDLRGLVEKLDYLQDLGITCLWLLPFFPSPLRDDGYDIADYKGIHPDYGTVDDFRQLVAAAHARGIRVVVELVVNHTSDQHPWFQRARRAPAGSPERAYYVWSDTDERYRDARIIFTDTEKSNWTWDPEAKQYYWHRFFSHQPDLNFENAVVLGEVLDALRFWAEMGVDGFRLDAVPYLIEQDGTSCENLPGTHEVIRKIRAYVDQHFPGRMLLAEANQWPADVRPYFGEGDECHMAFHFPLMPRIFMALRLEDVEPIVEIMRRTPAIPDTCQWALFLRNHDELTLEMVTADERDYMYLAYSQDPRMKLNVGIRRRLAPLVDNSRRRMELLNSLLFSFPGTPIVYYGDELGMGDNIYLHDRNGVRTPMQWSPDRNAGFSRADPGRLYSAPISDAVYGYQAVNVEAQLRDPSSLLHWMRNTIALRKLFRAFGRGTMEFLPVQNRKVLAYVRRHDEDVILCVANVSRFAQPAQLDLSHLEGYVPVEMVGYTEFPRIGRQPYALTLAPYGYFWFELRKPA

SEQ ID NO: 13794 - DNA, 1638 bp, Anaeromyxobacter dehalogenans 2CP-C
  CDS (1)..(1638): transl_table=11
atgaccccgtcccgccgccccgccgcgctcctcgccgtcgccctcgccgtcgccctcgccgcgctcgcctgcgcgcatgcgcccgccggccccccggccgccggcggcgcgcgggcggcctccgcaccggcggcgccctggtggaagggcgcggtcttctacgaggtgttcgtgcgcagcttcgcggactccgacggcgacgggaagggcgacctccgcggcctcaccgcgaagctcgactacctgaacgacggcgacccggccacctccaccgacctcggcgtggacgcgctctggctcatgccggtgttcgcctcgccgagctaccacggctacgacgtcaccgattacctgaaggtcaaccccgactacggcaccgaggccgacctcgaccggctcgtcgccgaggcgcaccggcgcggcgtccgcgtggtcctcgacctcgtcctcaaccacacctccgaccagcacccctggttccgcgagtcggcgtcgtcgcgcacctcgccgcgccgcgactggtacgtgtggcgccaggacgacccgggctggacgcagccgtggaacccggcgcagggcacctggtaccgccgcggcggcgagtggtactacgccgtcttctggagcgggatgccggacctgaactaccggaacccggcggtgcgcgaggaggcgaagcggatcgcggcgcgctggctggcgaagggcgtggacgggttccgcctggacgccatccgccacctcatcgagaccggcccgggggcgggccagtccggctcggcggagaaccacgtgttcctgcgcgagttcgcggcggcggtttgggccgcgaagccggacgcggtgctggtgggcgaggtctggtcggagaccgacgacatcgcccgctactacggggacgggaaggacgagttgcagctcctgttcgacttcccgctcgcgaaggcgatcgtggagggggtggacgcgggcgacggcggcttcaccgcgcacgtgctccgcgaggtcgccgcggcctacccgccgggcgcggtggacgccccgttcctcaccaaccacgaccagttccgggtcgcgacgcagctcgcgaacgacgccgggaagctccggctcgcggcggccatcctgctcacgctgccgggcgcgccgttcgtctactacggcgaggagctggggatgcagaacggccccggccgcgaggacgagtggaagcggacgcccatgccctgggaccgctcggagcacggcggcttcaccaccggtgacccgtggatgccgctcgcgccggggcacgagagcgccaacgtggccgcggaggcgggcgatccggcgtcgctgctgtcgaggtaccgggcgctggtccgggcgcggagggcgtcggcggcgctgtcgcgcggggatgcggtgccgctgtccacgccgggggcggcgctcgcgtacgtgcggcgggccgagggggagacggtgctggtggtgcacaacatgggcgccgcgccgctcgagctgggcgggctggaggcgccgggggcggcggcggaggcggtgttcgtggatgcgggggccgtggcggtgcgggaggcgggtgggtggcgggtcgtgctgccgccgcgggcctccggggtttggagggtgaggtag

SEQ ID NO: 13795 - protein, 545 aa, Anaeromyxobacter dehalogenans 2CP-C
MTPSRRPAALLAVALAVALAALACAHAPAGPPAAGGARAASAPAAPWWKGAVFYEVFVRSFADSDGDGKGDLRGLTAKLDYLNDGDPATSTDLGVDALWLMPVFASPSYHGYDVTDYLKVNPDYGTEADLDRLVAEAHRRGVRVVLDLVLNHTSDQHPWFRESASSRTSPRRDWYVWRQDDPGWTQPWNPAQGTWYRRGGEWYYAVFWSGMPDLNYRNPAVREEAKRIAARWLAKGVDGFRLDAIRHLIETGPGAGQSGSAENHVFLREFAAAVWAAKPDAVLVGEVWSETDDIARYYGDGKDELQLLFDFPLAKAIVEGVDAGDGGFTAHVLREVAAAYPPGAVDAPFLTNHDQFRVATQLANDAGKLRLAAAILLTLPGAPFVYYGEELGMQNGPGREDEWKRTPMPWDRSEHGGFTTGDPWMPLAPGHESANVAAEAGDPASLLSRYRALVRARRASAALSRGDAVPLSTPGAALAYVRRAEGETVLVVHNMGAAPLELGGLEAPGAAAEAVFVDAGAVAVREAGGWRVVLPPRASGVWRVR

SEQ ID NO: 13796 - DNA, 1602 bp, Anaeromyxobacter dehalogenans 2CP-C
  CDS (1)..(1602): transl_table=11
atgccgctcatgcccggtctccgccgcgcccgcagcgcgccccgcctcgcgaccgtcgcgctcgccgcctgcgcggtcctcgggctcgtggggctcgcggcctgcgcgccgcgcgcaccctccggcccgccggccggcgccgccgcggcggccgcgctcgccgaggcgccgccccggccgctgccgccgcgcccgtggcaggacgaggtcctctacttcgtgctggtggaccgcttcgccgacggcgaccgcggcaacgaccaggacgtggacctcgccggcaagggcacgttccacggcggcgacctgcgcggcctcaccgcgcacctcgacgacctcgccgcgctgggcgtgaccgcgatctgggtgaacccgctggtgcgcaacatccccggctacgtgagcggcgccgggttcccggactgggcctaccacggctactggatggacgacctgtcgcgcctcgacccgcgcttcggcagcgaggccgacctggccgccttcgtgaacgcctgccacgcgcgcggcatccgcgtgctgctcgacgtggtctacaaccacgccggctacgacaccgcctacctgcgcgatccccgcacgcgcccgtggctgcgcaacaacgtggtgggcgactgcggcgacgacgacctgacgagctgcctggccggcctgcccgactggaagaccgagctgcccgaggtccgcgagttcctgctcgccgcccagttcggctgggcgaagcgctcgggcgtggacggcttccggctcgacaccgtgaagcacgtcgagccggacttctgggcgctccaccggcggcgggtgcgcgccgagctcgtcccggggttcttcctgctcggcgagctgtggggcggcgaccgcgagtccctcgatccgtacttcgccgccgacacgctcgacgccggcctcgacttcggcttccagggctcgaccgtgggctggctgctcgggcgcggccgcaccatcgcctacgagcggtacctcgcgtcgcgccacaaggtccggcccgggcacctcctcgcgcactacctctcctcgcacgaccagcccggcgcgctgcacctgctcggcggcgaccgcgcgctgttccgcctcgccgcgctcctgcagctcaccaccctgggcgtcccgacgatcttctacggcgaggaggtggcgcggcccatcggcgagtggccggacaatcgttccgacatgccatgggggcaaatggacgtgctccccggcgccggaaagccgcgcgacgaggcaatgcgcgcgttctaccgacgggtcatcgccctgcgtcgcgcccaccccgccctgtcccgcggaacccacgagccggtgtccaccgacggtgacggcctggccttcctgcggcgcgacggggacgacgcggtgctggtcgcggtgaaccgcggcaagtcgccactctcgctgcggatccccgtgccggccggctgggaggggcgggagctggaggacgccctggagggcgaggcgatatcggtcggcgccggcggggtggcgctggagctcccgggtcacggcgcccgcgtcgtggtggcgaggccagcacccggcgcggcgattcgtcgctaa

SEQ ID NO: 13797 - protein, 533 aa, Anaeromyxobacter dehalogenans 2CP-C
MPLMPGLRRARSAPRLATVALAACAVLGLVGLAACAPRAPSGPPAGAAAAAALAEAPPRPLPPRPWQDEVLYFVLVDRFADGDRGNDQDVDLAGKGTFHGGDLRGLTAHLDDLAALGVTAIWVNPLVRNIPGYVSGAGFPDWAYHGYWMDDLSRLDPRFGSEADLAAFVNACHARGIRVLLDVVYNHAGYDTAYLRDPRTRPWLRNNVVGDCGDDDLTSCLAGLPDWKTELPEVREFLLAAQFGWAKRSGVDGFRLDTVKHVEPDFWALHRRRVRAELVPGFFLLGELWGGDRESLDPYFAADTLDAGLDFGFQGSTVGWLLGRGRTIAYERYLASRHKVRPGHLLAHYLSSHDQPGALHLLGGDRALFRLAALLQLTTLGVPTIFYGEEVARPIGEWPDNRSDMPWGQMDVLPGAGKPRDEAMRAFYRRVIALRRAHPALSRGTHEPVSTDGDGLAFLRRDGDDAVLVAVNRGKSPLSLRIPVPAGWEGRELEDALEGEAISVGAGGVALELPGHGARVVVARPAPGAAIRR

SEQ ID NO: 13798 - DNA, 1188 bp, Streptococcus pneumoniae TIGR4
  CDS (1)..(1188)
atgaattacttgcaagacttgggtattactggactatatctttgtcccatctttgaatctacaagcaatcacaagtacaatacgacagattactttgaaattgaccgtcattttggagacaaggagacctttcgggaactggtggatcaagcgcatcatcgtggcatgaaagtcatgctggatgcggtatttaatcatattggttcgcaatctcttcaatggaaaaatgtcgtcaaaaatggtgaacagtctgcttataaggattggttccatattcaacaattcccagtgacaactgaaaagctagttaataagagagacttaccctatcatgtttttggtttcgaggactatatgcctaagctaaatacagccaatccagaggtcaagaattatcttttaaaggttgcgacttattggattgaagagtttaatatcgatgcttggcgtttggatgtggctaatgagattgaccatcagttctggaaggattttcgtaaggcagttttagctaaaaatcctgatctttatatcctaggagaagtctggcatacatctcagccttggctaaatggagatgagttccatgccgtcatgaattatcctttatctgatagtatcaaggactatttcttacgaggaattaagaagacagaccagttcatcgatgaaatcaatggagagtctatgtattacaagcagcagatttcagaggtcatgtttaatctcttggattcacatgatacagagcgaatcctgtggacggccaatgaagatgttcaactggttaaatcagccttagcctttctctttttacaaaaaggaacaccgtgcatttattacggaaccgagctagccttgactggaggaccagatccagattgtcgtcgttgtatgccttgggaacgtgtatcaagtgacaatgatatgctgaactttatgaagaggctgattaaaattcggaaatacgcgtcagtaatcatttcgcatggcaagtatagccttcaagaaatcaactctgatctagtagctctggaatggaaatacgaaggacggatcctcaaagcaatattcaaccaatcaacagaagattatcttttagagaaagaagcagtagcactagcaagcaattgccaagaattggataatcagcttgtcatctctccagatggatttatgattttctaa

SEQ ID NO: 13799 - protein, 395 aa, Streptococcus pneumoniae TIGR4
MNYLQDLGITGLYLCPIFESTSNHKYNTTDYFEIDRHFGDKETFRELVDQAHHRGMKVMLDAVFNHIGSQSLQWKNVVKNGEQSAYKDWFHIQQFPVTTEKLVNKRDLPYHVFGFEDYMPKLNTANPEVKNYLLKVATYWIEEFNIDAWRLDVANEIDHQFWKDFRKAVLAKNPDLYILGEVWHTSQPWLNGDEFHAVMNYPLSDSIKDYFLRGIKKTDQFIDEINGESMYYKQQISEVMFNLLDSHDTERILWTANEDVQLVKSALAFLFLQKGTPCIYYGTELALTGGPDPDCRRCMPWERVSSDNDMLNFMKRLIKIRKYASVIISHGKYSLQEINSDLVALEWKYEGRILKAIFNQSTEDYLLEKEAVALASNCQELDNQLVISPDGFMIF

SEQ ID NO: 13800 - DNA, 1407 bp, Arthrobacter sp. FB24
  CDS (1)..(1407): transl_table=11
atgacggaaccggactgggtaaaacacgcaatctggtggcaggtctacccgatcggctttgtcggcgcggagcaggctgccgctgaacgggcgtccaaggcgccgacgtccgaggcgccgggccagactgtggcccatcggctggggcagctggttccctggcttgactacgtgctggaactcggcgcgtccgggctcgcgctggggcccgtcttcgcctcggaaacccacggctatgacaccacggactacttcaggatcgatccccggctgggcgatgacgcggactttgacgagctcatcgcccagtgccacgcccgcggactgaaagtcctgctggacggcgtcttcaaccacgtggggcgcagcttcggggcgttccagggtgtgctcacggacggtcccgggtctcctgccgcctcctggttccgcctgcggtggccggagtccggatgggcgccggggaccgaaccgggctacgaggattttgagggccatcatcacctggtggcgctcaaccacgatgaaccggcagttgccgccctggtcacggacgtgatgaagcactggctaggccggggagcggacggctggcggctggacgcggcgtacgctgtgccggcgtcgttctgggccccggtgctggctgaggtgcgccgcgagtatccggactcctatttcgtgggcgagtacatccacggcgacttcgccgaggaggtggagcggagcacgctcgactcggtcacgcagtacgaactgtggaaggccgtctggagttcactcaacgatgccaacttctacgaactcgcatccgcgctcgagcggcacaacgggttcctggacaccttcgtgccgctcacgttcgtgggcaaccacgacgtcacccgcctggccagcaagctgacgaacccggaccagctggcgcttgcgctcacagtcctcctgaccgtgggcgggacgccctgcatctactacggagacgagcaggctttccgcggcgtcaaggaggaccgggccggcggagatgacgccgtccgtccggcgttccccgcggggcccgcagaactggcggaggacggctggtccgtctaccacctgcaccaggaactgatcagcctccgacggcggcatgcctggctgcaccgggcccgcaccacggtcctggcgctcagcaacgaacacctcgtttaccaggtccgcggcgacggtaaggcagcagcaggtagcacagaggagggcggcgcaggcgccgcgctgacagtcgcgctgaacctttccggcacgccggcggacctgcccgtaccgtccgggtcaggcggcctcctggccgggcgggcccaccggcatccggatcgggatgccgtgggcctgcccggttacgggtgggcagtgctcgggaacagctag

SEQ ID NO: 13801 - protein, 468 aa, Arthrobacter sp. FB24
MTEPDWVKHAIWWQVYPIGFVGAEQAAAERASKAPTSEAPGQTVAHRLGQLVPWLDYVLELGASGLALGPVFASETHGYDTTDYFRIDPRLGDDADFDELIAQCHARGLKVLLDGVFNHVGRSFGAFQGVLTDGPGSPAASWFRLRWPESGWAPGTEPGYEDFEGHHHLVALNHDEPAVAALVTDVMKHWLGRGADGWRLDAAYAVPASFWAPVLAEVRREYPDSYFVGEYIHGDFAEEVERSTLDSVTQYELWKAVWSSLNDANFYELASALERHNGFLDTFVPLTFVGNHDVTRLASKLTNPDQLALALTVLLTVGGTPCIYYGDEQAFRGVKEDRAGGDDAVRPAFPAGPAELAEDGWSVYHLHQELISLRRRHAWLHRARTTVLALSNEHLVYQVRGDGKAAAGSTEEGGAGAALTVALNLSGTPADLPVPSGSGGLLAGRAHRHPDRDAVGLPGYGWAVLGNS

SEQ ID NO: 13802 - DNA, 1968 bp, Arthrobacter sp. FB24
  CDS (1)..(1968): transl_table=11
atgccggcattcctcccgccctgccccctcccgcaccacgacggttcgccgcttcatgtgcctcggcgcgccggcctcggcgatgatgccgggctctgcgtgcggatacccgcggcatggggccgtgccgcccgggtctgggtgcggtcggtccaggacggtgaaccccggtacgacgccgcgcgcagcctgggggagcttgacggctgggtttggtgggaagcggaaatgaccgtcaccaacccggtggcccggtaccgcttcctgctggaagtcgcggatagcgagcacgacggcggtactcccggcagcggacagacgggtagtggacatgggggcagcaccccggggtactggagcctcaacgcccagggcctgttccgccgcgacgtctccgactacgcggacttccgcctgaccaccttcccggcagcgccgcagtggctgcgccggggaacgatgtaccaggtgtttccggaccgcttcgcgcgctccgccgacgccggttcgcgtccggtgcctgactgggccataccgtccgcatgggaccacacgcccgtggagggaaccggaccggccacgccgttccagttctacggcggcgacctcaacggggtggccgaaaaactggaccatatccagcaactcggcgccgacgtcatctacctgacacccttcttcccggcacgctccaatcaccgctacgatgcctccaccttcaacgcagtggatccgctcctgggcggcgatgatgccctcgtgacgctggtggaagcggcccatgcccgcgggatcaaagtgatgggcgacctcacggccaaccattcgggcgatgcccacgagtggttccggcaggcgctggccgatcccgcatccgccgaggccggctactactacttcacagggaccgggaaacaaggcgccaccgaagcgggtgccagggcctacgaatcctggtacggcgtcgcctcgctgcccaagctcaactggtcttcagggggcctgacggacaagttcgtcctggacgatgactcgccggtggcgcgctggctcaggcccccgttcaacctggacggctggcggatcgacgtcggcaacatgaccggccggctgggcgccacggacctcaaccgggaggtggcctgcctgatcgcggaccgggtcagggacatcaacccggaagccgcactgctggccgaagccaccaacgatgccgcgccggacttcaccggcgaacactggcacggggccatgacctacgccaacttcacccgcccgctgtggtcctggctggcaggggacgccgcgcacgtcaattttttcggcaccccccttgcgggccccaaccggatgggagccgaggacttcctcgccacccacctggacctggcatcggccttcagctgggatctccggctgcagaacatgaacgccttgaacagccacgacaccgcccgtgcagccacggtgatgatcgacggcgggcagctgcttggggccgtcatgatgttcacgattcccggtgtcccggtggtcttcgccggagacgagtttggcctcaaggggtacaacggcgaagactccaggacgccgatgccgtggaacgacccttcccggattggggcggacctccgtgccagctattcggccatggcagccctgcggcggaagcagccggcgctcaccggaggcggaatccgctggttgcatgccgacggcgacgcgctcgcctatatccgcgagacagcagagagcgcggtcctggtgttcgtggcccgcgcacccgcccgggccgacctcgcggccggcgcactgtctccggcccagttctccgccctcgcggcagatcccgcattctgcacggccgacgtccggaccgatgcggcggcccggagtgccggcacccggatcagcgcgggccaagcagcggccgcggtgtggatacttcccggaacccggacaccgtaa

SEQ ID NO: 13803 - protein, 655 aa, Arthrobacter sp. FB24
MPAFLPPCPLPHHDGSPLHVPRRAGLGDDAGLCVRIPAAWGRAARVWVRSVQDGEPRYDAARSLGELDGWVWWEAEMTVTNPVARYRFLLEVADSEHDGGTPGSGQTGSGHGGSTPGYWSLNAQGLFRRDVSDYADFRLTTFPAAPQWLRRGTMYQVFPDRFARSADAGSRPVPDWAIPSAWDHTPVEGTGPATPFQFYGGDLNGVAEKLDHIQQLGADVIYLTPFFPARSNHRYDASTFNAVDPLLGGDDALVTLVEAAHARGIKVMGDLTANHSGDAHEWFRQALADPASAEAGYYYFTGTGKQGATEAGARAYESWYGVASLPKLNWSSGGLTDKFVLDDDSPVARWLRPPFNLDGWRIDVGNMTGRLGATDLNREVACLIADRVRDINPEAALLAEATNDAAPDFTGEHWHGAMTYANFTRPLWSWLAGDAAHVNFFGTPLAGPNRMGAEDFLATHLDLASAFSWDLRLQNMNALNSHDTARAATVMIDGGQLLGAVMMFTIPGVPVVFAGDEFGLKGYNGEDSRTPMPWNDPSRIGADLRASYSAMAALRRKQPALTGGGIRWLHADGDALAYIRETAESAVLVFVARAPARADLAAGALSPAQFSALAADPAFCTADVRTDAAARSAGTRISAGQAAAAVWILPGTRTP

SEQ ID NO: 13804 - DNA, 1797 bp, Arthrobacter sp. FB24
  CDS (1)..(1797): transl_table=11
gtgagttttagtccgcaaaacccgagccagcatttcacccccaagggcacgtttgagctcaacgcccccggcctgcaacacgatcccgtctggtaccgcaaagcagtgttctacgaagtcctggttcgcggctttgcggacggaaacggcgacggatccggcgacttccacgggctcatcgacaaactggactacctgcagtggctgggcgtcgactgcctctggctgccgccgttcttccagtcgccgctccgtgacggcggctacgacatctcggactacaactccgtcctggacgagttcggcaccatcagcgacttcaagcggctcgtggccgaggcccatgcccgcggcgtccgcgtaatcatcgacctgccgctgaaccacacctcggaccagcacccgtggttccaggagtcccgcaaggacccggacggaccgttcggcgacttctacgtctggagcgataccgacgagaagtaccaggatgcccgcatcatcttcgtggacaccgaggaatccaactggaccttcgaccccatccggcggcagttcttctggcaccggttcttcagccaccagcccgacctgaactttgagaacccgaaggttatcgacgcccttttcgacgtcgtccggttctggctggaccaggggatcgacggttttcgcgcggacgccatcccgtacctgtacgaggaagagggcaccaactgcgagaacctccccgccacgcacgatttcctgcgcaagctgcggaaaatggtggatgagaactacccgggcagggtcatcattgccgaggccaaccagcctccggtcgaggtggtggagtacttcggcaccgaggaagaacccgagtgccacatggccttccacttccccatcatgccgcgcctctactacgcgctgagggaccagaaagcggcgcccatcatcgagacgatgaaggacaccccggacattcccgaaggcgcccagtggggtaccttcctgcggaaccacgacgaactcaccctggaaatggtcaccgccgacgaacgcgcggccatgctcggctggtacgcaccggacccccgcatgcgcgccaacatcggcatccgccgaaggctggcgccgctgctggataattccaggtccgagattgagctcatcaatgccctgctgctttctctgccggggagcccgttcctgtactacggggatgaaatcggcatgggcgacaacatctggcttgaggaccgcgacgccgtccgcactcccatgcagtggaaccctgaccggaacgcgggcttctcgcacgcggatccgggcaagctctacctgccggtcatccagtcgctggtgtacaactacggcatggccaatgtggaggccgaggccgcgcactccggatcgctgctccgttggacccggcagatcctcagcgtccgtaagaaccaccccgtcttcgggcttggcacgttcaagcacgtcgaggcagatcacgacgtcgtgcttgcttacctgcgggaactggccccggacaatgcggcgggtgaagacgccgaatcgatcctgtgcgcgttcaacctctcgcagcatcccgtggccaccacgctgcggattccgcagtacgccggccgcggcctccgggacgtcttcggcggccagccgttccccgccatcggcgacgacgggcgtcttacgctgacgctcggcagccatgatttcttctggctgcggatccgttccgctgcttccaacccggcctcgccgttcacccaggccatgccggtcctgtccatcgaaggctga

SEQ ID NO: 13805 - protein, 598 aa, Arthrobacter sp. FB24
MSFSPQNPSQHFTPKGTFELNAPGLQHDPVWYRKAVFYEVLVRGFADGNGDGSGDFHGLIDKLDYLQWLGVDCLWLPPFFQSPLRDGGYDISDYNSVLDEFGTISDFKRLVAEAHARGVRVIIDLPLNHTSDQHPWFQESRKDPDGPFGDFYVWSDTDEKYQDARIIFVDTEESNWTFDPIRRQFFWHRFFSHQPDLNFENPKVIDALFDVVRFWLDQGIDGFRADAIPYLYEEEGTNCENLPATHDFLRKLRKMVDENYPGRVIIAEANQPPVEVVEYFGTEEEPECHMAFHFPIMPRLYYALRDQKAAPIIETMKDTPDIPEGAQWGTFLRNHDELTLEMVTADERAAMLGWYAPDPRMRANIGIRRRLAPLLDNSRSEIELINALLLSLPGSPFLYYGDEIGMGDNIWLEDRDAVRTPMQWNPDRNAGFSHADPGKLYLPVIQSLVYNYGMANVEAEAAHSGSLLRWTRQILSVRKNHPVFGLGTFKHVEADHDVVLAYLRELAPDNAAGEDAESILCAFNLSQHPVATTLRIPQYAGRGLRDVFGGQPFPAIGDDGRLTLTLGSHDFFWLRIRSAASNPASPFTQAMPVLSIEG

SEQ ID NO: 13806 - DNA, 3327 bp, Azotobacter vinelandii AvOP
  CDS (1)..(3327): transl_table=11
atggatcaatcgctcaagtccgtcgcctttctcgaggacccgttctggtacaaggacgcggtgatctaccaggtgcacgtcaagtcgttcttcgactcgaacaacgacggcatcggtgatttcccggggctgatcgccaagctggactacatcgccgacctgggggtcaacaccatctggctgctgccgttctacccttcgccgcgtcgcgacgacggctacgacatcgccgaataccgcggcgtgcatccagactacggcagcctcgccgacgtgcgacgcctcatcgccgaggcgcaccggcgcggcctgcggttgatcaccgaactggtgatcaaccacacctccgaccagcatccctggttccagcgggcgcggcaggccaggaagggctcggcggcgcgcaacttctacgtctggtcggatagcgacgacaagtaccgggacacccggatcatcttcctcgataccgagaagtccaactggacctgggacccggtggccggccagtacttctggcaccgcttctattcgcaccagccggatctcaacttcgacaacccgcaggtgatgaaggcggtgctcggcatcatgcgctactggctcgatctgggcgtcgacggtctgcgcctggacgccattccctacctgatcgagcgcgacggcaccaataacgagaacctgcccgagacccaccaggtgctcaagcgcatccgcgccgagctggatgcccgctatccggaccgcatgctgctggccgaggccaaccagtggccggaggacactcagctctacttcggcggcgccccggaggggaagggcgacgaatgccacatggccttccacttcccgctgatgccgcgcatgtacatggccatcgcccaggaagaccgcttcccgatgaccgacatcctgcgccagaccccggacatcccgtccgactgccagtgggcgatcttcctgcgcaaccacgacgaactgaccctggagatggtcaccgaccgcgagcgcgactacctgtggaacttctacgccgccgaccgccgcgcgcggatcaacctggggatacgccggcgcctggcgccgctgctggagcgcgaccggcggcgcatcgaactgctcaacagcctgctgctgtcgatgccaggtacgccggtgatctactacggcgacgagatcggcatgggcgacaacatctacctgggcgaccgcgacggggtgcgcacgcccatgcagtggagcaccgaccgcaacggcggcttttcccgcgccgatccggccggactggtgctgccgccgatcatggacccgctgtacggcttccagagcgtcaacgtcgaagcccagcagcgcgacagctactcgctgctcaactggacccggcgcatgctcgccgtacgcaagcagcagaaggccttcggccgcggctcgctgcggctgctggcgccggccaaccggcgcatcttcgcctacctgcgcgaataccatggcgcggacggcagcagcgagaccatcctctgcgtggccaacgtctcgcgctcggcccaggcggtggaactggaactgccccagttcgccgacatggtgccggtggagatgaccggcggcagcgccttcccgccgatcggccagttgccctacctgctgaccctgccgccctacggcttctgctggttcctgctggcgcccgcgtcgcagatgcccagttggcacatcaagcccaccgaaggcatgccggaattccagaccctggtgctgcggcgtctcgacgatctgctggtggaccccaaccggcgcatcctggagaaggaggtgttgccggcctacctgcccaagcgtcgttggttcgccggcaagggcgcgccctcgggcaacgtgcacatcgcctatacggtgaccttcggcaatctgccgcgccccgtgctgctcagcgagatcgaggtcggcggcgagggcggcccgcagcgctaccagttgccgctgggttttctccccgaggaggagttcggcagcgccttgccccagcaactggccatgacccgggtgcgccgtggccggcgggtgggcctgttgaccgatgccttcaccctggagggcttcgtccgcgcgacggtccaggcgctgcgcgagcgccgcgtgctggccttcgagcagggcgagctgcgctttctgcccaccgcgcaactggacaaggtcgagctgccggccgacgccgaggtgcgctacatctccgccgagcaatccaacagctcggcggtgcttggcaacgccctggtgctcaagctgatccgccgggtgtccgtcggcgtgcatcccgaactggagatgggcctgcacctcaccggatacggcttcgccaacatcgccagcgtgctcggcgaggtgtgtcgggtcgatgcccagggcggctgcaccgtgctgatgatcctgcagcgctacctggagaaccagggcgacgcctgggagtggacgcagaacaccctcgaccgggccatccgcgacgaactggccggcggcgagtcgaccctggagagccagtacagcgcgctgcacgagctggagagcttttcccgccagctcggccagcgcctcggcgagatgcacatggccctggccgcgcccaccgaggacccggatttcgctcgcgaaaccgccggtcccgagcaagcggcgcagtggaccgagagcatcggcgcgcaactggggcgggccctggaaatcctcgcccagcgccaggcgacgctggccgaggaggaacgggccgccgtcgagcagttgctgctgcagcgtgatgccctgctggagaaagtcggcgaactggccggggcctgcgtcggcagcctgcgcatccgcgtgcatggcgatctgcacctcggccaggtgctggtggtgcagggcgacgcctatctgatcgacttcgagggcgagccgtcgcggccgctcgccgcgcgccgcgccaagcacagcccttacaaggacgtcagcggcgtgctgcgctcgatcggctacgccgccgacatggccatgcgcaacgcgcagagtgtcgacagctccgaggcggccgaccaggcccgtcggcgcatcgcctcgctgtaccaggcgaacgcccgccaggccttcctcgccgcctaccgccaggcggcggccgagatcggccatgcctgggccgtgccggacggcgaggaggccgcgctggcgctgttcagcctggaaaagaccgcctacgaaatcgcctacgaggccgaaaaccgccccgcctggctggccgtaccgctgcggggcctggcgaatctggcgcaacagctactggatggagaggcgcaatga

SEQ ID NO: 13807 - protein, 1108 aa, Azotobacter vinelandii AvOP
MDQSLKSVAFLEDPFWYKDAVIYQVHVKSFFDSNNDGIGDFPGLIAKLDYIADLGVNTIWLLPFYPSPRRDDGYDIAEYRGVHPDYGSLADVRRLIAEAHRRGLRLITELVINHTSDQHPWFQRARQARKGSAARNFYVWSDSDDKYRDTRIIFLDTEKSNWTWDPVAGQYFWHRFYSHQPDLNFDNPQVMKAVLGIMRYWLDLGVDGLRLDAIPYLIERDGTNNENLPETHQVLKRIRAELDARYPDRMLLAEANQWPEDTQLYFGGAPEGKGDECHMAFHFPLMPRMYMAIAQEDRFPMTDILRQTPDIPSDCQWAIFLRNHDELTLEMVTDRERDYLWNFYAADRRARINLGIRRRLAPLLERDRRRIELLNSLLLSMPGTPVIYYGDEIGMGDNIYLGDRDGVRTPMQWSTDRNGGFSRADPAGLVLPPIMDPLYGFQSVNVEAQQRDSYSLLNWTRRMLAVRKQQKAFGRGSLRLLAPANRRIFAYLREYHGADGSSETILCVANVSRSAQAVELELPQFADMVPVEMTGGSAFPPIGQLPYLLTLPPYGFCWFLLAPASQMPSWHIKPTEGMPEFQTLVLRRLDDLLVDPNRRILEKEVLPAYLPKRRWFAGKGAPSGNVHIAYTVTFGNLPRPVLLSEIEVGGEGGPQRYQLPLGFLPEEEFGSALPQQLAMTRVRRGRRVGLLTDAFTLEGFVRATVQALRERRVLAFEQGELRFLPTAQLDKVELPADAEVRYISAEQSNSSAVLGNALVLKLIRRVSVGVHPELEMGLHLTGYGFANIASVLGEVCRVDAQGGCTVLMILQRYLENQGDAWEWTQNTLDRAIRDELAGGESTLESQYSALHELESFSRQLGQRLGEMHMALAAPTEDPDFARETAGPEQAAQWTESIGAQLGRALEILAQRQATLAEEERAAVEQLLLQRDALLEKVGELAGACVGSLRIRVHGDLHLGQVLVVQGDAYLIDFEGEPSRPLAARRAKHSPYKDVSGVLRSIGYAADMAMRNAQSVDSSEAADQARRRIASLYQANARQAFLAAYRQAAAEIGHAWAVPDGEEAALALFSLEKTAYEIAYEAENRPAWLAVPLRGLANLAQQLLDGEAQ

SEQ ID NO: 13808 - DNA, 3414 bp, Burkholderia vietnamiensis G4
  CDS (1)..(3414): transl_table=11
atgatgaaacgcgaagattccctcgacgacgtgcgccgcgcgcagttcgcgtccgtcgcaccggccggcaccgcgcgcgcgcgccgcgcgcggcgccgcgagcccgcgctgagcacggacgatccgctgtggtacaaggacgcgatcatctatcaggtgcacgtgaagtcgttctacgactccaacaacgacgggatcggcgacttccccggcctgatcatgaagctcgactacatcgccgagctgggcgtcgacacgatctggctgctgccgttctatccgtcgccgcgccgcgacgacggctacgacatcgccgactatcgcggcgtgcatccggactacggcacgctcgccgacgtgcgccgcttcatccgcgaggcgcatgcgcgcggcatccgcgtgatcgccgagctggtgatcaaccacacgtccgaccagcacccgtggttccagcgcgcgcggcgcgccaagcccggctcgacgcatcgcgactactacgtgtggtccgacaccgacacgaagtacgcgggcacgcgcatcatcttcctcgatacggaaacctcgaactggacccacgatccggtcgccggccagtactactggcaccgcttctactcgcaccagccggacctgaacttcgacaacccggccgtcgtgcgcgaggtgatccaggtgatgcgcttctggctcgacctcggcatcgacgggctgcggctcgacgcggtgccgtatctggtcgagcgcgaaggcaccaacaacgagaacctgcccgagacgcacgcgatcctgaagcggatccgcgcgacgatcgacgccgagtatccgaaccgcatgctgctcgcggaagcgaaccagtggccggaagacgtgcaggagtatttcggcaacgaggacgaatgccacatggcgttccacttcccgctgatgccgcgcatctacatgtcgatcgcgagcgaggaccgcttcccgatcctcgacatcatgcggcagacgccggcgctcgcgccgagcaaccagtgggccgtgttcctgcgcaatcacgacgagctgacgctcgagatggtgaccgactccgagcgcgacctgctgtggcagacctacgcgagcgaccggcgcgcgcggctgaatctcggcattcgccgccgcctcgcgccgctgatggagcgcgaccggcgccgcatcgagctgatcaactcgctgctgctgtcgatgcccggcacgccggtgatctactacggcgacgagctcgggatgggcgacaacatccacctcggcgaccgcgacggcgtgcgcacgccgatgcaatggtcgtcggaccgcaacggcggcttctcgcgcgccgatccggaattgctggtgctgccgcccgtgatgggctcgctgtacggctatgacgcgatcaacgtcgaggcgcagacgcgcgacccgcactcgctgctgaactggacccgccgcattctcgcgacgcgccgcgcgacccaggtgttcggccgcggcacgatccgcttcctgcgccccgagaaccgcaaggtgctcgcctacctgcgcgagctggacggccacgagccggtgctgtgcgtcgcgaacctatcgcgcgcgtcgcaggcggtcgagctcgatctgtccgaattcgcgggccgcgtgccgatcgagatgacgtcggactcgccgttcccgccgatcgggcagctcacctacctgctgacgtttccgccgtacggcttcctgtggttcgtgctgtccgagcacggccgcgagccgtcgtggcggcagccgcaggccgagccgctgcccgagtacgtgacgatcgtgatgcggcgcggcgagcagcggcccgacgtcggccagctgcatacgctcgcgcacgacgcgctgtcgtcgtggctcacgcggcgccgctggttcgcgtcgaaggaccgcaagatcggcgacgcgcggctgaacgtcgtcacgccgatgcctgacgagccgttccagtatgcggaggcatgggtgacgacccacggcggcgacgtcgaacgctacgtggtgccgctcgcggccgcatggggcggcgaaacgtcgaacccgctgttcgcgcagctcgcgctcgcgcgcgtgcggcgcggccacacggtcggctatctgaccgacgcgttcgcgctgccggccttcgggcgcgggatgttgcggatgctgcgcgacggcgcgaccgtgccgacttccgacggcggccgcctcgagttcctgcccgagcaggcgctcgccgcgctcgatcccggcgacgatgccgaagtgcgctggctcgccgccgagcagagcaacagctcgctcgtgatcggcgatgcgatcgtgctgaagctggtgcgcaaggtcgcgcacggcgtgcatccggaggcggagatgagccgttacctgacgcggatcggctatgcgaacaccgcgacgctcgccggcgaggtcgtgcacgtcgatcccgacggcacgccgcacacggtcgcgatcctgcaacgctacgtcgacaaccagggcgacgcgtggacgcgctcgttcgacttcctcaagcgcgcgatcgacgagctggcgctgccggccgtcggcgacggcgagcccgcggagcgcgacggcgagcccgatgcgctgctcggctacgcggcgttcgcgggcgtcgtcggcacgcggctcggcgagttgcacgtcgcgctcgcgcagccgtcggacgacgccgcgttcgcgccggagcgcgcgacgcccgagcacgtcgacggctggtgcgtcgacgcgattgcctcgttcggccatgcgctcgacgtgctggccacgcggctcgacgcgctcgacccgagcgcccgcgacgcggccgagacgctgctcgcgtcgcgcgacgcggccgtgcaggcgctcggcgcgctggtgccgcgcacgctcgacgcggtctgcacgcgcatccacggcgacttccatctcggccaggtgctcgacgtgcagggcgacgcgctgctgatcgatttcgaaggcgagccggcgcgcgcgctcgagcgccgccgcgcgaagtcgcatccgctgcgcgacgtcgccggcttgctgcgttcgctgtcgtacgtgagcgcgaccgcgcagttcgcgatcgagaaggtgccgccgcaggcggccggccgcaagcgcgcgttgttcgaccgcttcgggcaggcagccgcggaccgcttcgtcgagtgctatcgcgcggcggccgagcatgcgccggaacgcttcgtcgatccgcgctacgccgatcgcctgctcgcgctgttcctgatcgacaaggcgtcgtacgagctctgctatgaagccgcgaaccgccccgactggctcggcgtgccggtcggcgggctcgccgcgctcgtcgaacgcctgctggacgcgcacgccgcgtccgaccacggaggcacccgatga

SEQ ID NO: 13809 - protein, 1137 aa, Burkholderia vietnamiensis G4
MMKREDSLDDVRRAQFASVAPAGTARARRARRREPALSTDDPLWYKDAIIYQVHVKSFYDSNNDGIGDFPGLIMKLDYIAELGVDTIWLLPFYPSPRRDDGYDIADYRGVHPDYGTLADVRRFIREAHARGIRVIAELVINHTSDQHPWFQRARRAKPGSTHRDYYVWSDTDTKYAGTRIIFLDTETSNWTHDPVAGQYYWHRFYSHQPDLNFDNPAVVREVIQVMRFWLDLGIDGLRLDAVPYLVEREGTNNENLPETHAILKRIRATIDAEYPNRMLLAEANQWPEDVQEYFGNEDECHMAFHFPLMPRIYMSIASEDRFPILDIMRQTPALAPSNQWAVFLRNHDELTLEMVTDSERDLLWQTYASDRRARLNLGIRRRLAPLMERDRRRIELINSLLLSMPGTPVIYYGDELGMGDNIHLGDRDGVRTPMQWSSDRNGGFSRADPELLVLPPVMGSLYGYDAINVEAQTRDPHSLLNWTRRILATRRATQVFGRGTIRFLRPENRKVLAYLRELDGHEPVLCVANLSRASQAVELDLSEFAGRVPIEMTSDSPFPPIGQLTYLLTFPPYGFLWFVLSEHGREPSWRQPQAEPLPEYVTIVMRRGEQRPDVGQLHTLAHDALSSWLTRRRWFASKDRKIGDARLNVVTPMPDEPFQYAEAWVTTHGGDVERYVVPLAAAWGGETSNPLFAQLALARVRRGHTVGYLTDAFALPAFGRGMLRMLRDGATVPTSDGGRLEFLPEQALAALDPGDDAEVRWLAAEQSNSSLVIGDAIVLKLVRKVAHGVHPEAEMSRYLTRIGYANTATLAGEVVHVDPDGTPHTVAILQRYVDNQGDAWTRSFDFLKRAIDELALPAVGDGEPAERDGEPDALLGYAAFAGVVGTRLGELHVALAQPSDDAAFAPERATPEHVDGWCVDAIASFGHALDVLATRLDALDPSARDAAETLLASRDAAVQALGALVPRTLDAVCTRIHGDFHLGQVLDVQGDALLIDFEGEPARALERRRAKSHPLRDVAGLLRSLSYVSATAQFAIEKVPPQAAGRKRALFDRFGQAAADRFVECYRAAAEHAPERFVDPRYADRLLALFLIDKASYELCYEAANRPDWLGVPVGGLAALVERLLDAHAASDHGGTR

SEQ ID NO: 13810 - DNA, 3414 bp, Burkholderia cenocepacia HI2424
  CDS (1)..(3414): transl_table=11
atgatgaaacgcgaagattccctcgacgacgtgcgccgcgcgcaattcccgtcgctcgcgccggccggcacgccgcgccggcgccgcgcgcgccgccgcgaacccgcgctctgcgcggacgatccgctgtggtacaaggacgcgatcatctaccaggtgcacgtgaagtcgttctacgactcgaacaacgacggcatcggcgatttccccggcctgatcgcgaagctcgactacatcgccgaactcggtgtcgacacgatctggctgctgccgttctatccgtcgccgcgccgcgacgacggctacgacatcgccgattaccgcgacgtgcatcccgactacggcacgctggccgacgtgcggcgcttcatccgcgaggcgcatgcgcgcggcatccgcgtgatcgcggagctcgtgatcaaccacacgtcggaccagcatccgtggttccagcgcgcgcgccgcgcgaagccgggctccacgcatcgcgactactacgtgtggtccgacaccgacacgaaatacgcgggcacgcggatcatctttctggataccgaaacgtcgaactggacccacgacccggtggccggccagtactactggcaccgcttctactcgcaccagccggacctgaacttcgacaacccggccgtcgtgcgcgaagtgatccaggtgatgcgcttctggctcgacctcggcatcgacgggctgcggctcgacgcggtgccgtatctcgtcgagcgcgaaggtaccaacaacgagaacctgcccgagacgcatgcgatcctgaagcggattcgcgcgacgatcgacgccgagtacccgaaccggatgctgctcgcggaagcgaaccagtggccggaagacgtgcaggaatacttcggcaacgaggacgaatgccacatggcgttccacttcccgctgatgccgcgcatctacatgtcgatcgcgagcgaggatcgcttcccgatcctcgacatcatgcggcagacgccggcgctcgcgccgagcaaccagtgggccgtgttcctgcgcaaccacgacgagctgacgctcgagatggtcaccgattcggagcgcgacctgctgtggcagacctatgcgagcgaccgccgcgcgcggctgaacctcggcatccggcgccggctcgcgccgctgatggagcgcgaccggcgccgcatcgagctgatcaattcgctgctgctgtcgatgcccggcacgccggtgatctactacggcgacgaactcgggatgggcgacaacatccacctcggcgaccgcgacggcgtgcgcacgccgatgcagtggtcgtcggaccgcaacggcggcttctcgcgcgccgaccccgaactgctggtgctgccgccggtgatgggctcgctgtacggctatgacgcgatcaacgtcgaggcgcagacgcgcgatccgcactcgctgctgaactggacccgccgcatcctcgcgacgcgccgcgcgtcgcaggcgttcgggcgcggcacgatccgcttcctgcgcccggagaaccgcaaggtgctcgcgtacctgcgcgagctggacggccacgagccggtgctgtgcgtcgcgaacctgtcgcgcgcgtcgcaggcggtcgaactcgacctgtccgaattcgcgggccgtgtgccgatcgagatgacgtccgattcgccgtttccgccgatcggccagctcccgtatctcctcaccttcccgccgtacgggttcctgtggttcgtgctcgccgagcatggccgcgagccgtcgtggcggcagccgcatgcggagccactgcccgaatacgtgacgctcgtgatgcggcgcggcgatacgcggccagacgtctcgcaactgcacgcgctggcgcacgacgcgctcgcgtcgtggctcgcacggcggcgctggttcgcatcgaaggatcgcaagatcggcgacgcgtggctgaacgtcgtcacgccgattccggacgagccgttccagtatgcggaggcgtgggtgtccgcgagcgacggcggcgtcgagcgctacgtggtgccgctcgcgaccgcgtggggcggcgagacgtcccatccgctattcgcgcaactggcgctggcgcgcgtgcggcgcggccatacggtcggctacctgaccgatgcgttcgcgctgccggcgttcgcgcgcgggatgctgcgcaagctgcgcgacggcgcgacggtgcccacgtccgacggcggccggctcacctttctcccggaagacgcgctcgccgggctcgatccgggcgacgacgcggaagtgcgctggctcgcggccgagcagagcaacagttcgctcgtgatcggcgacgcgatcgtgctgaagctggtgcgcaaggtcgcgcacggcattcatccggaagcggaaatgagccggcacctgacgcgcatcggctatgcgaacactgcgacgctggtcggcgaagtcgtgcacgtcgacccggacggcacgccgcatacggtcgcgatcctgcagcgctacgtcgacaaccagggcgacgcgtggacgcgctcgttcgacttcctgcgccgcgcgatcgacgagctggcgctgccggccgcggacgaaggcgaggcggccgaaacggacgaggaacccgacgcactgctcggctacgcggcgttcgccggcatcatcggcacgcggctcggccagttgcacgtcgcgctcgcgcagccgtccgacgatcccgcgttcgcaccggagcgcgcgacgcccgatcacgtcgacggctggtgcgtggacgcgatcgcgtcgttcgaacgcgcgctcgacgtgctgcgcacgcggctcgacgcgctcgatgcgcccacccgcgcgtcggccgacgcgctcctcgcatcgcgcgacgcggccgtcgaggcgctcggcgaactggtgccgcgcacgctcgacgcgcaatgcacgcggattcacggcgattttcatctgggccaggtgctcgacgtgcagggcgacgcgctgctgatcgacttcgaaggcgaaccggcgcgcccgctcgagcggcgtcgcgcgaaatcgcatccgctgcgtgacgtggccggcctgctgcgctcgctgtcgtacgtgagcgcgaccgcgcagttcgcaatcgagaaggcgccgccgcaagcggccggccgcaagcgtgcgctgttcgaccgcttcggacaggccgccgccgaccgcttcgtcgaatgctatcgcgcggcggccgacctcgcgcccgcgcgcttcgtcgatccgcactatgcggaccgcctgctcgcgctgttcctgatcgacaaggcgtcgtacgagctgtgctacgaagccgcgaaccggcccgactggctgagcgtgccggtcggcgggctcgcggcgctggtcgaccggctgctcggcgacggcgcgctgcccgacgacggaggaaacccatga

SEQ ID NO: 13811 - protein, 1137 aa, Burkholderia cenocepacia HI2424
MMKREDSLDDVRRAQFPSLAPAGTPRRRRARRREPALCADDPLWYKDAIIYQVHVKSFYDSNNDGIGDFPGLIAKLDYIAELGVDTIWLLPFYPSPRRDDGYDIADYRDVHPDYGTLADVRRFIREAHARGIRVIAELVINHTSDQHPWFQRARRAKPGSTHRDYYVWSDTDTKYAGTRIIFLDTETSNWTHDPVAGQYYWHRFYSHQPDLNFDNPAVVREVIQVMRFWLDLGIDGLRLDAVPYLVEREGTNNENLPETHAILKRIRATIDAEYPNRMLLAEANQWPEDVQEYFGNEDECHMAFHFPLMPRIYMSIASEDRFPILDIMRQTPALAPSNQWAVFLRNHDELTLEMVTDSERDLLWQTYASDRRARLNLGIRRRLAPLMERDRRRIELINSLLLSMPGTPVIYYGDELGMGDNIHLGDRDGVRTPMQWSSDRNGGFSRADPELLVLPPVMGSLYGYDAINVEAQTRDPHSLLNWTRRILATRRASQAFGRGTIRFLRPENRKVLAYLRELDGHEPVLCVANLSRASQAVELDLSEFAGRVPIEMTSDSPFPPIGQLPYLLTFPPYGFLWFVLAEHGREPSWRQPHAEPLPEYVTLVMRRGDTRPDVSQLHALAHDALASWLARRRWFASKDRKIGDAWLNVVTPIPDEPFQYAEAWVSASDGGVERYVVPLATAWGGETSHPLFAQLALARVRRGHTVGYLTDAFALPAFARGMLRKLRDGATVPTSDGGRLTFLPEDALAGLDPGDDAEVRWLAAEQSNSSLVIGDAIVLKLVRKVAHGIHPEAEMSRHLTRIGYANTATLVGEVVHVDPDGTPHTVAILQRYVDNQGDAWTRSFDFLRRAIDELALPAADEGEAAETDEEPDALLGYAAFAGIIGTRLGQLHVALAQPSDDPAFAPERATPDHVDGWCVDAIASFERALDVLRTRLDALDAPTRASADALLASRDAAVEALGELVPRTLDAQCTRIHGDFHLGQVLDVQGDALLIDFEGEPARPLERRRAKSHPLRDVAGLLRSLSYVSATAQFAIEKAPPQAAGRKRALFDRFGQAAADRFVECYRAAADLAPARFVDPHYADRLLALFLIDKASYELCYEAANRPDWLSVPVGGLAALVDRLLGDGALPDDGGNP

SEQ ID NO: 13812 - DNA, 1614 bp, Chromohalobacter salexigens DSM 3043
  CDS (1)..(1614): transl_table=11
atgaaggacaacactttctggtggcgcggtggtgtcatctaccaaatctatccgcgcagctttctggacagcaacggcgacggtatcggcgacctgccgggcatcatcgaaaagctcgattacgtggcgtcgctcggtgtcgatggcatctggctgtcgcctttctttacatctccgatggcggattttggctacgacatcagcgattatcgcgacgtcgaccccatgttcggcaccctggacgacttcaagtcactgctcagtcacgcccatgctctggggctcaaggtgatcatcgatcaagtgatcagccatacgtcggaccagcatccctggtttcaggaaagtcgtcgcgaccgacaaaatgctcgtgccgattggtacgtatgggccgaccccaagcccgacggcacgccgcccaacaactggctgtctatctttggcggttcggcgtggacattcgactcgcgacgtcgtcagtattacctgcataatttcctgatcgagcagccggatcttaattttcataatccggccgtgcgtgacgctcagctcgacaacatgcgcttttggctggaacttggtgtcgatggctttcgcctggataccgtcaacttctatttccatgatgccgaactgcgcgacaacccggctatcgagcccggcgatacaaagacgctgggtgctccggaggccaacccttacacgtggcaacgccatgtccatgacataagccgccccgaaaacctcgacttcctcaaacgattacgcgcgttgatggatgagtttccgggcacggcgacggtcggtgagatcagcgaagatagtccactcgagcgcatggcggagtacaccgccaatggtgacaagctgcacatggcctacaccttcgatctgcttaatgcaccgcgctccccggcctacattcatgaggtgattgaacgcttccagcgactggcgggcgatgcctggccttgctgggcactgtccaaccacgatgtgatgagaagcgccacgcgctggggagccgaggaagacgccgaggcgtatcccaaggtcacgttggccatgctcttgtcattgcgcggcagcgtttgcctttatcaaggtgaggaactcggtctgcccgaggccgaagtgcctttcgagcgtattcaggacccctacggcaaggtcctttggcctgacttcaagggacgtgacggctgccggacgccgatgccctggcatgacggtattcatggcggtttttcgcgtgtcgagccttggttgccggtggatgcccgccacctgcagcgtgctgtgtcgcgtcagcaggcgagtctcgattccatgctcaacagcgtgcgggcgctgatcgcatttcgtcacgaccacccggcgctgttcgacggtgacctgcgattgctcgatgtcggcgatgccctgcttggcttcgttcgtgagcatgctcaggaacgccttgtgtgcgtgttcaacctgactgaccaggcgcaggcgtgttgcctgcccgagccagggcacctgctagacgctcccgggttcacggcgcacgtggaaaacgaccgcttgaccctgccggcctatcaggcggcctatctgcgccttgactga

SEQ ID NO: 13813 - protein, 537 aa, Chromohalobacter salexigens DSM 3043
MKDNTFWWRGGVIYQIYPRSFLDSNGDGIGDLPGIIEKLDYVASLGVDGIWLSPFFTSPMADFGYDISDYRDVDPMFGTLDDFKSLLSHAHALGLKVIIDQVISHTSDQHPWFQESRRDRQNARADWYVWADPKPDGTPPNNWLSIFGGSAWTFDSRRRQYYLHNFLIEQPDLNFHNPAVRDAQLDNMRFWLELGVDGFRLDTVNFYFHDAELRDNPAIEPGDTKTLGAPEANPYTWQRHVHDISRPENLDFLKRLRALMDEFPGTATVGEISEDSPLERMAEYTANGDKLHMAYTFDLLNAPRSPAYIHEVIERFQRLAGDAWPCWALSNHDVMRSATRWGAEEDAEAYPKVTLAMLLSLRGSVCLYQGEELGLPEAEVPFERIQDPYGKVLWPDFKGRDGCRTPMPWHDGIHGGFSRVEPWLPVDARHLQRAVSRQQASLDSMLNSVRALIAFRHDHPALFDGDLRLLDVGDALLGFVREHAQERLVCVFNLTDQAQACCLPEPGHLLDAPGFTAHVENDRLTLPAYQAAYLRLD

SEQ ID NO: 13814 - DNA, 3396 bp, Burkholderia pseudomallei S13
  CDS (1)..(3396)
atgaagcccgcagacacgctcgaagacgtcggccgcgcgcagttcgtcgcgcacatggcccgaaggccgcgcggcgcgcgcaggcgagaggcgccgggcgtcgccgacacgccgctgtggtacaaggatgcgatcatctaccaattgcacgtgaagtcgttcttcgacgccaacaacgacggcgtcggcgatttcgccggcctgatcgcgaagctcgactacatcgcggagctcggcgtcgacacggtgtggctgctgccgttctatccgtcgccgcgccgcgacgacggctacgacatcgccgactaccgcggcgtgcatcccgactacggcacgctcgcggacgtgcgccgcttcatccgcgaggcgcacgcgcgcgggctgcgggtgatcaccgagctcgtgatcaaccacacgtcggatcagcatccgtggttccagcgcgcccggcgcgcgaagcgcggctccgtccaccgcgactactacgtgtggtccgacaccgatctcaagtacgcgggcacgcggatcatcttcctcgataccgagacgtcgaactggacgcacgatccggtcgcgggccagtactactggcatcgcttctattcgcatcagcccgacctgaacttcgacaatccggccgtggtgcgcgaagtgctgcagatcatgcgcttctggctcgatctcggcatcgacgggctgcggctcgacgcggtgccctacctcgtcgagcgcgagggcacgagcaacgagaacctgccgcagacgcacgcgatcctcaagctgatccgcgcgacgatcgacgccgagtacccgaaccggatgctgctcgccgaagcgaaccagtggcccgaggacgtccaggaatatttcggcgacgaggacgagtgccacatggccttccacttcccgctgatgccgcgcatctacatgtcgatcgcgagcgaggaccgctttccgatcatcgacatcatgcggcagacgcccgccctcgcgccgagcaatcaatgggcggtgttcctgcgcaaccacgacgagctcacgctcgagatggtcaccgattcggagcgcgacctgctctggcaagcctacgcgagcgagcgccgcgcgcggctgaacctcggcatccgccgccggctcgcgccgctgatggagcgcgaccgccgcaggatcgagctgatcaactcgatcctgctgtcgatgcccggcacgcccgtcatctactacggcgacgagctcggcatgggcgacaacctgcacctcggcgatcgcgacggcgtgcgcacgccgatgcaatggtcgtcggaccgcaacggcggcttctcgcgcgccgatcccgagctgctcgtgctgcctccggtgatgggcacgctgtacggctacgacgcgatcaacgtcgaggcgcagacgcgcgatccgcattcgctgctgaactggacgcggcgcatcctgtcgacgcgccgcgcgacgcgcgtgttcggacgcggcgcgatccgcttcctgcgcccgggcaaccgcaagatcctcgcgtatctgcgcgagctcgacggcgaaacgccggtgctctgcgtcgcgaacctgtcgcgcgcgtcgcaggcggtcgagctcgacctgtcggaattcgccggctgcgtgccgaccgaaatgacgtcggactcgccgttcccgccgatcggccaactgccgtatctgctgacgttcccgccgtacggcttcctgtggttcgcgctgtccgagcacggccgcgagccggcctggcatcagcagtacgccgagccgctgcccgaatacctgacgctcgtgatgcggcgcggcgagacgcagccgggcgccgcgctgctcgacacgctcgcgcaggacgcgctgccgtcatggctcgcgcggcggcgctggttcgcatcgaaggagcggcgcgtcgacagcgcgcgcttcgacgcgctcacgccgattccgggcgagccgtttcagtatgcggaggcgcgcgtcgccgtcgacggccgcgaagaacgctacgtggtgccgctcgcgagcgcctggggcagcgagacgcctcagccgctgttcgcgcagctcgcgctcgcgcgcgtgcggcgcggccatacggtcggcctgctgaccgacgcgttcgcgctgccgtcgttcgcgcacggcgtgctgcgccagctgcgcgcgggcgcggccgtgccggtggcgggcggcgggcgtctcgaattccggcccgagccggacctggcgcggctcgatcccggcgatgcgcccggcgtgcggtggttcgccgccgagcagagcaacagctcgctcgtgatcggcgaggcgatcgtgctgaagatcgtgcgcaagctcgccgcgggcgtccacccggaagcggagatgggccggcacctgcggcgcatcggctaccggaacgtcgcgccgctcgtcggcgaggtcgtgcgcatcggcgcggacggcgcgccgcacaccgtcgcgatcctgcaggaatacgtcgacaatcagggcgacgcgtggacgcgctcgtgcgattttctcaagcgcgcgatcgaggagctcgcgctgcccgcggcaaacgacgccgacgcggcggcgccgagcgccgagccggagatgatcgacggctacgcgacgttcgcgggcatcgtcggcaagcggctcggcgaactgcacgcggcgctcgcgcagccgagcgacgatgcggcgttcgcgccgcagcgcgtgtcgcccgcgcgcgtcgacggctggatcggcgatgcgctgggctggttcgaacgcgcggcgagcctgctggccgaacggctcgacacgctcgaaggccaaacgcgcgcggccgccgagctgctcgtcgcgcagcgcgccgcggtggccgaggcgctgcgtgcgctggtgccgcgcgagctcgacggatgctgcatccggattcacggcgacttccacctgggccaggtgctcgacgtgcaaggcgacgcgcttctcatcgatttcgagggcgaacccgcgcgcccgctcgagcagcgccgcgcgcaatcgcatccgttacgcgacgtggccgggttcctgcggtcgctgtcgtacgcgagcgcggccgcgcagttcacgatcgaaaaggcgccgcagcaggccgccgagcgcaagcgcgcgctgttcgagcgcttcgggcaggcggccgcggaccgcttcgttgcgcaataccgcgaagcgctgtcggccgcgtcgcgcgaattcgtcgagccgcgctatgcggaccggctgctcgcgctgttcctcatcgagaaggcgtcctacgagctgtgctacgaagccgcgaaccggccggactggctgagcgtgcccgcaaacggcctcgccgcgctcgtcgcgcgcctgatcggcggcgccgcgccgcagcaggaggacgcgcgatga

SEQ ID NO: 13815 - protein, 1131 aa, Burkholderia pseudomallei S13
MKPADTLEDVGRAQFVAHMARRPRGARRREAPGVADTPLWYKDAIIYQLHVKSFFDANNDGVGDFAGLIAKLDYIAELGVDTVWLLPFYPSPRRDDGYDIADYRGVHPDYGTLADVRRFIREAHARGLRVITELVINHTSDQHPWFQRARRAKRGSVHRDYYVWSDTDLKYAGTRIIFLDTETSNWTHDPVAGQYYWHRFYSHQPDLNFDNPAVVREVLQIMRFWLDLGIDGLRLDAVPYLVEREGTSNENLPQTHAILKLIRATIDAEYPNRMLLAEANQWPEDVQEYFGDEDECHMAFHFPLMPRIYMSIASEDRFPIIDIMRQTPALAPSNQWAVFLRNHDELTLEMVTDSERDLLWQAYASERRARLNLGIRRRLAPLMERDRRRIELINSILLSMPGTPVIYYGDELGMGDNLHLGDRDGVRTPMQWSSDRNGGFSRADPELLVLPPVMGTLYGYDAINVEAQTRDPHSLLNWTRRILSTRRATRVFGRGAIRFLRPGNRKILAYLRELDGETPVLCVANLSRASQAVELDLSEFAGCVPTEMTSDSPFPPIGQLPYLLTFPPYGFLWFALSEHGREPAWHQQYAEPLPEYLTLVMRRGETQPGAALLDTLAQDALPSWLARRRWFASKERRVDSARFDALTPIPGEPFQYAEARVAVDGREERYVVPLASAWGSETPQPLFAQLALARVRRGHTVGLLTDAFALPSFAHGVLRQLRAGAAVPVAGGGRLEFRPEPDLARLDPGDAPGVRWFAAEQSNSSLVIGEAIVLKIVRKLAAGVHPEAEMGRHLRRIGYRNVAPLVGEVVRIGADGAPHTVAILQEYVDNQGDAWTRSCDFLKRAIEELALPAANDADAAAPSAEPEMIDGYATFAGIVGKRLGELHAALAQPSDDAAFAPQRVSPARVDGWIGDALGWFERAASLLAERLDTLEGQTRAAAELLVAQRAAVAEALRALVPRELDGCCIRIHGDFHLGQVLDVQGDALLIDFEGEPARPLEQRRAQSHPLRDVAGFLRSLSYASAAAQFTIEKAPQQAAERKRALFERFGQAAADRFVAQYREALSAASREFVEPRYADRLLALFLIEKASYELCYEAANRPDWLSVPANGLAALVARLIGGAAPQQEDAR

SEQ ID NO: 13816 - DNA, 1728 bp, Clostridium thermocellum ATCC 27405
  CDS (1)..(1728): transl_table=11
atgaaacttgaggcaatatatcacaaaccttacagcgagtttgcatttcctgttgctcccgacactctggtaatacggctcaggacggctaaaaacgatgtaaacacctgcattctcatctatcatgaaaagtatgatacgtcacaaagaggaaaagtgaaaatggataaagttgcaagcgatggaatgtttgactattacgaggtggagcttaatgtcggtataaagagaattaagtatatgttttatcttgaggataattattcaataaaatggtacagcagcgacggattttttgattatatgcctcagtggggacattttacctattcttatatatgcaaagacgacatatttcatgaggttgaatggtttcgtaattcaacaatatatcagatatttcccgacagatttgcaaagtttccgccggataccgaaaattcgggcaaaagaacgatacatgggggcaatattaaagggataatcgaccggtttgatcatttagtcaaacttggagttgatgtggtttatttaaatcccatattcaaatcggaatcttatcatcgctatgatgttgtcgattattatgaaattgacccgatgtttggaagtaaagaagagctcagggaattgatggacttgtgtcacaaaaacggtataaaagtaatatttgacggagtttttaatcactccggagacaagttttttgcattcagagatgttgtggaaaaaggagaaaaatcaaagtatgcaaactggtattttataaattcttttcccgttcagggatatccaagacccaattatgaatgcttttccttttatggaggaatgccgaagcttaacaccggaaatcctgagacggcaaaatactttcttgatgtggtaaagtattggacagtggagtttggggtggacggatggagacttgatgcggcggatgaggtggaccgaaagttttggagaaagcttagggatatgctgaaagatttgaacaaggatgtggtgctgattggcgaaatatttgacgaggcgtcttcgtggctttggggagaccagtttgactcggtgataaattatccgttgaaagccatgataaatgacctttttgcctataggtccattgatgtggagactttcaggaacagaataagcggctatattatgaagtttaacaaaaaggtgctaagcagcctggtaaatataataagcactcatgacacgccaaggtttttgactctttgcaacggagatgaaaagaggtttgagatggcagtagtgttccagtttacctttcctggagttcccctcatatactacggcgatgaaatagggatggaaggcgaaggagaccctgattgcagaagaccgatgatatgggacgaagcgaaatggaacaaaaaaactctcgagttgtataaattcctgattggcttgaggaagaggttcgatgccttgagaactggagaatatggagaacttcctgtaacaggatgcaatgggatactggcatacagaaggggccggggagaaaacggaattattgttgccatgaatacattggaccgaaaggaaaatgtcgtagtagaaacaggagattcttttgacacggtaaaagcttttgagtctttgaaagacgaagaaagactgaatgttgacaaaaaaaggataaacatatgcttaaatccgtttgagtggaggatttacaaagcctgcggcgaattataa

SEQ ID NO: 13817 - protein, 575 aa, Clostridium thermocellum ATCC 27405
MKLEAIYHKPYSEFAFPVAPDTLVIRLRTAKNDVNTCILIYHEKYDTSQRGKVKMDKVASDGMFDYYEVELNVGIKRIKYMFYLEDNYSIKWYSSDGFFDYMPQWGHFTYSYICKDDIFHEVEWFRNSTIYQIFPDRFAKFPPDTENSGKRTIHGGNIKGIIDRFDHLVKLGVDVVYLNPIFKSESYHRYDVVDYYEIDPMFGSKEELRELMDLCHKNGIKVIFDGVFNHSGDKFFAFRDVVEKGEKSKYANWYFINSFPVQGYPRPNYECFSFYGGMPKLNTGNPETAKYFLDVVKYWTVEFGVDGWRLDAADEVDRKFWRKLRDMLKDLNKDVVLIGEIFDEASSWLWGDQFDSVINYPLKAMINDLFAYRSIDVETFRNRISGYIMKFNKKVLSSLVNIISTHDTPRFLTLCNGDEKRFEMAVVFQFTFPGVPLIYYGDEIGMEGEGDPDCRRPMIWDEAKWNKKTLELYKFLIGLRKRFDALRTGEYGELPVTGCNGILAYRRGRGENGIIVAMNTLDRKENVVVETGDSFDTVKAFESLKDEERLNVDKKRINICLNPFEWRIYKACGEL

SEQ ID NO: 13818 - DNA, 1461 bp, Crocosphaera watsonii WH 8501
  CDS (1)..(1461): transl_table=11
atggtcataaaaacccctgaatgggtaaaaaacgccattttttatcaaatttatcccgatacctttgcgagaaaggttccagatcgccaaaaatggttattagatgtacccttggaagactgggaagcccccccaacctcccaaggatacaaaggaggcaacctctggggtgtgatcgataaattggattatttacaagatttaggggttgatgctctctatttgacccctatttttcgctctgcttgtaaccatcgctatcatactcaagattattatgcgatcgatcctttattgggagacagagaagcttttgatcacttgttgaaaactgcccatgataaagggtttaaggtggttttagatggggtatttaatcacgctagtcgtggctttttcttttttaacgatatcctggaaaatggaccgaattccccttggttagattggtttaaaatcgaagggtggcctttatctgcctacgatggcagtcgtccggctaattacgtctcctggatagattatcgtgctttaccccagtttaaccacgataacccggcagtgagggaatatatcatgcaagtgggggaatattggttacaacaagggatcgacggttggcggttagatgtacccaactgtgttgaagcagagggtttctgggaggaatttcgagaacgggttaaagctgtcaaccctgaagcctatatcgtcggagaaatcgtttctgatgctactcaatggctagatggcaagcaatttgatggggtgatgaattatccttttgctcgtttaaccgcttgttttgtcatcggcgatcgccttgacaaggagactatccccagtttttataaaccttacgaaaccctcgatgcagccgaatacgcaaagggacttgaggaattattagcccgtcatccttgggaaattcaattaacccagctaaacctacttgatagtcacgatacttctcgttttctaactatggcaggaggcgatcgcacttccttacagttagctacgttattgttgtttacctttcctggcactcccaacatattttatggggatgaaattggtattgaaggtggcaaagatcccgatgggagaaaaggtttccctacagaagaaaagtgggagcaagaaaccttaacctatcataaacaattaatccaaatcaggaaaaaatacacggctttacggacaggagaatatagagttatcactgctcaagaaaatgtctatgtctttgcccgtattttaggagaagaagggttgattattgcagttaataatggagaagataaaacagaaatacaaatagataaattcgacaaagtgtcctcaatattacagactaaaccgagtcagattatttatggagaagggtcaattaattggcatgataaccagttaaaaataacaatgcatcctcgttctggcctagttatagccccttaa

SEQ ID NO: 13819 - protein, 486 aa, Crocosphaera watsonii WH 8501
MVIKTPEWVKNAIFYQIYPDTFARKVPDRQKWLLDVPLEDWEAPPTSQGYKGGNLWGVIDKLDYLQDLGVDALYLTPIFRSACNHRYHTQDYYAIDPLLGDREAFDHLLKTAHDKGFKVVLDGVFNHASRGFFFFNDILENGPNSPWLDWFKIEGWPLSAYDGSRPANYVSWIDYRALPQFNHDNPAVREYIMQVGEYWLQQGIDGWRLDVPNCVEAEGFWEEFRERVKAVNPEAYIVGEIVSDATQWLDGKQFDGVMNYPFARLTACFVIGDRLDKETIPSFYKPYETLDAAEYAKGLEELLARHPWEIQLTQLNLLDSHDTSRFLTMAGGDRTSLQLATLLLFTFPGTPNIFYGDEIGIEGGKDPDGRKGFPTEEKWEQETLTYHKQLIQIRKKYTALRTGEYRVITAQENVYVFARILGEEGLIIAVNNGEDKTEIQIDKFDKVSSILQTKPSQIIYGEGSINWHDNQLKITMHPRSGLVIAP

SEQ ID NO: 13820 - DNA, 3318 bp, Chlorobium phaeobacteroides BS1
  CDS (1)..(3318): transl_table=11
atgccgcgagcatctgcatcctatcagcctgaaccgctctggtacaaggacgccatcatttatgaggcacatgtaaagactttttttgacagtaacaatgacggtgtcggtgattttgaagggttgcgccagaagctgccctatctggaaagtctcggtataaccgcaatctggctgcttcctttttatccttcacccctgagagatgacggctacgatattgccgattacatggaggtcaatcctgactacggtaccatcgaggatttcaaagcctttctcgatgacgcgcataagctcggactgaaggtgattaccgagcttgtcatcaaccatacgtccgatcagcacgcatggttccagagggccagacaggcagagccgggatcggtcgaacgggatttttacatgtggagcagtgatcccaagaaatactccggcgtccgcatcattttccaggatttcgaggcctcgaactggacatgggaccctgtcgccggagagtattactggcatcggttctatcatcatcagcctgatctgaacttcgaaaatcccgcggttgaaaaagccatttacaaggtgcttgattactggctggagatgggcgtcgacgggttgcggctcgacgcggttccctatctctatgcagaggaaggaaccaactgtgagaaccttccccgcacgcacaagtttctgcagaggctgcgcaagcatgtagacggcaagttcccgaaccgtatgcttcttgccgaggcaaatcagtggccggaagatgccgccgagtatttcggcgaaggtgacgaatgtcatatgaatttccatttccctctgatgccgaggatgtacatggcgctggaaatggaagatcgttttccgatcatagatattctcgaccagacacccgggattccggaagagtgccagtgggcttccttccttcgcaatcatgatgaacttactcttgagatggtgaccgatgaggagcgtgactatatgcgccgggtgtacgcgcatgatccgaaggcgcgcatcaatctcggtatacgccgccgtctggcgccgcttatgtcgaatgaccgcagaaaaatcgagctgatgaacatcatgctcctttccctgcccggcactccggttctctactacggtgacgagataggtatgggcgataatttttacctcggtgatcgtgacggcgttcgtactcccatgcagtggaacggtgaccggaatgcaggtttttccagagccaatccccagcagttgcagctgccggtgatcattgatccggaataccattacgagggagccaatgtcgaggtacaggaaagcaacatcaattcgctgctctggtggacacgccacatgctctccacctcccgcaggtacaaagccctcagtcgcggggatattatctttattcagtctcagaatcctcaggtcctgatttttaccaggacatacaaggatgagaccatgctgtgcatcatcaacctgtcgcgtaacgcacaggcggtcaccatggatctgtcggaatacgaaggatatattcctgaagaggtgttcagcctcagtcattttcccgggatctctgcaaggccgtatacggttacgctgggtccttacggatatttctggttcaagcttgtcaggagtgaagatgagatcgggagccgacgctatatcgacaagccgtttgcgaaagtagccgccatggatgacctcttttccggcaaggttcttgaccgtcttgaatccagagtgctgcctcagtatatacggggttgcagatggtttggcggcaaggcccgcaagatcgtcagggtcagcgtcaacgatagcattcctgtgccagcctgtcaaaacacggtctacctgattgtcgaggtacgctatccgagcggctcgaacgatctgtatcagcttccggtgacatttctgcctacaggagagttcaatcctgacgaagactttttcatgaagcaggttatctgcagtgtgaagatcggagagaacgaggggtatctctgcgatgcgacctatcagaaggagttccatcgtttccttctcgacgttatcatcgccggaaaaggcctgaagggggggattttcaaactgacagccgaaaagggctcgactctggaggagtatctgccgcaggaagaggatgatagtatgaactccgtgattttcggtctggagcagagcaatacgtcgatcatgtatgatgacaagctctgtctgaagctctaccgcaagatctcttcagggatttctcctgaagttgaaatctgccgcaccttgactgaaaagacatcgtttgagagttctccgggctatcttggagcgctttacctttccagaagccgcaaggatacctcttctctgggcatcctgcagaactttatccccaatgagggagatgcctggagccagaccctgcactatgtgcaccgttactatgaagaggtgcttgttctgttgccgcagctcgaagagatcccggaaattcccccgataggaggagagacagtcgagatgccggagatcatgcacgggctgataggtgaaatctacctcgggatggttaacaagcttgctgagcgaacagcagaaatgcatctttctctggcctcgccggatcttggtcctgattttctgcctgaagcatttaccacgctctatcagcgctccatataccagtccatgcgtgaacaggtgaaaagaggtatggtgatgctcaaggagcagatgaaagggatcgcgaaagattataagggaatcgcggctgatctgcttggacgggagcaggagatactggaccggctttcacatatcaaagctcgcaggatcccggcatcaaagatcaggattcatggtgactatcatctcggtcaggtactctggaccggtaaggattttgtgatcattgactttgaaggcgaaccggcacgctctatcagcgagcgcaggatcaagcgtgccgtgttccgtgatcttgcaggaatgatgcggtcgttccattacgctgccttcaacgtcctgatccaggatcgttctataaggcctgaggatgctgaaaagcttgagccatgggcggagttgtggagtttttataccgggcagcatttctatgatgtgtatgcggccgctgttggaggacacggtctgattcctgaaaatattacagaacagcaccttctgcttcgctcctatctcatggacaaggctatttatgaattgaactatgagctgaacaaccgtcctgagtgggtaggcatagccctgaagggtctgcagcggctgctcgaatcctga

SEQ ID NO: 13821 - protein, 1105 aa, Chlorobium phaeobacteroides BS1
MPRASASYQPEPLWYKDAIIYEAHVKTFFDSNNDGVGDFEGLRQKLPYLESLGITAIWLLPFYPSPLRDDGYDIADYMEVNPDYGTIEDFKAFLDDAHKLGLKVITELVINHTSDQHAWFQRARQAEPGSVERDFYMWSSDPKKYSGVRIIFQDFEASNWTWDPVAGEYYWHRFYHHQPDLNFENPAVEKAIYKVLDYWLEMGVDGLRLDAVPYLYAEEGTNCENLPRTHKFLQRLRKHVDGKFPNRMLLAEANQWPEDAAEYFGEGDECHMNFHFPLMPRMYMALEMEDRFPIIDILDQTPGIPEECQWASFLRNHDELTLEMVTDEERDYMRRVYAHDPKARINLGIRRRLAPLMSNDRRKIELMNIMLLSLPGTPVLYYGDEIGMGDNFYLGDRDGVRTPMQWNGDRNAGFSRANPQQLQLPVIIDPEYHYEGANVEVQESNINSLLWWTRHMLSTSRRYKALSRGDIIFIQSQNPQVLIFTRTYKDETMLCIINLSRNAQAVTMDLSEYEGYIPEEVFSLSHFPGISARPYTVTLGPYGYFWFKLVRSEDEIGSRRYIDKPFAKVAAMDDLFSGKVLDRLESRVLPQYIRGCRWFGGKARKIVRVSVNDSIPVPACQNTVYLIVEVRYPSGSNDLYQLPVTFLPTGEFNPDEDFFMKQVICSVKIGENEGYLCDATYQKEFHRFLLDVIIAGKGLKGGIFKLTAEKGSTLEEYLPQEEDDSMNSVIFGLEQSNTSIMYDDKLCLKLYRKISSGISPEVEICRTLTEKTSFESSPGYLGALYLSRSRKDTSSLGILQNFIPNEGDAWSQTLHYVHRYYEEVLVLLPQLEEIPEIPPIGGETVEMPEIMHGLIGEIYLGMVNKLAERTAEMHLSLASPDLGPDFLPEAFTTLYQRSIYQSMREQVKRGMVMLKEQMKGIAKDYKGIAADLLGREQEILDRLSHIKARRIPASKIRIHGDYHLGQVLWTGKDFVIIDFEGEPARSISERRIKRAVFRDLAGMMRSFHYAAFNVLIQDRSIRPEDAEKLEPWAELWSFYTGQHFYDVYAAAVGGHGLIPENITEQHLLLRSYLMDKAIYELNYELNNRPEWVGIALKGLQRLLES

SEQ ID NO: 13822 - DNA, 3339 bp, Geobacter metallireducens GS-15
  CDS (1)..(3339): transl_table=11
atggcacgcagagaaccgttgcggggcggcaatcccctctggtaccgggacgccattatctaccagctccacgtcaaggccttcgccgactcggacggcgacggcatgggggacttccggggcctcatggggaagctcgactatctccaatccctggggatcaccgccatctggatcctccccttctacccttcgccgctacgggatgacgggtacgacatcgccgactattacagcgtgaaccccagctacaacaccctgcgggaattccgggagttcctccgggcggcacacgcccgccgcatccgggtcatcactgagctggtcctcaaccacacctcggaccagcacccctggttccagcgggcccgccgggccaaaccgggatcggcccaccgcgactactacgtctggagtgacaaccccgaccgctaccaaggaacccggatcatcttccaggacttcgaaacctccaactggagctgggatccggtggccaaggcctactactggcaccggttctactcccaccagcccgatctcaactacgacaaccccaaggtccaggcggagatgctccgggtcatcgactactggctcgggatgggagtggacggggtgcgcctcgacgcggtcccctacctcttcgagcgcgaggggaccaactgcgagaacctccccgaaacccacgccttcctgaagaagctccgggcccacgtggacgcctcgttccccaaccggatgctcctcggcgaggccaaccagtggcccgaagacgccatcgcctacttcggcgagggggacgagtgcaacatgctcttccacttccccctcatgccccgtatgtacatggccatcgaaatggaggaccgcttccccgtaatcgacatcatcgaccagacccccgccatccccgaggggtgccagtgggccatcttcctccgcaaccacgacgagctgaccctggagatggtcaccgacgaagagcgggactacatgtaccggatctacgccgccgacccgaaagcgcggatcaacctggggatccggcggcgcctcgctccgctcatggagcgggaccggcggaagatcgagctgatgaacgcccttctcttctcgctccccggcacccccatcatctactacggcgacgagatcggcatgggggacaactactacctgggggaccgcaacggcgtccgcacccccatgcagtggagccctgaccgcaacgccggcttctccggcgccaacccccagcggctctacctgccggtcatcatcgaccccgaataccactacgaggcggtaaacgtggagattcaggagcgcaaccccacgtcgctcttatggtggatgcgccgcaccatcgccgtgcgccgccgccaccgggccttcagcagcggcaccctggagatgctctatccggccaatcaccgggtcctcgcctttctccggcgccacgaagacgaggtgatcctcgtagtgggaaacctctcccgcttcgcccaggccgtgagcctcgacctgaaggagttcgccggcatatcgccagcagacctcttcagccggaaccggtttccggtcatccgcgaaatcccctaccccctcaccctgggcccccacgatcatttctggttcatcctgagccgtgcagagtcgccacgcctgccagagggagaactgccgcggatcaacctcccgggaggactcccgtggtgggaggccctccagcataccggaggggacacccgcctggaacgggcgaccaccgactacctgaaccgaagcggctggttccgggggaaagcccgggcaatcatcggctatgccctgcgcgacaccgtgcttctgcggacatcagaccaggtctttcccctgttcttcctggaggtccgctaccagaacggcgcgccggaaacctacctgatccccgttgcgtttctccggggccccggggcgaaacgggtcgatgccgaatcgccacaggcggccattgcatccctctccgtgggggacgaagcagggatcctctgcgatgcgctccatgaccgggagttcagggacgcgctcctcgcccttgcccttggccggcgccgactccatggtaaacgggagagcctcgtcgtaccgctccatgggagaggaggccacgccgaaggaatgcgggaaacggagcatctcatttccgagctcgtcacgggggaagaggcgagcagtgtcatcctctatggcgatcggcacgtgttcaagctgtaccgcacggtggaaccgggggtgaattcggaggtggagctggtccggtttctgacggaaaagtcccgctaccccaacattgtccccttccaggcgagtctcgagttgcgccatcccggcaccgaaccatgcaccattggccttgtgcaggaatatgtgaaaaaccagggtaacggctggcggctcgcgctccacctcctcggccagtacttcgagcggattctctcccgccggggcgagatccctcctccgccgaagcggttctcgagcctcatagacggcagcgcctgcaccgttccggaaccggtcgcgaatctcattggcggcttctatctggaaatggcgggacttctcgggcgtagaaccgccgaactccacctggcccttgccgcggggggaaacgatccggcctggaaaccggaggcgtattcaaccatttaccagcgctccgtgtaccagtccatgcgcaaccaggcacggcgcacccttcagctcctgtcccagaaccgcaatcttctgccgatcgacgaccagggaccggctgaccgggtcctgggggccgaaaaggagattctctcctggctggcccaaatcgtcggccggcggatagggacgatgaagatccgcatccacggcaattttcacctggggaaagtgctcttcaccggcaaggatttcgtaatcctcgacttcgagggggagccggaccggaccctcagcgagcgccgcatcaagcgctctcccctgagggacgtggcatcaatgatccgctccttccacgctgccacgctgactgccctcgcacggcatgggaacggccgttccggagacgtccagcttctggagccgtgggcggatgcctgctattaccacgtgagctgccgctacctcgcggggtacctcgaacggatggggaacagtcccctcgttccggcagaccggaacgacctggcgaccctcctccgctcgttcctgctcgacagggcgctccgcgacctcgggttcgccctgggcaaccgccccgaaacggcctcgtcccccctgaaggggatcgagacggtgctgcgggaatacggggaatag

SEQ ID NO: 13823 - protein, 1112 aa, Geobacter metallireducens GS-15
MARREPLRGGNPLWYRDAIIYQLHVKAFADSDGDGMGDFRGLMGKLDYLQSLGITAIWILPFYPSPLRDDGYDIADYYSVNPSYNTLREFREFLRAAHARRIRVITELVLNHTSDQHPWFQRARRAKPGSAHRDYYVWSDNPDRYQGTRIIFQDFETSNWSWDPVAKAYYWHRFYSHQPDLNYDNPKVQAEMLRVIDYWLGMGVDGVRLDAVPYLFEREGTNCENLPETHAFLKKLRAHVDASFPNRMLLGEANQWPEDAIAYFGEGDECNMLFHFPLMPRMYMAIEMEDRFPVIDIIDQTPAIPEGCQWAIFLRNHDELTLEMVTDEERDYMYRIYAADPKARINLGIRRRLAPLMERDRRKIELMNALLFSLPGTPIIYYGDEIGMGDNYYLGDRNGVRTPMQWSPDRNAGFSGANPQRLYLPVIIDPEYHYEAVNVEIQERNPTSLLWWMRRTIAVRRRHRAFSSGTLEMLYPANHRVLAFLRRHEDEVILVVGNLSRFAQAVSLDLKEFAGISPADLFSRNRFPVIREIPYPLTLGPHDHFWFILSRAESPRLPEGELPRINLPGGLPWWEALQHTGGDTRLERATTDYLNRSGWFRGKARAIIGYALRDTVLLRTSDQVFPLFFLEVRYQNGAPETYLIPVAFLRGPGAKRVDAESPQAAIASLSVGDEAGILCDALHDREFRDALLALALGRRRLHGKRESLVVPLHGRGGHAEGMRETEHLISELVTGEEASSVILYGDRHVFKLYRTVEPGVNSEVELVRFLTEKSRYPNIVPFQASLELRHPGTEPCTIGLVQEYVKNQGNGWRLALHLLGQYFERILSRRGEIPPPPKRFSSLIDGSACTVPEPVANLIGGFYLEMAGLLGRRTAELHLALAAGGNDPAWKPEAYSTIYQRSVYQSMRNQARRTLQLLSQNRNLLPIDDQGPADRVLGAEKEILSWLAQIVGRRIGTMKIRIHGNFHLGKVLFTGKDFVILDFEGEPDRTLSERRIKRSPLRDVASMIRSFHAATLTALARHGNGRSGDVQLLEPWADACYYHVSCRYLAGYLERMGNSPLVPADRNDLATLLRSFLLDRALRDLGFALGNRPETASSPLKGIETVLREYGE

SEQ ID NO: 13824 - DNA, 1785 bp, Exiguobacterium sp. 255-15
  CDS (1)..(1785): transl_table=11
atgaataaagcagctgtgtttcaccgggccctgtctccgtatgtctatacatacgatcaagaagcggttcatatccgcttgatgtcagccaaaggggacctggaccgtattgaactgatccacggggatccttatgaatgggatgcagaaaaagaggaagatcgggactggaactttgatccggataaagaaaaattttggaaaacggagacgacagacatgacgtttgccggatcggatgcgacacatgatttttggttcgttgccatccggcccccaaagaagcgggtccgctacggctttaacgttcatgctaacggtgaatcggccgtctatacggaacgcggctggtacgatgaagtaccgctcgatcatccgggctactactttgccgtcccatatatgaatgcggtcgatgtatttgatgcgccgtcatgggtcaaagacaccgtctggtatcaaatttttcccgatcggttcgcgaacggggatttgacgaatgatcgtccgggtaccatcgcctggggtgccgaagcaccggcgtttgacaatcatttcgggggcgattttcaaggagtgattgatcatatcgattacttaaaagagctggggattaccggaatttatttttgtccggtctttgtcgcaccgtcgaatcataaatacgatacgttagattatttacgactcgatccggcctttggaacagaagagacgttccgggaaatgattcatttgctccatcaaaatgggattcggattttactggacgccgtctttaatcacgtcagcgttgatcatccggccttccaagacgtcattgcgcatggcaatgagtcgcagtatgcgaattggtttatgatggactcgttcccggtccaatcgacaccagtgccgaactatgaagtttttgcctttgaagggaatatgccgaaacttaatacggcgcatcctgatgtaaaagagtacttgttaaaagttgggcgttactgggtggaagagttccacgtcgacggatggcgactggatgtcgcgagtgaagtggatcatgctttttggcgtgagttccggcgtgaagtccgggcagcgaatccggaagcctatattgtcggcgagtgttggacagattcacaaccgtggttgctcggcgatcagtttgatgcggtcatgaactacggattgacggaagctttcttaacattttttgcgacgaatgaaagtacggcgtctgaattcagtcatgcaatcgtcaggaatctgaacagcaatacgatgaatgtcaacgaagtgatgttcaatctggtggattcgcatgatacaccccgtgccttgacgcgggcgaatggggaccgtgatcggatgaaactgttgatgctgtcactgctgacattcacgggaagtccggtcatctattacggagatgaaatcggtatgacaggcggtcaggatccggataaccggaagtgtatggtctgggatcaggcggaacaggacagggatctcttggcgtatatcacaaagttggttgatttacggaaatcgcaccccgctctcgccaacgcgagcggctatcaattcgaacaaatggatgatgagacggcaagtttcctcgttcgtcgtcagtctgatgaagcgacctatttgattggatttaacaatggttcagaagaaatccgctttgacttggacaaagcagcggttgatttaatggacggacaacggtatttgggaaccgtcaccgtacgtccgttgtccggaaaaattctccgggtggaaacaacataa

SEQ ID NO: 13825 - protein, 594 aa, Exiguobacterium sp. 255-15
MNKAAVFHRALSPYVYTYDQEAVHIRLMSAKGDLDRIELIHGDPYEWDAEKEEDRDWNFDPDKEKFWKTETTDMTFAGSDATHDFWFVAIRPPKKRVRYGFNVHANGESAVYTERGWYDEVPLDHPGYYFAVPYMNAVDVFDAPSWVKDTVWYQIFPDRFANGDLTNDRPGTIAWGAEAPAFDNHFGGDFQGVIDHIDYLKELGITGIYFCPVFVAPSNHKYDTLDYLRLDPAFGTEETFREMIHLLHQNGIRILLDAVFNHVSVDHPAFQDVIAHGNESQYANWFMMDSFPVQSTPVPNYEVFAFEGNMPKLNTAHPDVKEYLLKVGRYWVEEFHVDGWRLDVASEVDHAFWREFRREVRAANPEAYIVGECWTDSQPWLLGDQFDAVMNYGLTEAFLTFFATNESTASEFSHAIVRNLNSNTMNVNEVMFNLVDSHDTPRALTRANGDRDRMKLLMLSLLTFTGSPVIYYGDEIGMTGGQDPDNRKCMVWDQAEQDRDLLAYITKLVDLRKSHPALANASGYQFEQMDDETASFLVRRQSDEATYLIGFNNGSEEIRFDLDKAAVDLMDGQRYLGTVTVRPLSGKILRVETT

SEQ ID NO: 13826 - DNA, 1674 bp, Exiguobacterium sp. 255-15
  CDS (1)..(1674): transl_table=11
atggaacgtaaatggtggcacgacagtgtagtctatcaaatttatccgcggagtttcaatgattcaaacggagacggaatcggggatctcgtcggtatcattgaaaaactggattacttaaaagaacttggaattgatgttatttggctgagtccggtctatgactcaccaaatgatgataacggatatgatattcgggattatgaagccatcatgagcgaattcggaacgatggcggactttgatcgtctgctcgatcaggcgcatgagcggggaatcaaaatcgtaatggatttggtcatcaaccattcgtcggacgagcacgcctggtttgcagagtcacgaaagagtaaggacaatccataccgggactattacatttggagaagcgccaatgaagacgggacgctcccgaacaactggggctcgattttttccggaccggcttgggaactggatgaggcgacaaacgaatattacttgcacctgttttctaaaaagcaacctgatctgaactgggaaaacgaaaaactgcgtcaagaagtctatcagatgattacgcgctggttggatcgcgggattgacggtttccggatggacgtcatcaacttaatctcgaagacacccggtcttccggatgcgacggttcctcccggtgctctatacggggacggcggacaacattatattaacggaccaagaatccatgagtttttaaaagaaatgaatgatgcttcttttggtaattatgatgtcttgacggttggtgaaatgccgggggcgacaactgacgacgccattctttatacagatccagaacgcaaagaagtcaacatggtgtttacgttcgaacatatggacttggattccggtccgggtgggaaatgggatgtaaaaccatttgaccttcagaaactgaaagaaaacttcacgaaatggcaagtcgccttacacgaaaaagggtggaactcgctgtactggaataatcacgaccagccacgcgttgtcagccgattcggaaatgatacgacgtatcgcgtcgaatccgctaaaatgttagcgactctgctccacttgttaaaaggaactccctacatttatcaaggggaagaaatcggcatgacgaacgtggcctttgaatcgattgaggactatgaggatatcgaaatccgtaatatgtggaaagaacggaccgagcaaggggcttcaccggcagagttattgcgtgctgtccatgtgaagggacgggacaatgcccggacaccaattcaatgggatgcgacggagcatgccggatttacgacgggtacaccctggttaaaagttaatccgaactatccgaccatcaatgtcgaacaggccttggaggatccggattccatcttctattactataaacagctgattgcgttacgtcatcagcacgatgtaatcgtatacggtgaatatgccttgattttagaagaggaaacggacatctatgcgtacacaagaacatatgaaaatgaaacatggtacatttactgctccttcagtcaggaagaagtaacggttccgctgtctcacgatacttctgatccggtcatcggaaattacagtgaatcaccggcaggatcaaaagaagaattggttcttcgaccgtatgaagcaatcgtctaccggacgacgcggtaa

SEQ ID NO: 13827 - protein, 557 aa, Exiguobacterium sp. 255-15
MERKWWHDSVVYQIYPRSFNDSNGDGIGDLVGIIEKLDYLKELGIDVIWLSPVYDSPNDDNGYDIRDYEAIMSEFGTMADFDRLLDQAHERGIKIVMDLVINHSSDEHAWFAESRKSKDNPYRDYYIWRSANEDGTLPNNWGSIFSGPAWELDEATNEYYLHLFSKKQPDLNWENEKLRQEVYQMITRWLDRGIDGFRMDVINLISKTPGLPDATVPPGALYGDGGQHYINGPRIHEFLKEMNDASFGNYDVLTVGEMPGATTDDAILYTDPERKEVNMVFTFEHMDLDSGPGGKWDVKPFDLQKLKENFTKWQVALHEKGWNSLYWNNHDQPRVVSRFGNDTTYRVESAKMLATLLHLLKGTPYIYQGEEIGMTNVAFESIEDYEDIEIRNMWKERTEQGASPAELLRAVHVKGRDNARTPIQWDATEHAGFTTGTPWLKVNPNYPTINVEQALEDPDSIFYYYKQLIALRHQHDVIVYGEYALILEEETDIYAYTRTYENETWYIYCSFSQEEVTVPLSHDTSDPVIGNYSESPAGSKEELVLRPYEAIVYRTTR

SEQ ID NO: 13828 - DNA, 1611 bp, Exiguobacterium sp. 255-15
  CDS (1)..(1611): transl_table=11
atgaatcgggcctggtggaaagaagccgttgtctatcaagtgtattggcgcagttttaaagattcgaacggagacgggatgggcgatttacgcggagtaattgaaaaactcgattacatcgcttccctggatgtcgatatcatctggttaaatccctgttatacatcaccggatgtcgataacggatacgacatttcggattattactcgattatgccgaaggcgggaacgatgtcggatctggaagaactgattgcgtccgcccatgaacgaggactgaaactgattcttgatttggtcgtcaatcatacgagtgatcaacatacgtggtttaaagaatcccgcagcagtcggacgaacgagaaagccgattggtacatttggcgggacggggtcaaaggaacgccgccgaacaattggcggtcgtatttcgcgccgagtccctggacgtgggatgagacacgcgagcagtattatttccattcctttgcatcggagcaaccggacttgaactgggagcatcctgctgtccggcaggccgtatatacgatgatgcggtggtgggccgataaaggaatcgacggcttccggatggatgtcatcaatctgatcaagaaacgggcgacgtatgatgatgtcgcagatcctttggaattatcctacttagggaatcaaccgggcattcacgagttcttacaggagatgcaccaagaagtactggcgggaaccgatctctttaccgtcggtgagattccgtttgtcggcccggaagacgggttgctgtatgtcggggaggaacggaatgagctgcgaacgctgtttcacttcgaagtcgcggacgacatggagacgatggatttaccgcgctttaaacaaatccagaagcgttggtatgaggcgctttatccgagcggtgtcgcgtcccaattcttgaataaccatgaccacacccgtcaggtgacccggttcggaagcgaacggtatcgcgtcgaaagtgccaagttactgggtttgatgctccacacgttaccgggcattccgtacatttatcagggcgaagaaatcggtatgaccggcattcgtttttctgatccggagtcctatcaggacgttgcgtttcgaaatcagtacgccgaacggattgcggccggtgaatcacccggaacggtcctgtcatcgatgcagttgcgggcgcgtgacaactcacgaacaccgatgcagtggaatacggaccaatcagccggatttactatagggacaccatggatggcggtcaatccgaactaccgtgacattaacgtcgaagcagcggaacaggatccgcattccgtgctggctttttaccggcaactgattgatttacggaagactcatccggtcatggtttacggggtttatcgtgatttggcgattcaagatccgtacctgtatgtctatgaaagggtcctagacggagtggtttggcggattgtcttaaacgtccatgatgaaccggtgacgacgacgttcggtttaccggaagaacagttgattttgacgaattatgagacggcggacatcaatcgattggcaccgtacgaagcccggttgtaccaatacgagatgccttaa

SEQ ID NO: 13829 - protein, 536 aa, Exiguobacterium sp. 255-15
MNRAWWKEAVVYQVYWRSFKDSNGDGMGDLRGVIEKLDYIASLDVDIIWLNPCYTSPDVDNGYDISDYYSIMPKAGTMSDLEELIASAHERGLKLILDLVVNHTSDQHTWFKESRSSRTNEKADWYIWRDGVKGTPPNNWRSYFAPSPWTWDETREQYYFHSFASEQPDLNWEHPAVRQAVYTMMRWWADKGIDGFRMDVINLIKKRATYDDVADPLELSYLGNQPGIHEFLQEMHQEVLAGTDLFTVGEIPFVGPEDGLLYVGEERNELRTLFHFEVADDMETMDLPRFKQIQKRWYEALYPSGVASQFLNNHDHTRQVTRFGSERYRVESAKLLGLMLHTLPGIPYIYQGEEIGMTGIRFSDPESYQDVAFRNQYAERIAAGESPGTVLSSMQLRARDNSRTPMQWNTDQSAGFTIGTPWMAVNPNYRDINVEAAEQDPHSVLAFYRQLIDLRKTHPVMVYGVYRDLAIQDPYLYVYERVLDGVVWRIVLNVHDEPVTTTFGLPEEQLILTNYETADINRLAPYEARLYQYEMP

SEQ ID NO: 13830 - DNA, 1788 bp, Exiguobacterium sp. 255-15
  CDS (1)..(1788): transl_table=11
atgctgaaagaagctgttttccaccgcgcgatgtcaccgttcgtctataagtatgatgacaaaaccattcatgttcgactgcagacgaaaaaaaatgacgtcgaccatgttgatcttatttggggagatccgtacgactggcataccgaaaacccggatgatgccgattggaactttgatccgtccaaatcaaactattggaatactttcgaaacccctatgaaacggagcgggtcagatgagttattcgattattggttcatcgatgtcgttcctcctttccgccgacttcgttacggattccggcttcacgacggacattcgagtcaagtctttaccgaacgtggctggtttgatgaaaagccgctagatgataccggatactacttctgtgttccttttttaaacaaagtggatgtgttccatgctccggactgggtgaaggatacagtgtggtatcaaatcttccccgaccgctttgccaacggagattcgacgaatgatccggccggtacccttccatggaatagtacggcacctacaacgacaaatctgttcggcggtgattttcaaggcgtcattgataaaatcgattacttagtggatctcggcatcacaggcatttacttctgtccaattttcgaagccaagtccaatcataaatacgacacgattgattatttggaaattgatccgcagttcggaactaaagaaaagtttaaggaaatggttgatttactgcatgcaaatggaattcgcatcatgctggatgccgtctttaatcatgccggtttccaccataaagcattcgccgacattcgggaacacggcagcaattcttcttaccgggattggttccacctccggaacttccctctcgtaaccgagccgatgccgaactatgacacgtttgcgtttgttccggaaatgccgaagttcaatacggaaaatccggaagtaaaagaatacttacttcatgtcgcccgttactgggtcgaagaattcgggatcgacggctggcggcttgatgttgccaacgaagtcgatcatgccttctggcgtgacttccgttctgtcgtcaaggaagcggatccggagacgtatattctcggtgaaatttggcacgattcacaggaatggttgctcggtgaccaatttgatgccgttatgaactatccgttcacgaatgctgcacttaatttctttgcactcgataagacatctgcttccacctatgccaatgacatgtcgcatgtcttattctcaaacacggtcaacgtcaacgaagtatcgtttaacttaatcggttcacacgatacgccgcgtgccttgacccgtgccggaaacgacaaaaacaagatgcgtctgctgctgttatccatgctgaccttctccggaagtccggttatctattacggagatgaaatcggactcgacggtgatcaggatccgggttgccggaaatgtatgccgtggaatccggaagagcaggatttgaatctgttgatgtacacgaaacatctgcttcagttacgaaagcagcacaggacacttgccaatcacggacagatttcattcgtccatgccgacgatgaaaccaataccatcgtcatgcgtcgtatgagtcaggatgggacgtattacgtctatttcaataactcgaatcatcaggcgacaatcccggctcctcagtccggccaaggaatggatctcttttcgaacacaccacttccttcattagaagtgacgctcgctccgtatacaggaactatcattcaagtgatttga

SEQ ID NO: 13831 - protein, 595 aa, Exiguobacterium sp. 255-15
MLKEAVFHRAMSPFVYKYDDKTIHVRLQTKKNDVDHVDLIWGDPYDWHTENPDDADWNFDPSKSNYWNTFETPMKRSGSDELFDYWFIDVVPPFRRLRYGFRLHDGHSSQVFTERGWFDEKPLDDTGYYFCVPFLNKVDVFHAPDWVKDTVWYQIFPDRFANGDSTNDPAGTLPWNSTAPTTTNLFGGDFQGVIDKIDYLVDLGITGIYFCPIFEAKSNHKYDTIDYLEIDPQFGTKEKFKEMVDLLHANGIRIMLDAVFNHAGFHHKAFADIREHGSNSSYRDWFHLRNFPLVTEPMPNYDTFAFVPEMPKFNTENPEVKEYLLHVARYWVEEFGIDGWRLDVANEVDHAFWRDFRSVVKEADPETYILGEIWHDSQEWLLGDQFDAVMNYPFTNAALNFFALDKTSASTYANDMSHVLFSNTVNVNEVSFNLIGSHDTPRALTRAGNDKNKMRLLLLSMLTFSGSPVIYYGDEIGLDGDQDPGCRKCMPWNPEEQDLNLLMYTKHLLQLRKQHRTLANHGQISFVHADDETNTIVMRRMSQDGTYYVYFNNSNHQATIPAPQSGQGMDLFSNTPLPSLEVTLAPYTGTIIQVI

SEQ ID NO: 13832 - DNA, 1803 bp, Frankia sp. CcI3
  CDS (1)..(1803): transl_table=11
gtggggcaagcagaactacgtgcggctggacccggcggtcgagcccgcgcacgtcttcgctgtgcgggcccggtcgtgatggattctgagcctctcagcgaaccgatcggcgaccacacccccggcccggcccccgccatgccggtcggggggactttacgcgacccacactggttcaagcgagccgtgttctacgaggtgctcatccgcggcttcgcggactccaacggcgacggcacgggggacattcgcggcctgatctccaggctcgactacctggagtggctcggtgtcgactgtctgtggctgctaccgatctactcctcgccgttgcgtgacggcggctacgacatcagtgactactttcagatcctgccggaattcggtgacctcggcgacttcgttagcctggttgacgaggcccaccgccggggcatccggatcatcgcggatctggtgatgaaccacacctcggacgcccatccctggttccaggcgtcccgctccgaccccgacgggccgttcggggacttctacgtctggtccgacagcgacgagctgtacccggacgcccggatcatcttcgtggacaccgagaagtcgaactggtcgtgggatccggtccgcggtcagtactactggcaccgtttcttctcccaccagcccgacctgaactatgacaaccccgaggtccaggaggcgatgctggaggttctgcgcttctggctcgatctcggcatcgacgggttccggctcgacgcggtcccctacctctatgtccgggagaacaccaacggcgagaacctgccggagacccacgagtacctcaagcgggtccgcaaggaggtcgacgccaagtacgccgaccgggtgctgctcgccgaggcaaaccagtggccctccgacgtcgtcgagtacttcggcaacgacgacgagtgccacatggcgttccacttcccgttgatgccgcgcatcttcatggcggtccggcgggagtcccgctacccaatctcggaaattcttgctcagacaccccagatcccgccgaactgccagtggggcatcttcctgcgcaaccacgacgagctgacgctcgaaatggtgaccgacgaggaacgggactacatgtgggccgaatacgcgaaagatccgcgtatgaaagccaacatcggcattcgtcgccggctggcgccgctgctggacaacagccgtgaccagatggagctgttcaccgcgctcctgctctcgctgcccggctcgccagtgctgtactacggcgacgagatcgggatgggcgacaacatctacctgggcgaccgggacagcgtccggactccgatgcagtggtcaccggatcgtaacgccggtttctccaccgcggacccggcccgactgtaccttcccctgatcatggatccggtctacggttatcaggccctgaacgtcgaggccggacagcgcatgccgacctcgttcctggcctggaccaagcggatgatcgaggtacgcaagcgtcatccggtcttcgggctcggcgactacaccgagctcggcgcgtccaatccctcgatcttcgccttcgtccgcgagttcggcgacgaccgggtcctgtgcgtcgcgaatctgtcccgcttcgcccagccggtggagctcgatctgcgtcgtttcgagggaatggttccggtggagctgctcggccgggtgcacttcccgccgatcggcgagcttccctacctgctgacactgccaggtcacggacattactggttcgcggtgaccagaccgggggaattcaccccctag

SEQ ID NO: 13833 - protein, 600 aa, Frankia sp. CcI3
MGQAELRAAGPGGRARARLRCAGPVVMDSEPLSEPIGDHTPGPAPAMPVGGTLRDPHWFKRAVFYEVLIRGFADSNGDGTGDIRGLISRLDYLEWLGVDCLWLLPIYSSPLRDGGYDISDYFQILPEFGDLGDFVSLVDEAHRRGIRIIADLVMNHTSDAHPWFQASRSDPDGPFGDFYVWSDSDELYPDARIIFVDTEKSNWSWDPVRGQYYWHRFFSHQPDLNYDNPEVQEAMLEVLRFWLDLGIDGFRLDAVPYLYVRENTNGENLPETHEYLKRVRKEVDAKYADRVLLAEANQWPSDVVEYFGNDDECHMAFHFPLMPRIFMAVRRESRYPISEILAQTPQIPPNCQWGIFLRNHDELTLEMVTDEERDYMWAEYAKDPRMKANIGIRRRLAPLLDNSRDQMELFTALLLSLPGSPVLYYGDEIGMGDNIYLGDRDSVRTPMQWSPDRNAGFSTADPARLYLPLIMDPVYGYQALNVEAGQRMPTSFLAWTKRMIEVRKRHPVFGLGDYTELGASNPSIFAFVREFGDDRVLCVANLSRFAQPVELDLRRFEGMVPVELLGRVHFPPIGELPYLLTLPGHGHYWFAVTRPGEFTP

SEQ ID NO: 13834 - DNA, 3582 bp, Desulfitobacterium hafniense DCB-2
  CDS (1)..(3582): transl_table=11
gtggtattggcttatcataattctcacgatcccttcttccgcagcccctttggggctgttccatgcggcggcctgctgcgcttaagactgcttatgcagccggaggattcttctggtgcgggcagtccggttcaggaatgctttttgcgcttatgggtgcaggaccgggaggagcggctgcccatgctcagggtggaagagccgatcctgtgggagataaatagggaaggaactgttacaggggaagaggctattacaggggaaggggtccttacgggagaaggagtcgtttatgaggtggaatatcctcttccccatgaaccgggaatcatctggtattactttattttcagggcagggggagaaacctgtttctatggcaataatcaggaagaactgggaggcgtgggtgagcttcgatcctccgagcctcccggttatcaaatcaccgtttaccggcccatggccttgccaggctggtacacccagggcatcatgtatcagatctatgtggatcgcttctttaacggggatgaacagggaaaagtcctcaatccccgcccccgctccctgatccatggggactggtctgatacccccttctatattaaaaatgaaaagggcgaagtcctacgctgggattttttcggcggcaaccttgccggtgtgatcaaaaagcttccttatcttaaggaattaggagtgagtatcctttatttgaaccccatcttcgattcctccagcaaccataagtatgacacgggggattatctcactcttgatcccatgtatggggacgaggagatctttgcccaattgatcaaggaagcccaaagcttaggaatcgcgattattctggatggggtgttcagtcataccggtgatgacagtatttattttaaccgttatgggagatatcctggtctgggcgcctatcaatccccggattccccctattactcctggtatcaatgtcatggggaaggacaggaaaaagaatattcctgctggtggggagtgtccactctccctgaagtttgggagatggagccctcttatcgcgagtttatcattcactctcctcaaggagttctccaatcctggatgaaacggggtattaaaggctggcgtctggacgtggctgacgagcttcccgatgaatttatccaggagttccgccaaatgatgaaaacaatggaccctgagggagtcctgatcggtgaagtctgggaggaccccacccataaattcagctatggcaagctcaggcagtatttctggggggaagaactggatgccaccatgaattatcctttgcggaatatctttctccagtacttccttgggcagatcgatgccggtcaggcccataaacgcatcatgaatctctatgaaaactacccccgggaaaactttttcgggcagatgaacttgatcggcagccatgaccgggcccggattctcaccctcctcggtgaagcgccgccgccggagcagctctccgccgtggaacaggagcagtatcgcttgcctgcccctgcccgggatctggctgtccagcggttgaaactgctgactttgctgcagatgagctttcccggtgttccctgtctgtactacggtgatgaagcgggctgtgaaggatatcccgatccctataaccgggggacctacccttggggaagggaagatcaggagatcctccaatggtttaaacgggtgcttcgttatcgccgggaatatgaggtgctgcggcaaggcgagttctcttcctggttcgagggaaaagagatctatgtcttgcaaaggaagggtgaaaaagaggagattattgtcctggttaatcgcagtgctgaggagtccacggaaatgacattgaagctggagcagaacgtggggcaggtgatcgatatctttgcgggggaagtgctgcacagtctttcgcttatcctaccccccttatccgcaaaggcccttttctatcagaaatatgagcgtggtcactattttaaacaggagatcatgacccgtgcctgcggcatccttatgcatatctcctctttgccgtctccctggggcattggcgatctgggggaagaggcctatgcttttgtggatttcctggctgaaggagggcaaagcctctggcaggtgctgcctttgaaccctctagggctgggagattccccttaccaaagtgagtccgccttagccggtaattttttgctgatcagtcttgatttgcttattgaggccgggctgctgaccgaaggggaggcccgcagggaatgggccgactatggtcaagaggttaaaaagactgagggaagcgaaggaagcgaaggaagcgaaggaagcgaaggaagcgaaggcctcgggagcgagggctttgcctgggtggaacgctataaggagaagctgctgcgcaaggcttatgaacgtttcaaggagaaattgcccaggtaccctttggatttaagcagtccggagggaggcagccagcctggaactaaggggtacttggaccctcagggttatgaccggtttatagaagagaatcaggactggctgcaagactacgctctctataagtgtttaaagcttaagttccccggcaaggcgtggcaccaatgggaagaaagctatcgcttgcggaagcctgaggccctggaggctgtgactgaagattatgccgaggagataaactatattttctttgttcaatatactttcgctgatcagtggcaaaggctgaaggactatgctcaggaaaaaggggtaaaaataatcggcgatctgcccatttatgtggcctatgacagttgcgacacctgggctaaccgggagtgctttgctctggatgaaaataatgctcccgcaggaaccgctggggtgccccccgactatttcaaccctgaagggcagaactggggaaatcccttatacgattgggatgctctccgggccgccgattatgcctggtggaagctgcgtttccggcaagggctggagcgctttgatgccttaagactggatcatttccgtggctttgagggctattgggaagttccccctcaggccgggagcgccaaggaaggccgctggctgaaagggccggggaaagaatttttcgaaagcctggtccgtgaattggggcctctgcccgtcatcgctgaggatttagggtgcattacccctgaagtcaataccctgagagctattttaggatttccggggatgagggtgacgcagttttcacccttgcagcaagaagggaattatgttgattattccggaacccatgataacgataccctgttgggctggtatcgctcccaaggctatagcgataaggattccctggcgcaagtggaaaggactatcgaggagctttatcaggggaatggtatctgggtcattttcccccttcaggacattcttaaactggattcccgggcgaggatgaatactcccggcacaattaaagggaattggcagtggcgtgtagaaagaggaaccttaactcaggaggtttgtgcgcgattaaggggtttggcggaaaagtatgggcggttatcctga

SEQ ID NO: 13835 - protein, 1193 aa, Desulfitobacterium hafniense DCB-2
MVLAYHNSHDPFFRSPFGAVPCGGLLRLRLLMQPEDSSGAGSPVQECFLRLWVQDREERLPMLRVEEPILWEINREGTVTGEEAITGEGVLTGEGVVYEVEYPLPHEPGIIWYYFIFRAGGETCFYGNNQEELGGVGELRSSEPPGYQITVYRPMALPGWYTQGIMYQIYVDRFFNGDEQGKVLNPRPRSLIHGDWSDTPFYIKNEKGEVLRWDFFGGNLAGVIKKLPYLKELGVSILYLNPIFDSSSNHKYDTGDYLTLDPMYGDEEIFAQLIKEAQSLGIAIILDGVFSHTGDDSIYFNRYGRYPGLGAYQSPDSPYYSWYQCHGEGQEKEYSCWWGVSTLPEVWEMEPSYREFIIHSPQGVLQSWMKRGIKGWRLDVADELPDEFIQEFRQMMKTMDPEGVLIGEVWEDPTHKFSYGKLRQYFWGEELDATMNYPLRNIFLQYFLGQIDAGQAHKRIMNLYENYPRENFFGQMNLIGSHDRARILTLLGEAPPPEQLSAVEQEQYRLPAPARDLAVQRLKLLTLLQMSFPGVPCLYYGDEAGCEGYPDPYNRGTYPWGREDQEILQWFKRVLRYRREYEVLRQGEFSSWFEGKEIYVLQRKGEKEEIIVLVNRSAEESTEMTLKLEQNVGQVIDIFAGEVLHSLSLILPPLSAKALFYQKYERGHYFKQEIMTRACGILMHISSLPSPWGIGDLGEEAYAFVDFLAEGGQSLWQVLPLNPLGLGDSPYQSESALAGNFLLISLDLLIEAGLLTEGEARREWADYGQEVKKTEGSEGSEGSEGSEGSEGLGSEGFAWVERYKEKLLRKAYERFKEKLPRYPLDLSSPEGGSQPGTKGYLDPQGYDRFIEENQDWLQDYALYKCLKLKFPGKAWHQWEESYRLRKPEALEAVTEDYAEEINYIFFVQYTFADQWQRLKDYAQEKGVKIIGDLPIYVAYDSCDTWANRECFALDENNAPAGTAGVPPDYFNPEGQNWGNPLYDWDALRAADYAWWKLRFRQGLERFDALRLDHFRGFEGYWEVPPQAGSAKEGRWLKGPGKEFFESLVRELGPLPVIAEDLGCITPEVNTLRAILGFPGMRVTQFSPLQQEGNYVDYSGTHDNDTLLGWYRSQGYSDKDSLAQVERTIEELYQGNGIWVIFPLQDILKLDSRARMNTPGTIKGNWQWRVERGTLTQEVCARLRGLAEKYGRLS

SEQ ID NO: 13836 - DNA, 1719 bp, Frankia sp. EAN1pec
  CDS (1)..(1719): transl_table=11
gtgaacgagtcggaaccgttcgcggagcagccgctgcgcgagaccgcggccgagggcggcgacacggggacgtcccaggacccgctgtggttcaagcgggccgtgttctacgaggtcctcgtccgcggcttcgccgactccaacggcgacggcaccggtgacctggccgggctggtctcgaaactggactacctcgagtggctcggcgtggactgcctgtggctgctgcccatctactcctcgccgctgcgcgacggcgggtacgacatcagcgactacttccagatcctccccgagttcggggacctgggcgacttcatcaacctcgtcgacgaggcgcaccggcgcgggctacggatcatcgccgacctggtgatgaaccacacctccgacgagcacccgtggttccaggcgtcgcgctcggacccggacgggccgtacggcgacttctacgtctggtccgacaccgacgagaagtaccccgacgcccggatcatcttcgtcgacaccgagaagtcgaactggacctgggacccggtgcgcgggcagtactactggcaccggttcttctcccaccagcccgacctcaactacgacaacccggacgtccaggaggcgatgctggaggtcctgcgcttctggctcgacctcggcctcgacgggttccgcctggacgccgttccctacctgtacgtgcgcgagggcacgaacggggagaacctgccggagacgcacgagtacctgcgccgggtccgcaaggagatcgacgccaagtacgccgacagggtcatgctggccgaggcgaaccagtggccctcggacgtcgtccagtacttcggcaatgacgacgagtgccacatggccttccacttcccgctgatgccgcgcatcttcatggcggtgcggcgggagtcgcgctacccgatctcggagatcctggcgcagaccccggagatcccgccgaactgccagtggggcatcttcctgcgcaaccacgacgagctgaccctggagatggtcaccgacgaggagcgggactacatgtacgccgagtacgcgaaggacccgcgtatgaaggcgaacatcgggatccgccgacgcctcgccccgctgctggacaacagccgcgaccagatggagctgtttaccgccctgctgctctccctgcccggcagtcccgtgctctactacggcgacgagatcggtatgggcgacaacatctatctcggtgaccgcgacggcgtgcgcaccccgatgcagtggtccccggaccgcaacgccgggttctcgacaaccgacccggcccggctgtacctgccggtgatcatggacccggtgtacggctaccaggcgctgaacgtcgaggccgagcagcggatgccgacgtcgttcctgtcttggaccaggcggatgatcgaggtccgcaagcggcatcccgtcttcgggctcggcacctacgaggagctcggcgcgtcgaatccgtcggtcttcgcgtatgtccgggagttcggtgacgacagggtgctctgcgtcgcgaacctctcccggttcgcccagcccgtcgagcttgacctgcggagattcgccggcctggtgccggtggagctgctcggccgggtccatttcccaccggtcggcgagcttccgtacctgctgacactgcccggtcacggacactactggttcgctctgtccaatccgggggaattcactcagtag

SEQ ID NO: 13837 - protein, 572 aa, Frankia sp. EAN1pec
MNESEPFAEQPLRETAAEGGDTGTSQDPLWFKRAVFYEVLVRGFADSNGDGTGDLAGLVSKLDYLEWLGVDCLWLLPIYSSPLRDGGYDISDYFQILPEFGDLGDFINLVDEAHRRGLRIIADLVMNHTSDEHPWFQASRSDPDGPYGDFYVWSDTDEKYPDARIIFVDTEKSNWTWDPVRGQYYWHRFFSHQPDLNYDNPDVQEAMLEVLRFWLDLGLDGFRLDAVPYLYVREGTNGENLPETHEYLRRVRKEIDAKYADRVMLAEANQWPSDVVQYFGNDDECHMAFHFPLMPRIFMAVRRESRYPISEILAQTPEIPPNCQWGIFLRNHDELTLEMVTDEERDYMYAEYAKDPRMKANIGIRRRLAPLLDNSRDQMELFTALLLSLPGSPVLYYGDEIGMGDNIYLGDRDGVRTPMQWSPDRNAGFSTTDPARLYLPVIMDPVYGYQALNVEAEQRMPTSFLSWTRRMIEVRKRHPVFGLGTYEELGASNPSVFAYVREFGDDRVLCVANLSRFAQPVELDLRRFAGLVPVELLGRVHFPPVGELPYLLTLPGHGHYWFALSNPGEFTQ

SEQ ID NO: 13838 - DNA, 1761 bp, Moorella thermoacetica ATCC 39073
  CDS (1)..(1761): transl_table=11
ttgctccaccatcgcccgggaatccgtttctgccagcccctggcacccgaccggctcctcctgcgcttaaaaattggccgccgggaacagcaaagctgccaggtaatctatgaagaccggggccttaaaacggcccccatgcatgcctatgcccgaacaccccgttacctttattaccaggctgagatcagcctctcccgtccctggcgctgccgttattttttccggctgcgggaaggggatggggatgaccgctatatctttgccggtggtaccggccaacagggccgcccctttacctatcagtggaccccggcagatatctttaccgttcccgactggatctacgacgccgtttcctatcaaatatttcccgatcgcttttacaacggcaacccggccaacgacccgccgggaaccaggccctggagcgaagcccctaccagggaaaacttcttcggcggcgacctggagggtatccaggcgaagataccctatctaaagtttctgggggtcaatgtcctgtggctcaaccccatttttgccgcctcctccaaccatcgctataacacccgcgattacctggccgtggacccggccctgggagataccgataccctgcgccgcctggtggcatccctccatggcgccggcatacgcatcatcctggatggtgtcttcaaccatacggggaccgatttctttgcttttaaagacgtggtcgcccggggagccggttccccgtataaggactggtactacttctatgacttcccggtacggagtgaaccccgggccaattatgcctgctggtgggatatccccagcctgcccaagctcaacgtcagaaaccccgaggttcgtaattaccttcttcacgtggcgacctactggctgtgggatgccggtaccgacggctggcgccttgacgtgcccaatgagatcgagccgcccttctggcgggagttttaccagcaggttaaagggaccaatccggaagcctacattgtcggcgagatctggcgcgacgcccgtttctggctgaacggccgttactttgacggggtgatgaattacctcttccgggacctggtccttgcatacttcgcccggaggctttttcccatttccaccctggatatgctcctgggcctggtgcgcctgcgctaccctgaggcggccaatttcgccctgttaaacctcctgggcagccatgacacggcgcgaattatcaccgccttccaggaagggttggccggcgttcccggacactccggcagctacgccgaggccgtagcccacctgcgaccggccctcatcctgcagctcacctatcccggtgcgcccctgatctactacggcgacgaggtaggcctcaccggcggcccggaccccgactgccgccggaccatgccctgggaaccccgggactgggaccgggatctcctgaacttttaccggtgcctgataaggttgcggcaccagttgcggcctttgcgacggggatttttccagcccctttttaccgacgaccaggccgaggtctacgcctatgcccggcgcctggagggagagaaggtaattataattctcaatgccagcgacctcccccagacggttaccctggcggcagccgtcgcgggactggctgaggatagtacctggcgggacggcctgagcaaccgcctcctggaggtgaagggcggccagatcagcctgcccctggacgccaattccggggccgttctctaccaggagtaa

SEQ ID NO: 13839 - protein, 586 aa, Moorella thermoacetica ATCC 39073
MLHHRPGIRFCQPLAPDRLLLRLKIGRREQQSCQVIYEDRGLKTAPMHAYARTPRYLYYQAEISLSRPWRCRYFFRLREGDGDDRYIFAGGTGQQGRPFTYQWTPADIFTVPDWIYDAVSYQIFPDRFYNGNPANDPPGTRPWSEAPTRENFFGGDLEGIQAKIPYLKFLGVNVLWLNPIFAASSNHRYNTRDYLAVDPALGDTDTLRRLVASLHGAGIRIILDGVFNHTGTDFFAFKDVVARGAGSPYKDWYYFYDFPVRSEPRANYACWWDIPSLPKLNVRNPEVRNYLLHVATYWLWDAGTDGWRLDVPNEIEPPFWREFYQQVKGTNPEAYIVGEIWRDARFWLNGRYFDGVMNYLFRDLVLAYFARRLFPISTLDMLLGLVRLRYPEAANFALLNLLGSHDTARIITAFQEGLAGVPGHSGSYAEAVAHLRPALILQLTYPGAPLIYYGDEVGLTGGPDPDCRRTMPWEPRDWDRDLLNFYRCLIRLRHQLRPLRRGFFQPLFTDDQAEVYAYARRLEGEKVIIILNASDLPQTVTLAAAVAGLAEDSTWRDGLSNRLLEVKGGQISLPLDANSGAVLYQE

SEQ ID NO: 13840 - DNA, 1623 bp, Shewanella baltica OS155
  CDS (1)..(1623): transl_table=11
atgagtgagttaacttggtggcgtggtgcggtaatttaccaaatttatccgcgtagccttttagatacgaatggtgatggcgttggtgatttgcgtggcattatcactaagctggactacattgcgagcctcaatgtcgatgccatctggatttcacctttctttaaatcgcctatggcagattttggctacgacatcagtgattaccgcgaagttgaccctctttttggcactatgcatgatttcgatgaattgattgaaaaagcccacggcttaggcattaaggtcattatcgatcaagtattaagtcatacctctgatcagcatgcgtggtttgttgaaagccgcgagagccgtacgaatcccaaagcggattggtacgtgtgggccgatcctaaggaagacggcactgcgcctaacaactggctcgcgatttttggcggttgtgcttgggaatgggaaccgcgcagacaacaatactatttacataacttcctgcgtagccagcccgatatcaacttccataatcctgacgtgcgccaagctgtgctggataatgtcgagttctggcttaaaaaaggcgttgatggctttcgcttagatgcgattaccttctgttatcacgatgaacagctcagggacaatccggcaaaacctaaggataaacgtcagggccgaggtttcagcgaagataacccctacgcctatcaatatcattactacaataatgaccgtccgcaaactatcgcgtttatcgaagacttacgccaactcattaatcgttatcctggtgcggtgaccttaggtgaagtgtctgcagaagactctttagctgtgatggcggcttacactaagggtgaagatcgcctgcacatggcctacagttttgagctattaaccgacgattacagtgctgcttatattcgccaaaccgtagaagcattagaagcgagcataggtgatgggtggccttgttgggctatcggtaatcatgatgtgcagcgcgtggcgagtcgttgggggcagggcaaacagaattcagacatggtcaaaatactcaatgccatgctaagttcactgcgcggtagtgtgtgtagttatcaaggtgaagaacttggtttaaccgaagcgccgattgaataccatgagttgcaagatccctttggcaaaaccttctggcctatgtttaaaggccgtgatggttgccgtacgccaatgccatggcaacaaggcgccgattttagcggttttagtgaggtttcaccctggttgccgatcgcccctgcgcatcaagcgttagcggtggatgtacaagaatcagatgcagattccatgcttaacggttatcgacgttttcttgcttggcgtaaattacatccagtgttggttgaaggcgatatccaatttgtggataccaacgagcccatcttggccttcatccgcaccttaggagagctcaaaatattcgtcggattcaacttaggcgataccaatgttgagttggatttatcacagttggaattgggtgaaatattaacgggacacggcctgaaaatcgcacaaatagaaaacaatcagctgaagttttcggcatttgccagcttttatgcagttttaaactga

SEQ ID NO: 13841 - protein, 540 aa, Shewanella baltica OS155
MSELTWWRGAVIYQIYPRSLLDTNGDGVGDLRGIITKLDYIASLNVDAIWISPFFKSPMADFGYDISDYREVDPLFGTMHDFDELIEKAHGLGIKVIIDQVLSHTSDQHAWFVESRESRTNPKADWYVWADPKEDGTAPNNWLAIFGGCAWEWEPRRQQYYLHNFLRSQPDINFHNPDVRQAVLDNVEFWLKKGVDGFRLDAITFCYHDEQLRDNPAKPKDKRQGRGFSEDNPYAYQYHYYNNDRPQTIAFIEDLRQLINRYPGAVTLGEVSAEDSLAVMAAYTKGEDRLHMAYSFELLTDDYSAAYIRQTVEALEASIGDGWPCWAIGNHDVQRVASRWGQGKQNSDMVKILNAMLSSLRGSVCSYQGEELGLTEAPIEYHELQDPFGKTFWPMFKGRDGCRTPMPWQQGADFSGFSEVSPWLPIAPAHQALAVDVQESDADSMLNGYRRFLAWRKLHPVLVEGDIQFVDTNEPILAFIRTLGELKIFVGFNLGDTNVELDLSQLELGEILTGHGLKIAQIENNQLKFSAFASFYAVLN

SEQ ID NO: 13842 - DNA, 1635 bp, Shewanella amazonensis SB2B
  CDS (1)..(1635): transl_table=11
atgagcattcatccctggtggcgcggcgctgccatctatcagatttacccgcgcagtcttaaggacagtaacggcgatggtattggcgatctgcaagggatcatcgagcgtctggactatattgccagcctcaatgtggatgcgatttggatctcgcccttcttccgctctcccatgaaggactttggttacgatatcagtgactatcttgatgtggaccccatgtttggcaccatggacgactttgatgagcttattgccaaggcccattctctggggttgaaggtggttatcgatcaggtactcagccacacttccgacgaacatgcctggtttgccgagagccgccagagccgcgacaatccaaaggccgactggtatgtgtgggccgatccccgagaagacggtacccctcccaacaattggctggcgatattcggtggctgcgcctgggaatgggagccaagacgccagcagtattacctgcacaattttttgaagagccagccggatcttaactttcactgtgaagccgttcgtcaggcggtgctcaataacgtagagttctggctcaaaaagggcgtggatggtttccggctcgatgccattactttttgtttccacgataaggcgcttcgtgacaacccggcgaaaccggccgataagcgccagggccgaggtttttctgaagacaacccctacgcctatcagtatcactggtacaacaacgaacgtcccgaaacccttggttttatcgaagatttaagagcgctgattgatcgctacccgggtgccgtgaccctcggtgaagtctcaagcgaagactcccttgccaccatggccgaatacacccggggcgataaccgcctgcacatggcctacagctttgagcttttaaccaaggactacagcgctgggtatatccgcagcacagttgaagcactcgaaggtgccatcggtgacggctggccgtgctgggccataggcaaccacgatgtggagcgggtcatcagtcgatgggggcagggtaagggcacacctcaaatggccaagatgctgtcggccatgctgggatgcctgcggggcagcctgtgcgtgtatcagggcgaagagttggggcttaccgaagccgacatcccctttgatgcgctgcaggacccctttggtatcgcattctggcctaactttaaaggccgcgatggctgtcgtacccccatgccctggcaagccgaaggcgaatacatgggattcggtgcgacagcctctggtgccatgccctggttaccgctgccagaagaacatcgtgcactgaacgttgccgcccagagtgcgaacccggactcggtgctcaatcagttcagccgctttatggcatggcgccgcactcagccggctttggtaactggtgaaattaaatttattgatagcaaagagcccgttctggcgtttgaacgtgtgagctctgataaaaaagtgctttgtgtgttcaatttatctgataagccgcaaacgatgactgttcctggcagtgagccatggaagctccttgaaggccatgggcttgaaggtggtagtctggacggcgctggcactgttcgccttgcaccccacggggctctgttactgggcaactaa

SEQ ID NO: 13843 - protein, 544 aa, Shewanella amazonensis SB2B
MSIHPWWRGAAIYQIYPRSLKDSNGDGIGDLQGIIERLDYIASLNVDAIWISPFFRSPMKDFGYDISDYLDVDPMFGTMDDFDELIAKAHSLGLKVVIDQVLSHTSDEHAWFAESRQSRDNPKADWYVWADPREDGTPPNNWLAIFGGCAWEWEPRRQQYYLHNFLKSQPDLNFHCEAVRQAVLNNVEFWLKKGVDGFRLDAITFCFHDKALRDNPAKPADKRQGRGFSEDNPYAYQYHWYNNERPETLGFIEDLRALIDRYPGAVTLGEVSSEDSLATMAEYTRGDNRLHMAYSFELLTKDYSAGYIRSTVEALEGAIGDGWPCWAIGNHDVERVISRWGQGKGTPQMAKMLSAMLGCLRGSLCVYQGEELGLTEADIPFDALQDPFGIAFWPNFKGRDGCRTPMPWQAEGEYMGFGATASGAMPWLPLPEEHRALNVAAQSANPDSVLNQFSRFMAWRRTQPALVTGEIKFIDSKEPVLAFERVSSDKKVLCVFNLSDKPQTMTVPGSEPWKLLEGHGLEGGSLDGAGTVRLAPHGALLLGN

SEQ ID NO: 13844 - DNA, 3297 bp, Pelodictyon phaeoclathratiforme BU-1
  CDS (1)..(3297): transl_table=11
atgtatcaacccgaaccgctctggtacaaagacgccattatttatgaggcgcatgtcaagacgttctatgacagcaacaatgatggtgttggagattttcagggactgcgccagaagcttggttacctgcaaagtctcggtgttactgccatctggctgcttcccttttatccatcgcctttacgagatgatggttacgatattgccgattatatgagtgtcaatcccgattacgggacgatggaagatttccgggagtttattgaagaggcacactctcttggtataaaggtgattaccgagctggtcgtgaaccacacttccgaccaacatgcctggttccagcgtgcccggaaggctccggcaggctctccagagagaaacttctatgtctggagtgacgattccagcaaatattctgaagcccggattattttccaggacttcgaggcttcaaactggacatgggatccggttgccgggcaatatttctggcatcgcttctaccatcaccagcccgacctgaactttgaaaaccccgaagtacacaaggctctgctcggtgtgcttgatttctggcttggcatgggcgttgatggtctccgccttgatgctgttccctatctctatgaagaggaggggagtaactgcgaaaatttaccgaggacttatgagtatctgagggcgttgcgctcctatgtggatgagcactatcccaaccggatgctgcttgccgaagccaaccagtggcctgaagattctgcagcctattttggtaccggtgacctctgtcacatgaacttccactttcccctgatgccgcgcatgtatatggcgcttgctaccgaagatcgttttcccattctcgatattctggaacagacaccggaaattccggagatctgccagtgggcttcgttccttcgcaatcatgatgagctgacgcttgaaatggttactgacgaggagcgcgactacatgcgcagggtctatgccaacgatcccaaggcccgtatcaatcttggtatccgccgccgtcttgcaccgctcatggccaatgatcgccgcaagattgaactgatgaacatcatgctgctctcactgcccggaactccggtactctactacggtgacgaaattggcatgggcgataacttttatcttggtgatcgagatggagtacgtacacccatgcagtggaactctgaccgtaatgcagggttttcgcgtgccaatccccagcggctgcagctcccggtcatcatcgatccggaatatcattatgaggcggtcaacgtagaggtgcaggagagcaatgtcaactccctgctctggtggatgcgccataccatatcaactgctcatcgctacaaatcgctcagccgtggtaccattgagttcctgcaggtgagcaaccccaaagtgctgatttttattcgtcagttcgaggatgaaaccatgcttagtgtgatcaacctctcaagaaatgcccaggcggtgatgattgatctatcccgctttgacggctatatccctgaagaggtgttcagcatgaaccgttttccgaaaatcaggaaaattccctacatggtggccctgggatcctatggatatttctggttgcagttggtcaaggataccgaaaatacggatggtcgtccatacctcgacaaaccttttgcgacaccctctcgctggcaaagcctctttaccggcaaaagccgcgaacggcttgaaacagagattctgccccagtacttcaaggtaagccgctggtttggcggcaaggtgcgtcatatcatgcgtatctccatcgtcgataccattcctgtggcgggaatggcaaaagccaagttgctggttacggaagtgcgctattcaagtggtgagaatgaacgctatcaactcccggtatgcttttctccgctttccctggtttctctccaggatgataatttctacaagcgcgttattgcaagggtcgttattggcgatgaagagggttatctgtgcgacgccacctttgatgggcgtttcctgaaccatctctatcagcttgttaccggcaaggagagttggcagggtaaagagggcactgtttccggaatgaagtccatgaagatggatgctgttgcggaagagggaatggagcatgagcccctcctgatgggtgtcgaacaatcgaatacctcaattcgcttcaataatgatctctgcctgaagctctatcgccgcattgaaatcggaatctctcccgaagtggagatgtgccgtgcgctgagtgagcatacttcgttcaaaaacctgccgggctatcttggttcactgaactatgagcagagtcgcaccaacggctattctctcggtattttgcagcattttgtgaaaaacgaaggggatgcctggcagctttcgcttagtcaggtgaaacgctattatgatgatatccttgcaaaaatcaactccggcatggtattgcctgcgttgccgaaactcagtggtgatcccgtgcagcttcccgaaatcatgcatgaactgattggtgaagcctatcttggcatgcttgaaaagcttgcagaacggactgctgaaatgcacctctcccttgcttcgctcgacagcgatccggcatttgcgccagaggcttttactacactctatcagcgttctatctaccaggcgatgtgcgaacaggtgaagcgggcggttcttcttatccgtgaaatcatgcatcagatggctccggagcagcagcagcttgcatctctttttgtgcagaggcagaaacagattttgcagcagtttgatcccatcaggatagagaaaatcgatacactcaaaatcaggattcacggcgattttcatcttggccaggtactctttaccggcaaggattttgtgattatcgattttgagggagagcctgcccggcccctctccgaacggaaaatcaaacgttcggttttccgtgatatttcaggcatgttgcgctccttcgactatgcggcctttaatgtgctgcagcaggacaacaccctcttccgtccggaagagcggcttgcccttgagccttgggctgaccgctggagtttctatgctggccagtactttctcgacagctattttgcaaagaccggaggcagtaatattgttccggcagatccgaagcagcgtgaacatctgatgcgggcctatttgatgaacaaggcggtctacgaactcaattatgagctcaacaatcgtcctgactgggcctccataccgcttcggggtattatgaagattctggagtcgtaa

SEQ ID NO: 13845 - protein, 1098 aa, Pelodictyon phaeoclathratiforme BU-1
MYQPEPLWYKDAIIYEAHVKTFYDSNNDGVGDFQGLRQKLGYLQSLGVTAIWLLPFYPSPLRDDGYDIADYMSVNPDYGTMEDFREFIEEAHSLGIKVITELVVNHTSDQHAWFQRARKAPAGSPERNFYVWSDDSSKYSEARIIFQDFEASNWTWDPVAGQYFWHRFYHHQPDLNFENPEVHKALLGVLDFWLGMGVDGLRLDAVPYLYEEEGSNCENLPRTYEYLRALRSYVDEHYPNRMLLAEANQWPEDSAAYFGTGDLCHMNFHFPLMPRMYMALATEDRFPILDILEQTPEIPEICQWASFLRNHDELTLEMVTDEERDYMRRVYANDPKARINLGIRRRLAPLMANDRRKIELMNIMLLSLPGTPVLYYGDEIGMGDNFYLGDRDGVRTPMQWNSDRNAGFSRANPQRLQLPVIIDPEYHYEAVNVEVQESNVNSLLWWMRHTISTAHRYKSLSRGTIEFLQVSNPKVLIFIRQFEDETMLSVINLSRNAQAVMIDLSRFDGYIPEEVFSMNRFPKIRKIPYMVALGSYGYFWLQLVKDTENTDGRPYLDKPFATPSRWQSLFTGKSRERLETEILPQYFKVSRWFGGKVRHIMRISIVDTIPVAGMAKAKLLVTEVRYSSGENERYQLPVCFSPLSLVSLQDDNFYKRVIARVVIGDEEGYLCDATFDGRFLNHLYQLVTGKESWQGKEGTVSGMKSMKMDAVAEEGMEHEPLLMGVEQSNTSIRFNNDLCLKLYRRIEIGISPEVEMCRALSEHTSFKNLPGYLGSLNYEQSRTNGYSLGILQHFVKNEGDAWQLSLSQVKRYYDDILAKINSGMVLPALPKLSGDPVQLPEIMHELIGEAYLGMLEKLAERTAEMHLSLASLDSDPAFAPEAFTTLYQRSIYQAMCEQVKRAVLLIREIMHQMAPEQQQLASLFVQRQKQILQQFDPIRIEKIDTLKIRIHGDFHLGQVLFTGKDFVIIDFEGEPARPLSERKIKRSVFRDISGMLRSFDYAAFNVLQQDNTLFRPEERLALEPWADRWSFYAGQYFLDSYFAKTGGSNIVPADPKQREHLMRAYLMNKAVYELNYELNNRPDWASIPLRGIMKILES

SEQ ID NO: 13846 - DNA, 3414 bp, Prosthecochloris aestuarii DSM 271
  CDS (1)..(3414): transl_table=11
atggcgaatggaattttgtttcgctcaatcccgcatcgactccggcacatatttttaacgttcttcttcattcataattatttttatcgggattttatgccgaaaacacgcacaaccggccagcctgagccgcaatggtacaaggatgccatcatttatgaagcgcatgtcaaaacattttttgacagcaacaatgacggtgtcggtgattttgaggggcttcgtcagaagctgccctatcttgaaagtcttggtattacggcgatctggctgttgccgttttatccttctccgctgagagatgatgggtatgatattgccgattatatggatatcaatcccgattacggtacgatcgacgactttagagcatttctcaatgaagcgcatgagcgcgggctgaaagttattaccgagctggttatcaaccatacctccgatcagcatgcatggtttcagagggcccgtcgtgcagaacagggctccgacgagcgcaatttctatgtgtggactgacgatccgaaaaagtattcggaaacacggattattttccaggacttcgagtcgtcaaactggacttgggacccgatcgccggacagtatttctggcatcgtttctaccaccatcagcccgatcttaattttgagaacccctcggttgaaaaggcgctctacaaggtgcttgactactggctggagatgggtgtggacgggttgcgccttgacgctgtaccgtatttgtacgaggaagagggctccaactgcgagaacctgccgcgtacgcatgagtttttgaagcgtcttcgcaagcatgtcgacgacaagttccctaaccggatgctgcttgccgaggcaaaccagtggcctgaagatgctgccgagtatttcggggatggcgacgagtgccatatgaattttcattttccgctcatgccgaggatgtatatggccctggaaatggaggaccgttttccgatcatcgatattctcgaccagacgcccgagattgccgaaacctgccagtgggcttcgttcctgcgtaaccacgatgagcttaccctcgaaatggtgaccgatgaggagcgcgactacatgaggcgggtctacgctcatgatccgaaggcaaggatcaatctcggtatccgccgcagacttgcgcccctgatgtcgaacgaccggcgcaagatcgaactgatgaacatcatgctgctttccttgccgggaacaccggtactctattacggtgacgagatcggcatgggggataacttctaccttggagaccgtgatggtgtgcggacccccatgcagtggaacggggaccgcaatgccggtttttcgcgggccaatccgcaacagctgcagctgcccgttattatcgaccccgagtatcactacgaggcaaccaatgtcgaggtgcaggacagcaacatcaactctcttctgtggtggactcgtcacatgctctcaacctcgcgccgttacaaggcgctgagccgtggagatatacgctttatcgcatgtcagaatccccagatcctgattttcagcaggacttttgaggatgaaacgatgctttgtatcatcaacctttcccgtaacgcccaggcggccacggtcgatctgtcggagtatgagggccatactcccgaggaggtgttcagtctcagccacttcccaggcattacgtcgaggccctatacggtaacgcttggcccgtacggttatttctggttcaagctcatcaggaccgaagaggagatcggctcacgccgctatgttgacaagccctttgctcaggttgcttctctgaaggaccttttcgccggtaaagccctcgaacgtcttgaaacgaaagttcttcctgaatatatcagggggtgcaggtggttcggtggcaaagcgcgcaagattgtcagagtgagtgtcgaagagcatattcctgtgacggcatgcgacaacacggtctacatgattgtcgaagtacgttatcccagcgggtcgaacgatacctatcagcttccggtgacgtttctcccggctggagagttcaatcctgatgatgactactttctcaagcaggtcgtctgcagcgtaaaaataggtgatgaggagggttatctctgcgattcggcttatcagaaatcgttccacagcttcctgctcgataccattgtcagcagtaaggggctgaaaggatcgaccggtaaactgacgggtgaaaagggttcccgtgttgaagagtttcttgaaacccaagacgatggagagatgaattccgtgcttttcggggccgagcagagcaatacgtcgatcatgtatggcgacaggctttgcctgaagatctatcgtaagatctcttcaggggtttctcctgaggtggagatctgccgtatgctgacagaaaagacatcgttcgaaagttcgcccgcgtatcttggtgcccttcattttacccggagccgtaaagaccagtgctccctcgggattctgcagaatttcattccgaacgagggtgatgcatggagccagacgctgcatttcgtgcatcgttattacgaagatgtgctcgtcatgctgccgcagatttcagaggtacccgtcctcccatctaccggaggagagtctgtcgaaatgccggaaattattcatggccttatcggagaaccttacctcgagatggtgtcgagactggctgaaaggactgccggaatgcaccttgcactggcctcaccggaccttggtcaggactttatcccggaacccttcaccacgctttaccagcgttcgatctatcagtccatgagggagcaggtgaagcgcggcatggtgcttctgcgcgagcagatgggaggtgtcgctgaagagtaccaggggttggctgccgggcttttgaagcgcgaaggggagatcctcgaacaactgtcgcatatcaaagcccgcaagatcgccgcgtccaagatccggatccatggcgattatcatctcggtcaggtactgtggaccggtaaggactttgtgattatcgattttgagggcgagcctgcccgatcgttgagcgaacggcgtatcaagcgttcagcgttccgtgatcttgcaggtatgatgcgttccttccattatgcggcattcaacgtgctgattcaggatcgttcgatcaggcaggaagatgttgaacgacttgagccgtgggctgaactgtggagcttctataccgggcagcacttcttcgatgtctacgaagatgccgtcaggggacaggggctcattcctgaagatgttaaggagcagcatctgcttcttcgcgcttatcttatggataaggcgatttatgagttgaactatgagctgaacaaccgtcctgaatgggtcgggattgcgctcaagggtctcagcaggctgctcgagttgtag

SEQ ID NO: 13847 - protein, 1137 aa, Prosthecochloris aestuarii DSM 271
MANGILFRSIPHRLRHIFLTFFFIHNYFYRDFMPKTRTTGQPEPQWYKDAIIYEAHVKTFFDSNNDGVGDFEGLRQKLPYLESLGITAIWLLPFYPSPLRDDGYDIADYMDINPDYGTIDDFRAFLNEAHERGLKVITELVINHTSDQHAWFQRARRAEQGSDERNFYVWTDDPKKYSETRIIFQDFESSNWTWDPIAGQYFWHRFYHHQPDLNFENPSVEKALYKVLDYWLEMGVDGLRLDAVPYLYEEEGSNCENLPRTHEFLKRLRKHVDDKFPNRMLLAEANQWPEDAAEYFGDGDECHMNFHFPLMPRMYMALEMEDRFPIIDILDQTPEIAETCQWASFLRNHDELTLEMVTDEERDYMRRVYAHDPKARINLGIRRRLAPLMSNDRRKIELMNIMLLSLPGTPVLYYGDEIGMGDNFYLGDRDGVRTPMQWNGDRNAGFSRANPQQLQLPVIIDPEYHYEATNVEVQDSNINSLLWWTRHMLSTSRRYKALSRGDIRFIACQNPQILIFSRTFEDETMLCIINLSRNAQAATVDLSEYEGHTPEEVFSLSHFPGITSRPYTVTLGPYGYFWFKLIRTEEEIGSRRYVDKPFAQVASLKDLFAGKALERLETKVLPEYIRGCRWFGGKARKIVRVSVEEHIPVTACDNTVYMIVEVRYPSGSNDTYQLPVTFLPAGEFNPDDDYFLKQVVCSVKIGDEEGYLCDSAYQKSFHSFLLDTIVSSKGLKGSTGKLTGEKGSRVEEFLETQDDGEMNSVLFGAEQSNTSIMYGDRLCLKIYRKISSGVSPEVEICRMLTEKTSFESSPAYLGALHFTRSRKDQCSLGILQNFIPNEGDAWSQTLHFVHRYYEDVLVMLPQISEVPVLPSTGGESVEMPEIIHGLIGEPYLEMVSRLAERTAGMHLALASPDLGQDFIPEPFTTLYQRSIYQSMREQVKRGMVLLREQMGGVAEEYQGLAAGLLKREGEILEQLSHIKARKIAASKIRIHGDYHLGQVLWTGKDFVIIDFEGEPARSLSERRIKRSAFRDLAGMMRSFHYAAFNVLIQDRSIRQEDVERLEPWAELWSFYTGQHFFDVYEDAVRGQGLIPEDVKEQHLLLRAYLMDKAIYELNYELNNRPEWVGIALKGLSRLLEL

SEQ ID NO: 13848 - DNA, 1593 bp, Rubrobacter xylanophilus DSM 9941
  CDS (1)..(1593): transl_table=11
gtgacggagagaagagggcacctgtggtggcagcgcggggtggtctaccacatctacccccgcagcttcgccgacgcgagcggcgacggggtgggcgacctcgagggcatcgcctcccgcctggactacctggagtggctcggggtcgacgccatctggctctcccccttctacccctcccccatggcggacttcggctacgacatctccgaccactgcgccgtggaccccctcttcggcacgctcgcggacttcgacgagctggtcgcggagacgcaccggaggggcatgcgcctcatcgtcgactacgtccccaaccacacctcggacgagcacccgtggtttttggagtcccgcgcctcgcgcgagagcccgaggcgcgactggtacatctgggccgacccgaagcccgacggctcgccgcccaacaactggcggagcgtcttcgggggttctgcgtgggagtgggacgagagaacggggcagtactactaccacgccttccaccgcaagcagccggacctcaactggcgcaaccccgcggtgagggaggcgatgcacggggtgatgcgcttctggctggagaggggcgtggacggcttccgggtggacgccctgcgccacctcgtaaaagacgagaagctccgggacaacccgcccaacccggcctacgaggagggtcggccctcctacgaggcccatctccccgtctacaccaccgaccgcccggaggtgcaccggatgatctccgggatgcgccgcgtcctcgacggctgcggcggggagcgggtgatgatcggcgagctctacctgccgttcgacaggctcgtgctctactacggggagggggggcgcggggtccacctgccgacgaacatgcacctcatcacgacgccctggagcgccccctccctcgccgccctcatctccgagtacgaggcggccctccccccgcacggctggcccaactgggtcctgagcaaccacgacaacccccgcgtcgccacccgggtcggcccggagagggcgcgggcggccgccgtgctgctcctcaccctgcgcgggacccccacggtctactacggcgacgagatcggcatggtcgacgggaagatcccgccggagcgtctccgcgacccggccggctcgcagaacccgcgcctcagccgcgacccggcccgcaccccgatgcagtgggacgcctccccgaacgccgggttctgcccgccggacgccgagccctggctcccgctctcccccgaccgccgccaccgcaacgtcgccgcgcagagggagagccggggctccctcctctgcctctaccgcaggctcctgcgcctccgccgctcggagcccgccctctccgtgggctcctacgagccgctcgaggccgggggctccctgctggcctacgcccgcagccacgccgggcgccgcctcctcgtcgccctgaacctgggcgaggcccccgagcccctgccgccggtcctccgggggcgcgtcctgctctccacctctcccgggcaggagggcggagacctccgcccccccgcccggctcggccccggcgaggccctcgtcgtggcgccctag

SEQ ID NO: 13849 - protein, 530 aa, Rubrobacter xylanophilus DSM 9941
MTERRGHLWWQRGVVYHIYPRSFADASGDGVGDLEGIASRLDYLEWLGVDAIWLSPFYPSPMADFGYDISDHCAVDPLFGTLADFDELVAETHRRGMRLIVDYVPNHTSDEHPWFLESRASRESPRRDWYIWADPKPDGSPPNNWRSVFGGSAWEWDERTGQYYYHAFHRKQPDLNWRNPAVREAMHGVMRFWLERGVDGFRVDALRHLVKDEKLRDNPPNPAYEEGRPSYEAHLPVYTTDRPEVHRMISGMRRVLDGCGGERVMIGELYLPFDRLVLYYGEGGRGVHLPTNMHLITTPWSAPSLAALISEYEAALPPHGWPNWVLSNHDNPRVATRVGPERARAAAVLLLTLRGTPTVYYGDEIGMVDGKIPPERLRDPAGSQNPRLSRDPARTPMQWDASPNAGFCPPDAEPWLPLSPDRRHRNVAAQRESRGSLLCLYRRLLRLRRSEPALSVGSYEPLEAGGSLLAYARSHAGRRLLVALNLGEAPEPLPPVLRGRVLLSTSPGQEGGDLRPPARLGPGEALVVAP

SEQ ID NO: 13850 - DNA, 5328 bp, Rubrobacter xylanophilus DSM 9941
  CDS (1)..(5328): transl_table=11
ttgcgagagcgacggaggcccggaggtgcccagacccagacccccgatcatcatagaggacgtctacccggagctggactgcggccgctaccccatcaagcgggaggtcggcgaccggctggaggtgtgggccgacatcttcaaggacgggcacgatgccgtctcggcggtcgtccggtaccgggagaggggggcgcgccgctggtccgaggtgcccatgcgccaccacgagaacgaccgctggaccgcgagcttcccgctcaccaggaacacgcgctaccagtacaccatcgaggcctggccggacgagttcgagacctggcgctccgaggtggggaagaagctcgaggccgggcagcgggtggaggtggagctgctggaggggcgcgagatcctcgagcgggcctactcgcgctcgaaggacgggcgcctccggcagacgctcgacgccttcgacgccgccgggtacgaggggcggctcgcgctgctgcgctccgaggaggtgcgcgggctgatgcgcgagcaccccgaccgctcgctcgcgaccgcctacggcaagaccctcgaggtggtggtggaccgggtgcgggcccgctacggggcctggtacgagatgttcccccgctcgcaggggagcgtcccgggcaggagcgccaccttccgggaggccgaggggcggctggacgagctctcgtggatgggcttcgacgtggtgtacctcacgcccatccaccccatcgggaagaccaaccgcaaggggcgcaacaacgccctcgtggccgggcccggcgacccgggcagcccctacgccatcgggagcgaggagggcgggcacaaggccgtccaccccgagctcgggacgctggaggacttccggcgcttcgttgcggccgcccgcgagcgcgggatggaggtcgcgctcgacctcgccctgcagtgctcgcccgaccacccctacctcagggagcaccccgggtggttcaggcggcggcccgacggcaccataaagtacgccgagaacccgcccaaaaagtacgaggacatcgtcaacgtggacttctactgcgaggagtgggaggctctctggcgggagtggctggaggtcatcctgttctgggtggggcagggcgtcaggatcttccgggtggacaacccgcacaccaagcccttccccttctgggagtgggtgataggggaggtgcagcgggagcaccccgacgtcatcttcctctccgaggccttcacccggcccaaggtgatgcgcgctctggccaagctcggcttcacccagtcctacacctacttcacctggcgcaacaccaagcaggagctcaccgagtacctcaccgagctcaccatggactggcccaaggagtacatgcgccccaacttcttcgccaacacccacgacatcctcccgcacatcctgcagttcggggggcggcccgccttcatgatgcggctggtgctcgcggccaccctctcccccagctacggcatctacagcgggtacgagctgtgcgagaacaccccgcgcggggagcggggcaccaccgtctactaccaggactccgaggtctacgagtacaaggtctgggactgggacaggcccgggaacataaagggctacatccggagggtgaacgagatccggcgcgagaaccccgcgctgcaggagctgaccaacctctccttcctccccgccccggacgacaacatcatcttctacggcaagaggagcggggagaacgccgtcttcgtggcggtcaacctggacccgcacaacccccacgacacccacgtgcagttcccgctgtgggagctcggcatcggggaggaggagccctacgtggtcgaggagctcatcacccgccgcgagatcccggcccgcggcagctggttctgggtgcggctcgacccccaccagaacccggccgagatcttccgcctcaggagggcgggatgacccagacggcccgcaggggggcggcgcgccgggaggaggcctaccgggaggacccgctctggtacaaggacgccatcatctaccagctgcacgtaaaggccttcttcgactcggacaacgacggcatcggggacttcaggggcctgacgcagcggctggagtacataaaagacctcggggtcaacgccatctggctcatgcccttctacccctccccgatgcgcgacgacggctacgacatctccgagtacaagaacgtccaccccgagtacggcacccgccgcgacttccgcaacttcgtgcgccgggcgcacgccctgggcctcaaggtcataaccgagctggtcataaaccacacctccgatgcgcacccctggttccagcgggccagaaaggcgcccaggaactccgtctggcgcaacttctacgtctggagcgacaccgacaagaagtacgccgacgcccggatcatcttcaccgacaccgagacctccaactggacctgggacccggtcgcccagcagtactactggcaccggttcttcagccaccagccggacctcaaccacgacaacccccgggtcttcgacgccatcatgcgggtgatgcgcttctggctggacgccggggtggacgggctgaggctggacgccatcccctacctcatagagcgcgaggggaccgactgcgagaacctcccggagacccacgagatcctcaggcggatgagggccgagctggacgcccgctaccagaacaggatcttcctggccgaggccaaccagtggccggaggacgtgctgccgtacttcgggaagggcgacgagtgccacatggccttccacttccccctgatgcccaggatctacatggccgtggcgcaggaggaccggcaccccatcgtggagatcatgcagcagaccccggagatccccgaggtctgccagtgggccatcttcctcagaaaccacgacgagctgacgctggagatggtcaccgaccgcgagcgggactacatgtaccagacctacgccgccgacccccgcgcccggataaacctgggcatccggcgccggctcgcccccctcatggagaacgaccgggcccgcatagagctgctcaacagcctgctcatgagcatgcccggcacccccatcatctactacggggacgagatcgggatgggggacaacgtcttcctcggggaccgcaacgcggtgcgcacgcccatgcagtggacctccgaccgcaacgcgggcttctcccgggccgacccccacagcctctacctgcccccgatcatggacccggtctacggctacgaggccctcaacgtggaggcccagagccgcagcccgggctcgctgctgaactggatgaagcggatcatcgcggtgcgcaaggcccacaaggccttcgggcgggggacgctggagttcttgcaccccggcaaccggaaggtgctggcctatttgcgggagtacggggacgagacgatcctctgcgtggccaacctctcccgctccgcccagccggtggagctggacctctcccggttcagcgggcgggtgccggtcgagatgatcggggggagcagcttcccgcccatcggctcgctgccgtacttcctcaccctccccgggcacagcttctactggttcaacctcaccaccgaggccgaggccccgagctggcaccaggagagcccccgcttcttcgagccgccggtggtggtgctgcccgccggccgccagacggcccgggacatccgccggctgccgctgcgcctgcagcaccgccaggtggcgcagctggagcaggaggcgctgccggccttcctgagcgtccggcggtggttcgcggcgaagggcagcgagatagagcgggtgagcctcctcgcccgggcggagttcggcccggaccgcctgctggcgctgctgcgggtgggggccgggggcgccgaacacacctacttcctgccgctcgccgccgcctgggaggacgaggacggcgagcgggtctcgggcctcatgccgcacgccctggccaagatccggcgccgctaccgggtcggcgtcctcttcgacgcgctcgcggacgagggcttctgccgggaggtggtcgccgcgatggccggggggcgggagctggagatgggggaggggcgggtgcgcttctacgccaccggcgccctcgaggagctgctggcgggggagccggtgggggagctcgcggtccggcgggcctcggtggagcagagcaacacctcggtgatcctgggcgagcggctggtgctgaaggcctaccgccggctgcagccgggcgtcaacccggagctggagatcgggcgctacctcaccgaggtgcggcgcttcccgaacaccccgccgctcgcgggggccgtggagtacgaggacccgcgctcggggacggtctccctggccctcctgcagggcttcgtccccagccagggcgacggctggtcctacgtgctgggctacctggaccgctacctggagcggcgcctgctctccgcctcctggagcccggaggaggagggcccggcggagccccccgggcaggagggtcaggaggccgacgagggctttttcatggagctgatgcggaccctcggggtgcgcaccggcgagctgcacgctgccctggccgcccccaccgacgacccctccttctcccccgagcccgccccgcccgcggaggtctcccgctgggtcgaggccgtgctggacgacctgcggctcaccctgagcctcctggagcgccgccggtccgggctgccagaggaggtgcgccccgaggtggaccgcctgctccggatggaggcccgggccttcgaccggctggaggcgatctccgcccgggggatacgggccgtgaagacccgccaccacggggactaccacctcgggcaggtgctcgtcgccgggaacgacttccagatcatagacttcgagggcgagcccgcccgcaccctggaggagcgccgccgcaagcactcccctctgcgcgacgtggccggcatgctccgctccttcgactacgccgcccagaccgccctgatgaacctgggggccgaccgggccgtcggggaggacccggagcccgtggtgcgccgctgggagcggagcgtgcgggaggccttcctcgggggctacgccgagggcgtgcggggcgccggggtcctcccgggggagggcgaggaggccgccgccctcgtcgagcttttcgccctggagaaggcgctctacgagatccgctacgagctggacaaccgcccggactggatcgggataccggtccggggcgtcctggaccttctgacgagggaggagagcccgtga

SEQ ID NO: 13851 - protein, 1775 aa, Rubrobacter xylanophilus DSM 9941
MRERRRPGGAQTQTPDHHRGRLPGAGLRPLPHQAGGRRPAGGVGRHLQGRARCRLGGRPVPGEGGAPLVRGAHAPPRERPLDRELPAHQEHALPVHHRGLAGRVRDLALRGGEEARGRAAGGGGAAGGARDPRAGLLALEGRAPPADARRLRRRRVRGAARAAALRGGARADARAPRPLARDRLRQDPRGGGGPGAGPLRGLVRDVPPLAGERPGQERHLPGGRGAAGRALVDGLRRGVPHAHPPHREDQPQGAQQRPRGRARRPGQPLRHRERGGRAQGRPPRARDAGGLPALRCGRPRARDGGRARPRPAVLARPPLPQGAPRVVQAAARRHHKVRREPAQKVRGHRQRGLLLRGVGGSLAGVAGGHPVLGGAGRQDLPGGQPAHQALPLLGVGDRGGAAGAPRRHLPLRGLHPAQGDARSGQARLHPVLHLLHLAQHQAGAHRVPHRAHHGLAQGVHAPQLLRQHPRHPPAHPAVRGAARLHDAAGARGHPLPQLRHLQRVRAVREHPARGAGHHRLLPGLRGLRVQGLGLGQAREHKGLHPEGERDPAREPRAAGADQPLLPPRPGRQHHLLRQEERGERRLRGGQPGPAQPPRHPRAVPAVGARHRGGGALRGRGAHHPPRDPGPRQLVLGAARPPPEPGRDLPPQEGGMTQTARRGAARREEAYREDPLWYKDAIIYQLHVKAFFDSDNDGIGDFRGLTQRLEYIKDLGVNAIWLMPFYPSPMRDDGYDISEYKNVHPEYGTRRDFRNFVRRAHALGLKVITELVINHTSDAHPWFQRARKAPRNSVWRNFYVWSDTDKKYADARIIFTDTETSNWTWDPVAQQYYWHRFFSHQPDLNHDNPRVFDAIMRVMRFWLDAGVDGLRLDAIPYLIEREGTDCENLPETHEILRRMRAELDARYQNRIFLAEANQWPEDVLPYFGKGDECHMAFHFPLMPRIYMAVAQEDRHPIVEIMQQTPEIPEVCQWAIFLRNHDELTLEMVTDRERDYMYQTYAADPRARINLGIRRRLAPLMENDRARIELLNSLLMSMPGTPIIYYGDEIGMGDNVFLGDRNAVRTPMQWTSDRNAGFSRADPHSLYLPPIMDPVYGYEALNVEAQSRSPGSLLNWMKRIIAVRKAHKAFGRGTLEFLHPGNRKVLAYLREYGDETILCVANLSRSAQPVELDLSRFSGRVPVEMIGGSSFPPIGSLPYFLTLPGHSFYWFNLTTEAEAPSWHQESPRFFEPPVVVLPAGRQTARDIRRLPLRLQHRQVAQLEQEALPAFLSVRRWFAAKGSEIERVSLLARAEFGPDRLLALLRVGAGGAEHTYFLPLAAAWEDEDGERVSGLMPHALAKIRRRYRVGVLFDALADEGFCREVVAAMAGGRELEMGEGRVRFYATGALEELLAGEPVGELAVRRASVEQSNTSVILGERLVLKAYRRLQPGVNPELEIGRYLTEVRRFPNTPPLAGAVEYEDPRSGTVSLALLQGFVPSQGDGWSYVLGYLDRYLERRLLSASWSPEEEGPAEPPGQEGQEADEGFFMELMRTLGVRTGELHAALAAPTDDPSFSPEPAPPAEVSRWVEAVLDDLRLTLSLLERRRSGLPEEVRPEVDRLLRMEARAFDRLEAISARGIRAVKTRHHGDYHLGQVLVAGNDFQIIDFEGEPARTLEERRRKHSPLRDVAGMLRSFDYAAQTALMNLGADRAVGEDPEPVVRRWERSVREAFLGGYAEGVRGAGVLPGEGEEAAALVELFALEKALYEIRYELDNRPDWIGIPVRGVLDLLTREESP

SEQ ID NO: 13852 - DNA, 1755 bp, Mesorhizobium sp. BNC1
  CDS (1)..(1755): transl_table=11
gtgcttttttttatcagctcagcgcagctctccagcaaccttcgccattcgccgatttgcgcagcggaacataagcgacttgcgtgtgttcaccgcgtcatggggaacccaggaccagcgcggaaggagctcatgaaaggcacaagccctgacgttgaggtgcactcatcgcaagagccatggtggcggcgcggcgtcatctaccaaatctatccgcgctcctttcaggacagcaatggcgacggcatcggcgacatccgcggcatcatagatcgcctggactacctcgtctggctcgggatagatgccgtctggatttcgccgatcttcttctcgccaatggccgatttcggctatgacatcgcggattatcgcaagatcgaccctcttttcggtacgctcacggatttcgaccagctcattgaagccgcgcatcggcgtggaattcggatattgctcgactatgtgccgaaccactcctcagaccgtcatcaatggtttctggaggcgcgcagctcccgcgataatcctcggcgcgatttctacatatggcgggatgcggcgccggacgggggaccgccaaacaactggcaaagcgaattcggcggcagcgcatgggaactggatgccgcaaccggccaatattactaccatgccttcctgaaagagcagcccgatctaaactggcgcaatccagaagtgcgccgtgaaatgtacgacgtgctccgcttctggctggaccggggcgtcgacggttttcgcgtcgatgtcatgtggcatctcatcaaggacgcggagtttcgcgacaatccgcagaaccccgactggaccgaagacatgccgccgcacaagtcggtgctttcgatctattcctgcgatcaggaggaggtgcacgacgtagtctccgaaatgcgcgccgtgctggacgaatacgggggcgaccggctgcttatcggagaaatatatctgccgattgcccggctcgtcgcctattatggccgggatcttcgcggtgcgcacctgccgttcaatttccgccttattgaggcgcaatgggacgctcgccacatcgagcggcagattgtcgaatacgaggccgctctgccggagggcggctggccgaactgggttttgagcaatcacgataagccgcgtatcgcctcccgtgtcggccgggaccaggcgcgtgttgccgccatgatgctacttacgttgcgcggcacgccaaccatctattatggcgacgagatcgggatgaacgacgctcccattccgcctgagcgcgtgcaggacccgttcgagctgcgcgttcccggacgcggtttcgggcgtgatccccaacgcacgcctatgcagtgggacaatacggtgaatgcaggcttcagcaccggctcgccttggcttcctcttgccccggacaaggacagcttcaatgtggaggcggaacgcagcgatccgcactcaatgctgtcgctctatcgcaggctgattgcattccggcgagaaaatgatgcgctgaaccttggccgttacgcctccgtcgaggcagacagctgcgtgctcgcttacctccgggagacggagaatgatcgctatttgattgcacttaatctcgggcccgagccggcggtgctggaaacacccgggcaatgccggattgtgatcagcacggaaggcaaggcggaaggcgagattgtcgaggaaaagctccacctgcaaggcaatgagggcgtgctggcggagatgatgagttag

SEQ ID NO: 13853 - protein, 584 aa, Mesorhizobium sp. BNC1
MLFFISSAQLSSNLRHSPICAAEHKRLACVHRVMGNPGPARKELMKGTSPDVEVHSSQEPWWRRGVIYQIYPRSFQDSNGDGIGDIRGIIDRLDYLVWLGIDAVWISPIFFSPMADFGYDIADYRKIDPLFGTLTDFDQLIEAAHRRGIRILLDYVPNHSSDRHQWFLEARSSRDNPRRDFYIWRDAAPDGGPPNNWQSEFGGSAWELDAATGQYYYHAFLKEQPDLNWRNPEVRREMYDVLRFWLDRGVDGFRVDVMWHLIKDAEFRDNPQNPDWTEDMPPHKSVLSIYSCDQEEVHDVVSEMRAVLDEYGGDRLLIGEIYLPIARLVAYYGRDLRGAHLPFNFRLIEAQWDARHIERQIVEYEAALPEGGWPNWVLSNHDKPRIASRVGRDQARVAAMMLLTLRGTPTIYYGDEIGMNDAPIPPERVQDPFELRVPGRGFGRDPQRTPMQWDNTVNAGFSTGSPWLPLAPDKDSFNVEAERSDPHSMLSLYRRLIAFRRENDALNLGRYASVEADSCVLAYLRETENDRYLIALNLGPEPAVLETPGQCRIVISTEGKAEGEIVEEKLHLQGNEGVLAEMMS

SEQ ID NO: 13854 - DNA, 3348 bp, Mesorhizobium sp. BNC1
  CDS (1)..(3348): transl_table=11
atgaacacgatggaaaaggtcgcctcggaactcatgtctccagaagaggccgaagctgtccaggtcgtgccgcctgccggcccgcggccgcccgattggtataaggacgcggtcatctatcagctccacatcaaggccttccacgattccaatggcgatggaatgggggatttcaatggcctgatgcagcggctcgattatgtcgaacggctgggcgtcaacaccatatggcttctgccgttctatccctcaccgctccgggatgacggttacgacatcgcggattaccgctccatcaatccttcctacggcaccatgcgcgattttcgccgcttcgtggccgaagcgcaccggcgcggcatccgggtgatcacggaactggtcatcaaccacacctccgaccagcatccctggttccagcgggcaaggcacgccaagaagggttccgccgcgcggcaattctatgtctggaacgacgatgacgagcgctatcccgagacacgcatcatcttcctcgatacggaaaaatccaactggacctgggatccggtcgccggccaattcttctggcaccgcttctattcgcaccagccggatctcaattttgataatccccgggtgctcgacgctgtcatcaggatcatgcgtttctggctggatatgggggtggacgggctgaggctcgacgcgattccgtatctcgtcgagcgcgacgggacgaacaacgagaacctgcccgagacgcatgagatcctgaagaaaatacgaaaggcgctggacgagaaatatcccgaccggatgctgcttgccgaagccaatcagtggccggaggacacgcgcccctatttcggcgagggggacgagtgccatatggctttccacttcccgctaatgccgcgcatctatatggcgctggcgcaggaagaccggcatccgatctccgatatcatgcggcagacgccggaaatcccggaatcatgccaatgggcgattttcctgcgcaaccacgacgaactgacgcttgaaatggtgaccgaccgcgagcgcgactacctttggcgcacctatgcggaggacgtgcgggcgcgcatcaatctcggcatccgccgccggcttgcgccgctgatgcagaacgaccggcgcaagatcgagctgatgaatgcgctgctcttctccatgcctggcacgccgatcgtctattatggcgacgagctcggcatgggcgacaatatctatctcggcgaccgggacggggtgcgcacacccatgcagtgggcgcccgaccgcaatggcggcttctcacgcgccaacccgcaaatgctttacctgccgcccatcatggacccggtctacggttaccagaccatcaatgtggaggcgcaggaggcagatccatcgtcgcttctcaactgggtgcggcgtgtgatcggcgtgcgcaagcaacactcggccttcggacgtggcgatttcaccatgctctatccgagaaaccgccgcatccttgcctatacgcgcagcgatgcaaacgagacgatcctgtgcgtggccaatctctcgcgctcgcctcaggcagtggaactggatctttcgaaataccgcaattgcgtgccgatcgaacttgtcagccagtcgccattcccgccgatcggcgatctgccctacatgcttacgctgacgggttacggtaccttctggttcgtgctcgcgagcgaggcgcaggcgcccgaatggcacaacaatgtgccggagcctttgcctgaattcataacgcttaccatggtggacgggcgcatcgagcgcgcgctggaagggcgcgagcggcggcagctcgaacaggatgttctgccgcaattcatgcagcgccaacgctggtatggcgccaagggcgaggggatacgctccgccgggataagtgatatcgccaaactgggtgatgaaggggggcttctcaccatcgtggatgtcgatctgtccgtctcgggcaggcagcgctacctcctgccgcttaccgtcctctggggcgaagaaaacgtgcagttcggggcgcccaaactttccgtaacgctggcacgtgtgcgcaaaggttcgcgtctcggcgccctgatcgacggcgcctatgacgaccgcttcgcctcggagctgatgcggcggatgcaggaaaaccaggagatgcaggtgccaggcgggactctgcgcttctatggaaatgaacagctcacggccatgcatttcgaggagacgccttcccccctgatgggagagcagagcaatgtgtcagtcgccttcgaccggcaggtgctgctcaagattttccgccggttgaggccgggcgaccagcctgaggtggaggtggcgcgcttcctgacggaggtcgcgggcttcaggaatacgcccgcctttctcggcatggtcgaatatgaggagcagggcgcccgtaccgttctggccagcgtttccggtttcgtcgagaatcagggcgatgcatggggcgtcttcgtgcacgcgctggagcggcagatcgaagacgaaacccttgcaccgcctgccccggccggcgccacgccggctgaggggaccacggcacagctcctctatccgctcgacctgcttcggcgcctcggcgaacgcacgggcgaaatgcacgctgccctcgcgattgaaaccgacatggaggctttccggtgcgagccgatccgccgggcggacatcgcaagctgggtcaaggacctgaaacagcaggcggcgagcgcccgcgcggccctggagcgcaacaaggatcgccttcccctcaacataagggaaagcgtggagcaccttctgtctctgagacaacggatcgacaggcgcatcagcgagttcggaaaaatcacgccttccgggaagaagtcacgcatccatggcgactatcatcttggccaggtgctggtctcaaagcaggacctctacatcatcgatttcgagggtgagccgcgccgaagcctggaggaacgccgcggcaagagctctccgttgcgggatgtggcgggaatgctgcgctccttcgattatgccgcatggacggcggtgcgccaggtcgccgcgcgcctgccggaccagacgcgggatggcagctcgctcgcgcgccaatggcgagagcggatgagcgcggaattcctggaaggataccgcgcggctgcctccgtcgcgcagaaccagccagcagacggagccacatgggaagccctgctcgaacttttcctgttgcagaagggtttctacgaaatcaactacgaactctccaaccggccggactgggtgggcatccccgtgcagggcgtgctcgacctgatcgaaaggaggagcggatga

SEQ ID NO: 13855 - protein, 1115 aa, Mesorhizobium sp. BNC1
MNTMEKVASELMSPEEAEAVQVVPPAGPRPPDWYKDAVIYQLHIKAFHDSNGDGMGDFNGLMQRLDYVERLGVNTIWLLPFYPSPLRDDGYDIADYRSINPSYGTMRDFRRFVAEAHRRGIRVITELVINHTSDQHPWFQRARHAKKGSAARQFYVWNDDDERYPETRIIFLDTEKSNWTWDPVAGQFFWHRFYSHQPDLNFDNPRVLDAVIRIMRFWLDMGVDGLRLDAIPYLVERDGTNNENLPETHEILKKIRKALDEKYPDRMLLAEANQWPEDTRPYFGEGDECHMAFHFPLMPRIYMALAQEDRHPISDIMRQTPEIPESCQWAIFLRNHDELTLEMVTDRERDYLWRTYAEDVRARINLGIRRRLAPLMQNDRRKIELMNALLFSMPGTPIVYYGDELGMGDNIYLGDRDGVRTPMQWAPDRNGGFSRANPQMLYLPPIMDPVYGYQTINVEAQEADPSSLLNWVRRVIGVRKQHSAFGRGDFTMLYPRNRRILAYTRSDANETILCVANLSRSPQAVELDLSKYRNCVPIELVSQSPFPPIGDLPYMLTLTGYGTFWFVLASEAQAPEWHNNVPEPLPEFITLTMVDGRIERALEGRERRQLEQDVLPQFMQRQRWYGAKGEGIRSAGISDIAKLGDEGGLLTIVDVDLSVSGRQRYLLPLTVLWGEENVQFGAPKLSVTLARVRKGSRLGALIDGAYDDRFASELMRRMQENQEMQVPGGTLRFYGNEQLTAMHFEETPSPLMGEQSNVSVAFDRQVLLKIFRRLRPGDQPEVEVARFLTEVAGFRNTPAFLGMVEYEEQGARTVLASVSGFVENQGDAWGVFVHALERQIEDETLAPPAPAGATPAEGTTAQLLYPLDLLRRLGERTGEMHAALAIETDMEAFRCEPIRRADIASWVKDLKQQAASARAALERNKDRLPLNIRESVEHLLSLRQRIDRRISEFGKITPSGKKSRIHGDYHLGQVLVSKQDLYIIDFEGEPRRSLEERRGKSSPLRDVAGMLRSFDYAAWTAVRQVAARLPDQTRDGSSLARQWRERMSAEFLEGYRAAASVAQNQPADGATWEALLELFLLQKGFYEINYELSNRPDWVGIPVQGVLDLIERRSG

SEQ ID NO: 13856 - DNA, 1653 bp, Silicibacter sp. TM1040
  CDS (1)..(1653): transl_table=11
atgaacgctcagaccacaatcaaccctgcttcggtgctgtccaatgacccggattggtggcgcggtgcggtgatctaccagatttatccgcgcagctaccaagacagcaatggcgacggcatcggggatctgcagggtatcacgtcacgtctggaccacatcgcctctcttggggtggatgccatctggatttcgccctttttcacgtcaccgatgaaagactatggctacgatgtcagcgactactgcgatgttgatccgatgtttggcaacctcgcagattttgacgcgctggtggcgcgggcgcatgatctcggcctgcgggtgatgatcgatctggtgctgtcgcatagttcggatcagcacccttggttcgccgagagccgtcagagccgcgacaacccaaaggccgactggtacgtctgggccgatccccaagaagacggcacgccgccgaacaactggctgtcgatctttggcggttccgcctggcattgggacgcgcgccgcgagcaatattatctgcacaattttctggtctcgcagcctgacctaaatttccattgtccggacgtgcagaatgcgcttttggatgtgacccgcttctggctcgagcggggagtcgatgggttccgcttggacaccatcaatttctacatccacgacaaggagttgcggtcgaacccagcgcttcccaaggatcagcgcaatgccaatatcgccccttcggtgaacccctataaccatcaggaacacctctactccaagaaccagccggaaaacctcgattttctcgcgcggttccgtgcgcttttggacgaatacccggccaagaccgcggttggcgaagtcggcgatgcgcagcgcgggctggaactattgggacagtacacggccggcaacaccggtgtccacatgtgctatgccttcgagttcctggccaaagatccgctaaccgccgcgcgcgtggctgaggtttttgagcgcacagatgaggtagcagccgatggttgggcctgttgggccttctccaaccatgatgttcagcggcacgtcagccgatgggggttgtcggacgctgcgctgcgcctccatgcgactttgatcatgtgcctccgcggctctgtctgcatctatcagggcgaagaactggggctgccagaggccgatatttcctttgaagatctgcaagatccctatgggattgagttctggcctgaattcaaaggacgcgatggatgccgcactccgatggtctggcgcagcgacaatacgcatggcggcttctccgaggcgcgtccttggctgccggtcagcctcgagcatgcggcgctgtccgtagcagagcaagaagcaaaccccgatgcgttgctgcaccactaccgccgcgtgattgccctgcgacgcgcccacgcggcactgtcgcacggaacccacgacaaggtcgtggcaagcgggtctgtcgttcattttctgcgcagcgccgagtccgaggacatcttctgtgccttcaatcttggcgaggcggcggcagaggtcagcttgcccgcgggaacgtgggagcagcttggtgctgacatcggcactgccgaaatcaatggtgatctggtgaaacttggcccttggcaagcctgcctcgtacggcgcgtataa

SEQ ID NO: 13857 - protein, 550 aa, Silicibacter sp. TM1040
MNAQTTINPASVLSNDPDWWRGAVIYQIYPRSYQDSNGDGIGDLQGITSRLDHIASLGVDAIWISPFFTSPMKDYGYDVSDYCDVDPMFGNLADFDALVARAHDLGLRVMIDLVLSHSSDQHPWFAESRQSRDNPKADWYVWADPQEDGTPPNNWLSIFGGSAWHWDARREQYYLHNFLVSQPDLNFHCPDVQNALLDVTRFWLERGVDGFRLDTINFYIHDKELRSNPALPKDQRNANIAPSVNPYNHQEHLYSKNQPENLDFLARFRALLDEYPAKTAVGEVGDAQRGLELLGQYTAGNTGVHMCYAFEFLAKDPLTAARVAEVFERTDEVAADGWACWAFSNHDVQRHVSRWGLSDAALRLHATLIMCLRGSVCIYQGEELGLPEADISFEDLQDPYGIEFWPEFKGRDGCRTPMVWRSDNTHGGFSEARPWLPVSLEHAALSVAEQEANPDALLHHYRRVIALRRAHAALSHGTHDKVVASGSVVHFLRSAESEDIFCAFNLGEAAAEVSLPAGTWEQLGADIGTAEINGDLVKLGPWQACLVRRV

SEQ ID NO: 13858 - DNA, 3267 bp, Nitrobacter hamburgensis X14
  CDS (1)..(3267): transl_table=11
atgaacgagatgaccaaaatcgatgctgaccgatatgtccagaccgacgatctctggtacaaggacgccatcatctatcagcttcatgtcaaggccttcgccgacagcaacaacgatggcatcggcgacttcgccgggctgaccaacaagcttgactaccttcaggaactgggcgttacgacgctgtggctgctgccgttctatccgtccccgggacgcgacgatggatacgacatcgccgattacggttcggtcaaccccgacttcggcacgatgaaggatttccgtcgcttcatctccgaggcgcggcggcgcggccttcgggtgatcacggaactcgtcatcaatcacacctccgaccagcacagatggttcaaacgcgctcagcgcagcccgcccggatcgagcgcacgcaactggtatgtctggagcgacaccgacaaaaaataccaggacacgcggatcattttcaccgacacggaaaaatcgaactgggcctgggatgccgaggccaaggcttactactggcatcgtttcttcacgcatcagccggacctcaatttcgacaatccgcgcgtggtcagggcggtcattcaggtgatgaagcgatggctcgacgcaggcgtcgacggctttcggctggatgccattccctacctctgcgagcgcgacggcaccaacaacgaaaatcttcccgaaacccatgcggtgatcaagcacattcgtgcggagctcgacgcctacgccaagggcaaggtgcttctggccgaagccaatcaatggccggaggatgtccagtcctatttcggcgatggcgacgagtgccatatggcctatcatttcccgctgatgccgcgcatctatatggcgatcgcgcaggaggatcgctttccgatcaccgacatcttgcggcagacgcccgatatcccgcccaattgccaatgggcgatgttcctgcgcaaccatgacgagctgacactcgaaatggtgacggacatcgagcgcgattatctctggtcgatctatgccgccgatccacgcgcacgcatcaatctcggcattcgccgccgcctcgcgcctttgatggacaatgaccggcggaaaatcgagctgatgaattcgttgctgatgtcctttcccggcacccctatcatctattacggcgacgaaatcgggatgggcgacaacatctatctcggcgaccgcaacggcgtccgtaccccgatgcaatggacgccggaccgcaacggcggcttttcgcgatgcgatcccgcgcggctctatgcacctccggtcatggacgccgtctacggctacgagtccgtcaatgtcgaagcacagtcgcgaagcctgttctcgctgttgaactggatgaaaaagctgatctcggttcgcaaatcgagccacgtcttcggccgtggcaccatgtccttcgtgcgctcctcgaatcgcagcgttctcgcttacgtgcggaaaaataacgacgaggtcgtgctctgcgtcgccaacctgtcgcgatcggcacaggcttccgaactcgatctgtcgcactggaaaggccgctcgccgatcgaaatgctgggacgaacgacgtttcccgatatcggcgaactgccttatctgatcacgctcgcgccttacggtttctactggttccgcctgaccgaaaagccgccgtcgccgaacgttgcggcggtgatcgttcccgactatgagaccctcgtggtgccgctgggcgcgacctggatgtcactggcgcggacccgctcgatcttcgagcgcgatgtcctgccttcgcatctcgcccgctcgcgctggttccccgagcggtcggccagcgccatcgccgcgcgtgtcccggcagcgataccgctcatgaaagaccaggtttcacggccatggctggtgatcttcgacgtcacccatcgcgggcagtcggggcgatacgcgatgccgatccgaatccgatgggatcggctcgaccgccgcaactatgacgccaaaaacatcgccgccgtgcggcaggggtcgcgcgagggaacgctgatcgacgccgcctatgagaacgacctgatcgccggcatcatcgacggtctgcgccaccggacgacctttgaggaaggcgaattgcggcttgcctaccatcccacggaacggctggcctcgattgcagaggagccgattggcaacgtgcgcgcggtgcagaccgaacaatcgaacagcaccgcgctggtagaccagaggttcgtcgtcaaaatctatcgcaagcttgaaaacggtatcaatccggaagtggaagtcgggcgcttcctgacggacgtcgccggattcgccaatacgcccgccctgctcggcagcgccgaactgaccggccccgatgtccaggccgccgttgccattgtccatgcctttgtcggcaaccagggtgacgcatggaccgtcagcaacgctgcactggatcgctttatcgacgagcagcggctggtcggcgctagcgattcggctccggcgcttgaagagaaggcggcgtatcagcgctcgatgaagcagatcggcaagcgcgtcgcggaaatgcacgtcgcgctggccagccgcaacgacatcgcgaatttccgtcccgaacctgtaacgccttcggacctcgcgcacctcatcgatcgtttgatgatgcgcgccgggcaaacgttcgaccgcctcgctcaagtcaagcttgccgattcggatcggcttcttgccgatgaaattctgagcatccgtccaacgttgcatggccggctcaccgagctgctgccgccctcgattcaaatgtacaacattcgacatcacggtgactttcatctcgggcagatcctcgtcgtccgcgacgatgtctttatcatcgactttgaaggcgaaccccgccgaagcctccccgagcggcgattgaaagcgccggcggcccgcgatgtcgccgggctgatccggtccatcgactattccgtcaccacagcgcaagagcgcgtcctcaagaccggaacggacgacgacggacgactggccgaggctttgtcggcatggcgcaacgaggcgacgcaaaccttcctgaccgcctaccgcgaagcgatgtccgatccccggctatggccgcaggataacgaccacgccgacaggacgctgcggttcttcctgctcgaaaaggcgttctatgaaatcgactacgagctcgcgcatcgcccggactggcttcgtgtcgcattgggcggcgcacttcgcgtgctgcgcaaatag

SEQ ID NO: 13859 - protein, 1088 aa, Nitrobacter hamburgensis X14
MNEMTKIDADRYVQTDDLWYKDAIIYQLHVKAFADSNNDGIGDFAGLTNKLDYLQELGVTTLWLLPFYPSPGRDDGYDIADYGSVNPDFGTMKDFRRFISEARRRGLRVITELVINHTSDQHRWFKRAQRSPPGSSARNWYVWSDTDKKYQDTRIIFTDTEKSNWAWDAEAKAYYWHRFFTHQPDLNFDNPRVVRAVIQVMKRWLDAGVDGFRLDAIPYLCERDGTNNENLPETHAVIKHIRAELDAYAKGKVLLAEANQWPEDVQSYFGDGDECHMAYHFPLMPRIYMAIAQEDRFPITDILRQTPDIPPNCQWAMFLRNHDELTLEMVTDIERDYLWSIYAADPRARINLGIRRRLAPLMDNDRRKIELMNSLLMSFPGTPIIYYGDEIGMGDNIYLGDRNGVRTPMQWTPDRNGGFSRCDPARLYAPPVMDAVYGYESVNVEAQSRSLFSLLNWMKKLISVRKSSHVFGRGTMSFVRSSNRSVLAYVRKNNDEVVLCVANLSRSAQASELDLSHWKGRSPIEMLGRTTFPDIGELPYLITLAPYGFYWFRLTEKPPSPNVAAVIVPDYETLVVPLGATWMSLARTRSIFERDVLPSHLARSRWFPERSASAIAARVPAAIPLMKDQVSRPWLVIFDVTHRGQSGRYAMPIRIRWDRLDRRNYDAKNIAAVRQGSREGTLIDAAYENDLIAGIIDGLRHRTTFEEGELRLAYHPTERLASIAEEPIGNVRAVQTEQSNSTALVDQRFVVKIYRKLENGINPEVEVGRFLTDVAGFANTPALLGSAELTGPDVQAAVAIVHAFVGNQGDAWTVSNAALDRFIDEQRLVGASDSAPALEEKAAYQRSMKQIGKRVAEMHVALASRNDIANFRPEPVTPSDLAHLIDRLMMRAGQTFDRLAQVKLADSDRLLADEILSIRPTLHGRLTELLPPSIQMYNIRHHGDFHLGQILVVRDDVFIIDFEGEPRRSLPERRLKAPAARDVAGLIRSIDYSVTTAQERVLKTGTDDDGRLAEALSAWRNEATQTFLTAYREAMSDPRLWPQDNDHADRTLRFFLLEKAFYEIDYELAHRPDWLRVALGGALRVLRK

SEQ ID NO: 13860 - DNA, 1926 bp, Shewanella denitrificans OS-217
  CDS (1)..(1926): transl_table=11
atgaaaaaattgaccttcactgtggctaccaccctgcttatgagtgcgatgaatttagctattgcagcgcaaagcccctcctcctttaccatcaatgctgagcctatgttttggtgggcgggaatggaaaatagtcaactagagctcttgatagaaggcgacaatgttgcggccttgacccctaagcttagccaacagcaaggcattacattagtcaagactgagcgcagcactagcccaaaccatttgtttgttactctggatctgcatcaagcccagccgcaaacattaaccattgatttttatgaattaaacaatcctaaaaaacccgctacagcgacattagcctatcaactaaaaccaagaacatcagactcaaagcagcgccaaggctttagcaataaagacgtgatataccttattaccccagacagattcgccaatggcaacccagataacgataaccataccaccatgttggaaaaggtgaaccgcagcgataaagatggccgtcatggcggcgacatccagggcataatcgaggcgctgccttatttagccgacttaggtgtgactcagctatggataaacccactactggaaaataaccaagaaaagtattcttaccatggttattccatcacaaacttttatcgaatagacccccgctttggcagcaatcaggactatgtcaatctagttcaacaggcgaataaattggggattggggtaattaaagacatagttgtcaatcatatgggcagcggtcatccttggatgacaaatttccccagcgccacctgggtcaacggccaagcaagtttgcagcaacaactgccattggattttaccaaccatagacgcaccacagtgcaagacccctatgccgcgagcaccgacacccaagccttcagcgacggctggtttaccgataccatgcctgacatgaaccagaccgaccctcactttgccacctatctcattcagaacagcatctggtgggtggagtacgcaggtttgagcggcattcgagaagacacttactcttatgctgataaagctttcttaactcagtggtctaaggccatcatgaccgaataccccaagttcaatattgtcggtgaagagtggagtcctaaccccatcaccgtcagctattggcaggcgggcaagcataataaagatggctatgtctcccatgtacctagcatgatggacttccccttgtatgagaaacttatcgcctcgctcacccaagtcgaaggctgggacacgggcctagtcaacctctatgagatgctcgccaacgatgtggtttatgccgaaccgacccaattggtgctgtttgaaggcaatcacgacaccaatcgcctctatagcttgatgaatgaagatcttgccctgtttaagatggccatggcttatgtgctcacgagtaatcgcattccacagattttttatggcacagaagtgttgatgacaagccccactaaagacagaaacgatggcctagttcgcagtgattttcccggtggttggcaaggcgatagccaaaatgccatcacaggcgataacctcagtccagctcaaatcgaagctcaacattttatcaagaccttgctcaattaccgtaagcactcagacgctatcataaacggcacccttagccattacgcccctcaagacggtgtgtatgtgcaattcagacaagctggggatgaaaccttgatgagtatctacaacaaaaattcggccccagtgaatttagccttaggccgttttgccgagcatataggcaagcacactcaagccagcaacatccttgaacacacagagtttgacttaaatgacagcatatcgctcacaaaaaaaggcgtgactctgctcaaattaagtacgctcaaattaagtacccacaagccctag

SEQ ID NO: 13861 - protein, 641 aa, Shewanella denitrificans OS-217
MKKLTFTVATTLLMSAMNLAIAAQSPSSFTINAEPMFWWAGMENSQLELLIEGDNVAALTPKLSQQQGITLVKTERSTSPNHLFVTLDLHQAQPQTLTIDFYELNNPKKPATATLAYQLKPRTSDSKQRQGFSNKDVIYLITPDRFANGNPDNDNHTTMLEKVNRSDKDGRHGGDIQGIIEALPYLADLGVTQLWINPLLENNQEKYSYHGYSITNFYRIDPRFGSNQDYVNLVQQANKLGIGVIKDIVVNHMGSGHPWMTNFPSATWVNGQASLQQQLPLDFTNHRRTTVQDPYAASTDTQAFSDGWFTDTMPDMNQTDPHFATYLIQNSIWWVEYAGLSGIREDTYSYADKAFLTQWSKAIMTEYPKFNIVGEEWSPNPITVSYWQAGKHNKDGYVSHVPSMMDFPLYEKLIASLTQVEGWDTGLVNLYEMLANDVVYAEPTQLVLFEGNHDTNRLYSLMNEDLALFKMAMAYVLTSNRIPQIFYGTEVLMTSPTKDRNDGLVRSDFPGGWQGDSQNAITGDNLSPAQIEAQHFIKTLLNYRKHSDAIINGTLSHYAPQDGVYVQFRQAGDETLMSIYNKNSAPVNLALGRFAEHIGKHTQASNILEHTEFDLNDSISLTKKGVTLLKLSTLKLSTHKP

SEQ ID NO: 13862 - DNA, 1419 bp, Thermotoga neapolitana
  CDS (1)..(1419): transl_table=11
atgtatcccataccaagttgggtatacgacagtgttgtgtaccagatattcccggacaggtttttcatcggcaaaggaaagaccgtcgaggacaaaaaagatctttatctgaaacgagggggaaccatcgaaaaatggggggttcctcctcgaaaacttcccggtgctcagcacgtgaaggtcttctacggaggagatctatggggaatagcagagaagatcgattacttagaagaactcggagttaacgcagtttacctcactcctatctttctttccgatacaaatcacaaatacgatacgatagattatttcaagatcgatccacagttcggaggaaaacgagcctttgtacaccttctgaaagttcttcacagcaggaacatcaaactcattctggacggtgtgttcaaccacgttggaagtcagcatccctggttcaaaaaggcaaggaagaaagatcctgaatacgtgaaccgtttctttctttacagagacaggcacagatcttggttcgacgtgggaagtttgcccgaactgaacgtggaagttgaagaggtgagagaatacatattgaaagtcgttcaacactacctggaagtgggtgtggacggctggaggctcgactgtggtcacgaccttggacctctggtcaacctgtggatcaacatgaaagtaaaggaattctcttctgaaaagtatcttgtgagcgagatatggacctacccggcaggatgggaaatggtcgatggattgatgaactacaatttcaggagccttgttttgagctatgtgaacggagaaacggattctatagggacagaactcgaaagggcttacagagaaacaaagaacatcttcgggtgctggaacatgctagacagccacgatactccaaggcttgcaacgacggtcccagtcaaagatctcagaaaactcgctatagtgcttcagttcacatatccgggcgttccgctcgtctattacggaacagagataggcctcacaggtggagaagatccggagtgtcgagccaccatggaatggaacagggaaaagtgggacatggagttgtttgagttttacaagaagatgatcaggttcaggagaaccgatcctggtttgaggtttggcgagttcatacttttgaaagaaaagccacttgccttcatgaggaaagccccgcatcctcttcaagacacgatcgttgtggtgaatcctgaagaggaaaaaaacgttgttctctcccttccggatggaaagatcatgaacgcaactcctcttttcgacatcttcaccggtgagaagttccatgtggatggaggagtcgtgaaggtgcccgttggaagaagatcgttcaggatcttaaagccgatcgacctcagagttggaaggtacagattgtacaagagagtgtga

SEQ ID NO: 13863 - protein, 472 aa, Thermotoga neapolitana
MYPIPSWVYDSVVYQIFPDRFFIGKGKTVEDKKDLYLKRGGTIEKWGVPPRKLPGAQHVKVFYGGDLWGIAEKIDYLEELGVNAVYLTPIFLSDTNHKYDTIDYFKIDPQFGGKRAFVHLLKVLHSRNIKLILDGVFNHVGSQHPWFKKARKKDPEYVNRFFLYRDRHRSWFDVGSLPELNVEVEEVREYILKVVQHYLEVGVDGWRLDCGHDLGPLVNLWINMKVKEFSSEKYLVSEIWTYPAGWEMVDGLMNYNFRSLVLSYVNGETDSIGTELERAYRETKNIFGCWNMLDSHDTPRLATTVPVKDLRKLAIVLQFTYPGVPLVYYGTEIGLTGGEDPECRATMEWNREKWDMELFEFYKKMIRFRRTDPGLRFGEFILLKEKPLAFMRKAPHPLQDTIVVVNPEEEKNVVLSLPDGKIMNATPLFDIFTGEKFHVDGGVVKVPVGRRSFRILKPIDLRVGRYRLYKRV

SEQ ID NO: 13864 - DNA, 1701 bp, Bacteroides thetaiotaomicron
  CDS (1)..(1701): transl_table=11
atgaaaaggaatttattattcattatcttactattattattacccggtcttcaccaggtattcgcaacaagcactataaagaaagtagccccgaccttttggtgggcaggaatgaagaatcccgaattgcagatactattatatggtgaccgcatatcatccgcagacgtcagtctttctgccgataatatcacgctgcaagaagtggtgaagcaggagaatcctaattatctggttctgtatttagacctttcgaaggctgctccacagaactttgacatcatcctgaaacaaggcaaaaagcagataaaaatcccttacgagcttaaacagcgccggccgaatgcttcggcagtagaaggttttgattcgagcgacgtgctttatcttattatgccggaccgttttgccaatggcaacccctccaacgacatcattcccggaatgctggaaggaaatgtagaccgtaatgagcctttcgcacgtcatggcggtgatttgaaaggaatagagaatcatctggattacatagcagacctcggagtcaccagtatatggctcaacccgattcaggaaaatgacatgaaagaaggatcgtatcacggttatgccattaccgattattatcaggtagaccgccgcttcggcagtaacgaagagttccgcaaacttactcaggaagctaatgccaaagggctgaaagtcgtaatggacatgatcttcaaccattgcggttcggacaactatctgtttaaagatatgccctccaaagactggtttaactttgaaggcaactacgtgcagaccagcttcaagactgccactcaaatggacccgtatgcttccgattacgaaaagaaaatcgctatcgacggttggttcacactgaccatgccggacttcaaccaaagaaaccgtcatgtagctacttatctgatacagagcagtatctggtggattgaatacgccggtatcaacggcatccgtcaggatacacacccttatgccgacttcgatatgatggcacgctggtccaaagcggtcaatgaagaatatcccaagttcaacattgtaggtgaaacatggctgggcaacaatgtactcatctcctactggcagaaagacagcagactcgcttatccgaagaacagcaatctcccgactgtcatggacttcccgctaatggaagagatgaacaaggctttcgacgaagagactaccgaatggaacggaggacttttcagactctacgaatatctatcacaggacatcgtctacagccatccaatgagcctgctgaccttcctcgacaatcacgatacttcccgcttctaccgttcggaagcagatacaaagaatctggaccgatacaagcaagccctgacgttcttactgacaacccgcggaataccgcagatatattatggaactgaaatcctgatggcagccgacaaggcgaatggagacggcctgctccgctgcgacttccccggaggctggccgaacgatacaaaaaactgctttgacgcagccaaccgcactccacagcaaaatgaagcattctcctttatcaaaaactgctccaatggagaaaaggaaacgaagtcattgccaaaggtcagctcaaacatttcgcaccgaataaaggtgtctacgtttacgaacccaaatacggtgataaatcagtcgttgttttcctga

SEQ ID NO: 13865 - protein, 566 aa, Bacteroides thetaiotaomicron
MKRNLLFIILLLLLPGLHQVFATSTIKKVAPTFWWAGMKNPELQILLYGDRISSADVSLSADNITLQEVVKQENPNYLVLYLDLSKAAPQNFDIILKQGKKQIKIPYELKQRRPNASAVEGFDSSDVLYLIMPDRFANGNPSNDIIPGMLEGNVDRNEPFARHGGDLKGIENHLDYIADLGVTSIWLNPIQENDMKEGSYHGYAITDYYQVDRRFGSNEEFRKLTQEANAKGLKVVMDMIFNHCGSDNYLFKDMPSKDWFNFEGNYVQTSFKTATQMDPYASDYEKKIAIDGWFTLTMPDFNQRNRHVATYLIQSSIWWIEYAGINGIRQDTHPYADFDMMARWSKAVNEEYPKFNIVGETWLGNNVLISYWQKDSRLAYPKNSNLPTVMDFPLMEEMNKAFDEETTEWNGGLFRLYEYLSQDIVYSHPMSLLTFLDNHDTSRFYRSEADTKNLDRYKQALTFLLTTRGIPQIYYGTEILMAADKANGDGLLRCDFPGGWPNDTKNCFDAANRTPQQNEAFSFIKNCSNGEKETKSLPKVSSNISHRIKVSTFTNPNTVINQSLFS

SEQ ID NO: 13866 - DNA, 3906 bp, Alicyclobacillus acidocaldarius
  CDS (1)..(3906): transl_table=11
atgcacgtgaagtggacgggtgccgcgagccttgcgacgaccatcgtcatgtctgcagcgcttccgttcgcggcgtttgaaaacacccgttccgtcggcacggaacgcgttctggcggcgaccgcggcggatagtactaacgcctcgcccccgaccggggcgtccgcaggcggtggcacagcaggagagacctactcgaatgccgtgcagattgtgagcggcaatggctttcgcgctggaaacggggccacggtcgtcctcgctgtgaatggactgaacttgaacccctcgagtttcaaggttgtggtatcgaatagcctcaacggcgtgatcgacgtcacaagtgattccgtgctaacggggccgaattcgattgccttgcaccttcctgccggggatgacgggcttggcgccggtacgtacacggtcaccgtcgaaagtggaggtgattcggtctcgacgccttcaggacagggacttcaggtcatgccttatacgacggccgacaccattcagtgggatggaatctacacatccgatggcgcgatgtacgtgtcagatccgaatccctcccctggacaagaggtgacgatcagccttcgagcgtacagcgggaacctgacgaaggtgatcctgaattgctgggacaccgcacaaaacaagggtttccaggtcgagatgtctccaggcagaacgtttggaccgtatcagctctggtctgccacgatccccgcttcaaacggcggaacgatctattatcgctttgacatatacgatggcaccagttttgcgtgtctctcaggtgacggactgcacacgtctgacgacatcaacaacaatttcccgttgcccgtggggacggtcacgctttcgacacttcaggcgaatcccggtgatacggtgacggtctccgaccctgtaggtgacttcgccggaagccaggatcaacccaatcacacggtgatacggtttgtcaactcgtcgggcgaaacggccgccacagtcaatgggacgaacgcgagctggaacagcgtgcagttcacagtcccacagagccttccaaacggcttgtatcgcgtcgagatcgacacggtcgccaaggacgcggatggggtggtcaatgtcgaattggacaggagtgcggagcttattgtagggcctctgcccgcgtggatgcaagcgtatgcacatgattcgtttcaggcgttctaccgatcgcctttcggagccgtgtccacaggaacccccatcacgcttcgcctgcgggctccgctcagcgtgaagagtgcgacgcttcgcctctggggggcagcggatcagtcaggcgagatcgacctgccgatgcagaagctccaaatgtcgggagacgagttggcgcaacaaaccggcgtgcaggacatcaacgactacacgtggtggacggtgaccatccctgcggcggatgtgaccacacccgggacgatgtggtatcagttcgtgacggagacggacactggccaggtggtctactacgatgacaatggagctcagcttgaagggcctggccaggttgggttgtcttccgacggaccgagctaccagatcagcgtatacgaacggggatttcagacgccagattggctgaagcacgccgtgatctacgaaatcatgccggatcggttctacaatggcaatatcgccacggaggagaatccgaatacgcaaaaggggatttatgtaggggccgatggaacggagtcattaggccccatccagttccacgagaactgggactcgccgccctatgatccgaatattcctccgttatctgatcccaaaattgccagtctgcgaggcaatggccaatggaacattgactttttcggaggtgatttgcagggcatcgaggataagctggactacctgaagagccttggagtcaatacgctgtatctgatgcccgtctttgaggcggaatccaatcacaaatatgacacagccgactatttcaagattgaccctggatttggaacgcagcaggactggctgaatctcgtacaggctgcgcacgcgaaggggttccatatcattctcgacggggtgttcgaagataccggaagtgacagcgtatatttcaacaagttcgggaacttccactccaacggtgcgtggcaggcgtacctgaagaaccagccgtcgctgtcgccctactactcgtggtacgtgtggacagggaacacctcaaacccatacgattcgtggtttcagatcgacacgctgccacttacggacacgtcgaaccccgcctatcagcgattcgtgtatgggagcgacaactcagtcgcgcgtgtgtggatccgggaaggtgcggacggatggcgcttggactcggccgacaacgggaatttcaacacggcatggtggggtggctttcggcaggccgtgaaatcgatcgatcccaacgcagcgatcatcggcgagatctgggacaatgcgacgaatgacaatggaacggattggttgacgggatcgaccttcgacagtgtaatgaactaccagttccggaacgccgtgatcgacttcttccgcggcacgtacaacgacggaaacgtgcagcaccacgccgtcgacgctgcgggattcaaccaggaactgatgcgcctgtacagtgaatatcctctgcagtcgttctactcgatgatgaaccttgtcgattcgcaagacaccatgcggatcctgaccatcttggagaacgcgccgcagccaggcgatctatccgcgctccagcaggatgagtacaggccgtctcctgcggctgaacagttggggatcgagaggctgaagcttgtatcggactttcaattcagcttcccgggcgatccgaccatcttctacggcgacgaggcagggctcactggttattcggatcccctcaatcgtcggacctatccgtgggacaaccagaatctcgatctcctgaaccactaccgcaagctcggggccattcgaaacgccaatcctgtgcttcagacgggggatttcacgccgttgtacgcacagggcatggtgtacgcatttgcaaggaccattcggaatgggcgagatgtcttcggtgtgccagcggaggatgccacggccattgtggcgatcaacaatcagaaccaagctatcaccgtgaccattccgacggatgggacggttgcggacgggtccacgatgctcgatgaactgaacaaccagtggtacaaggtgcagaatggtggcattacactcacgctgcaatcgtatcaaggtgccattttggtgacgccgagcgacgcgccgatggcttatctgcaagaggaggattctcagaacgagattgcgtggacgcctgtgcaaggtgccatcggttatcgcgtctggagacagaatccgaatggacaatgggtgccctttggacctgtgcttcctgccacggacttgagtgtcacggtggaacgcgatgcatatgcgcaaacgtttgctgtacaagcgctgttttcggcgtctgatcacgcccagtctccggtgtcggcacctaagacggtatcgcttgccgtcgatgtgcccgcggtacgcctgagtcagccgatcgttagtggtcgtgtggttggagatcgtgcgatggtctcgatcacgccggtttcaggcgcgacgcagtatgtgatctaccagagacagggcgacggatcgtatgctccggtcgcgacggtctccacaagtggcgattccgcagctataggggaagttcctgcgcaaggtccggccaactcgcctcacgcgacgattcgcgtgacagtgcccgtacctgcaggtttctcgtcggtgacctaccgcgtggctgcgcaaaacgaagatgggcaagctgtgaccaatccattgaccctatcgctctcgaaaaagtga

SEQ ID NO: 13867 - protein, 1301 aa, Alicyclobacillus acidocaldarius
MHVKWTGAASLATTIVMSAALPFAAFENTRSVGTERVLAATAADSTNASPPTGASAGGGTAGETYSNAVQIVSGNGFRAGNGATVVLAVNGLNLNPSSFKVVVSNSLNGVIDVTSDSVLTGPNSIALHLPAGDDGLGAGTYTVTVESGGDSVSTPSGQGLQVMPYTTADTIQWDGIYTSDGAMYVSDPNPSPGQEVTISLRAYSGNLTKVILNCWDTAQNKGFQVEMSPGRTFGPYQLWSATIPASNGGTIYYRFDIYDGTSFACLSGDGLHTSDDINNNFPLPVGTVTLSTLQANPGDTVTVSDPVGDFAGSQDQPNHTVIRFVNSSGETAATVNGTNASWNSVQFTVPQSLPNGLYRVEIDTVAKDADGVVNVELDRSAELIVGPLPAWMQAYAHDSFQAFYRSPFGAVSTGTPITLRLRAPLSVKSATLRLWGAADQSGEIDLPMQKLQMSGDELAQQTGVQDINDYTWWTVTIPAADVTTPGTMWYQFVTETDTGQVVYYDDNGAQLEGPGQVGLSSDGPSYQISVYERGFQTPDWLKHAVIYEIMPDRFYNGNIATEENPNTQKGIYVGADGTESLGPIQFHENWDSPPYDPNIPPLSDPKIASLRGNGQWNIDFFGGDLQGIEDKLDYLKSLGVNTLYLMPVFEAESNHKYDTADYFKIDPGFGTQQDWLNLVQAAHAKGFHIILDGVFEDTGSDSVYFNKFGNFHSNGAWQAYLKNQPSLSPYYSWYVWTGNTSNPYDSWFQIDTLPLTDTSNPAYQRFVYGSDNSVARVWIREGADGWRLDSADNGNFNTAWWGGFRQAVKSIDPNAAIIGEIWDNATNDNGTDWLTGSTFDSVMNYQFRNAVIDFFRGTYNDGNVQHHAVDAAGFNQELMRLYSEYPLQSFYSMMNLVDSQDTMRILTILENAPQPGDLSALQQDEYRPSPAAEQLGIERLKLVSDFQFSFPGDPTIFYGDEAGLTGYSDPLNRRTYPWDNQNLDLLNHYRKLGAIRNANPVLQTGDFTPLYAQGMVYAFARTIRNGRDVFGVPAEDATAIVAINNQNQAITVTIPTDGTVADGSTMLDELNNQWYKVQNGGITLTLQSYQGAILVTPSDAPMAYLQEEDSQNEIAWTPVQGAIGYRVWRQNPNGQWVPFGPVLPATDLSVTVERDAYAQTFAVQALFSASDHAQSPVSAPKTVSLAVDVPAVRLSQPIVSGRVVGDRAMVSITPVSGATQYVIYQRQGDGSYAPVATVSTSGDSAAIGEVPAQGPANSPHATIRVTVPVPAGFSSVTYRVAAQNEDGQAVTNPLTLSLSKK

SEQ ID NO: 13868 - DNA, 1797 bp, Klebsiella oxytoca
  CDS (1)..(1797): transl_table=11
atgattacaattagttcattaagccactccgcaaagagtgccgatagctacgcttataataaagaaaccctacatattagatttcgcacagtcaaaggcgaggtcgcgaaagtctctctgtggatcggcgatccctatcaatgggaggaaggtggcctagatggtggaaaccttggcggcagcgacgcgcatggatggagcggcggcaacgaagttcacatggaaaaagagggacaaagcgagagctatgaccactggtttgccgcatttactccgtgcaaacgacgtagccgctatggttttatattatacggaaataacggggaaaaattattatttggtgaacgacgctgtgttgatataagtaaaccacctgtagcagagacagaactgagtaacttgtccaactttttttgcttcccttatatcaatccaggtgatgtactttctacgccagaatgggttaaaaaaacaatatggtatcagatctttcctgaacgattttgcaatggcgatccatcgatatcgccagaaaacgtacaaccgtggggaacgcctccagattcaaaaaactttatgggcggtgatttgcagggcattattaacaaacttgattatttgcaagatcttggcgttaacggtttatacctttgtcccatatttacggctaacgctagccataaatatgataccgtagattattttaacgttgatccccatttcggtggcaacgatcggtttaaagaattggtgcaaaaagctcaccaacgaggaatgaaggtcatgctggatgcagtgtttaatcatattggtaatcaatcaccattatggttagatgttgtaaaaaatggtgataaatcaccttacgcagactggttctggattaaaaaattcccggtatacccatctggtgataaaaatgagtgggatttccgtaatttcaattacgaaacctttggtaatgttattgaaatgcctaaacttaatactgaaaaccccgcttgtcgtgattatctgctgcaggtggcgagatattggattgaagaatttgatattgatggctggcgccttgatgttgccaatgaagtcgaccacgaattttggcgagctttccgtagaacggtaaaaagcataaaacctgattgttatattctcggtgaaatttggcatgaaggcatgccatggctgcgcggagaccagtttgactccttgatgaactatcctctaatgcaagcaactactgactatttcgctttacaagcatatgacaaaaaaacatttatagatattgttacccatgcctatctttgctatccacgtaacgttaatgaagttatgtttaatcttcttgaaagccatgatacttcacgtttattaagtctgtgtggtaatgataaacgtaaagcccggttagcctatctctttatgtttagtcaggtgggttctccttgtatttattacggtagcgaagttggtatgaatggcagcagagcaatgggatcggaagataatcgtaaatgtatgatatgggatgaacaaaagcaggatttagagtttaagtcatttattaaagatcttattctatggaggaaaaaacattccgaatggaatgatcctaaaatacactggaataatgtcgaccatccggcagttgtcgcttttagcagaggagaagtacatttcctccttaataatagtgatgaatctttagctattaattatcagggcagaacactatctctgacaccttttgggttttatattatcggtctggaccataaggacatcatatcatga

SEQ ID NO: 13869 - protein, 598 aa, Klebsiella oxytoca
MITISSLSHSAKSADSYAYNKETLHIRFRTVKGEVAKVSLWIGDPYQWEEGGLDGGNLGGSDAHGWSGGNEVHMEKEGQSESYDHWFAAFTPCKRRSRYGFILYGNNGEKLLFGERRCVDISKPPVAETELSNLSNFFCFPYINPGDVLSTPEWVKKTIWYQIFPERFCNGDPSISPENVQPWGTPPDSKNFMGGDLQGIINKLDYLQDLGVNGLYLCPIFTANASHKYDTVDYFNVDPHFGGNDRFKELVQKAHQRGMKVMLDAVFNHIGNQSPLWLDVVKNGDKSPYADWFWIKKFPVYPSGDKNEWDFRNFNYETFGNVIEMPKLNTENPACRDYLLQVARYWIEEFDIDGWRLDVANEVDHEFWRAFRRTVKSIKPDCYILGEIWHEGMPWLRGDQFDSLMNYPLMQATTDYFALQAYDKKTFIDIVTHAYLCYPRNVNEVMFNLLESHDTSRLLSLCGNDKRKARLAYLFMFSQVGSPCIYYGSEVGMNGSRAMGSEDNRKCMIWDEQKQDLEFKSFIKDLILWRKKHSEWNDPKIHWNNVDHPAVVAFSRGEVHFLLNNSDESLAINYQGRTLSLTPFGFYIIGLDHKDIIS

SEQ ID NO: 13870 - DNA, 1581 bp, Bacillus sp
  CDS (1)..(1581): transl_table=11
atgaaacagctatgtaaaaaagggttggcttttattttggtgctcatttttgttaacgctctcattttgaatccacttaatggagcggctgcggaaaccgtacataaaggtaaatctccagctgcagataaaaacggtgtattttatgaggtgtatgtaaactctttttacgatgcaaataaagatggacatggtgatttaaaaggtcttacacaaaagctggactatttaaatgatggcaattctcatacaaagaatgatcttcaagtaaacgggatttggatgatgccggtcaacccttctcctagctatcataaatatgatgtaacggactattataacattgatcctcagtatggaaatctgcaagattttcgcaaactaatgaaagaagcagataaacgagatgtaaaagttattatggacctcgttgtgaatcatacgagcagtgaacacccttggtttcaagctgcgttaaaagataaaaacagcaagtacagagattactatatttgggctgataaagataccgacttgaatgaaaaaggatcttgggggcagcaagtatcgcataaagctccaaacggagagtatttttatggaacgttctgggaaggaatgcctgacttaaattacgataaccctgaagtaagaaaagaaatgattaacgtcggaaagttttggctaaagcaaggcgttgacggcttccgcttagatgctgccctccatatctttaaaggtcaaacacctgaaggcgctaagaaaaatctcctgtggtggaatgagtttagagatgcaatgaaaaaagaaaaccctaacgtatatctaacgggtgaagtatgggatcagccggaagtagtagctccttattatcagtcgcttgattccctatttaactttgatttagcaggaaaaattgtcagctctgtaaaagcaggaaatgatcaaggaatcgctactgcagctgcggcaacagatgaactgttcaaatcatacaatccaaataaaattgacggcattttcttaaccaatcatgaccaaaatcgcgtcatgagtgagttaagcggagatgtcaataaagcaaagtcagctgcctctatcttacttacgcttcctggaaatccgtatatttattacggtgaagaaatcggcatgaccggtgaaaagcctgatgaattaatccgtgaaccgttccgctggtacgaaggaaacggacttggacaaactagttgggaaacacctgtatacaataaaggcggcaacggcgtgtctgtagaagcacaaaccaaacaaaaggactctttgttaaatcattatcgtgaaatgattcgcgtgcgtcagcagcacgaagagttagtaaaaggaacgcttcaatctatttcagtagacagtaaagaagttgttgcttatagccgtacgtataaaggcaactccattagtgtgtatcataatatttcaaatcaacctgtaaaagtatctgtagcagcgaaaggtaaattgatttttgctagtgaaaaaggtgctaagaaagtcaagaatcagcttgtaattccggcgaatacatcggttttgataaaataa

SEQ ID NO: 13871 - protein, 526 aa, Bacillus sp
MKQLCKKGLAFILVLIFVNALILNPLNGAAAETVHKGKSPAADKNGVFYEVYVNSFYDANKDGHGDLKGLTQKLDYLNDGNSHTKNDLQVNGIWMMPVNPSPSYHKYDVTDYYNIDPQYGNLQDFRKLMKEADKRDVKVIMDLVVNHTSSEHPWFQAALKDKNSKYRDYYIWADKDTDLNEKGSWGQQVSHKAPNGEYFYGTFWEGMPDLNYDNPEVRKEMINVGKFWLKQGVDGFRLDAALHIFKGQTPEGAKKNLLWWNEFRDAMKKENPNVYLTGEVWDQPEVVAPYYQSLDSLFNFDLAGKIVSSVKAGNDQGIATAAAATDELFKSYNPNKIDGIFLTNHDQNRVMSELSGDVNKAKSAASILLTLPGNPYIYYGEEIGMTGEKPDELIREPFRWYEGNGLGQTSWETPVYNKGGNGVSVEAQTKQKDSLLNHYREMIRVRQQHEELVKGTLQSISVDSKEVVAYSRTYKGNSISVYHNISNQPVKVSVAAKGKLIFASEKGAKKVKNQLVIPANTSVLIK

SEQ ID NO: 13872 - DNA, 1761 bp, Anoxybacillus flavithermus
  CDS (1)..(1761): transl_table=11
atgttaaaggaagctgtataccaccgtccaaccgatcagtttgcctatgcttatgacgacaaaacattgcacattcggttgcgaacgaagaaaagcgatgttcatgctgtgtcccttttgcatggtgatccgtattgttgggaagataggcaatggcagtttacaaaaacagagatgacaaaaagcggatcagatgccttgtttgactattggtgggtcgccatatcaccgccatatcgccgtctccgctacgggtttgagcttgtgtcaggaaacgagagatgcgtttatacggaaaaagggttttttcatgaagcacctattgatgatatcgcttattatttctgcttcccatttttaaatcgaatcgacgtatttcacgcgccaacatgggtgaaagataccgtttggtatcaaattttccctgagcggttcgcaaatggggatccgtccttgaacccgaaaggaacgatcccgtggggaagtgccgatccgactccgacgagcttttttggtggtgattttgctggcattatggagcggcttgattatttagtcgagctaggaattaacgggatttatttcactccgatttttaaagcatcgtccaatcataaatacgatacaattgattatttcgagattgatccacaatttggtgacaaaccaacatttaagcgacttgtcgagcgttgccaccaaaaaggcattcgcgttatgcttgatgcggtatttaatcatagtgggcattttttcgctccatttcaagatgtgctgaaacatggagaaaaatcaaaatataaagattggttccatattcacgagtttccattacaaaccgaaccgttaccgaactacgatacatttgccttcgtgccaactatgccaaaattaaatacggaaaatcaagaagtgaaacaatatctattagatgtagcaacatattggattcgcgaatttgatattgacggttggcgtttagatgtcgcaaatgaagtcgatcatcaattttggcgcgagtttcgtcaagcagtgaaagcggtgaaacaagacgtatatattcttggggaaatttggcacgatgcaatgccttggttacgcggcgatcagtttgatgcggtgatgaattatccatttacaaatggggtattgcgttattttgctaaaagcgaaatgaaagcaagcgaatttgctcattcgattacaaacgtgctccattcgtatccaaacaacgtaaatgaagtagcattccatttacttggcagccacgacactccgcgcattttaacggaatgtggggaaaataaggaaaaagtaaaactgatgtttactttccaattttcgttcacagggactccgtgcatttattacggcgatgaaattgggctaactggcggacaagacccgctttgccgcaaatgcatggtctgggaggaagaaaaacaagacctcgagttattcgcacacgtgcaaaaattaatttcattgcgccgcaagtaccgctctttgtctcgtggcgaactacactttctagaaacgaatgacgaaacaaaccatcttgtctatactaaaacatatgaacaagaaacggtaatattccttcttaacaatagcaaccgaaagcttgacatcacattgccgctttcggtaaaaagaaaaaagcttactgatttatggacaaataagcaatttgtgtcagaagaaaacgaatggaccgtaacgcttgcgccatacggatttcttatgttcttagttgaataa

SEQ ID NO: 13873 - protein, 586 aa, Anoxybacillus flavithermus
MLKEAVYHRPTDQFAYAYDDKTLHIRLRTKKSDVHAVSLLHGDPYCWEDRQWQFTKTEMTKSGSDALFDYWWVAISPPYRRLRYGFELVSGNERCVYTEKGFFHEAPIDDIAYYFCFPFLNRIDVFHAPTWVKDTVWYQIFPERFANGDPSLNPKGTIPWGSADPTPTSFFGGDFAGIMERLDYLVELGINGIYFTPIFKASSNHKYDTIDYFEIDPQFGDKPTFKRLVERCHQKGIRVMLDAVFNHSGHFFAPFQDVLKHGEKSKYKDWFHIHEFPLQTEPLPNYDTFAFVPTMPKLNTENQEVKQYLLDVATYWIREFDIDGWRLDVANEVDHQFWREFRQAVKAVKQDVYILGEIWHDAMPWLRGDQFDAVMNYPFTNGVLRYFAKSEMKASEFAHSITNVLHSYPNNVNEVAFHLLGSHDTPRILTECGENKEKVKLMFTFQFSFTGTPCIYYGDEIGLTGGQDPLCRKCMVWEEEKQDLELFAHVQKLISLRRKYRSLSRGELHFLETNDETNHLVYTKTYEQETVIFLLNNSNRKLDITLPLSVKRKKLTDLWTNKQFVSEENEWTVTLAPYGFLMFLVE

SEQ ID NO: 13874 - DNA, 1749 bp, Thermoactinomyces thalpophilus
  CDS (1)..(1749): transl_table=11
atgcttattgaagcactttttcacgaaacgagggttccctatgcctgtccggaaaatttgcattccctcagggtgcgactgcgtgccgggaaaggagaaatcgcccgctgtctcgtgctccacgcggatcgctatgaattactggattcctgttttcagcagacggaagcggaatggatggcctcggaccagcggtttgattattttgaagctttgctggagtgcactgcaaaacgcctgcaatatgtatttctcctggaaggaaaaaaaggagagcgggtttatttcggagaatcgggagtgtcaaaggaacggaaccgggcaggagttttccagtatgcctatatccatgaatcagccttgtttgtgaccccggagtgggccagggatgcggtggtttatcagatttttccggacaggtttgccaatggtgacaaggagaacgacccgccccggacggaagattggagcaaggatgcacggcccggaagggacagtttttacggcggtgacttggagggggtgatccattccctcccctatttgcgcaaactgggggttaatgcgctctatttcactcccatttttgcctccccatccaatcacaagtacgatacagcggattatctgagaattgatccccagtttggcaatctggacacgtttaagcgcctgatcagggaggctcaccggcacgggatgcgaatcattcttgatgcggtgttcaaccattcgggtgaccggttttttgcttttcgcgatgtactggaaaagggagcggactcgcaatacagagactggtttttcatcgagcagtttccggttgtgcaaacgccacagcccaactatgagacgtttgctgtcaatgttcctgtcatgccgaagctgcgcacggaaaacagggaggtaaaagaatatttgttccaggtcgtccgctactggacagaaatggggatcgacgggtggcggctggatgtggccaatgaggtggatcatgccttttggcgtgatttccgatcttttgtgaagatgctgaatccggaagccctcatcatcggcgaagtatggcataatgcggtaaaatggctggaaggggatcagtttgattcggtcatgaattatttgtttcgcgactgcgtttatcgtttttttgcagagcaaacatcagatgccagcgagtttgatgccgaattgaccacagcacgcatctcttatccggatcaggcgctgcaagtggcatggaatctgcttgattcccatgataccgagcgctttttgacctcttgcggtgaaaaggaagaacggttccgcctggccgtcttgtttcagatgacctatgtggggacgccgttgatttattacggggatgaaataggcatgaccggagagacagatcctgattgccgccggccgatgttgtgggataaagaggagcaaaatcaggcgcttttctcctattatcaacggctcatccggattcgccggagttgtgctccgttgcggagggggagtttccggacatggttggctgatccaggttcccctgtctatgcctttgtgcgctcatggcaaggggaaaatgcaggaattgtcctgaataacagcgacagctggcaaaatgtttccttgccgctggatacatgggcaaaaaggaattggaccgatttgttgacgggggaaaaaggccaggcatcaggaaaccggatggagttgattctttccccttatcagggaatagtgctggtttga

SEQ ID NO: 13875 - protein, 582 aa, Thermoactinomyces thalpophilus
MLIEALFHETRVPYACPENLHSLRVRLRAGKGEIARCLVLHADRYELLDSCFQQTEAEWMASDQRFDYFEALLECTAKRLQYVFLLEGKKGERVYFGESGVSKERNRAGVFQYAYIHESALFVTPEWARDAVVYQIFPDRFANGDKENDPPRTEDWSKDARPGRDSFYGGDLEGVIHSLPYLRKLGVNALYFTPIFASPSNHKYDTADYLRIDPQFGNLDTFKRLIREAHRHGMRIILDAVFNHSGDRFFAFRDVLEKGADSQYRDWFFIEQFPVVQTPQPNYETFAVNVPVMPKLRTENREVKEYLFQVVRYWTEMGIDGWRLDVANEVDHAFWRDFRSFVKMLNPEALIIGEVWHNAVKWLEGDQFDSVMNYLFRDCVYRFFAEQTSDASEFDAELTTARISYPDQALQVAWNLLDSHDTERFLTSCGEKEERFRLAVLFQMTYVGTPLIYYGDEIGMTGETDPDCRRPMLWDKEEQNQALFSYYQRLIRIRRSCAPLRRGSFRTWLADPGSPVYAFVRSWQGENAGIVLNNSDSWQNVSLPLDTWAKRNWTDLLTGEKGQASGNRMELILSPYQGIVLV

SEQ ID NO: 13876 - DNA, 1332 bp, Anaerobranca gottschalkii
  CDS (1)..(1332): transl_table=11
atgcaacaagagattttatattttattatggtagatcgttttttccaagggataaaagataaggagtttgatgatatagataaaagtcatcccagaaaattccatggaggagatatcaaagggataatagaaaaattagactatatacaagagttaggagcaacagccctctggattactccgatttttaagaatgatcccgatggttatcatgggtattgggcacaagacttttttagtgtagatccccattttggaattctagaggattttaaagagttggtacaaaaagcccatagaaaagggttaaaggtgattttagatatagtagtaaatcatacaggaaaaacccatcctcttttaaaggaaaagccccattggtttcatcctttagtacctattaaagattgggataaccaaaaggaagtagaggaaaagtgtttagggatgttaccagatttgaaccaggatttaccggaagtcagtagttatctaattaatatgtgtaaatggtggattgttcaaacaggtttagatggctttagaatagatacagtaaaacatgttcctagggaattttggagaaagttttgccaggaaatgaaaggggtaaaggaagatatcattcttttaggagaagtatggcatccagatccctgttacttagctccttatcaaaaggatggaattaactctttagtggattttcctctatattatgctattactaaagtatttgctaaagatgaacctatggataaaatttcatcaatattattgcaagatcacctttatcaaaacccttatcttctaggtacatttattgacaatcacgatgtaccaaggtttttaagtgtcgtaaaggatcggggaaaagaacgtttaaaattagcccttgattttctattctcagtaaggggagtaccgataatatattatgggacagaaactggtatggatggaggggatgatccccataatcgaaaggatatggattttgaaggggatcttgaattaagaaaatatgttaaagacctaattaccctaagaaaaaaatatttatctttatctttaggttctctgaaagttttaaaggtaaccgatgatggtatggtctttattcgggaatgtggagaagagcaagttgttatctttattaataacagttttgatagtcaaacttttgtagtaagacttcccgatgaattacaaaggaaaagctggaagttagtatggggtaaagggacctaccaatattcctatgaaatagcatcttgtataataccacctaaatcttctgcctattttcaattatttgcccctgaaaaataa

SEQ ID NO: 13877 - protein, 443 aa, Anaerobranca gottschalkii
MQQEILYFIMVDRFFQGIKDKEFDDIDKSHPRKFHGGDIKGIIEKLDYIQELGATALWITPIFKNDPDGYHGYWAQDFFSVDPHFGILEDFKELVQKAHRKGLKVILDIVVNHTGKTHPLLKEKPHWFHPLVPIKDWDNQKEVEEKCLGMLPDLNQDLPEVSSYLINMCKWWIVQTGLDGFRIDTVKHVPREFWRKFCQEMKGVKEDIILLGEVWHPDPCYLAPYQKDGINSLVDFPLYYAITKVFAKDEPMDKISSILLQDHLYQNPYLLGTFIDNHDVPRFLSVVKDRGKERLKLALDFLFSVRGVPIIYYGTETGMDGGDDPHNRKDMDFEGDLELRKYVKDLITLRKKYLSLSLGSLKVLKVTDDGMVFIRECGEEQVVIFINNSFDSQTFVVRLPDELQRKSWKLVWGKGTYQYSYEIASCIIPPKSSAYFQLFAPEK

SEQ ID NO: 13878 - DNA, 1740 bp, Aedes albopictus
  CDS (1)..(1740)
atgaagatcttcatacctctattaaccaccctcctagtagggctgaccactgctctagactggtgggagcacggaaacttctaccaggtctacccacgatccttcaaggattccgatggtgacggaattggtgatctggatggaatcaccgaaaagctgcaatatctaaaggacatcggcatggacggagtttggttgtcaccgatcttctcttcaccgatggctgattttggctacgacatttcaaacttccgtcagattcagaccgaatacggagatctggatgctttccagcgcttgtccgacaagtgtaaggaactgggcttgcatctgatcttggatttcgtcccgaaccatactagcgatcagcacgaatacttcattaagtctgtggaaaaagacgagacctacaaggatttctacgtctggcacccaggtgtagatggaccaaacaacaccaaggttccgccatcgaactggatcagcgtgttccgtggatcttcctgggaatggaatgagcagcgcggggagttttacctgcatcaatttttgaaggagcaaccggatcttaactatcgcaatcctgccgtagttgaagagatgaagaacgtgctgcggtattggttggatcgtggagtttctgggttcagaattgatgccgtgccgtatctgtttgaaagtggcgagtccgacggacgttatcgcaatgaaccagagagtcgagccaccgacgatcccgagaatccagcttacctgacccatacgcaaaccatggatcagccggaaacctacgacatgatctatcaatggcgcgcagttttggacgaatattcccagaaagacaacagaactcgtatcatgatgaccgagggctacacgagccttccgaagatcatcgagttcttcggtaacgctaccgcaaacggggcacagattccgttcaacttcgaagtgatcagtaacatcaagaagaccagcactggcgctgactttgccaaatacgtcaaaaactggctggatgccaaaccagcgaacagacgttccaactgggtgcttggaaatcacgacaaccctcgtattggatctcgtcttggtgagaacaagatcgacttgtacaacattgctctgcaaacgttgccggatattgccgtcacgtactacggcgaggaaatcggaatgctcgatcagtggattccttggaatgagaccgttgatccggctgcctgtagatcggacgaagccacctataccgcttactctcgagatccagttcgtaccccaatgcagtgggacaatgaaaagaacgccggtttctctacagcagctaaaacatggcttcaggttgcggataactataagaccctcaacgtcaaggttcaggaccgcgcccgcaagagtcatctgaagatattcaagaagctgaccaaataccgaaagcgccaaattctgaccgaaggagacctggacatccaggtgtccggggagaatctactcgtgtacaaacggaaggtcgacaaggtgggctacgtggttgtggcgctaaactttggcacggaaccggttgcgctgggtctgaccagtttgtacgatggagttgataaacgaatgcaagtggtggtatcttctaacagagtgaccactgctgataacgcctgggtggatgcggacaaataccgattgattggagagagcggtatcgttcttcaatacctttggggtaagaatccaattgtttcctaa

SEQ ID NO: 13879 - protein, 579 aa, Aedes albopictus
MKIFIPLLTTLLVGLTTALDWWEHGNFYQVYPRSFKDSDGDGIGDLDGITEKLQYLKDIGMDGVWLSPIFSSPMADFGYDISNFRQIQTEYGDLDAFQRLSDKCKELGLHLILDFVPNHTSDQHEYFIKSVEKDETYKDFYVWHPGVDGPNNTKVPPSNWISVFRGSSWEWNEQRGEFYLHQFLKEQPDLNYRNPAVVEEMKNVLRYWLDRGVSGFRIDAVPYLFESGESDGRYRNEPESRATDDPENPAYLTHTQTMDQPETYDMIYQWRAVLDEYSQKDNRTRIMMTEGYTSLPKIIEFFGNATANGAQIPFNFEVISNIKKTSTGADFAKYVKNWLDAKPANRRSNWVLGNHDNPRIGSRLGENKIDLYNIALQTLPDIAVTYYGEEIGMLDQWIPWNETVDPAACRSDEATYTAYSRDPVRTPMQWDNEKNAGFSTAAKTWLQVADNYKTLNVKVQDRARKSHLKIFKKLTKYRKRQILTEGDLDIQVSGENLLVYKRKVDKVGYVVVALNFGTEPVALGLTSLYDGVDKRMQVVVSSNRVTTADNAWVDADKYRLIGESGIVLQYLWGKNPIVS

SEQ ID NO: 13880 - DNA, 1170 bp, Aeromonas hydrophila
  misc_feature (866)..(866): n is a, c, g, or t
  CDS (1)..(1170): transl_table=11
atgcgcatctgggcaccaacgcccaattcggccgagctgacgcgcaacctgcaccagcgcggcatgaagatcatcctggatgcggtggtcaaccacacctccaccgaacacccctggttctgcccgccgctgggggcccagcgcaacccggactcgccgtggcgcagcttctacacctttgacaacgaaggggattacgtcagctggaagggcatccgcagcctgcccaagctcgacttctccagcgaacaggtgcaggacgccgtctatcgcgccgatgacgccatcctgcgctactggatgcgcgccccctaccagatcgacggctggcgcttcgacgtcatccacatgctgggggagcgcggcaccgccgagggcaaccgcggccacgtgcgcgccattcgcggcgcggtgaagcaggagaacccggacgcctatgtactgggcgagcacttcttcgaggcgagccagtggttgcagggggatcaggaggatggcgccatgaactactacggcttcgcccacccgatccgcgccttcctggcgggccaggacatcgcctaccaccccatcaagatcagcgccgaggagctggatcgctggctcaagctggcgcgggcccacatcccgttcaagaatcagctggcacagttcaacctgctggacagccacgacaccgcccgcttcctccatctgctgggggaggacaagcagcggatgcggctcgccgccaccctgctgctcacctacatcggcgtaccctccatctactacggcgatgaagtggggctctctggcggcaacgatccggactgccgccgctgcttcccgtgggagaccaccgcctgggatcacgttctgcacgnccactaccgccggttgatccagatccgccggcaacgtccggctctgcgccgcggcgacatccagaccctctatgccggcccgcacagctatgtgttcgcccgcaccctgcaaagcgatcaggtggtggtagcctgcaaccgtcaccccagcgagccgcgcaccatcagtctgcccctgtggcagaccgccagtcccgccagccgcttcacagacgccttgaacggcgacaagttcgaagtagtgcagggcgagatacagctcaccatccccgccaactcggccagagtgctgctctccagctag

SEQ ID NO: 13881 - protein, 389 aa, Aeromonas hydrophila
  misc_feature (289)..(289): Xaa can be any naturally occuring amino acid
MRIWAPTPNSAELTRNLHQRGMKIILDAVVNHTSTEHPWFCPPLGAQRNPDSPWRSFYTFDNEGDYVSWKGIRSLPKLDFSSEQVQDAVYRADDAILRYWMRAPYQIDGWRFDVIHMLGERGTAEGNRGHVRAIRGAVKQENPDAYVLGEHFFEASQWLQGDQEDGAMNYYGFAHPIRAFLAGQDIAYHPIKISAEELDRWLKLARAHIPFKNQLAQFNLLDSHDTARFLHLLGEDKQRMRLAATLLLTYIGVPSIYYGDEVGLSGGNDPDCRRCFPWETTAWDHVLHXHYRRLIQIRRQRPALRRGDIQTLYAGPHSYVFARTLQSDQVVVACNRHPSEPRTISLPLWQTASPASRFTDALNGDKFEVVQGEIQLTIPANSARVLLSS

SEQ ID NO: 13882 - DNA, 1449 bp, Thermoactinomyces vulgaris
  CDS (1)..(1449): transl_table=11
atgaaaaagggagctttgctcagtgggttggtgtgtttattgtcggctgtgctgatgtttgcttctaccgcacccacagccgtggcgctttctcctgcggattggcaagagaaaagcatctattttattatgaccgaccggtttgacaatggtgaccccagcaatgacaattatggcggttttaacgctgacaaaagcgatccgcgcaagtatcatggtggggattttcaagggattatcaatcgcttggactacatcaagaatatggggttcacggccatttggattactcccgtcacgatgcaaaagagcgctaatgcatatcatggttattggacctatgatttttacagcgtagacggtcatctgggctccatggctaagctgcaagaattggtgcgggcggcgcatgcgaaagggatatcggtgatgctggatgtagtcgccaatcatacaggggatttccaaccttcgagcttcgccaaagctccgtttgacaaggcagattggtaccatcattatggcgacactcaagactggaacgatcaatggtgggtggagaatggagatattgccggcttggatgatttaaaccaagataatccggcagtggcaacggaattgaagaattggatcgcatggcttgtgcaaacgaccggagtggatgggttgcgcgttgatacggtgaaacacgttccaaagtggttctggcgcgaatttgacggggcagccaatacctttacccttggcgaagtgtttcatggggaccccgcatatgtaggcgattacaccaattatttggatgcggtgctcgatttcccgatgtactacaccatcaaaaatgtgtttggccaagaccagtcgatgagaacgattgcggatcgttacgcgcaagactatcgatataaaaatccgatgactaacggcttgtttatagacaaccatgacgtgccgcgctttttgaatgaagcttcaggcaagcctggcgcttcctgggacaagtggccgcaattaaaagcagcattgggcttcatgtttactacccgtgggatcccgattctgtatcaaggcacagagcagggatttagcgggggcgctgatccttacaaccgggatgatatggtctttaacgacaagcatgagctctacggttatatcgccaagctaaattatattcgtaacactcatgttgctttgcgcaaaggaacacaggctgaaaagtgggtggatgacacattttacgcttttcagcgttcgtataacggcgatgaggtggtggtgatgatcaataattcttggaacagccagacgcgcacagtgcccaacatcgatcgagtcgccaatgggcaaaccctgtacaatcggatggggacggacaaagtaacagtgaacaatggttcgattactgccacactcggccccaaagaagtaaagatatttaccaaatga

SEQ ID NO: 13883 - protein, 482 aa, Thermoactinomyces vulgaris
MKKGALLSGLVCLLSAVLMFASTAPTAVALSPADWQEKSIYFIMTDRFDNGDPSNDNYGGFNADKSDPRKYHGGDFQGIINRLDYIKNMGFTAIWITPVTMQKSANAYHGYWTYDFYSVDGHLGSMAKLQELVRAAHAKGISVMLDVVANHTGDFQPSSFAKAPFDKADWYHHYGDTQDWNDQWWVENGDIAGLDDLNQDNPAVATELKNWIAWLVQTTGVDGLRVDTVKHVPKWFWREFDGAANTFTLGEVFHGDPAYVGDYTNYLDAVLDFPMYYTIKNVFGQDQSMRTIADRYAQDYRYKNPMTNGLFIDNHDVPRFLNEASGKPGASWDKWPQLKAALGFMFTTRGIPILYQGTEQGFSGGADPYNRDDMVFNDKHELYGYIAKLNYIRNTHVALRKGTQAEKWVDDTFYAFQRSYNGDEVVVMINNSWNSQTRTVPNIDRVANGQTLYNRMGTDKVTVNNGSITATLGPKEVKIFTK

SEQ ID NO: 13884 - DNA, 1581 bp, Xanthomonas campestris
  CDS (1)..(1581): transl_table=11
atgtcttcgtcctgccgtttccgcccgttgtcgttcctgctcgccgccgcgctcggcgcatccgcggcgttcgcgccgtccgtgcatgccgccgatgccgcgcctgccactccgcggtccgaaggctccggcgtgtggtacgagatcttcgtgcgcgcctggtacgacaccgacggtgacggcatcggcgatctcaacggcgtcaccgccaagctcgactacctgcaatcgctcggcgtcagcggcatctggctgatgccgatcaatccgtcgcccagctaccacggctacgacatcaccgactacgaggggatcaacccgcagtacggcacgatggccgacttcgagaagctggtgagcgaagcgcacaagcgcggcatcgaggtgatcctcgacctggtgatcaaccacaccagcgaccagcatccatggttcaaggcggcgctggatccgaaggacgcgcatcgttcctggtacacctgggcaggcccgggtacgaacctgaaggcggtcagcgcggtgggcggcccggcgtggcatgccaacggcaagcagcactacctgggcgatttcaccggcgccatgccggacctcaactacgacgagccagcggtgcgccgcgagatgatcgcggtcggcaagttctggctggacaagggcgccgatggcttccgcctggatgccgcgcgccacatctatgacgatctggaaagcgacaacggccagcccgccgtgatcgccaggaatgcccagtggtggaacgagttccgccagggtttgcggcaggtccgtccggacgtctatctggtcggcgaggtctcggccaagcagccgggcgagctggcgccgtatctgccggcactgggctcggtgttcgactttccgctggccgagcagctgatcgccagcgccgggcaggaaaaggccggcaagctgccggcgctgctcaccgaaacgtacgcggccttccgtgccgccgcgggcgacgactacgccgacgcgccgttcctttccaaccacgatcaggagcgtgtgctcagccagctcggcggcgatctgcgccacatgcgcacggcggcggcgatgctgctgaccttgcccggccggccgtacctctactacggcgaagagatcggcatgctcggccgcaagccggacgagaacctgcgcgaacccatgcgctggcagcgccaggccggcgcgccgggcgacagccgctggaagccgtacagcgtgaagcagggcggcgaagtgtcggtgcaggccgagcaggatcggcccgattcgctcctgagcttctaccggacgctgatccattggcgcgtggaggtgccggcgctgcgcgacggcgcgctgcgcgtggtcgataccggcgccccggcgctggtggcctacgagcgcgtcacggcggacagccgcgcgctggtggtgcacaacctctcgggcaagccggcgagcatgaagctcggcgccgaccgcgccaaggccttcgccgccatccgcctgcacagtgcgcctggcgcgacgctgacggagggccggctcaccgtgccggcgtacgccaccgtggtgttgcagtga

SEQ ID NO: 13885 - protein, 526 aa, Xanthomonas campestris
MSSSCRFRPLSFLLAAALGASAAFAPSVHAADAAPATPRSEGSGVWYEIFVRAWYDTDGDGIGDLNGVTAKLDYLQSLGVSGIWLMPINPSPSYHGYDITDYEGINPQYGTMADFEKLVSEAHKRGIEVILDLVINHTSDQHPWFKAALDPKDAHRSWYTWAGPGTNLKAVSAVGGPAWHANGKQHYLGDFTGAMPDLNYDEPAVRREMIAVGKFWLDKGADGFRLDAARHIYDDLESDNGQPAVIARNAQWWNEFRQGLRQVRPDVYLVGEVSAKQPGELAPYLPALGSVFDFPLAEQLIASAGQEKAGKLPALLTETYAAFRAAAGDDYADAPFLSNHDQERVLSQLGGDLRHMRTAAAMLLTLPGRPYLYYGEEIGMLGRKPDENLREPMRWQRQAGAPGDSRWKPYSVKQGGEVSVQAEQDRPDSLLSFYRTLIHWRVEVPALRDGALRVVDTGAPALVAYERVTADSRALVVHNLSGKPASMKLGADRAKAFAAIRLHSAPGATLTEGRLTVPAYATVVLQ

SEQ ID NO: 13886 - DNA, 3309 bp, Rhodobacter sphaeroides f
  CDS (1)..(3309): transl_table=11
atgaatcagaatgtctctccctccaccgttgccgtccgccgcacggacggcatcgatcgcagccagaccgactggtacaaggatgcgatcatctaccagttgcacatcaaggcgttccaggacgccaatggcgacgggatcggtgacttcgcgggcctgatgcagcggctggattatgtgcaggcgctgggcgtgaccgcgatctggctgctgccgttctacccttcgccgctccgcgacgacggctacgacatctcggattaccgctcgatcaacccgtcctacggcgcgatgcgcgacttcaagctgttcgtgcaggaagcgcacaagcgcgggctgcgcgtcatcaccgagcttgtcatcaaccatacctccgaccagcacccctggttccagcgggcccggcgggcgaagaagggctcggccgcccgcgactggtatgtctggagcgacaccgaccagaaattccccgaaacgcggatcatctttctcgatacggaaaagtcgaactggacctgggatccggtggcgggcgcctattactggcaccgcttctattcgcaccagcccgacctgaacttcgacaatccccgcgtgctcgaggaagtcctcaagatcatgcgcatgtggctcgagatgggcgtcgacgggctcaggctcgacgcgatcccctatctggtcgagcgcgagggcaccaacaacgagaacctccccgagacgcatgacgtgctcaagaagatccgggccaatctcgaccagcatttccccgacaggatgctgcttgccgaggcgaaccaatggccggaggacacgcgcccctatttcggcgagggcgacgaatgccacatgggctttcatttcccgctgatgccgcggatgtacatggcgctcgcgcaggccgaccggcatccgatcaccgacatcatccgccagacgcccgagatcccggaaggctgccaatggggcatcttcctgcggaaccacgacgagctgacgctcgagatggtgacggccgaggagcgcgactacatgtggcgcttctatgccgaggattcgcgggcgcggatcaatctcggcatccggcgcaggctggcgccgctgatgaagaacgaccggcgcaagatcgagcttctgaaccagatgctgatgtcgatgccgggcacgcccatcgtctattacggcgacgagatcggcatgggcgacaattactatctcggcgaccgcgacggggtgcgcacgcccatgcaatggtcggccgaccgcaacggcggcttctcgcgctgcaatccgcagcagctttacctgccgaccatcctcgacccggtctacggccatcaggcgatcaacgtcgaggcgcaggcggcagacccgtcctcgctcctgaactggacgcggcggctgatcgcggtgcgcaagcagcatccggccttcgggcgcggctcgatgagcctgctctatccgcgcaaccgcaaggtgctggcctatgtgcgcagccatgagggcacggacatcctctgcgtggcgaacctctcggacacggcgcaggcggtcgagctcgatctcgcgcggttccgcggcgcggtgccggtcgagctcacgggccggtcggagtttccgccggtgggcgatctgccctacatgctgacgctgccgccctacggcttctactggttcatcctgtccgaccagcaggcgctgccgagctggcaccagccgatgcccgagacgctgccggatttcatcacgctcacgacgcgcgacgggcgggcggaaacggcgctcaccgggcgcgagacgcgccagttcgaggccgatgtgctgccgaactggctgccgctgcaacgctggttcggggccaaggaagagaagatcagcgcggtgaagctggccgttctgggctcgctctccgccgatcatgccctcgtccggctcgatgccgatgtgggcggcgaggcgcagcagtatttcctgcccgcctccgcgctctggggcgaggagcagctccgggccggggcgcccaagctgagcttcaccctggccaaggtccggcgcggcccgcaggtgggcgcgctcatcgacggggcctatgacgagcagatggcgcaggcgatgctcgaggcgctgcgtgagggccgcaggctctctggtgccgggggcgaggtggtgttcgagccgggctcgggactggccgagatcgccgacccgggcgagccgcgctatctcggggccgagcagtcgaacatttccatcgccttcggcgaccgcctgatcctgaagctctaccgacgcctgcgggccggcgagcagccggacgtcgaggtggcgcgcttcctgacggaagtggcgggctacacccatacgccccgctatctcggcgtcgtgagcctgcgcccggcggagggcgaggcgaccgtcctcgccgcggccttcgccttcgtggccaacatgggcgacgcctggcgcggcctcttcgacgcgctggtgcgggatctgggcgagttcggcggctggagcacggccgaggcgccggaagtggagaaggaaggcttctccttcccgctcaccatcccgggccttctcggccagcgcacggccgagctgcatcaggctttcgccaccgagaccgacgaggcggccttccgcatggagccgctgagggccgagcatctgacgggctgggccgagggggcgcggcgcgaggccgagaccatgctgtcggtgctcgaacggcagcggacgcatctgcccgaggaggtgctgcctctggccgaggcgctgctggcgcggcgcgacgacctgctggcgcggctcgaccgcgttaccggcttcgaaccctcgggcgcgctgacccgcattcatggcgactaccatctgggtcaggtgctgcttgcgcaggacgatgtcgccatcatcgactttgagggcgagccgcgccgcacgctcgaggaacggcgcgagaaatcctcgccgctccgcgatgtggcggggatgctgcgctcgttcgactatgccgccgccgcagccctcgcccgtcacgaggaaagcttcggcccggccagcgagcgggcggtggagcgggccgaagcctggcggcagcaggcggtggccgacttcctctctgcctacgagggcgcgtccgccggaaccgcgagcctgccctcggacccggcgctgaaggaggcgctgctcgatctcttcctcgtgcagaaggcggtctacgagacctcctacgaattgggcagccgtcccgcctgggtcggcatcccgctgcgcggccttctggaactgttggacaggacacctgcatga

SEQ ID NO: 13887 - protein, 1102 aa, Rhodobacter sphaeroides f
MNQNVSPSTVAVRRTDGIDRSQTDWYKDAIIYQLHIKAFQDANGDGIGDFAGLMQRLDYVQALGVTAIWLLPFYPSPLRDDGYDISDYRSINPSYGAMRDFKLFVQEAHKRGLRVITELVINHTSDQHPWFQRARRAKKGSAARDWYVWSDTDQKFPETRIIFLDTEKSNWTWDPVAGAYYWHRFYSHQPDLNFDNPRVLEEVLKIMRMWLEMGVDGLRLDAIPYLVEREGTNNENLPETHDVLKKIRANLDQHFPDRMLLAEANQWPEDTRPYFGEGDECHMGFHFPLMPRMYMALAQADRHPITDIIRQTPEIPEGCQWGIFLRNHDELTLEMVTAEERDYMWRFYAEDSRARINLGIRRRLAPLMKNDRRKIELLNQMLMSMPGTPIVYYGDEIGMGDNYYLGDRDGVRTPMQWSADRNGGFSRCNPQQLYLPTILDPVYGHQAINVEAQAADPSSLLNWTRRLIAVRKQHPAFGRGSMSLLYPRNRKVLAYVRSHEGTDILCVANLSDTAQAVELDLARFRGAVPVELTGRSEFPPVGDLPYMLTLPPYGFYWFILSDQQALPSWHQPMPETLPDFITLTTRDGRAETALTGRETRQFEADVLPNWLPLQRWFGAKEEKISAVKLAVLGSLSADHALVRLDADVGGEAQQYFLPASALWGEEQLRAGAPKLSFTLAKVRRGPQVGALIDGAYDEQMAQAMLEALREGRRLSGAGGEVVFEPGSGLAEIADPGEPRYLGAEQSNISIAFGDRLILKLYRRLRAGEQPDVEVARFLTEVAGYTHTPRYLGVVSLRPAEGEATVLAAAFAFVANMGDAWRGLFDALVRDLGEFGGWSTAEAPEVEKEGFSFPLTIPGLLGQRTAELHQAFATETDEAAFRMEPLRAEHLTGWAEGARREAETMLSVLERQRTHLPEEVLPLAEALLARRDDLLARLDRVTGFEPSGALTRIHGDYHLGQVLLAQDDVAIIDFEGEPRRTLEERREKSSPLRDVAGMLRSFDYAAAAALARHEESFGPASERAVERAEAWRQQAVADFLSAYEGASAGTASLPSDPALKEALLDLFLVQKAVYETSYELGSRPAWVGIPLRGLLELLDRTPA

SEQ ID NO: 13888 - DNA, 1548 bp, Ostreococcus tauri
  CDS (1)..(1548)
atggaagctgcgctcgcgtctcgcgaacgcgcgcgcgcgaagatcgtgcggaagaatcaaaacgacgagtcttccatgaaaagggcacagggtgatgcggtctctacgctagcaaagtcgaggctgcccttggatgagaggaacaccgtcgccgccccaaagctgaaaaagattaccgagatggccccgcaaacaccctttgcatcgcctctgagccgcccgctaccgtctacgccgtgcggaaatggtcgtgaattaattcttcaaggatttaattgggagtcgtgccaacacgcagaaaaaatgggcgcgtcttggtacgcgcacctgactgagatgacccctcaaatcgccgaagccggtttcacatccgtgtggttgccgccgccgacgaaatctgtgagtaaacaaggatatctaccgacggatttgtacaatctgaactcattctatgggtctgaagatgagctgaggtcttgtgtcgcgcgcctgcgtgagtacaacatcaccccagtggcggacattgtcatcaatcatagatgcgccgaggcaaaggatgacgccggtcggtggaacaagtacaccgggaagctagattgggatgagcgcgcgatcacgtgtgagaaccccgcctttggcggccgcggggcacataagactggcgaggattatctccccgcgccgaatatcgatcacacgcaagagtttgttcgacgcgatttgacccagtggctcgaatggttgcgtagcgacgtcggtttccgcggttggaggtttgacttcgtcaagggttacagtggcgccttcacgggagagtacgtcgaagctacgcgaccgtttttggcctttggcgagttctgggacgagtgtggatacagggatggagtcttggattataaccaagacgctcaccgccagcgcacgtgcaactgggtcgactccacgaccggtaacaccgccgcgttcgacttcacgacgaagggaattttgcaagaagccgtctcacgcaccgagtactggcgattgatcgacaacaaaggtcgtccaccgggattcttaggcatctggccttctcgcgccgtgaccttcatagaaaatcacgacactgggtctacgctccagcactggcctttcccatgggacaaggtcctgcaaggttactgctacatcttgacgcatcctggaacgcctacggtgttctttgatcactgggtcgatccagttttcaagccatccattgacgcgatgcttgaagttcgtaagcgcaaccgtctctcgtccaaggacgcggcgattcacattgagcgcgccaccgcgggagtctacgccgcacacgtaggccacgcgaaggaggcatacaccgaagggctgtgtaccgatgtcgacgtcacgcagccatcgatttgcatgaagatcgggcatgaagcctggtcgccgaacgcgcaaaaagttggaaacctatcttggcagtgcaccgctagcggcgacggctgggcggtctgggaagataaggcccatctcgtcgatgccgagaagatgaccagatag

SEQ ID NO: 13889 - protein, 515 aa, Ostreococcus tauri
MEAALASRERARAKIVRKNQNDESSMKRAQGDAVSTLAKSRLPLDERNTVAAPKLKKITEMAPQTPFASPLSRPLPSTPCGNGRELILQGFNWESCQHAEKMGASWYAHLTEMTPQIAEAGFTSVWLPPPTKSVSKQGYLPTDLYNLNSFYGSEDELRSCVARLREYNITPVADIVINHRCAEAKDDAGRWNKYTGKLDWDERAITCENPAFGGRGAHKTGEDYLPAPNIDHTQEFVRRDLTQWLEWLRSDVGFRGWRFDFVKGYSGAFTGEYVEATRPFLAFGEFWDECGYRDGVLDYNQDAHRQRTCNWVDSTTGNTAAFDFTTKGILQEAVSRTEYWRLIDNKGRPPGFLGIWPSRAVTFIENHDTGSTLQHWPFPWDKVLQGYCYILTHPGTPTVFFDHWVDPVFKPSIDAMLEVRKRNRLSSKDAAIHIERATAGVYAAHVGHAKEAYTEGLCTDVDVTQPSICMKIGHEAWSPNAQKVGNLSWQCTASGDGWAVWEDKAHLVDAEKMTR

SEQ ID NO: 13890 - DNA, 1554 bp, uncultured bacterium
  CDS (1)..(1554)
atgaaaaaatccatcctaactacctccatttttgcacttgtcgctttttcttcctgcgaaaaaaagcctgctccggaagtcaaaaactattggcctcaagcaggagtgacctatgagatttttgttcaatctttttatgattctaacggagacagtattggggattttaatggggtcactcaaaaactggactatgtgaaggagttgggggccaatgccatttggtttatgccgattatgccttcgccaacttaccataagtacgatgtgacggactacaaggcggttcatccagattacggtacgctggatgatttcaaaaagcttttggacgaagctcacaagcgggacatcaagattgtgatcgatttgatcatcaatcacaccagcaacgaacatccgtggtttttggaagcaaaatccggtagggataatccctatcgcgattactacgtgtgggcgcaaaaggacaccattgctgattttttgaacaaaaagaccatcacgtttgatttggataatatccgtcaatggcatgacccgggacagggagaagatttttactacgggtttttctggggtggaatgcctgatctgaactttgacaatcctaaggtaagagaggaaatctatgaaatcggacgattctggttggaagaagtgggtgtggacggatttcggttggacgctgccaagcatatttttcccgatgaccgacctttggataatcatgccttttggaaagaattccgggcaaaaatggaagtcataaagccggatgtttacttggtaggagaggtgtatgacaaaaaagaagtcgtggctccttatcttcctgggttgccagccttgttcaactttgattttcattacactctgcttgagaccatgaataccggggacgggatgcttttggccaagaagcagaaggagattttggacttttatcagggaatcacatcaagctttatcgatgcgaccatttcttctaaccatgatcagccccgtctgctgaatgaattgggatctgatccggccaaatacaagcaggccatcgcagtgatgctcagcatgccgggagcgccatatttgtattatggggaagagatcgggatgctgggtctcaagccggacgagcatatccgggagcctttcctttgggatgaaaaaagcaaggatacaggtcgcaccaagtggatcaaacccaaatacagcaaagactcaacagtaacctcattggaggtccaaaagaaagattccaacagctatttcaatcattacaaaaacttaattgctcttcgtaattcttatcctgctttggctattggttctttggaacttccagctgaggaattacctaaaagtgtaatggcatatttcagaaagtctggagatcaggaaatctttgtggttcacaatgtggacaaggaggaagttgacattcagcttccagagggatttgaagaagttattttctatttgggtgaggggaaaaacagttcaggaaaacttcagctaaaaggcaactcgagtatggtttttttgaaggattag

SEQ ID NO: 13891 - protein, 517 aa, uncultured bacterium
MKKSILTTSIFALVAFSSCEKKPAPEVKNYWPQAGVTYEIFVQSFYDSNGDSIGDFNGVTQKLDYVKELGANAIWFMPIMPSPTYHKYDVTDYKAVHPDYGTLDDFKKLLDEAHKRDIKIVIDLIINHTSNEHPWFLEAKSGRDNPYRDYYVWAQKDTIADFLNKKTITFDLDNIRQWHDPGQGEDFYYGFFWGGMPDLNFDNPKVREEIYEIGRFWLEEVGVDGFRLDAAKHIFPDDRPLDNHAFWKEFRAKMEVIKPDVYLVGEVYDKKEVVAPYLPGLPALFNFDFHYTLLETMNTGDGMLLAKKQKEILDFYQGITSSFIDATISSNHDQPRLLNELGSDPAKYKQAIAVMLSMPGAPYLYYGEEIGMLGLKPDEHIREPFLWDEKSKDTGRTKWIKPKYSKDSTVTSLEVQKKDSNSYFNHYKNLIALRNSYPALAIGSLELPAEELPKSVMAYFRKSGDQEIFVVHNVDKEEVDIQLPEGFEEVIFYLGEGKNSSGKLQLKGNSSMVFLKD

SEQ ID NO: 13892 - DNA, 2628 bp, Chlamydomonas reinhardtii
  CDS (1)..(2628)
atgcttctgcaagcccctggcctcgcgccgggctcggctcgtcgccaggcagcctgcagcgtggctcgcgaggcaaccaacgtgcgcattgtgacagcacctgctttgacacccgggcgcgctggagtttctggccggcgtatcctcccgccctcgcgcgtcgtgtccgtggagctggaggccccgacgctgtcgtcgagccctgcgactgtcagcaccaagaagttgttctgcgagccgagcgggcagcccgcatctactgcctatgggcccgccctgaccgggcgcccagctcctttgggcgccagcatcgacgctgacacgggcgccatcaacttctcagtgttcagctcctccgccgagtccgtgagcctggtgctgttcacggaggctgacctcaacgcaggccgggccactttcgagattcctctggacccgtatgtgaaccgcacgggcgacgtgtggcacatcatgctgcccgacctgcgggacgacctgctgtacggctaccgtgtggagggcgtgcaccaggaggaggacaaggactacccgggcatgaggcacgacaagcggcgtgtggttctggacccgtacgcggtggctgtgctcaaccggcggcgctggggccagatggggcccaacctgccgtacggcgaggagggcgtgctgggcgtcatgcccacgtggccgcaggccgccgccgcgctgcccgccgcccgcggctccgccttcgactgggagggcgacacgccgctcaacctgcccatggagagcctggtcatctacgaggcgcacgtgaggggcttcacggcgcacgccagcagcggggtggcggcgccgggcacgtacgcgggcatggtggagcggctggactacctcaagtcgctgggtgtgaacgccattgagctgctgcccgtgttcgagttcaacgagctcgagtactacagccagatccccggaagcgaccagtacaggttcaacttctggggctactccacggtcaactacttcagccccatgggccgcttcagcgctgcggtgggccagggcgcgccggcccgcgcctcctgcgacgagttcaagcagctggtcaaggagtgccacaggcgcggcatcgaggtgatcctggacgtggtgttcaaccatacggccgagggcaacgagcgcggccccaccatctccttccgcggcctggacaaccgcgtctactacatgctggcgccgggaggcgagtactacaactacagcggctgcggcaacacgctcaactgcaaccagcctgtggtgcggcagttcatcctggattgcctcaagcactgggtcaccgagtaccacgtggacgggttcaggttcgacctggcctccatcctgacccgcgcccactcggcctggcacccgcagcagtacgaccaggagacggggcagcgcgtggccatgagcagcggcggagccatcgtcacagcggagggcatcatgactgacggtgcgggtgtgcccaccggctacccgctggccgacccgcctctggtggagtccatcagcgaggaccccgtgctgcggaacaccaagatgatcgcggaggcctgggactgcgacggactcaaccaggtcggcgccttcccgcactacggcggccgctggagcgagtggaacggcaagttccgcgacgtggttcgcaacttcatcaagggcacggacggcccctgggcgggcgacttcgcctccgccatctgcggctcgcccaacatctacgccaacaacacgccgcacgagaccgactggtgggccaacaacggcgggcggcagtggaagggcggccgcggcccgcacgcctccatcaacttcgtggcggcgcatgacggcttcacgctggcagacatggtggcctacaacaacaagcacaacgaggccaacggagagaacaaccgggacggcgagcaacacaacaacagctggaactgcggcgaggaggggcccaccaccaagtgggaggtcaaccggctgcgtcagcgccagatgcgcaacctgaccggcgcgctgctgctgtcgtgcggcgtgcccatgatcaacatgggcgacgagtacgggcacagcaagaacggcaacaacaacacctactgccacgacagcgagctaaactacctgcggtgggaccagctggccgaggacccgcacggcttcaaccgcttcgtgcgcctgctgatccacttccgccgcgccacgcccgcgctgcagcgcaccacctttgtcaacgacaaggacatccagtggcacggcgagctgcccaacacgcccgactggaccgacaccagccgcctggtggccttcacgctgcacgacggcaagggcggcggcctgtacgtggccttcaacaccagccacctgcccaagctgctgcagctgcccaagtggggcggccgcgtgtggcagccgctggtggacaccagcaaggtggccccctacgacttcctggcggtggacggcgttctgagcgccgaggacgtggcggcggcgcggcggcagatggccatgtggaccgccgaccacacctaccccgtgctgccctggagctgcatcgtgctgcagagcgcgcccgaggacccggccgccacaagcatgatcaagtga

SEQ ID NO: 13893 - protein, 875 aa, Chlamydomonas reinhardtii
MLLQAPGLAPGSARRQAACSVAREATNVRIVTAPALTPGRAGVSGRRILPPSRVVSVELEAPTLSSSPATVSTKKLFCEPSGQPASTAYGPALTGRPAPLGASIDADTGAINFSVFSSSAESVSLVLFTEADLNAGRATFEIPLDPYVNRTGDVWHIMLPDLRDDLLYGYRVEGVHQEEDKDYPGMRHDKRRVVLDPYAVAVLNRRRWGQMGPNLPYGEEGVLGVMPTWPQAAAALPAARGSAFDWEGDTPLNLPMESLVIYEAHVRGFTAHASSGVAAPGTYAGMVERLDYLKSLGVNAIELLPVFEFNELEYYSQIPGSDQYRFNFWGYSTVNYFSPMGRFSAAVGQGAPARASCDEFKQLVKECHRRGIEVILDVVFNHTAEGNERGPTISFRGLDNRVYYMLAPGGEYYNYSGCGNTLNCNQPVVRQFILDCLKHWVTEYHVDGFRFDLASILTRAHSAWHPQQYDQETGQRVAMSSGGAIVTAEGIMTDGAGVPTGYPLADPPLVESISEDPVLRNTKMIAEAWDCDGLNQVGAFPHYGGRWSEWNGKFRDVVRNFIKGTDGPWAGDFASAICGSPNIYANNTPHETDWWANNGGRQWKGGRGPHASINFVAAHDGFTLADMVAYNNKHNEANGENNRDGEQHNNSWNCGEEGPTTKWEVNRLRQRQMRNLTGALLLSCGVPMINMGDEYGHSKNGNNNTYCHDSELNYLRWDQLAEDPHGFNRFVRLLIHFRRATPALQRTTFVNDKDIQWHGELPNTPDWTDTSRLVAFTLHDGKGGGLYVAFNTSHLPKLLQLPKWGGRVWQPLVDTSKVAPYDFLAVDGVLSAEDVAAARRQMAMWTADHTYPVLPWSCIVLQSAPEDPAATSMIK

SEQ ID NO: 13894 - DNA, 1962 bp, Paenibacillus sp
  CDS (1)..(1962): transl_table=11
atgtttctggaagctgtgtatcaccgtccgcgcaaaaactggtcctatgcgtacaacggcaccaccgttcatcttcggatccgcaccaagaaagacgacatgaccgccgtctatgctctcgccggtgacaagtacatgtgggaccacacgatggagtatgtcccgatgaccaagctggcgacagacgagctgttcgactactgggaatgcgaggtgaccccgccgtaccgaagagtgaaatacgggtttctgctgcagcagggtcatgagaagcgctggatgaccgagtatgattttctgaccgagccgccggccaatcccgaccgactgtttgagtacccgttcatcaaccctgtcgatgtgttccagccgccggcatgggtgaaggatgccatcttctatcaaattttccctgaacggtttgccaacggggatacccgcaatgatcccgaaggcacgctgccatgggggagtgccgatccgacgccaagctgcttctttggcggtgatctgcaaggcgtcatcgaccacctcgatcatctgagcaagctgggcgtgaacgccgtatacttcaccccgctctttaaggcgaccaccaaccataagtacgatacggaggattattttcagattgacccgcagttcggggacaaggatacgctgaagaagctcgtcgatctgtgccatgagcgcggaattcgcgtcctgctggacgccgtgttcaaccattccggccgaaccttccctcccttcgttgatgtcctcaagaacggggagaagtccaaatacaaggactggttccatatccgctccctgccgcttgaggtggtggacggcattccgacgtatgatacctttgcctttgaaccgctgatgcccaagctcaataccgagcatccggaagtgaaggaatacttgctgaaggccgcggaatactggattcgcgaaacggggatcgacggctggcggctcgatgttgccaatgaggtgagccaccagttctggcgcgagtttcgccgggtggtgaagcaagcgaaccccgatgcctatattctgggcgatgtatggcatgaatcgtccatctggctcgagggcgaccagttcgatgcggtgatgaactatccgttcaccaacgccgtccttgatttcttcattcatcaaatcgccgatgccgagaagttctccttcatgctcggcaagcagcttgccgggtatccgcgccaggccagcgaagtcatgttcaacctgctggacagccatgacaccgccagattgctgacccaagcggatggcgacaagcggaagatgaagctggcggtgctgttccagttcacctacttcggcaccccgtgcatctattatggggacgaggtcggccttgatggcgggcatgacccgggatgccgcaaatgtatggaatgggacgagacgaagcatgacaaggatctgttcgcgttctaccagacggtcatccggctccgccaagctcatgctgctctgcgcaccggcaccttcaagttcctcacggccgagaagaacagccggcagattgcttacctgcgtgaggacgaccaagatacgatcttggtcgtcatgaacaacgacaaggcgggccacacgcttacgctgcctgtccggcatgcacagtggacccatctgtggaacgacgatgtcctgaccgctgctcacggacagttgaccgtgaagctcccggcttacggctttgccgtgctgaaggcctcatccgattggtcatcatgggggcgccctccgttcactggcgaacacgccagcccgagcaagcggggcgcctctttttgtcgctccccctcctttcccttgacatcatcacattggcttgacccggtatcaacgttatcatgctcatgggttcagttatttagtaaattagtaaattataaatttagtgaacaattgagctgcatgtcattgaaatcatga

SEQ ID NO: 13895 - protein, 653 aa, Paenibacillus sp
MFLEAVYHRPRKNWSYAYNGTTVHLRIRTKKDDMTAVYALAGDKYMWDHTMEYVPMTKLATDELFDYWECEVTPPYRRVKYGFLLQQGHEKRWMTEYDFLTEPPANPDRLFEYPFINPVDVFQPPAWVKDAIFYQIFPERFANGDTRNDPEGTLPWGSADPTPSCFFGGDLQGVIDHLDHLSKLGVNAVYFTPLFKATTNHKYDTEDYFQIDPQFGDKDTLKKLVDLCHERGIRVLLDAVFNHSGRTFPPFVDVLKNGEKSKYKDWFHIRSLPLEVVDGIPTYDTFAFEPLMPKLNTEHPEVKEYLLKAAEYWIRETGIDGWRLDVANEVSHQFWREFRRVVKQANPDAYILGDVWHESSIWLEGDQFDAVMNYPFTNAVLDFFIHQIADAEKFSFMLGKQLAGYPRQASEVMFNLLDSHDTARLLTQADGDKRKMKLAVLFQFTYFGTPCIYYGDEVGLDGGHDPGCRKCMEWDETKHDKDLFAFYQTVIRLRQAHAALRTGTFKFLTAEKNSRQIAYLREDDQDTILVVMNNDKAGHTLTLPVRHAQWTHLWNDDVLTAAHGQLTVKLPAYGFAVLKASSDWSSWGRPPFTGEHASPSKRGASFCRSPSFPLTSSHWLDPVSTLSCSWVQLFSKLVNYKFSEQLSCMSLKS

SEQ ID NO: 13896 - DNA, 1548 bp, Halothermothrix orenii
  CDS (1)..(1548): transl_table=11
gtgaagctaaaacgcttgtctttcttcatgtttgttaccttactggtatttatatctgtttttcctgtttatgcaaacgatttcgaaaaacatggtacatattatgaaatttttgtcaggtctttttatgactctgatggtgacggaataggggatttgaaaggtataatagaaaaactggattatcttaatgatggagaccctgaaaccattgctgatctgggggttaatggtatctggttaatgcctatctttaaatctccctcctatcatggctatgatgtaaccgattattataagattaatcctgactacgggactctggaagacttccataagcttgttgaggctgcccatcaaaggggaatcaaggttataattgatttacccatcaatcataccagtgaaagacatccctggtttctcaaggcttcccgggataagaatagtgaatacagggattattatgtctgggctggccccgataccgataccaaagaaaccaagttagatggaggccgggtctggcattattccccgaccggcatgtattatgggtatttctggagtggcatgcctgatttaaactataataaccctgaagttcaggaaaaggttattgggatagcaaaatactggttaaaacagggggttgatggtttcaggcttgatggagccatgcatatcttcccaccggcccagtatgataaaaactttacctggtgggagaagttccgtcaggaaattgaagaggtaaaacccgtttacctggtgggtgaggtctgggatatttcggaaacggtagctccttacttcaaatatggttttgattctacctttaactttaaactggcagaggcagttatcgctacggctaaagctggatttccctttggttttaataaaaaggcaaaacatatttacggggtatatgacagggaggttggatttgggaattatatcgatgctcccttcctgaccaaccatgatcagaaccggattttggaccagcttgggcaggatcgtaataaggccagggttgctgccagtatttatttgaccttgcctggtaatccctttatttactatggtgaagaaatcggtatgagggggcaggggccccatgaagttatcagggagcccttccagtggtataatggatccggggagggagaaacatactgggagccagccatgtataatgatggctttacttctgttgaacaggaagaaaagaatctcgattccctcttaaatcactacaggaggttaatccatttccggaacgaaaatcctgtcttttataccggtaagattgagattataaatggaggattaaatgtagttgcatttagaagatataatgataagagggatttatatgtctaccataacctggtaaacagaccggttaaaataaaagtggctagtggtaactggaccttattgtttaattcaggtgataaggaaattacccctgttgaagataataataaacttatgtatactatccctgcttatactaccattgttctggaaaaggagtaa

SEQ ID NO: 13897 - protein, 515 aa, Halothermothrix orenii
MKLKRLSFFMFVTLLVFISVFPVYANDFEKHGTYYEIFVRSFYDSDGDGIGDLKGIIEKLDYLNDGDPETIADLGVNGIWLMPIFKSPSYHGYDVTDYYKINPDYGTLEDFHKLVEAAHQRGIKVIIDLPINHTSERHPWFLKASRDKNSEYRDYYVWAGPDTDTKETKLDGGRVWHYSPTGMYYGYFWSGMPDLNYNNPEVQEKVIGIAKYWLKQGVDGFRLDGAMHIFPPAQYDKNFTWWEKFRQEIEEVKPVYLVGEVWDISETVAPYFKYGFDSTFNFKLAEAVIATAKAGFPFGFNKKAKHIYGVYDREVGFGNYIDAPFLTNHDQNRILDQLGQDRNKARVAASIYLTLPGNPFIYYGEEIGMRGQGPHEVIREPFQWYNGSGEGETYWEPAMYNDGFTSVEQEEKNLDSLLNHYRRLIHFRNENPVFYTGKIEIINGGLNVVAFRRYNDKRDLYVYHNLVNRPVKIKVASGNWTLLFNSGDKEITPVEDNNKLMYTIPAYTTIVLEKE

SEQ ID NO: 13898 - DNA, 1533 bp, Paenibacillus sp
  CDS (1)..(1533): transl_table=11
atgctcacgatgttcgcctcaggtgcaatggctgagcaagaaatgaatgggcataagcctccaaattctgttggaagcggcgtgttttacgaaatttatattaattctttttatgattcgaatggggacggacacggtgatttgaaagggattacacaaaagcttgattacttaaacgacggcaacccccgttcgggcaaggatttgcaggttagtggcctctggctcatgcccatgaatccatctccaagctaccataaatatgatgttaccgactattatcaggtggacccccagtatgggaatctgaatgatttccgcaccttgacgaaagaagccaaacggaagggtgtcaaggtgatcatagaccttgttatcaaccattcgagcagtgagcacccttggttcaaggaggccagcaccaatccacaaagcaaataccatgactattacgtatgggcaaatgagaagacaaatctggatgaaaagggatcatggggccagcaggtatggcataagaatccgaatggcgaagggtatttctatggtaccttctggtcggggatgccagatctgaactttgacaatccagaagtccgtaaggaaatgattaaagtcggtaagtattggctgcagcagggtgcagatggtttccggcttgatgcggcgatgcatatctttaaagggcaaacgaaggatggtgccgataaaaacattgcgtggtggaatgagttccgttccgagatggaaaagattaatccaaatgtatatctggcaggagaggtatgggataagccggagaccatagctccttattacgaatcactccactctttgtttaattttgacctgggcggaaagatattgaactctgtgaaaaacggccgggatcagggtatcgcaacattcgctgagaaaacactgaagctgtacaaatcacacaataaagcggcacttgatgccccgttcctaagcaatcatgaccagacccgtgttatgagcgaactgggtggggatgtgcgaaaagccaagctgcctgcatccattcttttgacgctgccaggtcagccgtttctctattacggtgaagagatcggcatgaaaggggagaagcctgatgagtatcttcgagagcctatgcgctggtacaaaggagaaggccgcggtcaaacgacgtgggaagtacccaaatacaaccgaggcgaagtatcggtagaagcgcagatgcgggacaatgattccctgctacaaagctaccgcacgctcatccgtttgagggaagaacatgaagctcttcgtagccataatctagaaccaatccaagcaggttctgccaacgtggcggcataccaacgttcttctggcaaagaaacattgtatgtatatcacaacctgtcagggaagccggttacgctccagatgaaagatgcggataagcagaagaggaaagtggtcttttccagctccaagggtgtaaaaataaagaaaaatgcggtgacgattcccgcatacagctctctaatcaccaaatag

SEQ ID NO: 13899 - protein, 510 aa, Paenibacillus sp
MLTMFASGAMAEQEMNGHKPPNSVGSGVFYEIYINSFYDSNGDGHGDLKGITQKLDYLNDGNPRSGKDLQVSGLWLMPMNPSPSYHKYDVTDYYQVDPQYGNLNDFRTLTKEAKRKGVKVIIDLVINHSSSEHPWFKEASTNPQSKYHDYYVWANEKTNLDEKGSWGQQVWHKNPNGEGYFYGTFWSGMPDLNFDNPEVRKEMIKVGKYWLQQGADGFRLDAAMHIFKGQTKDGADKNIAWWNEFRSEMEKINPNVYLAGEVWDKPETIAPYYESLHSLFNFDLGGKILNSVKNGRDQGIATFAEKTLKLYKSHNKAALDAPFLSNHDQTRVMSELGGDVRKAKLPASILLTLPGQPFLYYGEEIGMKGEKPDEYLREPMRWYKGEGRGQTTWEVPKYNRGEVSVEAQMRDNDSLLQSYRTLIRLREEHEALRSHNLEPIQAGSANVAAYQRSSGKETLYVYHNLSGKPVTLQMKDADKQKRKVVFSSSKGVKIKKNAVTIPAYSSLITK

SEQ ID NO: 13900 - DNA, 1767 bp, Bacillus stearothermophilus
  CDS (1)..(1767): transl_table=11
atgaggaaagaagccatccaccaccgctcaaccgaccatttcgcttatgcttatgacagcgagacgctccatctccggcttcaaacaaagaaacatgatgtcgaccacgtcgagctgctttttggcgacccgtacgaatggcacgatggcgcctggcagtttcaaacgatgccgatgcggaaaacgggaagcgacgggttgtttgactattggctcgccgaagtcaaaccgccatatcgacggctgcgctatgggtttgtgcttcgagctggggacgagaaactggtctatacggaaaaaggattttaccatgaagctccgagcgacgacaccgcttactacttttgcttcccctttcttcatcgggtcgacctattccaagcgccggactgggtaaaagacacagtatggtatcaaattttccccgagcggttcgccaacggcaacccggccatcagtccgaaaggggcgcggccgtggggaagcgaggacccgacgccgacgagctttttcggcggcgacttgcaaggaatcatcgatcaccttgactatttggctgatctcggcatcaccggcatttacttgacgccgattttccgcgcgccgtcgaatcataaatacgacaccgctgattattttgaaatcgacccgcactttggggacaaagagacgttgaaaacacttgtcaagcgctgccatgaaaaagggatccgcgtcatgctcgatgcagtcttcaatcattgcggctatgagtttgccccgtttcaagatgtgttaaaaaacggtgcagcgtctaggtataaagattggttccatattcgcgagtttccgctccaaacggagccgcgcccgaattacgacacatttgcgttcgtgccgcaaatgcccaaactcaataccgcccatccggaagtgaagcgctacttgcttgatgtcgcgacgtactggattcgcgagtttgatattgacggctggcggctcgatgtggcaaacgaaatcgatcaccaattttggcgcgaattccgtcaggcggtgaaggcgctaaagcccgatgtgtacattctcggcgagatttggcatgatgccatgccgtggctgcgcggcgaccaatttgacgccgtcatgaactacccgttcacggacggagcgcttcgctttttcgcgaaagaggaaatcagcgcccgccagtttgccgatatcatggtccggttgcttcattcgtatccgaaacatgtgaacgaagcggcgtttaacttgcttggcagccatgatacaccaaggctgctcactgtttgcggcggcgacgtccgcaaagcgaagttgttgtttttgttccagctcacgttcactggttcgccgtgtatttactatggcgatgagatcggcatgacgggtggaaacgatccggaatgccggaaatgtatggtgtgggatacagagaagcaaaacaaagaactgtatgaacatgtcaagcaactgatcgctcttcgcaggcaatatcgggcgcttcgacgcggcgatgtcgcttttctcgccgccgatgatgaagcgaaccatcttgtttatgaaaaaacggatggcaatgaaacggtcatgatcatcatcaaccggagcaacgaagcagcagaaattcccatgccgatcgatgcgcgtggaaaatggctggtcaaccttctgacaggggagcggttcgctgcagaggcggaaacactttgcgtctccttgccgccgtacgggtttgtgctttacgcggtcgaaagctggtaa

SEQ ID NO: 13901 - protein, 588 aa, Bacillus stearothermophilus
MRKEAIHHRSTDHFAYAYDSETLHLRLQTKKHDVDHVELLFGDPYEWHDGAWQFQTMPMRKTGSDGLFDYWLAEVKPPYRRLRYGFVLRAGDEKLVYTEKGFYHEAPSDDTAYYFCFPFLHRVDLFQAPDWVKDTVWYQIFPERFANGNPAISPKGARPWGSEDPTPTSFFGGDLQGIIDHLDYLADLGITGIYLTPIFRAPSNHKYDTADYFEIDPHFGDKETLKTLVKRCHEKGIRVMLDAVFNHCGYEFAPFQDVLKNGAASRYKDWFHIREFPLQTEPRPNYDTFAFVPQMPKLNTAHPEVKRYLLDVATYWIREFDIDGWRLDVANEIDHQFWREFRQAVKALKPDVYILGEIWHDAMPWLRGDQFDAVMNYPFTDGALRFFAKEEISARQFADIMVRLLHSYPKHVNEAAFNLLGSHDTPRLLTVCGGDVRKAKLLFLFQLTFTGSPCIYYGDEIGMTGGNDPECRKCMVWDTEKQNKELYEHVKQLIALRRQYRALRRGDVAFLAADDEANHLVYEKTDGNETVMIIINRSNEAAEIPMPIDARGKWLVNLLTGERFAAEAETLCVSLPPYGFVLYAVESW

SEQ ID NO: 13902 - DNA, 6057 bp, Bacillus stearothermophilus
  CDS (1)..(6057): transl_table=11
atggtgaagggaagatggagaaagtatgtcgcttatttctcaatctttttgctttttgcccagttgttttcatttagcgcaatcgttcgcgcaaatgaatcggtgcaaagccctgttgtgaacggaaacgatgtgacgtttcgctacgttggaacaggggaagagcagtctgttttgctcgctggatcgtttaatgactggcaaacagatggtgagaaaaagattgaattaacgaaagaaagcgatcatatttggtcagtaacaaaaacgcttccagatggaacgtacatgtacaaattcgttgtagacggaaattggatgacagatccattaaataacaacaaagcagatgatggatatggcggaaaaaatagcgtcgttgtagtcggtcaacctgctcagcagcaggagcgcgttgtgacgctcgtcggcaatttacaaaatgagcttgggcatgaaaaagagtgggatccggcagcgacagctaccgtcatgaagcatgaaggaaacggcttgtacacgttcacaggtgtactcccggcaggtacgtatgagtacaaaatcgcgataaatggaagctgggatgaaaactatggtgcgggtggccggaacggtggaaacatttctttcacgctcgaaaaagaaacggaagtaacgttttattaccacgatagtactcatgcgatcgctgattcaacgtggtatacgccgattccaaaagaaaaacagccgcgattagtcggaacgattttgcctgcgatcggctatgaaaaagaagttgatggttggacgccagagacgtcgagtgcatttttagtcgataataacttcgacttcatttacacatttactgctcgtgtaccaaaaggaaactatgaatttaaagtgacgttagggaatagttgggatgaaaattatcctcaagataatgctaagttaaacgtattagaagaaacgacaattacgttcttctttaacgcaaaaacaaaggagctatatacagactacagtccaacaggttcggatggcaacgttcaaaaagatcgtttaaagcataatacgtgggactctttatatcgtcagccgtttggagcagtgaaagcaggaacggaagtgacgttacgtttagctgcgaaaaaaggcgatgtaacgaaagcgaacgtgtatgtgaagaatacaacgacaggaacggcgaagttgtacgcgatgagcaaagtaggagtgatcggagacgatgagtattgggaagcgacattcactcctgaagaaaaagggttatatggctataaatttatcgcgatggacggtgcagctaaagcagagtatggtgaggatacacaagaaggtcaatggggacgagcggcagataagaacgtagaattattccaattgactgtatacgatccaaactataaaacgccagattggatgaaacaggcggttgtataccaaattttccctgatcgtttctttaatggaaatccaaataacgacaaagtgaaaaaatatgcgcgtggaaatgaaccgattgaacatcgggagtggtcggaacttccagataatccacgtatgaaagctactcctggatatgacggtgacggtatttggtccaacgacttttttggtggagacattgctggtattgaacaaaagctagattacttgcagtctttaggtgtaaatacgatttacttaaacccgattgcgcatgcgccatcaaaccataagtatgatgcgcacgattataaagcaatcgatccgatgtttggcacgcctgaagaatttgaatcattcgtgcaagcggttgcatcgcgcggtatgcaccttattttagatggggtatttaaccacgtatcggatgactccatttattttgatcgttacggaaaatatccgactgttggggcatatgaatattggtcggctgtatacgatttaatgaacgataaagggttgtcggaagaggaagcgcgtgttcaagtagaacaaaagtttaaagatgagggacaacagttcagtccgtacggattccatttatggtttaatatcgagaatgaaaaagtaaacggtgcatataaatatcaagcatggtggggatttgatagtttaccagaatttaagtctatttctggaacgaaagtaccgtatgcgagcgaattaaacaatgagcaactcgcaaactacattttttacgagcaagattccgtcgcaaaaagttggattacgcgcggggcatccggttggcgtttagatgtagccaatgaggtggatacggagttttggcgcgagtttcgtaaagagttgttgcaaggtgactatgaccgtgggccaacgctcaaaagcggacaacaaccgttaattctcggtgaaatttgggatgatgcatcaaaatacttccttggtgatcaatacgattcagttatgaactaccgtttccgcggcgctgtattagactttttacgaaacggtaaagcagaggaaatcgatgcgcgattaacagctattcgtgaagattatccggaagaagctttttatgcgctaatgaaccttatcggctcgcatgatacggcgcgtgcagtgtttttacttgggaacggaacagattcgtatgagcgtgctgaacttgatccgaactataatgaacaactcggcaaaaagcgattgaaactcgcggcgattttgcaaatgggttatccaggagcaccaacgatttactacggcgatgaggcaggtgtaacaggttcaaaagatccagatgatcgtcgtacgtatccgtggggaagcgaagatacggagcttattgcacattatcaaaaagtaggtactgttcggacagaacatcaagatgtgttagcgaaagggacaattgagacagtatatgcgaaaggtgatgtgtacgtctttgcccgtcagtacggaaaagatgttgcgcttatcgcgataaaccgtgggaatagtgcacaaacggtacagttggatgtttcttcaatcattccgaatggaacaagctttgttgatgaactacatggcgaatatgaagtgacagtatcgaacggaaaggtacagctaaacattcctgcatttgatggacgcatgttgtttggaaaagtaactgttaatatgccgaatgaagtgacgaacgttcaagcaacagcaggcgttggacaagtgacattaacgtgggaaggtgatgcaccgacttatcgtatttatcaatccacgttaaaaggtgcaggttatacgctcgtgaaagagacgaatgagaaagaggctgtcattggtggtctgaaaaatggaacagcgtattattttgctgttacagctgttgatgaaaacggaaatgagtcggctaaagtagaaacgaatcgcgtcgtaccacattatcctttagatgagcagcatattgtacatgtggacatcgtaagcgatgacgttttggacttggcaaaagcgatcgttgttgaggcgaaagtgcgcattgatgatgtaacaaagcacggcttagcggacggtttacaagccgtattacaagtgaaaagaccgaatcatgaaaagtgggaaaacgtgcaagcggcatacgaacgtcaagacggtgaagataacgtattccgagcatcgtttattccgttagcttcaggaacatacacgtatcgttacggctttacaacaaatctcggtgacagttgggtgtatacagaagaaaaaacgtttacactcgctgcaaatgaggcagatcaacaagcaccagcaaagggcattcagctcgtgcaaccagatgtcgaatctggtcaagtaaatttatcatggtcgtttgttgaaagagacgatcatgatgcttatatggtagtcattgagcgcgacggtcaagtgatttatacgacaacaacgattagtacatcatttacagattatgatgtagaaaacggaaaaacgtacacatatgtcgtaaaattgtacgaccgagcaggaaatgttgtcgaatccaatgcggtggaagtaacaccgaacatcgttatggttcaagtgacgtttaaagtgagagcgcctagttacacgccgttagatacgcgcattactattccaaacagcttgaacggttggaacacaggagcttgggaaatgacgcgtggtggagcggtaacatcggattgggagtttacaacggaactgcaagaaggtgagacgatcatctacaaatatgtaaaaggagcgtcttgggatcaggaaggattagctgatcatacacgtgatgatcaaacagatgatgacgttagctattatggctatggcgcaatcggaacggatttaaaaattacggtacaaaatcaaggcaataacaaaatgatcattcaagattacattttgcgttggatcgatatgcctgtcgttattgaagaagtgaaaaaagatggcgatcgcgtcacgataaaaggaaacgccatcaaaggcggtgtgcttacgatcaataaagaacgtgtaacgattcacgatgatatgtcatttacgtacacgttcacaccgaatgcaaaccaaaaagaagtagctatccatattgagccttctgaagaaagtaaggcgaatattttcaaaaatgacggtggagccattgcgaaaaatacgaaaaattatgtgttaaacattgaaacgaagcaattacgtgaaggggtgttaactgagcagccagatagcggcacgacaccaggaagcggcacgacaccaggaagcggcacaacaccaggaagcggcacaacaccaggaagcggcacaacaccgggcagtggtacaacaccaggaagcggcacgacaccaggcagtggtacaacaccaggcagtggtacaacgccagaaaaaggtgcagttgtcgttgagccgaaagtggaagtgaaagagagagatggaaaagttgttgaaaaagttgctgccgtttcgtcgaacgatatcgcaacgattgtcaacgaactttcgaatgaaaagaaacaagtcgtcatttccacaggttcgctcgttaaagatgtagcaacaaaagtagacgtacctgcgtcgttgtttgttcaagcagcgaataagcaatccgatgcgacgattgttagtgcgagtgaacaagcggtgtataaattgccagcaaaagaagtgaagcaagcagtagatcaagtggctaaacagctcggaacgacggtagatcaagtaagcatttccatcgagatgaaagtaaaagatgcgccacaattaccggttaaaacgttgtctgatgcggtacagttccacgttgtcgcaaaagcaaatggaaaggaacaagccattgatcgctttactcaatatgtcgagcgagagattgcgctcaaacaacctgttcagccaaatcgcgcggtagttgtgcgcgtaaacgatgatgggtcattgactccagtaccgacaacgttcgtcgatcaaaaagcggtagcgaagtcgttaacgaactcgacgtatgttgttgtcgaaggaacaacgacgtttgcggatatcgttcaacattgggcgaagccgtatattgattcgttggcagcaaaacagctcgttcgcggggtaacagagacggcgtaccgaccaaatgagccgatgacgcgtgcacaatttgccgtattgcttgtgcgtgccctcgcgttgcctagtgaaacatatgatgggcgatttgccgatgtgaaaggaacagaatggtttaaccaacatggtgaacttgctgcggcggtgaagtatggtgtgattcaaggaaagacgccaagcacgtttgcaccaaatgagccgattacacgcgcgcaagcagctgtcatgatcgagcgtgctcttaacctttcgtttgtcaactttgacaaggcggcaaaagatcaaacgaagaaactagcggatttccgtgatgcgaatcaattgccagcatggtcaaaacaagctattgaagcaatatatcaagcagggatcgtacaaggtcacccagacggtacatttgccccagcaggtcgaatgacacgtgcagaaatggcaaaggtgttagcagaatttttagcaaaggcgaagttgatgtaa

SEQ ID NO: 13903 - protein, 2018 aa, Bacillus stearothermophilus
MVKGRWRKYVAYFSIFLLFAQLFSFSAIVRANESVQSPVVNGNDVTFRYVGTGEEQSVLLAGSFNDWQTDGEKKIELTKESDHIWSVTKTLPDGTYMYKFVVDGNWMTDPLNNNKADDGYGGKNSVVVVGQPAQQQERVVTLVGNLQNELGHEKEWDPAATATVMKHEGNGLYTFTGVLPAGTYEYKIAINGSWDENYGAGGRNGGNISFTLEKETEVTFYYHDSTHAIADSTWYTPIPKEKQPRLVGTILPAIGYEKEVDGWTPETSSAFLVDNNFDFIYTFTARVPKGNYEFKVTLGNSWDENYPQDNAKLNVLEETTITFFFNAKTKELYTDYSPTGSDGNVQKDRLKHNTWDSLYRQPFGAVKAGTEVTLRLAAKKGDVTKANVYVKNTTTGTAKLYAMSKVGVIGDDEYWEATFTPEEKGLYGYKFIAMDGAAKAEYGEDTQEGQWGRAADKNVELFQLTVYDPNYKTPDWMKQAVVYQIFPDRFFNGNPNNDKVKKYARGNEPIEHREWSELPDNPRMKATPGYDGDGIWSNDFFGGDIAGIEQKLDYLQSLGVNTIYLNPIAHAPSNHKYDAHDYKAIDPMFGTPEEFESFVQAVASRGMHLILDGVFNHVSDDSIYFDRYGKYPTVGAYEYWSAVYDLMNDKGLSEEEARVQVEQKFKDEGQQFSPYGFHLWFNIENEKVNGAYKYQAWWGFDSLPEFKSISGTKVPYASELNNEQLANYIFYEQDSVAKSWITRGASGWRLDVANEVDTEFWREFRKELLQGDYDRGPTLKSGQQPLILGEIWDDASKYFLGDQYDSVMNYRFRGAVLDFLRNGKAEEIDARLTAIREDYPEEAFYALMNLIGSHDTARAVFLLGNGTDSYERAELDPNYNEQLGKKRLKLAAILQMGYPGAPTIYYGDEAGVTGSKDPDDRRTYPWGSEDTELIAHYQKVGTVRTEHQDVLAKGTIETVYAKGDVYVFARQYGKDVALIAINRGNSAQTVQLDVSSIIPNGTSFVDELHGEYEVTVSNGKVQLNIPAFDGRMLFGKVTVNMPNEVTNVQATAGVGQVTLTWEGDAPTYRIYQSTLKGAGYTLVKETNEKEAVIGGLKNGTAYYFAVTAVDENGNESAKVETNRVVPHYPLDEQHIVHVDIVSDDVLDLAKAIVVEAKVRIDDVTKHGLADGLQAVLQVKRPNHEKWENVQAAYERQDGEDNVFRASFIPLASGTYTYRYGFTTNLGDSWVYTEEKTFTLAANEADQQAPAKGIQLVQPDVESGQVNLSWSFVERDDHDAYMVVIERDGQVIYTTTTISTSFTDYDVENGKTYTYVVKLYDRAGNVVESNAVEVTPNIVMVQVTFKVRAPSYTPLDTRITIPNSLNGWNTGAWEMTRGGAVTSDWEFTTELQEGETIIYKYVKGASWDQEGLADHTRDDQTDDDVSYYGYGAIGTDLKITVQNQGNNKMIIQDYILRWIDMPVVIEEVKKDGDRVTIKGNAIKGGVLTINKERVTIHDDMSFTYTFTPNANQKEVAIHIEPSEESKANIFKNDGGAIAKNTKNYVLNIETKQLREGVLTEQPDSGTTPGSGTTPGSGTTPGSGTTPGSGTTPGSGTTPGSGTTPGSGTTPGSGTTPEKGAVVVEPKVEVKERDGKVVEKVAAVSSNDIATIVNELSNEKKQVVISTGSLVKDVATKVDVPASLFVQAANKQSDATIVSASEQAVYKLPAKEVKQAVDQVAKQLGTTVDQVSISIEMKVKDAPQLPVKTLSDAVQFHVVAKANGKEQAIDRFTQYVEREIALKQPVQPNRAVVVRVNDDGSLTPVPTTFVDQKAVAKSLTNSTYVVVEGTTTFADIVQHWAKPYIDSLAAKQLVRGVTETAYRPNEPMTRAQFAVLLVRALALPSETYDGRFADVKGTEWFNQHGELAAAVKYGVIQGKTPSTFAPNEPITRAQAAVMIERALNLSFVNFDKAAKDQTKKLADFRDANQLPAWSKQAIEAIYQAGIVQGHPDGTFAPAGRMTRAEMAKVLAEFLAKAKLM

SEQ ID NO: 13904 - DNA, 1983 bp, Thermococcus sp
  CDS (1)..(1983): transl_table=11
atgtataaaattttcggatttaaagacaatgactaccttggaaaggttggaatcacagagttttctatacctaagagcggttcctatgcctaccttttaggaaattttaatgcattcaatgaaggaagctttagaatgagggaaaagggagatagatggtatataaaggtagagcttcctgagggaatctggtactatacattttcggttgatggaaatttaatattagattttgaaaataatgaaaaaactgtgtatagaaggctttcatataaatttgaaaaaactgttaatgttgctaaaatcttctcgggagagaaattttaccattatccctctttggtctatgcttattctttgggagactcaacatacattcgctttagagccatgaagggagtggctaaaagagtgtttttaatttcagaccaaaaatatgaaatgagaaaaaaagcacaagatgaactctttgagtattttgaagcagttctacccagaaaagaaggacttgagtattattttgagattcatgaagcagatgaaattattgattatggagactttaaggtagattttaacgagcagaaggaaaggtttaagccacctgcatgggtctttgagagagtcttttatcaaataatgcccgatcgctttgctaatgggaatccagagaatgacccgcataattgtatagaatttaaaactatcactcaccacggcggtgatcttgagggtattatagagaaacttgactacattgaggaactcggtgttaatgcactttacctaaccccgatcttcgagtcaatgacatatcacgggtatgacatagtggactactatcatgttgctcggaaattcgggggagatgaagcttttgaaaaattaatgcaaaagctgaagaaacgggatataaagcttattttagatggagtttttcatcataccagcttttttcatccctactttcaagatgtagtgaaaaatgggaaaaacagtaagtacaaagatttttatcgtataatcagttttccagttgttccagaggagtttttcgagattttaaactcgaagctcccatgggatgaaaaatataggcggcttaaatcccttaaatggaactacgagagcttttattctgtatggctaatgcctcgtttaaaccacgacagcaaaggagtaagagaattcattaggaatataatggagtactggattaaaaaaggcgccgatggctggaggttggatgttgctcatggagttccacctgaagtatgggaagaaattagagaaaagttgcccagtaatgtgtatctagttggagaagtgatggacgatgctaggttgtggatattcaacaagttccatggaaccatgaactatccattgtatgaggcaattttgagattttttgtaacaagagaaattaacgcagagcaattcttgaactggcttgaacttttgagcttctactacggccctgctgagtacgtgatgtataatttcttagataaccatgatgtggatagaatgcttagcctgcttggagacaagagaaaatatctctgcgccttggtttttcttttcacgtacaagggagttccgtctatttactatggtaatgaaattgggatgaaaaatatagaggctccttttatggagcgttcaagggcacctatggaatggaataagaagaaatgggataaagaaatccttaaaactacaaaagagttgataaagttgagaaggagaagcaaagctttgcaaaaaggtatttttaaaccagttaaattcaaagacaaattattggtctataaaagagtgttaaataacgaaaacatcttagtagcaatcaactattcaaagaaagaaaagcatctagatttaccaccttcctttgaaatactctttcaaagtggatcattcgacagagtgaatatccgattaaaaccattttccagtattattgctaaaaagttgtag

SEQ ID NO: 13905 - protein, 660 aa, Thermococcus sp
MYKIFGFKDNDYLGKVGITEFSIPKSGSYAYLLGNFNAFNEGSFRMREKGDRWYIKVELPEGIWYYTFSVDGNLILDFENNEKTVYRRLSYKFEKTVNVAKIFSGEKFYHYPSLVYAYSLGDSTYIRFRAMKGVAKRVFLISDQKYEMRKKAQDELFEYFEAVLPRKEGLEYYFEIHEADEIIDYGDFKVDFNEQKERFKPPAWVFERVFYQIMPDRFANGNPENDPHNCIEFKTITHHGGDLEGIIEKLDYIEELGVNALYLTPIFESMTYHGYDIVDYYHVARKFGGDEAFEKLMQKLKKRDIKLILDGVFHHTSFFHPYFQDVVKNGKNSKYKDFYRIISFPVVPEEFFEILNSKLPWDEKYRRLKSLKWNYESFYSVWLMPRLNHDSKGVREFIRNIMEYWIKKGADGWRLDVAHGVPPEVWEEIREKLPSNVYLVGEVMDDARLWIFNKFHGTMNYPLYEAILRFFVTREINAEQFLNWLELLSFYYGPAEYVMYNFLDNHDVDRMLSLLGDKRKYLCALVFLFTYKGVPSIYYGNEIGMKNIEAPFMERSRAPMEWNKKKWDKEILKTTKELIKLRRRSKALQKGIFKPVKFKDKLLVYKRVLNNENILVAINYSKKEKHLDLPPSFEILFQSGSFDRVNIRLKPFSSIIAKKL

SEQ ID NO: 13906 - DNA, 2181 bp, Thermococcus sp
  CDS (1)..(2181)
atgagacggcgctttggggctcttcttttgctaatgttcatgttaaatataatagcatcaggatgccttcaatcacccacaacccaagagctaaaacttccctcaggaaactatccccccatctacataaacgaaaaaagccaaaatatgtgtccaccaggtaaagtgcccgtcacgttcagataccaaccagaagaaaacgttacttctgtgagtctgcgaggaagctttaacgactggggagaactgcccatgaaaaatgagaatggaacatgggtaaggacagtatgcttaaatcccggcagatacgaatacaaattctttgtagatggcgaatggataaaagatatgtcagcagttgatcccacagcagatgcttacgtagatgacggatttggcggaaaaaacgccgttaaaatcgtaaaaggggaacaaggcctgataatagaacacgaccctaagaaccccgcttatctatcgattgccgataatagaacggtaattaggttcaaggtacaacccaaccagatacaatcggcatttctcgtggcttccaatggagaatacaaaatggagcgtcagctatggtgggggtctggagaagtctggagagtggagattcaagaggtaagccccatagaatactacttcaaactcacaacaaacaatggagaggttctcgtccttaatacctccaaaaatccattcttcacctttgatgggataaacaggttcccccaagtggagtgggtgagcaaaggaataggctaccagatatttccggatcgctttaataacggtgatccaagcaatgatgcattagctctccaaaccgatgagttttggtttaatgagcttataaatgaaaggcccattctatcaaattggagcgacccaataagcccacttcactgctgtcaccagtactttggaggagatataaaagggatactcgaaaagctggattaccttcaagaacttggggttactgttatctacctaaacccgatatttctagctggaagcgctcacggttacgatgtatacgaccattaccgcctcgatccacagtttggaagcgaagaagacctaaagattctcattgaagaagctcataagagaggtataagaattatctttgactttgtccccaaccacagcggaattggacattgggcgtttctggatgtggcatcaagaggaaagaaaagcccttactggaactggtactttgtgcagagatggccatttaagttgggagatggaaaagcatatcttgggtggtggggactcggaagtttgcccaagctcaacacagccaatccagaggtcaaggaatatttaataggtgccgcactgcactggcttgactttggctttgacggcattaggatagatgcgccacaagagctcataaacgccgaggaatttttctccgagctaaggaaagccatcaaggaaaagcaccccgatgcatacatagtgggcgaaatatgggagctttctccgagatgggtgcagggaaacatgttcgactccctcatgaactacgctctcggaagagatatactccttgcttacgcaaggggagactggaatggagaaagaacgctggagcttttgggcagatactacgcaagctacggagaaaacgtcattgccatgggttttaatctggtaagctcccatgacacttcaagagtccttacagatttaggaggtggcaatttaggagacacaccaaagccagaagcaattcagagactaaaacttctttcaacgctcttatacactcttccaggcatgcccgtaactttccaaggagatgaaagaggcctcctaggggacaaagaacactttgactcccatagatacccaatacaatgggataccgtgaatgaagatgtgttaaaccattacaagagcctcgcagatttaagaaaaagcgttccggcgttaacaagcagcaaaataaagttctacacctcaaaagaaggcgtcctagcatttttcaggggacatgatgacgaggttcttgtaattgcaaacaacgtccccaaagacacatctattccccttcctccaggcaaatggaagcagatatggccagaaggagagaaaatatttgagaaagagataacagttccagggctggaagttctggtactcgtaaagacatag

SEQ ID NO: 13907 - protein, 726 aa, Thermococcus sp
MRRRFGALLLLMFMLNIIASGCLQSPTTQELKLPSGNYPPIYINEKSQNMCPPGKVPVTFRYQPEENVTSVSLRGSFNDWGELPMKNENGTWVRTVCLNPGRYEYKFFVDGEWIKDMSAVDPTADAYVDDGFGGKNAVKIVKGEQGLIIEHDPKNPAYLSIADNRTVIRFKVQPNQIQSAFLVASNGEYKMERQLWWGSGEVWRVEIQEVSPIEYYFKLTTNNGEVLVLNTSKNPFFTFDGINRFPQVEWVSKGIGYQIFPDRFNNGDPSNDALALQTDEFWFNELINERPILSNWSDPISPLHCCHQYFGGDIKGILEKLDYLQELGVTVIYLNPIFLAGSAHGYDVYDHYRLDPQFGSEEDLKILIEEAHKRGIRIIFDFVPNHSGIGHWAFLDVASRGKKSPYWNWYFVQRWPFKLGDGKAYLGWWGLGSLPKLNTANPEVKEYLIGAALHWLDFGFDGIRIDAPQELINAEEFFSELRKAIKEKHPDAYIVGEIWELSPRWVQGNMFDSLMNYALGRDILLAYARGDWNGERTLELLGRYYASYGENVIAMGFNLVSSHDTSRVLTDLGGGNLGDTPKPEAIQRLKLLSTLLYTLPGMPVTFQGDERGLLGDKEHFDSHRYPIQWDTVNEDVLNHYKSLADLRKSVPALTSSKIKFYTSKEGVLAFFRGHDDEVLVIANNVPKDTSIPLPPGKWKQIWPEGEKIFEKEITVPGLEVLVLVKT

SEQ ID NO: 13908 - DNA, 2220 bp, Thermococcus sp
  CDS (1)..(2220): transl_table=11
atgagaagcagaaagatttatatgcttgttgtattgcttctttttttaggatttagtgaacaaatttcaacagtagctgcaggggtcagtccctcatatccagcaggggatccccagacatgggttatctaccaaatagtcattgatagattttacgatgggaacacctcaaacaatgatccattaaaaagtccaggattatatgatccaaacaaagagaactggaagctttattggggcggtgatttagagggcatcatagcaaagctgccctacttatatgaacttggagtgagtgccatatggatttctccagtgtttgataatatagatgttcctatcaatggaagcaatggtctagaggcggggtatcatgggtattggccaaaggactttaaggttatagaagagcactttgggacatgggaaatattccgcagacttagtcaagaagcagccaagtacaatatcacgattataattgacttcgttccaaaccacagcaatcccaatgatgcgggcgagtatggagctctatatgataatggcacgtttgttattgattatccaacggatgcaaattatgcgactgttcacccaataacaaagagtttatcgtacatatacaatcacaatggaggaataacaaattggaatgatagatgggaagtcagatataaaaatctctttaatctggctgatcttaatcagttgaatccatgggtggacaattatcttaaagaatcgacagtatcttacttagaagctggaattggaggaataagaatagatgcagttaaacacttagagcctggatggctcaaaacttatgcagactatgtatatgcaagaaagaacgtatttatgtttggagaatggtaccagggctttaacgatgagatgtactgggatatggttaagtttgcaaactatacggggataggccttattaacatcccactccaacaagttctcgttgatgtttttgcttatgatacaaagactatgtgggacttggaaagcgctgttaataaatataccattgactttatgtggcaaaataaactaactatattcgtagacagccacgatgttccaagatttctgtccttgagaaatgacttaataagatttcaccaagctcttgcttttgttctaaccgctcctggaattccaataatctattacggtgatgaacaatatcttcacaatgatactgtaaatgactttggtcaagttggaggtgacccatataatagacctatgatgaaaacttggaacacatcaacaaccgcttttaaactaataaagactctcgcaagtctgagacgctataatcctgctttagcttatggattgatcgcgacaaggtatgtaagcgatgacatttacatctttgaaagaaagttctttgataacgttgttctcgtagcaataaatcgcaatttaaattctccatatgtggtctctaacgtttacacctccctaccagatggaagttacaatgactaccttggaggacttttgaacggagttggaataacggtttcatctggtacattctctgtagagttacctgcaggttcagtatcagtatggcagtacaaagcaacgccgactgatccatgggtaggagcaattgatccagttatgggaagagctggaaacattgtcacagttagtggagaagggtttggggatgttccgggaagagtcttaataacaaatggacaagattactggactgcagaagttacatattggagcgataaaagcgtagagttcatagttccttcaggaataactacccaactaaacgaaaatcatgttgaagtcagaattgaaagggctgatggggctacatcaaatggaatagcctttgaatatctaacgaacaaacaaattccagctatttttgaagttaggaacactcaaggtacaaatttagaaacccaagttggagaatttttatggctaacaggtagtgttccagagttgagctattggagtccagaaacaataaaagctgttggaccaatgttgtgtccaggatggcctgattggtttgttgtagcaagtgtcccggcggatacctatatagagttcaagttcttaaaggcaccgcttggaggcactggaatctgggaagtaggaagcaatcacgcatacctaacaccttcaagcggaataggggaagtttcagttgaagccaaccgttga

SEQ ID NO: 13909 - protein, 739 aa, Thermococcus sp
MRSRKIYMLVVLLLFLGFSEQISTVAAGVSPSYPAGDPQTWVIYQIVIDRFYDGNTSNNDPLKSPGLYDPNKENWKLYWGGDLEGIIAKLPYLYELGVSAIWISPVFDNIDVPINGSNGLEAGYHGYWPKDFKVIEEHFGTWEIFRRLSQEAAKYNITIIIDFVPNHSNPNDAGEYGALYDNGTFVIDYPTDANYATVHPITKSLSYIYNHNGGITNWNDRWEVRYKNLFNLADLNQLNPWVDNYLKESTVSYLEAGIGGIRIDAVKHLEPGWLKTYADYVYARKNVFMFGEWYQGFNDEMYWDMVKFANYTGIGLINIPLQQVLVDVFAYDTKTMWDLESAVNKYTIDFMWQNKLTIFVDSHDVPRFLSLRNDLIRFHQALAFVLTAPGIPIIYYGDEQYLHNDTVNDFGQVGGDPYNRPMMKTWNTSTTAFKLIKTLASLRRYNPALAYGLIATRYVSDDIYIFERKFFDNVVLVAINRNLNSPYVVSNVYTSLPDGSYNDYLGGLLNGVGITVSSGTFSVELPAGSVSVWQYKATPTDPWVGAIDPVMGRAGNIVTVSGEGFGDVPGRVLITNGQDYWTAEVTYWSDKSVEFIVPSGITTQLNENHVEVRIERADGATSNGIAFEYLTNKQIPAIFEVRNTQGTNLETQVGEFLWLTGSVPELSYWSPETIKAVGPMLCPGWPDWFVVASVPADTYIEFKFLKAPLGGTGIWEVGSNHAYLTPSSGIGEVSVEANR

SEQ ID NO: 13910 - DNA, 1737 bp, Alicyclobacillus acidocaldarius
  CDS (1)..(1737): transl_table=11
atggaacttgtgtggcagcatcgttgggcggcagacgcttacccgcttgacttgtcaaccatggttcttgtgttgcgcgttgcgcgatgcacacccgcacagcgggtgcgggtgcactttggagatcggtacgaacctgactttcagaattcaagtgaggctcgaagatacggatcggacggaacatttgactggtttacgtgtcgagttgccgcaccgacgcgaagactgaagtatgcatttgaagtgttatcctcaactggacgggctgtgtacctgggtgagggcgggctcgcggatacattggatgctgtccagccctttcaatatccgtacattcatccatctcgggttctcgctgtcccagattgggtggggcatgcggtggcttatcaaatatttcctgatcggtttgctgtgggtgaacaacagttggtacgtccgacggatccatgggacgcgcgtccaacccctgatagtgtatttggtgggaacctgcgagggattgtggacaaactcccgtatctgagcgatctcggcgtgaacctgatgtacctcacgcctatcttccaggctccatcgaaccacaaatacgacacgcaggactattttgccgtagaccccgcattcggtaccttgggcgatctgcaattgctcgtacgagaagctcatcgcctcgggattcgcgtggttctcgacgcagtgttcaaccattcggggtttcaatttgccccctttcaggacgtcattgcgcgcggtacggcgtctccctattggtcttggttcttcgtgcaaggggaccgcgttgacgtcgaatccgtcaattatgagactttcgcaacgcgcctcagacatatgccaaaactgaacttggcagagcctgctgccgaagaatactttctgcaagtggccaaacactatgttctcgagtgcgatatcgacggatggcgttttgacgtcgccaacgaaatcgatccccacttttggtcacggttgcgatcagaactgcgcgccttgaaacctgatatcttgttgataggagaaatatggcatgacagcctcccttggctgatgggcgatgccttcgatggcgtgatgaattatccgcttcgagagcttgtcatgcgctatgccatggacgaatccatagatgaacctgctttcgcagaagcgtgggtacgcctctatctgcagtacccgcgtccggcatggcgcgcgatgtggaatctgttgggcagtcatgatactgaacgcgcgcttacgcgcgcacgcggtcatgttccctctgttgtgttggcgtttgcaatgcttttcacgctacccggaattcccatggtgtattatggggacgagatcggcatggaaggtggaaccgatccggattgccgtcggggcatgatctgggacgcgaacttatggcagcttgatcttcgcgaagccgtgcggcaactcgcatggctcaagcgaacccatcccgcgcttgcaggagatacaatggagattcgcgatgcgaactctggcgtgctgcattatgtacggctaaacggcacaggtccgcatcttcacattgctgtttgcaaacgtcgagacttcggcgcggaagtggactccccactattcgcgtgggatgtgccatctcggacatcgggcgaggaacgaaagatcctgatatgggaatgcgattcaactgaggggtgtgggcatgattcacgagcagacggatttcacaaccagtga

SEQ ID NO: 13911 - protein, 578 aa, Alicyclobacillus acidocaldarius
MELVWQHRWAADAYPLDLSTMVLVLRVARCTPAQRVRVHFGDRYEPDFQNSSEARRYGSDGTFDWFTCRVAAPTRRLKYAFEVLSSTGRAVYLGEGGLADTLDAVQPFQYPYIHPSRVLAVPDWVGHAVAYQIFPDRFAVGEQQLVRPTDPWDARPTPDSVFGGNLRGIVDKLPYLSDLGVNLMYLTPIFQAPSNHKYDTQDYFAVDPAFGTLGDLQLLVREAHRLGIRVVLDAVFNHSGFQFAPFQDVIARGTASPYWSWFFVQGDRVDVESVNYETFATRLRHMPKLNLAEPAAEEYFLQVAKHYVLECDIDGWRFDVANEIDPHFWSRLRSELRALKPDILLIGEIWHDSLPWLMGDAFDGVMNYPLRELVMRYAMDESIDEPAFAEAWVRLYLQYPRPAWRAMWNLLGSHDTERALTRARGHVPSVVLAFAMLFTLPGIPMVYYGDEIGMEGGTDPDCRRGMIWDANLWQLDLREAVRQLAWLKRTHPALAGDTMEIRDANSGVLHYVRLNGTGPHLHIAVCKRRDFGAEVDSPLFAWDVPSRTSGEERKILIWECDSTEGCGHDSRADGFHNQ

SEQ ID NO: 13912 - DNA, 1548 bp, Paenibacillus polymyxa
  CDS (1)..(1548): transl_table=11
atgctcacgatgttcgcctcaagtgcaatggccgagcaggatatgaacgggcataagcctccgaattctgctggaagcggcgtgttttacgaaatttatatcaattctttttatgattcgaacggggacggacatggtgatttaaaaggtattacgcaaaagcttgattacttaaacgacggcaatccccgttcgggtaaggatttgcaggtcagcggcctctggctcatgccactgaatccgtctccaagctaccataaatatgatgtaactgactactatcaagtggacccgcagtacgggaatctgaatgatttccgcaccttgacgaaagaagcaaaaagaaaaggtgtcaaggtgatcattgaccttgttatcaatcattcaagtagcgagcacccttggttcaaggaggctagtgccaacccgcaaagcaaataccatgactattacgtatgggctgatgagaatacaaacctggatgaaaagggatcatggggccagcaggtatggcataagaatccgaatggcgaagggtatttttacggtaccttctggtccgggatgccggatctgaattttgataatcccaaagtccgcaaggaaatgatcaaagtcggtaagtattggctacagcaaggtgcagacggcttccggcttgatgcggcgatgcatatttttaaagggcaaacgaaggacggtgccgataaaaacattacgtggtggaatgaattccgttccgagatggaaaagataaatccaaacgtatatctggcaggagaggtatgggataaaccggagacaatagctccttattacgaatcgctccactctctgtttaattttgacctgggcggaacgatattgaactctgtgaaaaacggtcgagatcaaggtattgctacattctccgagaaaacgctgaagctgtacaaatcatacaataaggcggcactcgatgctccatttttaagcaatcatgaccaaacccgagttatgagcgagctgggcggggatgtacgaaaagccaagctggctgcatccattcttttgacgttgccgggtcagccgtttctctattatggggaagagatcggcatgaagggagagaagcccgatgagtatcttcgagagcctatgcgctggtacaagggagaaggcctcggtcaaacaaagtgggaggaacccaaatacaacaaaggcgaagtatcggtggaagcgcagttgcgggacaatgattctctgctggaaagctaccgcacgcttatccgtctgagggaagaacatgaggctcttcgcagcgacagtctagagccgatccaagcaggttctgccagcgtgacggcatacgaacgttcttcaggcaaagaaacattgtatgtatatcataatctgtcaggagagccggttaccatccagatgaaagatcgagataaggaaaagcggaaagtggttttctctacctcaaaggatgctaaagtaaggaaagaaacggtgacgattcccgcttacagttctttaattacccaagaagatagaaagagctga

SEQ ID NO: 13913 - protein, 515 aa, Paenibacillus polymyxa
MLTMFASSAMAEQDMNGHKPPNSAGSGVFYEIYINSFYDSNGDGHGDLKGITQKLDYLNDGNPRSGKDLQVSGLWLMPLNPSPSYHKYDVTDYYQVDPQYGNLNDFRTLTKEAKRKGVKVIIDLVINHSSSEHPWFKEASANPQSKYHDYYVWADENTNLDEKGSWGQQVWHKNPNGEGYFYGTFWSGMPDLNFDNPKVRKEMIKVGKYWLQQGADGFRLDAAMHIFKGQTKDGADKNITWWNEFRSEMEKINPNVYLAGEVWDKPETIAPYYESLHSLFNFDLGGTILNSVKNGRDQGIATFSEKTLKLYKSYNKAALDAPFLSNHDQTRVMSELGGDVRKAKLAASILLTLPGQPFLYYGEEIGMKGEKPDEYLREPMRWYKGEGLGQTKWEEPKYNKGEVSVEAQLRDNDSLLESYRTLIRLREEHEALRSDSLEPIQAGSASVTAYERSSGKETLYVYHNLSGEPVTIQMKDRDKEKRKVVFSTSKDAKVRKETVTIPAYSSLITQEDRKS

SEQ ID NO: 13914 - DNA, 1689 bp, Dictyoglomus thermophilum
  CDS (1)..(1689): transl_table=11
atgatatacgatgacaaaatattcggagatttatgccacaaagagtttttagtagaaagagaagttaaaaaacttgaagaaatatatttagaagaggttttaccagaagatcctaagcctgaagatgaaatagaatttacttttaactgtccattaaagtttcacattacttcaggaaaaattgtcaaagataacagagaaatatatacctttaatatacaggaaagaaaaactcaatggaatgatagcatatttaactttagcgaaattatcaaaataaaaatacctcctttaaaggaaaatggtctatatcaaatccacctttatgagatgaatgaaaaaatctatgagcaatatctctcaatagacagttttgaagcacccttatggagtgaggagagtataatttatcacatatttattgatagatttgctaaagatgaaaaagaagtagaatattctgaaaacctcaaagagaaattaggaggaaacctgaaggggatactaagccgtttggattatatagaaaaccttgggataaataccatatggatatctcccatttttaaaagcacatcatatcatggttatgatattgaggattactttgaaattgatcctatttggggaacaaaagaagatttaaaaaaacttgtaagggaagccttcaatagaggcataagaataatcttagactttgtaccaaatcatatgtcatataaaaatcctatatttcagaaagctttaaaagacaaaaacagtaatctaagaagttggtttatatttaaaggagaagattatgaaacctttttcggtgtaaagtcaatgcccaaaataaaccttaaaaataaggaagcgatagattatataataaatgctgccaaatactggataagagaatttggaatttctggatatagaatggatcatgctacaggtcctgacattaatttttggagtattttttattataatttgaaatctgaatttccagaaactttctattttggagagatagtagagactccgaaagaaacaaaaaaatatgtaggcaaatttgacggaactttagatttttatctttttaaaataattagagacttttttataggtaaaagatggtctaccaaagagtttgtaaaaatgatcgatttggaagaaaaattctatggaaataaattcaagagaatttcttttctcgaaaatcacgattcaaatagatttctatgggttgctaaagataagaaattacttagattagcttcaattttccaattctcgattaatgcaatacctataatctacaatggacaagaaatgggatgtagtcagtacagagatatacttgagggaaatagaactctacacgaacatgcaagacttcctataccctggagtgatgacaaacaagacaaagaacttatagatttttacaggcaattagttaaaatcagaaaaagtcatccagcgctttacaaaggtacgtttattcctatattttcagatatgatatcttttatcaaagaaacccaagaagaatccatacttgtacttataaatatagaggataaagaagaaatctttaatctgaacggtacgtacagagatctatttagcggaaatatttacactaattctttaaagctaggcccgatgagtgctcacttattacttcgtatagatcactga

SEQ ID NO: 13915 - protein, 562 aa, Dictyoglomus thermophilum
MIYDDKIFGDLCHKEFLVEREVKKLEEIYLEEVLPEDPKPEDEIEFTFNCPLKFHITSGKIVKDNREIYTFNIQERKTQWNDSIFNFSEIIKIKIPPLKENGLYQIHLYEMNEKIYEQYLSIDSFEAPLWSEESIIYHIFIDRFAKDEKEVEYSENLKEKLGGNLKGILSRLDYIENLGINTIWISPIFKSTSYHGYDIEDYFEIDPIWGTKEDLKKLVREAFNRGIRIILDFVPNHMSYKNPIFQKALKDKNSNLRSWFIFKGEDYETFFGVKSMPKINLKNKEAIDYIINAAKYWIREFGISGYRMDHATGPDINFWSIFYYNLKSEFPETFYFGEIVETPKETKKYVGKFDGTLDFYLFKIIRDFFIGKRWSTKEFVKMIDLEEKFYGNKFKRISFLENHDSNRFLWVAKDKKLLRLASIFQFSINAIPIIYNGQEMGCSQYRDILEGNRTLHEHARLPIPWSDDKQDKELIDFYRQLVKIRKSHPALYKGTFIPIFSDMISFIKETQEESILVLINIEDKEEIFNLNGTYRDLFSGNIYTNSLKLGPMSAHLLLRIDH

SEQ ID NO: 13916 - DNA, 1497 bp, Dictyoglomus thermophilum
  CDS (1)..(1497): transl_table=11
atgaagataaagttttttatcaaaagaactcttattttcatattcatcttagttacttttctaacttatattcatggatataatgagccatggtataaaaacgcgattttttatgaagtctttgtaagatcttttgcagatagcgacggggatagagtaggagatttaaatggacttatagacaaattagattactttaaaaatctaaatattactgctctatggctaatgcctatcttcccctcagtgagttatcatggatatgatgtcacagactattatgatatccatccaggttatggtaccatggaggactttgaaaacctaataagaaaagcccatgaaaaaaatattaaaataattcttgatttggtagtaaaccacacctcttcaaggcatccatggtttgtttcttctgcctcttcttacaattctccgtatcgcgattattatatatggagtactgaaaaacctgaaaaaaattctaatttatggtataaaaaacctacaggatactactatgcattattctggtcagaaatgcccgatctaaactttgataatccaaaagtaagagaagaggtcaaaaaaattgcaaaattttggatagaaaaaggtgttgacggatttagactcgacgcagcaaagcatatttatgatgatgactctaaaaacattcagtggtggaaagaattttactcatatttaaagagtataaaacccgatgtataccttgttggtgaagtttgggataacgagtataagatagcagaatactataaaggattaccctcaaactttaattttcctctttctgacaaaataatgaactccagtagcaaatcaaaaagacttaggaattatagaatttctcgattgaagagactttttggggaaaacaatacagactttgctgatgccatatttttaagaaaccacgatcaagtaagagttaggacattctttggtggaagcatagataaaagtattttggcaggatctatttacttaactttggccgggaataccttcatatactacggagaagaaataggaatggaaggatcaaaacctgacgaatatataagagaaccgtttaagtggactgacgatatgaaatctaaataccaaacctattggattattccacgatataacttaccaggaaatggtatagccctcgataccgaagaaaaagatccaaatagcatatacaatcactataaaaaactcttagaaataagagtcaaatgcagagctttatctaatggaaaaatagagagaataaagactcaagatagatctatacttgcctataagttagaattagaggatgaaaaaataatggtagtccacaatctaaataggattgaaaatacctttaactttaacaacgagataaaagaaaaagacatactatatattagaaacgctaaaactgaaaaaaataaaataatcttaggaccttatagcactgttatagtcaaaatcccataa

SEQ ID NO: 13917 - protein, 498 aa, Dictyoglomus thermophilum
MKIKFFIKRTLIFIFILVTFLTYIHGYNEPWYKNAIFYEVFVRSFADSDGDRVGDLNGLIDKLDYFKNLNITALWLMPIFPSVSYHGYDVTDYYDIHPGYGTMEDFENLIRKAHEKNIKIILDLVVNHTSSRHPWFVSSASSYNSPYRDYYIWSTEKPEKNSNLWYKKPTGYYYALFWSEMPDLNFDNPKVREEVKKIAKFWIEKGVDGFRLDAAKHIYDDDSKNIQWWKEFYSYLKSIKPDVYLVGEVWDNEYKIAEYYKGLPSNFNFPLSDKIMNSSSKSKRLRNYRISRLKRLFGENNTDFADAIFLRNHDQVRVRTFFGGSIDKSILAGSIYLTLAGNTFIYYGEEIGMEGSKPDEYIREPFKWTDDMKSKYQTYWIIPRYNLPGNGIALDTEEKDPNSIYNHYKKLLEIRVKCRALSNGKIERIKTQDRSILAYKLELEDEKIMVVHNLNRIENTFNFNNEIKEKDILYIRNAKTEKNKIILGPYSTVIVKIP

SEQ ID NO: 13918 - DNA, 1242 bp, Triticum aestivum
  CDS (1)..(1242)
atgggcaagcactctgctactctctgtggccttctggttgttgtgctttgtctcgcctccagcttagcacaggctcaaattcttttccaggggtttaattgggaatcgtggaagacacaaggcgggtggtacaagttcatgcaagggaaggtggaggagatcgccagcaccggcgccacccacgtctggctccccccgccgtcgcaatccgtgtcgccggagggctatctgccggggcagctctacaacctcaactccaagtacggcagcggggccgacctcaagtcgctgatccaggcgttccgcggcaagaacatctcgtgcgtcgccgacatcgtcatcaaccaccgctgcgccgacaagaaggacggccgcggcgtctactgcatcttcgagggcgggacgtccgacaaccgcctcgactggggccccgacgagatctgcagcgacgacaccaagtactccaacggccgcggccacagggacaccggcggtggcttcgacgccgcgcccgacatcgaccacctcaacccgcgggtccagagggagctctccgcctggctcaactggctcaaaaccgacctcggcttcgacggatggcgcctcgacttcgccaagggatactccgcggccatggccaagatctacgtcgacaacagcaagccggcgttcgtcgttggcgagctctacgaccgggaccgacagctgctcgcgaactgggtgcggggcgtcggcgggccggccacggcgtttgacttccccaccaagggcgttctccaggaggccgtccagggcgatctggggaggatgcgcggcagcgacggcaaggcgcccggtatgattgggtggatgccggagaagaccgtcacgttcatcgacaaccacgacactgggtcgacgcagaggctgtggccattcccctcggacaaggtcatgcagggctacgcctacatcctcacacacccgggcataccatgcatcttctacgaccatgtgttcgactggaaactgaagcaggagatcaccgcactggctacggtcaggtcaaggaacgggatccatccgggtagcacactggatatcctcaaagccgagggcgatctctatgttgccaagattgggggcaaggttataaccaagatcgggtcaagatacaatattggcgacaatgtgatcccctcgggtttcaagattgcagctaaaggcaacaactattgtgtctgggagaagagcggcctctga

SEQ ID NO: 13919 - protein, 413 aa, Triticum aestivum
MGKHSATLCGLLVVVLCLASSLAQAQILFQGFNWESWKTQGGWYKFMQGKVEEIASTGATHVWLPPPSQSVSPEGYLPGQLYNLNSKYGSGADLKSLIQAFRGKNISCVADIVINHRCADKKDGRGVYCIFEGGTSDNRLDWGPDEICSDDTKYSNGRGHRDTGGGFDAAPDIDHLNPRVQRELSAWLNWLKTDLGFDGWRLDFAKGYSAAMAKIYVDNSKPAFVVGELYDRDRQLLANWVRGVGGPATAFDFPTKGVLQEAVQGDLGRMRGSDGKAPGMIGWMPEKTVTFIDNHDTGSTQRLWPFPSDKVMQGYAYILTHPGIPCIFYDHVFDWKLKQEITALATVRSRNGIHPGSTLDILKAEGDLYVAKIGGKVITKIGSRYNIGDNVIPSGFKIAAKGNNYCVWEKSGL

SEQ ID NO: 13920 - DNA, 1761 bp, Bacillus acidopullulyticus
  CDS (1)..(1761): transl_table=11
atgtttagagaagcaatttatcaccgtcctaaagataattatgcatatgcttgcgcaaatggagaattacatatcagaatcagaacgaaaaaagacgatatgaaagaggtaacacttgtttacggagacacttatgaatttgatgacaataaatggacctattcaacagcccatatgaaaaaaaccggctccgaccaattgtttgattactggctcgcttctgtcactccgcgatataagagattgcgctatgggtttattgtaaatgaccgcaaagactcgacctgttttactgaaaaagggttttacccggagcccccagtaaatgacatttcctattatttcagctttccttatgtgaatcaggccgatattttccaggcacccgaatgggtaaaggacaccgtctggtatcaaattttccctgaacgctttgccaatggaaacaaagacaacgaccctgatggcacccttccatggggcagccgtgaaccggaaattgacaacttttttggcggagatttggaaggagtcattgaacatattgactatctcaaagaattgggcattggcggtatatactttacccctatatttaaggcacactccaaccataaatacgatacgattgattacatggaaatagatccgcaattcgggacaaaagaaacattaaaaaaattgattgatgtctgccataaaaatggaataaaagtgatgcttgatgctgtgtttaatcatagcggtgttttttttccaccatttcaggatgtagtggaaaaaggtaagaattccaagtaccaagactggttccacatccgggagtttccactcgtaatggagccaaggccaaattatgataccttcggctttacgtcttccatgccaaagttcaagacagaaaaccctgaagtgaaggaatatttactagaggttggccggtattgggtaagggaatttgatattgacggctggcgtttagatgtggcaaatgaagtgagccacgccttttggcgtgaattccgcagggaagtgaaagccatcaagcccgacttgtatatccttggggaaatttggcacgactccttgccttggctgcggggtgatcaatttgatgctgtgatgaattatcctttatccactaatattgtaaatctttttgccaatcaatccgtttcggtaaaagagtttgtagaaaatatgtcccatgttatccatatgtatcctgacactgttaacgaagctgcgttcaaccttgttggcagccacgatacaccgagaatattaacacagtgcggagaggatgtagaacgcttaaagcaagtgtttgtcttattgttaacattcataggcaccccctgcatttattacggggatgaaatcggcttaaccggcggacaggatcccggctgccggaaatgcatggagtggaatccagaccaacaaaaccgtgaacttcttcagcacgtcaggaaattaatacaattacgcagcgaaaatcctttgctcgccaatgagggagagctgacttttgtcccaccgaaaaatgaggaagatccgtgtcttgcttatacaaaatccaatgaggaaaaaacgattatgattattataaataaaagtaaaaactcagtggagtacccactttcatttgacgcagctgaacaaacagtaaaaaatctttggaatcaggaacagttgattttacaaaatggccaaacactggaactgaaggcaaatgactttaaaatattagaattttaa

SEQ ID NO: 13921 - protein, 586 aa, Bacillus acidopullulyticus
MFREAIYHRPKDNYAYACANGELHIRIRTKKDDMKEVTLVYGDTYEFDDNKWTYSTAHMKKTGSDQLFDYWLASVTPRYKRLRYGFIVNDRKDSTCFTEKGFYPEPPVNDISYYFSFPYVNQADIFQAPEWVKDTVWYQIFPERFANGNKDNDPDGTLPWGSREPEIDNFFGGDLEGVIEHIDYLKELGIGGIYFTPIFKAHSNHKYDTIDYMEIDPQFGTKETLKKLIDVCHKNGIKVMLDAVFNHSGVFFPPFQDVVEKGKNSKYQDWFHIREFPLVMEPRPNYDTFGFTSSMPKFKTENPEVKEYLLEVGRYWVREFDIDGWRLDVANEVSHAFWREFRREVKAIKPDLYILGEIWHDSLPWLRGDQFDAVMNYPLSTNIVNLFANQSVSVKEFVENMSHVIHMYPDTVNEAAFNLVGSHDTPRILTQCGEDVERLKQVFVLLLTFIGTPCIYYGDEIGLTGGQDPGCRKCMEWNPDQQNRELLQHVRKLIQLRSENPLLANEGELTFVPPKNEEDPCLAYTKSNEEKTIMIIINKSKNSVEYPLSFDAAEQTVKNLWNQEQLILQNGQTLELKANDFKILEF

SEQ ID NO: 13922 - DNA, 1563 bp, Bacillus megaterium
  CDS (1)..(1563): transl_table=11
atgaaagggaaaaaatggacagctttagctctaacactgccgctggctgctagcttatcaacaggtgttgacgccgaaaccgtacataaaggtaaagctccaacagcagataaaaacggtgtcttttatgaggtatatgtaaactctttttacgatgcaaataaagatggacatggtgatttaaaaggccttacacaaaagttggactatttaaatgacggaaattctcatacaaagaatgatcttcaagtaaacgggatttggatgatgccggtcaacccttctcctagctatcataaatatgatgtaacggactattataatattgatccgcagtatggaaatctgcaagattttcgcaaacttatgaaagaagcagataaacgagacgtaaaagtcattatggaccttgttgtgaatcatacgagcagtgaacacccttggtttcaagctgcgttgaaagataaaaacagcaagtacagagattactatatttgggctgataaaaatactgacttgaatgaaaaaggatcttggggacaacaagtatggcataaagctccaaacggagagtatttttacggaacgttctgggaaggaatgcctgacttaaattacgataaccctgaagtaagaaaagaaatgattaacgtcggaaagttttggctaaaacaaggcgttgacggcttccgcttagatgctgcccttcatatttttaaaggtcaaacgcctgaaggcgctaagaaaaacattctatggtggaatgagtttagagatgcgatgaaaaaagaaaacccgaacgtatatctaacgggtgaagtgtgggaccagccagaagtagtagccccttactatcaatcacttgattctctatttaattttgatttagcaggaaaaattgtcagctctgtaaaagcaggaaatgatcaaggaatcgccactgcagcagcggcaactgatgagctgttcaaatcatacaatccaaataaaattgacggcattttcttaaccaaccatgaccaaaatcgcgtcatgagtgagttaagcggcgatgtgaataaagcaaaatcagccgcctctatcttacttacgcttcctggaaatccgtatatttattacggtgaagaaattggcatgacaggtgaaaagcctgatgaattaatccgtgaaccgttccgctggtacgaaggcaacggaattggacaaactagctgggaaacacctgtatataacaaaggcggtaacggcgtgtctgtagaagcacaaacaaaacaaaaggattccttgttaaatcattaccgtgaaatgattcgtgtgcgccagcagcacgaagagttagtaaaaggaacgcttcaatccatttcagtagacagtaaagaagtcgttgcctatagccgcacgtacaaaggcaaatcgattagcgtgtatcataatatttcaaatcaacctgtaaaagtatctgtagcagcgaaaggtaacttgatttttgctagtgaaaaaggtgctaagaaagtcaaaaatcagcttgtgattccggcgaatcggacggttttaataaaataa

SEQ ID NO: 13923 - protein, 520 aa, Bacillus megaterium
MKGKKWTALALTLPLAASLSTGVDAETVHKGKAPTADKNGVFYEVYVNSFYDANKDGHGDLKGLTQKLDYLNDGNSHTKNDLQVNGIWMMPVNPSPSYHKYDVTDYYNIDPQYGNLQDFRKLMKEADKRDVKVIMDLVVNHTSSEHPWFQAALKDKNSKYRDYYIWADKNTDLNEKGSWGQQVWHKAPNGEYFYGTFWEGMPDLNYDNPEVRKEMINVGKFWLKQGVDGFRLDAALHIFKGQTPEGAKKNILWWNEFRDAMKKENPNVYLTGEVWDQPEVVAPYYQSLDSLFNFDLAGKIVSSVKAGNDQGIATAAAATDELFKSYNPNKIDGIFLTNHDQNRVMSELSGDVNKAKSAASILLTLPGNPYIYYGEEIGMTGEKPDELIREPFRWYEGNGIGQTSWETPVYNKGGNGVSVEAQTKQKDSLLNHYREMIRVRQQHEELVKGTLQSISVDSKEVVAYSRTYKGKSISVYHNISNQPVKVSVAAKGNLIFASEKGAKKVKNQLVIPANRTVLIK

SEQ ID NO: 13924 - DNA, 4428 bp, Thermoanaerobacter thermohydrosulfuricus
  CDS (1)..(4428): transl_table=11
gtgtttaaaaggagagctttaggatttttgctggcttttcttttagtttttacagcagtatttggctcaatgcctatggaatttgcaaaggctgagacagatacagcgccagcgatagccaatgttgttggcaattttcaatccaaacttggagattctgactggaatataaacagtgacaaaacgataatgacatataaaggtaatggcttttatgaatttactaccccagttgcgttacctgcaggtgattatgagtataaagttgctcttaatcattcatgggaaggtggaggagttccttcacaaggtaatttaagctttcatcttgattcagattctgtagtgactttttattacaattacaacacttcaagtattaccgattccacaaaatatacaccaattcccgaagacaagcttccaagacttgtagggactatacagcctgcaataggagcaggtgatgattggaaacctgaaacatcgactgctataatgagagactataagtttaataatgtttacgaatacactgcaaatgttccaaaagggaattatgagtttaaagtgactttagggccctcatgggatataaattatggcttaaatggtgaacaaaatgggccaaatattcctttgaatgtagcctatgatactaagattacattttactatgattcggtttcacataatatatggacagattataatccacctcttacaggacctgataataacatatattatgacgatttaagacatgacacccatgacccattcttccgctcgcctttcggtgcaataaaaacgggagatactgtgacattaagaatacaagcaaaaaatcatgacattgagtcagctaaaatttcttattgggatgatattaaaaaaacaagaatagaagtccctatgtacagaattggtcaaagtcctgacgggaaatatgaatactgggaagttaagttaagctttgaccatcccacaagaatttggtattactttatacttaaagacgggaccaaaactgcttattacggagataacgatgaacaattaggtggcgtaggtaaagccacagatacagaaaataaggacttcgaacttactgtctacgataaaaacttagacacccctgattggatgaaagggtcagtaatgtatcaaatattccctgataggttctttaatggggattcttcaaatgaccatctaaagaaatacagcagaggttttgatcctgttgaatatcatagcaactggtacgagcttccagataatccgaatgataaaaataaactaggatatacaggggatggcatatggtcaaatgacttctttggcggtgatttaaaaggtatagatgataaattggattatttaaaaagccttggaatatcagtcatttatctcaatccaatttttcaatcaccttctaatcacaggtacgatacaaccgattacacaaaaatagacgaactattaggagatttatctacctttaagaagctcatggaggatgcccatgcaaaagggattaaggtaatacttgatggcgtcttcaatcatacaagtgatgacagcatttattttgatagatatggtaaatacttaaacacgggagttttaggtgcttatcaagcatggaaacagggagatcagtcaaagtctccatatggtgactggtatgagataaagcctgacggtacctatgaaggatggtggggatttgacagtttacctgtgataaggcagataaacggcagtgaatataatgtcaaaagttgggcggattttattataaataatcctaatgcaatatctaagtattggttaaatcctgatggggacaaaaatgtaggtgcagatggttggagattagatgttgcgaatgaagttgctcacgatttttgggttcattttagaggtgcaattaatactgtgaaaccgaatgctccgatggttgcagaaaactggaatgacgcttcactggatctgcttggagattcttttaactctgttatgaattatctctttagaaatgcagtaattgactttatattggataaatcatttgatgacggaaatgtggttcacaatcctatagatgcagcaaaactcgaccaaaggcttatgagcatatatgagagatatcctcttccagtgttttattctactatgaatcttttaggttctcatgacaccatgaggatattgacagtatttggatacaactctgcggatgaaaatcaaaattctcaagcagcaaaagaccttgcggttaaaagacttaaacttgctgcaatactgcaaatgggttatccaggcatgccttctatttattacggagatgaagcaggacaatctggcggaaaagacccggacaacagaaggacattcccttggggaagagaagatactgatttgcaaacttttttcaagaaagttgtaaatataagaaatgagaatcaagttttgaaaacaggagaccttgagacactttatgcaaatggcgatgtttatgcctttggaagaagaatcataaatggaaaagatacttttgggaaatcgtatcctgacagtgtagctattgtcgtaataaataaaggtgacgcaaaacaggtttctatagataccactaaatttataagagatggagttgcttttacagatgccttaagtggcaagacatacacggttcaggatggtaaaattgttgtagaagttggatcaatggatggagctatacttatatcagatacaggacaaaatttgacagcacctcagccaataacagaccttaaagcagtctcagggaatggcaaagtagacctttcctggagtgtagtagataaagcagtaagctataatatttaccgttctacagttaaaggtgggttatatgaaaaaatagcttcaaatgttacgcaaattacctatactgatacagaggttaccaatggtctaaagtatgtgtatgctgtaaccgctgtagataatgatggaaatgagagtgctttaagcaatgaagttgaggcatatccagcatttcctattggctgggcgggaaatatgaatcaagtaaatacacatgtaataggtgtaaataatccagttgaagtgtatgctgaagtgtgggctcaagggcttacagataaacctggccaaggagaaaatatgattgcccagttaggatataggtatattggagatactgtaggagatgcagtttacaatgccgtgtacaataaggtagaaggtgttgaaataagtaaggactggacatgggttgatgcacaatatgtaggtgattctggaaataatgataaatacatggctaaatttgtacctgatatggtaggcacatgggaatacattatgagattttcttctaaccaaggccatgattggacgtatacaaaaggaccagatgggaaaacagatgaagcaaaacagtttactgtcgtgccatcaaatgatgtagaaacacctacagctccagtcttacaacaaccaggaattgaatcctcaagagttacacttaactggagtccgtcagctgatgatgttgctattttcggctacgaaatctataagtcttcaagtgagacaggaccatttataaagattgcaactgtgtctgacagtgtgtataactacgtagatacagatgtagtaaatggcaatgtgtattattataaagttgtggcagttgatacctcctataataggacagcatcaaatacagtaaaagcgacacctgatataatacctataaaagtgacatttaatgtcacaataccagattatactcctgatgatggtgtaaatattgctggaaacttcccggatgctttctggaatccaaatgctaatcaaatgacaaaagctggttctaacacctatagtattacacttactttaaatgagggtacacaaattgaatataaatatgcaagggggagctgggataaagtagaaaaaggtgaatacggcaatgagattgacaacagaaaaataactgttgtcaatcagggttcaaatacaatggttgtaaatgatacagtgcaaagatggagagatgtgccaatatatatctattctccaaaagacaagactattgttgatgcaaatacgagtgaaatagagattaaaggcaatacttacaaaggtgcgaaagtaactataaatgatgaatcttttgtgcaacaagaaaatggagtatttacaaaagtagttcccttggaatatggtgtaaatactatcaaaatacatgtagagccaagtggtgacaagaataatgaacttacaaaagatataacaataactgttacaagagagaagccggccaggagacagaacctactcctactccaccaacagaaacaacaaaaccatctcaagaagtatcacaaggcaaaatag

SEQ ID NO: 13925 - protein, 1475 aa, Thermoanaerobacter thermohydrosulfuricus
MFKRRALGFLLAFLLVFTAVFGSMPMEFAKAETDTAPAIANVVGNFQSKLGDSDWNINSDKTIMTYKGNGFYEFTTPVALPAGDYEYKVALNHSWEGGGVPSQGNLSFHLDSDSVVTFYYNYNTSSITDSTKYTPIPEDKLPRLVGTIQPAIGAGDDWKPETSTAIMRDYKFNNVYEYTANVPKGNYEFKVTLGPSWDINYGLNGEQNGPNIPLNVAYDTKITFYYDSVSHNIWTDYNPPLTGPDNNIYYDDLRHDTHDPFFRSPFGAIKTGDTVTLRIQAKNHDIESAKISYWDDIKKTRIEVPMYRIGQSPDGKYEYWEVKLSFDHPTRIWYYFILKDGTKTAYYGDNDEQLGGVGKATDTENKDFELTVYDKNLDTPDWMKGSVMYQIFPDRFFNGDSSNDHLKKYSRGFDPVEYHSNWYELPDNPNDKNKLGYTGDGIWSNDFFGGDLKGIDDKLDYLKSLGISVIYLNPIFQSPSNHRYDTTDYTKIDELLGDLSTFKKLMEDAHAKGIKVILDGVFNHTSDDSIYFDRYGKYLNTGVLGAYQAWKQGDQSKSPYGDWYEIKPDGTYEGWWGFDSLPVIRQINGSEYNVKSWADFIINNPNAISKYWLNPDGDKNVGADGWRLDVANEVAHDFWVHFRGAINTVKPNAPMVAENWNDASLDLLGDSFNSVMNYLFRNAVIDFILDKSFDDGNVVHNPIDAAKLDQRLMSIYERYPLPVFYSTMNLLGSHDTMRILTVFGYNSADENQNSQAAKDLAVKRLKLAAILQMGYPGMPSIYYGDEAGQSGGKDPDNRRTFPWGREDTDLQTFFKKVVNIRNENQVLKTGDLETLYANGDVYAFGRRIINGKDTFGKSYPDSVAIVVINKGDAKQVSIDTTKFIRDGVAFTDALSGKTYTVQDGKIVVEVGSMDGAILISDTGQNLTAPQPITDLKAVSGNGKVDLSWSVVDKAVSYNIYRSTVKGGLYEKIASNVTQITYTDTEVTNGLKYVYAVTAVDNDGNESALSNEVEAYPAFPIGWAGNMNQVNTHVIGVNNPVEVYAEVWAQGLTDKPGQGENMIAQLGYRYIGDTVGDAVYNAVYNKVEGVEISKDWTWVDAQYVGDSGNNDKYMAKFVPDMVGTWEYIMRFSSNQGHDWTYTKGPDGKTDEAKQFTVVPSNDVETPTAPVLQQPGIESSRVTLNWSPSADDVAIFGYEIYKSSSETGPFIKIATVSDSVYNYVDTDVVNGNVYYYKVVAVDTSYNRTASNTVKATPDIIPIKVTFNVTIPDYTPDDGVNIAGNFPDAFWNPNANQMTKAGSNTYSITLTLNEGTQIEYKYARGSWDKVEKGEYGNEIDNRKITVVNQGSNTMVVNDTVQRWRDVPIYIYSPKDKTIVDANTSEIEIKGNTYKGAKVTINDESFVQQENGVFTKVVPLEYGVNTIKIHVEPSGDKNNELTKDITITVTREKPARRQNLLLLHQQKQQNHLKKYHKAK

SEQ ID NO: 13926 - DNA, 1776 bp, Bacillus sphaericus
  CDS (1)..(1776): transl_table=11
atgattatgctggaagccgtttaccaccggatgggacaaaactggtcctatgcctacaatgattcgaccttgcatatccgcatccgcaccaagcgggacaatgtcccgcgcatcgacctgcactgcggcgagaagtacgatccggagaagtacaaggaaaccattcccatggagcgtatggcttctgacggactgtttgattattggcaagccgccgtgcagcccagataccgtagattagtttattacttcgcgctgcattccgacaacggcgatgccgtttactttatggagaagggattctttgatcagccgcccaaggtgatgtatgaaggattgttcgacttcccttatctgaatcggcaggatgtgcacacgcctccggcatgggttaaggaagcgatattctatcagattttccccgagcgcttcgcgaacggcgatccgtccaacgatcccgaaggcgtgcaggaatggggaggtacgcccagcgccggcaatttcttcggcggggatttgcaaggcgtgatcgatcatctggactatctaagcgatctgggcgttaatgctttgtatttcaaccccctattcgcggccaccaccaaccataaatacgatacggcggactatatgaagatcgacccccaattcggcacgaacgaaaagctcaaggagctggtcgatgcctgccatgcccggggcatgcgcgtgctgctggacgccgtgttcaaccactgcggccatacgtttccgccgttcgtggacgtgttgaacaacggtctgaattcgcgttacgcggattggttccatgttcgggaatggcctctgcgggtcgttgacgggattccgacctacgatacgttcgcattcgaaccaatcatgcccaagctcaataccggcaatgaagaagtgaaggcttacctgttgaatgtcggccgttactggctggaggagatggggctggacggctggcggctggatgtcgccaatgaggtggaccatcaattctggcgggaattccggagcgagatcaaacggatcaatccttcggcctatatcttaggcgagattatgcatgattccatgccgtggctgcaaggcgaccaattcgacgcggtcatgaattatcccttcacgaacatcctgctgaacttcttcgcccgcaggctgacgaacgcggccgaattcgcccaggcgatcggcacgcagctcgccggttatccgcagcaggttacggaagtgtcattcaatctgctcggcagccatgacacgacgaggctattgacgttgtgcagcggcaatgtggagcgcatgaagctggcgaccttattccagctgacctatcaggggacgccatgcatctattacggcgacgagatcggcatggacggcgagtatgaccccctcaaccgcaagtgcatggaatgggacaagagcaagcagaatacggagctgcttgcgttcttccggagcatgatcagcctgcgcaaggctcaccctgcgctgcgcggaagcggactgcgcttcctgccggtgctggagcacccgcagttgctggtctatgagcgctgggacgataatgagcgattcctcatcatgctgaataatgaggatgctcccgtgaacgttgttatcccggcagctcagcccggcgcttcttggcgcaccgtgaacggcgagccatgcgcagtagtcgaggaaagttcgatacaggcggctctccctccttacggttatgccatactgcatgcgcctatagcaggaacggctgagtaa

SEQ ID NO: 13927 - protein, 591 aa, Bacillus sphaericus
MIMLEAVYHRMGQNWSYAYNDSTLHIRIRTKRDNVPRIDLHCGEKYDPEKYKETIPMERMASDGLFDYWQAAVQPRYRRLVYYFALHSDNGDAVYFMEKGFFDQPPKVMYEGLFDFPYLNRQDVHTPPAWVKEAIFYQIFPERFANGDPSNDPEGVQEWGGTPSAGNFFGGDLQGVIDHLDYLSDLGVNALYFNPLFAATTNHKYDTADYMKIDPQFGTNEKLKELVDACHARGMRVLLDAVFNHCGHTFPPFVDVLNNGLNSRYADWFHVREWPLRVVDGIPTYDTFAFEPIMPKLNTGNEEVKAYLLNVGRYWLEEMGLDGWRLDVANEVDHQFWREFRSEIKRINPSAYILGEIMHDSMPWLQGDQFDAVMNYPFTNILLNFFARRLTNAAEFAQAIGTQLAGYPQQVTEVSFNLLGSHDTTRLLTLCSGNVERMKLATLFQLTYQGTPCIYYGDEIGMDGEYDPLNRKCMEWDKSKQNTELLAFFRSMISLRKAHPALRGSGLRFLPVLEHPQLLVYERWDDNERFLIMLNNEDAPVNVVIPAAQPGASWRTVNGEPCAVVEESSIQAALPPYGYAILHAPIAGTAE

SEQ ID NO: 13928 - DNA, 1725 bp, Thermoanaerobacter ethanolicus
  CDS (1)..(1725): transl_table=11
atgataaaagaagctatattccataaaagcgatgtgccttacgcatatccactgaatgaaaatcaattaaagatagtactaaggactgctgtatttgatgtagatagggtgtatgttttatacaaagacagatacgattggctgggaaaattcaaaataaaaccaatggtattaactcataccaacgagttatttgattattatgagactactttagagcttaataaaaaatttgtgtattttttctatttggtatctgatgggggcgagaagttatattatacagaagcaggattttacaaaaaaaggccagaaaatcatttttggggatttttccattacccgtatataggagaaaaggatgtcttttttgctccagagtggacaagcgattgcatggtgtatcagatatttcctgaaaggtttaataacggtgataaatcaaatgaccctgaaaatgtaaagccctggggtgaaaaacctactgcagattctttctttggaggagatttgcaaggaataatagataaaatagattatttaaaggatttgggtataaatgccatttatttaacccccatatttttatcgcattccacccacaaatatgatactactgattattatacaattgacccccactttggtgatacgcaaaaagcgagagaacttgtgcaaaaatgtcatgacaatggcataaaagttatatttgatgccgtttttaatcactgcggatatgacttttttgcatttcaggatgttattaaaaatggtaaaaaatcaaaatactgggattggtttaatatatacgaatggccaattaaaactcatggaaaaccttcctatgaagcttttgcagatactgtatggagaatgccaaaacttatgacaaaaaatccagaagtacagaagtatttattggaagtagcggaatattggattaaagaagtggacatagacggctggaggctggatgttgctaatgagatagaccaccatttttggagaaagtttagagaagttgtaaaggcagctaaaccggaggccataattgtaggagaggtttggcatgatgcttctccttggcttagaggggatcagtttgacagtgtaatgaactatccttttagaaatgcggttgtggacttttttgcaaaaaggaaaataagtgcttctcgctttaatacaatgattacagagcaacttatgaggcatatggatagtgtaaatagggttatgtttaatttaataggaagtcatgatactgagaggtttttgactttagctaatggcatggttgcgagaatgaagttagcattagtgtttcaatttacctttgttggaatcccatatatttactatggggacgaggtaggaatggtgggagattatgaccctgattgcagaagatgcatgatatgggaggaggaaaagcaaaataaaagtatttttaatttctataaaaagttgatttctataaggagagaaaatgaggagctcaaatacggaagtttctgtactttatatgctataggaagagtgtttgcttttaagagggaatacaaaggtaaatcaataattgttgtactaaataacagtagcaagcaggaagtgatatttttgaatgaagtagaaggaaaagaagatattttaaagatgaaggaattaaaaagaagtggaaatctcctttacttgcaacctaactctgcctatattttaaagtaa

SEQ ID NO: 13929 - protein, 574 aa, Thermoanaerobacter ethanolicus
MIKEAIFHKSDVPYAYPLNENQLKIVLRTAVFDVDRVYVLYKDRYDWLGKFKIKPMVLTHTNELFDYYETTLELNKKFVYFFYLVSDGGEKLYYTEAGFYKKRPENHFWGFFHYPYIGEKDVFFAPEWTSDCMVYQIFPERFNNGDKSNDPENVKPWGEKPTADSFFGGDLQGIIDKIDYLKDLGINAIYLTPIFLSHSTHKYDTTDYYTIDPHFGDTQKARELVQKCHDNGIKVIFDAVFNHCGYDFFAFQDVIKNGKKSKYWDWFNIYEWPIKTHGKPSYEAFADTVWRMPKLMTKNPEVQKYLLEVAEYWIKEVDIDGWRLDVANEIDHHFWRKFREVVKAAKPEAIIVGEVWHDASPWLRGDQFDSVMNYPFRNAVVDFFAKRKISASRFNTMITEQLMRHMDSVNRVMFNLIGSHDTERFLTLANGMVARMKLALVFQFTFVGIPYIYYGDEVGMVGDYDPDCRRCMIWEEEKQNKSIFNFYKKLISIRRENEELKYGSFCTLYAIGRVFAFKREYKGKSIIVVLNNSSKQEVIFLNEVEGKEDILKMKELKRSGNLLYLQPNSAYILK

SEQ ID NO: 13930 - DNA, 1761 bp, Drosophila virilis
  CDS (1)..(1761)
atgagtttgaagtggagcttagttttgggcctaagttggctcctttttgtggcttcgtcagaattaaaaaagcataagccaaacgagttggacgacaatattaattggtggcgacacgaggtcttttatcagatttatcctaggtcctttaaggacagcgatggcgatggcattggtgatcttaagggcatcacctccaagctgcagtactttgtggacactggcatcacggccatctggctaagtcccatttacaagtcacccatggttgactttgggtacgatatatccgactacagggacatccagccggagtatggcaccctggaggactttgatgcgctgatcgccaaggccaatcaactgggcatcaaggtcattttggactttgtgcccaatcacagctcggacgaacacgaatggtttaagaagtccgctgctagagagcctggctatgaggatttctatgtgtgggaggacggcatacctggggataatgaaactcgcttaccgccaaacaactgggtatctgtattctccggctccgcttggcagtggcacgaggagcggcaacaattctatttgcgtcagtttaccaagggacagcccgatttgaactatcgtaatcctgctgtggtgcaggccatggatgaagttttgttgtactggctgcaaaagggcgtggctggcttccgcatcgatgccgttatctatatatatgaggacgaacagttgcgcgacgagcccttgagcggttccaccagtgatccgaactcagttgattatctggagcacatctacacaaggaacctgccggaatgctatggcctcattcagcattggcgtcagctgttggacaactacacggccgataatccgggaccagtgcgcattatgatgaccgagggctatgcggatctatcgctgctaatgaactactatgaagatgaggacggcgtgcagggcgcccactttccctttaattttgattttattaccgagctgaatgcaaactcagcggctccggactttgtatacttcattcaaagatggctgacctatatgccgcctggacactcagccaactgggtgatgggcaatcatgataatccgcgcgttgcatctcggtatggcgttggcactgtggatgccatgaacatgctgatgatgactttgccgggcatcggcattacctactatggcgaggaactcggcatggtagactatcgtgacattagctggaacgatacagtggatcagcccgcctgtgatgctggtcttgacaattacaagtgggtctctcgcgaccccgaacgcacgccaatgcagtggagtgatgagaagaatgctggtttctccacgggagattccacctggttgccagtgcacccgaattatcaggagcttaatctgctcacccagcaagaagccacttacagccattataaggtctatcagtcgctgatcaagctgagacaatcgcgagtcttgcgggatggctcatttacagcccaggcccttaatcgtaatgtttttgctattaagcgcgaattgagaggtcagcccaccctgctaactgtcattaatgtgagcaatcgcacccagcaagtcgatgtcagtaactttatcgatttgcccaatcgtcttacattgttggttgtgggcgtttgctcccagcatagggtgagcgagcgccttaagcccgccgaggtcaaactgtcgccccatgagggtctagttatacagctcaaagctcgctag

SEQ ID NO: 13931 - protein, 586 aa, Drosophila virilis
MSLKWSLVLGLSWLLFVASSELKKHKPNELDDNINWWRHEVFYQIYPRSFKDSDGDGIGDLKGITSKLQYFVDTGITAIWLSPIYKSPMVDFGYDISDYRDIQPEYGTLEDFDALIAKANQLGIKVILDFVPNHSSDEHEWFKKSAAREPGYEDFYVWEDGIPGDNETRLPPNNWVSVFSGSAWQWHEERQQFYLRQFTKGQPDLNYRNPAVVQAMDEVLLYWLQKGVAGFRIDAVIYIYEDEQLRDEPLSGSTSDPNSVDYLEHIYTRNLPECYGLIQHWRQLLDNYTADNPGPVRIMMTEGYADLSLLMNYYEDEDGVQGAHFPFNFDFITELNANSAAPDFVYFIQRWLTYMPPGHSANWVMGNHDNPRVASRYGVGTVDAMNMLMMTLPGIGITYYGEELGMVDYRDISWNDTVDQPACDAGLDNYKWVSRDPERTPMQWSDEKNAGFSTGDSTWLPVHPNYQELNLLTQQEATYSHYKVYQSLIKLRQSRVLRDGSFTAQALNRNVFAIKRELRGQPTLLTVINVSNRTQQVDVSNFIDLPNRLTLLVVGVCSQHRVSERLKPAEVKLSPHEGLVIQLKAR

SEQ ID NO: 13932 - DNA, 1329 bp, Thermotoga neapolitana
  CDS (1)..(1329): transl_table=11
atgataggctaccagatctacgtgagatcattcagggatggaaacttcgatggtgtgggggatttcaaaggattgaaaggtgcgatttcctacctgaaagaactgggtgttgattttgtctggctcatgcccgtcttttcctccatttccttccacgggtatgacgtggtggatttttattctttcaaagccgagtacggagacgagaaagactttagagagatgatcgaggcgttccacgacaacggtataaaagtcgttctcgatcttcccatccatcatactggtttcctccacacgtggtttcagaaagccctgaaaggagatccacactacagggattattacgtatgggcgagtgaaaaaacggatctggacgaaagaagagagtgggacaacgaaaggatctggcatcctctggaggacggaaggttctacagaggacttttcggtcccctctcacccgatctgaactacgataacccgcaggtttttgaagagatgaagaaggtggtttatcaccttcttgaaatgggagtggacggattcagattcgacgcagcaaagcacatgagagatactctggaacagaacgttcgcttttggaggtatttcctctccgatattgagggaatattccttgcggaaatctgggcagaatccaaagttgtggatgaacacggcaggatattcggctacatgctaaatttcgatacctcacactgtattaaggaagcggtgtggaaggaaaacttcaaagtgttgatcgagtcgatcgaaagggccctggttggaaaagattatctgccggtgaacttcacatcgaaccatgatatgtcaaggcttgcgagtttcgaaggagggttgagtgaagagaaggtgaaactctcactttccattctgttcacgcttcccggggttcctctcatattctacggagacgaactgggaatgaaaggaatctatcgaaaaccgaacacggaagtggttctggatccgttcccctggagtgaaaacatctctcttgaggggcagacgttctggaaatggccggcctacaacagtccattctctggtgtttctgttgagtatcaaaagaaaaaacgtgattcgatcctcttacacattatgaagtggacaggattcagaaaggaaaatcactggctggacagggcaaacatcgaatttctgtgcaaagaagaaaaactgctgcacgtgtacagactggtcgatgaagggcgttctctgaaagtgatacacaacctgtcgaatggtgaaatggtgtttgagggagtgcgcgtacaaccctacagcacggaggtgatttga

SEQ ID NO: 13933 - protein, 442 aa, Thermotoga neapolitana
MIGYQIYVRSFRDGNFDGVGDFKGLKGAISYLKELGVDFVWLMPVFSSISFHGYDVVDFYSFKAEYGDEKDFREMIEAFHDNGIKVVLDLPIHHTGFLHTWFQKALKGDPHYRDYYVWASEKTDLDERREWDNERIWHPLEDGRFYRGLFGPLSPDLNYDNPQVFEEMKKVVYHLLEMGVDGFRFDAAKHMRDTLEQNVRFWRYFLSDIEGIFLAEIWAESKVVDEHGRIFGYMLNFDTSHCIKEAVWKENFKVLIESIERALVGKDYLPVNFTSNHDMSRLASFEGGLSEEKVKLSLSILFTLPGVPLIFYGDELGMKGIYRKPNTEVVLDPFPWSENISLEGQTFWKWPAYNSPFSGVSVEYQKKKRDSILLHIMKWTGFRKENHWLDRANIEFLCKEEKLLHVYRLVDEGRSLKVIHNLSNGEMVFEGVRVQPYSTEVI

SEQ ID NO: 13934 - DNA, 2001 bp, Thermoactinomyces vulgaris
  CDS (1)..(2001): transl_table=11
atgatcaaattattaaagccgatgtctttgtccatcctccttgtcttcattctctcattttcttttccatttcccacggcaaaggcggccgccaatgacaacaatgtggagtggaatggattgtttcatgatcaaggcccgctttttgacaacgcgccggagcccacttcaacccagagtgtcacgcttaaactgcgaaccttcaaaggagatattaccagcgccaatatcaagtattgggatactgccgacaatgcctttcactgggtgcccatggtttgggattccaatgacccgacaggcacgtttgattactggaaagggacgatcccggcaagcccatcgatcaagtattaccgtttccaaattaacgatggcacaagcacggcctggtacaacggcaatggcccttcttccaccgaaccgaatgccgatgatttttatattattcccaatttcaaaacgccggactggctgaaaaacggcgtaatgtaccagatctttccggatcgtttctacaatggcgattcttcaaatgatgtccagacaggctcctatacctataacggcaccccaacggagaaaaaagcatggggcagcagcgtttacgctgatccggggtacgacaatagtttggtcttttttggcggagacctggcgggaatcgatcaaaaactgggctatatcaaaaagactctcggcgcgaacatcctctatctgaatcccatcttcaaggcgccaaccaaccacaaatacgacacccaggactacatggcggttgatcccgcgtttggcgacaattccaccttgcaaacgctgatcaacgacatacacagcaccgcgaacggccctaaagggtaccttattttggacggggtgttcaaccacacgggagacagccatccgtggtttgacaaatacaataatttttcgtctcagggagcatacgagtcacaatccagcccatggtacaactactatactttctacacatggcccgattcatacgcttcttttctcggattcaacagtttgcccaaactaaactacggcaacagcggttcagccgtacggggcgtaatctacaacaacagcaattcggtggctaaaacctatttaaacccgccttattctgtcgatggttggcggctcgatgcagcacaatatgttgacgcaaatggcaacaatggaagtgacgtgaccaaccaccagatttggagcgaatttcggaatgccgtcaagggagtgaattcaaacgccgcaatcatcggggagtattggggcaacgccaatccatggacggcccagggaaaccagtgggacgcagccaccaactttgatggcttcacccagcctgtttctgaatggattaccggcaaagactaccaaaacaattcggcttcgatcagcaccacacagtttgacagttggcttagggggacacgggccaactaccctaccaatgtccaacagtccatgatgaacttcctttccaatcatgacatcacccgctttgccacacgttccggcggagatctttggaaaacctacttggccctgatctttcagatgacttatgtgggcactccgaccatttactatggggacgaatacggcatgcagggaggcgcggaccccgacaaccgccggtcctttgattggtcacaagccactccctccaatagcgcggtggccctgacccaaaagctgatcaccattcgcaaccaataccctgctttaagaaccggttcctttatgacattaatcacggacgacaccaacaaaatttattcttatgggcgttttgacaacgtcaaccgaatcgccgtcgtgctaaacaatgactccgtcagccatacggtcaacgtgccggtttggcaactcagcatgccaaatggcagcactgtcacggacaaaattaccggccatagttacaccgtacaaaacggcatggttaccgttgccgttgacgggcactacggcgctgtcttggcacaataa

SEQ ID NO: 13935 - protein, 666 aa, Thermoactinomyces vulgaris
MIKLLKPMSLSILLVFILSFSFPFPTAKAAANDNNVEWNGLFHDQGPLFDNAPEPTSTQSVTLKLRTFKGDITSANIKYWDTADNAFHWVPMVWDSNDPTGTFDYWKGTIPASPSIKYYRFQINDGTSTAWYNGNGPSSTEPNADDFYIIPNFKTPDWLKNGVMYQIFPDRFYNGDSSNDVQTGSYTYNGTPTEKKAWGSSVYADPGYDNSLVFFGGDLAGIDQKLGYIKKTLGANILYLNPIFKAPTNHKYDTQDYMAVDPAFGDNSTLQTLINDIHSTANGPKGYLILDGVFNHTGDSHPWFDKYNNFSSQGAYESQSSPWYNYYTFYTWPDSYASFLGFNSLPKLNYGNSGSAVRGVIYNNSNSVAKTYLNPPYSVDGWRLDAAQYVDANGNNGSDVTNHQIWSEFRNAVKGVNSNAAIIGEYWGNANPWTAQGNQWDAATNFDGFTQPVSEWITGKDYQNNSASISTTQFDSWLRGTRANYPTNVQQSMMNFLSNHDITRFATRSGGDLWKTYLALIFQMTYVGTPTIYYGDEYGMQGGADPDNRRSFDWSQATPSNSAVALTQKLITIRNQYPALRTGSFMTLITDDTNKIYSYGRFDNVNRIAVVLNNDSVSHTVNVPVWQLSMPNGSTVTDKITGHSYTVQNGMVTVAVDGHYGAVLAQ

SEQ ID NO: 13936 - DNA, 1758 bp, Thermoactinomyces vulgaris
  CDS (1)..(1758): transl_table=11
atgctgttggaagcgatttttcatgaagcgaaaggaagctatgcttacccgatttcggaaacgcaactgcgggtgagattgcgggcgaaaaaaggggacgtggtgagatgcgaggtgctctatgcggaccgctatgcttcgccggaggaagaactggcacatgcacttgcgggcaaagcagggtccgatgagcgatttgattattttgaggctttactggaatgttccaccaaacgggtgaaatacgtgtttttgttgacaggcccacaaggggaggctgtttattttggcgagaccggtttttccgccgaacggtctaaagcgggggtgttccaatatgcttacatccaccggagcgaagtgtttacgacaccggaatgggcaaaggaggcggtgatctaccagatctttcccgaacgttttgccaatggggatcccagcaatgatccgccgggaacggaacaatgggccaaagacgccagacctcggcacgacagtttttacggcggagatttaaagggggtgatcgaccgtttgccatatttggaggagttgggagtgacggcgctttattttactcccatttttgcttcgccgtcccatcacaaatatgatacagctgattatttggcgattgatccgcaatttggggatttgcccacctttcggcgtttggtggatgaagctcaccggcgcgggatcaaaatcattttggatgccgtgtttaaccatgccggagatcagttttttgcgtttcgggatgttctgcaaaagggagaacagtcgcgatataaggattggtttttcatcgaggattttcccgtttccaagacgtcaagaaccaattatgaaacctttgccgtccaagtgccggccatgcccaaattgcggacggaaaatccggaagtgaaggaatatttgtttgatgtcgcgcgattttggatggagcaggggatcgacggatggagactggatgtggccaatgaggtggatcacgccttttggcgcgagtttcgccgccttgtcaaatccctcaatcccgacgccttgattgtcggagagatttggcatgacgcttccggctggctgatgggagaccaatttgattcggtgatgaattatttgtttcgcgagagtgtgatccgtttttttgccacgggggagatccatgccgaaagatttgacgccgaacttacccgggccaggatgctttatccggaacaggcggcacaagggttatggaacctcctcgactcacacgatacggaacgttttttgacatcgtgtggggggaatgaggcgaaattccgcctggctgttttgtttcagatgacatacctggggacgccgctgatttattacggtgatgagatcgggatggccggagcgacggacccggattgccggcgcccgatgatatgggaggaaaaagagcagaaccgcggcttgtttgagttttataaggaattgattcgcttgcgccatcggctggcatcgctcaccaggggaaatgtccggtcttggcatgccgacaaacaagccaatctttatgcttttgtgcgcacggttcaagaccaacatgtcggtgtggttctcaataatcgtggcgagaagcaaaccgttttgctacaggtgccggaatcgggcggaaaaacttggctggattgtttgaccggagaagaagtgcatggcaaacaagggcaactgaagctgacacttcgcccttaccagggaatgattctctggaatggccggtag

SEQ ID NO: 13937 - protein, 585 aa, Thermoactinomyces vulgaris
MLLEAIFHEAKGSYAYPISETQLRVRLRAKKGDVVRCEVLYADRYASPEEELAHALAGKAGSDERFDYFEALLECSTKRVKYVFLLTGPQGEAVYFGETGFSAERSKAGVFQYAYIHRSEVFTTPEWAKEAVIYQIFPERFANGDPSNDPPGTEQWAKDARPRHDSFYGGDLKGVIDRLPYLEELGVTALYFTPIFASPSHHKYDTADYLAIDPQFGDLPTFRRLVDEAHRRGIKIILDAVFNHAGDQFFAFRDVLQKGEQSRYKDWFFIEDFPVSKTSRTNYETFAVQVPAMPKLRTENPEVKEYLFDVARFWMEQGIDGWRLDVANEVDHAFWREFRRLVKSLNPDALIVGEIWHDASGWLMGDQFDSVMNYLFRESVIRFFATGEIHAERFDAELTRARMLYPEQAAQGLWNLLDSHDTERFLTSCGGNEAKFRLAVLFQMTYLGTPLIYYGDEIGMAGATDPDCRRPMIWEEKEQNRGLFEFYKELIRLRHRLASLTRGNVRSWHADKQANLYAFVRTVQDQHVGVVLNNRGEKQTVLLQVPESGGKTWLDCLTGEEVHGKQGQLKLTLRPYQGMILWNGR

SEQ ID NO: 13938 - DNA, 24 bp, Artificial sequence
  Primer sequence
atgatgttaaatgcatggcacctg

SEQ ID NO: 13939 - DNA, 24 bp, Artificial sequence
  Primer sequence
ttagttcatccataccgtagccga

SEQ ID NO: 13940 - protein, 917 aa, Artificial sequence
  Consensus
  Variant (2)..(2): Xaa in position 2 is any amino acid
  Variant (6)..(6): Xaa in position 6 is any amino acid
  Variant (15)..(16): Xaa in position 15 to 16 is any amino acid
  Variant (18)..(18): Xaa in position 18 is any amino acid
  Variant (22)..(22): Xaa in position 22 is any amino acid
  Variant (25)..(25): Xaa in position 25 is any amino acid
  Variant (26)..(85): Xaa in position 26 to 85 is any or no amino acid
  Variant (89)..(89): Xaa in position 89 is any amino acid
  Variant (93)..(93): Xaa in position 93 is any amino acid
  Variant (99)..(99): Xaa in position 99 is any amino acid
  Variant (101)..(108): Xaa in position 101 to 108 is any or no amino acid
  Variant (112)..(112): Xaa in position 112 is any amino acid
  Variant (117)..(117): Xaa in position 117 is any amino acid
  Variant (121)..(121): Xaa in position 121 is any amino acid
  Variant (124)..(125): Xaa in position 124 to 125 is any amino acid
  Variant (126)..(152): Xaa in position 126 to 152 is any or no amino acid
  Variant (158)..(158): Xaa in position 158 is any amino acid
  Variant (161)..(162): Xaa in position 161 to 162 is any amino acid
  Variant (166)..(166): Xaa in position 166 is any amino acid
  Variant (171)..(171): Xaa in position 171 is any amino acid
  Variant (174)..(175): Xaa in position 174 to 175 is any amino acid
  Variant (178)..(179): Xaa in position 178 to 179 is any amino acid
  Variant (182)..(182): Xaa in position 182 is any amino acid
  Variant (186)..(189): Xaa in position 186 to 189 is any or no amino acid
  Variant (195)..(195): Xaa in position 195 is any amino acid
  Variant (197)..(197): Xaa in position 197 is any amino acid
  Variant (203)..(203): Xaa in position 203 is any amino acid
  Variant (205)..(205): Xaa in position 205 is any amino acid
  Variant (208)..(208): Xaa in position 208 is any amino acid
  Variant (211)..(214): Xaa in position 211 to 214 is any amino acid
  Variant (215)..(256): Xaa in position 215 to 256 is any or no amino acid
  Variant (258)..(258): Xaa in position 258 is any or no amino acid
  Variant (266)..(266): Xaa in position 266 is any or no amino acid
  Variant (268)..(269): Xaa in position 268 to 269 is any amino acid
  Variant (270)..(394): Xaa in position 270 to 394 is any or no amino acid
  Variant (397)..(399): Xaa in position 397 to 399 is any or no amino acid
  Variant (401)..(402): Xaa in position 401 to 402 is any amino acid
  Variant (403)..(404): Xaa in position 403 to 404 is any or no amino acid
  Variant (413)..(413): Xaa in position 413 is any amino acid
  Variant (415)..(417): Xaa in position 415 to 417 is any amino acid
  Variant (420)..(420): Xaa in position 420 is any amino acid
  Variant (421)..(426): Xaa in position 421 to 426 is any or no amino acid
  Variant (433)..(433): Xaa in position 433 is any amino acid
  Variant (434)..(434): Xaa in position 434 is any or no amino acid
  Variant (436)..(441): Xaa in position 436 to 441 is any or no amino acid
  Variant (449)..(449): Xaa in position 449 is any amino acid
  Variant (451)..(452): Xaa in position 451 to 452 is any amino acid
  Variant (454)..(458): Xaa in position 454 to 458 is any amino acid
  Variant (459)..(487): Xaa in position 459 to 487 is any or no amino acid
  Variant (489)..(490): Xaa in position 489 to 490 is any amino acid
  Variant (492)..(495): Xaa in position 492 to 495 is any amino acid
  Variant (498)..(498): Xaa in position 498 is any amino acid
  Variant (504)..(509): Xaa in position 504 to 509 is any amino acid
  Variant (510)..(529): Xaa in position 510 to 529 is any or no amino acid
  Variant (532)..(534): Xaa in position 532 to 534 is any amino acid
  Variant (535)..(538): Xaa in position 535 to 538 is any or no amino acid
  Variant (540)..(544): Xaa in position 540 to 544 is any amino acid
  Variant (547)..(554): Xaa in position 547 to 554 is any amino acid
  Variant (555)..(592): Xaa in position 555 to 592 is any or no amino acid
  Variant (594)..(607): Xaa in position 594 to 607 is any amino acid
  Variant (608)..(611): Xaa in position 608 to 611 is any or no amino acid
  Variant (613)..(613): Xaa in position 613 is any amino acid
  Variant (617)..(618): Xaa in position 617 to 618 is any amino acid
  Variant (620)..(620): Xaa in position 620 is any amino acid
  Variant (623)..(623): Xaa in position 623 is any amino acid
  Variant (625)..(627): Xaa in position 625 to 627 is any amino acid
  Variant (628)..(667): Xaa in position 628 to 667 is any or no amino acid
  Variant (672)..(674): Xaa in position 672 to 674 is any amino acid
  Variant (684)..(684): Xaa in position 684 is any amino acid
  Variant (694)..(697): Xaa in position 694 to 697 is any amino acid
  Variant (698)..(737): Xaa in position 698 to 737 is any or no amino acid
  Variant (739)..(739): Xaa in position 739 is any amino acid
  Variant (740)..(740): Xaa in position 740 is any or no amino acid
  Variant (742)..(742): Xaa in position 742 is any or no amino acid
  Variant (745)..(745): Xaa in position 745 is any or no amino acid
  Variant (747)..(750): Xaa in position 747 to 750 is any amino acid
  Variant (752)..(797): Xaa in position 752 to 797 is any or no amino acid
  Variant (801)..(801): Xaa in position 801 is any amino acid
  Variant (803)..(803): Xaa in position 803 is any amino acid
  Variant (805)..(805): Xaa in position 805 is any amino acid
  Variant (808)..(808): Xaa in position 808 is any amino acid
  Variant (812)..(814): Xaa in position 812 to 814 is any amino acid
  Variant (817)..(817): Xaa in position 817 is any amino acid
  Variant (818)..(818): Xaa in position 818 is any or no amino acid
  Variant (820)..(827): Xaa in position 820 to 827 is any amino acid
  Variant (828)..(840): Xaa in position 828 to 840 is any or no amino acid
  Variant (845)..(845): Xaa in position 845 is any amino acid
  Variant (847)..(850): Xaa in position 847 to 850 is any amino acid
  Variant (852)..(852): Xaa in position 852 is any amino acid
  Variant (857)..(857): Xaa in position 857 is any amino acid
  Variant (859)..(864): Xaa in position 859 to 864 is any amino acid
  Variant (865)..(886): Xaa in position 865 to 886 is any or no amino acid
  Variant (888)..(898): Xaa in position 888 to 898 is any amino acid
  Variant (899)..(909): Xaa in position 899 to 909 is any or no amino acid
  Variant (911)..(915): Xaa in position 911 to 915 is any amino acid
  Variant (916)..(916): Xaa in position 916 is any or no amino acid
PXWWKXAVIYQIFPXXFXDSNXDGXXXXXXXXXXXXXXXXXXXXXXXXXXXXXXXXXXXXXXXXXXXXXXXXXXXXXXXXXXXXXGDLXGIIXKLDYLXDXXXXXXXXLGVXAIWLXPIFXSPXXXXXXXXXXXXXXXXXXXXXXXXXXXXXHGYDIXDYXXIDPXFGTLXDFXXLVXXAHXRGIXXXXKVILDXVXNHTSDXHXWFXDAXXXXXXXXXXXXXXXXXXXXXXXXXXXXXXXXXXXXXXXXXXXXXXSXYRDWYVWXDXXXXXXXXXXXXXXXXXXXXXXXXXXXXXXXXXXXXXXXXXXXXXXXXXXXXXXXXXXXXXXXXXXXXXXXXXXXXXXXXXXXXXXXXXXXXXXXXXXXXXXXXXXXXXXXXXXXXXXXXXXXXXXXYYXXXFXXXXPDLNFDNPXVXXXLLXXXXXXXVMRFWLXXGXXXXXXIDGFRLDXVXXLXXXXXXXXXXXXXXXXXXXXXXXXXXXXXXXXXXRXXVXXXXPDXYLLGEXXXXXXXXXXXXXXXXXXXXXXXXXXGDXXXXXXXYXXXXXILXXXXXXXXXXXXXXXXXXXXXXXXXXXXXXXXXXXXXXXXXXXXXXVXXXXXXXXXXXXXXXXXXLXNHDXXRXLTXLXXXXXXXXXXXXXXXXXXXXXXXXXXXXXXXXXXXXXXXXXXXRIKLXXXLLLTLPGTPXIYYGDEIGMXXXXXXXXXXXXXXXXXXXXXXXXXXXXXXXXXXXXXXXXXXXXDXXRXPMXWXXXXNXXXXXXXXXXXXXXXXXXXXXXXXXXXXXXXXXXXXXXXXXXXXXXSLLXFXRXLIXLRKXXXALXXGXXXXXXXXXXXXXXXXXXXXXVLAYXRXXXXEXILVVXNXXXXXXXXXXXXXXXXXXXXXXXXXXXXLXXXXXXXXXXXXXXXXXXXXXXLXXXXXXV

SEQ ID NO: 13941 - protein, 8 aa, Artificial sequence
  Consensus
  Variant (2)..(2): Xaa in position 2 is Glu or Gln
  Variant (3)..(3): Xaa in position 3 is Ile, Leu or Val
  Variant (4)..(7): Xaa in position 4 to 7 is any amino acid
YXXXXXXF

SEQ ID NO: 13942 - protein, 72 aa, Artificial sequence
  Consensus
  Variant (2)..(12): Xaa in position 2 to 12 is any amino acid
  Variant (14)..(16): Xaa in position 14 to 16 is any amino acid
  Variant (17)..(17): Xaa in position 17 is Phe, Ile, Leu, Met or Val
  Variant (18)..(18): Xaa in position 18 is Trp or Tyr
  Variant (19)..(19): Xaa in position 19 is Phe, Ile, Leu, Met or Val
  Variant (20)..(20): Xaa in position 20 is any amino acid
  Variant (22)..(30): Xaa in position 22 to 30 is any amino acid
  Variant (31)..(31): Xaa in position 31 is any or no amino acid
  Variant (33)..(35): Xaa in position 33 to 35 is any amino acid
  Variant (36)..(36): Xaa in position 36 is Asp, Glu, Asn or Thr
  Variant (37)..(39): Xaa in position 37 to 39 is any amino acid
  Variant (40)..(40): Xaa in position 40 is Phe, Ile, Leu or Val
  Variant (41)..(44): Xaa in position 41 to 44 is any amino acid
  Variant (46)..(52): Xaa in position 46 to 52 is any amino acid
  Variant (53)..(53): Xaa in position 53 is Phe, Leu, Met or Val
  Variant (54)..(61): Xaa in position 54 to 61 is any amino acid
  Variant (62)..(62): Xaa in position 62 is Phe, Ile, Leu, Met or Val
  Variant (63)..(63): Xaa in position 63 is any amino acid
  Variant (64)..(64): Xaa in position 64 is Ile, Leu or Val
  Variant (65)..(66): Xaa in position 65 to 66 is any amino acid
  Variant (67)..(67): Xaa in position 67 is Asp or Glu
  Variant (68)..(71): Xaa in position 68 to 71 is any amino acid
GXXXXXXXXXXXGXXXXXXXPXXXXXXXXXXYXXXXXXXXXXXXGXXXXXXXXXXXXXXXXXXXXXXXXXXH

SEQ ID NO: 13943 - protein, 14 aa, Artificial sequence
  Consensus
  Variant (2)..(6): Xaa in position 2 to 6 is any amino acid
  Variant (7)..(8): Xaa in position 7 to 8 is any or no amino acid
  Variant (10)..(10): Xaa in position 10 is Ala or Gly
  Variant (11)..(11): Xaa in position 11 is any amino acid
  Variant (13)..(13): Xaa in position 13 is Phe, Ile, Leu, Met or Val
WXXXXXXXDXXRXD

SEQ ID NO: 13944 - protein, 12 aa, Artificial sequence
  Consensus
  Variant (2)..(2): Xaa in position 2 is any amino acid
  Variant (3)..(3): Xaa in position 3 is Ala, Ile, Pro or Val
  Variant (4)..(5): Xaa in position 4 to 5 is any amino acid
  Variant (7)..(7): Xaa in position 7 is any amino acid
  Variant (9)..(9): Xaa in position 9 is Asp, Glu, Gly, Asn, Gln, Ser or Thr
  Variant (11)..(11): Xaa in position 11 is any amino acid
GXXXXYXGXEXG

SEQ ID NO: 13945 - DNA, 1203 bp, Escherichia coli
  CDS (1)..(1203)
atgacacaattcgcttctcctgttctgcactcgttgctggatacagatgcttataagttgcatatgcagcaagccgtgtttcatcactattacgatgtgcatgtcgcggcggagtttcgttgccgaggtgacgatctgctgggtatttatgccgatgctattcgtgaacaggttcaggcgatgcagcacctgcgcctgcaggatgatgaatatcagtggctttctgccctgcctttctttaaggccgactatcttaactggttacgcgagttccgctttaacccggaacaagtcaccgtgtccaacgataatggcaagctggatattcgtttaagcggcccgtggcgtgaagtcatcctctgggaagttcctttgctggcggttatcagtgaaatggtacatcgctatcgctcaccgcaggccgacgttgcgcaagccctcgacacgctggaaagcaaattagtcgacttctcggcgttaaccgccggtcttgatatgtcgcgcttccatctgatggattttggcacccgtcgccgtttttctcgcgaagtacaagaaaccatcgttaagcgtctgcaacaggaatcctggtttgtgggcaccagcaactacgatctggcgcgtcggctttccctcacgccgatgggaacacaggcacacgaatggttccaggcacatcagcaaatcagcccggatctagccaacagccagcgagctgcacttgctgcctggctggaagagtatcccgaccaacttggcattgcattaaccgactgcatcactatggatgctttcctgcgtgatttcggtgtcgagttcgctagtcggtatcagggcctgcgtcatgactctggcgacccggttgaatggggtgaaaaagccattgcacattatgaaaagctgggaattgatccacagagtaaaacgctggttttctctgacaatctggatttacgcaaagcggttgagctataccgccacttctcttcccgcgtgcaattaagttttggtattgggactcgcctgacctgcgatatcccccaggtaaaacccctgaatattgtcattaagttggtagagtgtaacggtaaaccggtggcgaaactttctgacagccctggcaaaactatctgccatgataaagcgtttgttcgggcgctgcgcaaagcgttcgaccttccgcatattaaaaaagccagttaa

SEQ ID NO: 13946 - protein, 400 aa, Escherichia coli
MTQFASPVLHSLLDTDAYKLHMQQAVFHHYYDVHVAAEFRCRGDDLLGIYADAIREQVQAMQHLRLQDDEYQWLSALPFFKADYLNWLREFRFNPEQVTVSNDNGKLDIRLSGPWREVILWEVPLLAVISEMVHRYRSPQADVAQALDTLESKLVDFSALTAGLDMSRFHLMDFGTRRRFSREVQETIVKRLQQESWFVGTSNYDLARRLSLTPMGTQAHEWFQAHQQISPDLANSQRAALAAWLEEYPDQLGIALTDCITMDAFLRDFGVEFASRYQGLRHDSGDPVEWGEKAIAHYEKLGIDPQSKTLVFSDNLDLRKAVELYRHFSSRVQLSFGIGTRLTCDIPQVKPLNIVIKLVECNGKPVAKLSDSPGKTICHDKAFVRALRKAFDLPHIKKAS

SEQ ID NO: 13947 - DNA, 1281 bp, Aquifex aeolicus VF5
  CDS (1)..(1281): transl_table=11
atgaaatatttaggactttgcacagacctctacgaactcaccatggcacagagttacctctacgaaggcaaaaccggaaccgctgtattctccctttttgtaaggaaactccccgaaaagaggaacttcctgatatccgcagggctcgaaaccttggtggagaggataaagaacttcaagttcggagatgaggagataaagtatttaaagagcctgggaatttttaaagacgattttctggactacctcaaggactttgaattttctggaaatgtttacgcaattcccgagggaaggatagtattccaaaacgaacctctcgttcaggtagaagctccgattcccgaagcccaactccttgagacgttggtaataaatactatacagtttgagacaatgatagcttcaaaggcggtgaggagttatctcgtggctaaagggaagaagctcgttgatttcggtttcaggcgggcccacggcttagaagcgggaatccttgcagcgagggcttcctacatcgccggttttgacgggacttcaaacgtcgaggcgggaagggagttcggtattcccgttgtgggaactatggcacactcctacgtgatgatttttgacaaggaagaagacgccttcagggcttttgccaaactctaccccaagaacgctatattcctgatagacacctacgataccattgaggcggcaaaaaaggtcgtagacctcgcaaaggaaggcgtacccgttgtgggagtcagaattgacagcggtgatatagtgaagctttccaaggaagtgaggaaaattctggacgaaaacggactgaaaaatgtaaggattatagtgagcggtggcgttgacgagtacaaaatcaaggaatggtttgacagaggcgctcccatagacgccttcggcgtaggaacgaagttcataacttccgcagatgccccatactttgacatagcctataagctcgttgagtacgaaggaaaaccaaagtacaaactcagccccggtaaaaaaacattcccatacaagaggcaggtctacaggtattacgaaaacggaaagatgaagtacgacgagaccgccaagtgggagagcaaaagggaaggagaacctctggtagaactcgttatgaaaaacggaaagctaataaaggaattgcctagcctgaaggaaataagggaagttgtgatgtcggaactagaaaaactccccgaaaattacaaggacataacgaaacactacgagtacgaagtaaagatcttagactgggagtaa

SEQ ID NO: 13948 - protein, 426 aa, Aquifex aeolicus VF5
MKYLGLCTDLYELTMAQSYLYEGKTGTAVFSLFVRKLPEKRNFLISAGLETLVERIKNFKFGDEEIKYLKSLGIFKDDFLDYLKDFEFSGNVYAIPEGRIVFQNEPLVQVEAPIPEAQLLETLVINTIQFETMIASKAVRSYLVAKGKKLVDFGFRRAHGLEAGILAARASYIAGFDGTSNVEAGREFGIPVVGTMAHSYVMIFDKEEDAFRAFAKLYPKNAIFLIDTYDTIEAAKKVVDLAKEGVPVVGVRIDSGDIVKLSKEVRKILDENGLKNVRIIVSGGVDEYKIKEWFDRGAPIDAFGVGTKFITSADAPYFDIAYKLVEYEGKPKYKLSPGKKTFPYKRQVYRYYENGKMKYDETAKWESKREGEPLVELVMKNGKLIKELPSLKEIREVVMSELEKLPENYKDITKHYEYEVKILDWE

SEQ ID NO: 13949 - DNA, 1260 bp, Neisseria meningitidis Z2491
  CDS (1)..(1260): transl_table=11
atgtgttctaatacgccccaagccgccaccaaaaatcgggagacacgccatatgaccggcatcatacattcgttgcttgacaccgacctctacaaattcactatgctgcaagtagtcctgcaccagtttccgcagacgcacagcctttacgaattccgatgccgcaacgcctcgaccgtctatccgcttgccgacatcaaagaagacttggaagtcgaactcgacgcgctctgccaactacgcttcacccacgacgaactcgactatctgcgcagcctgcgtttcatcaaaagcgactttgtcgattatctcgaactcttccagctccaacgccgctttgtcgaagtcggcacagacgataaaggccgtctgaacatccgcatcgaaggtccgatgatacaggcgatgttttttgaaatcttcatcctcgccattgtcaacgaactttacttccgccggctggaaacccctgccgttatcgaagaaggtgaacgccggcttcaagccaaagccgcgcgcctgaaagaaatcgccgccgcacaaaaccccgacgaaccgcccttcctgatttccgacttcggcacgcgccgccgctacaagctcgcgtggcaggaacacgtcatccgcaccctgctcgaagccgccccaagcatcgtgcgcggcaccagcaatgtctttctcgccaaaaaactcggcatcacgcccatcggcaccatggcgcacgaattcctccaagccttccaagccctcgacgtgcgcctgcgtaatttccaaaaggccgcgctcgaaagttgggtacacgaataccggggcgatttgggcgttgccctgaccgacgtggtcggtatggatgccttcctgcgcgatttcgacctctatttcgccaaactctttgacgggctgcgccacgacagcggcgacccttacatttggggcgacaaagcctacgcccactatcaaaagctcaaaatcgacagccgcaccaaaatgctgaccttctccgacgggctggacatcgaacgctcttgggcattacaccaatatttcaaagaccgcttcaaaaccggcttcggcatcggcaccaacctcaccaacgatatggggcatacacccttaaatattgtgttgaaactggtcgaatgcaacgggcagtccgtcgccaagctgtccgactctccgggcaaaaccatgaccaacaacagcaccttcctcgcctacctgcgccaagtgttcgacgtacccgaacccgaaacgccgtaa

SEQ ID NO: 13950 - protein, 419 aa, Neisseria meningitidis Z2491
MCSNTPQAATKNRETRHMTGIIHSLLDTDLYKFTMLQVVLHQFPQTHSLYEFRCRNASTVYPLADIKEDLEVELDALCQLRFTHDELDYLRSLRFIKSDFVDYLELFQLQRRFVEVGTDDKGRLNIRIEGPMIQAMFFEIFILAIVNELYFRRLETPAVIEEGERRLQAKAARLKEIAAAQNPDEPPFLISDFGTRRRYKLAWQEHVIRTLLEAAPSIVRGTSNVFLAKKLGITPIGTMAHEFLQAFQALDVRLRNFQKAALESWVHEYRGDLGVALTDVVGMDAFLRDFDLYFAKLFDGLRHDSGDPYIWGDKAYAHYQKLKIDSRTKMLTFSDGLDIERSWALHQYFKDRFKTGFGIGTNLTNDMGHTPLNIVLKLVECNGQSVAKLSDSPGKTMTNNSTFLAYLRQVFDVPEPETP

SEQ ID NO: 13951 - DNA, 1425 bp, Deinococcus radiodurans R1
  CDS (1)..(1425): transl_table=11
atgactgacctctccccccttctgaccgacctctaccagctcaccatgatgcagggctattttctcagcgacctgcaccggcagcaggcgacgtttgacctgtatttccgccgcctgcccttcgagggcggctacgcggtgtgggccgggctggagccgatgctcgactggcttcagggcttgcacttcgccgaggccgacctcgactacctcgcctcgctggggcagttccggcccgagtttctggcggcgctgcgcgagtggcgcttttcctgcgaggtgacggcgtttcccgaaggcagcgtggtctttccgcacgagccgctgctgacggtgcgcgggccgctgtgggaagcgcaactggtggaaacggcgctgctcaacaccctgaattttcagacgctggtggcgaccaaggcggcgcgctgcgtgctggcggcgcaggcgggcggcggcacggtcctcgaattcggggcgcggcgggcgcaggggccgaacggggccgtcagcgcggcgcgggcggccttcgtgggcggcgcagtgggcacgagcaatctggaagcggggcggcagttcgggattccagtgtcggggacgcacgcgcacgcctgggtggagagttttccgactgaactcgacgcctttcgcgcctacgccgagttttaccccgactccaccacgctgctgctcgacacggtggacaccctcggcagcggcctgcccaacgcgctgacggtggccgccgaactgcgggcgaagggccatgaactgggcggcgtgcgcgtggactcaggcgacctcgcctacctctcgcgggtcatccgggagcggctggacgcggcgggctttcccgacgtgaaaatcgtggtgagcaacgacctgtccgaatcggtcatctccggcgtgattgccgaggggggccgggtggacgtgtacggcgtggggacgcaactcgccacggcggggggccccggcggcggagcgctcggcggcgtgtacaagctggccgaactgaatgggcggccccgcatgaagctgaccggcgaccccgccaagtcgagcctgcccggcaccaaagccgtgtggcgcgggttagatcatgatcacttcgcctgggacgtgctgacgctgggagacgctccacatgagggcctgcgcgtcagcgaccccaccaacccgctgcgctcggcccggctcacctcgcgcctgcactggcgtccggcccgcgacctcgtgatgagcggcggccagcgcacccgccctgctgaggcgctgcccgcgctgcaagcccgcgcccgcgaggaacttgcgcgcctcgcccccgaaacgcgccgtctgcttaacccgcacgtctaccgcgtgagccttgcccccgaagtctcggaattgcgcgaccggctggcgcaggaactgcggggccactga

SEQ ID NO: 13952 - protein, 474 aa, Deinococcus radiodurans R1
MTDLSPLLTDLYQLTMMQGYFLSDLHRQQATFDLYFRRLPFEGGYAVWAGLEPMLDWLQGLHFAEADLDYLASLGQFRPEFLAALREWRFSCEVTAFPEGSVVFPHEPLLTVRGPLWEAQLVETALLNTLNFQTLVATKAARCVLAAQAGGGTVLEFGARRAQGPNGAVSAARAAFVGGAVGTSNLEAGRQFGIPVSGTHAHAWVESFPTELDAFRAYAEFYPDSTTLLLDTVDTLGSGLPNALTVAAELRAKGHELGGVRVDSGDLAYLSRVIRERLDAAGFPDVKIVVSNDLSESVISGVIAEGGRVDVYGVGTQLATAGGPGGGALGGVYKLAELNGRPRMKLTGDPAKSSLPGTKAVWRGLDHDHFAWDVLTLGDAPHEGLRVSDPTNPLRSARLTSRLHWRPARDLVMSGGQRTRPAEALPALQARAREELARLAPETRRLLNPHVYRVSLAPEVSELRDRLAQELRGH

SEQ ID NO: 13953 - DNA, 1392 bp, Mycobacterium tuberculosis CDC1551
  CDS (1)..(1392): transl_table=11
atggcgatccgccaacacgtcggcgcgctgttcaccgacctgtacgaggtgacgatggcccaggcctactgggccgaaagaatgtcgggcacagcggttttcgagatattcttccgcaagcttccgcctggcaggtcctacatcatggccgccgggctggccgatgtggtcgagttcctcgaagcgtttcgattcgacgagcaggatctgcgttacctgcgtggcctgggccagttttccgacgagttcctgaggtggctggccggagtgcgtttcaccggagatgtctgggccgcgccggaaggaaccgtgatttttccgaacgaacccgcggtccagctgatcgcgccaatcatcgaggcccagcttgtcgagacgtttgtgctgaaccagattcatctgcaaagcgtgctcgcgagcaaggccgcgcgggtggtcgccgccgcgcgcggacgaccggtggtggatttcggcgcgcggcgcgctcacggcaccgacgcggcctgcaaggtcgcgcgcaccagttatctcgcgggcgctgcgggcacgtcgaatctgctcgcggcccgccaatatgggatcccgacgttcggcaccatggcgcacagctttgttcaagccttcgacagtgaggtggccgcgttcgaggcgttcgcccggctctacccagccaccatgctgctcgtggacacctacgacacgctacgcggcgtcgatcacgtcatcgagttggccaagcggctgggcaatcgcttcgatgtgcgcgcggtccggctggattccggcgacctcgatgagctgtccaaggcgacccgtgcacggctcgacaccgccggtctcgagcaggtcgagatcttcgcgtcgtcgggcctcgacgaaaaccgcatcgccgcgcttttggctgcccgctgtccgatcgacggcttcggcgtgggcacccagctcgtcgtggctcaagacgcgcccgcgctggacatggcctacaagctggtggcatacgacggcagcgggcgcaccaagttctccagcggcaaggtgatctacccgggacgcaagcaggtgttccgtaagctcgagcacggagtcttttgcggcgacacgctcggcgagcacggtgaaaaccttcccggggacccgttgctggtgcccatcatgaccaacggccgacgcatccggcagcatgcacccacattggacggcgcgcgggactgggcccgccagcagatcgacgcgctcccgccggagctgcgctcgctcgaggacaccggctactcgtatccggtggcggtcagcgacaggatcgtgggcgaactcgcccggctgcggcacgccgacacggccgaagcccaccccgggtccaacgtcgtcggggcgaaggccaaacgaccctag

SEQ ID NO: 13954 - protein, 463 aa, Mycobacterium tuberculosis CDC1551
MAIRQHVGALFTDLYEVTMAQAYWAERMSGTAVFEIFFRKLPPGRSYIMAAGLADVVEFLEAFRFDEQDLRYLRGLGQFSDEFLRWLAGVRFTGDVWAAPEGTVIFPNEPAVQLIAPIIEAQLVETFVLNQIHLQSVLASKAARVVAAARGRPVVDFGARRAHGTDAACKVARTSYLAGAAGTSNLLAARQYGIPTFGTMAHSFVQAFDSEVAAFEAFARLYPATMLLVDTYDTLRGVDHVIELAKRLGNRFDVRAVRLDSGDLDELSKATRARLDTAGLEQVEIFASSGLDENRIAALLAARCPIDGFGVGTQLVVAQDAPALDMAYKLVAYDGSGRTKFSSGKVIYPGRKQVFRKLEHGVFCGDTLGEHGENLPGDPLLVPIMTNGRRIRQHAPTLDGARDWARQQIDALPPELRSLEDTGYSYPVAVSDRIVGELARLRHADTAEAHPGSNVVGAKAKRP

SEQ ID NO: 13955 - DNA, 1203 bp, Salmonella typhimurium LT2
  CDS (1)..(1203): transl_table=11
atgacacaattcgcttctcctgttctgcactcgttgctggatacagatgcttataagttgcatatgcagcaagccgtttttcaccactactatgatgtgcaggtagcggctgagtttcgttgccgtggcgacgacctgctgggtatttatgccgatgctattcgcgagcaggtggacgcgatgcagcacctgcgcctcctggaggacgagttccagtggctctccggcctgcccttttttaaaccggattatctgaactggttacgcgagtttcgctataacccagctcaagtctgtgtcaccaacgataacggcaagctgaatattcgcttaaccggcccgtggcgtgaagtcattatgtgggaagtgccgctgctggccgtgatcagtgagctggttcatcactaccgctcgccaaacgcgggtgttgatcaggcgctcgacgcgctggaaagtaagctggttgatttcactgcgttaaccgccaatctcgatatgtcccgcttccacctgatggacttcggcacccgccgccgtttctctcgtgaagtgcagcaggcgatagttaaacgtctccagcaggagtcatggttcgtcggcaccagcaactatgatctcgcgcgtcgcctggcgctgacgccgatgggcactcaggcgcacgaatggttccaggcgcatcaacaaatcagtccggacctggcgaccagccagcgtgccgcgttggccgcctggcttaacgaatatccggaccagcttggtatcgccttgacagattgcattacaatggatgcgtttttacgcgatttcggcattgaattcgccagccgttatcaggggttacgccacgactcaggagaccctgtcgcatggggcgaaaaggcgattgcccattatgaaaagctggggattgatccgctgacaaaaacgctggtcttttcagataaccttgatctgccaaaggcggtcgagctctatcgccatttcgcctctcgcgtgcagttaagcttcggcatcggtacccgcctgacctgcgatatccctcaggtaaaaccgctcaatatcgtgattaagctcgtggaatgtaacggaaagccggtggctaaactttccgacagccccggtaaaacgatctgtcatgataaagcgtttgtgcgcgcgctgcgtaaagcgttcgatctcccgcaggtgcgtaaagcaagttaa

SEQ ID NO: 13956 - protein, 400 aa, Salmonella typhimurium LT2
MTQFASPVLHSLLDTDAYKLHMQQAVFHHYYDVQVAAEFRCRGDDLLGIYADAIREQVDAMQHLRLLEDEFQWLSGLPFFKPDYLNWLREFRYNPAQVCVTNDNGKLNIRLTGPWREVIMWEVPLLAVISELVHHYRSPNAGVDQALDALESKLVDFTALTANLDMSRFHLMDFGTRRRFSREVQQAIVKRLQQESWFVGTSNYDLARRLALTPMGTQAHEWFQAHQQISPDLATSQRAALAAWLNEYPDQLGIALTDCITMDAFLRDFGIEFASRYQGLRHDSGDPVAWGEKAIAHYEKLGIDPLTKTLVFSDNLDLPKAVELYRHFASRVQLSFGIGTRLTCDIPQVKPLNIVIKLVECNGKPVAKLSDSPGKTICHDKAFVRALRKAFDLPQVRKAS

SEQ ID NO: 13957 - DNA, 1320 bp, Agrobacterium tumefaciens str. C58
  CDS (1)..(1320): transl_table=11
ttggggaatgcaagtatgacgaagaccgatatagccacccgtgtccacaatcatacttggaagctagacccgatcgtccgcagcctgattgatacagatttctacaagctgttgatgttgcagatgatctggaaactctatccggaagtcgacgcgacgttttccctgatcaaccgcaccaagactgtgcggctggcggaagagatcgacgagatggaactgcgcgagcagctcgatcatgcgcgcaccctgcgtctctccaaaaaggaaaatatctggcttgcgggtaatacgttttacggccgctcgcagattttcgagccggaatttctctcctggctttccagctatcaattgccggaatacgagcttttcaagcgcgacgggcaatatgagctgaatttccatggccgctggatggacacgacactctgggaaatcccggcgctgtctatcatcaacgagctgcgctcgcgcagcgccatgcgttcgctcggttatttcacgctggacgtgctttatgcccgcgccaaggccaagatgtgggaaaaggtcgagcggttgcgtgaactgccggggctgcgcatttccgatttcggcacccgccgccgccatagcttcctgtggcagcgctggtgcgtcgaggcgctgaaggaaggcatcggccctgcctttaccggcacgagcaatgtcctgctcgccatggattccgacctcgaagccgtcggcaccaacgcgcatgagttaccgatggtggttgccgcactggcgcagacgaacgaggaactggccgccgccccctatcaggttctaaaggactggaaccggctttatggcggtaacctgctgatcgtgctgccggacgcctttggcacggcggcgtttcttcgcaatgcgccggaatgggtggctgactggacgggctttcgccccgacagcgcgccgcccattgaaggcggtgaaaagattatcgagtggtggcggaagatgggccgcgacccgcgcacgaagatgctgatcttctcagatggtctcgatgtcgatgccatcgtcgatacctacaggcattttgaaggccgcgtccgtatgagcttcggctggggcaccaacctcaccaatgattttgccggctgcgcgccgaagaccattgccagcctcaagccgatttccatcgtctgcaaggtgagcgatgccaatggccgcccagcggtgaagctctcggacaatccgcaaaaagccactggcgatccggccgaagtggaacggtatctgaagttcttcggcgaggaagaccacaaggaacagaaggttctggtgtaa

SEQ ID NO: 13958 - protein, 439 aa, Agrobacterium tumefaciens str. C58
MGNASMTKTDIATRVHNHTWKLDPIVRSLIDTDFYKLLMLQMIWKLYPEVDATFSLINRTKTVRLAEEIDEMELREQLDHARTLRLSKKENIWLAGNTFYGRSQIFEPEFLSWLSSYQLPEYELFKRDGQYELNFHGRWMDTTLWEIPALSIINELRSRSAMRSLGYFTLDVLYARAKAKMWEKVERLRELPGLRISDFGTRRRHSFLWQRWCVEALKEGIGPAFTGTSNVLLAMDSDLEAVGTNAHELPMVVAALAQTNEELAAAPYQVLKDWNRLYGGNLLIVLPDAFGTAAFLRNAPEWVADWTGFRPDSAPPIEGGEKIIEWWRKMGRDPRTKMLIFSDGLDVDAIVDTYRHFEGRVRMSFGWGTNLTNDFAGCAPKTIASLKPISIVCKVSDANGRPAVKLSDNPQKATGDPAEVERYLKFFGEEDHKEQKVLV

SEQ ID NO: 13959 - DNA, 1251 bp, Yersinia pestis KIM
  CDS (1)..(1251): transl_table=11
ttgccgactgtggaaaatgctcctacgaggatgctgtatagcgccatgactcaagacgcctcaccgattttgacttcattgcttgatacggacgcatataagcttcatatgcaacaagccgtatttcatcattatcgtcacattactgttgccgccgaattccgctgccgtagtgatgagctgctgggggtgtatgctgatgaaatccgccaccaggtaaccctgatgggtcaattagcactgacatctgatgagtttatttacctctccagtctccccttcttccaggatgattatctgcattggttgcgcgattttcgttttaaaccagagcaagtctccgtcgctgttcatgacggtaaattagatattcgcattgccggtttatggtgtgaggtgatcatgtgggaagtgcctttgctggcagtgatcagcgaaatcgttcaccgccgccgctctacccaagtgacaacggatcaagcggttcaacaactgcgcacaaaacttgagcaattcaatgccctcagtgcggatatcgatattactcactttaaattgatggatttcggtacccgccgccgattctctcgcgagatacagcacaccgttgtcagcacgttaaaagatgagttcccttatctggtcggcaccagcaactacgacttagcccgcacattagccttagcgcccgtcgggactcaagcccatgagtggtttcaggctcaccaacaaattagcccaacattggcaaacagccagcgtgtagcactgcaagtctggctggatgaataccccaatcaactgggcatcgcactaactgattgcattactatggatgctttcctacgcgattttgatctggctttcgccaaccgctatcaaggcctacgccatgactctggtgacccgatcgagtggggggagaaggctatcgcgcattatgaaaaattgggtattgacccaatgaaaaaggtattggtgttttcagataatctagatctggagaaagcattattcctctaccgtcacttttatcagcgcattaagttggtgtttggtatcggtacccgtttgacctgcgatataccagatgttaagccattgaatattgttattaaactggttgaatgtaacgataaaccggtggctaagctctcagatagcccgggtaagactatttgtcaggaccccgcattcgttgatcaattacgtaaagcctttgcgctaccgttagtcaagaaagccagttaa

SEQ ID NO: 13960 - protein, 416 aa, Yersinia pestis KIM
MPTVENAPTRMLYSAMTQDASPILTSLLDTDAYKLHMQQAVFHHYRHITVAAEFRCRSDELLGVYADEIRHQVTLMGQLALTSDEFIYLSSLPFFQDDYLHWLRDFRFKPEQVSVAVHDGKLDIRIAGLWCEVIMWEVPLLAVISEIVHRRRSTQVTTDQAVQQLRTKLEQFNALSADIDITHFKLMDFGTRRRFSREIQHTVVSTLKDEFPYLVGTSNYDLARTLALAPVGTQAHEWFQAHQQISPTLANSQRVALQVWLDEYPNQLGIALTDCITMDAFLRDFDLAFANRYQGLRHDSGDPIEWGEKAIAHYEKLGIDPMKKVLVFSDNLDLEKALFLYRHFYQRIKLVFGIGTRLTCDIPDVKPLNIVIKLVECNDKPVAKLSDSPGKTICQDPAFVDQLRKAFALPLVKKAS

SEQ ID NO: 13961 - DNA, 1314 bp, Thermosynechococcus elongatus BP-1
  CDS (1)..(1314): transl_table=11
atgagcggtttgaccttggctgccaccgattacagcttgctgacggatctctacgaactgacgatggtgtccacctacgccggcgaagatttggcttggacaccggccagttttgaactcagtgtgcggcgtctgccccgaggctatacgtatctggtggcaatggggttggctcaggtgctggagtatttgcaacagctacggttgacacctcagcaaattgattacctcagaggtctggcggtttttgaacgggcaccggcagcattttgggagctattgagccagggtgagttccgcggcgatgtctgggcggttccggaaggaacagtggtctttgcccaggaacccctgctgcgcattgatgcccccctttggcaaggccagtggatagaaacttgtctgctcaatatcgtcaactaccaaacccttgtggccacccgtgcttcccggctgcgacagttggtgggggaagaggtggatctcctggaatttggcacgcggcgcgccttcagtccccaagcctccctgtgggcagcccgctccgccctagcggcaggatttacagccacttccaatgtcctcgctgcacagcagttgggggtggttcccgtaggcaccatggcccattccctagtcatggcgatcgcgaccctcaagggaaccgaacaggacgcctttacggttttcttgcgctcctatcccgaaggggcactcttggtggatacctatgacagccttgccgccattgccaccctcgccgatcgccaagccgctggggagattttggtcaaggcagtgcgcattgattcaggggatctcttgagcctctcccagaaaatccgtcaactgttgccccaagcaaaaatcattgccagtggcgatctcgatgagggggaaattcgccgcctgcaggcagcgggtgccgcaattgatgcctatggcatcggtacgaagctggttacgggagaaccggtcaacggtgtctataaactggtggagatcaatggtcagggggtgatgaagatcgccagtggcaaaatgaccctacccggacgcaagcaaatttaccgccgccccagtggggattgccttgcccttgccagcgaggaacaggtttggggcaaaccgctccttgaactggttatgaaggaagggtgccccctttatccgccggagtcattgacaaccattcgcgatcgccaccgcgccagccttgcggaattgccagagactctcttggatgtgacccagcccgtggtttattcccctgcccttgacgccttgatccaacagttacgacagcacccatga

SEQ ID NO: 13962 - protein, 437 aa, Thermosynechococcus elongatus BP-1
MSGLTLAATDYSLLTDLYELTMVSTYAGEDLAWTPASFELSVRRLPRGYTYLVAMGLAQVLEYLQQLRLTPQQIDYLRGLAVFERAPAAFWELLSQGEFRGDVWAVPEGTVVFAQEPLLRIDAPLWQGQWIETCLLNIVNYQTLVATRASRLRQLVGEEVDLLEFGTRRAFSPQASLWAARSALAAGFTATSNVLAAQQLGVVPVGTMAHSLVMAIATLKGTEQDAFTVFLRSYPEGALLVDTYDSLAAIATLADRQAAGEILVKAVRIDSGDLLSLSQKIRQLLPQAKIIASGDLDEGEIRRLQAAGAAIDAYGIGTKLVTGEPVNGVYKLVEINGQGVMKIASGKMTLPGRKQIYRRPSGDCLALASEEQVWGKPLLELVMKEGCPLYPPESLTTIRDRHRASLAELPETLLDVTQPVVYSPALDALIQQLRQHP

SEQ ID NO: 13963 - DNA, 1464 bp, Oceanobacillus iheyensis HTE831
  CDS (1)..(1464): transl_table=11
atgaattacattgatgacagcttggcattacatacggatttatatcaaattaatatggcagaaacatattggaatgacgatgttcataataggaaagcagtgtttgatctatatttccgcagccttccatttggaaacggatatggagtgtatgctggtttagaacggataatcgagtatatgaataattttcgatttacagatgcagatctaacttatttaaaagagattggttatcaagatgactttatcgaatatttaaaaagtatacgcttcactggtacgattaagtcaatgaaagaaggggaaatcgtatttgccaatgagccgattcttcgtgtagaggctagtcttgctgaggcgcaattattagaaacagctttattaaatattgttaattaccaaacgcttattgctaccaaagcatcgcgtattcgccagcttgtaggagatcagcttgtaatggaatttggaacgagaagagcgcaggaaatggatgcagcagtttggggtactcgcgctgcatttattggaggctttagtgcaacgagtaatgtccgtgcaggcaaattatttggtattcctgtctcaggaacccatgcgcactcgatgattcaggcgtatcgagatgaatataaagcgtttatgaagtacgccgaacgacacaaagactgtgtgtttcttgttgatacatacgatacattacgttcaggagttccgaacgctattaaagctgcaaaagagctaggggatagtattaatttccaaggaatacgattagacagcggagatttagcttatttatcaaaagaagcaagaagaatgcttgatgaagctggttttccagatgcaaaaatttatgcatcgaatgatttagatgaatatacgattgcaagtcttctcgcacagggagcgaagattgatgtgtggggaattggaacaaagctgattactgcgtatgatcaacctgcactaggtgcagtatataaacttgtgtctattgaagatgaaaatggggatatgaaagataccattaaattatcaggaaatccagaaaaaatgacaacacctgctatgaaaaaggtttaccgaattataaataaggaaaatcaacatagtgaaggagattatctcacgctggaaaatgagtatccaaatgaacaagaagaagtgatgttattccatccggtgcatacttactataaaaagtttgtttctaattttgaagctgtaaatctccatcatgatattttcattgatggacaacttgtttatgaatgtcctgatttggcagagattcaattatttactgaaaatcaacttaatttattctgggacgagtataaaagaacaaactatccggctgagtatccggtcgatttaagtgaagcattatggaataataagatgaatcatattgaacgagtgaaacaagcagtaaaagataaaattaataaacgataa

SEQ ID NO: 13964 - protein, 487 aa, Oceanobacillus iheyensis HTE831
MNYIDDSLALHTDLYQINMAETYWNDDVHNRKAVFDLYFRSLPFGNGYGVYAGLERIIEYMNNFRFTDADLTYLKEIGYQDDFIEYLKSIRFTGTIKSMKEGEIVFANEPILRVEASLAEAQLLETALLNIVNYQTLIATKASRIRQLVGDQLVMEFGTRRAQEMDAAVWGTRAAFIGGFSATSNVRAGKLFGIPVSGTHAHSMIQAYRDEYKAFMKYAERHKDCVFLVDTYDTLRSGVPNAIKAAKELGDSINFQGIRLDSGDLAYLSKEARRMLDEAGFPDAKIYASNDLDEYTIASLLAQGAKIDVWGIGTKLITAYDQPALGAVYKLVSIEDENGDMKDTIKLSGNPEKMTTPAMKKVYRIINKENQHSEGDYLTLENEYPNEQEEVMLFHPVHTYYKKFVSNFEAVNLHHDIFIDGQLVYECPDLAEIQLFTENQLNLFWDEYKRTNYPAEYPVDLSEALWNNKMNHIERVKQAVKDKINKR

SEQ ID NO: 13965 - DNA, 1209 bp, Pseudomonas putida KT2440
  CDS (1)..(1209): transl_table=11
ttgatgagcgaaagcgcattcgccgagcgcatcgtgcacaacctgctcgacaccgacttctacaaactcaccatgatgcagggtgtgctgcacaactacccggacgccgacgtcgaatgggaattccgctgccgcaacggtgaggacctgcgcccctacctcggcgaaattcgcaatcagctcgaacggcttgccgacctcaccctggacgatggccagctggccttcctcgaacgcatcagcttcctcaagcccgactttttacgctttctgcgcctgttccgcttcaatctgcgttacgtgcacgtcggcatcgaaaatgatcagctgttcctgcgcctgaaaggtccgtggctgcatgtgatcctgttcgaagtgccgctgctggccatcatcagcgaagtacgcaaccgcaatctgcacccgcacatgcgcctggccgaggcgcgggaccagttgtaccgcaagttcgactggctgcgtgcgcatgccagcgacgacgagctggccgaactgcaggtggccgacttcggcacccgccggcgcttttccagccgcgtgcaggaggaagtggcaagggtgctgcgcgacgacttccccggccgttttgtcggcaccagcaacgtcgacctggcatggaaactggatatcaagccgctgggcaccatggcccacgagtggatcatggcccaccagcagctcggcccacggctgatcgacagccagatcgctgcgctggactgctgggtacgcgagtaccgcggcctgctcggcatcgccctgaccgactgcatcaccatggatgccttcctcggcgatttcgacctgtacttcgccaagctgttcgacggcctgcgccatgattcgggcgagccggtagcctgggcggagaaggccattgcccattaccagaaactgggtatcgacccgatgaccaagacgctggtgttttccgacggcctcaacctgacccgctcgctggaaattttccgcgccctgcgcggacgcatcaacgtcagctttggcatcggcaccaacctgacctgcgacatcccaggtgtggcccccatgaacatcgtgcttaaaatgaccgactgcaacggcgcgccggtggccaagatctctgacgaagccgccaagacccagtgccgcgacgagaacttcgtcgcctacatgcgtcacgtattcaaagtccccagcaaggagtaa

SEQ ID NO: 13966 - protein, 402 aa, Pseudomonas putida KT2440
MMSESAFAERIVHNLLDTDFYKLTMMQGVLHNYPDADVEWEFRCRNGEDLRPYLGEIRNQLERLADLTLDDGQLAFLERISFLKPDFLRFLRLFRFNLRYVHVGIENDQLFLRLKGPWLHVILFEVPLLAIISEVRNRNLHPHMRLAEARDQLYRKFDWLRAHASDDELAELQVADFGTRRRFSSRVQEEVARVLRDDFPGRFVGTSNVDLAWKLDIKPLGTMAHEWIMAHQQLGPRLIDSQIAALDCWVREYRGLLGIALTDCITMDAFLGDFDLYFAKLFDGLRHDSGEPVAWAEKAIAHYQKLGIDPMTKTLVFSDGLNLTRSLEIFRALRGRINVSFGIGTNLTCDIPGVAPMNIVLKMTDCNGAPVAKISDEAAKTQCRDENFVAYMRHVFKVPSKE

SEQ ID NO: 13967 - DNA, 1305 bp, Bradyrhizobium japonicum USDA 110
  CDS (1)..(1305)
atgacagtgaccgatattgcgagccggacctacaatcacagctggcggctggatcccatcatccgcagcctgctcgataccgacttttataagctattgatgttacagatgattcgggaagattactcgaatcagcaggtgaccttctcggtcatcaaccgctcgcgccatgtgcggctcgccgagatcatcgacgagggcgagctgcgcgcccagctcgaccacgcccgcaccatccgcttcaccaagaaggagctgatctggctcgccggtaacaccttctacggcaagacccacatgttctcggcggatttcatccgctggctggccgaattccgcctgcccgaatacgagctgcgcaaggtcgaggggcagtacgaattgcacttccacgggccgtggacccacaccacgatgtgggagattccggcgctcgcgattctcaacgagctgcgctcgcgcgcggcgatcaagggccgcggccgcttcgagctcgacgtgctctacgcccgcgccaaggccaagctgtggaccaaggtcgagcggctgcgcaagctcgagaacctgaggctctccgacttcggcacccgccggcgtcacggctttctctggcagcgctggtgcgtcgaggcggtgaaggaaggcctcggcccctccttcatcggcacctccaacgtgctgctcgcgatggacaacgacctcgaggccatcggcaccaacgcgcacgagctgccgatggtcgcggccgggctcgccaaggacgacgaggagttgcgctgggcgccctatcgcattctcgaccagtggcgtcagacctacggcggcaacctcctgatcgcactgcccgacgccttcggtacgaaagcgttcctacgcgatgcgccggaatgggtcgccgactggaccggcttccgccccgacagcgcgccgccaatccaggccggcgaggagatcatcgcctggtgggagaagaagggccgcaacccgagggacaagctgctcgtcttttccgacgcgatggacgtcggctcgatcgaggagacctatcaccacttcaccggccgcgtgcggctctctttcggctggggcaccaacctcaccaacgacttcgtcggctgcgccccggacggctcgttcaatctcgatccgatctcgctggtctgcaaggtgtcgtcggtcgacggccatccggcggtcaagctctccgacaatccggagaaggcaaccggcctcccctcggagatcgagcgttacctgcgcgtgttcggcgacgtcggccgcgtgcgcaagccggtgctggtctag

SEQ ID NO: 13968 - protein, 434 aa, Bradyrhizobium japonicum USDA 110
MTVTDIASRTYNHSWRLDPIIRSLLDTDFYKLLMLQMIREDYSNQQVTFSVINRSRHVRLAEIIDEGELRAQLDHARTIRFTKKELIWLAGNTFYGKTHMFSADFIRWLAEFRLPEYELRKVEGQYELHFHGPWTHTTMWEIPALAILNELRSRAAIKGRGRFELDVLYARAKAKLWTKVERLRKLENLRLSDFGTRRRHGFLWQRWCVEAVKEGLGPSFIGTSNVLLAMDNDLEAIGTNAHELPMVAAGLAKDDEELRWAPYRILDQWRQTYGGNLLIALPDAFGTKAFLRDAPEWVADWTGFRPDSAPPIQAGEEIIAWWEKKGRNPRDKLLVFSDAMDVGSIEETYHHFTGRVRLSFGWGTNLTNDFVGCAPDGSFNLDPISLVCKVSSVDGHPAVKLSDNPEKATGLPSEIERYLRVFGDVGRVRKPVLV

SEQ ID NO: 13969 - DNA, 1434 bp, Lactobacillus plantarum WCFS1
  CDS (1)..(1434): transl_table=11
atgcgcaatttatctttattaaccgacttatacgaactctcaatggcaaatggatttcatcacgacttacctcagaccaacgccaccttcgaccttttttatcgccgggttcctgacaatggtagctttgtcattgcggccggcctccagcaagttgtcgaagctttacaagattttcattttaccaacagtgacctcgactacttccgtcaacttaacctatgggatgaatccttcttagccatgctggcaaattttaagttaacttgtcaaattaaggcactaccagaaggaaccccggtctttcctcgtgaaccactattgacaatcactgggccacttgagcaagcgcaattacttgaaacactcgccttaaatatcgtcaatcaccaatcactgattgccactaaagctcgtcgactgagttatgctgcggcaggacgtccaattatggaattcggtgcgcgccgtgcgcaaggcccggacagcgcgctttacggcacccgggcagccattattggtggcgccaatagtacttcaaacgttctcgctgcgaagctgtttgatattcccgttgctggtaccatggcccacagttggattgaggccttcccggatgaactaacggcgtttcgcaagtgggccgaacaatatcctgacaatagtgcgctactagtcgatacttatgatgtgcttaactctgggattcctaacgcggtgacggtctttaaggagctacgagcagctgggcatgaacccgtcggtattcgaatcgattcgggggacgtcacgactttatcacaagctgcccggacacaattggacgcggctggctttcccaatgccaaaatcactatttctaacgcattggatgaacacatcattacttcgctgttgcacgaaggcgcaccgatcgataattttggtatcggtgaaaagctcatcactagcgcgtccgcaccggttctaagtggcgtctacaagcttgcggcaactgagagcaatggtcagagcacccccaagatcaaggtcagtgccagtcgcgaaaaactaacgattcctggtgataagcaagtctatcgtctgtacgaaccaggaactcagcgggcctttgctgacttgattgcactagctaccgagacgatcgtcgatgcgaccagcctaaccgtcgtcaacagtgacccactcagtgtcgaccgccaacagcgactcacccgttttgaagcccggcccttactcgcgccggtagatttgtccaacaccacgtcaattccggttacaaccattcaggcaacgacccaggctaaacttgccgagctcccacgaacaacccagcggctcgtcaacccagatctttacccggtctacatgacaaccacactcagccagttacaaactagtttgttgaataaaatgacgatactagcagattaa

SEQ ID NO: 13970 - protein, 477 aa, Lactobacillus plantarum WCFS1
MRNLSLLTDLYELSMANGFHHDLPQTNATFDLFYRRVPDNGSFVIAAGLQQVVEALQDFHFTNSDLDYFRQLNLWDESFLAMLANFKLTCQIKALPEGTPVFPREPLLTITGPLEQAQLLETLALNIVNHQSLIATKARRLSYAAAGRPIMEFGARRAQGPDSALYGTRAAIIGGANSTSNVLAAKLFDIPVAGTMAHSWIEAFPDELTAFRKWAEQYPDNSALLVDTYDVLNSGIPNAVTVFKELRAAGHEPVGIRIDSGDVTTLSQAARTQLDAAGFPNAKITISNALDEHIITSLLHEGAPIDNFGIGEKLITSASAPVLSGVYKLAATESNGQSTPKIKVSASREKLTIPGDKQVYRLYEPGTQRAFADLIALATETIVDATSLTVVNSDPLSVDRQQRLTRFEARPLLAPVDLSNTTSIPVTTIQATTQAKLAELPRTTQRLVNPDLYPVYMTTTLSQLQTSLLNKMTILAD

SEQ ID NO: 13971 - DNA, 1203 bp, Salmonella enterica subsp. enterica serovar Typhi Ty2
  CDS (1)..(1203): transl_table=11
atgacacaattcgcttctcctgttctgcactcgttgctggatacagatgcttataagttgcatatgcagcaagccgtttttcaccactactatgatgtgcaggtagcggctgagtttcgttgccgtggcgacgacctgctgggtatttatgccgatgctattcgcgagcaggtggacgcgatgcagcacctgcgcctccaggaggacgagttccagtggctctccggcctgcccttttttaaaccggattatctgaactggttacgcgagtttcgctataacccagctcaagtctgtgtcaccaacgataacggcaagctgaatattcgcttaaccggctcgtggcgtgaagtcattatgtgggaagtgccgctgctggccgtgatcagtgagctggttcatcactaccgctcgccaaacgcgggcgttgatcaggcgctcgacgcgctggaaagtaagctggttgatttcactgcgttaaccgccaatctcgatatgtcccgcttccacctgatggacttcggcacccgccgccgtttctctcgtgaagtgcagcaggcgatagttaaacgtctccagcaggagtcatggttcgtcggcaccagcaactatgatctcgcgcgtcgcctggcgctgacgccgatgggcactcaggcgcacgaatggttccaggcgcatcaacaaatcaatccggacctggcgaccagtcagcgtgccgcgttggccgcctggcttaacgaatatccggaccagcttggtatcgcattgacagattgcattacaatggatgcgtttttacgcgatttcggcattgaattcgccagccgttatcaggggttacgccacgactcaggagaccctgtcgcatggggcgaaaaggcgattgcccattatgaaaagctggggattgatccgctgacaaaaacgctggtcttttcagataaccttgatctgccaaaggcggtcgagctctatcgccatttcgcctctcgcgtgcagttaagcttcggcatcggtacccgactgacctgcgatatccctcaggtaaaaccgctcaatatcgtgattaagctcgtggaatgtaacggaaagccggtggctaaactttccgacagccccggtaaaacgatctgtcatgataaagcgtttgtgcgcgcgctgcgtaaagcgttcgatctcccgcaggtgcgtaaagcaagttaa

SEQ ID NO: 13972 - protein, 400 aa, Salmonella enterica subsp. enterica serovar Typhi Ty2
MTQFASPVLHSLLDTDAYKLHMQQAVFHHYYDVQVAAEFRCRGDDLLGIYADAIREQVDAMQHLRLQEDEFQWLSGLPFFKPDYLNWLREFRYNPAQVCVTNDNGKLNIRLTGSWREVIMWEVPLLAVISELVHHYRSPNAGVDQALDALESKLVDFTALTANLDMSRFHLMDFGTRRRFSREVQQAIVKRLQQESWFVGTSNYDLARRLALTPMGTQAHEWFQAHQQINPDLATSQRAALAAWLNEYPDQLGIALTDCITMDAFLRDFGIEFASRYQGLRHDSGDPVAWGEKAIAHYEKLGIDPLTKTLVFSDNLDLPKAVELYRHFASRVQLSFGIGTRLTCDIPQVKPLNIVIKLVECNGKPVAKLSDSPGKTICHDKAFVRALRKAFDLPQVRKAS

SEQ ID NO: 13973 - DNA, 1170 bp, Bacteroides thetaiotaomicron VPI-5482
  CDS (1)..(1170): transl_table=11
atgattgtaagaacactactggatacagacctctataagtttaccacctcgtacgcttatatcaaattattcccttacgcaatgggcactttcagtttcaacgacagaaacgaaactgaatataccgaagagtttctggaagcgctcaaaagcgaattcaacaaactcagccggttgagacttacggaagaggaactggaatacatgacacgcaattgccggtttcttcctagagtctattgggaatggctgtcttctttccgttttgatccggacaagatcgatattcatctggacacaacgggccggctgcatattgaagtcagcgattttctttataaagtcacactgtatgaagtaccgctgctcgccatcgtatccgaaatcaaaaacaagtttttcggcaatgtacccgatatgagcgagatactctgcaaattgtcggagaaagtggaattgtccaatcagcaccagctccgcttctcggagttcggcacgcggagaagattctcaatcgacgtgcaggagacggtgatcaaacggctgaatgatacggccaaatactgtaccggaacttccaactgctattttgccatgaagtacggcatgaaaatgatgggaactcatccgcatgagtggttcatgtttcatggggcacagttcggatataagcacgccaactatatggcgctcgaaaactgggtgaatgtatatgacggagatttgggcattgcgctgtccgacacttatacttcaggaatattcctgagcaatctcagccgcaagcaggccaagctattcgacggagtgcgctgcgattccggcaatgagtttgattttatcgataagctggtagcccgctataaagaactgggcattgatgccactaccaaaacaatcgtcttcagcaacgctctcgacttcacgaaggcactggaaattcaggaatactgcaaggacaagattcgctgttccttcggaatcggtaccaatcttacgaatgatacaggatttgccccttccaacattgtcatgaaactcacgcaatgcaaaatgaatgtcaatcaggaatggagagaatgcatcaaactatcggatgacgagggaaaacatacaggcagtccggaggaagtacaggcttgtctatacgaactgaggctggcgaaataa

SEQ ID NO: 13974 - protein, 389 aa, Bacteroides thetaiotaomicron VPI-5482
MIVRTLLDTDLYKFTTSYAYIKLFPYAMGTFSFNDRNETEYTEEFLEALKSEFNKLSRLRLTEEELEYMTRNCRFLPRVYWEWLSSFRFDPDKIDIHLDTTGRLHIEVSDFLYKVTLYEVPLLAIVSEIKNKFFGNVPDMSEILCKLSEKVELSNQHQLRFSEFGTRRRFSIDVQETVIKRLNDTAKYCTGTSNCYFAMKYGMKMMGTHPHEWFMFHGAQFGYKHANYMALENWVNVYDGDLGIALSDTYTSGIFLSNLSRKQAKLFDGVRCDSGNEFDFIDKLVARYKELGIDATTKTIVFSNALDFTKALEIQEYCKDKIRCSFGIGTNLTNDTGFAPSNIVMKLTQCKMNVNQEWRECIKLSDDEGKHTGSPEEVQACLYELRLAK

SEQ ID NO: 13975 - DNA, 1407 bp, Coxiella burnetii RSA 493
  CDS (1)..(1407): transl_table=11
atgtttcacttaacaggcacttacactgatcaataccaactggcgatgggacaagtttatttcctgaaggggaaaaaaaatcacccagctgtcttcgattatttctttcgaaaattgccgtttggagggggctacgctattttcgcgggcttggaggatctacttgctatccttgaaaatcttcgttttaatgaaaaagatattgaatttcttcaccgtcaaggcttccatccggaatttctcaattatcttagggattttcgcttcaccggcaccctttatgcctcccgcgaaggcgatgtggtgtttccaacgcgacccatcttgagtgtagaagctcctttgattgaagctcagattgtggaaacgttgctattaaatatcttgaatttccaaacgctaatcgccaccaaagccagccgaatgcgccaggttgccgaagagcgcgccttagttgattttggatttcgtagagccgcggggcttgcaagctactatgccagccgcgctgctgttattggcggtttcgatgcgacaagccatgtagccgcaggaagagactacgacattcccgtcgtagggacaatggcgcactcgtttgtccaaagttatgatgatgaattatccgctttccgcgattttgccgaggggcggcccgatgattgcgttttgctggtggacacctacgatacgctgaaaagtggtatgccaaacgcgatcaagatcgccaaagcgatggaagcgcgcggccaaagactcaagggggtacggctggacagcggcgatttagcttatctggctaagaaaagccgccaaatgttagatgacgcaggattatcttacgtaaaaattgctgcttctaaccagttagacgaatacgttattaaaagtttgttagaacaaaaagcgcccatcgacatatttggcgtaggaaccaaactcgctatcggagcgcctgacgctgcgctagatggggtctataaattagcgatgagcaatctcaagcctcgcataaagctttcagaaagcattgcgaaaataacacttccttacaaaaaacaagtttatcgtgtcatcgatcagaagggcgattttttcggcgctgatgtggtggctttacgcgaagaagaagaaataaatattatgcaccactcttttgaactttctaaatctttcgtcattaaaaagaataagaaagaaccattgctgaataaagtaatggaaaaaggcaaacgcctttttgaggcgaaaaagccgttggaaataatgaaatttagccagcagcgtttgggtttcttgcctttagaatacaaacgttttaataatcctcatatttataaaatcggtttaagcgatggactgaataacaaacgaaaccaattaatagaagcttataaaaaaacatga

SEQ ID NO: 13976 - protein, 468 aa, Coxiella burnetii RSA 493
MFHLTGTYTDQYQLAMGQVYFLKGKKNHPAVFDYFFRKLPFGGGYAIFAGLEDLLAILENLRFNEKDIEFLHRQGFHPEFLNYLRDFRFTGTLYASREGDVVFPTRPILSVEAPLIEAQIVETLLLNILNFQTLIATKASRMRQVAEERALVDFGFRRAAGLASYYASRAAVIGGFDATSHVAAGRDYDIPVVGTMAHSFVQSYDDELSAFRDFAEGRPDDCVLLVDTYDTLKSGMPNAIKIAKAMEARGQRLKGVRLDSGDLAYLAKKSRQMLDDAGLSYVKIAASNQLDEYVIKSLLEQKAPIDIFGVGTKLAIGAPDAALDGVYKLAMSNLKPRIKLSESIAKITLPYKKQVYRVIDQKGDFFGADVVALREEEEINIMHHSFELSKSFVIKKNKKEPLLNKVMEKGKRLFEAKKPLEIMKFSQQRLGFLPLEYKRFNNPHIYKIGLSDGLNNKRNQLIEAYKKT

SEQ ID NO: 13977 - DNA, 1185 bp, Porphyromonas gingivalis W83
  CDS (1)..(1185): transl_table=11
atgggtattatccggagcatattagacaccgatctatataaattcaccaccggctatgcctatgccaagctattccccagagcttatggcgaatttcgcttcatagaccgtaatcggcagggctttacggaagaatttgcggagctggtgcgaggtgaaatacgagcgatggctgctctgtctttgactcgtgatgaaaaagagtttctccaacgagagcttccttatcttccaccgatatatatcgattttctcgatggcttccgtttcgatccggaagaagttacagtatcgatagacgcacaaggccacttggatatacgagcgcaaggccttctctaccgagtgacactttgggagacgcctatccttgccgtcatcagcgagctgtactatcgttttattggagccgagccggattggaaacaagtagaagaggtaactcgatctaaaggggagctgatgcgagagcatcgagctacgttctcgatattcggtatgcggcggcgtttctcccttgaagtggaagaccgtgtgacggatattctcaagcagtatgcaggtgagagtctctttggtacgagcaacgtacaccttgcccataagcatgggctacgtgtttccggcacacatccacacgaatggatacaattccatggagctatttacggctataagatggccaattatgtagccatggaggattggatcaatgtctatgacggtgatcttggcactgtgctgaccgatacgtacacgactgatgtcttcatgcgcaatttcagtaagaagcatgccatgctctttaccagtctgagacatgacagtggtgatcccgagatattcatagaaaaagcagtgcgacgatacgaagagctgcgagtggatcccaaaatcaagtacattatattctctgacagcctcactcctcagcgagctatagagattcaaaagttgtgcgccggcaggattaaggccagctttggaatcggtaccaatctgaccaatgatgtgggggggggcgtagagccgttgaatatcgtaatgaagctctggaagtgcaagatgacggcgaaagacgactggcactactgtgtaaagctgagcgacgtcgatggtaagcatacgggagagccggaagaaatccttttggcgatgaatacactgggtatcaaaccgaaataa

SEQ ID NO: 13978 - protein, 394 aa, Porphyromonas gingivalis W83
MGIIRSILDTDLYKFTTGYAYAKLFPRAYGEFRFIDRNRQGFTEEFAELVRGEIRAMAALSLTRDEKEFLQRELPYLPPIYIDFLDGFRFDPEEVTVSIDAQGHLDIRAQGLLYRVTLWETPILAVISELYYRFIGAEPDWKQVEEVTRSKGELMREHRATFSIFGMRRRFSLEVEDRVTDILKQYAGESLFGTSNVHLAHKHGLRVSGTHPHEWIQFHGAIYGYKMANYVAMEDWINVYDGDLGTVLTDTYTTDVFMRNFSKKHAMLFTSLRHDSGDPEIFIEKAVRRYEELRVDPKIKYIIFSDSLTPQRAIEIQKLCAGRIKASFGIGTNLTNDVGGGVEPLNIVMKLWKCKMTAKDDWHYCVKLSDVDGKHTGEPEEILLAMNTLGIKPK

SEQ ID NO: 13979 - DNA, 1608 bp, Oryza sativa (japonica cultivar-group)
  CDS (1)..(1608)
atggcggcggtggcgggtagcgcgagcgcaggcgccaacggttcggcggcggcgcatcgggtgggggcgccgacgaaccccatggcgacggcgctgctcaccgatcagtaccagttctccatggcctacgcctactggaaggccggcaagcacgccgaccgagccgtgtttgatctgtacttcaggaaaaatccatttggtggagaattcactgtttttgctggtcttgaagaatgcattaagttcattgcaaattttaagttcacagaagatgacattttgttcctgcaatcagtcatgccaatgtgtgaggatgcgttctttgattatctcaggaaaaccgactgctctgatgtggaagtgtactccattcctgagggttcagtggtttttccaaaagttcctttgatgcgagttgagggtccagttgctgtggtccaactacttgagacaccgtttgtaaatcttatcaattatgcctctttggtaacaacaaatgctgcgagacaccgccatgttgctggaaaatcaaaagttttactggaatttggtttgagacgagcacaggggcctgacggtgcaataagtgcttcaaagtattgtttcatgggaggttttgatgcaaccagtaatgttttggctggaaatctgtttggcataccacttcgcggaacacattctcatgcttatgttagctcatatatgttagcagaatcgttatgtggggtatttggtgagacaaatcaaagtgagctggcagcatttgcatcctatgcattgggttttccgacccattttttagctcttgtggacacatatgatgttatgcgaagtggaattccaaacttttgtgcagtagcgctagcactccatgacttagggtacaaggcatctggtattagattagattctggtgatctggcctatttgtctattgaggcccgtaaagtgttccgtacactagaaaaggagtttaatgtgcccgcttttgggaagatgataattactgctagcaatgacctgaatgaggaaacaattgatgccctgaacaagcagggccatgaagttgattcctttggtattggaacttatctagtaacatgttattcccaggctgctcttggctgtgtctttaagctagttgagataaacagtagacctcgtatcaaactttctgaggatgtggctaaatgtcatgatgggttccaggtatccattccatgcaaaaagcgatgtttcagattgtatggaaaagaaggctaccccttagtagatatcatgatgcgtgaaagtgaaccatcaccgaaggctggagaacgaatcctttgtcgtcatccattccttgaatccaagagagcatatgttgtcccccagcatgttgaggagctcctacaatgctactggcctggtacatcaaataaacctagggtagagttaccctctctagaggagatcagagggcgctgcatgcaacagcttgaaaaacttcgaccagatcacatcaggcggttaaatccaacaccttacaaggtgagtgtgagtgcaaagctgtatgagtttatccattccctatggttgaatgaggccccagtaggagagttacaatag

SEQ ID NO: 13980 - protein, 535 aa, Oryza sativa (japonica cultivar-group)
MAAVAGSASAGANGSAAAHRVGAPTNPMATALLTDQYQFSMAYAYWKAGKHADRAVFDLYFRKNPFGGEFTVFAGLEECIKFIANFKFTEDDILFLQSVMPMCEDAFFDYLRKTDCSDVEVYSIPEGSVVFPKVPLMRVEGPVAVVQLLETPFVNLINYASLVTTNAARHRHVAGKSKVLLEFGLRRAQGPDGAISASKYCFMGGFDATSNVLAGNLFGIPLRGTHSHAYVSSYMLAESLCGVFGETNQSELAAFASYALGFPTHFLALVDTYDVMRSGIPNFCAVALALHDLGYKASGIRLDSGDLAYLSIEARKVFRTLEKEFNVPAFGKMIITASNDLNEETIDALNKQGHEVDSFGIGTYLVTCYSQAALGCVFKLVEINSRPRIKLSEDVAKCHDGFQVSIPCKKRCFRLYGKEGYPLVDIMMRESEPSPKAGERILCRHPFLESKRAYVVPQHVEELLQCYWPGTSNKPRVELPSLEEIRGRCMQQLEKLRPDHIRRLNPTPYKVSVSAKLYEFIHSLWLNEAPVGELQ

SEQ ID NO: 13981 - DNA, 1446 bp, Geobacter sulfurreducens PCA
  CDS (1)..(1446): transl_table=11
atgcgctactccccccttctcaccgacctctatcagctgaccatgctcgccggctacctggacgaaggcatggcggagactccggcagtctttgatctcttttttcgccacaaccctttccagggtggctatgcagtcttcgccggactcgacacggccctcgactttctcgaacacctcgagttcagcgaagacgagatcgagtatctccaggggctcggtctcttccggccggcgttcatcgattttctccgttcgttccgtttcaggggaagggtaacggcccctcccgaaggaacggtggtcttcgccaatgagccgctggtcacggtggatgcgcccctggcccaggcccaactggtggaaaccgcgctcctcaatatcatcaacttccagacgctcgtggccacgaaggccgcccggatcgttcacgcggcagcggacggaaccgttctcgagttcggccttcgacgcgcccagggccccgacggcggcctgagcgaagccagggctgcctacgtgggaggggtacgcagcaccagcaacgtcctggcgggcaagaccttcggcatcccggtgcgcggcactcacgcccacagctggatcatggccttttccgacgaattgacggcgttcaggaaatacgctgaggtcttccccgactcctgcattctcctggtggatacctatgacactctcaggagcggcctgcccaacgcaatcaccgttgcgcgggagttgcgggccaagggacacgaattggtcggggtacggatcgactcgggcgatctggcctacctctcgcgccaggcacggcggctgttcgacgaagcggggttccccaatgtccggatcgtcgcctccaatgagctggacgaattcgtcatcgagtcgatccgggccgaagggggatgtgtcgacatctacggcgtgggaacccggctcgccacctgtgccggggagggaggaggcgccctgggaggtgtctacaaactggtccggatcggcgatcgaccgcggctcaaggtgacgagtgacctggcaaaggcgaccctgcctgaccggaagcggctcctgcgggccgtggcggccgacggcaccttcatccaggacgtgatctgcctggatggcgaagaggtgcttcccggccatacggtctttgatccggccaatcctctgcagcatgtgaccatcccgatgaaggcccgccttgaagacgtccgttccgttgccatggagaacggcaggcggaccgcctcacgatccgtttcactcgaccggatggccgatcggtcacggaatcaactcgccctcctcccgcagggatgccttcggttcatcaacccgcaccgctacaaggtttccatcagccaagggctcaatgacctgcgacttcgcctcatggaggaggtgcggcacgggtatcacgacattgccaatccgtaa

SEQ ID NO: 13982 - protein, 481 aa, Geobacter sulfurreducens PCA
MRYSPLLTDLYQLTMLAGYLDEGMAETPAVFDLFFRHNPFQGGYAVFAGLDTALDFLEHLEFSEDEIEYLQGLGLFRPAFIDFLRSFRFRGRVTAPPEGTVVFANEPLVTVDAPLAQAQLVETALLNIINFQTLVATKAARIVHAAADGTVLEFGLRRAQGPDGGLSEARAAYVGGVRSTSNVLAGKTFGIPVRGTHAHSWIMAFSDELTAFRKYAEVFPDSCILLVDTYDTLRSGLPNAITVARELRAKGHELVGVRIDSGDLAYLSRQARRLFDEAGFPNVRIVASNELDEFVIESIRAEGGCVDIYGVGTRLATCAGEGGGALGGVYKLVRIGDRPRLKVTSDLAKATLPDRKRLLRAVAADGTFIQDVICLDGEEVLPGHTVFDPANPLQHVTIPMKARLEDVRSVAMENGRRTASRSVSLDRMADRSRNQLALLPQGCLRFINPHRYKVSISQGLNDLRLRLMEEVRHGYHDIANP

SEQ ID NO: 13983 - DNA, 1437 bp, Treponema denticola ATCC 35405
  CDS (1)..(1437): transl_table=11
atgattgataatgctttattttcagacttttatgaattgacaatggctcaaggtttttggaaaaaaggaaacaatacaaaaaccgtttttgaaatgttttttagatcaaatccttttaaggggggctattccgtctttgcaggccttgaacccctcttaaaaaccattcaaaattttcactttgaaaaaagcgatatcgactggcttaagtctttaggaatatttgaaaaagattttttggaatatattgccggttttaaattctcgggcaatatttgggcaatgaaagaaggcagtctcgttttcccgaatgaacccttaatccgtatcgaagctgatacggttgaagccttgctcttggaaggcctaattttaaacatgataaatttccaaacccttatagcaaccaaaacagcccgaatttggctggcctcaaaaaagggatctataatggaattcggtctccgcagagctcaaggcaatgacggtgctatgagtgcaacaagagctgcctacataggcggagctttcggcacaagcaattcccttgctgccaaggaactcggcatacccgccctcggaacaatggctcactcatggataatgtcttttaaaagcgaagaagatgcctttcaggcctatgctgacatgtatcccgacaattcaatattcttaatagatacttatgatacgctccgttcgggtattgtaaatgctatcaaggtaggaaagcggctgcaagaaaaggggaaaaacttcggagtacgcctcgattcgggagatatttattatttgagtaaggatgtgcggaagcggcttgatgaagcaggttgtactaaagcaaagatttccgtttcaaacgaactgacggaagaaattgtagaatccctagttcaaaacaatgcacctatagattcttggggagtaggtactcacatggttacgggcggaaatgaagcatctcttacaggcgtatacaaaatggccgcccgcaagagtttaggagaagcggaatggactccggttatgaaattttctgataatccagcaaagatgactaaccctgcatgtaagcaggtttggcgcctatacaatcccgacggaacatttaaggccgatgtgttgacccttgaagacgaaaaaattgaagagggtgtggagcagactttttatcaccctgcaaacgattatcagaattttacctttacaccgacaaagattgaagctcttttagaaaaacgtattgaaaacggcaaggctgtcggcaaggctccaagtcttaaagaaatcaaagcctatgctgaaaaacagctcgacagtttggactacacttcaaagcgccttttaaaccctcacatatacaaggtttctttaagcgaaaagatgagggatttaaaacagcagctgataaaaaataaaccggtttttaaaaactga

SEQ ID NO: 13984 - protein, 478 aa, Treponema denticola ATCC 35405
MIDNALFSDFYELTMAQGFWKKGNNTKTVFEMFFRSNPFKGGYSVFAGLEPLLKTIQNFHFEKSDIDWLKSLGIFEKDFLEYIAGFKFSGNIWAMKEGSLVFPNEPLIRIEADTVEALLLEGLILNMINFQTLIATKTARIWLASKKGSIMEFGLRRAQGNDGAMSATRAAYIGGAFGTSNSLAAKELGIPALGTMAHSWIMSFKSEEDAFQAYADMYPDNSIFLIDTYDTLRSGIVNAIKVGKRLQEKGKNFGVRLDSGDIYYLSKDVRKRLDEAGCTKAKISVSNELTEEIVESLVQNNAPIDSWGVGTHMVTGGNEASLTGVYKMAARKSLGEAEWTPVMKFSDNPAKMTNPACKQVWRLYNPDGTFKADVLTLEDEKIEEGVEQTFYHPANDYQNFTFTPTKIEALLEKRIENGKAVGKAPSLKEIKAYAEKQLDSLDYTSKRLLNPHIYKVSLSEKMRDLKQQLIKNKPVFKN

SEQ ID NO: 13985 - DNA, 1293 bp, Eremothecium gossypii
  CDS (1)..(1293)
atgacgagcgaggaagctgcgattaagtcgctgttggacacagacatgtacaaactgacaatgcatgcggcggtttacgtgaatttcccagacaccgaggtcgtctacaagtacaccaatagatccgccggcctgagcttcaacaaggctgctattgtgtggctcgaggaccaggtgagcaagctggcaacactgcgcttcacggcggaggaggtggcataccttaaagagaccttgcctttcctgcctgcgcagtacatcgattacatctcgtcgccagagtgccgcatggaccctgccactcaggtgcagctcctgcacgagcagcgagagggcgaggagcgctatgacctgaacatcaccgtcaccggtctctggaaagacacgatcctctacgagatacacatgctggcgctcatctcggaggcgtacttcaagtttgtcgacacagactgggtgctcgacggccaggtcgagcaggcgtatcgcaaaacgcggctgctgttggacaacggcctggtcttctcggagttcggcacgcgccggcgccgctcgctgctcgtccaggacctcgtgctccagggcatcgccgaggccgtggcagatagcggtaccggcgacacgcagttcatcggcacctccaacgtctacttcgccaaaaagtacggcgtcaagcccgtcggcaccgtcgcgcacgagtggtacatgggcattgccgccctgacagacgactaccgcaacgccaacaaaaacgccatggacttctggctcaacaccttcggctccgaacaggcgggcctggtcctcaccgacaccttcggcaccgataccttcctgcccatgttccgcccgccctactccgacgtctacgacggcgtgcgccaggactctggcgacccggccgttttcaccgagaaggtcgcccaccactacctcaacgtcctgcactatccccgcttttcgaaggtcatctgctactcggactccctaaacccggagaaggccctgcagtacgccgaggtcgcacgcgcacacggcatgagagcctcctttggaatcggcacaaactttacaaacgacttccgcagacattctgcgcccgacgccaagagcgagccactaaatatcgtcttcaagctgcttactgtcaacggacgccccgccatcaagatctctgatgatcttgggaagaccatgggcgacccggaaaaggtcgaagaggtaaaaagagagctaggctatatagaaagaacgtgggagggcagcgatgaggcgcataggtggaaagactag

SEQ ID NO: 13986 - protein, 430 aa, Eremothecium gossypii
MTSEEAAIKSLLDTDMYKLTMHAAVYVNFPDTEVVYKYTNRSAGLSFNKAAIVWLEDQVSKLATLRFTAEEVAYLKETLPFLPAQYIDYISSPECRMDPATQVQLLHEQREGEERYDLNITVTGLWKDTILYEIHMLALISEAYFKFVDTDWVLDGQVEQAYRKTRLLLDNGLVFSEFGTRRRRSLLVQDLVLQGIAEAVADSGTGDTQFIGTSNVYFAKKYGVKPVGTVAHEWYMGIAALTDDYRNANKNAMDFWLNTFGSEQAGLVLTDTFGTDTFLPMFRPPYSDVYDGVRQDSGDPAVFTEKVAHHYLNVLHYPRFSKVICYSDSLNPEKALQYAEVARAHGMRASFGIGTNFTNDFRRHSAPDAKSEPLNIVFKLLTVNGRPAIKISDDLGKTMGDPEKVEEVKRELGYIERTWEGSDEAHRWKD

SEQ ID NO: 13987 - DNA, 1434 bp, Neurospora crassa
  CDS (1)..(1434)
atggacttcaacagctctttgcctcacccagcgggtgttatctcgttcctcgacaccgatctgtacaagttgacgatgcaatgcgccgttctcaaatacttcaaagacgtacccgtcacctactcgttcacaaaccgcactcccgagaagaagttgtcgcgcgaagccttcgtctggctcgaagaacaggttatgaagctcgggaatatcagcctatcccccgaggagctccagttcctcaagactcactgcccttacctaaccgaagagtatcttgattacctttccgagttccgccttcggccgcgagagcaggtcgccgtttccttccgccctgatggtgactcagatctcggtgatatccactatgatattaagggcaattgggccgagactattctctacgaaattccgcttctcgcactcacttcggaagcctacttcaagttcatggacacggactgggattatgatggccaggaagagaaggcctatgagaagggcatgcgcctgctcgaggctggttgcgtgttctcggaattcggaacccgccggcgccgcgactaccacacgcaagctttggtgtttaggggtctcaccaaggcggccaaggaagccgagaagagaggcctaaccggcaagctctccggcactagcaatgttcaccttgccatgcgcttcaacatcccacccgttggcaccgttgcgcacgagtggtttatgggtaacgccgccatccttggagattacaagtccgctacagaggaagccctttcccgctgggttggatgctacggccctggcgtcctcggcattgcgctcacagatacctttggaacccctgaattccttagggcgtttagcaagccaatgtcggcatctggagagcccgtaccacagccaagggatcgcaagatcagcacggccgatgccttcatctcggcagcgaaagatttcatcaaggacctccatcccgacaagacctatgcccaagttttcacgggtgtccgccaggattcgggagaccccaaggagtttgtcaagctcatgcgcaagttctatgatgaacagggcatcaaggacaaaaaggttattgtcttttccgactcgctggatattgacaggtgcttggagtacaaggaggttgctgaagcggccggcttccagccaacttttggtgtcggtacctactttaccaatgactttgtccacaaggctactggcaagaaatccacgcctctgaatattgtcatcaagctgagctcggctgccggaaatccagcagtcaagatcagtgacaacgtgggaaagaacacaggcgataaggcgacggtcgagaaggtcaagcgagagctcggatacgtcgaaaaggattggagcgagggtgatgagtcggcaagatggggtcacgatggtgatgctgccacggcatga

SEQ ID NO: 13988 - protein, 477 aa, Neurospora crassa
MDFNSSLPHPAGVISFLDTDLYKLTMQCAVLKYFKDVPVTYSFTNRTPEKKLSREAFVWLEEQVMKLGNISLSPEELQFLKTHCPYLTEEYLDYLSEFRLRPREQVAVSFRPDGDSDLGDIHYDIKGNWAETILYEIPLLALTSEAYFKFMDTDWDYDGQEEKAYEKGMRLLEAGCVFSEFGTRRRRDYHTQALVFRGLTKAAKEAEKRGLTGKLSGTSNVHLAMRFNIPPVGTVAHEWFMGNAAILGDYKSATEEALSRWVGCYGPGVLGIALTDTFGTPEFLRAFSKPMSASGEPVPQPRDRKISTADAFISAAKDFIKDLHPDKTYAQVFTGVRQDSGDPKEFVKLMRKFYDEQGIKDKKVIVFSDSLDIDRCLEYKEVAEAAGFQPTFGVGTYFTNDFVHKATGKKSTPLNIVIKLSSAAGNPAVKISDNVGKNTGDKATVEKVKRELGYVEKDWSEGDESARWGHDGDAATA

SEQ ID NO: 13989 - DNA, 5916 bp, Magnaporthe grisea 70-15
  CDS (1)..(5916)
atggacttcaatagcgactctccgtttccggagggagtcatctcctttttggatacggatttgtataaactcactatgcagtgtgcggtcctcaaatactacagcaacacttctgtcacatattcttttaccaaccggaccccggagaaaaggttgtctagaaaggcttaccagtggttgcaggatcagattaggaatgaggagtaccgcttcttgaaggacaactgcccatacctcggtactcagtatctagagttcctccaaaatttccggctcaatccgagggatcaagtcattgtgagttttgcgcccgtgggcaagcatgaaggggccgattcggatgtgggagacatcgacatccaaatcagtggaaaatgggtagataccatcctttacgagatcccaattctcgccctgacgtctgaggcctacttccgcttcatggataccgactgggactaccagggtcaagaggagctcgcctacgaaaagggcaaacgcatcctcgaggccggctgcatattgtcggaatttggcaccaggcgccggagggactaccacacccaagccttggtattccgcgggctggtgaaggcaagcaaggaagcccagaagcgcggtctctccggaaagctctccggcaccagcaatgtgcacctggcgatgcgcttcaacatggcccctgtcggcactgtcgcgcatgagtggtttatgggcatcgccgctattatcggcgactaccgcagcgcatcggaggaggcgctggcccgatgggtcggcgctttcggccccggcgtgctggctatcgcgttgaccgacacgttcggcacccccgagtttctcaagtcgttcagccggccggtgcgatggctggaggaggcgcactcggcggcagcgggcaacgaatcaaagacgtacgcgcaggtgtttgcgggggtgaggcaggactccggagacccgacgacgtttgtcaagcggatgcgggagttctacgaccaacagagaatcaaggagaagaagaccattgttttctcggactctcttgacatcgaccggtgcctggtatacaagcaggtgtcagaggctgcgggcttccagccgacttttggagtgggaaccttcttgacaaacgattttgttggcaagtcgactgggaagaagtcgacgccgctaaacattgtcatcaagctgagctctgcggatggcaagcctgcggtgaaattgagcgacaacattggaaagaacacgggcgatgcaaacaccgtcgagaaagtcaagcgtgaaattgggtacgaggagaaggactgggagggcggtgacgagacatcgagactaaatgggaatcgatacgatagaggtgcacatgccttgatggacctgagcgatcctgccgccaccagtcgcagtcgcagtgtcgtctacttcttcaagagtggaaccaccctctccgagatcccggaaagcccgcctgggcgctcagggcctatgaattctcaacggtcccacggcggcggtgcctttgaccgcgagcgcgatccccgcgaacgtgacctcgacgagcaccgacaccgtccacttacacaagaggaagccgccaatcgtgaccgtgagcgagacatcgatcgtgaacgcgagcgggaacacgccgaccggcagcagccacgcgaggcctacccgcccggagcacctcttcacagcaccgccggctcgataccgatccaccagcccgtagcctcgcgaatagcgggcgtcatccacagccctggtggtctcttgggtgcccacaacggcgcgcccggcggcctgcccttgggcgccccgacgacgcagttagctggtttcggcgggccgatccacagcgatcccgcaaggcagatgccgcctcaacccccgaaccagaacagcacgggtggccaacagcaccagatgtttgcgccgatccctcagcaagcgggagggcccaacggctccctgggacctgggggtagccctggatccgtctttggcggcccgctacagacagaaaatggtcgggcacctgttcagcaggcccctccgcccgctgttgttcctccagcacaaacaagctctgctgctgggctctcgcagcagggctcacagcctattttgaatgatgcgctcagctacctcgatcaagtcaaggctcaatttcatgaacaacccgatgtttataaccgattcctcgatatcatgaaagatttcaagagtcaaacaatcgacactcctggggtgatcaaccgagtttccgatctttttgctggacatccgaatctcatacagggttttaacacgttcttgccacccggttaccggatcgagtgcgggctggacaacaaccccaacagcataagggttactacaccttcaggttcgaccgtccattcaattggtgctggaagaggcgcactgccgcccgtggacggatctgcaggaccccctggtcagaacgctcagtatctcggtcccaacagccggccagggaactggcagcagtcagtacagcatagtattgagagtcctgaagcccagttcagcgcacctgcgcagccgggacctggtccatttggccctgtcggagctccaggggcccagttcgatggccacagccctgcgcatcaacagcgtgtcgtgagttcaggacagcagcctgcaggtcctggctctgggcttgtagcgggccctggctcggcgatgcctggccctatggccagaaatgtacaaaccccaacgccaggtgcgcagccggcttcgttgaatggaagttcttcgcagcaaggcggtcagcggggaccagtcgagttcaaccatgctataagttacgtcaacaagatcaagaaccgattccaggacaagcccgaaatctacaaacaatttcttgagatactgcagacgtaccagcgggaacagaagccgatccaggaggtgtatgctcaggttaccaccttgttccatacagccccagacctgctggaggacttcaaacagtttctccccgagtctgctgctcagacccgcacgtttggccaacgacccgccgaggatggcggccttttgaaccacatcaaccagatgccgcaagctacaaaccccgctagggaaggccccaaaatgcctcctgttggcaattttgccgttccggtcagtgccagcaaggacaacaagaagcgaccgcgcatagaaaagccacccgctgcaacgcctcaggctcaacagtcgccggctgttgggtccgcctctatcaacagcgcgaacaaacggacaaagaccacgcataagccttctggcgatggtccttctattgagccgtcgttgacgcccattgtgcctgaaccaatgagcccgtctgcgtcgacaagtgtctcccaggagaaggctctcaactaccttgagcgcatcaagaagcacattggaaacaggacaactctgcacgaatttttcaagcttatcaatctttacacccagggcctgatcgataagaacgtgctcgtccaaaaggctcaaatgataataggcgctaatgtcgaacttatgacatggttcaagaactttgttcggtacactggggatgatgagttggttgagaacaagcctgaaccacctactggccgtgtgtcactcagcaactgccgcggatacggcccaagttaccgactgctacgtaagcgagaacgactaaagccatgtagcggacgcgacgagctgtgtaattcagttctgaatgacgaatgggcttctcacccgacatgggcctcggaagatagtggattcgtggcccatcgaaagaacgcctttgaagaaggccttcatcggattgaagaagagcgtcacgactatgactttttcatcgaagccaatcagaagtgcatccagttgctagagccaattgcccagcagatgctgaccttgaatcctgccgacaggcagaacttcaggatgcccagtgggctgggaggccagagcacttcgatctacaagcgagtacttaagaaggtgtacggtgcagacaagggtgctgaagtagtcaatgacatgttccagcatcccttcaccgtggtacctatagtaatggctcgcctcaagcagaaagacgaggaatggaggtttagccagcgtgagtgggaaaaggtatggcaaagtcaaacaaaagccatgcatctgaagagtctggaccaccaaggaatccaggtcaagggtaacgacaagcggactctgtctgccaagcacctggttgatttgatcaagaccaagcacgaagagcaaaagcgacaacgggtcaacaaaggcaaagcgccaagggtccagcacctttggtcatttacggaccagggcgttctgctggatttgctccggttcatggttttgtacgcaatgaacagcgggcagcatgggtcttctgaaaaggacaggattctagagttcttcgagaactcggtgccacagttcttcggaatacttcctgagcaggtccgtcagcatctcggcgatatcgaccgcgatgctggcgaggaggaggctgatgacaacacgcctgctgaattgactaacggccgaagccgccggaatggcaagaaatcagacctccttcgtgggctcttggacccaggtcgcaacggcagcaagactaggagtcagcccgaggaaagcaacacatcggccagcaaggaaaccacgcctgatcagggctcgactaatgaggaggagatggccgatgcaccggatgatggttctgctaccgcagagaacgccaacaacgaaaggtggctgcaaaatcctccaaaggcaaccgtactgtctggttacaatcctctgagcgacggagacagcgaactcaaggccgacggactcttcccgcggccctggtacaatttcttctgcaatcagacgatatttgtcttcttcagcgtcttccagacattatacaagcgcttgaagacagtcaaggaaagcagggagagcgtgttggaggagatcaggcgagagagggcagacaagcctgccaagcagttgggcctggttcatgacgagatgaactactttgatggcgatcccgagacattctggccaaggacggttgagctgatcgaagatttcatcacgggtgaaatagacgagagcaggtgtcaggacgtcctacgccattactatctacagtgtggctggactttgtacaccattcaggacttgctcaaaaccttgtgccggcaagctctcgtttgcaacaactctgacaacaaggagaagacaccagatcttgtgcaacaattcctgactgccaagagtcaggaggagactagttatcaggttgagatcagtgcccgcaagtttgcggaaaagtgcatcaaggatggcgagatgtttatgattacttgggccccaagcagcaatgaggcaacagtacgctggttaccaaaggaggacacgaccttccatgcggaagaaatggaaccgacggatcgctggaagtactacatcgcctcctacatgcgagtcgacccgactgagggggtgcctaagctgcgtctccaaaagacggtgttagcacgcaacctgccatcctcagactcggactcggacgacggtgctgtccctaagccgctttcatacagtgaaggtcttggcctgcgaatctgcgtcaactcgtccaagatagtatacgagaaggagacgtccgagtacacaatctacaacatgacgtcgctctcagaggagaggcgtgcttttgatagggaccggcgagctcaactattccgcgaaaagctgattatgaacaacgcctggatgaaggatctgagccaagtcgaggtgcaaggaatgaacgaggatttccagcggtgggcaaaggacggcattgtaccaggcacctcatcaaccggcggtgctgggtcttctgcataa

SEQ ID NO: 13990 - protein, 1971 aa, Magnaporthe grisea 70-15
MDFNSDSPFPEGVISFLDTDLYKLTMQCAVLKYYSNTSVTYSFTNRTPEKRLSRKAYQWLQDQIRNEEYRFLKDNCPYLGTQYLEFLQNFRLNPRDQVIVSFAPVGKHEGADSDVGDIDIQISGKWVDTILYEIPILALTSEAYFRFMDTDWDYQGQEELAYEKGKRILEAGCILSEFGTRRRRDYHTQALVFRGLVKASKEAQKRGLSGKLSGTSNVHLAMRFNMAPVGTVAHEWFMGIAAIIGDYRSASEEALARWVGAFGPGVLAIALTDTFGTPEFLKSFSRPVRWLEEAHSAAAGNESKTYAQVFAGVRQDSGDPTTFVKRMREFYDQQRIKEKKTIVFSDSLDIDRCLVYKQVSEAAGFQPTFGVGTFLTNDFVGKSTGKKSTPLNIVIKLSSADGKPAVKLSDNIGKNTGDANTVEKVKREIGYEEKDWEGGDETSRLNGNRYDRGAHALMDLSDPAATSRSRSVVYFFKSGTTLSEIPESPPGRSGPMNSQRSHGGGAFDRERDPRERDLDEHRHRPLTQEEAANRDRERDIDREREREHADRQQPREAYPPGAPLHSTAGSIPIHQPVASRIAGVIHSPGGLLGAHNGAPGGLPLGAPTTQLAGFGGPIHSDPARQMPPQPPNQNSTGGQQHQMFAPIPQQAGGPNGSLGPGGSPGSVFGGPLQTENGRAPVQQAPPPAVVPPAQTSSAAGLSQQGSQPILNDALSYLDQVKAQFHEQPDVYNRFLDIMKDFKSQTIDTPGVINRVSDLFAGHPNLIQGFNTFLPPGYRIECGLDNNPNSIRVTTPSGSTVHSIGAGRGALPPVDGSAGPPGQNAQYLGPNSRPGNWQQSVQHSIESPEAQFSAPAQPGPGPFGPVGAPGAQFDGHSPAHQQRVVSSGQQPAGPGSGLVAGPGSAMPGPMARNVQTPTPGAQPASLNGSSSQQGGQRGPVEFNHAISYVNKIKNRFQDKPEIYKQFLEILQTYQREQKPIQEVYAQVTTLFHTAPDLLEDFKQFLPESAAQTRTFGQRPAEDGGLLNHINQMPQATNPAREGPKMPPVGNFAVPVSASKDNKKRPRIEKPPAATPQAQQSPAVGSASINSANKRTKTTHKPSGDGPSIEPSLTPIVPEPMSPSASTSVSQEKALNYLERIKKHIGNRTTLHEFFKLINLYTQGLIDKNVLVQKAQMIIGANVELMTWFKNFVRYTGDDELVENKPEPPTGRVSLSNCRGYGPSYRLLRKRERLKPCSGRDELCNSVLNDEWASHPTWASEDSGFVAHRKNAFEEGLHRIEEERHDYDFFIEANQKCIQLLEPIAQQMLTLNPADRQNFRMPSGLGGQSTSIYKRVLKKVYGADKGAEVVNDMFQHPFTVVPIVMARLKQKDEEWRFSQREWEKVWQSQTKAMHLKSLDHQGIQVKGNDKRTLSAKHLVDLIKTKHEEQKRQRVNKGKAPRVQHLWSFTDQGVLLDLLRFMVLYAMNSGQHGSSEKDRILEFFENSVPQFFGILPEQVRQHLGDIDRDAGEEEADDNTPAELTNGRSRRNGKKSDLLRGLLDPGRNGSKTRSQPEESNTSASKETTPDQGSTNEEEMADAPDDGSATAENANNERWLQNPPKATVLSGYNPLSDGDSELKADGLFPRPWYNFFCNQTIFVFFSVFQTLYKRLKTVKESRESVLEEIRRERADKPAKQLGLVHDEMNYFDGDPETFWPRTVELIEDFITGEIDESRCQDVLRHYYLQCGWTLYTIQDLLKTLCRQALVCNNSDNKEKTPDLVQQFLTAKSQEETSYQVEISARKFAEKCIKDGEMFMITWAPSSNEATVRWLPKEDTTFHAEEMEPTDRWKYYIASYMRVDPTEGVPKLRLQKTVLARNLPSSDSDSDDGAVPKPLSYSEGLGLRICVNSSKIVYEKETSEYTIYNMTSLSEERRAFDRDRRAQLFREKLIMNNAWMKDLSQVEVQGMNEDFQRWAKDGIVPGTSSTGGAGSSA

SEQ ID NO: 13991 - DNA, 1380 bp, Gibberella zeae PH-1
  CDS (1)..(1380)
atggttttcaacagctcttcgccctaccccgagggcgtcatctccttcctcgacaccgacctttacaagttgacgatgcaatgcgcggtcttcaagttcttcaaggatgtaccagtaacatatgcctacacgaaccgaacccccgacaagaagctgtcccgaactgctttcaagtggcttgaggagcagattggaaagctcggaaatatctcactctctaccgacgaatacctcttcctaaagaagcactgcgattacctctccgaagactacctcaacttcctcaaggagttccgcttgagcccccgagagcaagttgttgcgaccttcactcccgttggcgaggacactggagacgactcaattgttggagatgttgacattcagattaagggaacttgggtcgacacgattctctacgaaattcccatgcttgcgttgacctcggaggcatacttcaagtttatggacactgattggaactatgagggccaagagaagcaggcgttcgacaagggactccaattgctcgaggcaggatgcgtcacatccgagtttggcacacgacgacgtcgcgattaccacacccaggctcttgtcttcagaggtctggtccaggcttccaaggaagctgagaagaagggattccctggcaagctttctggaaccagtaacgtccatcttgctatgcgcttcaacattcctcctgtcggaacagtcgctcacgagtggttcatgggcgttgctgctattcttggtgactacaagcaagctactgaagtcgcactacgacactgggtggcttgctttggtaataagcttggtatcgctttaaccgacacttttggcactcaggagttcctccgcgcctttacacagactgtgcaaaccattgagggtggattcccagcagagacctttaagagggctgatggaagcatgaagacttatgccgaagcttttgctggcattcgacaagattctggtgaccctgctgagtacaccaagtggatgcgagagttttacgacaagcagggcattacggacaagaagttgattgtcttttccgactctctcaacatcgaaagatgcttggagtacaagaaggtcgctgatgacctcggtttccaacccacgttcggtgttggcacataccttactaacgactttactaacaccaagactggcaagaagtcagtacccttgaacattgtaatcaagatcagctcagcggcgggcaatccagctgttaagatcagtgacaacgctggaaagaacactggtgataaagaaaccgtcgagaaggtcaagagagagcttggatatgttgagcgtgagtggaaagagggcgacgaaacctcccgatggggtaaggcgtaa

SEQ ID NO: 13992 - protein, 459 aa, Gibberella zeae PH-1
MVFNSSSPYPEGVISFLDTDLYKLTMQCAVFKFFKDVPVTYAYTNRTPDKKLSRTAFKWLEEQIGKLGNISLSTDEYLFLKKHCDYLSEDYLNFLKEFRLSPREQVVATFTPVGEDTGDDSIVGDVDIQIKGTWVDTILYEIPMLALTSEAYFKFMDTDWNYEGQEKQAFDKGLQLLEAGCVTSEFGTRRRRDYHTQALVFRGLVQASKEAEKKGFPGKLSGTSNVHLAMRFNIPPVGTVAHEWFMGVAAILGDYKQATEVALRHWVACFGNKLGIALTDTFGTQEFLRAFTQTVQTIEGGFPAETFKRADGSMKTYAEAFAGIRQDSGDPAEYTKWMREFYDKQGITDKKLIVFSDSLNIERCLEYKKVADDLGFQPTFGVGTYLTNDFTNTKTGKKSVPLNIVIKISSAAGNPAVKISDNAGKNTGDKETVEKVKRELGYVEREWKEGDETSRWGKA

SEQ ID NO: 13993 - DNA, 1839 bp, Ustilago maydis 521
  CDS (1)..(1839)
atgtgtgccgcgccatccacaagtgcgcctgtcgccaaacatgcgtcggacgcatcgccgattcgaagcatcctcgataccgacttgtacaagctcacaatgcaacaagcggtgcttcgtcactacccacacactcgtgtcgcatacaagttcaccaaccgctctgcagccacgatgaagttcacacgtcaagccatggatcgcatccgtaatcacattgacaaccttgtccatctttcgctcagcgctcaagaacgcgcttggctcgagcgaagctgtccttaccttggaaaggactacctcgattacctcgaggcgtttcgcttccagccaaagcagcaggtgcagctccgctttcttcccacgggtgaggatgggtggggccatctcgatctaaacgtttcgggtgtgtggtcagacgtcatcttttacgaggtacccttgatggcgattgtatcagaggtgtatttcagcacgatcgacacagactggtcgttgcaagaccagtatcaacaggcatttgacaaggcttgcaggctgacgtcgaatggcattcgatattccgaattcgggacgaggagaagacgatcctatcaaacacaccgtattgtcctgcaagggctcatggcgggcgacttgtctgcaagctcgggatgctcctctgggaaacttctggggacatccaacgtgcactttgcgcaacaatttgatctggtccccattggcacagtggcgcacgaatggaccatggctattgccgcgctgcaagggtatgcgcattcaaatctgaaagcgctgcagctgtgggacgctgtctattctgcaccggactttgtcgccaacagtgctacgcacgacctcaccattgcgctcaccgatacattttccaccaacgtcttctggaacgatctgctggataatccatctggcatcgaaatcgcgcgtcgatggcgcggcctccgtcaggattccggtgacagtaaagcgtttgcgcaaaaggcacttgacgcatatcgctcgatcggcgtcgatccgaaatccaaagtggtcatctactcggacggcctagacgtcgaccgatgcctcgagctcgccgcttactcgaaccacatcggcatcggcgccgccttcggtatcggcacgtccttcaccaacgacttcatccagctctccaccgcccaaaagagcaaaccactcaatatcgtcatcaagctcgattcggtcgagcacagacgcgtcgtcaagatcagtgatgacctcaccaaaaacacgggcgatcccacagaggtgctcgccgtcaagaggaggtttggcattccaacaccgtcgagtgccacgccagctgatgcatctgtgatcaaccatctcgatccaggagcgccaccgaatccgtcctcgcatgcgcatcttggcacagacgatgctaccatgacccaagtatcgccgcttgatcaacgcaatgtggcagcaggcgtcgaactgaccccaccgaacgagccgcgaagactcttgagtgctcggtccacttcgaagctctcgtcacctaagaatgtggcctcgtcctgcgcctggtccaactgtgcactcgcatcgaagctcgtctcgtcgataccggctgcgctcatcgctggcgtgatcgagcgtgctcgcgaaggcgactgcgactgcgaaccggacgcgcctcgtgaaatgtgtcttgccctaaacgctgccaacggcgacgatgcaggtgcgactgctccgatagctgggttgaactcggagatcggcgtgcctggcgtacccggcgtacctggcgaaccgatccggttgttgctttgtgcaaatccactattgtag

SEQ ID NO: 13994 - protein, 612 aa, Ustilago maydis 521
MCAAPSTSAPVAKHASDASPIRSILDTDLYKLTMQQAVLRHYPHTRVAYKFTNRSAATMKFTRQAMDRIRNHIDNLVHLSLSAQERAWLERSCPYLGKDYLDYLEAFRFQPKQQVQLRFLPTGEDGWGHLDLNVSGVWSDVIFYEVPLMAIVSEVYFSTIDTDWSLQDQYQQAFDKACRLTSNGIRYSEFGTRRRRSYQTHRIVLQGLMAGDLSASSGCSSGKLLGTSNVHFAQQFDLVPIGTVAHEWTMAIAALQGYAHSNLKALQLWDAVYSAPDFVANSATHDLTIALTDTFSTNVFWNDLLDNPSGIEIARRWRGLRQDSGDSKAFAQKALDAYRSIGVDPKSKVVIYSDGLDVDRCLELAAYSNHIGIGAAFGIGTSFTNDFIQLSTAQKSKPLNIVIKLDSVEHRRVVKISDDLTKNTGDPTEVLAVKRRFGIPTPSSATPADASVINHLDPGAPPNPSSHAHLGTDDATMTQVSPLDQRNVAAGVELTPPNEPRRLLSARSTSKLSSPKNVASSCAWSNCALASKLVSSIPAALIAGVIERAREGDCDCEPDAPREMCLALNAANGDDAGATAPIAGLNSEIGVPGVPGVPGEPIRLLLCANPLL

SEQ ID NO: 13995 - DNA, 1464 bp, Aspergillus nidulans FGSC A4
  CDS (1)..(1464)
atgggcgagcactccctgcttccggacggggtcttctctctgcttgatacagatttgtacaagctgacgatgcaatgcgcgatcctcaaatactttccggacgtccaggttacctatggcttcacgaaccgaaccccgcatatgaagttgacgcgaggtgcatacaaatggatgctggctcaaatggataagctcgcaaatatccgcgttacagaagacgaaattgcgttcctcaaaaggcgctgcccttactttaacaccgcctacctggacttcctgacgaatttccgcctcaagccctccgagcagattgatataaactttacacccgtaaatgatacaggaagcgacagtgacttcggcgacattgattatatagtcaagggtgcctgggtggatacgatcctatatgagatccccttactggccctgactagccaggcatacttcatgttcagcgataaggactggaactacgagtgccaggaagggaaggcataccggaagggatatgttctgctagagaatggctgcaccttttcagagtttgggaccaggcggcgccgcagctaccacacccaggaccttgttatgcaggggctctgtcgggctgctagggagggaaaggccaagggtttaccaggtgtctttaccggcagtagcaatgtccactttgcgatgaagtatgatgttgatccggtcgggacagtagcgcacgagtggtacatgaccattgcagcgatcacggacgactacgagaatgcaaacgagatggccctgaagtactggcttggttgctttggtgaaggtgtcctcgggatcgcactaacagacacctttggcacccctgccttcctcgacgctttccgcaaacctatccccgattatacctccgccggcactggcgccgtctcaacaacagcttcagggcccagcacgactgccgaatccaatattcagagcgaagccgaaaccaaagcccccatcacagcgccgctttccccagaccaccctccacccgccgttaaaacgtatgcccaggtctacgcaggcgtacgtcaggactcaggcgacccatcttatttcgtaaagatggcccgcgatttctacgaccgtgagggcattacagggacaaagacagtggtattctcggactcgttggacatcgagcactgtcttgagtataaagttctagcagaggaggctgggttcaagcctgtttttggcgttgggacattcttcacgaatgacttcatcaatacaaccacgaacgaaaaatcgcaaccgctcaacattgtcataaaaatttcctctgctaatggccgggccgctgtcaagctaagcgacaatatgggcaagaatacgggcgacaaggatacagtccaggctgtcaagaagaggctggggtacgtcgagcatgaatgggaagaaggtgatgagcggaatcggtgggctcggaagtga

SEQ ID NO: 13996 - protein, 487 aa, Aspergillus nidulans FGSC A4
MGEHSLLPDGVFSLLDTDLYKLTMQCAILKYFPDVQVTYGFTNRTPHMKLTRGAYKWMLAQMDKLANIRVTEDEIAFLKRRCPYFNTAYLDFLTNFRLKPSEQIDINFTPVNDTGSDSDFGDIDYIVKGAWVDTILYEIPLLALTSQAYFMFSDKDWNYECQEGKAYRKGYVLLENGCTFSEFGTRRRRSYHTQDLVMQGLCRAAREGKAKGLPGVFTGSSNVHFAMKYDVDPVGTVAHEWYMTIAAITDDYENANEMALKYWLGCFGEGVLGIALTDTFGTPAFLDAFRKPIPDYTSAGTGAVSTTASGPSTTAESNIQSEAETKAPITAPLSPDHPPPAVKTYAQVYAGVRQDSGDPSYFVKMARDFYDREGITGTKTVVFSDSLDIEHCLEYKVLAEEAGFKPVFGVGTFFTNDFINTTTNEKSQPLNIVIKISSANGRAAVKLSDNMGKNTGDKDTVQAVKKRLGYVEHEWEEGDERNRWARK

SEQ ID NO: 13997 - DNA, 1296 bp, Candida glabrata CBS138
  CDS (1)..(1296)
atgtcaagcatgactcctgccattacgtccttattggacaccgacatgtacaagattaccatgcatgctgcagttttcactaacttcccagatgctagagtagtctacaagttcaccaataggactgcacaatttcatttcaacaagagagcagtcgattggatcaaagagcagtttaggctactaggcgacctcacgtttacacacgatgatgttgagtatttagctcgtgagattccctttttgcctgcaaaatatcttcattacattgagaatgggttcactttgaagcctgatgaacaaatagaactagactgccaggagataaaaggtaaagaagaccaatatgaccttcatatcctagtgaaaggtctgtggattgacactatcctttacgagattccaatactggctttattgtctgaggcttacttcaaatttgttgacactgactgggattatgagaaccaactatctaacgccaaagaaaaggccctaagattattcgaaaacaacctatcctttagcgaatttggaactagacgtcgtaggtctttcaagactcaagatttggtcatggaaggtatcatgcaagctgtgaaggaaaatcctgagaaatacaggccgttgcttttgggtacctctaacattttattcgctaagaagtacggagtcaaaccaattggtacagtcgcccatgaatggatcatgggtatagcatccatcactggcgattatccagagactaacagaattgccatggattactggattaagacatttggcaaagagcatgcaggccttgccttgactgatacctttggtaccgacgacttcttaaaaagcttcaagcctccatattccgattattacattggtgttagacaagattctggagatccaataaaatacacagaaaagattgcacaccatttccatgatgtactgaaactaccaaaattctctaaattcatatgttactcagactcgcttaatattgacaaagctatcgaatatggaaaggttgcagaggctcatggcataaagtccacctttggcataggtacaaattttacgaatgatttccacaaaaagtccgatccttctgtcaaaagtgcaccattaaatattgttattaaactactagaagtgaatggtaaccactcaattaagatttcagataatgcaggtaaaaatatgggtgacccagatactgtaaaaaaagtaaaggaacaactgggatatgttgaacgtcaatgggctggaggtaatgaagcccatcgttctgctgcatga

SEQ ID NO: 13998 - protein, 431 aa, Candida glabrata CBS138
MSSMTPAITSLLDTDMYKITMHAAVFTNFPDARVVYKFTNRTAQFHFNKRAVDWIKEQFRLLGDLTFTHDDVEYLAREIPFLPAKYLHYIENGFTLKPDEQIELDCQEIKGKEDQYDLHILVKGLWIDTILYEIPILALLSEAYFKFVDTDWDYENQLSNAKEKALRLFENNLSFSEFGTRRRRSFKTQDLVMEGIMQAVKENPEKYRPLLLGTSNILFAKKYGVKPIGTVAHEWIMGIASITGDYPETNRIAMDYWIKTFGKEHAGLALTDTFGTDDFLKSFKPPYSDYYIGVRQDSGDPIKYTEKIAHHFHDVLKLPKFSKFICYSDSLNIDKAIEYGKVAEAHGIKSTFGIGTNFTNDFHKKSDPSVKSAPLNIVIKLLEVNGNHSIKISDNAGKNMGDPDTVKKVKEQLGYVERQWAGGNEAHRSAA

SEQ ID NO: 13999 - DNA, 1284 bp, Kluyveromyces lactis NRRL Y-1140
  CDS (1)..(1284)
atggaaccggttataacttcattcctcgacacggacatgtacaaattgacgatgcatgccgctgtctatacacattttaaggatgtcaaagtcaagtacaagtataccaaccgatcgcctcagatgacgttcaataaggaagctgtggaatggttgaagggtcaattcctattattggctaatataagacttactactgaggaactgaaatacatcaaggaggctattccgtacctgccagcggaatatttggaatttatatctaacggtgggttcgaagtaaatccaaaggatgaaattaaatttgaggccagggaaattgagggtgaacctggtcattacgagttggatatctccattgagggattatggatcaagactatatggtacgagatcccagtgcttgcgttggtgtcagaagcgtacttcaaattcgtggatacggattggacttacgatggtcaggtcgagaaagcttatgccaaggccaaaaagcttttggatcacgatatcgtattcagtgagtttggtactagacgtcgtagatctttcaagactcaagatcttgtcatgcaaggtatcataaatgccgctaaggattgtgataagtctaaatacgtattgggtacctcgaacgtgttattcgctaagaaatataacgtaaaccctatcggtacagtagcgcatgagtggatgatgggtattgcatccattacaaatgactatctgaatgcaaataagaacgcaatggattactggattgagacgtttggtatggaaaatgcgggtcttgcactaacagatacttttggtaccgattcgttcttgaaatcgttctacccaccttattcagatgcatacattggggtgagacaggactctggagacccaattttgtacactgagaaaatcgctcatcattacaatgacgtattgaagctcccaaagttctcaaagataatctgctattcagactctcttaacccagatcgagcaatagaatatgcccaagtggctcataaacatggtctaaaggcaactttcggtatcggtacgaatttcaccaacgatttccaaagaaaatctgatgtctcagtgaaaagtgaaccgctgaatattgtcataaaactactggaggttaatgggaaccatgccatcaagatttccgataatttaggtaaaaatatgggtgacccagagacagttcgtagagtgaaggaagaattgggctatgttgagagaaagtatgcaggtgataatgaagctcatagatgggctgcttaa

SEQ ID NO: 14000 - protein, 427 aa, Kluyveromyces lactis NRRL Y-1140
MEPVITSFLDTDMYKLTMHAAVYTHFKDVKVKYKYTNRSPQMTFNKEAVEWLKGQFLLLANIRLTTEELKYIKEAIPYLPAEYLEFISNGGFEVNPKDEIKFEAREIEGEPGHYELDISIEGLWIKTIWYEIPVLALVSEAYFKFVDTDWTYDGQVEKAYAKAKKLLDHDIVFSEFGTRRRRSFKTQDLVMQGIINAAKDCDKSKYVLGTSNVLFAKKYNVNPIGTVAHEWMMGIASITNDYLNANKNAMDYWIETFGMENAGLALTDTFGTDSFLKSFYPPYSDAYIGVRQDSGDPILYTEKIAHHYNDVLKLPKFSKIICYSDSLNPDRAIEYAQVAHKHGLKATFGIGTNFTNDFQRKSDVSVKSEPLNIVIKLLEVNGNHAIKISDNLGKNMGDPETVRRVKEELGYVERKYAGDNEAHRWAA

SEQ ID NO: 14001 - DNA, 1269 bp, Debaryomyces hansenii CBS767
  CDS (1)..(1269)
atgacgacagacattccaattattacatccatattggatactgacttgtacaagttgacgatgcatgctgcagttgtcaagcatttcccgaacatacccgttgtatatagatatacaaataggacaccatcgatggtattaaacaaagaagcaatcgattggttaaagtatcaaatttccaagctaagtgacttaagggtcagttcagaagaacttgaatatttgcggaaagcattgccacaaatgccggaggtttacttgaaatatttggaaactttccagctctttcccgacaaacaaatcaaatacttcaatgacgagagcaattttgaagaatttgaaattgaaatgaaaggcaaatgggatgaaaccatgttatatgaaatccctttgttggcgttaatatcagaagcttattttaaatttgttgatactgattggaactacgatggtcaagcagaacgtgccgaagacaaatgtgcacaattatttaagaacgaatgcacttttagtgaatttggaactagacggaggagatcattcaagacgcaagatctagtagtgaagaatttatgtgattttgctggaaagaatccagataagaagcactttttaggaacatcaaatgtattattggcaaaaaaatacaatacaacacctataggaacagttgcacacgaatggtttatgggtattgcctcgattacgcaggactatacaaatgctaataaacttgccatggactactggttagatacatttggtcctgaacatgctggtttggctttaacagatacatttggaacagatgcgtacttaaaagtatttaccaagccttacactgattattatactggcgtaagacaagattcaggcgatcctgaactgttcgctgaaaaattagcagatcattacaagaagcaagggtatccggattttagtaaaataatatgctttagcgattccttaaacgttgagaagtgtttaaaatataaacaaaaagttaatagtttgggattgatcgcttcttttggtattggaacgtttttcacaaatgactttgcgtctgtgtctgatccctctactaagtctgttccgcttaatattgtcattaaattgaaagaagccaacggtaacccttcgatcaaaattagcgataatcttggtaaaaatatgggtgatccggcagtagtctcgagagtgaaaaaagaactcaattatgaagaacattcttgggctgagggagatgaagagaagagatgggattag

SEQ ID NO: 14002 - protein, 422 aa, Debaryomyces hansenii CBS767
MTTDIPIITSILDTDLYKLTMHAAVVKHFPNIPVVYRYTNRTPSMVLNKEAIDWLKYQISKLSDLRVSSEELEYLRKALPQMPEVYLKYLETFQLFPDKQIKYFNDESNFEEFEIEMKGKWDETMLYEIPLLALISEAYFKFVDTDWNYDGQAERAEDKCAQLFKNECTFSEFGTRRRRSFKTQDLVVKNLCDFAGKNPDKKHFLGTSNVLLAKKYNTTPIGTVAHEWFMGIASITQDYTNANKLAMDYWLDTFGPEHAGLALTDTFGTDAYLKVFTKPYTDYYTGVRQDSGDPELFAEKLADHYKKQGYPDFSKIICFSDSLNVEKCLKYKQKVNSLGLIASFGIGTFFTNDFASVSDPSTKSVPLNIVIKLKEANGNPSIKISDNLGKNMGDPAVVSRVKKELNYEEHSWAEGDEEKRWD

SEQ ID NO: 14003 - DNA, 1245 bp, Yarrowia lipolytica CLIB99
  CDS (1)..(1245)
atgtccacaatcacctcgcttctcgacaccgatctgtacaagctgacgatgcaggcagctgttttgcagcactttcccgcggcacaggcgacttttctgttcaagaatcgaacaccatccaaacagctcaacgacgacgcgattgagtggctcaagagcgagattgcggcgctgggcgagcttcgatttactgaggacgagattgtgtttctccagaagcatgtcggcttcctgccagccgagtactttgagtatctcaagacgtgccaactcgatccggcagcccaggtcaaggtgaccgtcaacacagaaggacacctggaaatcgaggtcaatggcccctggaaagacacaattttgtacgagattccgctgctggcgctggtttcggaagcgtacttcaagtttgtcgacaaggactggagctacgacggacagagtgaactggcggccaccaaggcccaggagctcattgcccagggctgtgcgttttccgagtttggcacccgacgccgacgttccctcaagacccacgatatcgtcattgccggtattctggagggtctcaaatccgcccaaggcaacggtatcttcacaggaacctccaacgtctacctggccaagaagtacaatctcaagccgattggaacggtggcacacgaatggatgatgggcgtggctgcagctacgggcgactactctacagccaacctgcgggccatggagttgtggatccagacggttggagacgccaacgcaggggtggctctcacagacacgtttggaacggaatcatttctcctggacttcaacaagccgctcacagacatttacaacggcgtgcggcaggactctggcgatcccctggagtacacgaagctattgggcgaccactacaagcagttgggatatgagcccatgtccaaggtgattgtgtactcggattcgttggacgtggaaaagtgtggcaaatacaaggctgccgctgccgagaacgggctcaaggctgcctttggagtgggcactttcttcaccaacgatttcaagcggctcagcgatggacagaagagcactcctctgaacattgtcatcaagatccaacagctcaacgggcagtcgtgtatcaagctatccgacaatctgtccaagaacatgggtgatcccgagaccgttgagagggttaagcgggagcttgggtatgttgagaagggggatgtgattgacgagtccaagcggtggaattga

SEQ ID NO: 14004 - protein, 414 aa, Yarrowia lipolytica CLIB99
MSTITSLLDTDLYKLTMQAAVLQHFPAAQATFLFKNRTPSKQLNDDAIEWLKSEIAALGELRFTEDEIVFLQKHVGFLPAEYFEYLKTCQLDPAAQVKVTVNTEGHLEIEVNGPWKDTILYEIPLLALVSEAYFKFVDKDWSYDGQSELAATKAQELIAQGCAFSEFGTRRRRSLKTHDIVIAGILEGLKSAQGNGIFTGTSNVYLAKKYNLKPIGTVAHEWMMGVAAATGDYSTANLRAMELWIQTVGDANAGVALTDTFGTESFLLDFNKPLTDIYNGVRQDSGDPLEYTKLLGDHYKQLGYEPMSKVIVYSDSLDVEKCGKYKAAAAENGLKAAFGVGTFFTNDFKRLSDGQKSTPLNIVIKIQQLNGQSCIKLSDNLSKNMGDPETVERVKRELGYVEKGDVIDESKRWN

SEQ ID NO: 14005 - DNA, 1362 bp, Cryptococcus neoformans var. neoformans JEC21
  CDS (1)..(1362)
atgccggacaagctacacctacccatagatgatgtccagatccccttcagtatcctcgatactgacctttacaagcttacaatgcaaaacgccgtcctccaccactttagtgacgcgcatgtggtcatcaagtttaccaataggagtcctcaaatgctcttctcgaaggaatgttttgactgggtacaacagcgagtgaatgacctttcgaagctcaagttgacttcagaagaacgtaaagagctttctaaggcttgtccttatttctcggaatcatacctagattatctctccaatatgcaactcgaccctgtcaagcaagtaaagctcactttcattccccagggctccaacgagaaaggagaaaagatgggtgagattggatgtgtcatcgaagggccttggaaggatactatgttatacgaagttcccgttatggctatcttgagtgaaggatacttcaagtttgtggacaccgactgggattacgacgggcagtttgaactggccaagaagaaggctttagatctcttgaatcctcctgctcccacgacgtcattatcgttctctgaattcggcactcgccgtcgacggagtttcaaggcccaggatatcatcatgcggggccttattgctggccatgaagagtacaaatccaaaggagggagtcaggggattttgagcgggacaagtaatgtctatttggctttgaaatacggcctcaatcctgtcggcacgattgcccatgaatggatcatggccgtcggtgcgacttatggatacagaggggctaatggaagagctatggatatgtgggaagaggtctaccctcccggtaccaagttttcctctccactcaccatgctcacggacacctacactgccgcgatcttctttaaagactttatctccgatcccgctcgtgctcttcgctgggccgttctcaggcaagattctggagacgccttcaagtttgtcgaggacgcaaaggaggcgtggaggactatcgaggataaggctggtatcaagcgagacgttgggccgaatggcgaggaagaagttgcaaaaggaaagaaggttattttcagtgacggcttagatgtggagaaggccatcaagttgcaacaagggtgtgacaaggctggcatggcggcatcattcggtatcggtacggacttgaccaatgattttcgtaaggcctcagatcccagtcaaaagtccaaagctttgaatatggtcatcaaactcaacaagatcaatggaaaggattgtatcaagttgtcagatgacaaggggaagcatactggttctcttgaagaggttaggaaagctcaacaggaactgggcattaacaagaactag

SEQ ID NO: 14006 - protein, 453 aa, Cryptococcus neoformans var. neoformans JEC21
MPDKLHLPIDDVQIPFSILDTDLYKLTMQNAVLHHFSDAHVVIKFTNRSPQMLFSKECFDWVQQRVNDLSKLKLTSEERKELSKACPYFSESYLDYLSNMQLDPVKQVKLTFIPQGSNEKGEKMGEIGCVIEGPWKDTMLYEVPVMAILSEGYFKFVDTDWDYDGQFELAKKKALDLLNPPAPTTSLSFSEFGTRRRRSFKAQDIIMRGLIAGHEEYKSKGGSQGILSGTSNVYLALKYGLNPVGTIAHEWIMAVGATYGYRGANGRAMDMWEEVYPPGTKFSSPLTMLTDTYTAAIFFKDFISDPARALRWAVLRQDSGDAFKFVEDAKEAWRTIEDKAGIKRDVGPNGEEEVAKGKKVIFSDGLDVEKAIKLQQGCDKAGMAASFGIGTDLTNDFRKASDPSQKSKALNMVIKLNKINGKDCIKLSDDKGKHTGSLEEVRKAQQELGINKN

SEQ ID NO: 14007 - DNA, 1173 bp, Entamoeba histolytica HM-1:IMSS
  CDS (1)..(1173)
atgccaattattacaagtatacttgataatgatttgtataaatttactgtaagtaatggttatttttgtttgtatccttatgcctctggtgttttttcttttagagaccgtaatttaatgaattttcctgatggctttgctgaggtgttacagaaagagataaatgaaatggcatctataagtacaacaacagaagaagttgaataccttaaaacccttaaatatttacctccaacatatattgaatttattaagaattttcattatgacccaaaagaagttaagattgaagttattaacaataaattgcatatagactgtactgggtatttgtacagaatgactttatgggaagttcctttattggctattgtaagtgaattatatcaaaaaatgactcatcatactgctgatatggattatgtcatcaaaactactgaattgaaagcaaaaaaacttactgaagcaggatgtaaatatagtgattttggaacaagaagaagattttctaaagaagttcacgacgttgttgtgaaaacattaaaagaaaattcaggtaacaactttattggatcatctaacgtttatttagcaatgaaatataaccttaaacctattggaactcatccacatgaatggatgatgttccatgctgctgcttatggatataaaggggctaatgctttaggacttactcgatggagagatttgtacagagggtatttgtgttgtgctttaactgatacattcacaactgatgtattctttagagaatttgacagaccacttgccatgagttttgatggtattagacatgacagtgaatctccatttgtttttgctgacaaagctattgctttttataagaagatgggtattgacccaatgaccaaaaacattgttttcagtgatagtctgacttatgaaaaagctattgaattacaaaattattgtaaaggaaaaatcaattgcagctttggtattggaactcattttacttgtgacactggtaataataataaacctttaaacattgttatgaaacttttgaaagcaaaagaatatgatgaaaatgagtttgtaggttgtgttaaactttctgatgcagttggaaaacatcttggagaagaaaaagatatattaacttgcaaactatctcttgggcttaattaa

SEQ ID NO: 14008 - protein, 390 aa, Entamoeba histolytica HM-1:IMSS
MPIITSILDNDLYKFTVSNGYFCLYPYASGVFSFRDRNLMNFPDGFAEVLQKEINEMASISTTTEEVEYLKTLKYLPPTYIEFIKNFHYDPKEVKIEVINNKLHIDCTGYLYRMTLWEVPLLAIVSELYQKMTHHTADMDYVIKTTELKAKKLTEAGCKYSDFGTRRRFSKEVHDVVVKTLKENSGNNFIGSSNVYLAMKYNLKPIGTHPHEWMMFHAAAYGYKGANALGLTRWRDLYRGYLCCALTDTFTTDVFFREFDRPLAMSFDGIRHDSESPFVFADKAIAFYKKMGIDPMTKNIVFSDSLTYEKAIELQNYCKGKINCSFGIGTHFTCDTGNNNKPLNIVMKLLKAKEYDENEFVGCVKLSDAVGKHLGEEKDILTCKLSLGLN

SEQ ID NO: 14009 - DNA, 1266 bp, Candida albicans SC5314
  CDS (1)..(1266): transl_table=12
atgaatggaactgaagataaaccagtcatcaaatccttcttggataccgatttatacaaattgtttatgcatgcagcggtcaacaaacagtttcctgatgtcccagtgaaatacaggtataccaatagaactcctcaattgaagttaaatagccaagccatatcgtggttgaaaaagcaaatcgagtatttgggtgatttaagattttctgcagaagagattttgtatttgcatagagtattgccgcaattgccatcagactatttagaatatttggcggacttcaaattagtcccatcgtcccagatcaaatatttggataatgatgaaggggacttcgaattggaaattgtcggtaagtggaatgacactatactttatgagattccgttattggcattagtgtctgaagcttattttaagtttgttgacaccgactggaattacgaaggtcagtacgctttagcacaaaaaaaggccaagcagttaattagcaatgaatgtaatttcagtgaatttggaactagaagaagaagatcatacgagtcacaagaaattgttatcaaggcaatcaaagacgtgcaaatagacactcaatcaaagtacattgctggtacgtcgaacgtttattttgccatgaaatatgatttgccacctataggcactgttgcacatgaatggtatatgggaattgcatcaatcacacaagattatgtgcatgcaaataaattggctatggattattggattgatacatttggagcaaaatatgcagggttggccttgacagatacttttggaacagacaactacttgacaatgtttgttgctccctatgtaaatgaatactctggagttaggcaagattcgggggatcctgaattgtatgctgagaaaattgcccgtcattatgaaaaaatgggtatagcgaaaaataccaagatcatttgtttcagtgactccttgaacgttgaaaaatgtttgaaatataaaaatacagcagataaattgggattaatcagtacttttggaattggtacgtttttcacaaatgatttcaataagttgtcaaatggcgaaaagtctcagccaatgaacattgtcattaaaattaaggaggcaaacggtaaaccagccattaagattagtgataatattggaaagaatatgggtgatcaggctactgttgatagagtcaaacaagaattaggatatacagaaagaacatggtctgaaggagacgaaactcatagatggtctaagtag

SEQ ID NO: 14010 - protein, 421 aa, Candida albicans SC5314
MNGTEDKPVIKSFLDTDLYKLFMHAAVNKQFPDVPVKYRYTNRTPQLKLNSQAISWLKKQIEYLGDLRFSAEEILYLHRVLPQLPSDYLEYLADFKLVPSSQIKYLDNDEGDFELEIVGKWNDTILYEIPLLALVSEAYFKFVDTDWNYEGQYALAQKKAKQLISNECNFSEFGTRRRRSYESQEIVIKAIKDVQIDTQSKYIAGTSNVYFAMKYDLPPIGTVAHEWYMGIASITQDYVHANKLAMDYWIDTFGAKYAGLALTDTFGTDNYLTMFVAPYVNEYSGVRQDSGDPELYAEKIARHYEKMGIAKNTKIICFSDSLNVEKCLKYKNTADKLGLISTFGIGTFFTNDFNKLSNGEKSQPMNIVIKIKEANGKPAIKISDNIGKNMGDQATVDRVKQELGYTERTWSEGDETHRWSK

SEQ ID NO: 14011 - DNA, 1305 bp, Bartonella quintana str. Toulouse
  CDS (1)..(1305): transl_table=11
atgaatcatccagatatcgctcaacgtgtttacaatcatacctggaaactcgatcctattattcgttcacttctcgatacggatttttataaacttcttatgttgcagatgatttggggactttatcccaatgtaaatgttactttcaccctcataaaccgcaccaaaacaatacgtcttgccgatgatattgatgagggtgaattgcgtgcccaacttgatcacgcgcttagtttacgctttactaaaaaagaaatgatctggctcgctggtaatacattttacggacgtaaacaaattttcaaaccagattttcttcattggcttaagaattttcaactgccagaatatgaacttacacgtaaagatggccaatatatccttcatttccatggtccgtggtcccatagctccatgtgggaaatccccgctcttgctattatcagtgaattacgttcacgtgccgccatgaaaaatctagatcgtttcgctcttgatgtactttatgcgcgtgctaaagcaaaaatgtggagtaaagtcgaacaactaaaaaaactacctgatattaaaatatccgactttggtacaagacgtcgtcattcttttttatggcaacgctggtgtgttgaagcattaaaagaagggattggcgattcttttacaggtacttctaatgtccttctcgccatggctacagatctagaagctcttggtaccaatgcacatgaattgcccatggtcatcgccgctctcaccaataatgataatgaattatgcaaggcaccttatcaagtcttgcaagattggaatcgttattatggtggaaatcttctcattgttttgcctgatacctttggtacagaaacatttttacgcaatgcaccagattgggtggctgattggacaggtttcagacctgatagtgctccccctattgagggcggtgaacgcattatccagtggtggaaagaaaaaggaaaagacccgcgtgaaaaattattgattttttctgatgcactcgatgtcaatacaattgaacagacctatcaccatttccatgggagagtgcgcatgagttttggatggggaacagatcttaccaatgatttcgtaggctgtgcgccccaaaaaattgcgacctttgatgctctttcccttgtctgtaaagtcacccacgccaatggtcgacctgccgtaaaactttcagataaccctgaaaaaaccatcggtgatccacgagaaatacaacgttatcttaattttttcggcaatgaaaactttatcaccaggcctataaacacttaa

SEQ ID NO: 14012 - protein, 434 aa, Bartonella quintana str. Toulouse
MNHPDIAQRVYNHTWKLDPIIRSLLDTDFYKLLMLQMIWGLYPNVNVTFTLINRTKTIRLADDIDEGELRAQLDHALSLRFTKKEMIWLAGNTFYGRKQIFKPDFLHWLKNFQLPEYELTRKDGQYILHFHGPWSHSSMWEIPALAIISELRSRAAMKNLDRFALDVLYARAKAKMWSKVEQLKKLPDIKISDFGTRRRHSFLWQRWCVEALKEGIGDSFTGTSNVLLAMATDLEALGTNAHELPMVIAALTNNDNELCKAPYQVLQDWNRYYGGNLLIVLPDTFGTETFLRNAPDWVADWTGFRPDSAPPIEGGERIIQWWKEKGKDPREKLLIFSDALDVNTIEQTYHHFHGRVRMSFGWGTDLTNDFVGCAPQKIATFDALSLVCKVTHANGRPAVKLSDNPEKTIGDPREIQRYLNFFGNENFITRPINT

SEQ ID NO: 14013 - DNA, 1305 bp, Bartonella henselae str. Houston-1
  CDS (1)..(1305): transl_table=11
atgaatcatccagacattgcgagacgcgtttacaatcatacctggaaacttgaccccattattcgttcactgctcgataccgatttttataaacttcttatggtacagatgatttgggggctttatcccaatgtaaacgttactttctccctcatcaaccgtagcaaaacaatacgtcttgctgatgatattgatgaaatggaattgcgtgcacaacttgatcacgcccttaatttacgctttaccaaaaaagaaatgatttggcttgctggtaatacattttatggacgtaaacaaattttcgaaccagattttcttcagtggcttgagaattttcaacttccagaatatgaactcacacgtaaagatggccaatatatccttcatttccatggtccgtggacccatagctccatgtgggaaatccctgccctttctattataagtgaattacgttcacgtgctgctatgaaaaaactagatcgcttcactcttgatgtactttatgcgcgtgctaaagcaaaaatgtggagtaaagtcgaaagactcaaaaaactgcctaatattaaaatatctgactttggtacaagacgtcgccattcttttttatggcaacgttggtgcgttgaagcattaaaagaaggaattggcaattcttttaccggaacgtctaatgtccttctcgccatggatacagatttagaagctcttggtaccaatgcacatgaattgcctatggtcatagccgctctcaccaataatgataatgaattgcgcaaagcaccttatcaagttttacaagattggaatcgttattatggtggaaatcttctcattgttttgccagataccttcggtacagaagcatttttacgcaatgcaccagattgggtggctgattggacaggtttcagacctgacagtgctcctcctctcgagggcggcgaacgcattattcaatggtggagagaaaaaggaaaagaccctcgtgaaaagttattgattttctccgatgcactagacatagatacaattgaaaaaacctatcatcattttcacggtaaagtgcgcatgagttttggatggggaacagaccttactaatgatttcgtcggctgttctccacaagaaactgcaacttttgatgctctttcccttgtttgtaaagttacccatgccaatggtcggccagccgtaaaactttcagataatcctgaaaaaaccatcggtaatccgcaagaaatacaacgttatctcaatttttttggtaatgaaaaccgtgttgctaaacctatcaaaacataa

SEQ ID NO: 14014 - protein, 434 aa, Bartonella henselae str. Houston-1
MNHPDIARRVYNHTWKLDPIIRSLLDTDFYKLLMVQMIWGLYPNVNVTFSLINRSKTIRLADDIDEMELRAQLDHALNLRFTKKEMIWLAGNTFYGRKQIFEPDFLQWLENFQLPEYELTRKDGQYILHFHGPWTHSSMWEIPALSIISELRSRAAMKKLDRFTLDVLYARAKAKMWSKVERLKKLPNIKISDFGTRRRHSFLWQRWCVEALKEGIGNSFTGTSNVLLAMDTDLEALGTNAHELPMVIAALTNNDNELRKAPYQVLQDWNRYYGGNLLIVLPDTFGTEAFLRNAPDWVADWTGFRPDSAPPLEGGERIIQWWREKGKDPREKLLIFSDALDIDTIEKTYHHFHGKVRMSFGWGTDLTNDFVGCSPQETATFDALSLVCKVTHANGRPAVKLSDNPEKTIGNPQEIQRYLNFFGNENRVAKPIKT

SEQ ID NO: 14015 - DNA, 1470 bp, Bacillus licheniformis ATCC 14580
  CDS (1)..(1470): transl_table=11
ttggaacaccgttttacagacgacagtctagcactacacacagacctatatcaaattaatatggcggaaacgtattggcgcgacggcattgatcaaaagaaagccgtatttgaactgtttttcagaaagctcccttttgacagcggttttgccgtttttgccggtcttgaaaaagcgattgaatttttgcgggatttcagatttactgaaagcgatttagtttatttaaaagaagagctgggctttaaagatgactttctcggctttttaaaagatatgagattcaccggttcgctttattctatgcaggaaggcgaaatcgtgtttggcaacgaaccgatcatgaggatcgaagcgcctttggctgaagcgcagctgattgagacggctctgctcaacattgtgaattaccaaacattgattgccacaaaagcggcgagaatcaaaagtgtgatcggagaagagacggcgcttgaatttggaacaaggcgcgcgcatgaaatggacgcggcgatgtggggagcaagagccgcgattatcggcggattcgacgcgacaagcaatgtccgcgccggcaagcggtttgacattccggtatcaggcacgcacgcccatgcgcttgtacaggcctatcgcgatgagtacacggcatttaaaaaatatgcggaaacccataaaaaatgtgtctttttggtcgatacatatgatacggtgcgttccggcattccaaatgcgatcaaagtagcaaaggaattcggcgatcaaattgaattttcgggaatccgcctggacagcggagacctcgcctatttgtcgaagaaagcgagagccatgctggatgaagccggatttacagatacaaaagttgttgcatcaagcgatcttgatgagtacacgattatgaaccttaaagcccagggtgcaaaaatcgacgtctggggcgtgggcacaaagctgattaccgcttacgaccagccggctctcggcgcggtttacaaacttgtttcgatcgaagaagacggaaagatggcagacacgattaaaatttcttcgaatccggaaaaagtgacgactccaggcttgaaaaaggtgtacagaatcatcaatcagctgaaccatcattcagaaggcgattatatcgctttggactatgaaaaggtcaatgaacaggagcggctgaagatgtttcaccccgttcatacgtttatcagcaagtttgtgacgaattttgatgcgaaagatcttcaccagccgatctttgaaaaaggcgagcttgtctatgagaatccgagcattcaggatattaagcggtatgttcaagaaaatctcagtttgctttgggaagagtataagcggatcagcaagcccgaagaatatcctgtcgatttaagcgaagcttgctggaacaacaagatgcagcaaattcacgaagcgaaaatcaaggcgaaaaaaggtctggatcaaggttga

SEQ ID NO: 14016 - protein, 489 aa, Bacillus licheniformis ATCC 14580
MEHRFTDDSLALHTDLYQINMAETYWRDGIDQKKAVFELFFRKLPFDSGFAVFAGLEKAIEFLRDFRFTESDLVYLKEELGFKDDFLGFLKDMRFTGSLYSMQEGEIVFGNEPIMRIEAPLAEAQLIETALLNIVNYQTLIATKAARIKSVIGEETALEFGTRRAHEMDAAMWGARAAIIGGFDATSNVRAGKRFDIPVSGTHAHALVQAYRDEYTAFKKYAETHKKCVFLVDTYDTVRSGIPNAIKVAKEFGDQIEFSGIRLDSGDLAYLSKKARAMLDEAGFTDTKVVASSDLDEYTIMNLKAQGAKIDVWGVGTKLITAYDQPALGAVYKLVSIEEDGKMADTIKISSNPEKVTTPGLKKVYRIINQLNHHSEGDYIALDYEKVNEQERLKMFHPVHTFISKFVTNFDAKDLHQPIFEKGELVYENPSIQDIKRYVQENLSLLWEEYKRISKPEEYPVDLSEACWNNKMQQIHEAKIKAKKGLDQG

SEQ ID NO: 14017 - DNA, 1167 bp, Bacteroides fragilis YCH46
  CDS (1)..(1167): transl_table=11
atgatcattcgtaccatactcgatacagacctttataaattcactacttcgtatgcttatatcaaactattcccgtacgcaataggcactttcaacttcaaagacagggacgggactgaatatagcgacgagtttgtggaaagattgagaacggaaatcagtcagctatcacacgtggcactgaccgaaaaagaactggaatatatgataaagaactgccgcttcctgcccagggtctattgggagtggctctcttctttccgtttccaacccgagaaaatagaaatccgtctggacgagaatcggcagcttcacatcgaagtgaacgactatctttacaaagcaacgctttatgaagtacctctactcgccatcgtttcggagataaagaaccaatcgtccggcaatgttgccaacctggaagacatcctgtacaaactgtccgaaaagacagaactgtccaataagcatcagctacttttctctgaattcggaacccgaaggcgcttttcgttcgatgtgcagaatcaagtcatcgggcacctgaaacagacagcccattactgtatcggcacttccaattgccatttcgccatgaaatacggcatgaagcccatgggtacgcatccccatgaatggttcatgtttcacggagcgcaattcggctataaacatgccaactatatggcccttgaaaattgggtaaatgtatacgatggcgaccttggcatcgccttgtccgacacttatacatctgccatctttctaagcaatctaagccgcaaacaggctaagttgtttgatggcgtgaggtgtgattccggtgatgaattccggttcatcgatcagctgaccgcacgttataaggagttgggcatcgacccgaccaccaagacaatcgtattcagtaacgcactcgactttgacaaagcactggatatccaggagtattgccagggaaagatccgttgctctttcggcatcgggacaaacctgaccaacgatacgggattcaagccatcaaacattgtcatgaagctatcgcaatgcaagatgaacatgaaccaggagtggcgcgaatgtgtgaaattatcagacgacatagggaaacatatcggcagcccggaagaggtgcgtgcctgtctatacgacttgcggttggagtaa

SEQ ID NO: 14018 - protein, 388 aa, Bacteroides fragilis YCH46
MIIRTILDTDLYKFTTSYAYIKLFPYAIGTFNFKDRDGTEYSDEFVERLRTEISQLSHVALTEKELEYMIKNCRFLPRVYWEWLSSFRFQPEKIEIRLDENRQLHIEVNDYLYKATLYEVPLLAIVSEIKNQSSGNVANLEDILYKLSEKTELSNKHQLLFSEFGTRRRFSFDVQNQVIGHLKQTAHYCIGTSNCHFAMKYGMKPMGTHPHEWFMFHGAQFGYKHANYMALENWVNVYDGDLGIALSDTYTSAIFLSNLSRKQAKLFDGVRCDSGDEFRFIDQLTARYKELGIDPTTKTIVFSNALDFDKALDIQEYCQGKIRCSFGIGTNLTNDTGFKPSNIVMKLSQCKMNMNQEWRECVKLSDDIGKHIGSPEEVRACLYDLRLE

SEQ ID NO: 14019 - DNA, 1350 bp, Methylococcus capsulatus str. Bath
  CDS (1)..(1350): transl_table=11
atgagcctgccgatcgacagcgtcctgctcaccgacctctatcagttgacgatgctgcagggctatcatgcccaacgcatgaacgggactgcggtgttcgaattcttcgtccgcaagcttcccggtggggacgagcccaaacgcaacttcctggtcgcggccgggctggaacaggccctggatttcctggaaggcatgcggttccggcccgacgagatcgagtggctgcgcgccagcggacggttcacgccggatttcgtcgacgccttggccgcgctgcgcttcagcggcgacgtcgatgccatgccggaaggcacggtgttctttcccggcgagccgatattgcgggtgacggcgccccttcccgaggcccagctggccgaaacccggctcatcaacctgctgcatttccagaccctcatcgcctccaaggcggcgcgcatgaccctggccgcgccgggcaaactgctggtggatttcggtctgcgccgcgcccacggcgccgaggcgggactcctggcggcccgcgccgcctgcctcgccggtttcgccggcacttccgacgtactcgccggccggctttgggacttcccgctgtacggcaccatggcccattccttcatccaggcccatgacgacgaactcgccgccttcgagcatttcgccctcgcccagccggacaacctggtgctgctgatcgacacctacgacaccgaagccgcggcggaaaagctcatccccctggccgaacgcctggctgccaaaggaatccgcatccagggcgtgcgcctggacagcggcgacctggccgagcacgcccgccgggtccggcgtatcctcgaccgcggcggcctcggccaggtcagcatcttcgccagcggcagcctcgacgaatacctcctggccgcgcacactgcggaagccgtgccgatcgacggctacggcatcggcacccgcatggatacctcgtccgacgcaccctatctcgactgcgcctacaagctccaggaatatgccggcatcccccggcgcaagcgttcggaaggcaaggcgacctggcctggccggaaacaggtttaccggtattacgacgccgaggggaaattgcagcgggacagcctgacgttggtcgacgacgcgcagcccggcgaaccgctgctgcgcccggtgatgcgcaacggccgccgactcgcagcaagcccgcctttgcagacccttcgatcccatgcgatggaacagctcggtcgcctgccggaagcgttacgccgcctgtcaccggcgccggctcatccggtagagatcgccgggcgattgaagtccctggttaaagcgatggatggccatagctga

SEQ ID NO: 14020 - protein, 449 aa, Methylococcus capsulatus str. Bath
MSLPIDSVLLTDLYQLTMLQGYHAQRMNGTAVFEFFVRKLPGGDEPKRNFLVAAGLEQALDFLEGMRFRPDEIEWLRASGRFTPDFVDALAALRFSGDVDAMPEGTVFFPGEPILRVTAPLPEAQLAETRLINLLHFQTLIASKAARMTLAAPGKLLVDFGLRRAHGAEAGLLAARAACLAGFAGTSDVLAGRLWDFPLYGTMAHSFIQAHDDELAAFEHFALAQPDNLVLLIDTYDTEAAAEKLIPLAERLAAKGIRIQGVRLDSGDLAEHARRVRRILDRGGLGQVSIFASGSLDEYLLAAHTAEAVPIDGYGIGTRMDTSSDAPYLDCAYKLQEYAGIPRRKRSEGKATWPGRKQVYRYYDAEGKLQRDSLTLVDDAQPGEPLLRPVMRNGRRLAASPPLQTLRSHAMEQLGRLPEALRRLSPAPAHPVEIAGRLKSLVKAMDGHS

SEQ ID NO: 14021 - DNA, 1317 bp, Nocardia farcinica IFM 10152
  CDS (1)..(1317): transl_table=11
gtggacatccgcgaccaggtcaccacgagcaccgcgctgctgaccgatcaatacgagctcaccatgctggccgccgcgctcgccgacggttcggccgcgcgcacctgcgcgttcgaggtgttcgcccggcgcttgccgcacgggcgccgctacggcgtggtcgccggtaccgggcggttgctcgaggcgctgcggcacttccgcttcggcgagcccgagctcgcggtggtggcggggttcctcgacgagcgcacgctgaactggttgcgcgagtaccgcttcaccggcgacatcgacggctacccggagggcgagctgtactttcccggctccccgatcctgtccgtgcgcggcagtttcgccgagtgcgtggtgctggagacgctgatcctgtcgatcttcaaccacgacagtgccatcgcctcggcggcggcccgcatggtctcggccgccgacggccgccggatgatcgagatgggctcgcgccgcacccacgaagcggccgcacccgccgcggcccgggccgcctacctcgccggtttcgacgccacctcgaatctggaggcggtgcgccgctacggcgtgcccggcgcgggcaccagcgcgcacgcgttcaccctcctgcacagcggccgcgacggcgcgcacgaggccgaggcgttccgcagccaggtcgccgcgctcggcgtcggcaccaccctgttggtcgacaccttcgacatcaccgagggggtggcgaccgcgatccgggtggccggaccggagctgggcggcgtgcgcatcgactccggcgacctgggtgtgctggcccggcaggtccgcgagcaactggacgccctcggcgcgacgaagacccgcatcgtggtctccggcgacctcgacgagtacgcgatcgccgcgttgcgcgccgaacccgtcgacgtctacggcgtgggcacctcgctggtcaccggttccggcgcgccgaccgcgggcatggtctacaagctggtggaggtcgagggtgtgccggtggtcaagcgcagcagccacaaggaatcgcgcggcggtgccaagcgggcactgcggctgaccaagagctcgggcacgatcgtggaggagatcgtctacccggccactgccgagccgccgcccaccgacggcttcgaggccaggcagctgctggtgccgctggtgcgcggcggtgcggtcgtcgacgacctgccgacgctcaccgacgcccgcgacctcgtcgcgcgcggcctggtgagcctgccgtgggagggcctcaagctctccgacggcgaacccgccgtgcccaccaccttcgtctcctga

SEQ ID NO: 14022 - protein, 438 aa, Nocardia farcinica IFM 10152
MDIRDQVTTSTALLTDQYELTMLAAALADGSAARTCAFEVFARRLPHGRRYGVVAGTGRLLEALRHFRFGEPELAVVAGFLDERTLNWLREYRFTGDIDGYPEGELYFPGSPILSVRGSFAECVVLETLILSIFNHDSAIASAAARMVSAADGRRMIEMGSRRTHEAAAPAAARAAYLAGFDATSNLEAVRRYGVPGAGTSAHAFTLLHSGRDGAHEAEAFRSQVAALGVGTTLLVDTFDITEGVATAIRVAGPELGGVRIDSGDLGVLARQVREQLDALGATKTRIVVSGDLDEYAIAALRAEPVDVYGVGTSLVTGSGAPTAGMVYKLVEVEGVPVVKRSSHKESRGGAKRALRLTKSSGTIVEEIVYPATAEPPPTDGFEARQLLVPLVRGGAVVDDLPTLTDARDLVARGLVSLPWEGLKLSDGEPAVPTTFVS

SEQ ID NO: 14023 - DNA, 1404 bp, Legionella pneumophila str. Paris
  CDS (1)..(1404): transl_table=11
atgataaacatcacaggaacctacacagatcaatatcaattggctatggctcaagtatgttttttaaaagggcagcatgagcgtatagcgacattcgattatttttttcgtgctcttccttttaaaggaggctatgcgatttttgctggtttggaggatttactggatgttctcgaacaacttcgctttgaacaacaagatatagagtttttacaacatcagaatatgcatcctgactttattcgctatttgcaacagtttaagttcaatggcacggtgtatacgtcgctcgagggagatgttgtatttcctacgcggccagtggttattatcgaagccaatttgattgaagcacaaatcatagaaacattattattaaatattattaattttcagacacttattgcgacaaaagccagacgcatcaggcaggttgcgggggaacggattttaattgattttggactaaggagagcacagggtgctggagggtattttgcaagccgtgcagccatagttggtggctttgattcgacaagcaatgtcagagcagggcgtgattattcaattcctgtatcgggtactatggctcattcctttatccaaagttacgatagcgagatacaagctttttctgattatgctgaagcttggccggagaattgcatcttgctagtagatacttataatacgttgcaaagtggtgttcctaatgcaatcaaaatagctaaggaaatggagaagagaggacatagactcaaaggcattcgcctggatagtggcgatttggcatggttagccaagagggctcgccacatgttagacgaggtcggtttaaactatgtggctattacagcttccaatcaactcgatgaatatgtcatcaagaatttgttagagcaggatgcgcctattgacgcttttggtgtggggaccaatctcgcgattggtgccccggatgcggctcttgatggggtttataaattagcgtttataaatggtcaacctaggattaaactatcggatacccctgcaaagatcactattccttatcaaaagcaagtctacagggtgttcgaaagagatgggacatatcgaggtgcggatgttgtctgtctcaaaacggaaaaaaaaattgatatgatgcatcatccttttgaaattctaaaatcgctttcgataaagcactataaaaaagaagcattactgcataaagtgatggaaaacggcaaacggttactacctaaaaaatcacttggagaaatagccaggtttagccagcaatgttttgatcgattgcctttggaatacaagcgttttattaatcctcatatctataaagtaggtttaagtaccgagctgaaaatgaaaagagatcaactgatagctgaacactcaagataa

SEQ ID NO: 14024 - protein, 467 aa, Legionella pneumophila str. Paris
MINITGTYTDQYQLAMAQVCFLKGQHERIATFDYFFRALPFKGGYAIFAGLEDLLDVLEQLRFEQQDIEFLQHQNMHPDFIRYLQQFKFNGTVYTSLEGDVVFPTRPVVIIEANLIEAQIIETLLLNIINFQTLIATKARRIRQVAGERILIDFGLRRAQGAGGYFASRAAIVGGFDSTSNVRAGRDYSIPVSGTMAHSFIQSYDSEIQAFSDYAEAWPENCILLVDTYNTLQSGVPNAIKIAKEMEKRGHRLKGIRLDSGDLAWLAKRARHMLDEVGLNYVAITASNQLDEYVIKNLLEQDAPIDAFGVGTNLAIGAPDAALDGVYKLAFINGQPRIKLSDTPAKITIPYQKQVYRVFERDGTYRGADVVCLKTEKKIDMMHHPFEILKSLSIKHYKKEALLHKVMENGKRLLPKKSLGEIARFSQQCFDRLPLEYKRFINPHIYKVGLSTELKMKRDQLIAEHSR

SEQ ID NO: 14025 - DNA, 1404 bp, Legionella pneumophila str. Lens
  CDS (1)..(1404): transl_table=11
atgataaacatcacaggaacctacactgatcaatatcaattggctatggctcaagtgtgttttttaaaagggcagcatgagcgcatagcgacattcgattatttttttcgagctcttccttttaaaggaggctatgcgatttttgcgggtttggaggatttactggatgttctcgaacaacttcactttgaacaacaagatatagagtttttacaacatcagaatatgcatcctgactttattcgctatttgcagcagtttaagttcaatggcacggtgtatacgtcgctcgagggagatgttgtatttcctacgcggccagtggttattatcgaagccaatttgattgaagcacaaatcatagaaacgttattattaaatattcttaattttcagacacttattgcgacaaaagccagacgcatcagacaggttgcgggagaacggattttaattgattttggcctaaggagagcacagggtgctggagggtattttgcaagccgtgcagccatagtcggtggctttgattcgacaagcaatgtcagagcagggcgtgattattcaattcctgtatcgggtactatggctcattcctttatccaaagttacgatagcgagatacaagctttttctgattatgccgaagcatggccggagaattgtgtcttgctagtagatacttataataccttgcaaagtggtgttcccaatgcaatcaaaatagctaaggaaatggagaagagaggacatagactcaaaggcattcgcctggatagcggcgatttggcatggttagccaagagggctcgccacctgttagacgaggccggtttaaactatgtggctattacagcttccaatcaactcgatgaatatgtcatcaagaatttgttagagcaggatgcgcctattgatgcttttggtgtggggaccaatctcgcgattggtgccccggatgcggctcttgatggggtttataaattagcgtttataaatggtcaacctaggattaaattatcagatacccctgcaaagatcactattccttatcaaaagcaagtctacagggtgttcgaaagagatgggacatatcggggtgcggatgttgtctgtctcaaaacggaaaaaaaaattgatatgatgcatcatccttttgaagttctaaaatcactttcgataaagcactataaaaaagaagcattactgcataaagtgatggaaaacggcaaacggttactacctaaaaaatcacttggagaaatagccaggtttagccagcaatgttttgatcgattgcctttggaatacaagcgttttattaatcctcatatctataaagtgggtttaagtaccgagcttaaaatgaagagagatcaactgataactgaacactcaagataa

SEQ ID NO: 14026 - protein, 467 aa, Legionella pneumophila str. Lens
MINITGTYTDQYQLAMAQVCFLKGQHERIATFDYFFRALPFKGGYAIFAGLEDLLDVLEQLHFEQQDIEFLQHQNMHPDFIRYLQQFKFNGTVYTSLEGDVVFPTRPVVIIEANLIEAQIIETLLLNILNFQTLIATKARRIRQVAGERILIDFGLRRAQGAGGYFASRAAIVGGFDSTSNVRAGRDYSIPVSGTMAHSFIQSYDSEIQAFSDYAEAWPENCVLLVDTYNTLQSGVPNAIKIAKEMEKRGHRLKGIRLDSGDLAWLAKRARHLLDEAGLNYVAITASNQLDEYVIKNLLEQDAPIDAFGVGTNLAIGAPDAALDGVYKLAFINGQPRIKLSDTPAKITIPYQKQVYRVFERDGTYRGADVVCLKTEKKIDMMHHPFEVLKSLSIKHYKKEALLHKVMENGKRLLPKKSLGEIARFSQQCFDRLPLEYKRFINPHIYKVGLSTELKMKRDQLITEHSR

SEQ ID NO: 14027 - DNA, 1473 bp, Geobacillus kaustophilus HTA426
  CDS (1)..(1473): transl_table=11
atgaacgaaaaatatgccgatgacagtttgatgcttcatacggacttatatcaaatcaatatggtcgagacgtattgggaagatcgtatgcatgagcgccgcgccgtgtttgaagtgtttttccgcaagctgccgtttggcaacggctatgcggtgttcgctgggttggagcgcgtcattcagtttttgcaacaattccgcttctccgacagcgacatcgactatttgcggcatgagcttggctaccgcgacgactttttagactatttgcggacgcttcgtttcactggcacggtccgttcgatgcgagaaggggaaatcgtgttcgccaacgagccgattatgcgcattgaggcgccgctcgcggaggcgcagctcatcgaaaccgccattttaaacatcatcaatttccagacgctcatcgccacgaaagcgtcacgcattaagcatattctcggggatgagccggccttggagttcggcagtcggcgggcgcaggagatggatgcggcgctatggggcgcgcgcgcagcgtatatcggtgggattgaggcgacatcgaacgtgcgcgctgggaagctgtttggcattccggtcgccggaacgcatgcccattcgatgattcaagcgtatcaggatgaatacatcgcatttttgaagtatgcacgccgccataaagactgcgtatttctcgtcgatacgtacgatacgttgaagtcgggggtgccaaacgccattcgcgtcgctaaggagctgggcgaccaaatcaactttatcggcatccgcatcgacagcggcgatctcgcctatttgtcgaaagaagcgcggaaaatgctcgatgaagccggatttccgaacgcgaaaattttcgcctcgaacgatttggacgaagatacgattttaaacttgaagtcgcaaggggcgaaaattgacgtctgggggatcggcacgaagctgatcacggcgtacgatcagccggcgctcggtgccgtgtacaaaatggtggcgattgaaaacgaacgcggtgagatggtcgatacgatcaaaatcagcggcaatccagagaaagtgacgacgccggggctgaagcgggtgtaccgcatcgtcaacaaaatcaaccataaagcggaaggcgactacatcgccttagagagcgaaaacccgcagcaagaagagcggctgaaaatgttccatccggtgtacacgttcatcagcaaattcgtcaccaattttgaagcgcgtgatttgcatgtgacgatcttcgacaacggccggcttgtgtatacgtcgcccccgctttcggacattcaagcgtatgcgaaagaaagcttgcgcttgttttgggaggaatacaaacggacgctcaaccctgagcaatatcccgtcgatttgagccaagcgtgctgggacaataagatggaaaacatccgcaaggtgaaagaaacgatcgcgcgcatgtcgacgaaagagtaa

SEQ ID NO: 14028 - protein, 490 aa, Geobacillus kaustophilus HTA426
MNEKYADDSLMLHTDLYQINMVETYWEDRMHERRAVFEVFFRKLPFGNGYAVFAGLERVIQFLQQFRFSDSDIDYLRHELGYRDDFLDYLRTLRFTGTVRSMREGEIVFANEPIMRIEAPLAEAQLIETAILNIINFQTLIATKASRIKHILGDEPALEFGSRRAQEMDAALWGARAAYIGGIEATSNVRAGKLFGIPVAGTHAHSMIQAYQDEYIAFLKYARRHKDCVFLVDTYDTLKSGVPNAIRVAKELGDQINFIGIRIDSGDLAYLSKEARKMLDEAGFPNAKIFASNDLDEDTILNLKSQGAKIDVWGIGTKLITAYDQPALGAVYKMVAIENERGEMVDTIKISGNPEKVTTPGLKRVYRIVNKINHKAEGDYIALESENPQQEERLKMFHPVYTFISKFVTNFEARDLHVTIFDNGRLVYTSPPLSDIQAYAKESLRLFWEEYKRTLNPEQYPVDLSQACWDNKMENIRKVKETIARMSTKE

SEQ ID NO: 14029 - DNA, 1347 bp, Idiomarina loihiensis L2TR
  CDS (1)..(1347): transl_table=11
atgacaggtactgagcgacaagatcttggactgttcacagatttgtatcagctcacaatgctcgatgcgtatttgcaggaaggcatgcaagacgacgccgtttttacgttgttcgtccggcggcttccgaatgagcggaaatttctgttggctgcggggttagatcccttgcttgaaaccattgaaaacctgtcgttcagcgatgacgatttgcgctacctaaaagagcaaaacttctctcaacagcttatcgattatcttcgtgattttgagtttaccgggcaggtcagagcgcttcctgaaggtacggtattctttgaaaatgaacccattgtcgagattaaagcgccgctgccacaggcacagcttattgaaactctggtgatgaatcagatacacctgcaaaccttattggcctcaaagggggcgcgagttgcccatgcggcagaaaagcggccggttctggattttggtgcacgcagggtgcatggcattgatgcgggcaaaaaaggcagccgggcactgtatttaagcggtattgctgccacttcaaatatgctggctgcgcgaacttacggtttacctgtagctggcactatggcgcacagctatattcaggctcacgattcggaatatcaggcgttaaagaattttacccaggtttttccggaaaccgtcctactggtagacaccatcgataccttaaaaggtgtagaaaaagtcattcagttggccaatgagctgggcgatgactttaaagtaaaaggcattcggcttgactccggtgatttaggtgatcttgctgttaaagccagaaagctgctggacgaacataaccttcaccatttagagattattgccagcggcggtctggacgaacataaaattgcgcagttaatagctgatagagcacctatcgatggttttggtgtcggcaccggcatgggggtctccgacgatgcagcggcacttgatatggcctacaaactggttgaatacgcgggcaaggggcgtttgaagctttccagtggcaagcctgttttgccgggcgaaaagcaagtttttcgcgagtctggagacaacttccgtcgcgacactattgctcgtgcagaagagcagttacccggcgaaccattgctgaaaaaagtgatgcaaagcggcaaaaggttgccttctcaccagcgcgacattgaagaaattcgacagtacgcgcagcaacagttaaataaattacccgagtacgtctcctcgataagcagcaaggagaagtcttatccgatcgagataagcgataaactagcgagctaccagaaagaaataaccgaacaccttaaacaagagggttag

SEQ ID NO: 14030 - protein, 448 aa, Idiomarina loihiensis L2TR
MTGTERQDLGLFTDLYQLTMLDAYLQEGMQDDAVFTLFVRRLPNERKFLLAAGLDPLLETIENLSFSDDDLRYLKEQNFSQQLIDYLRDFEFTGQVRALPEGTVFFENEPIVEIKAPLPQAQLIETLVMNQIHLQTLLASKGARVAHAAEKRPVLDFGARRVHGIDAGKKGSRALYLSGIAATSNMLAARTYGLPVAGTMAHSYIQAHDSEYQALKNFTQVFPETVLLVDTIDTLKGVEKVIQLANELGDDFKVKGIRLDSGDLGDLAVKARKLLDEHNLHHLEIIASGGLDEHKIAQLIADRAPIDGFGVGTGMGVSDDAAALDMAYKLVEYAGKGRLKLSSGKPVLPGEKQVFRESGDNFRRDTIARAEEQLPGEPLLKKVMQSGKRLPSHQRDIEEIRQYAQQQLNKLPEYVSSISSKEKSYPIEISDKLASYQKEITEHLKQEG

SEQ ID NO: 14031 - DNA, 1344 bp, Silicibacter pomeroyi DSS-3
  CDS (1)..(1344): transl_table=11
atggcggttcggctggcgtatccatgggtgatccattccgaacgagggccatccgtggacatcgcaacccgcgtctataatcacaagtggaagatcgacccgatcgtccggtcgctgattgataccgatttctacaagttgctgatgtgccaatcggtgttccgcaacaagcccgacactcaggtcaccttttccctgatcaaccgcacgatgcggatcccgttggcccgtatcattgacgagggcgagttgcgcgagcagctcgatcatatccgctcgctgcggctgagccggggcgagagcacctggttgcgtggcaataccttttacggcaagcggcagatgtttaggccggacttcatggaatggttcgaggggctgcagttgccgccctatcatctggaacgccgcgacgatcaatatgagctgaccttcgagggcaactggcccgaggtgatgctgtgggagataccggcgctggcagtgctgatggaactgcgctcgcgcgcggtgctgcatgacatgcgccggttcgagctgcaggtgctttatgcccgcgcgatgacccgggtctgggagaagatcgaacgcctgcgcgggatcgacgggctgaccatcgccgatttcggcacccggcggcggcactccttcctctggcaggactggtgcgtgcaggcgatgatcgaggggctgggcgcgaaattcaccggcacctccaactgtctgatcgcgatgcgtcgcgaggtcgaggcgatcggcaccaatgcgcatgaactaccgatggtctatagcgccctggccgagaccgacaccgaactggcgcgcgcgccctacgacgtgctgagcgattggcacgaggagcatgacggcaacctgcgcatcatcctgcccgatacctatggcaccaaggggttcctcgaccgggcgccggactggctggcaggctggacaggcatccggatcgacagtggcgatccggccgagggggcggaaaccgccatctcctggtggaaggatcgcggcgagaacccgaccgacaagcgtatcatcttctcggacgggctcgacgtggacaagatcgccgaactgcatgcccggttttccgggcgggccaagatttccttcggctggggcaccctgctgaccaatgatttcaggggcctcgtgccggacgatgggctggcgccgttctcgctggtgtgcaaggcggtctcggccaatgggcacccgacggtgaaactgagcgacaatccggaaaaggcgatgggtcccgccgacgaggtcgcgcgctacaagcgggtgttcggagtggggcggcaaaccagctatgcggtcgaggtgtaa

SEQ ID NO: 14032 - protein, 447 aa, Silicibacter pomeroyi DSS-3
MAVRLAYPWVIHSERGPSVDIATRVYNHKWKIDPIVRSLIDTDFYKLLMCQSVFRNKPDTQVTFSLINRTMRIPLARIIDEGELREQLDHIRSLRLSRGESTWLRGNTFYGKRQMFRPDFMEWFEGLQLPPYHLERRDDQYELTFEGNWPEVMLWEIPALAVLMELRSRAVLHDMRRFELQVLYARAMTRVWEKIERLRGIDGLTIADFGTRRRHSFLWQDWCVQAMIEGLGAKFTGTSNCLIAMRREVEAIGTNAHELPMVYSALAETDTELARAPYDVLSDWHEEHDGNLRIILPDTYGTKGFLDRAPDWLAGWTGIRIDSGDPAEGAETAISWWKDRGENPTDKRIIFSDGLDVDKIAELHARFSGRAKISFGWGTLLTNDFRGLVPDDGLAPFSLVCKAVSANGHPTVKLSDNPEKAMGPADEVARYKRVFGVGRQTSYAVEV

SEQ ID NO: 14033 - DNA, 1260 bp, Neisseria gonorrhoeae FA 1090
  CDS (1)..(1260): transl_table=11
atgtgttctaatacgccccaagccgccaccagaaatcgggagacacgccatatgaccggcatcatacattcgctgctcgacactgacctctacaaattcactatgctgcaagtagtcctgcaccagtttccgcagacgcacagcctttacgaattccgctgccgcaacgtctcgaccgtctatccgcttgccgacatcagggaagacttggaagccgaactcgacgcgctctgccggctgcgcttcacccacgacgaactcggctatctgcgctccctgcgtttcatcaaaagcgactttgtcgattatctcgaactcttccagctccaacgccgctttgtcgaagtcggcacagacgataaaggccgtctgaacatccgtatcgaaggcccgatgatacaggcgatgttttttgaaatcttcatcctcgccattgtcaacgaactttacttccgccggctggaaacccctgccgttatcgaagaaggcgaacgccggcttcaagccaaagccgcgcgcctgaaagaaatcgccgccgcacagaatccggacgaaccgcccttcctgatttccgacttcggcacgcgccgccgctacaagctcgcgtggcaggaacacgtcatccgcaccctgctcgaagccgccccaagcatcgtgcgcggcacaagcaacgtttacctcgccaaaaaactcggcatcacccccatcggcaccatggcgcacgaattcctccaagccttccaagccctcgacgtgcgcctgcggaatttccaaaaggccgcgctcgaaagctgggtgcacgaataccggggcgatttgggcgttgccctgaccgacgtggtcggtatggatgccttcctgcgcgatttcgacctctatttcgccaaactctttgacgggctgcgccacgacagcggcgacccttacgtttggggcgacaaagcctacgcccactatcaaaagctcaaaatcgacagccgcaccaaaatgctgaccttctccgacgggctggacatcgaacgctcttgggcattgcaccaatatttcaaaggccgcttcaaaaccggcttcggcatcggcaccaacctcaccaacgatatggggcatacgcccttgaatatcgtgttgaaactggtcgaatgcaacgggcagtccgtcgccaagctctccgactcgccgggcaaaaccatgaccaacaacagcaccttcctcgcctacctgcgccaagtgttcggcatacccgaacctagaacgccgtaa

SEQ ID NO: 14034 - protein, 419 aa, Neisseria gonorrhoeae FA 1090
MCSNTPQAATRNRETRHMTGIIHSLLDTDLYKFTMLQVVLHQFPQTHSLYEFRCRNVSTVYPLADIREDLEAELDALCRLRFTHDELGYLRSLRFIKSDFVDYLELFQLQRRFVEVGTDDKGRLNIRIEGPMIQAMFFEIFILAIVNELYFRRLETPAVIEEGERRLQAKAARLKEIAAAQNPDEPPFLISDFGTRRRYKLAWQEHVIRTLLEAAPSIVRGTSNVYLAKKLGITPIGTMAHEFLQAFQALDVRLRNFQKAALESWVHEYRGDLGVALTDVVGMDAFLRDFDLYFAKLFDGLRHDSGDPYVWGDKAYAHYQKLKIDSRTKMLTFSDGLDIERSWALHQYFKGRFKTGFGIGTNLTNDMGHTPLNIVLKLVECNGQSVAKLSDSPGKTMTNNSTFLAYLRQVFGIPEPRTP

SEQ ID NO: 14035 - DNA, 1167 bp, Bacteroides fragilis NCTC 9343
  CDS (1)..(1167): transl_table=11
atgatcattcgtaccatactcgatacagacctttataaattcactacttcgtatgcttatatcaaactattcccgtacgcaataggcactttcagcttcaaagacagggacgggactgaatatagcgacgagtttgtggaaagattgagaacggaaatcagtcagctatcacacgtggcactgaccgaaaaagaactggaatatatgataaagaactgccgcttcctgcccagggtctattgggagtggctctcttctttccgtttccaacccgagaaaatagaaatccgtctggacgagaatcggcagcttcacatcgaagtgaacgactatctttacaaagcaacgctttatgaagtacctctactcgccatcgtttcggagataaagaaccaatcgtccggcaatgttgccaacctggaagacatcctgtacaaactgtccgaaaagacagaactgtccaataagcatcagctacttttctctgaattcggaacccgaaggcgcttttcgttcgatgtgcagaatcaagtcatcgggcacctgaaacagacagcccattactgtatcggcacttccaattgccatttcgccatgaaatacggcatgaagcccatgggtacgcatccccatgaatggttcatgtttcacggagcgcaattcggctataaacatgccaactatatggcccttgaaaattgggtaaatgtatacgatggcgaccttggcatcgccttgtccgacacttatacatctgccatctttctaagcaatctaagccgcaaacaggctaagttgtttgatggcgtgaggtgtgattccggtgatgaattccggttcatcgatcagctgaccgcacgttataaagagttgggcatcgacccgaccaccaagacaatcgtattcagtaacgcactcgactttgacaaagcactggatatccaggagtattgccagggaaagatccgttgctctttcggcatcgggacaaacctgaccaacgatacgggattcaagccatcaaacattgtcatgaagctatcgcaatgcaagatgaacatgaaccaggaatggcgcgaatgtgtgaaattatcagacgacatagggaaacatatcggcagcccggaagaggtgcgtgcctgtctatacgacttgcggttggagtaa

SEQ ID NO: 14036 - protein, 388 aa, Bacteroides fragilis NCTC 9343
MIIRTILDTDLYKFTTSYAYIKLFPYAIGTFSFKDRDGTEYSDEFVERLRTEISQLSHVALTEKELEYMIKNCRFLPRVYWEWLSSFRFQPEKIEIRLDENRQLHIEVNDYLYKATLYEVPLLAIVSEIKNQSSGNVANLEDILYKLSEKTELSNKHQLLFSEFGTRRRFSFDVQNQVIGHLKQTAHYCIGTSNCHFAMKYGMKPMGTHPHEWFMFHGAQFGYKHANYMALENWVNVYDGDLGIALSDTYTSAIFLSNLSRKQAKLFDGVRCDSGDEFRFIDQLTARYKELGIDPTTKTIVFSNALDFDKALDIQEYCQGKIRCSFGIGTNLTNDTGFKPSNIVMKLSQCKMNMNQEWRECVKLSDDIGKHIGSPEEVRACLYDLRLE

SEQ ID NO: 14037 - DNA, 1251 bp, Salmonella enterica subsp. enterica serovar Choleraesuis str
  CDS (1)..(1251): transl_table=11
ttgtttattgtactaaacgctcccgtgagaggacgcaacagcgcacctatgacacaattcgcttctcctgttctgcactcgttgctggatacagatgcttataagttgcatatgcagcaagccgtttttcaccactactatgatgtgcaggtagcggctgagtttcgttgccgtgacgacgacctgctgggtatttatgccgatgctattcgcgagcaggtggacgcgatgcagcacctgcgcctccaggaggacgagttccagtggctctccggcctgcccttttttaaaccggattatctgaactggttacgcgagtttcgctataacccggctcaagtctgtgtcaccaacgataacggcaagctgaatattcgcttaaccggcccgtggcgtgaagtcattatgtgggaagtgccgctgctggccgtgatcagtgagctggttcatcactaccgctcgccaaacgcgggcgttgatcaggcgctcgacgcgctggaaagtaagctggttgatttcactgcgttaaccgccaatctcgatatgtcccgcttccacctgatggacttcggcacccgccgccgtttctctcgtgaagtgcagcaggcgatagttaaacgtctccagcaggagtcatggttcgtcggcaccagcaactatgatctcgcgcgtcgcctggcgctgacgccgatgggcactcaggcgcacgaatggttccaggcgcatcaacaaatcagtccggacctggcgaccagccagcgtgccgcgttggccgcctggcttaacgaatatccggaccagcttggtatcgcattgacagattgcattacaatggatgcgtttttacgcgatttcggcattgaattcgccagccgttatcaggggttacgccacgactcaggagaccctgtcgcatggggcgaaaaggcgattgcccattatgaaaagctggggattgatccgctgacaaaaacgctggtcttttcagataaccttgatctgccaaaggcagtcgagctctatcgccatttcgcctctcgcgtgcagttaagcttcggcatcggtacccgcctgacatgcgatatccctcaggtaaaaccgctcaatatcgtgattaagctcgtggaatgtaacggaaagccggtggctaaactttccgacagccccggtaaaacgatctgtcatgataaagcgtttgtgcgcgcgctgcgtaaagcgttcgatctcccgcaggtgcgtaaagcaagttaa

SEQ ID NO: 14038 - protein, 416 aa, Salmonella enterica subsp. enterica serovar Choleraesuis str
MFIVLNAPVRGRNSAPMTQFASPVLHSLLDTDAYKLHMQQAVFHHYYDVQVAAEFRCRDDDLLGIYADAIREQVDAMQHLRLQEDEFQWLSGLPFFKPDYLNWLREFRYNPAQVCVTNDNGKLNIRLTGPWREVIMWEVPLLAVISELVHHYRSPNAGVDQALDALESKLVDFTALTANLDMSRFHLMDFGTRRRFSREVQQAIVKRLQQESWFVGTSNYDLARRLALTPMGTQAHEWFQAHQQISPDLATSQRAALAAWLNEYPDQLGIALTDCITMDAFLRDFGIEFASRYQGLRHDSGDPVAWGEKAIAHYEKLGIDPLTKTLVFSDNLDLPKAVELYRHFASRVQLSFGIGTRLTCDIPQVKPLNIVIKLVECNGKPVAKLSDSPGKTICHDKAFVRALRKAFDLPQVRKAS

SEQ ID NO: 14039 - DNA, 1224 bp, Pseudomonas syringae pv. syringae B728a
  CDS (1)..(1224)
atgagcgagagcgccttttccaatcgcatcgtgcaaagcctgctcgataccgatttctacaagctgaccatgatgcaggccgtcctgcacaactacccgaacgtggacgtcgagtgggaattccgttgccgcaacggggaggaccttcgcccctatctggatgaaatcaagcaccagatcgagctgttgtgcgagctgtcgctaagccccgaacatctggcctttctggaacgcatcaccttcatcaaaccggattttctgcgctttctcgggctgttccgcttcaatacccgctacgtgaaaaccaccatcgagaatgacgaactgtgcattcgcctgcacgggccgtggctgcacgtcatcctgttcgaagtgccgctgctggccatcgtcagcgaagtgcgcaaccggcatcgctacccggacaccctgctcagccaggcgcgggatcgtctgtatgacaagttcgaatggttgaccacgcatgccacgacggatgagctggccgagctgaaagtggcggacttcggcacgcgccggcggttttcctaccgcgtgcaggaagaaatgctcggcgtcctgaaaaacgactttccaggccagttcgtcggcaccagcaatgtgcatctggcccgccagcttgacctcaagcccttgggcaccatggcccacgaatggatcatggcccatcagcagctgggaccgcgtctgatcgacagtcagattgccgcgctcgattgctgggtccgtgaatatcgcggcctgctggggatcgcgctgaccgactgcatcaccaccgatgccttcctgaacgacttcgatctgtacttcgccaagctgttcgacggtttgcgccatgattcgggcgacccggtgaagtgggccgaaaaatgcatctcgcattaccagaagctcggtatcgacccgatgagcaagaccctggtgttttccgatgggctgaacctgcccaaggcgctcgatatctttcgcgcgttgcgcggacgcatcaatgtcagcttcgggatcggcaccaacctgacggccgacatccccggcattgcgccgatgaacatggtattgaaaatgacggcttgcgccggtcaggccgtggcgaagatctctgacgagcccggcaagacgcagtgcaaggacccgaactttgtcgcttacctgcggcatgtgttcaaggtgccggatttgccgagcccggaaaaacccgcttga

SEQ ID NO: 14040 - protein, 407 aa, Pseudomonas syringae pv. syringae B728a
MSESAFSNRIVQSLLDTDFYKLTMMQAVLHNYPNVDVEWEFRCRNGEDLRPYLDEIKHQIELLCELSLSPEHLAFLERITFIKPDFLRFLGLFRFNTRYVKTTIENDELCIRLHGPWLHVILFEVPLLAIVSEVRNRHRYPDTLLSQARDRLYDKFEWLTTHATTDELAELKVADFGTRRRFSYRVQEEMLGVLKNDFPGQFVGTSNVHLARQLDLKPLGTMAHEWIMAHQQLGPRLIDSQIAALDCWVREYRGLLGIALTDCITTDAFLNDFDLYFAKLFDGLRHDSGDPVKWAEKCISHYQKLGIDPMSKTLVFSDGLNLPKALDIFRALRGRINVSFGIGTNLTADIPGIAPMNMVLKMTACAGQAVAKISDEPGKTQCKDPNFVAYLRHVFKVPDLPSPEKPA

SEQ ID NO: 14041 - DNA, 1326 bp, Corynebacterium jeikeium K411
  CDS (1)..(1326): transl_table=11
atggagcgggtgaacgaaaacaacacccgctcctccgcacttcttacggacaaatacgaactcaccatgctcgaggccgcgatcctcgacggcactgtcgaccgcgcctgcaccttcgaggtgttcacccgccgcctgcccaacgagcgccgctacggcgtgatcgccggcaccgcccgcgtactgcaggccgtgcgcgatttcgtatttaccgaccagcagctggatcgcatcgacttcctgcgggacgaaaccctggagtacctgcgcaacttccgcttctccgggcagatcgacggctaccgcgaaggcgagctgtacttcccccactcccccgtcctgacggtccggggcaccttcggcgagtgcgtaatcctggagacagtgatcctctccatcctgaacatggattccgccgtggctagtgccgccgcccgcatggtcaccgccgcaggtgaccgtcccatcatcgacatgggtgcacgccgcacccacgaatacgccgccgtcacctccgcccgggccgcctacctcgccgggttcgtcgccacctccaacatggaggccgcccagcgctacggcatcccggcctccggcaccgcagcccacgcctggaccctgctgcacacccgcccggacggcacccccgacgagctcgcagccttcaaggctcagatcgccgccctgggaacagacaccaccctgttggtggatacctacgacatcactcaaggcgtggaaaacgccgttgccgccggcggcacggaactgggagccgtgcgcatcgactccggcgatttgggcgtgctgacccgccgggtgcgcgaccagctggattccttgggggcaaagaacaccaagatcgtggtctcctccgacatggacgaattctccatcgccgccttgcgcagcgagccggtggattccttcggcgtgggcacctccgtcgttaccggctccggggcgcccaccgcggggctggtctacaagctcgtggaggtagacggcgtgcccgtcgccaagcgttcccgaggcaaggccagcctcggcggggcgaaggatgccgcccgctttagccgcccctccggcacggccgtcgaggaagtcaccttccccttgggtgcggaactgccccaggccgaagggctgaaaagcacccagctgaccatccccatggttcgcgacggcgagctcgtggacggcctgcccaccctcgaggaatcccgcgagcactgcgccaagcagctagtttgcctgccctgggaaggcctggctctcacccgcgacgagcccgccctgcaggtgcgccatatcagccgcatttaa

SEQ ID NO: 14042 - protein, 441 aa, Corynebacterium jeikeium K411
MERVNENNTRSSALLTDKYELTMLEAAILDGTVDRACTFEVFTRRLPNERRYGVIAGTARVLQAVRDFVFTDQQLDRIDFLRDETLEYLRNFRFSGQIDGYREGELYFPHSPVLTVRGTFGECVILETVILSILNMDSAVASAAARMVTAAGDRPIIDMGARRTHEYAAVTSARAAYLAGFVATSNMEAAQRYGIPASGTAAHAWTLLHTRPDGTPDELAAFKAQIAALGTDTTLLVDTYDITQGVENAVAAGGTELGAVRIDSGDLGVLTRRVRDQLDSLGAKNTKIVVSSDMDEFSIAALRSEPVDSFGVGTSVVTGSGAPTAGLVYKLVEVDGVPVAKRSRGKASLGGAKDAARFSRPSGTAVEEVTFPLGAELPQAEGLKSTQLTIPMVRDGELVDGLPTLEESREHCAKQLVCLPWEGLALTRDEPALQVRHISRI

SEQ ID NO: 14043 - DNA, 1293 bp, Rhodobacter sphaeroides 2.4.1
  CDS (1)..(1293)
atggtcgatatcgccacccgcgtctacaatcacaaatggaagatcgatccgatcgtccgctcgctgatcgacaccgacttctacaagctcctgatgtgccagtcggtgttccgcaacaggccggacacggtggtgcgcttcagcctcatcaaccgcacctcctcggtgcggctggccgagctgatcgacgagggcgagctgcgcgaacagctcgaccatatccgcacgctgagcctgtcgcgcggcgagagcaccttcctgcgcggcaacaccttctacggcaagcgccagatgttccgccccgacttcatggagtggttcgaaaacctgcggatgcccccctaccatctggagaagcgcgacgggcaatacgagctgaccttcgagggcaagtggcccgaggtcatgctgtgggagatcccggcattggccgtgctgatggagctgcgctcgcgcgcggtgctggccacgatggggcggttcgagctgcaggtgctctatgcccgcgccatgaccaagctctgggagaagatcgagcggctgaagcggatcgagcggctgaagatcgcggatttcggcacccggcggcggcattccttcctctggcaggactggtgcgtgcaggcgatgatcgaggggctgggcgatgccttcaccggcacctcgaactgcctgatcgccatgcggcgcgaggtcgaggccatcggcaccaatgcccacgagctgccgatggtctattccgccctggccacgacggacgaagacctcgcccgcgcgccctatcaggtgctggccgactggcacgaggagcatgacggcaacctccgcatcatcctgcccgacacctacggcaccgaaggcttcctcgcccgcgcgccggactggctctcgacctggacgggcatccgcatcgactcgggcgacccggcccagggcgccgagaccgcgatccgctggtggcagagccggggcgaggatccgcgccgcaagctcgtgatcttctcggacgggctcgatgtcgagaagatcgaggagctgcaccgccagttccacggccaggtgaaggtcagcttcggctgggggacgatgttcaccaacgatttccgcggcctcgtgaaggacgatgcgctggcccccttcagcctcgtctgcaaggcggtggcggcggacggacggcccacggtgaagctctcggacaatccgctgaaggcgatgggtcccgccgacgagatcgcgcgctacaagcgcgtcttcggcgtgggcgatcaggtggcctacgaagtgcaggtctga

SEQ ID NO: 14044 - protein, 430 aa, Rhodobacter sphaeroides 2.4.1
MVDIATRVYNHKWKIDPIVRSLIDTDFYKLLMCQSVFRNRPDTVVRFSLINRTSSVRLAELIDEGELREQLDHIRTLSLSRGESTFLRGNTFYGKRQMFRPDFMEWFENLRMPPYHLEKRDGQYELTFEGKWPEVMLWEIPALAVLMELRSRAVLATMGRFELQVLYARAMTKLWEKIERLKRIERLKIADFGTRRRHSFLWQDWCVQAMIEGLGDAFTGTSNCLIAMRREVEAIGTNAHELPMVYSALATTDEDLARAPYQVLADWHEEHDGNLRIILPDTYGTEGFLARAPDWLSTWTGIRIDSGDPAQGAETAIRWWQSRGEDPRRKLVIFSDGLDVEKIEELHRQFHGQVKVSFGWGTMFTNDFRGLVKDDALAPFSLVCKAVAADGRPTVKLSDNPLKAMGPADEIARYKRVFGVGDQVAYEVQV

SEQ ID NO: 14045 - DNA, 1134 bp, Xylella fastidiosa Ann-1
  CDS (1)..(1134)
atgatgcaggctgtgttgcatcaataccctggggcacaggtggagtacaggtttaaatgccgtacgcctggtgtggatctggcgcgtttcatcaacgaaatctctcatgagattgatgggctatgtgggctgtgtttttctaaggaggaactggattatttgcgcggcttgcgcttcatgaagccagatttcgttgatttccttggactgtttcatttagaccgtaaatacctgcaattgcgtgcctcgtcccaggtgccgggcgagattgaattggatattcgtggcccatggttacatacgattctgttcgaggtgccgttgttggcgattatcaatgaggtttggttccgcaatacaagcgtgttgaatcttgatgtgggtcgtgaccgattggatgccaaggtacgtttacttaaagacgagagtggttatgaggagtgcagcattgctgactatggcacccgccgccgttactcgcggcagtggcatgccgaattattgccgttgttggcgcaaggtttagggtcgaacttcgttggtaccagtaacgtttatttcgccaagcagtatggctataccccattggggacgatggcacacgagtatctacaggcatttcaggcattgggaccgcgcctgcgtgattcccaggtggcagggttggaagcctgggcgcgtgagtaccgcggcgatttaggaattgcgttgtctgatgttgttgggttggatgcgtttttgggtgactttgacttgtatttttgcaagttgtttgacggaatgcgccacgactccggagatccatttaaatggggggagcgcatcattatgcatctggagtcgcatcgtatcgatccacgtaccaaggtgctggtattcagtgatggacttgatatgaataaggtcatgcggttgtaccagcacttccgtggccgttgtcgcttggcgtttggcgtagggacgagtttgacgaatgatctcgggccgacgccattgcagatcgtgattaaaatggtccgttgcaatggtcagccagtggcgaagctcagtgattctccgggtaaaagcatgtgcgatgatccagggtacctgcattacttgcgtcaggtgtttggggtatctgccgatgtttga

SEQ ID NO: 14046 - protein, 377 aa, Xylella fastidiosa Ann-1
MMQAVLHQYPGAQVEYRFKCRTPGVDLARFINEISHEIDGLCGLCFSKEELDYLRGLRFMKPDFVDFLGLFHLDRKYLQLRASSQVPGEIELDIRGPWLHTILFEVPLLAIINEVWFRNTSVLNLDVGRDRLDAKVRLLKDESGYEECSIADYGTRRRYSRQWHAELLPLLAQGLGSNFVGTSNVYFAKQYGYTPLGTMAHEYLQAFQALGPRLRDSQVAGLEAWAREYRGDLGIALSDVVGLDAFLGDFDLYFCKLFDGMRHDSGDPFKWGERIIMHLESHRIDPRTKVLVFSDGLDMNKVMRLYQHFRGRCRLAFGVGTSLTNDLGPTPLQIVIKMVRCNGQPVAKLSDSPGKSMCDDPGYLHYLRQVFGVSADV

SEQ ID NO: 14047 - DNA, 1464 bp, Leuconostoc mesenteroides subsp. mesenteroides ATCC 8293
  CDS (1)..(1464)
atggaaggaaaggacttgaacatgtattctgatgactcactggtgctccatacggatgcgtaccaaattaatatgatttatacttactggaaacaaggtattgatcaaaaacccgttgtttttgaggcttatttccgtaaaatgcctttcaataatggctatgttattttcagtggtttagaacgaattgtcaaaatattaaatcaactgaaatttactgatgacgatattgattatttacaatcattagacctatacgacactgaatttttaacgtaccttaaaaactggcatttgactgcaacaatacgttcggcttatgagggtgaagtgatgttcaacaatgaaccgcttttgcaagttgaaggacctctggtcgatgctcaattattggaaactttactgctcaatattatcaactttcagacattgattgctactaaagcggctcgtattgctagtgtaacaaatggtgaccccctattagagtttggtacacgtcgtgctcaggaattggacgctgcgctttggggtacccgtgctgcttttattggtggctttgatgctacatctaatgttcgtgcaggaaaactattcaatattcctatttctggcacacatgctcatgcgcttgttcaagcttaccacaacgattatgatgcttttcatgcctacgcagcaacacataaaaatgttgtttttctagtagatacatttgacacactaaaatctggtgttccaaacgctatcaaagtagcccgtgagtttggagataagattaattttcaaggggttcgaattgattcaggtgacatggcatacctttctaaaaaagttcgtatcatgttagatgaagcaggattcacgaatgccaaaatttatgcatcaaatgatttagacgaaaacaccattttaaatcttaaaattcagggtgcaaaaattgatgtctggggaattggcacaaaattaatcacagcatatgatcaacctgccttaggtgcggtatacaagatggttagtatcgacggcgatgacacaattaaattgtcaaacaacgttgaaaaaatctcaacccctggaaaaaagcaagtttggcgaataacagatagtaaagatggcaaatctgaaggtgattatttgactttcgatgatgaaaatcctagccaattggaaactttgcacatgtttgatcccaatcatcctgttatttctaaaaacattaaaaatttcgatgcacaaccgatgctacatgatatttttgttgagggtgacctaatttatgatttgcctgatattactacaattaaaagctacgccaaacattcgttaaacgatctatgggatgaatacaaacgtatactgaatcctgaaacctatcctgttgacttatctcaaaagctatatgatgctaaaatgaatttaattcatgacattcgaaacaatatacaggagatgaccaaatga

SEQ ID NO: 14048 - protein, 487 aa, Leuconostoc mesenteroides subsp. mesenteroides ATCC 8293
MEGKDLNMYSDDSLVLHTDAYQINMIYTYWKQGIDQKPVVFEAYFRKMPFNNGYVIFSGLERIVKILNQLKFTDDDIDYLQSLDLYDTEFLTYLKNWHLTATIRSAYEGEVMFNNEPLLQVEGPLVDAQLLETLLLNIINFQTLIATKAARIASVTNGDPLLEFGTRRAQELDAALWGTRAAFIGGFDATSNVRAGKLFNIPISGTHAHALVQAYHNDYDAFHAYAATHKNVVFLVDTFDTLKSGVPNAIKVAREFGDKINFQGVRIDSGDMAYLSKKVRIMLDEAGFTNAKIYASNDLDENTILNLKIQGAKIDVWGIGTKLITAYDQPALGAVYKMVSIDGDDTIKLSNNVEKISTPGKKQVWRITDSKDGKSEGDYLTFDDENPSQLETLHMFDPNHPVISKNIKNFDAQPMLHDIFVEGDLIYDLPDITTIKSYAKHSLNDLWDEYKRILNPETYPVDLSQKLYDAKMNLIHDIRNNIQEMTK

SEQ ID NO: 14049 - DNA, 1242 bp, Psychrobacter sp. 273-4
  CDS (1)..(1242)
atgaccgttacccatacttctacaacttttgagcccattattacctcgttacttgataacgatttgtacaaatttaccatgctgcaagccatgctacatcagtttccgcagactcatggtgtctaccgctttcgctgccgtaataataaagatgccgcttatccacttgctgatatcaaagacgcattagaaaaacaactagacagcttatgtgaactgcgatttttagaagatgaactagaatacttgcgtggtttacgctttatgcgttcagacttcgttgattacttggagttgtttaagttaaaacgtcgttttatcacggtgactaccgatgataaaggtcgcctatttatcgatatcgaaggtccgatgattcaggcgatgttcttcgaagtgttcgtgctagccattgttaatgagctatatttcaaggcgttaaccgacgctagcgtacttgaagaagggcagcgccgcctagatgaaaaagttgaattattgcatcgttatgctgccgaacaagcaggcaacagccgtgatattccgccttttatcgtcgctgattttggtacacgtagacggtttaataaagactggcaagcccatgtggttgaaactttgcacaaggctgaaccaaaaatagtgggcggcacctccaacgtttatttggcaaaaaagcttggcatgacgccaattggtacgatggcacatgagtttatgcaggcatttcaggcattggatgtgcgcctacgtgattcacaaaaagcagcgcttgaggcttgggtacacgaatatcgcggtgatttgggtattgcgctgaccgatgtcgttggcatggatgcgttcttacgtgattttgatttgtattttgccaagctttttgatggtctgcgccatgatagtggcgacccgtatctttggggtgataaggcgattgcccattataaaaagctaaaaatagacccaagaactaaggtgttaacctttagtgatggcttggatctgaataaggcgtgggatttacatcaatattttaaaggtcaaattaaaaccagctttggtattggcaccaatctcaccaatgatatgggcatcacaccgttaaatatcgttctaaaattggttgaatgtaatggacagccagtcgctaagctgtctgatagcccaggcaagacaatgatcaataatgatacctatcttgcctatctgcgccaagtgtttgacgtcgatgagccagaatag

SEQ ID NO: 14050 - protein, 413 aa, Psychrobacter sp. 273-4
MTVTHTSTTFEPIITSLLDNDLYKFTMLQAMLHQFPQTHGVYRFRCRNNKDAAYPLADIKDALEKQLDSLCELRFLEDELEYLRGLRFMRSDFVDYLELFKLKRRFITVTTDDKGRLFIDIEGPMIQAMFFEVFVLAIVNELYFKALTDASVLEEGQRRLDEKVELLHRYAAEQAGNSRDIPPFIVADFGTRRRFNKDWQAHVVETLHKAEPKIVGGTSNVYLAKKLGMTPIGTMAHEFMQAFQALDVRLRDSQKAALEAWVHEYRGDLGIALTDVVGMDAFLRDFDLYFAKLFDGLRHDSGDPYLWGDKAIAHYKKLKIDPRTKVLTFSDGLDLNKAWDLHQYFKGQIKTSFGIGTNLTNDMGITPLNIVLKLVECNGQPVAKLSDSPGKTMINNDTYLAYLRQVFDVDEPE

SEQ ID NO: 14051 - DNA, 1179 bp, Ralstonia eutropha JMP134
  CDS (1)..(1179)
atgatcatccaatccctgctcgacaccgacctgtacaagttcacgatgatgcaggtggtgctgcaccatttcccgcaggcccaggtcgagtaccgcttcaagtgccggaacgcggatgttgacctgactccgtatgtcgacgagatccgcgcggaagtggcccacctgtgcagccttcgcttctcggatgacgaacttgcctacctgcgtagcatgcgcttcatcaagagcgatttcgtcgatttcctcgcgctgttccacctgaacgagaaatacgtgtcgatcgagccggcgccgcagggcaatggtgaaatcgagattgcgatccgcggctcgtggctgcacacgatcctgttcgaggtgccgctgctggccatcgtcaacgaggtttatttccgggccacccagccgcagccggacttcgccgaggggcgtcgccggctggaacagaagctgacgctgctgcgggcgccgaagtaccgcgactgcgtgattgccgactatggcacgcgccggcgcttctcgcgcgactggcaggaggaaatcctgctggcgacacgcaagacgctgggggcgcaactggccggcaccagcaacgtgctttttgcataccggcacaatatggtgccgctggggaccatggcccatgagtacctgcaggcgtgccaggcactgggtccgcgcctgcgcgactcacaggtattcgcgctggagaactgggcgcgcgaataccgtggcgacctgggcatcgcgctgtcggacacctacggcttcgacgcgttcctgcgggacttcgatctgtttttctgcaagctgttcgatggcgttcggcatgattccggtgacccgttcctgtggggcgagaagatgctcgcgcactacgcggccaatcgtgtcgatccgctcggcaagacgctgatcttcagcgacagcctcgatatcccgcgcgtgatcgagctgtacgagcggttccatggccgctgcaagctggcattcggcgtcggcaccaacctgaccaacgacctcggctacacgccgttgcagatcgtcatcaagatggtccgctgcaacggccagccggtggccaagctgtcggataccccggaaaagaccatgtgcgacgaccccggctacctggcctacctgcgtcaggtattcgacgttaaggcgtccgcgtag

SEQ ID NO: 14052 - protein, 392 aa, Ralstonia eutropha JMP134
MIIQSLLDTDLYKFTMMQVVLHHFPQAQVEYRFKCRNADVDLTPYVDEIRAEVAHLCSLRFSDDELAYLRSMRFIKSDFVDFLALFHLNEKYVSIEPAPQGNGEIEIAIRGSWLHTILFEVPLLAIVNEVYFRATQPQPDFAEGRRRLEQKLTLLRAPKYRDCVIADYGTRRRFSRDWQEEILLATRKTLGAQLAGTSNVLFAYRHNMVPLGTMAHEYLQACQALGPRLRDSQVFALENWAREYRGDLGIALSDTYGFDAFLRDFDLFFCKLFDGVRHDSGDPFLWGEKMLAHYAANRVDPLGKTLIFSDSLDIPRVIELYERFHGRCKLAFGVGTNLTNDLGYTPLQIVIKMVRCNGQPVAKLSDTPEKTMCDDPGYLAYLRQVFDVKASA

SEQ ID NO: 14053 - DNA, 1200 bp, Burkholderia cepacia R18194
  CDS (1)..(1200)
atgatcatcacttcgctgctcgacacggatctctacaagttcacgatgatgcaggtcgtcctgcatcacttccccgctgcaagcgtcgaataccgtttccgctgccgcacgcccggcgtcgatctcgtgccgtacatcgacgagatccgcgacgaggtgcgcggcctgtgcgcgctgcgtttttccgacgtcgaactcgactacctgcggcggatgcgcttcatcaaaagcgatttcgtcgatttcctcgcgctgttccacctgaacgagaagtacatctcgatcacgccgtcgccgaagggcaacggcgaaatcgacatcgagatcatcgggccgtggctgcacacgatcctgttcgagatcccggtgctcgcgatcgtcaacgaagtgtatttccgcaacacgcagcgcgagcccgactatcgcgaaggccgcgaacggctgtgcgagaaaatcaagctgctcggtgcgaagcccgagttcgccgactgcaagatcgccgactacggcacgcgccggcgcttctcgaaggtctggcacgaggaagtcgcgctcaccctgcgcgacggcctcggcccgcagttcgcgggcacgagcaacgtgctttatgcgatgaagcacggcatcacgccgctcggcacgatggcgcacgagtacctgcaggcgtgccaggcgctcggcccgcggctgcgcgattcgcagatctacggcttcgagatgtgggcgaaggaataccgcggcgacctcgggatcgcgctatcggacgtctacgggatggatgcattcctgaacgacttcgacatgtacttctgcaagctgttcgacggcgcgcgccacgattcgggcgatccgttcgaatggggcgagcggatgctgcgccattacgagtcgaaccgttgcgacccgcggaccaaggtgctcgtgttctcggacgcgctcgacatcccgaaggtcatgcagttgtacgaacggttccgcggccgctgcaagctcgcgttcggtgtcggcacgaacctcaccaacgatctcggctacgtgccgctgcagatcgtgatcaagatggtccgctgcaacggccagccggtcgcgaaactgtcggattcgccgggcaagagcatgtgcgacgacaaggcgtatctcgcatacctgcgccaggtgttcggcatcgcgcagccggtcgaggaagacgcgtcgaagtaa

SEQ ID NO: 14054 - protein, 399 aa, Burkholderia cepacia R18194
MIITSLLDTDLYKFTMMQVVLHHFPAASVEYRFRCRTPGVDLVPYIDEIRDEVRGLCALRFSDVELDYLRRMRFIKSDFVDFLALFHLNEKYISITPSPKGNGEIDIEIIGPWLHTILFEIPVLAIVNEVYFRNTQREPDYREGRERLCEKIKLLGAKPEFADCKIADYGTRRRFSKVWHEEVALTLRDGLGPQFAGTSNVLYAMKHGITPLGTMAHEYLQACQALGPRLRDSQIYGFEMWAKEYRGDLGIALSDVYGMDAFLNDFDMYFCKLFDGARHDSGDPFEWGERMLRHYESNRCDPRTKVLVFSDALDIPKVMQLYERFRGRCKLAFGVGTNLTNDLGYVPLQIVIKMVRCNGQPVAKLSDSPGKSMCDDKAYLAYLRQVFGIAQPVEEDASK

SEQ ID NO: 14055 - DNA, 1224 bp, Pseudomonas fluorescens PfO-1
  CDS (1)..(1224)
atgagcgagagtgtgtttgccgatcgcatcgtgcagaacctgctcgacaccgacttctacaaactgacgatgatgcaggcggtgctgcacaactaccccaacgtcgaagtcgaatgggagtttcgttgccgtaacagtgaagatctgcgcccgtatctggcggagatccgcttccaggtcgagcgtctggccgagttgagcctgagcgccgatcagttgagtttcctggagcgcatcagcttcctcaaacctgacttcctgcgtttcctcggcctgttccgcttcaacctgcgctacctgcacaccggtatcgagaacggcgagttgttcatccgcctgcgcgggccgtggctgcatgtgattctgttcgaagtgccgctgctggcgatcgtcagcgaagtgcgcaaccgctatcgctaccgtgaaacggtgctggaacaggcccgcgaacagctgtatcgcaagttcgactggttgaccgccaatgcctcggccgaagagttgtcgcagttgcaggtcgccgatttcggcacacgccggcggttttcctaccgcgtgcaggaagaagtggtgaacgtgctcaagcacgatttccccggacgcttcgtcggcaccagcaacgtgcacctgtcccgcgaactggacatgaaaccgctgggcaccatggcccacgagtggatcatggcccaccagcaactcggcccgcgactgatcgacagccagatcgccgccctcgattgctgggttcgcgagtaccgcggcctgctggggatcgccctcacagactgcatcactaccgatgccttcctcggcgatttcgatctgttcttcgccaagctgttcgacggtctgcgccacgattccggggacccggtgctgtggggcgaaaaatgcatcgcccactatcacaagctcggcatcgacccgatgagcaagaccctggtgttctccgacagcctgaccctgcccaagtcgctggagatcttccgtgcgttgcgcggccggatcaatgtcagcttcggcatcggcaccaacctgacctgtgacattccgggtgtcgaaccgatgagcatcgtgcttaaaatgaccgcctgcaacggccaaccggtggcgaagatctccgacgagccgggcaagacccactgcaaagacccgaatttcgtcgcctatttgcgacacgttttccaggttcctgccgtttccagcctttccagcaaggagtga

SEQ ID NO: 14056 - protein, 407 aa, Pseudomonas fluorescens PfO-1
MSESVFADRIVQNLLDTDFYKLTMMQAVLHNYPNVEVEWEFRCRNSEDLRPYLAEIRFQVERLAELSLSADQLSFLERISFLKPDFLRFLGLFRFNLRYLHTGIENGELFIRLRGPWLHVILFEVPLLAIVSEVRNRYRYRETVLEQAREQLYRKFDWLTANASAEELSQLQVADFGTRRRFSYRVQEEVVNVLKHDFPGRFVGTSNVHLSRELDMKPLGTMAHEWIMAHQQLGPRLIDSQIAALDCWVREYRGLLGIALTDCITTDAFLGDFDLFFAKLFDGLRHDSGDPVLWGEKCIAHYHKLGIDPMSKTLVFSDSLTLPKSLEIFRALRGRINVSFGIGTNLTCDIPGVEPMSIVLKMTACNGQPVAKISDEPGKTHCKDPNFVAYLRHVFQVPAVSSLSSKE

SEQ ID NO: 14057 - DNA, 1197 bp, Burkholderia fungorum LB400
  CDS (1)..(1197)
atgattattacttcgctgctcgacaccgatctgtacaagttcacgatgatgcaagtggtcttgcatcactttcccgcagcgaacgtcgaatatcgcttccgttgccgcacgccgaacgtcgatctcgtgccgtatatcggcgagattcgcgacgaagtgcgcaagctctgccaactccgcttcaccgacgacgaactcgactacctgcgccgcatgcgcttcatcaagggcgacttcatcgagtttctcgcgctgttccatctgaacgaaaaatacatttcgatcgggccttcgcccaagggcaatggcgaaatcgacatcgagatcaaggggccgtggctgcatacgatcctgttcgagattccgatgctcgcgatcgtcaacgaagtctacttccgcaacacccagcaaaagccggactatagcgaagggcgcggccgtctcgtcgagaagatcaagctcctcggcgcgcgtccggaattcgccgactgcaagatcgccgactacggtacgcgccgccgcttctcgaagcaatggcacgaggaagtgatcctcaagctcaaagagggcctcggcgagcagttcgccggcaccagcaacgtcttctacgcaatgaagcacggcctcacgccgctcggcacgatggcgcacgaatacctgcaggcgtgtcaggcgctcggtccgcggctgcgcgattcgcagattttcggcttcgagatgtgggccaaggaataccgcggcgacctgggtatcgcgctgtccgacgtgtacggcatggaggcgttcctgcgcgacttcgacatgtatttctgcaagctgttcgacggcgcgcgccacgattccggcgacccgttcgactggggcgaacgtctgctcaagcactacgaagcgaatcgctgcgacccgcgcaccaagatcctcgtattttccgacgcactcgacattcccaaagtgctgcaactctacgagcgctttcgcggccgctgcaagctggcgttcggcgtgggcacgaacctgaccaacgacctcggctataacccgctgcagatcgtcatcaagatggttcgctgcaacggccagccggtggcgaagctgtcggactcgccgggcaagaacatgtgcgaagacaaggcttacctcgcttacctgcgccaggtgttcggcattgcgcagcccgaggaagaggcggcgaagtaa

SEQ ID NO: 14058 - protein, 398 aa, Burkholderia fungorum LB400
MIITSLLDTDLYKFTMMQVVLHHFPAANVEYRFRCRTPNVDLVPYIGEIRDEVRKLCQLRFTDDELDYLRRMRFIKGDFIEFLALFHLNEKYISIGPSPKGNGEIDIEIKGPWLHTILFEIPMLAIVNEVYFRNTQQKPDYSEGRGRLVEKIKLLGARPEFADCKIADYGTRRRFSKQWHEEVILKLKEGLGEQFAGTSNVFYAMKHGLTPLGTMAHEYLQACQALGPRLRDSQIFGFEMWAKEYRGDLGIALSDVYGMEAFLRDFDMYFCKLFDGARHDSGDPFDWGERLLKHYEANRCDPRTKILVFSDALDIPKVLQLYERFRGRCKLAFGVGTNLTNDLGYNPLQIVIKMVRCNGQPVAKLSDSPGKNMCEDKAYLAYLRQVFGIAQPEEEAAK

SEQ ID NO: 14059 - DNA, 1428 bp, Oenococcus oeni PSU-1
  CDS (1)..(1428)
atgaatttatcaatggttaccgatctttacgaattatcaatggccaacggttatcagcaggccctcgaaaaagaagatggtgttttcgatgtgtttttccgccacgttcccgatgacggtagttttgtgatcacggctggactggctcaagccattcaagcagtttcagactttcatttcgacgaaaaagatttagcttatttaaagaaccttgatttatttacggataattttctgaattttctaaaaaaattcaaattcagtggaaatatttcggcaattccggaaggaacaccggtttttccaagggaaccactattaactatcagcggtcccttaattgaaactcaactttttgaaacaattttgctaaatatagtgaaccaccagtctctaatagctaccaaggctcggagaatctgttatgcagcccaaggaatgccgattatggaattcggcgcccgaagggctcaaggaccctcagcagcaaccttaggggctcgtgcggcaattattggcggatgcgcaagcacctctaatttattggcagctgaaaaatttggtttaaccgtcgccggaacaatggctcatagttggattgaagcttttcccaatgaactaagcgcctttgaaaaatgggccgaattatatcccgataattcttccctgcttgtcgacacatatgatgtcgtcagttcgggcgtgccaaacgcaattaaagtatttcaaaaacttgaagaaaagggccacaaaccaattggtatcagaatcgattcaggtgatattgcccatttatcaaaactagcaagaaaaatgctcgacgatgccggtttttccgaagctaaaattactgcttcgaatgccttggatgaaacaacgatccagtcattattgttcagccaaggggctccaattgataactttggagttggagaagaactaataaccagtgccagcgatcctgttttgagcggtgtttataaattagtagcaattaaaaaagagggtaaaattatcccgaaaataaaaataagcgacagtcgtgagaaggtcactctaccaggaatcaagcaactttatcgattgtataaaaaaggaacccgacaagcgtttgccgacgtaattgctttgaaagaagaacgcttgtcaaaaagaatgttggttaaatcggcagatccattagacacaaaacaaaatattaatctaatggattttgatttagaaacattgcaaacgaatatctttgaaaaaggaaaaattgtttacagctcacccactgtacagcaaatcaaaaaagtatctcagcagtcccttagcgaactgccagaagaaacaaaaagactaaagaatcctaataaatatcctgtttacattaccgagaagcttgctaaattacaggatgaattattgaacgatcaagaatattga

SEQ ID NO: 14060 - protein, 475 aa, Oenococcus oeni PSU-1
MNLSMVTDLYELSMANGYQQALEKEDGVFDVFFRHVPDDGSFVITAGLAQAIQAVSDFHFDEKDLAYLKNLDLFTDNFLNFLKKFKFSGNISAIPEGTPVFPREPLLTISGPLIETQLFETILLNIVNHQSLIATKARRICYAAQGMPIMEFGARRAQGPSAATLGARAAIIGGCASTSNLLAAEKFGLTVAGTMAHSWIEAFPNELSAFEKWAELYPDNSSLLVDTYDVVSSGVPNAIKVFQKLEEKGHKPIGIRIDSGDIAHLSKLARKMLDDAGFSEAKITASNALDETTIQSLLFSQGAPIDNFGVGEELITSASDPVLSGVYKLVAIKKEGKIIPKIKISDSREKVTLPGIKQLYRLYKKGTRQAFADVIALKEERLSKRMLVKSADPLDTKQNINLMDFDLETLQTNIFEKGKIVYSSPTVQQIKKVSQQSLSELPEETKRLKNPNKYPVYITEKLAKLQDELLNDQEY

SEQ ID NO: 14061 - DNA, 1380 bp, Trichodesmium erythraeum IMS101
  CDS (1)..(1380)
atggtacaagaatatctagaactttctctatctccagaagattacaccttgttaacagacctctatcaattaacaatgatagcttgctatgttggagaaaaaatagaccaacgacaagctagttttgagctatttgtgcgaaaactacctacaggttttggctatctcattgctatgggtttagcacaagcattagactatctcgagaaatttagatttagctctgagcaaattgacgccttaaagtcaacgggaatttttgctaatgcccctagtgaattttggtccttactagcagaagctaaattcactggaaatgtatgggcggtgaaagagggaacagccatttttccaaatcaacccctactgcggatagaagcaccgctttggcaagggcagttggtagaaacatatctactaaatacaatgaattaccaaaccctgatagcaacaaaagcagcgagaatgcgggatattgctggaaatagcaccaaattactagaatttggcacaagacgtgcatttagtccccaagctagtgttttggctgctcgtgctgctttggcaggaggaatggatgctacttctaatgttttggcagccttgaaattaggtcggaaaccagtaggaacgatggctcactctttggtgatggcaatatctgcagtggaaggtagtgaggaggatgcttttaaaagttttcagcgatatttccctacagccactttattgatagatacttatgatactttatcagctactcgtttattggcacgacgagttaaacagggtgaaatgcagataagtggggtcaggttagattctggaaatttggttgaattgtcccagaaggtgcgatcgctactgccaaaagtgaggatttttgctagtggagatatagatgagtgggaaatagctagacttcagaaggaaaatgcttgtattgatggatatggtattggtactaagttggtaactggtgttcctgtgaatggagtttataaactggtagaaatagatggtattcctgcgatgaaaaatactactggaaaagttagttatcctggtcgaaaacaaatatatagatatttggaaaatggtcaattgaaacaagattatttggggttaatggctgaagatgtattgagtcaaacagaacctcatactgattcttttgtaaaattaatgatacaagtagttaaaaatggggagatgctgcaaacatcagaaagtctagaagcgatcgctaaacgtactgctatttctgttgctagtttgccacctgaaactcgtagtttagaaaatcctattttgccaccaatgaaaatttctcataaattacaacaacttacacaaaaaactcaagctaacagctcttaa

SEQ ID NO: 14062 - protein, 459 aa, Trichodesmium erythraeum IMS101
MVQEYLELSLSPEDYTLLTDLYQLTMIACYVGEKIDQRQASFELFVRKLPTGFGYLIAMGLAQALDYLEKFRFSSEQIDALKSTGIFANAPSEFWSLLAEAKFTGNVWAVKEGTAIFPNQPLLRIEAPLWQGQLVETYLLNTMNYQTLIATKAARMRDIAGNSTKLLEFGTRRAFSPQASVLAARAALAGGMDATSNVLAALKLGRKPVGTMAHSLVMAISAVEGSEEDAFKSFQRYFPTATLLIDTYDTLSATRLLARRVKQGEMQISGVRLDSGNLVELSQKVRSLLPKVRIFASGDIDEWEIARLQKENACIDGYGIGTKLVTGVPVNGVYKLVEIDGIPAMKNTTGKVSYPGRKQIYRYLENGQLKQDYLGLMAEDVLSQTEPHTDSFVKLMIQVVKNGEMLQTSESLEAIAKRTAISVASLPPETRSLENPILPPMKISHKLQQLTQKTQANSS

SEQ ID NO: 14063 - DNA, 1434 bp, Campylobacter upsaliensis RM3195
  CDS (1)..(1434): transl_table=11
atgatttttctaaattcaatgaccaaaaaagcaatttttttgaaagcaaagttacaaattattctaaaggtagtatcagttttgacgacttttaaatatcatcttctttgtgatttttatgaatttactatgacgcaaggctatttaaaagagggttttgcggatagaatttgctattttgatattttttttagaaaggctcctgatggaggggcttttgccatttttgctggacttgaagatgttttagattttgtagaaaatttgcattttgatgcggaagaccttgcttttttgaggcaaaagggctttgatgaggactttttaaaatatttgaagcattttaaatttagtggtgaaatttattctgttaaagaaggtgcggtaatcttcgcaaatgaacctgtgatggtgattaaagctagggctattgaggcacaacttttagaaacttttttactttgcactctcaatcatcaaagtctaatcgccactaaggcaagtcgcattgtaagggcggctaggggtagggctgttttagaatttggagcaagaagagctcacggtggcgaggcagcacttaaaggtgctagagcagcgatgataggcggatgtttaggcacttcaaatacccttgcagctaaactttatagattaaaaacaagcggaactatggcacatgcttgggtgcaaatgtttgcagacgaatatgaggcttttagggcttttgtgaagctttaccctgaaaatgcaactttacttattgatacttatgattgctttttggggcttgaaaatgcgattagggtttttaaagaatttggcattaaaaagggggctgtgaggattgattctggaaatttatgtgaattaagccttaaaattcgcaaaagactcgatgaggttgggcttaaagagtgtaaaatcatcgcttcaaattctttggacgaaaaaagcattgaaaccctacttgaaaatggtgctaaaatcgatggatttggagttggagagcgtttaatcacggcttttagcgatgcgatttttggctgtgtttataagcttgtggcggtggagattaaaggagaaatttatcccaaaatcaaaatttctcaagactctttcaaaacgacaattccacattttaaaaagctctttcgcgtttatgagggagaaaaagctttgtatgatgagcttatgatttatgatgaagttttagaaaatttgccaccgaatttaaagcgtgaagagcttttgggctgtgtttttaaagagggaaaaagactttatgcaaataaaagcattgaaacattagccttttttacaaaagctcaactttcaagccttgatgaaggcttacttgatgcgaaaaaagcttacgagctaagactttctcctgctttgaaaagtcttaaaaaaagtctaagtcaaggttga

SEQ ID NO: 14064 - protein, 477 aa, Campylobacter upsaliensis RM3195
MIFLNSMTKKAIFLKAKLQIILKVVSVLTTFKYHLLCDFYEFTMTQGYLKEGFADRICYFDIFFRKAPDGGAFAIFAGLEDVLDFVENLHFDAEDLAFLRQKGFDEDFLKYLKHFKFSGEIYSVKEGAVIFANEPVMVIKARAIEAQLLETFLLCTLNHQSLIATKASRIVRAARGRAVLEFGARRAHGGEAALKGARAAMIGGCLGTSNTLAAKLYRLKTSGTMAHAWVQMFADEYEAFRAFVKLYPENATLLIDTYDCFLGLENAIRVFKEFGIKKGAVRIDSGNLCELSLKIRKRLDEVGLKECKIIASNSLDEKSIETLLENGAKIDGFGVGERLITAFSDAIFGCVYKLVAVEIKGEIYPKIKISQDSFKTTIPHFKKLFRVYEGEKALYDELMIYDEVLENLPPNLKREELLGCVFKEGKRLYANKSIETLAFFTKAQLSSLDEGLLDAKKAYELRLSPALKSLKKSLSQG

SEQ ID NO: 14065 - DNA, 1488 bp, Lactococcus lactis subsp. cremoris SK11
  CDS (1)..(1488)
atgggagaaaaaattatgccacatctatatcaagacgacagtcttacattacatacggacttatatcaaattaatatgatgcaaacttactttgagcttggaagacaccagcgccatgcagtctttgaagtttttttccgtgagatgccttttaaaaatggttatgctgtttttgctggtttagagcgaatggttgaatatttaaagaatctcaaattctcggaaacagatatcgcctatttgcgtgaattagactatccagaagattttctaaattatttaaaagaattacgctttacaggaacagtcagagccatgcaagaaggtcaacttgcctttgcaaatgaacctttggttcaggttgaaggttcacttgcggaatgccagttggtagaaacagctactttaaatattattaatttccaaactctgatagcaacaaaagccgcccgtatcaaatctgtaattggggaagaccctttgttggaatttggtacaagaagagctcaagaaatggatgcagcaatttggggaacaagagctgcggttatcgggggagctgatgcgacatcaaatgttcgggcggctaaaatctttggcttgaaagcaagtggaacacatgcgcatgctttagttcaatcttatggtaatgactatgaagcttttaaggcttatgctcaaacgcataaagattgtgttttcctcgttgatacttatgatactttacgtgttggggttccgtcagcgattaaagtggcgcgtgaatttggcgataaaattaattttcaaggtgtccgaattgattcaggagatatggcttatatctcgaaaaaagttcgtcagcaacttgatgaagctggctttactgacgcaaagatttatgcttcaaatgacttagatgaaaatactattttaagtttgaaaatgcaaaaagcaaaaattgatgtttggggagtcggaacaaaattaattaccgcctacgaccaaccagcgcttggtgcggtttataaattagtttctatggaagatgaacacggagaaatgcaagatacgattaagctttcaagtaatgcggaaaaagtatcgacaccaggtaaaaagcaagtttggcgcatcaccaaaaaagcagatggaaaatcagagggagattatatcactttttctgacgagcgtccagatgtagcagaagaaatctacatgttccacccgctctatacatacattaataaaaatgttcgggatttcaatgctaatccacttttaaaagatatttttattgatggtgagcttatttatcaacttccggaactacaggaaattaaaacatttgctcgtgaaaaccttgaggagctttgggatgaatataagcgtgatttgaatcctcaaccttacccagtagatttgtcacaagaattatggaatcataaaatgcgcctaatttcacaggtgcgtacaacagtatcaatgacgagattggatgatgaatga

SEQ ID NO: 14066 - protein, 495 aa, Lactococcus lactis subsp. cremoris SK11
MGEKIMPHLYQDDSLTLHTDLYQINMMQTYFELGRHQRHAVFEVFFREMPFKNGYAVFAGLERMVEYLKNLKFSETDIAYLRELDYPEDFLNYLKELRFTGTVRAMQEGQLAFANEPLVQVEGSLAECQLVETATLNIINFQTLIATKAARIKSVIGEDPLLEFGTRRAQEMDAAIWGTRAAVIGGADATSNVRAAKIFGLKASGTHAHALVQSYGNDYEAFKAYAQTHKDCVFLVDTYDTLRVGVPSAIKVAREFGDKINFQGVRIDSGDMAYISKKVRQQLDEAGFTDAKIYASNDLDENTILSLKMQKAKIDVWGVGTKLITAYDQPALGAVYKLVSMEDEHGEMQDTIKLSSNAEKVSTPGKKQVWRITKKADGKSEGDYITFSDERPDVAEEIYMFHPLYTYINKNVRDFNANPLLKDIFIDGELIYQLPELQEIKTFARENLEELWDEYKRDLNPQPYPVDLSQELWNHKMRLISQVRTTVSMTRLDDE

SEQ ID NO: 14067 - DNA, 1461 bp, Deinococcus geothermalis DSM 11300
  CDS (1)..(1461): transl_table=11
atgaccggaccttcctcgccccccacctcctcggccctcttcaccgatctctatcagctcacgatgatgcagggctactacgcccacggtctacacaccgaggaggcggtctttgatctgtacttccgcaagcagcccttcggcggcggcttcgcggtgtgggcggggctagaaccggcgctggagctgctcgaaaccctgcgcttcagcgaaacggacctcgcctacctggactcgctgggcctctttcagcccgagttccttacggcgctgcgcggctggaagttcagcgggcgcgtcacggccttccgcgagggcagcgtggtgttcgcgcacgagccgctgctgactgtcaccgcgccgctgtgggaggcgcagcttgtcgagacggcgctgctcaacaccctgaacttccagaccctggtggcgaccaaggcggcccgctgcgtcctggcggcagaggccagtccctacggcgggcagatcatcgagtttggtgcgcggcgagcgcaggggccggacggggcactcagcgccgcgcgtgccgcctttgtggggggagcagtcggcaccagcaacgtggaggcggggcgtatcttcggcctgccactgaccggcacgcacgcccacgcctgggtggagagctttcccgacgaattgacggccttccgcgcctatgccgccctgtaccccgacaacaccaccctgctgctcgatacggtggacacgctgcgcagcggtttgcccaatgcgctcattgtggcgcgggaactgcgcgcggcggggcatgagctgcgcggtgtgcggcttgacagcggtgacctcgcgtacctgtcgagccggattcgtgcggcgctcgacgcggcgggcttcccggacgtgaagattgtcgccagcaatgacctgtccgaatcggtgatcgcttcggtcatcgcagagggcgggcgggtggacgtgtacggcgtcggcacccagctggccacggcgggcggggagggcggcggcgcgctggggggcgtctttaaactcgcgcagctcggcggcgtgcccaagatgaagctgacgggcgaccccgccaaatccagcctgcccggggtgaagtatgtgtggcggggcgtgggcgaggacggacagtacgccctcgacgtgctgacgctgggcgaggtgccctgcccaggccagcgcgtcagcgaccctaccaacccgctgcgcttcgcgcggctgcccgacggcctcgcctggcgggatgcccgcgaggtggtgctcgagggcgggcggcgcaccggtccgcccgagacgctggggcaggcccaggcccgcgcccgcgctgacctcgcccggctcccagcgggtacgcgccgtcccctcaatccccatatctaccgcgtcagcctgggagatgacgtggccggattgcgcgaccgtgtggcagaggagctgcgtgcgcacgtggggagatga

SEQ ID NO: 14068 - protein, 486 aa, Deinococcus geothermalis DSM 11300
MTGPSSPPTSSALFTDLYQLTMMQGYYAHGLHTEEAVFDLYFRKQPFGGGFAVWAGLEPALELLETLRFSETDLAYLDSLGLFQPEFLTALRGWKFSGRVTAFREGSVVFAHEPLLTVTAPLWEAQLVETALLNTLNFQTLVATKAARCVLAAEASPYGGQIIEFGARRAQGPDGALSAARAAFVGGAVGTSNVEAGRIFGLPLTGTHAHAWVESFPDELTAFRAYAALYPDNTTLLLDTVDTLRSGLPNALIVARELRAAGHELRGVRLDSGDLAYLSSRIRAALDAAGFPDVKIVASNDLSESVIASVIAEGGRVDVYGVGTQLATAGGEGGGALGGVFKLAQLGGVPKMKLTGDPAKSSLPGVKYVWRGVGEDGQYALDVLTLGEVPCPGQRVSDPTNPLRFARLPDGLAWRDAREVVLEGGRRTGPPETLGQAQARARADLARLPAGTRRPLNPHIYRVSLGDDVAGLRDRVAEELRAHVGR

SEQ ID NO: 14069 - DNA, 1359 bp, Azotobacter vinelandii AvOP
  CDS (1)..(1359): transl_table=11
atgccgcacgatccgccatatctgcccgcccccggcgcactgctcaccgacctctaccagttgaccatgctgcagggctatgtcgagcgcgacatgctcgacggcgcggtgttcgagttcttcgcccgcaagccgccggcctgtcgcaatttctacctggccgccggactggagcaggtgctcgactacctggaacagttgcatttcacccagggcgagctcgactggctgagcggcctgggcctgttccgtccggcctttctcgactacctggccgggctgcgcttttccggcgaggtgcaggccatggccgagggcacgccgttcttcgccgacgagccgatcctgcgggtggtcgcgcccctgcccgaggcgcaactggtcgagtcgcggctgatcaacctgctgcatttccagacgctgatcgccagcaaggcggcgcggctgacgctggcggcgtcgggccggcgcctggtggacttcggcctgcgccgcgcccacggcgccgaggccgggctgctcgccgcccgcgccagctacctggccggcttccaggccagcgccacggtgctggccggcgcgcagttcggcatcccgctggccgggaccatggcgcattccttcgtccaggcccacctcgacgaggccgaggccttcgagcacttcgcccgcagcctgccgcagtcggtgctgctgctgatcgacacctacgacaccgaggcggcggcgcgcaaggtggtcgagctggcgccgcgcctggccgcggccggcatccgtgtccagggggtgcgcctggacagtggcgacctcggcgagcacgcccgccgggtgcgcgccatcctcgaccgtggcgggctgggcgacgcgaccgtcttcgccagcggcaacctggacgagtacgaggtgcgtcggctgctggcggagggcgcgccgatcgacggcttcggcgtcggcacccggctggatacctccagcgacgcgccgtacctggactgcgtctacaagctgcaggagtacgccggccagccgcggcgcaagcgttcggagggcaaggccacctggccggggcgcaagcaggtctggcggcgctacgacgacgacggccgctgccgtggcgacagcctgatgctggagggcgagacgggcgaggggcaggcgctgatccggccggtgatgcgcgacggacggcgcctggcgccttcgccatcgctgcgggaggtgcgcgctcatgccctgcgccagctcgacaccctgccggcggcgctgcgagcgctggagccggcgccgccctatccggtggcggtgagcgaggcgctgcgcgacctggcggagcgggccgaccggctggccgggctatga

SEQ ID NO: 14070 - protein, 452 aa, Azotobacter vinelandii AvOP
MPHDPPYLPAPGALLTDLYQLTMLQGYVERDMLDGAVFEFFARKPPACRNFYLAAGLEQVLDYLEQLHFTQGELDWLSGLGLFRPAFLDYLAGLRFSGEVQAMAEGTPFFADEPILRVVAPLPEAQLVESRLINLLHFQTLIASKAARLTLAASGRRLVDFGLRRAHGAEAGLLAARASYLAGFQASATVLAGAQFGIPLAGTMAHSFVQAHLDEAEAFEHFARSLPQSVLLLIDTYDTEAAARKVVELAPRLAAAGIRVQGVRLDSGDLGEHARRVRAILDRGGLGDATVFASGNLDEYEVRRLLAEGAPIDGFGVGTRLDTSSDAPYLDCVYKLQEYAGQPRRKRSEGKATWPGRKQVWRRYDDDGRCRGDSLMLEGETGEGQALIRPVMRDGRRLAPSPSLREVRAHALRQLDTLPAALRALEPAPPYPVAVSEALRDLAERADRLAGL

SEQ ID NO: 14071 - DNA, 1356 bp, Burkholderia vietnamiensis G4
  CDS (1)..(1356): transl_table=11
atggggcgatggcaggcctgcgcggtgacggcgccgccgcacgcgcgcgccggacggcttcacgatggtccgtcccgcattcgggtaacatggccggcagaccgggcggcgcgccgtgcgccggggccttgtcacgatattggcggtgccgcaaacatgatcattacttcgctgctcgatacggatctctacaagttcacgatgatgcaggtcgtcctgcatcactttcctgccgcaacggtcgagtaccgcttccggtgtcgcacgcgcggcgtcgatctcgtgccgtacatcgacgagatccgcgacgaggtgcgcggcctctgcgcgctgcgcttcaccgacgtcgagctcgactacctgcggcgcatgcgcttcatcaagagcgacttcgtcgatttcctcgcgctgttccacctcaacgagaagtacatttcgatcatgccttcgccgaagggcaacggcgagatcgacatcgtgatcgaagggccgtggctgcatacgatcctgttcgagatcccggtgctcgcgatcgtcaacgaagtctatttccgcaacacgcagcgcgagcccgactaccgcgaaggccgcgagcggctgcgcgacaagatcaagctgctcggcgcgaagcccgagttcgccgactgcaagatcgccgactacggcacgcgccgccgcttctcgaaggtgtggcacgaggaagtcgcgctgacgctgcgcgacgggctcggcccgcaattcgccggcacgagcaacgtgttctacgcgatgaagcacgacctcacgccgctcggcacgatggcgcacgaatacctgcaggcgtgtcaggcgctcgggccgcggctgcgcgattcgcagacctacggtttcgagatgtgggcgaaggagtatcgcggcgacctcgggatcgcgctgtcggacgtctacgggatggacgcgttcctgaacgacttcgacatgtacttctgcaagctgttcgacggcgcgcgccacgattcgggcgatccgttcgactggggcgagcgcatgctgcgccactacgaggcgaaccgctgcgacccgcgcaccaaggtgctcgtgttctcggacgcgctcgacatcccgaaggtcatgcagctgtacgaacggttccgcggccgctgcaagctcgcgttcggcgtcggcaccaacctgacgaacgatctcggctacgtgccgctgcagatcgtgatcaagatggtccgctgcaacggtcagccggtcgccaagctgtccgattcgccgggcaagagcatgtgcgacgacaaggcgtatctcgcgtacctgcgtcaggtattcgggatcgcgcagccggtcggcgacgacgcttcgcagtag

SEQ ID NO: 14072 - protein, 451 aa, Burkholderia vietnamiensis G4
MGRWQACAVTAPPHARAGRLHDGPSRIRVTWPADRAARRAPGPCHDIGGAANMIITSLLDTDLYKFTMMQVVLHHFPAATVEYRFRCRTRGVDLVPYIDEIRDEVRGLCALRFTDVELDYLRRMRFIKSDFVDFLALFHLNEKYISIMPSPKGNGEIDIVIEGPWLHTILFEIPVLAIVNEVYFRNTQREPDYREGRERLRDKIKLLGAKPEFADCKIADYGTRRRFSKVWHEEVALTLRDGLGPQFAGTSNVFYAMKHDLTPLGTMAHEYLQACQALGPRLRDSQTYGFEMWAKEYRGDLGIALSDVYGMDAFLNDFDMYFCKLFDGARHDSGDPFDWGERMLRHYEANRCDPRTKVLVFSDALDIPKVMQLYERFRGRCKLAFGVGTNLTNDLGYVPLQIVIKMVRCNGQPVAKLSDSPGKSMCDDKAYLAYLRQVFGIAQPVGDDASQ

SEQ ID NO: 14073 - DNA, 1200 bp, Burkholderia mallei 10229
  CDS (1)..(1200)
atgatcatcacttcgctgctcgataccgacctgtacaaattcacgatgatgcaggtcgtcctgcatcatttcccggccgcaagcgtcgaatatcgcttcaagtgccgcacgcccggcgtcgatctcgtgccgtacatcgacgagatccgcgccgaggttcgctcgctctgcgagctgcgcttcaccgattccgagctcgactatctgcgccggctgcgcttcgtcaagagcgatttcgtcgattttctcgcgctctttcacctgaacgagaagtacatctcgatcacgccgtcgcaaaagggcggcggcgagatcgacatcgagatcaaggggccgtggctgcacacgatccttttcgagattccggtactcgcgatcgtcaacgaggtgtacttccgcaacacgcagcgccggccggattaccgcgaagggcgcggccggctgcgcgagaagatcaagctgctcggcgtgaagcccgaattcgccgattgcaagatcgccgattacggcacgcgccgccgcttctcgaaggtctggcacgaggaggtgctgcgcacgctgcaggacgggctcgggccgcagttcgccggcacgagcaacgtctattacgcgatgacgcacgagatcacgccgctcggcacgatggcgcacgaatatctgcaggcgtgccaggcgctcggcccgcggctgcgcgattcgcagacctacggtctcgagatgtgggcgaaggaatatcgcggcgatctcggcatcgcgctgtccgacgtctacgggatggacgcgttcctgcgcgacttcgacatgtacttctgcaagctcttcgacggcgcgcgccacgattcgggcgatccgttcgactggggcgagcggctcatcaagcactacgaggagaaccgctgcgacccgcgcacgaaggtgctcgtgttctccgacgcgctcgatatcccgaaggtcatgcagctgtacgcacgctttcgcggacgctgcaagctcgcgttcggcgtcggcacgaacctcaccaacgatctcggctatcagccgttgcagatcgtcatcaagatggtgcgatgcaacgggcagccggtcgcgaagctgtcggattcgccgggcaagagcatgtgcgacgacaaggcctacctcgcgtatctgcgccaggtgttcgggatcacgcagccgcccgacgacgacgcgggcaagtaa

SEQ ID NO: 14074 - protein, 399 aa, Burkholderia mallei 10229
MIITSLLDTDLYKFTMMQVVLHHFPAASVEYRFKCRTPGVDLVPYIDEIRAEVRSLCELRFTDSELDYLRRLRFVKSDFVDFLALFHLNEKYISITPSQKGGGEIDIEIKGPWLHTILFEIPVLAIVNEVYFRNTQRRPDYREGRGRLREKIKLLGVKPEFADCKIADYGTRRRFSKVWHEEVLRTLQDGLGPQFAGTSNVYYAMTHEITPLGTMAHEYLQACQALGPRLRDSQTYGLEMWAKEYRGDLGIALSDVYGMDAFLRDFDMYFCKLFDGARHDSGDPFDWGERLIKHYEENRCDPRTKVLVFSDALDIPKVMQLYARFRGRCKLAFGVGTNLTNDLGYQPLQIVIKMVRCNGQPVAKLSDSPGKSMCDDKAYLAYLRQVFGITQPPDDDAGK

SEQ ID NO: 14075 - DNA, 1200 bp, Burkholderia cenocepacia AU 1054
  CDS (1)..(1200): transl_table=11
atgatcatcacttcgctgctcgacacggatctctacaagttcacgatgatgcaggtcgtcctgcatcacttcccggctgcaaacgtcgaataccgcttccggtgccgcacgcccggcgtcgatctcgtgccgtacatcgacgagattcgcgacgaggtgcgcggcctgtgctcgctgcgctttgccgacgtcgaactcgactacctgcggcggatgcgcttcatcaagagcgacttcgtcgacttcctcgcgctgttccacctgaacgagaagtacatctcgatcacgccgtcgccgaagggcaacggcgaaatcgacatcgtgatcgaggggccgtggctgcatacgatcctgttcgagatcccggtgctcgcgatcgtcaacgaagtctatttccgcaacacgcagcgcgagcccgactatcgcgaagggcgcgagcggctgcgcgagaagatcaagctgctcggcgcgaagcccgaattcgccgactgcaagatcgccgactacggcacgcgccggcgcttctcgaaggtctggcacgaggaagtcgcgctcacgctgcgtgacgggctcggcccgcagttcgcgggcacgagcaacgtgctgtacgcgatgaagcacgacatcacgccgctcggcacgatggcgcacgaatacctgcaggcgtgccaggcgctcggcccgcggctgcgcgactcgcagatctacggcttcgagatgtgggcgaaggaatatcgcggcgacctcgggatcgcgctgtcggacgtctacgggatggacgcgttcctgaacgacttcgacatgtacttctgcaaactgttcgacggtgcgcgccacgattcgggcgatccgttcgagtggggcgagcggatgctgcgccattacgaggcgaaccggtgcgacccgcgcaccaaggtgctcgtgttctcggacgcgctcgacatcccgaaggtcatgcagctgtacgaacggttccgcggccgctgcaagctcgcgttcggcgtcggcaccaacctcaccaacgatctcggctacgtgccgctgcagatcgtgatcaagatggttcgctgcaacggccagccggtcgcgaagctgtccgattcgccgggcaagagcatgtgcgacgacaaggcgtatctcgcgtacctgcggcaggtgttcggcatcgcgcagccggtcgacgaagacgcgtcgaagtag

SEQ ID NO: 14076 - protein, 399 aa, Burkholderia cenocepacia AU 1054
MIITSLLDTDLYKFTMMQVVLHHFPAANVEYRFRCRTPGVDLVPYIDEIRDEVRGLCSLRFADVELDYLRRMRFIKSDFVDFLALFHLNEKYISITPSPKGNGEIDIVIEGPWLHTILFEIPVLAIVNEVYFRNTQREPDYREGRERLREKIKLLGAKPEFADCKIADYGTRRRFSKVWHEEVALTLRDGLGPQFAGTSNVLYAMKHDITPLGTMAHEYLQACQALGPRLRDSQIYGFEMWAKEYRGDLGIALSDVYGMDAFLNDFDMYFCKLFDGARHDSGDPFEWGERMLRHYEANRCDPRTKVLVFSDALDIPKVMQLYERFRGRCKLAFGVGTNLTNDLGYVPLQIVIKMVRCNGQPVAKLSDSPGKSMCDDKAYLAYLRQVFGIAQPVDEDASK

SEQ ID NO: 14077 - DNA, 1356 bp, Burkholderia pseudomallei 1655
  CDS (1)..(1356)
atgagggcgaagcctgcctgcacgcgggcgctgctcgccgacctgtacgaattcacgatgctgcagtcgtacttcgactgcgggatgaacgatacggcgacgttcgagctgttcgtgcgcaggctgcccgcgcatcggaatttcatgatggcggcggggctcgagcaggcgctcgactatctggcgaacctcgcgttcgacgccgacgagatcgaagcgctcgcgggcatggggctcttcggcgacggctttctcgcgtcgctcgcatcgctgcgcttcacgggcacggttcgcgcgatgcgcgagggcaccgtgttcttcgcggacgagccgatcctgcaagtcaccgcgccgctgcgcgaggcgcaactgatcgagagccgcgtgatgaacctgctgcactacgaaacgatcgtcgcgagcaaggccgcgcgcgcggtgctcgcggcgccgggcaaggcgctcgtcgatttcgggctgcgccgcgcgcatggcgccgaggccgcgctgctgtcggcgcgcgcgagctacgtggcgggcttcgccggcacggcgacgctgcttgccggcctgcgctacgggattccgacgtacggcacgatggcgcattcgtacgtgcaggcgcacgacgacgaagcgctcgcgttcgagcatttcgcgcgctcgttcccgcgcaacgcgatgctgctcgtcgatacgtacgacaccgaggcggccgcgggcaaggtcatcgaagtcgcgaggaggctcgcgcgcgacggcgtcgaggtgaagggcgtgcggctcgacagcggcgatctcgcgcagcacgcgatgcgcgtgcgcgcgcagctcgatcgcgcggggctcggccgggtgacgctcttcgcgagcggcaatctcgacgaataccggctcgccgagctgatcgggcagggcgcgccgatcgacggcttcggcgtgggcacgcggatgaacacgtcggcggacgcgccgtacgcggattgcgcgtacaagctgaccgaatacgcgggcgtgccgcggcgcaagcgctcggagggcaaggcgacgtggccggggcgcaagcaggtgtttcgccgctatcgagacgatggcctgctcgacggcgattgcctcgcgctgcacgacgatgcgcaggcgggcgtcgcgctgctcgaaccggtgatgatcggcggcgagcgcgtcgcgccttcgccgagccttgccgacgttcgcgcgcatgcgcgcgcgcagctcgacacgctgcccgcggcgctgcgcgatctcgcgcgcgcggccgagtatccggtcgcggtggccggcacgttggcggcgctcgcgcaacggctcgatgcgcgggcggcgagcggcgcgtag

SEQ ID NO: 14078 - protein, 451 aa, Burkholderia pseudomallei 1655
MRAKPACTRALLADLYEFTMLQSYFDCGMNDTATFELFVRRLPAHRNFMMAAGLEQALDYLANLAFDADEIEALAGMGLFGDGFLASLASLRFTGTVRAMREGTVFFADEPILQVTAPLREAQLIESRVMNLLHYETIVASKAARAVLAAPGKALVDFGLRRAHGAEAALLSARASYVAGFAGTATLLAGLRYGIPTYGTMAHSYVQAHDDEALAFEHFARSFPRNAMLLVDTYDTEAAAGKVIEVARRLARDGVEVKGVRLDSGDLAQHAMRVRAQLDRAGLGRVTLFASGNLDEYRLAELIGQGAPIDGFGVGTRMNTSADAPYADCAYKLTEYAGVPRRKRSEGKATWPGRKQVFRRYRDDGLLDGDCLALHDDAQAGVALLEPVMIGGERVAPSPSLADVRAHARAQLDTLPAALRDLARAAEYPVAVAGTLAALAQRLDARAASGA

SEQ ID NO: 14079 - DNA, 1173 bp, Chromohalobacter salexigens DSM 3043
  CDS (1)..(1173): transl_table=11
atgctggattcgctcctcgataacgatttctacaagttcaccatgcaaagcgcggtcatcaagcgctttccctacgcgcgagcccgttatgcattcatcaaccggggggagcatgccttccctccgggcttcggcgagcaattgcgcgaggcggtggatgccatggcagacctctccctgagcgtcgaggaaaagcgctttctggagcgcacctgcccctacctggacccgacgtatctcgacttcctctcggggttccggtacgacccgagcgaggtcgacatcgtccagcagggtgagcgcttcgagttgcgcatcgaaggcctctggtaccgcaccatcctgtgggaagtccctctgatggcgctgatcagcgagatctggtaccgcatgggagacggcaagcgcgatgcggatgccatcatcgacatgcgcacccgcgacaagatcgaacactacaagcgcctggggctcaagatcgccgaattcggtacccgccggcgctattcctacgatgtgcacgaccgtgtggtggcctcgctgcgccaccacggcggcgataccttctccggctccagcaacgttcacctggccatgcgccacggcgtcaagccgatcggcacgcacgcccacgagtggttcatgttccacggcgcccgcttcggcttcaagatggccaacagcctcgccctggagcactgggtggacgtgtaccgtggcgacctgggcatcgcgctcacggacaccttcacgtcggcgaccttcttcgacagcttcgacaagaaattcgccaagctcttcgacggcgtgcgtcacgacagcggcgaccccctcgagttcgccgccgccaccatcgctcattacgagcgcatgggaatcgatccgcgtaccaagaccatcatcttctccgacgccctgacgcccgagcgcgtcgaacgcatcgacgccttctgtcgcggccgcatcaccacggccttcggcatcggcaccaacttcaccaacgatgtcggcgtcacgccgatgaacatggtgatcaagatgaccgaggcgcgcccggaagggcagcactggatgccggtcatcaagctctcggacgtgcccgacaagaataccggcgaccccgacatgatcgagctcgccaagcgtgtcctggcactctcgcggcgcgcctga

SEQ ID NO: 14080 - protein, 390 aa, Chromohalobacter salexigens DSM 3043
MLDSLLDNDFYKFTMQSAVIKRFPYARARYAFINRGEHAFPPGFGEQLREAVDAMADLSLSVEEKRFLERTCPYLDPTYLDFLSGFRYDPSEVDIVQQGERFELRIEGLWYRTILWEVPLMALISEIWYRMGDGKRDADAIIDMRTRDKIEHYKRLGLKIAEFGTRRRYSYDVHDRVVASLRHHGGDTFSGSSNVHLAMRHGVKPIGTHAHEWFMFHGARFGFKMANSLALEHWVDVYRGDLGIALTDTFTSATFFDSFDKKFAKLFDGVRHDSGDPLEFAAATIAHYERMGIDPRTKTIIFSDALTPERVERIDAFCRGRITTAFGIGTNFTNDVGVTPMNMVIKMTEARPEGQHWMPVIKLSDVPDKNTGDPDMIELAKRVLALSRRA

SEQ ID NO: 14081 - DNA, 1356 bp, Burkholderia pseudomallei 668
  CDS (1)..(1356)
atgagggcgaagcctgcctgcacgcgggcgctgctcgccgacctgtacgaattcacgatgctgcagtcgtacttcgactgcgggatgaacgatacggcgacgttcgagctgttcgtgcgcaggctgcccgcgcatcggaatttcatgatggcggcggggctcgagcaggcgctcgactatctggcgaacctcgcgttcgacgccgacgagatcgaagcgctcgcgggcatggggctcttcggcgacggctttctcgcgtcgctcgcatcgctgcgcttcacgggcacggttcgcgcgatgcgcgagggcaccgtgttcttcgcggacgagccgatcctgcaagtcaccgcgccgctgcgcgaggcgcaactgatcgagagccgcgtgatgaacctgctgcactacgaaacgatcgtcgcgagcaaggccgcgcgcgcggtgctcgcggcgccgggcagggcgctcgtcgatttcgggctgcgccgcgcgcatggcgccgaggccgcgctgctgtcggcgcgcgcgagctacgtggcgggcttcgccggcacggcgacgctgcttgccggcctgcgctacgggattccgacgtacggcacgatggcgcattcgtacgtgcaggcgcacgacgacgaagcgctcgcgttcgagcatttcgcgcgctcgttcccgcgcaacgcgatgctgctcgtcgatacgtacgacaccgaggcggccgcgggcaaggtcatcgaagtcgcgaggaggctcgcgcgcgacggcgtcgaggtgaagggcgtgcggctcgacagcggcgatctcgcgcagcacgcgatgcgcgtgcgcgcgcagctcgatcgcgcggggctcggccgggtgacgctcttcgcgagcggcaatctcgacgaataccggctcgccgagctgatcgggcagggcgcgccgatcgacggcttcggcgtgggcacgcggatgaacacgtcggcggacgcgccgtacgcggattgcgcgtacaagctgaccgaatacgcgggcgtgccgcggcgcaagcgttcggagggcaaggcgacgtggccggggcgcaagcaggtgtttcgcagctatcgcgacgatggcctgctcgacggcgattgcctcgcgctgcacgacgatgcgcaggcgggcgtcgcgctgctcgaaccggtgatgatcggcggcgagcgcgtcgcgccttcgccgagccttgccgacgttcgcgcgcatgcgcgcgcgcagctcgacacgctgcccgcggcgctgcgcgatctcgcgcgcgcggccgagtatccggtcgcggtggccggcacgttggcggcgctcgcgcaacggctcgatgcgcgggcggcgagcggcgcgtag

SEQ ID NO: 14082 - protein, 451 aa, Burkholderia pseudomallei 668
MRAKPACTRALLADLYEFTMLQSYFDCGMNDTATFELFVRRLPAHRNFMMAAGLEQALDYLANLAFDADEIEALAGMGLFGDGFLASLASLRFTGTVRAMREGTVFFADEPILQVTAPLREAQLIESRVMNLLHYETIVASKAARAVLAAPGRALVDFGLRRAHGAEAALLSARASYVAGFAGTATLLAGLRYGIPTYGTMAHSYVQAHDDEALAFEHFARSFPRNAMLLVDTYDTEAAAGKVIEVARRLARDGVEVKGVRLDSGDLAQHAMRVRAQLDRAGLGRVTLFASGNLDEYRLAELIGQGAPIDGFGVGTRMNTSADAPYADCAYKLTEYAGVPRRKRSEGKATWPGRKQVFRSYRDDGLLDGDCLALHDDAQAGVALLEPVMIGGERVAPSPSLADVRAHARAQLDTLPAALRDLARAAEYPVAVAGTLAALAQRLDARAASGA

SEQ ID NO: 14083 - DNA, 1269 bp, Polaromonas sp. JS666
  CDS (1)..(1269): transl_table=11
atgccaccttgctgtttgaagtcgacctgctggcaacctgagcctctgcgttttcagccgccccggagcaaagccgccaccatgatcatcaccagcctgcttgataccgacctgtacaagttcaccatgatgcaggtggtgttgcaccagtttccaggtgccgaggtggagtaccggttcaagtgccgcaacgccggggcgcccggcataggcaagctggcaccttatgtgaacgaaatccgcgaagagatccgcgggttgtgcaatttgcgctttcaggatgccgagctggcctacctgaaggccatgcgcttcatcaagagcgacttcgtcgattttctgggtatcttcaagctcaacgagaaatacgtgagcgtgacggccttgccatcgggcgagatcgaggtgtccatcaagggcccctggctgcacaccatcctgtttgaaatcccggtgctggccatcatcaatgaggtctactttcgcaacacgcaaaagcagcctgacctgaccgaaggccgcaaacgcctggacaccaagatactggagctgcaggccgatggcctgcgcgaactcaagatcgccgactacggcacgcgccggcgtttcggcaaggtctggcacgaggaagtgttgcgcacgctggtgacccgtctgggcacgggcatgtcgggccagctcgcggggaccagcaatgtgctgtttgccatgaagctgggcctgacgccgctgggcaccatggcgcacgaatacctgcaggcctgccaggcgctcgggccgcgcctgcgtgacagccaggtcttcggtttcgaatcgtgggcccgggagtaccggggtgacctggggattgcgctgtcggacgtatacggcatgagtgccttcctgcgcgatttcgacatgtacttctgcaagctgtttgacggggcgcgccatgacagcggcgacccgttcgagtggggtgagcgcatgctcgcgcactacgttaaaaaccgcgtcgatcccagaaccaagacgctgatcttcagcgacgcgctcaccgtgccgcgcaccattgagctgtaccagcagttcagggggcgttgccagctggctttcggcataggcaccaacctgaccaacgacctgggttacgagccgctgcagatcgtcatcaagatgattcgctgcaatggccagccggtggccaagctgtcggacacgccctccaaaaacatgtgcgaggacgaaaagtacctggcctatctgcgtcaggtcttcgagattggctga

SEQ ID NO: 14084 - protein, 422 aa, Polaromonas sp. JS666
MPPCCLKSTCWQPEPLRFQPPRSKAATMIITSLLDTDLYKFTMMQVVLHQFPGAEVEYRFKCRNAGAPGIGKLAPYVNEIREEIRGLCNLRFQDAELAYLKAMRFIKSDFVDFLGIFKLNEKYVSVTALPSGEIEVSIKGPWLHTILFEIPVLAIINEVYFRNTQKQPDLTEGRKRLDTKILELQADGLRELKIADYGTRRRFGKVWHEEVLRTLVTRLGTGMSGQLAGTSNVLFAMKLGLTPLGTMAHEYLQACQALGPRLRDSQVFGFESWAREYRGDLGIALSDVYGMSAFLRDFDMYFCKLFDGARHDSGDPFEWGERMLAHYVKNRVDPRTKTLIFSDALTVPRTIELYQQFRGRCQLAFGIGTNLTNDLGYEPLQIVIKMIRCNGQPVAKLSDTPSKNMCEDEKYLAYLRQVFEIG

SEQ ID NO: 14085 - DNA, 1341 bp, Crocosphaera watsonii WH 8501
  CDS (1)..(1341): transl_table=11
atgttaactttcaatcccagtttaaccccatcactccaagaaagtagcttgttgacagacttgtatcagttaacaatggctgcttgttacgcaggagaaggcattgccgaaaaaaaagccagttttgaactatttgtacgccgtttacccgataattttggttatttgatagctatgggactggctcaagggttacagtatctagaaaatttacgtttttcagcagaacagatagattatctgcaaagtacaggtatttttgaccatgtaaccccttatttttggtcattattgcaaaatcaaggctttacgggagatgtttgggctgttcccgagggaatccctatctttgccaatgaacccttattgcgggttgaggcaccgttatggcaagcacaaatagtagaaacctaccttttgaacaccatcaactatcagaccctaatcgccaccagagcagcgagaatgcgcgatatagcaggggaaaaggcaattttgttagaatttggtacaaggcgagcatttagccctcaaggggcaatttgggcggctagagcagctttaggagcgggttttgatgccacttctaatgttttagcagcgaaggaacttaaccagcaacccagtggcactatggcccacgctttggtgatggctattaaaggtttatctggcagcgaagacgaggcgtttatggcttttaatcgtcactttccaggggcaaccttattgatcgatacctatgataccttagctgcggcgcaacggttagccgaaaacagggaaatagagattaaaggggttcgtgtggactctggggacttggggagtttatctcaaaaagtgcgatcgctactaccaaaggtaaatatttttgccagtggggatattgatgaatgggagttgcaacggttacgatcagaaaacgctctttttgacggttatggggtgggaactcgtttggtgacgggacatccggttaatggggtctataaattagtagaaatagataacgttcctaccatgaaacaatctagcaataagatgacttatccgggaagaaaacagatatttcgtcgctataataacggaattatagaaagcgatcgcttagccttaatagaggaagagattgaatcaggagaaacccccttattagagttagtcataacagaaggtaacttgttaaaagaaaatgaatctttagacaccattcgtcaacgggttcaaacttctcttaaaagtttacctgaagatactcataagataaccaaaccgagtcctattcaagtgaatatttctcaacccttagaaaccttacgtcaatctttaattgtttaa

SEQ ID NO: 14086 - protein, 446 aa, Crocosphaera watsonii WH 8501
MLTFNPSLTPSLQESSLLTDLYQLTMAACYAGEGIAEKKASFELFVRRLPDNFGYLIAMGLAQGLQYLENLRFSAEQIDYLQSTGIFDHVTPYFWSLLQNQGFTGDVWAVPEGIPIFANEPLLRVEAPLWQAQIVETYLLNTINYQTLIATRAARMRDIAGEKAILLEFGTRRAFSPQGAIWAARAALGAGFDATSNVLAAKELNQQPSGTMAHALVMAIKGLSGSEDEAFMAFNRHFPGATLLIDTYDTLAAAQRLAENREIEIKGVRVDSGDLGSLSQKVRSLLPKVNIFASGDIDEWELQRLRSENALFDGYGVGTRLVTGHPVNGVYKLVEIDNVPTMKQSSNKMTYPGRKQIFRRYNNGIIESDRLALIEEEIESGETPLLELVITEGNLLKENESLDTIRQRVQTSLKSLPEDTHKITKPSPIQVNISQPLETLRQSLIV

SEQ ID NO: 14087 - DNA, 1431 bp, Geobacter metallireducens GS-15
  CDS (1)..(1431): transl_table=11
atgagctactcaccgcttctgaccgacctctaccaactcaccatgcttgccggatacctggaagaagggatggcggacaaaccggcggtgttcgacatcttcttccggcacaaccccttccagggggggtatgcggtgttcgccggccttgacacggccctcggctacctggagaacctccagttcacggaggatgatctcgagtatctccaggggctggaaatcttccgcccccgattcatcgattttctccgctcattccggttccggggaaaagtaacggcgcctcccgagggaacagtggttttcgccaatgagccccttgtgaccatcgaggcccccctggcccaggcgcaactggtggagacggcgctcttgaacatcatcaatttccagaccctggtggccaccaagggtgcccgaatcgtccatgcggcggtggacggcacggtgctggagttcggcctgcgccgcgcccaagggcccgacgggggagtgagcgaagcccgggccgcctacattggcggggttcggagcacgagcaacgtgctggcggggaagctcttcggcatcccggtaaaaggaacccatgcccacagctggatcatggcctttcccgatgagctgaccgccttccgcgcctatgccgaggtattccccgacacctgcatcctcctggtggacacctacgacaccctcaaaagcggcatccccaacgccatcaccgttgcccaggaactccgctcccaggggcacgaactggtcggggtgcggatcgattcgggtgacctggcctacctctcccgggagggacgccggatgttcgacgaggcgggcttccccggcgtaaagattgtcgcctccaacgagctggacgaatacgtgatcgaatcgatgcggagcgaagggggccgggtcgacatctacggcgtggggacacgtctcgccacctgcgccggagaggggggaggagccctgggcggagtctacaagctggtcaggatcggcgaccgcccaaaactcaaggtgaccagcgacgtcgccaaggcgacccttcccgaccgcaagcggctcctgcgggccgtggcccccgacggctccttcatccaggacgtgctctgcctcgccgacgaggacattgcccccggagccacggtgtacgacccttccaatccccttcagttcgttgccatcccgcaacaggcccgcttcgtcgagattcgtggcgttgtgatggaggacggtgtgcgaacggcgaaatctcctcccagcctggacgagatggccgaccgcagccgtgaccagctcacccgcctcccccagggatgcatgcgtttcatcaatccgcataaatacaaggtctccatcagcgccggtctcaacgagctacggctgcagcttatggacgaggttcaacggggatataaatag

SEQ ID NO: 14088 - protein, 476 aa, Geobacter metallireducens GS-15
MSYSPLLTDLYQLTMLAGYLEEGMADKPAVFDIFFRHNPFQGGYAVFAGLDTALGYLENLQFTEDDLEYLQGLEIFRPRFIDFLRSFRFRGKVTAPPEGTVVFANEPLVTIEAPLAQAQLVETALLNIINFQTLVATKGARIVHAAVDGTVLEFGLRRAQGPDGGVSEARAAYIGGVRSTSNVLAGKLFGIPVKGTHAHSWIMAFPDELTAFRAYAEVFPDTCILLVDTYDTLKSGIPNAITVAQELRSQGHELVGVRIDSGDLAYLSREGRRMFDEAGFPGVKIVASNELDEYVIESMRSEGGRVDIYGVGTRLATCAGEGGGALGGVYKLVRIGDRPKLKVTSDVAKATLPDRKRLLRAVAPDGSFIQDVLCLADEDIAPGATVYDPSNPLQFVAIPQQARFVEIRGVVMEDGVRTAKSPPSLDEMADRSRDQLTRLPQGCMRFINPHKYKVSISAGLNELRLQLMDEVQRGYK

SEQ ID NO: 14089 - DNA, 1206 bp, Methanosarcina barkeri str. fusaro
  CDS (1)..(1206): transl_table=11
gtgataaaatccatactcgataacgacctttataaattcaccatgcaacttgcagtgcttgaactttttcctaaagctgaggctgaataccggtttactaaccggggttcccagcgctttactacggagtttgtagaagaactggaaagaactatacgcgaagagatctcaaaattagcattaacagaagaagaatataactggctttcagagaattgcccttacctgaaacctatgtaccttgaatatcttaagaatttccgcttcaaacctggtgaggtaaaagtctgccttaccgaagaaaaagatctggacattcggataaaaggaccctggcacagcacgattctctgggaaattgtccttatggctacggtttcggaactatatttcacaactattgaaaaagagtggaacggagattcccaagggggttgtacttccgaatccgtactgactgcatacgaaaataagattcttgagatgggaaaagcccttgagaaaaacaactgccttttttcggaatttggaactcgcaggcgaagaagttccgaactccacgaccatgtgatgaaaacccttactggaataaaaaccctgacaggaacaagcaatgtgtattttgcaaaaaaatatggcctgaaaccgatcgggactgtcgggcacgaatggattatgggtacctcagcacttgtagggttaaggtatgcaaaccgttttgcttttgaaaactggatagatgtttataacggggatctgggaattgcccttacggacactttcggctcaaaagccttttttaaggatatggacctgaggttatcaaaaacttacgatgggttcaggcacgacagtggagatccttatgattttgtggacgctgtgatagaacactatcggaaaatgggtatagatcccatgaaaaagttacttgttttcagtgatgccctcaatgcagataccgcaatccaactcaaaaaatattgcgaaggtaaaatcaactgcagtttcggtataggcacaagccttacaaataactccgatttcttcaggaaaagccctcctcttaatatggtcataaagctgcacagtattgacggcattcctgttgtaaaactgagcgactccccggaaaaggaaaccggagaaaaagatgctataagggttgcaaattacatttttggaagaaaagggctggatgaatga

SEQ ID NO: 14090 - protein, 401 aa, Methanosarcina barkeri str. fusaro
MIKSILDNDLYKFTMQLAVLELFPKAEAEYRFTNRGSQRFTTEFVEELERTIREEISKLALTEEEYNWLSENCPYLKPMYLEYLKNFRFKPGEVKVCLTEEKDLDIRIKGPWHSTILWEIVLMATVSELYFTTIEKEWNGDSQGGCTSESVLTAYENKILEMGKALEKNNCLFSEFGTRRRRSSELHDHVMKTLTGIKTLTGTSNVYFAKKYGLKPIGTVGHEWIMGTSALVGLRYANRFAFENWIDVYNGDLGIALTDTFGSKAFFKDMDLRLSKTYDGFRHDSGDPYDFVDAVIEHYRKMGIDPMKKLLVFSDALNADTAIQLKKYCEGKINCSFGIGTSLTNNSDFFRKSPPLNMVIKLHSIDGIPVVKLSDSPEKETGEKDAIRVANYIFGRKGLDE

SEQ ID NO: 14091 - DNA, 1206 bp, Desulfuromonas acetoxidans DSM 684
  CDS (1)..(1206): transl_table=11
atgagtccacgcatcactgaccagcctctgattcacagtcttctcgataccgacctgtataaaataagcatgttgcaggcgttttttcatgccccggaatttcgcaccgtatccgtggagtggaagttcgcctgccgtaatgatcacggctttgatctgaccacgttgcgcgaggatgtgcagtggcagttacaacaggtgtgttcgcttcagtttactgacgaggaactggattatctcgatcaattccctttttttacccacgatttcatcgaatttctgcgcattttccatctcgatatgcgctttgtgtctctggccgttgttgaggggcagttggatatccgtttccgtggcccgctgctgcatgtgaccctgttcgagatttgcaccttggcaattatcagtgaactgcatacgctggcgcattacggcggcgttgatctggatgtggcccgccggcgcctcgaagagaagatcgaccagctcaaggcacccggaccgatgccgggatttcactttgccgatttcggcacccggcgtcgtgccagccgcgcctggcaggaggaagtggtttgccgcctgcatgaagcattacccgactattttaccggtaccagtaacctggatctggcgcgccgttataacctgatgccgatcggcaccatggcccacgaatggtttcaggcctggcaggctgtgacccgtttggccgatgcccagaaggcggcgctggaaagctgggtgcgggaataccgcgggcgtctcggcattgctctgaccgattgttacaacatggatgcgttcatgcgcgatttttccgatccctattttggcaaattgtatgatggtctgcgccatgacagtggcccacccatcgaatggggtgaaaaagccattgccatgtatcaggctatggggatcgacccgctgtcgaagaccctggtgtttagtgacagcctgacctttgaacggatgctggaaatttaccagtatttcaatggccgcgtgcaggtctcgttcgggattggtaccatgctgaccaacgatatcggtcaaccggctctgaacatggtgatcaaaatggtggcggctaacggcaagccggtggcaaaaatctccgatgaaccgggcaagagcatgtgcgaagatgccggatatttacgttatctggcgtcggtgtacgacattgagctgaacctgtaa

SEQ ID NO: 14092 - protein, 401 aa, Desulfuromonas acetoxidans DSM 684
MSPRITDQPLIHSLLDTDLYKISMLQAFFHAPEFRTVSVEWKFACRNDHGFDLTTLREDVQWQLQQVCSLQFTDEELDYLDQFPFFTHDFIEFLRIFHLDMRFVSLAVVEGQLDIRFRGPLLHVTLFEICTLAIISELHTLAHYGGVDLDVARRRLEEKIDQLKAPGPMPGFHFADFGTRRRASRAWQEEVVCRLHEALPDYFTGTSNLDLARRYNLMPIGTMAHEWFQAWQAVTRLADAQKAALESWVREYRGRLGIALTDCYNMDAFMRDFSDPYFGKLYDGLRHDSGPPIEWGEKAIAMYQAMGIDPLSKTLVFSDSLTFERMLEIYQYFNGRVQVSFGIGTMLTNDIGQPALNMVIKMVAANGKPVAKISDEPGKSMCEDAGYLRYLASVYDIELNL

SEQ ID NO: 14093 - DNA, 1293 bp, Jannaschia sp. CCS1
  CDS (1)..(1293): transl_table=11
atggtcgatatcgccacccgcgtctggaaccacaaatggaagatcgacccgatcgtccggtccctgatcgacacggatttctacaaactgctgatgtgtcagtccgtctttcgcaacaagcccgacacgcaggtgcgcttttcgctgatcaaccgcaccacgcgcattcccctcgccgaccttattgacgaaggcgagcttcgcgaacagctggaccacatccgcaccctccgcctcacccgcggcgagtcgacctggatgcgcggcaacaccttctacggtcagcggcagatgttctcgcccgaattcatggattggtttgaggccctgcaactccccccctatcatctggagcgggtcggcgatcagtatgagctgacgtttgaaggtgcctggcccgaggtcatgctgtgggaaatccccgcgctgtcggtgttgatggagcttcgcggtcgtgccgtcctcggcaccatgggccggtttgaacttcaggtcctctatgcccgcgccatgaccaaactgtgggaaaagatcgaacgcctcaaggacatccccgacctgcgcgtcgctgatttcggcacccggcggcggcattccttcctctggcaggattgggccgtccgcgcgatggacgagggcttgggtgataacttcaccggcacctctaactgcctcattgccaagaaccgcgatctggaggcgatcggcaccaacgcccacgaactccccatggtttacgccgctttggccgacagcgacgaggccctcttcaccgccccctacgacgtgctgtccgactggcatgaagagcattccggcaatttgcgcatcatcctgcccgacacctacggcacgcaaggcttcctcgacaacgcgccggattggctggccggttggaccgggatcaggatcgactccggcgacccagcgacggcggcggaagtggccatcgcctggtggaaaagccgtggcgaagacccccggtcaaagctggtgatattctccgacgggctggacgtcgacaagatcgagactcttcacaaacaattctcaggtcgcgtgcgggtcagcttcggctggggcactttgctgacgaacgacttccgaggcctcgtcacaaacgacgccctcgccccgttcagcctggtctgcaaagcggtgagcgcaaacggacgccccaccgtcaaactcagcgacaaccccgaaaaggccatggggcctgcggatcagatcgagcggtataagcgggtgttcggggttggcgagcaggaacgggtggaggtggtggtttaa

SEQ ID NO: 14094 - protein, 430 aa, Jannaschia sp. CCS1
MVDIATRVWNHKWKIDPIVRSLIDTDFYKLLMCQSVFRNKPDTQVRFSLINRTTRIPLADLIDEGELREQLDHIRTLRLTRGESTWMRGNTFYGQRQMFSPEFMDWFEALQLPPYHLERVGDQYELTFEGAWPEVMLWEIPALSVLMELRGRAVLGTMGRFELQVLYARAMTKLWEKIERLKDIPDLRVADFGTRRRHSFLWQDWAVRAMDEGLGDNFTGTSNCLIAKNRDLEAIGTNAHELPMVYAALADSDEALFTAPYDVLSDWHEEHSGNLRIILPDTYGTQGFLDNAPDWLAGWTGIRIDSGDPATAAEVAIAWWKSRGEDPRSKLVIFSDGLDVDKIETLHKQFSGRVRVSFGWGTLLTNDFRGLVTNDALAPFSLVCKAVSANGRPTVKLSDNPEKAMGPADQIERYKRVFGVGEQERVEVVV

SEQ ID NO: 14095 - DNA, 1458 bp, Desulfitobacterium hafniense DCB-2
  CDS (1)..(1458): transl_table=11
gtgcaggatgttgctctgttaactgatttatatcaactcacgatgatgcaaggctattaccaaaatggttatgaaaataaggaagcggtctttgatctttattttcgcaaaatccccagtgggggcggttatgttatagctgcgggcctggagcaggtcgtggagtatattgaaaatttgcggttttcttcagaggacatggcttatctcaggggattaaacatattcgatgaggggtttcttaatctattgaaggatttccgattccatggcgatatagatgccgttcctgaggggactgtggtttttccctatgaaccgttggtgcgggtgaaaggccggatccttgaagctcagcttatcgagacagcgctccttaatataataaactttgagacgcttattgccacgaaagcctcccgggtagtagctgctgccggtggaggaagtgtcatggaatttggtttaagacgggcccagggacctgatgccgggatattaggttcgcgagcggcctttatcggagggtgccaatttacttccaatgtgctggctggaaaacgctatggcatccccctatcgggaactcaagcccatagttggattcagtgctttcctgacgagctggaagctttccgggcctatgccagaaccttcccggatcaatgcctgcttttagttgatacttataatgtgcttaaatccggagtccccaacgccatcaaggtagggctggagctggaggcggaaggacatcgctttttaggcatccgcattgatagcggcgatttaacgtatctttcccgggaagcccgcaaaatgttggatcaagcaggccttgaacatgcacgaattgtggcctccaatgatttggatgagcataccatctcagctattcgcgctcaaggggcggctatcgattcctggggggtaggcactcacttaattacctccaaggataccccggctttaggcggagtctacaagctctcggccgaaggccagaagggggtctttgagccccgccttaaagtctcggagaatatctccaagataaccaaccctggtattaagaagatcgtgcgcttttacgatcggcgcggaaaagccatggcggatttaattgccttagaggatgagcattttgaagaacccttaaccatcttcgaccctattgagacatggaagcgcaaaaccctcactgattttaagacccgggagctcctgaggccggttttccgggggggcaggcgagtctatgaactgccctatctcaaagatatccagacctacgcccagcacgaatgtgagaccttatgggatgaagtgaaacgtctggttaacccacaccgctatatcgtggacttatcgccgaagctcttcgagctaaggcagtccctgctcctggaaatcagtactaagatagaggaagagcagactaaaagattatccaaatga

SEQ ID NO: 14096 - protein, 485 aa, Desulfitobacterium hafniense DCB-2
MQDVALLTDLYQLTMMQGYYQNGYENKEAVFDLYFRKIPSGGGYVIAAGLEQVVEYIENLRFSSEDMAYLRGLNIFDEGFLNLLKDFRFHGDIDAVPEGTVVFPYEPLVRVKGRILEAQLIETALLNIINFETLIATKASRVVAAAGGGSVMEFGLRRAQGPDAGILGSRAAFIGGCQFTSNVLAGKRYGIPLSGTQAHSWIQCFPDELEAFRAYARTFPDQCLLLVDTYNVLKSGVPNAIKVGLELEAEGHRFLGIRIDSGDLTYLSREARKMLDQAGLEHARIVASNDLDEHTISAIRAQGAAIDSWGVGTHLITSKDTPALGGVYKLSAEGQKGVFEPRLKVSENISKITNPGIKKIVRFYDRRGKAMADLIALEDEHFEEPLTIFDPIETWKRKTLTDFKTRELLRPVFRGGRRVYELPYLKDIQTYAQHECETLWDEVKRLVNPHRYIVDLSPKLFELRQSLLLEISTKIEEEQTKRLSK

SEQ ID NO: 14097 - DNA, 1218 bp, Methanococcoides burtonii DSM 6242
  CDS (1)..(1218): transl_table=11
gtgatccgatcgatactggacaatgacctttataagtttacaatgcaaatggcagtgttagaactgtttccaaatgcacgtgctgaataccgtttcatcaataggggcgctcagagttttacaaatgatttcgtgaatgagcttcggcgtatcatcaataaggatatttctaaaatcgcactttccgaagatgaatacatctggctcaaagataattgtcctttttttaaaccttcatatattgaatacctgaagaactttcgctttaatcctgaagaagtgaagatcgttctgacagaagataatgaacttgaactatgtattgaaggtccctggcacagttccatattgtgggagatcgtactcatgtcaaccatttcggaactttattttactgtaacggataacaaaggagaagaaatctcagctagcaatgccaatgatcctgaaaatactctaatggaggagtatagcagttttataggagatatgggaaaggaactggatgccaaaggctgcatcttctctgaatttggaactcgccgccgaagaggattcaaattacatgataaagtggtcgaagttctccatgaactggattctttttccggcactagcaatgtatattttgcaaaaaagtatggtgtgaggccgataggtaccattggccatgaatggataatgggcaactccgcccttgttggtctaaggaatgcgaacaagtttgcttttgataactgggtaaaggtgtacaaaggtgatcttagtattgctcttagtgatactttcggttcaaagcctttcttccaaaattttagtattggtcttgcaaagatctatgatggggtcagacatgacagtggtgatccgatcaagtttgcagatgaggtcattgagcattacaaaaagcttggcattgacccgatgaaaaaagtgctggttttcagtgattcccttcatgtaagtgatgctgtaaaacttaaagaatattgtagtggcaggataaattgcagtttcggtattggcacaacccttacgaacaatccggactttttcagctacaaccctcccctgaacatggtcatcaagctacacaaaatagatggcataccggtggtgaaacttagcgattcagtagaaaaggctactggggacaaggatgctttgagggtggctaattatatatttggcagaaaagggctggatgagcaattttga

SEQ ID NO: 14098 - protein, 405 aa, Methanococcoides burtonii DSM 6242
MIRSILDNDLYKFTMQMAVLELFPNARAEYRFINRGAQSFTNDFVNELRRIINKDISKIALSEDEYIWLKDNCPFFKPSYIEYLKNFRFNPEEVKIVLTEDNELELCIEGPWHSSILWEIVLMSTISELYFTVTDNKGEEISASNANDPENTLMEEYSSFIGDMGKELDAKGCIFSEFGTRRRRGFKLHDKVVEVLHELDSFSGTSNVYFAKKYGVRPIGTIGHEWIMGNSALVGLRNANKFAFDNWVKVYKGDLSIALSDTFGSKPFFQNFSIGLAKIYDGVRHDSGDPIKFADEVIEHYKKLGIDPMKKVLVFSDSLHVSDAVKLKEYCSGRINCSFGIGTTLTNNPDFFSYNPPLNMVIKLHKIDGIPVVKLSDSVEKATGDKDALRVANYIFGRKGLDEQF

SEQ ID NO: 14099 - DNA, 1575 bp, Frankia sp. EAN1pec
  CDS (1)..(1575): transl_table=11
atggactaccccgcggccaccccgagggctaccccaccgtcgtccctaggccccgcgcacgttcctgcccgtcacgtgccgccacccgcccccgcgaccgccgccacccgggccgcgaccggccacccgccgcggcccgcgggttcgtccgatgtggtgcaccggaagcctgtcgtccctaccctgttccggatgtccacggcgcttctgaccgatcactacgagttgaccatgctgcgggcggctctgcgctccggcgcggccgaacgcagagcggtcttcgaggtcttcacccggtccctgcccgccggccgtcgcttcggagtcatggccggcaccgggcgcctgctcgccgcgctcgccgacttccggttcggcccggccgagatcgaccacctgtccgcgaccggcgtcgtggatcccgacacggccgactggctggcctcctaccagttccgcggcgacgtcgacgggttcgccgagggcgagcccttcctgcccgacacccccgtcctcgtggtggagggcacgttcgccgagtgcgtcctgctggagaccctcgtcctgtcggtgctcaaccacgacagcgccatcgccgccgccggcagccgcatggtcgccgccgccggcgaccggccgtgcatagagatgggtggccggcgcacccacgagcaggccgcggtcgccgccgcgcgggccgcctacctcgtcggcttcaccgcgacgtccaacctggaggcggcgcgccgctacggcgtgcccagcgcaggcacgagcgcgcacgccttcaccctcgcgcaccacgacgaggcggcggcgttcgcggcccaggtcgcggcactcggcgccggcacgaccctgctggtggacacctacgacatcccgaccgggatcgccaacgccgtggccgcggcgggcagcgagctcggggcgatccgcatcgacagcggggacctcgccggcggcgcccgggcggcccgcacccagctcgaccagctcggcgccgagtccacccggatcatcgtcaccggcgacctcgacgagcactcgatcgcccgcctggcctcggcccccgtcgacggctacggcgtgggcaccagcctggtgaccgggtcgggcgcacccaccgccggcttcgtctacaaactcgtcgaggttgacggtgagccggtcgtcaagacttctgtgggcaagcgcagccgcggcgggcgcaaggacgtcctgcgccgcctgggcccgaacggactggccgtcgccgacctggtcatccccagagcacccctcgaccgctccgccgccccgcggcccgccggcggtgcgtccgctgcccgcgtacctggcggagaggcgctggacggggctgtggggcgccgggaccgccatctcctcgtccccctgatgcgcggcggccagctcgtcgcggacacgctcgtcggcgcggccggagtcgcccgggcccgggagcaccaccggctcgccctggagtccctaccggccggcgcgcgcgaggtctccttcggacgtccatgcctgccggtcgtggtcgcagcggcggagccgcggacctccttctga

SEQ ID NO: 14100 - protein, 524 aa, Frankia sp. EAN1pec
MDYPAATPRATPPSSLGPAHVPARHVPPPAPATAATRAATGHPPRPAGSSDVVHRKPVVPTLFRMSTALLTDHYELTMLRAALRSGAAERRAVFEVFTRSLPAGRRFGVMAGTGRLLAALADFRFGPAEIDHLSATGVVDPDTADWLASYQFRGDVDGFAEGEPFLPDTPVLVVEGTFAECVLLETLVLSVLNHDSAIAAAGSRMVAAAGDRPCIEMGGRRTHEQAAVAAARAAYLVGFTATSNLEAARRYGVPSAGTSAHAFTLAHHDEAAAFAAQVAALGAGTTLLVDTYDIPTGIANAVAAAGSELGAIRIDSGDLAGGARAARTQLDQLGAESTRIIVTGDLDEHSIARLASAPVDGYGVGTSLVTGSGAPTAGFVYKLVEVDGEPVVKTSVGKRSRGGRKDVLRRLGPNGLAVADLVIPRAPLDRSAAPRPAGGASAARVPGGEALDGAVGRRDRHLLVPLMRGGQLVADTLVGAAGVARAREHHRLALESLPAGAREVSFGRPCLPVVVAAAEPRTSF

SEQ ID NO: 14101 - DNA, 1200 bp, Ralstonia metallidurans CH34
  CDS (1)..(1200): transl_table=11
atgcccccgtctggcctcgttatgatcatccgttccctgctcgacactgacctgtacaaattcacgatgatgcaggtggtgctgcatcacttcccgcaggcccaggtggagtaccgcttcaagtgccgcaacgccggggtcgacctgacgccgtacgtcgacgagatccggtcccagatcacgcagctttgtcagttgcgattcaccgacgatgaactcaattacctgcgtggcctgcgcttcatcaaaagcgactttgtcgagtttctggcgctgttccatctgaacgagaagtacgtgcaggtgctgccgtcggccaagggtaatggcgaaatcgagatcatcatcaagggtccgtggcttcatacgatcctgttcgagattccgctgctggccatcgtcaacgaggtgtacttccgacgtacccagccgaagcccgatctggcggagggccgtcgccggctgcaggccaagctggagctgctcgcggcgccgccctatgtggattgcgtgatcgcggactacggcacccgccgccggttctcgtgcgactggcaggaggaggtcctgctgtcgatgcgcgacgccattggcccgcaattggccggcaccagcaacgtccacttcgcgcgtctgcacaacatgacgccgcttggcacgatggcgcacgagtacctgcaggcctgccaggcccttgggccgcgcctgcgtgattcgcaggtctacgcgctggagcggtgggcacacgagtatcgtggtgaccttggcatcgcgctttcggacacctacggcttcgacgcattcctgcgggacttcgatctctatttctgcaagctgttcgatggcgtgcgacacgattcgggcgatccgttcgaatggggcgagcggatgatcgcgcactacgcagcgaaccgcgtggatccgcgcggcaagacgctgatcttcagcgatgcgctggacattcccaaggtcatcgagctctatgagcgattccgtggccgttgcaagctcgcattcggtgtgggcaccaacctgaccaatgatcttggctacaagccattgcagatcgtgatcaagatggtgcgctgcaatgggcagcccgtggccaagctgtcggacacgcccgagaagacgatgtgcgacgatcccggctatctgtcgtacctgcggcaggtgttcgcggttcaggcccccgcttag

SEQ ID NO: 14102 - protein, 399 aa, Ralstonia metallidurans CH34
MPPSGLVMIIRSLLDTDLYKFTMMQVVLHHFPQAQVEYRFKCRNAGVDLTPYVDEIRSQITQLCQLRFTDDELNYLRGLRFIKSDFVEFLALFHLNEKYVQVLPSAKGNGEIEIIIKGPWLHTILFEIPLLAIVNEVYFRRTQPKPDLAEGRRRLQAKLELLAAPPYVDCVIADYGTRRRFSCDWQEEVLLSMRDAIGPQLAGTSNVHFARLHNMTPLGTMAHEYLQACQALGPRLRDSQVYALERWAHEYRGDLGIALSDTYGFDAFLRDFDLYFCKLFDGVRHDSGDPFEWGERMIAHYAANRVDPRGKTLIFSDALDIPKVIELYERFRGRCKLAFGVGTNLTNDLGYKPLQIVIKMVRCNGQPVAKLSDTPEKTMCDDPGYLSYLRQVFAVQAPA

SEQ ID NO: 14103 - DNA, 1341 bp, Magnetococcus sp. MC-1
  CDS (1)..(1341): transl_table=11
atgaaccattcgacggcggtggaacagaccccggccctgctgaccgatctctaccagctaaccatgttacagagttattggaaagaggggatggcgcagagcgccatctatgattttggcatgcgcagcctgcccggatgccgtaactatctggttatggccgggttggaaagtgtgctggagctgctggaaagtctgcattttacggcgcaggatttggcctatttaagcacccttgggctgtttggcgatgattttctaagctggttacaggattttcgttttaccggtaccgtacacgccttggccgagggtacgctgtttttccctcctgccccgatgctgctgattgaggccccgttaccccaggctcagttggtggaaacggcggtgatgaaccagctgcatttccagacattggtggccagtaaggccgcccgtgtgacccaagcctgtcagggcaagccctttatggagttcgccttgcgccgcacccacggtatggatgccggcttaaaggccagccgcagcgcctatttggcgggggcctctttaacctccaatgtggaagcggggcggcgttggcagattccggtctctggcaccatggcccacgcctttgtgcaggcccatggggatgaattgagcgcttttcgagcctatgccgcgctctatccggagggggccttgttggtggatacctacgataccctacaaggggtgcgtcacgtgatcgccttagcgaaggagctggggacagcgtttcgcattcgcgccatccgactggattcgggcgatctggtggctctggccaaaagcgcccgccagatgttggacgaagcgggtttgttacagatgaaaatctatgtttccggtgggttggatgaacactcagtggctcaactagaggccagtggcgcgcccattgatgcctatgcggtgggtacctcactgtgggtctccgaagatcttccggcaacctcctgtgtctataaatgcgccgtctacggggggcgcccggttatgaaaaaagccaccggtaagcgttctctgcccggctttaaacagctctatcgacatcaacaggatggacgttttagccacgactgtattgagttgcgcgatgcccaagccagcggaacccccctgttacagcgggttatggtggatggcaagcgtgtcaaccgccctgccaatcccctcgccgaggcgcgtgagcgctgcgccgaacagctgcggcaactccccgatgagctgttgggtctaacgcaggccagcaccccttatcctgtgcagatcgggccgcatttgacaaccttgatcgagcaactgtgcggttga

SEQ ID NO: 14104 - protein, 446 aa, Magnetococcus sp. MC-1
MNHSTAVEQTPALLTDLYQLTMLQSYWKEGMAQSAIYDFGMRSLPGCRNYLVMAGLESVLELLESLHFTAQDLAYLSTLGLFGDDFLSWLQDFRFTGTVHALAEGTLFFPPAPMLLIEAPLPQAQLVETAVMNQLHFQTLVASKAARVTQACQGKPFMEFALRRTHGMDAGLKASRSAYLAGASLTSNVEAGRRWQIPVSGTMAHAFVQAHGDELSAFRAYAALYPEGALLVDTYDTLQGVRHVIALAKELGTAFRIRAIRLDSGDLVALAKSARQMLDEAGLLQMKIYVSGGLDEHSVAQLEASGAPIDAYAVGTSLWVSEDLPATSCVYKCAVYGGRPVMKKATGKRSLPGFKQLYRHQQDGRFSHDCIELRDAQASGTPLLQRVMVDGKRVNRPANPLAEARERCAEQLRQLPDELLGLTQASTPYPVQIGPHLTTLIEQLCG

SEQ ID NO: 14105 - DNA, 1305 bp, Mesorhizobium sp. BNC1
  CDS (1)..(1305): transl_table=11
atgaccgttaccgatatcgcacgccgggtttacaatcacacctggaagcttgatcccatctgccgcagcttgctcgacacggatttttacaagcttctgatgctccaaatgatttggggcctctaccaggatgtggacgccactttttcgctgaccaaccggaaccatcgcgtccgccttgccgacgaaatagacgaggccgagttgcgtgcgcagctagaccacgcccgcacgatccgcttttcaaaaaaggagatgatctggctcgccggcaattccttctacggtcgcaagcagatcttcagccccgagttcctcgcttggctcgccgatttccaactgcctgaatatgagctgaggcgacgcgacggtcagtttgaacttcacttttacggccgctggatggaaaccaccatgtgggaaattccggctctggccataatcaacgaattgcgctcacgcgcggccatgcgcacccttggccgctttgccctggacgtgctctacgctcgcgccaaggcgaaggtctgggaaaaggtcgaacgcctgaagaagtacccggacattcgcatctccgacttcggaacgcgacgccgccattcctttttatggcaacgctggtgcgtggaggccttgaaggaaggaatcggcgaatccttcaccggcacgtccaatgtgctgctggccatggatacggacctggaagcgctgggaacgaatgcccacgagcttccgatggttcttgcggcgctaagcagctccgacgaggaactgaaagcctcgccctatcaggtcctcaaggattggcagagctattacggcggcaatctcttgatcgtgctgccggatacgttcggaaccgaatcgttccttgaggacgcaccgggatgggtcgcggattggaccggcttccgccccgatagcgcgccccccatcgaaggcggcgagcgcatcatctcctggtgggagcaacatggccgggacccgcgggaaaagctgctgatcttttccgacgccctcgacgtcgatacaatcgagcagacatatcggcacttcaagggccgttcccgcctgagcttcggctggggaaccaatcttacaaacgacttcgacggctgcgcccccgaaaagatcgacaggctgaaagcgatatcgcttgtttgcaaggtaagcagtgccaacggccgtcccgccgtgaagctctccgacaatccggaaaaggcaaccggcaggcctgaggagatccagcgttatctgcgcgttttcggcagccgcaaccgcgtgcaccagccggtagaggtgtag

SEQ ID NO: 14106 - protein, 434 aa, Mesorhizobium sp. BNC1
MTVTDIARRVYNHTWKLDPICRSLLDTDFYKLLMLQMIWGLYQDVDATFSLTNRNHRVRLADEIDEAELRAQLDHARTIRFSKKEMIWLAGNSFYGRKQIFSPEFLAWLADFQLPEYELRRRDGQFELHFYGRWMETTMWEIPALAIINELRSRAAMRTLGRFALDVLYARAKAKVWEKVERLKKYPDIRISDFGTRRRHSFLWQRWCVEALKEGIGESFTGTSNVLLAMDTDLEALGTNAHELPMVLAALSSSDEELKASPYQVLKDWQSYYGGNLLIVLPDTFGTESFLEDAPGWVADWTGFRPDSAPPIEGGERIISWWEQHGRDPREKLLIFSDALDVDTIEQTYRHFKGRSRLSFGWGTNLTNDFDGCAPEKIDRLKAISLVCKVSSANGRPAVKLSDNPEKATGRPEEIQRYLRVFGSRNRVHQPVEV

SEQ ID NO: 14107 - DNA, 1290 bp, Silicibacter sp. TM1040
  CDS (1)..(1290): transl_table=11
ttggatattgcaacgcgcgtctacaatcacaagtggaagattgatccaatcgtccggtcgctgattgatacggatttctacaaactcttgatgtgtcagtcggtctttcgcaacaaacctgatacgcaggtgaccttctcgctgatcaaccgctctgacaaggtgccgcttgcgcgtctcatcgacgagggcgagctgcgcgagcagctggatcacatccgctccctgagtctcagccgcggcgaaagcacatggctgcgcggcaacacgttctacggcaaacgccagatgtttcggcccgacttcatggagtggttcgaaaacctgcgcctgccgccttatcaccttgaacgcaagggtgatcaatacgagctgacctttgaagggtcctggcccgaggtcatgctgtgggaaattcccgcgcttgcggtgctgatggagctgcgctcgcgcgcggtcctgaatgacatgggccggttcgagctgcaggtgctctatgcccgagcgatgaccaaagtctgggagaaaatcgaacaattgcgccagatcgacggtctcgggatcgcggattttggcacccggcgccgccatagctttttgtggcaggactggtgcgtgcaggcgatgatggaagggcttggcgggtcttttaccggcacctccaactgtctcattgcgatgcgccgcgaggtcgaggccattggcaccaacgcgcatgagctgccgatggtctactctgctttggccgaagatgacgcggcgcttgcccgcgcgccctatgatgtcctgtcggactggcacgaggaacacgagggcaacctgcgcatcattctcccggacacctacggcaccaagggctttttggaaaatgcgccggactggctggcgggatggacgggtattcggatcgacagtggcgatccggcggcggcggcagaaatcgctatcaagtggtggcaggatcgcggcgaggatcccactgaaaaacgtgtgatcttttccgatgggctggatgtgggcaagatcgcagaattgcaccggcagttttcgggtcgggtcaaagcctccttcggctggggtacgcttttgaccaatgatttccgcggcctcgtccctgatgacggcctcgcgcccttctcggtggtgtgcaaggcggtttcggccaatgggcgcccgacggtcaagctctcggacaatcccgaaaaggcgatgggccccaaggatgagatcgcgcggtacaagcgggtgttcggcgtcggcacgcaagagcgtatcgacgtgattgtctga

SEQ ID NO: 14108 - protein, 429 aa, Silicibacter sp. TM1040
MDIATRVYNHKWKIDPIVRSLIDTDFYKLLMCQSVFRNKPDTQVTFSLINRSDKVPLARLIDEGELREQLDHIRSLSLSRGESTWLRGNTFYGKRQMFRPDFMEWFENLRLPPYHLERKGDQYELTFEGSWPEVMLWEIPALAVLMELRSRAVLNDMGRFELQVLYARAMTKVWEKIEQLRQIDGLGIADFGTRRRHSFLWQDWCVQAMMEGLGGSFTGTSNCLIAMRREVEAIGTNAHELPMVYSALAEDDAALARAPYDVLSDWHEEHEGNLRIILPDTYGTKGFLENAPDWLAGWTGIRIDSGDPAAAAEIAIKWWQDRGEDPTEKRVIFSDGLDVGKIAELHRQFSGRVKASFGWGTLLTNDFRGLVPDDGLAPFSVVCKAVSANGRPTVKLSDNPEKAMGPKDEIARYKRVFGVGTQERIDVIV

SEQ ID NO: 14109 - DNA, 1305 bp, Nitrobacter hamburgensis X14
  CDS (1)..(1305): transl_table=11
atgaccgttacggatatcgcgacgcgaacctataaccacggctggcgcctcgatcccatcgtgcgcagcctgctcgatacggatttctacaagcttctgatgctgcagatgatccgggaattctatccgaacgagcacgtcacgttttccgtcatcaatcggagccgccacgtccgcctcgccgaagcgatcgacgagggtgaactgcgcgcgcagctcgatcatgcccgctctatccgcttcagcaagaacgagctgatctggctcgcgggcaacaccttctacggcaagacccagatgttttcgccggacttcatcgattggctggcgacgttccggcttggcgaatatgaattgcggaaggtcgacggccagtacgaactgcatttccacggtccgtggacccacaccaccatgtgggagattccggcgctcgccattctcaacgagttacggtcgcgccaggtgaccaagggtcagggccgtttcgccctcgacgtgctttatgcgcgcgccaaggcaaagctgtgggccaaggtcgaacggttgcgcaagctggatgacttgtggctgtcggacttcggaacgcggcgacgtcacggctttctctggcagcgttggtgcgtcgaggcggccaaggaaggactgggacccgccttcaccggcacgtcgaacgttttgctcgcgatggacaacgacctcgaggccatcggcaccaacgcacatgaactgccgatggtcgcggctgcgctcgccgacgacgataccgcgttgcgccgggcgccctatcgtatcctcgaccaatggcgacacacctatgggggcaacctgctggtcgccctgcccgatgccttcggcacccaggcctttctgcgggacgcgccggagtgggtggcggactggaccggatttcgtcccgacagcctgccgccgatcgcggcgggcgaggaaatcatcaagtggtggaagcagaagagccgcgatccccgggagaagctgctggtgttttccgacggcatggacgtcgattcgatcgaggagacgtatcatcactttgctggccgcgtgcgggtcagtttcggctggggcaccaacctgaccaacgacttcgtgggatgttcgcccgacggcaccgtcgacctcgatccgatctcgatcgtctgcaaggtgacgtcggtcaacggccgtcctgccgtgaaactgtcggataatcccgagaaggcgaccggcgagccctcggagatcgaacgctacctgcgcgtgttcggaagcgccggccgcgtccgcgctcccgttcacgtctga

SEQ ID NO: 14110 - protein, 434 aa, Nitrobacter hamburgensis X14
MTVTDIATRTYNHGWRLDPIVRSLLDTDFYKLLMLQMIREFYPNEHVTFSVINRSRHVRLAEAIDEGELRAQLDHARSIRFSKNELIWLAGNTFYGKTQMFSPDFIDWLATFRLGEYELRKVDGQYELHFHGPWTHTTMWEIPALAILNELRSRQVTKGQGRFALDVLYARAKAKLWAKVERLRKLDDLWLSDFGTRRRHGFLWQRWCVEAAKEGLGPAFTGTSNVLLAMDNDLEAIGTNAHELPMVAAALADDDTALRRAPYRILDQWRHTYGGNLLVALPDAFGTQAFLRDAPEWVADWTGFRPDSLPPIAAGEEIIKWWKQKSRDPREKLLVFSDGMDVDSIEETYHHFAGRVRVSFGWGTNLTNDFVGCSPDGTVDLDPISIVCKVTSVNGRPAVKLSDNPEKATGEPSEIERYLRVFGSAGRVRAPVHV

SEQ ID NO: 14111 - DNA, 1308 bp, Paracoccus denitrificans PD1222
  CDS (1)..(1308): transl_table=11
atgatcccgacggtcgatatcgccacccgcgtctataaccacaaatggaagatcgacccgatcgtccgctcgctgatcgacgacgatttctacaagctgctgatgtgccagtcggtgttccgcaaccggcccgacacgcaggtcaccttcagcctgatcaaccgcagcagtcgcatccgcctggccgagctgatcgacgaaggcgagctgcgcgaacagctggaccatgcgcgtggcctgtcgctgacgcggggcgaaagcacctggctgcgcggcaataccttctatggcaagcggcagatgttccgcccggacttcatggagttcctcgagaacctgcgcctgccggcctatcacctggaaaagcgcgacggccagtatgagctggtcttcgagggcagatggcccgaagtcatgctgtgggagatcccggcgctggcgatcatcatggaactgcgctcgcgcgccgtgctcaaggacatgggccggttcgagctgcaggtgctctatgcccgcgccatggcccggctttgggaaaagatcgaggaattgcgcaagctcggccccgacctgcgcatcgccgacttcggcacccgccgccgccacagcttcctgtggcaggactggtgcgtgcaggccatggtcgaggggctgggcgaccagcggttcatcggcacctcgaactgcctgatcgccatgcgccgcgacatcgaggccatcggcaccaatgcccatgaactgcccatggtctatgccgcgctggccgacagcgacgccgaactgcgccaggcgccctatcgtgtgcttgccgactggcacgaggagcatgacgggatgctgcgcatcatcctgcccgacacctatggcaccaagggcttcctggaccatgcgcccgactggctggcaggctggaccggcatccgcgtcgacagcggcgacccggccgagggcgccgagacggcgatccgctggtggcaggagcgcggcgaggatccgcgcaacaagctgatcatcttttcggacggtctggacgtggacaagatcagggacctgttccaccgcttccacggtcgggccaaggtcagtttcggctggggcacgctgctgaccaacgattttcgcgggctggtgccgggcgacgggctggcgccgttttcgctggtctgcaaggcggtggcggccgagggacggccgaccgtcaagctttccgacaatcccgagaaggccaccggcccccaggacgagatcgagcgctacaagcgcgtattcgacgtcggccagcagcagcgcatggcggtggtggtctga

SEQ ID NO: 14112 - protein, 435 aa, Paracoccus denitrificans PD1222
MIPTVDIATRVYNHKWKIDPIVRSLIDDDFYKLLMCQSVFRNRPDTQVTFSLINRSSRIRLAELIDEGELREQLDHARGLSLTRGESTWLRGNTFYGKRQMFRPDFMEFLENLRLPAYHLEKRDGQYELVFEGRWPEVMLWEIPALAIIMELRSRAVLKDMGRFELQVLYARAMARLWEKIEELRKLGPDLRIADFGTRRRHSFLWQDWCVQAMVEGLGDQRFIGTSNCLIAMRRDIEAIGTNAHELPMVYAALADSDAELRQAPYRVLADWHEEHDGMLRIILPDTYGTKGFLDHAPDWLAGWTGIRVDSGDPAEGAETAIRWWQERGEDPRNKLIIFSDGLDVDKIRDLFHRFHGRAKVSFGWGTLLTNDFRGLVPGDGLAPFSLVCKAVAAEGRPTVKLSDNPEKATGPQDEIERYKRVFDVGQQQRMAVVV

SEQ ID NO: 14113 - DNA, 1230 bp, Pseudomonas fluorescens
  CDS (1)..(1230): transl_table=11
atggaaagtgcatttgaccgcaacaacggcgtgatccagagcctgctggataccgactactacaccttcaccatgatgcaggcggtgttgcaccagcaccccaatgtggacgtggaataccagttcatcgttcgttccagagagtccctggtgcacctgatccccgagatccgccaggagctggaaaagcttgccggcctgcagatgcgcgaaggcgaacagcgctttttgttcaacaagcgctttcgtgaatacctgacccctgacttcgaacagttcctcggcctgttccgcttcaacctgcgctacatccacgtggcggcggtcgacggccaactgagcatccgcgtccgcggcccgatgctgcactgcatcatgttcgagcagccggtgctggccatggtcagcgaactgcgcaaccgcgataagtaccccgaggtggagcttgaggatgtcactcgccggctctaccagaagttcgaatggctggagaaaaacgccagccgcgacgagcttgccgagttccgcgtttcggatttctctacccgccggcgcctgtcgttcaaggcccagcgcgaagtggtgaagatcatgcgcagcgatttccccggggtcttcgtcggcaccagcaatgcgcacctggcctatgagttcgacctgccgctgatcggcaccatggcccaccaatggctgatggtgcaccagcaactggggcggctgcgcgagagccagaatgcggcccttgagaactgggtgcacgagtatcgcgggcgcctgggcattgccctgaccgactgcatcagcaccgatttcttcctcaaggacttcgacctgtacttcgccaagctctacgacggcctgcgccaggattccggggacccgatcctctgggccgacaaggtcctggcccgctaccgggaactgggcatcgacccgcggaccaaggacctgatgttttccgatggcctgaacttcgagaaatgcctgccgatcctgcgccacgtgcgtggccaggcccgcttcggtttcggcatgggcaccagcctggcctgcgatgtggagggcgtggagccgctgagcatcgtgatgaagctggtgcgagtccacggtgaaccggtggtgaagttctccgacgacccgatcaagaacgtctgcgaagacccgtcgttcctccggtacgcggcccaggtgttcaacgtcgatcttgcccactcgcccctggaggcctga

SEQ ID NO: 14114 - protein, 409 aa, Pseudomonas fluorescens
MESAFDRNNGVIQSLLDTDYYTFTMMQAVLHQHPNVDVEYQFIVRSRESLVHLIPEIRQELEKLAGLQMREGEQRFLFNKRFREYLTPDFEQFLGLFRFNLRYIHVAAVDGQLSIRVRGPMLHCIMFEQPVLAMVSELRNRDKYPEVELEDVTRRLYQKFEWLEKNASRDELAEFRVSDFSTRRRLSFKAQREVVKIMRSDFPGVFVGTSNAHLAYEFDLPLIGTMAHQWLMVHQQLGRLRESQNAALENWVHEYRGRLGIALTDCISTDFFLKDFDLYFAKLYDGLRQDSGDPILWADKVLARYRELGIDPRTKDLMFSDGLNFEKCLPILRHVRGQARFGFGMGTSLACDVEGVEPLSIVMKLVRVHGEPVVKFSDDPIKNVCEDPSFLRYAAQVFNVDLAHSPLEA

SEQ ID NO: 14115 - DNA, 1215 bp, Pseudomonas fluorescens
  CDS (1)..(1215): transl_table=11
atgagcgagagtgtgtttgccgatcgcatcgtgcagaacctgctcgacaccgacttctacaaactgaccatgatgcaggcggtgctgcacaactaccccaacgtcgaggtggaatgggagtttcgttgccgtaacagcgaggacctgcggccctatctggcagagatccgctaccagttcgagcgcctggcggatctgagcctgagcgccgaccagttgggctttctcgaacggatcagcttcctcaagccggatttcctgcgctttctcgggctgtttcgcttcaacctgcgctacgtgcataccggcatcgaggacggcgagctgtttatccgcctgcgcggcccctggctgcacgtgatcctgttcgaagtgccgatgctggccatcatcagcgaggtgcgcaaccgctaccgctatcgcgagatccagctggtccaggcccgcgagcagctgtaccgcaagttcgactggctgaccgccaacgccagcagcgaagaactttccgagctgcaagtggctgatttcggcacccgccgacgcttttcctaccgggtccaggaagaagtagtgaacgtgctcaagcacgatttccccggacgttttgtcggcaccagtaacgtgcacctgtcccgggaactgaacatgaaacccctgggcaccatggcccacgaatggatcatggcccaccagcaactggggccgcggctgatcgacagccagatcgccgccctcgactgctgggtccgcgaataccgtggcttgctgggcatcgccctgacggattgcatcaccaccgatgccttcctcggcgatttcgacctgttcttcgccaagctgttcgacggcctgcgccacgactccggcgacccgatcctctgggcggaaaaggccatcgcccactaccacaagctgggcatcgatccgatgagcaagaccctggtgttctccgacagcctgagcctgccgcgcgccctggaaatattccgtgcgctgcgggggcggatcaatgtcagcttcggcatcggcaccaacctgacctgtgacattcccggtgtcgagccgatgagcatcgtgcttaaaatggctgcctgcaatggccagcccgtcgccaagatctccgatgaagcgggcaagacccattgcaaggatccgaacttcgtcgcttacttgcgccacgttttccaagtacctgcccaacctggcaaggagtga

SEQ ID NO: 14116 - protein, 404 aa, Pseudomonas fluorescens
MSESVFADRIVQNLLDTDFYKLTMMQAVLHNYPNVEVEWEFRCRNSEDLRPYLAEIRYQFERLADLSLSADQLGFLERISFLKPDFLRFLGLFRFNLRYVHTGIEDGELFIRLRGPWLHVILFEVPMLAIISEVRNRYRYREIQLVQAREQLYRKFDWLTANASSEELSELQVADFGTRRRFSYRVQEEVVNVLKHDFPGRFVGTSNVHLSRELNMKPLGTMAHEWIMAHQQLGPRLIDSQIAALDCWVREYRGLLGIALTDCITTDAFLGDFDLFFAKLFDGLRHDSGDPILWAEKAIAHYHKLGIDPMSKTLVFSDSLSLPRALEIFRALRGRINVSFGIGTNLTCDIPGVEPMSIVLKMAACNGQPVAKISDEAGKTHCKDPNFVAYLRHVFQVPAQPGKE

SEQ ID NO: 14117 - DNA, 1443 bp, Staphylococcus haemolyticus
  CDS (1)..(1443): transl_table=11
atgttacataatgacttataccaaattaacatggcagagagctattggaatgatggtattcatgaacgaaatgcagtatttgatttgtattttagaagtatgccatttgagagtggatatgcagtttttaatggtttaaaaagagtaattcaatttattgaacattttcattttagtgattctgatattgaatatttacagtcaataggttataaaaatgatttcttaaactatttaaaaaatttaaagttcactggtaatattcgctcaatgcaagaaggtgaattgtgttttggaaatgaaccattacttagagtggaggcaccattaattcaagcgcaacttatagaaaccgtattacttaatataatcaacttccatacattaatttcgactaaagcaagtagaattcgtcaagtagcacctgatgatacattaatggaatttggaactcgtcgtgcacaagagttagatgctgcgttatggggggctagagctgcttatatcggtggttttgattctactagtaatgtgcgttccggtaaattatttggtatacccgtttctggtacgcatgcacacgctttagttcaaacatatggtgatgaatataaagcttttaaaatttatgcagaacgccataaaaattgtgtgttcttagttgatacgttccacacgcttaaatcaggtgttcctacagctattaaagtagcgaaagaactaggggataaaatcaatttcattggtatccgtttagattctggagatattgcttatttatctaaagaagcacgcagaatgttagatgaagcgggattcaaagatgctaaaatcatcgcatctaatgacttagatgaacaaacgataatgagtttgaaatctcaaggagctaaagttgactcatggggtgtaggtacgaaattaattactggttatgaccaaccagcacttggtgcagtatataaactagtagcagttgaagatgacaacggccgatatgttgatagaattaaactgtccaacaatgcagaaaaagtgacaacacctggtaagaagaaagtgtatcgcattataaatactaaaacaggtaaagcagaaggcgactatattactctagaacatgagaatcctaataatgaaaaacctttaaaaatgttccatccagttcacacgtataaaatgaaacatatcaaacactttgaagcgattgacttgcatcattcaatctttgaaaatgggaaacttgtttaccaattaccgagtgaaaaagaggcacaagaatactctaaaaaggcattatctaaattatgggatgaaaataaacgttatttaaatcctcaagaataccctgtggatttaagtacagcttgttgggacaacaaacataagcgtattttcgaagttgcagaacacgtaaaagagatggaggaagacaatgactaa

SEQ ID NO: 14118 - protein, 480 aa, Staphylococcus haemolyticus
MLHNDLYQINMAESYWNDGIHERNAVFDLYFRSMPFESGYAVFNGLKRVIQFIEHFHFSDSDIEYLQSIGYKNDFLNYLKNLKFTGNIRSMQEGELCFGNEPLLRVEAPLIQAQLIETVLLNIINFHTLISTKASRIRQVAPDDTLMEFGTRRAQELDAALWGARAAYIGGFDSTSNVRSGKLFGIPVSGTHAHALVQTYGDEYKAFKIYAERHKNCVFLVDTFHTLKSGVPTAIKVAKELGDKINFIGIRLDSGDIAYLSKEARRMLDEAGFKDAKIIASNDLDEQTIMSLKSQGAKVDSWGVGTKLITGYDQPALGAVYKLVAVEDDNGRYVDRIKLSNNAEKVTTPGKKKVYRIINTKTGKAEGDYITLEHENPNNEKPLKMFHPVHTYKMKHIKHFEAIDLHHSIFENGKLVYQLPSEKEAQEYSKKALSKLWDENKRYLNPQEYPVDLSTACWDNKHKRIFEVAEHVKEMEEDND

SEQ ID NO: 14119 - DNA, 1245 bp, Leishmania major
  CDS (1)..(1245)
atggctcactcgaacgagttcgccccgattatcaaatcgttcctcgacacggatgcctacaaactgcacatgcagcaggccgtttttcaccagaacccaaccgtgactgcggcctacaagctcagctgccgtgacaaggatgtccaccttggcatctacgcggatcgggtatacgcgcatgtgcagcagatggcccatgtgcgactgaccgaagaggagtgtgcctacttggcaacgctgccctactttaaggaggactacctcgagtacctgcgcggctaccgctacaagtcggagcaggtgcagattcgcaccgtgctgccgacgatggcatgcgagaagaacgagttcggtgaggacggctccgacctggaggtgacggtggaggggccatgggtggaaacaattctgtgggaaatcccgctactggcgatcgtcagcgaggtcacccaacgcagccgccactcccgcgtgggtccggccgaggcgctggcgaacttgcacgagaagttggatctgtttttcgctaatcacacggaggaggagcttgccactttcaaggtcgctgagtttggcacgcgccggcgctgcagccaggcggtgcaggaggtggtcgtgcgagcgctgaaggaggatgcgcgattcggacctcgcctcgtgggcacgagtaactatgatctggcgcggcgccttggcctgccgcctgtgggcactcaagcgcacgagtggtttcaggcctttcagcagctctcttcagagctgcgccgttcccagattatggcgatggaccactggctacaggagtacccccagtgtctcggcatcgcgctaacggattgcatcacaatggacgccttcttgaaggacttcgacgcgcgtctggcgaacgcctatcagggactgcggcaagactcgggtgtgccgacggagtggggccagaaggccttgaatcactacaagcttctcgggatcgatccccgcaccaagactctcgtcttctcagacgggctcgacttggagaaggcggcggagttatacaacggcttcaaggaggacataaatgtgctatgcggcatcggtacgcagctgacgtgctccattaaaggagttcgctcgattaacatcgtcatgaaaatggtccgatgccagggcaggccagtcgcgaagctgtcggacagccccgggaagatcatgtgcgacgacctcgagtacgtcgagaagctgaaggaggcgtttaacgtgtaa

SEQ ID NO: 14120 - protein, 414 aa, Leishmania major
MAHSNEFAPIIKSFLDTDAYKLHMQQAVFHQNPTVTAAYKLSCRDKDVHLGIYADRVYAHVQQMAHVRLTEEECAYLATLPYFKEDYLEYLRGYRYKSEQVQIRTVLPTMACEKNEFGEDGSDLEVTVEGPWVETILWEIPLLAIVSEVTQRSRHSRVGPAEALANLHEKLDLFFANHTEEELATFKVAEFGTRRRCSQAVQEVVVRALKEDARFGPRLVGTSNYDLARRLGLPPVGTQAHEWFQAFQQLSSELRRSQIMAMDHWLQEYPQCLGIALTDCITMDAFLKDFDARLANAYQGLRQDSGVPTEWGQKALNHYKLLGIDPRTKTLVFSDGLDLEKAAELYNGFKEDINVLCGIGTQLTCSIKGVRSINIVMKMVRCQGRPVAKLSDSPGKIMCDDLEYVEKLKEAFNV

SEQ ID NO: 14121 - DNA, 1380 bp, Gibberella moniliformis
  CDS (1)..(1380)
atggatttcaacagctcctcgcccttcccggagggcgtcatctccttcctcgacactgatctatacaagttgacgatgcaatgtgccgtcttcaagttcttcaaagatgtgcctgtgacatacgcctacaccaaccgaactccagacaagaagctgtcgcgtaccgccttcaagtggctcgaagagcagattcgaaagctcggaaacatttctctttctaccgacgaatacctttttctcaagaagcattgcgactacctctccgacgactacctcaacttcctcaaggaattccgacttagcccccgagaacaagttgttgctaccttcactcccgtcggagaggataatggagacgactccattgagggcgacgtcgatatacagatcaagggcacttgggttgacacgatcctctacgaaatccccatgcttgctcttacatccgaggcgtacttcaagttcatggacacagactggaactatgagggccaagaaaagcaggcatttgagaagggactcaagttattagaggcaggatgcatcacatccgagttcggcacacgaagacgtcgcgactaccacacccaggcccttgtattccgaggattggtgcaagcttccaaagaagccgagaagaagggattccctggcaagctctctggaaccagtaacgtccatctcgctatgcgcttcaacatccctcccgtaggaactgtcgcccacgagtggttcatgggtgttgccgctattatcggtgactacaggtctgctactgaggttgcgctgcgacactgggtagcttgtttcggtaacaagctcggcattgctttgaccgacacctttggaactcaagagtttctgcgagctttcacccagcctgtgcaaactatcgagggtggcttcccagcagagaccttcaagaaggctgacggaaccatgaagacatatgcggagacttttgctggtattcgtcaagattccggcgaccctgcagagtacaccaagtggatgaaagagttctacgataagcagggtattaccgacaagaagctgattgtcttctctgactcactgaacattgagaggtgtctcgagtataaaaagattgctgaggaccttggcttccagccaacatttggtgtgggaacataccttaccaacgactttgtgcacctcacgactggcaaaaagtcagtgcctctgaacattgtcatcaagatcagctcggcggcaggccgcccagctgtcaagatcagtgacaacattgggaagaacacgggcgacaaggagactgtggagaaggtcaagcaggaacttggttatgtcgagcgcgagtggaaggagggcgacgaaacttctcgatggggcaaggaataa

SEQ ID NO: 14122 - protein, 459 aa, Gibberella moniliformis
MDFNSSSPFPEGVISFLDTDLYKLTMQCAVFKFFKDVPVTYAYTNRTPDKKLSRTAFKWLEEQIRKLGNISLSTDEYLFLKKHCDYLSDDYLNFLKEFRLSPREQVVATFTPVGEDNGDDSIEGDVDIQIKGTWVDTILYEIPMLALTSEAYFKFMDTDWNYEGQEKQAFEKGLKLLEAGCITSEFGTRRRRDYHTQALVFRGLVQASKEAEKKGFPGKLSGTSNVHLAMRFNIPPVGTVAHEWFMGVAAIIGDYRSATEVALRHWVACFGNKLGIALTDTFGTQEFLRAFTQPVQTIEGGFPAETFKKADGTMKTYAETFAGIRQDSGDPAEYTKWMKEFYDKQGITDKKLIVFSDSLNIERCLEYKKIAEDLGFQPTFGVGTYLTNDFVHLTTGKKSVPLNIVIKISSAAGRPAVKISDNIGKNTGDKETVEKVKQELGYVEREWKEGDETSRWGKE

SEQ ID NO: 14123 - DNA, 1233 bp, Schizosaccharomyces pombe
  CDS (1)..(1233)
atgagtgaaccggctgttgtctctatcctcgatacggatctttacaaactcaccatgcttcaagccgttttagagcattatccggatgctcaagtatcatataagtatacaaaccggtccccaaaaatggcattaaatcaggaggcttataactggttacgggaacaaataagaggcttacggaatttacatttacttcctgaagaagagcaatggcttcgcaagaactgtccttatttaaaggaatcattttatgaattcatgcatgagttcgaatttgatcctgaaaattcaatttcccttaattatgattctgaaactaaggatctctcaatctttattcacggcctctggaagaataccattttttatgaaattccactgcttgctctcgtctcagaatcttattttaaatttgtcgataaggactggtcacctgagggtcagtttgaaaaagcttacgagaagggtaagcgtctcatccgagccggatgtgcctttactgactttggcactcgtcgtcgtcgtgatcctcacacccaggaaattgttctccaaggtctcatgaaagcacaagaggattttaagggccctggaagtttccttggtacatctaatgtttacttcgccgccaaatataatctaaatgtctctggtacggttgctcacgagtggtatatgggcattgcagctattactcaaaattataaacaagcaaatcgtattgcttccttaaagtgggtccaaacttttggtactagtcttttaatagccttaacggatacattctctactgatgtgtttctcaaatcttttacagccaattctgccgacgatttagccaatgttttccatggtgttcgtcaagatagcggttgtgctgaggaatacattgaaaaagtcgtaaagcactataaatcaataggtgtcgatccttccacaaaagtaattgttcatagcgatgctttaaatgttgacagatgtatcgaactgtacaaatactgcgagaaatgtggcattaagtctgcatttggcatcggcacaaatcttaccagcgacttccaaaaagtttccaatcccagtgaagtgagcaaacctatgaatattgttattaagcttttttccgctgaaggaactaaagcagtgaagattagtgacgatatcatgaaaaatactggtgatcgtgatgctgttattcaagccaagcatcaattatgcctccctatagcataa

SEQ ID NO: 14124 - protein, 410 aa, Schizosaccharomyces pombe
MSEPAVVSILDTDLYKLTMLQAVLEHYPDAQVSYKYTNRSPKMALNQEAYNWLREQIRGLRNLHLLPEEEQWLRKNCPYLKESFYEFMHEFEFDPENSISLNYDSETKDLSIFIHGLWKNTIFYEIPLLALVSESYFKFVDKDWSPEGQFEKAYEKGKRLIRAGCAFTDFGTRRRRDPHTQEIVLQGLMKAQEDFKGPGSFLGTSNVYFAAKYNLNVSGTVAHEWYMGIAAITQNYKQANRIASLKWVQTFGTSLLIALTDTFSTDVFLKSFTANSADDLANVFHGVRQDSGCAEEYIEKVVKHYKSIGVDPSTKVIVHSDALNVDRCIELYKYCEKCGIKSAFGIGTNLTSDFQKVSNPSEVSKPMNIVIKLFSAEGTKAVKISDDIMKNTGDRDAVIQAKHQLCLPIA

SEQ ID NO: 14125 - DNA, 1290 bp, Saccharomyces cerevisiae
  CDS (1)..(1290)
atgtcagaaccagtgataaagtctcttttggacacagacatgtacaagattacgatgcatgctgctgtcttcactaattttccagatgttacagttacttataaatataccaacaggtcgtcccaattgaccttcaataaggaagccattaattggttgaaagagcaattttcgtatttgggaaatttgaggttcacagaagaggaaattgaatacttaaaacaggaaatcccatatttgccatcggcatatattaagtatattagcagttctaattacaaactacaccctgaagagcagatttccttcacttcagaagaaatcgagggcaagcccacccactacaaattgaaaattttagtcagtggtagttggaaggatactatcctttatgagatccccttactgtccctaatatcagaagcgtattttaaatttgttgacatcgactgggactacgaaaaccaattagaacaagctgagaagaaggcggaaactttgtttgataatggtattagattcagtgaatttggtacaagacgtcgtagatctctgaaggctcaagatctaattatgcaaggaatcatgaaagctgtgaacggtaacccagacagaaacaaatcgctattattaggcacatcaaatattttatttgccaagaaatatggagtcaagccaatcggtactgtggctcacgagtgggttatgggagtcgcttctattagtgaagattatttgcatgccaataaaaatgcaatggattgttggatcaatacttttggtgcaaaaaatgctggtttagcattaacggatacttttggaactgatgactttttaaaatcattccgtccaccatattctgatgcttacgtcggtgttagacaagattctggagacccagttgagtataccaaaaagatttcccaccattaccatgacgtgttgaaattgcctaaattctcgaagattatctgttattccgattctttgaacgtcgaaaaggcaataacttactcccatgcagctaaagagaatggaatgctagccacattcggtattggcacaaactttactaatgattttcgtaagaagtcagaaccccaggttaaaagtgagccgttaaacatcgttatcaaactattagaagtaaatggtaatcacgctatcaaaatttctgataacttaggtaaaaatatgggagatcctgccactgtgaagagagtgaaagaggaattgggatatactgaacgaagttggagtggtgataacgaagcgcacagatggacctaa

SEQ ID NO: 14126 - protein, 429 aa, Saccharomyces cerevisiae
MSEPVIKSLLDTDMYKITMHAAVFTNFPDVTVTYKYTNRSSQLTFNKEAINWLKEQFSYLGNLRFTEEEIEYLKQEIPYLPSAYIKYISSSNYKLHPEEQISFTSEEIEGKPTHYKLKILVSGSWKDTILYEIPLLSLISEAYFKFVDIDWDYENQLEQAEKKAETLFDNGIRFSEFGTRRRRSLKAQDLIMQGIMKAVNGNPDRNKSLLLGTSNILFAKKYGVKPIGTVAHEWVMGVASISEDYLHANKNAMDCWINTFGAKNAGLALTDTFGTDDFLKSFRPPYSDAYVGVRQDSGDPVEYTKKISHHYHDVLKLPKFSKIICYSDSLNVEKAITYSHAAKENGMLATFGIGTNFTNDFRKKSEPQVKSEPLNIVIKLLEVNGNHAIKISDNLGKNMGDPATVKRVKEELGYTERSWSGDNEAHRWT

SEQ ID NO: 14127 - DNA, 1200 bp, Pseudomonas aeruginosa
  CDS (1)..(1200): transl_table=11
atggccgaaagcgtctttgccgagcgcattgtgcagaacctgctcgataccgatttctacaagctgaccatgatgcaggcggtgctgcacaactaccccaacgccgaagtggagtgggaattccgctgccgcaacgccgaggacctgcgtccgtacctggcggagatccgctaccagatcgagcgcctcgccgaagtcgaggtaaccgccgaccagctcgccttcctcgaacgcatcccgttcatgaagccggacttcatccgcttcctcagcctgttccgcttcaacctgcgctacgtgcacaccggcatcgaggatggccaactggcaatccgcctgcgcggcccatggctgcacgtgatcctcttcgaggtgccgctgctggccatcgtcagcgaggtgcgcaaccgttatcgctaccgcgaggtggtcctggaacaggtcggcgagcagctctatcgcaagctcgactggctctccgcccaggccagcagcgaggaactcgcggaattccaggtcgccgacttcggcacccgccggcgcttctcctaccgcacccaggaggaagtggtgcatatcctcaagcgcgacttccccgggcgcttcgtcggcaccagcaacgtgcacctggcccgcgagtacgacctcaagccgatcggcaccatggcccacgaatggctgatggcccaccagcaactcggcccgcggctggtcgacagccagcaagcggcgctggactgctgggtccgcgagtaccgcggacagctcggcatagccctgaccgactgcattaccatggatgccttcctcgacgacttcgacctgtacttcgccaagctcttcgacggcctgcgccacgattcgggcgacccgctggcctgggcggagaaagccatcgcccactaccgccgcctgggtatcgacccgctgagcaagaccctggtgttctccgacgggctggacatgcccaaggcgttgcagctgttccgcgcgctacgtggcaagatcaacgtcagcttcggcatcggcaccaacctgacctgcgacatcccgggggtcgagccgatgaacatcgtcctgaagatgacggcctgcaacggccatccggtggcgaagatatccgacgccccgggcaagacccaatgccgcgacgagaacttcgtcgcctacctccgccacgtcttcaacgtgccggcctaa

SEQ ID NO: 14128 - protein, 399 aa, Pseudomonas aeruginosa
MAESVFAERIVQNLLDTDFYKLTMMQAVLHNYPNAEVEWEFRCRNAEDLRPYLAEIRYQIERLAEVEVTADQLAFLERIPFMKPDFIRFLSLFRFNLRYVHTGIEDGQLAIRLRGPWLHVILFEVPLLAIVSEVRNRYRYREVVLEQVGEQLYRKLDWLSAQASSEELAEFQVADFGTRRRFSYRTQEEVVHILKRDFPGRFVGTSNVHLAREYDLKPIGTMAHEWLMAHQQLGPRLVDSQQAALDCWVREYRGQLGIALTDCITMDAFLDDFDLYFAKLFDGLRHDSGDPLAWAEKAIAHYRRLGIDPLSKTLVFSDGLDMPKALQLFRALRGKINVSFGIGTNLTCDIPGVEPMNIVLKMTACNGHPVAKISDAPGKTQCRDENFVAYLRHVFNVPA

SEQ ID NO: 14129 - DNA, 1197 bp, Pseudomonas aeruginosa
  CDS (1)..(1197): transl_table=11
atggccgagagcgctttttccgaacgtatcgtgcagaacctgctggataccgacttctacaagctgaccatgatgcaggcggtgctgcacaactatcccaacgccgaggtggaatgggagttccgctgccgcaaccaggaagacctgcgcctgtacctgccggccatccgcgaacaactggaatacctggcgggcctggcgatcagcgacgagcaactggccttcctcgaacggattcccttcctcgcgccggacttcatccgcttcctcgggttgttccgcttcaacccgcgctacgtgcagaccggcatcgagaacgacgaattcttcctgcgcctgaaaggtccctggctgcacgtgatcctcttcgaagtgccgctgctggcgatgatcagcgaggtgcgcaaccgcgcccgctacccggccgccaccgtcgagcaggcgcgcgaacgcctgcaggaaaagttcgattggctgcgccgggaggccagcgccgaggaactggccggcttcaagatggccgacttcggtacccgccgccgcttctcctatcgggtccacgaggcggtggtgagcggtctgaaggaggactttccgggctgcttcgtcggcaccagcaacgtccacctggcacgcaagctcgacctcaagcccctcggcaccatggcccacgaatggctgatggcccaccagcagctcggtccgcgcctgatcgacagccagagtgccgcgttggactgctgggtccgcgaataccgtgggctgctcggcatcgcgctgaccgactgcatcaccaccgatgccttcctgcgcgacttcgacctctatttcgccaagctcttcgacggcctccgccacgactcgggcgacccattgctgtgggcggaaaagaccatcgcccactacctcaagctgggcatcgacccgctgaccaagaccctggtgttctccgacggcctcgacctgccgcgggccctgaagatctatcgcgcgctgcagggccggatcaacgtcagcttcggcataggcacgcatttcacctgcgacctgccgggcgtcgagccgatgaacatcgtggtgaagatgagcgcctgcaacggccatccggtggcgaagatctccgatacgcccggcaaggcgcaatgccgggaccctgacttcatccactacctcaagcacgtgttccaggtcgcctag

SEQ ID NO: 14130 - protein, 398 aa, Pseudomonas aeruginosa
MAESAFSERIVQNLLDTDFYKLTMMQAVLHNYPNAEVEWEFRCRNQEDLRLYLPAIREQLEYLAGLAISDEQLAFLERIPFLAPDFIRFLGLFRFNPRYVQTGIENDEFFLRLKGPWLHVILFEVPLLAMISEVRNRARYPAATVEQARERLQEKFDWLRREASAEELAGFKMADFGTRRRFSYRVHEAVVSGLKEDFPGCFVGTSNVHLARKLDLKPLGTMAHEWLMAHQQLGPRLIDSQSAALDCWVREYRGLLGIALTDCITTDAFLRDFDLYFAKLFDGLRHDSGDPLLWAEKTIAHYLKLGIDPLTKTLVFSDGLDLPRALKIYRALQGRINVSFGIGTHFTCDLPGVEPMNIVVKMSACNGHPVAKISDTPGKAQCRDPDFIHYLKHVFQVA

SEQ ID NO: 14131 - DNA, 1224 bp, Acinetobacter sp
  CDS (1)..(1224): transl_table=11
ttgttgtctatgtctccaatcattcattcattacttgataccgatctttataaattcaccatgttgcaagtggtgttacaccagtttccacaaacgcatagtgtctatcattttcgctgtcgtaatctggatgaaactcaatatcctttaaccgatattctggatgatttgaatgaacaactcgatcatttatgtacgctgaaatttaaggacgacgaactacaatatctgcgttcttttcggtttattaaaagtgattttgtcgattacttggaactgttccagcttaaacgtcgttttatcactgcgggtattgatgaagaaggccgcctggatatctgggttgaaggaccgatggttcaggccatgatgtttgaaatatttgtactggcgattgtgaatgagctttattttcgtcgtatacgaagtgatgctgtacttgaagagggtgagcgtcgcttacaggctaagctggctttacttgagcagtatcagacccagcatcagtcagatgagccaccatttttagtttctgattttggtacacgtcgccgttatagttttgaatggcaaaaacatgtcattgcagcatttcatcatcatttcccaaatatctttaggggaaccagtaatgtgctgttggcaaaagaactcaacattacaccaattggtacgatggcacatgagtttttgcaagcctttcaggcacttgatgtacgtttgcgtgattttcagaaagctgcacttgaaacgtgggtacaagagtatcgtggagatttagggattgcattaacggatgtcgtcggaatggatgcatttctacgcgacttcgatttgtattttgccaagttgtttgatggtttgcgtcatgacagtggtgacccttatgaatggggagataaagcctatgcacattatcgtaaattaaagatagacaccaagaccaagatgctcacgtttagtgatggcttaaatctggaaaaggcatgggaattgcatcaatattttaagggccgttttaaggtgagttttggaattgggactaatctcaccaacgatatggggcaaacgccgctcaatattgtgttgaaactggtagaatgtaatgggcaatctgtggctaaaatttcagatagtccaggcaaaaccatgactgataacgatacctttctggcttatttaagacaggtatttcaaattgctgaagaagagcctgtcgcctaa

SEQ ID NO: 14132 - protein, 407 aa, Acinetobacter sp
MLSMSPIIHSLLDTDLYKFTMLQVVLHQFPQTHSVYHFRCRNLDETQYPLTDILDDLNEQLDHLCTLKFKDDELQYLRSFRFIKSDFVDYLELFQLKRRFITAGIDEEGRLDIWVEGPMVQAMMFEIFVLAIVNELYFRRIRSDAVLEEGERRLQAKLALLEQYQTQHQSDEPPFLVSDFGTRRRYSFEWQKHVIAAFHHHFPNIFRGTSNVLLAKELNITPIGTMAHEFLQAFQALDVRLRDFQKAALETWVQEYRGDLGIALTDVVGMDAFLRDFDLYFAKLFDGLRHDSGDPYEWGDKAYAHYRKLKIDTKTKMLTFSDGLNLEKAWELHQYFKGRFKVSFGIGTNLTNDMGQTPLNIVLKLVECNGQSVAKISDSPGKTMTDNDTFLAYLRQVFQIAEEEPVA

SEQ ID NO: 14133 - DNA, 1218 bp, Bordetella pertussis
  CDS (1)..(1218): transl_table=11
atggtgtgccgaaacgtttcgcggcaacagtttcgcgccatcatgatcatcacatcgctgctcgacacggacctgtacaaattcagcatgatgcaggtcgtgctgcatcattttccggctgcacaggtcgagtaccgctacaagtgccgtactccgggcatcaatctgcggccctatctcgacgaaatacgcgccgaggtgcacgagctgtgccagctgcgcttcaccagcgaggagctggattatctgcgcggcctgcgcttcatcaagagcgatttcgtcgacttcctgggcctgttccatttgcccgagcgttgcatattcatcggcgagggcgagcagcccggcgaaatatccattacggtcaaggggccatggctgcacacgatattgttcgaaataccggtgctggccatcgtcaacgaagtctattttcgtaatacgcgcaggaatcccgattgggaggaaggccgcaagcgcttgcaatcgaagatgaacctggtgctcgacgaccccgcgctggccgatttccgggtcgcggaatacggcacccggcggcgcttctcgaaggtctggcacgaggaaatcgtctcgaccatgaaggcgcgcatgggggtgcatttcgccggcaccagcaacgtgctgctggccatgcggcacggcgtgctgccgctgggcaccatgggccacgagtatctgcaggcctgccaggcgctggggccgcggctgcgcgactcccaggtgttcgcactggaagtctgggccaaggaataccgcggcgatctcggcatcgccctgtcggacgtctatggcatggatgctttcctgcgcgacttcgacatgtacttctgcaaactgttcgacggcgcgcgccacgattcgggcgatccgttcgtgtggggcgagcggctgctcgagcactaccgcaccaatcgcgcggatccgcgcgccaagaccctggtgttctcggattcgctgacatttccgcgcgccatcgagctggcgcgccagttcgccggccgctgcaaggtgtcgttcggcatcggcaccaacctgaccaacgacctgggccacgagcccctgcagatcgtcatgaagatggtgcgctgcaatgggcagccggtcgccaaggtatcggatgcgcccgagaagacgatgtgcgacgatcccgcctatctggcctacctgcgccaggtgttccagcttccgccggcctga

SEQ ID NO: 14134 - protein, 405 aa, Bordetella pertussis
MVCRNVSRQQFRAIMIITSLLDTDLYKFSMMQVVLHHFPAAQVEYRYKCRTPGINLRPYLDEIRAEVHELCQLRFTSEELDYLRGLRFIKSDFVDFLGLFHLPERCIFIGEGEQPGEISITVKGPWLHTILFEIPVLAIVNEVYFRNTRRNPDWEEGRKRLQSKMNLVLDDPALADFRVAEYGTRRRFSKVWHEEIVSTMKARMGVHFAGTSNVLLAMRHGVLPLGTMGHEYLQACQALGPRLRDSQVFALEVWAKEYRGDLGIALSDVYGMDAFLRDFDMYFCKLFDGARHDSGDPFVWGERLLEHYRTNRADPRAKTLVFSDSLTFPRAIELARQFAGRCKVSFGIGTNLTNDLGHEPLQIVMKMVRCNGQPVAKVSDAPEKTMCDDPAYLAYLRQVFQLPPA

SEQ ID NO: 14135 - DNA, 1305 bp, Brucella melitensis
  CDS (1)..(1305): transl_table=11
atggccaaaaccgatcttgcgcggcgcgtctataaccatacctggaagctggatccgatcatccgcagcctgctggatacggatttttacaagctcctgatgctccagatgatctgggggctttatcccagggtggatgccaccttctcgctcatcaaccgcacgagttccgtgcgccttgccgacgagattgatgaaggtgaactgcgcgcgcagcttgaccatgcgcgcacattgcgtttttccaagaaggaaatgatctggcttgccggtaacacgttttatggccgcaagcagatttttcagccggaatttctggcatggctgcatgattgccaactgccggaatatgaactgcgccgcaaggacggccagtatgaactgcatttccacgggccatggacccacacgaccatgtgggaaattccggcgctggccatcatcaacgagcttcgctcgcgcgcggcaatgaaaaatctggggccgttctcgctcgatgtgctctatgcccgggccaaggcgaagatgtggagcaaggtggagcggctgcgccaactgcctgatttgaagatttctgacttcggcacccgccgccgccattccttcctgtggcaacgctggtgcgtggaagccttgaaggaggggatcggcagcgcctttaccggcacgtcaaacgtgctgcttgccatggatacggatctcgaagctctcggcaccaatgcacacgaattgccgatggtgctggccgcacttgcaaaaacggacgacgaattgcgcagcgccccctatcgtgtgttgcaggactggaaccgttattatggcggcaatcttctgatcgtgctgcccgacgccttcggcacggcggcgtttctgcgcaatgcgccggactgggtggctgactggacgggcttccgcccggacagcgccccgccgattgagggcggcgagcgcattatcgaatggtggaaatcgaagggcaaggacccgcgcgaaaagcttttgatcttttccgatgcgctcgatgtggacaccatcgaggagacctatcgccatttcgagggccgtgtgcgcatgggcttcggctggggcaccaacctcaccaatgattttgcgggctgtgcgccgcagagcattgatggcctcaaggccatttctttggtctgcaaggtaacggacgccaatggccatccggcggtcaagctttccgacaatccgcaaaaagcgacaggcgatccgaaggaagtggcgcgctatctcaggttcttcggcaatgaggaacgcgtggagcagctcgtccgcgtctga

SEQ ID NO: 14136 - protein, 434 aa, Brucella melitensis
MAKTDLARRVYNHTWKLDPIIRSLLDTDFYKLLMLQMIWGLYPRVDATFSLINRTSSVRLADEIDEGELRAQLDHARTLRFSKKEMIWLAGNTFYGRKQIFQPEFLAWLHDCQLPEYELRRKDGQYELHFHGPWTHTTMWEIPALAIINELRSRAAMKNLGPFSLDVLYARAKAKMWSKVERLRQLPDLKISDFGTRRRHSFLWQRWCVEALKEGIGSAFTGTSNVLLAMDTDLEALGTNAHELPMVLAALAKTDDELRSAPYRVLQDWNRYYGGNLLIVLPDAFGTAAFLRNAPDWVADWTGFRPDSAPPIEGGERIIEWWKSKGKDPREKLLIFSDALDVDTIEETYRHFEGRVRMGFGWGTNLTNDFAGCAPQSIDGLKAISLVCKVTDANGHPAVKLSDNPQKATGDPKEVARYLRFFGNEERVEQLVRV

SEQ ID NO: 14137 - DNA, 1305 bp, Brucella suis
  CDS (1)..(1305)
atggccaaaaccgatcttgcgcggcgcgtctataaccatacctggaagctggatccgatcatccgcagcctgctggatacggatttttacaagctcctgatgctccagatgatctgggggctttatcccagggtggatgccaccttctcgctcatcaaccgcacgagttccgtgcgccttgccgacgagattgatgaaggtgaactgcgcgcgcagcttgaccatgcgcgcacattgcgtttttccaagaaggaaatgatctggcttgccggtaacacgttttatggccgcaagcagatttttcagccggaatttctggcatggctgcatgatttccaactgccggaatatgaactgcgccgcaaggacggccagtatgaactgcatttccacgggccatggacccacacgaccatgtgggaaattccggcgctggccatcatcaacgagcttcgctcgcgcgcggcaatgaaaaatctggggccgttctcgctcgatgtgctctatgcccgggccaaggcgaagatgtggagcaaggtggagcggctgcgccaactgcctgatttgaagatttctgacttcggcacccgccgccgccattccttcctgtggcaacgctggtgcgtggaagccttgaaggaggggatcggcagcgcctttaccggcacgtcaaacgtgctgcttgccatggatacggatctcgaagctctcggcaccaatgcacacgaattgccgatggtgctggccgcacttgcaaaaacggacgacgaattgcgcagcgccccctatcgtgtgttgcaggactggaaccgttattatggcggcaatcttctgatcgtgctgcccgacgccttcggcacggcggcgtttctgcgcaatgcgccggactgggtggctgactggacgggcttccgcccggacagcgccccgccgattgagggcggcgagcgcattatcgaatggtggaaatcgaagggcaaggacccgcgcgaaaagcttctgatcttttccgatgcgctcgatgtggacaccatcgaggagacctatcgccatttcgagggccgtgtgcgcatgggcttcggctggggcaccaacctcaccaatgattttgcgggctgtgcgccgcagagcattgatggcctcaaggccatttctttggtctgcaaggtaacggacgccaatggccatccggcggtcaagctttccgacaatccgcaaaaagcgacaggcgatccgaaggaagtggcgcgctatctcaggttcttcggcaatgaggaacgcgtggagcagctcgtccgcgtctga

SEQ ID NO: 14138 - protein, 434 aa, Brucella suis
MAKTDLARRVYNHTWKLDPIIRSLLDTDFYKLLMLQMIWGLYPRVDATFSLINRTSSVRLADEIDEGELRAQLDHARTLRFSKKEMIWLAGNTFYGRKQIFQPEFLAWLHDFQLPEYELRRKDGQYELHFHGPWTHTTMWEIPALAIINELRSRAAMKNLGPFSLDVLYARAKAKMWSKVERLRQLPDLKISDFGTRRRHSFLWQRWCVEALKEGIGSAFTGTSNVLLAMDTDLEALGTNAHELPMVLAALAKTDDELRSAPYRVLQDWNRYYGGNLLIVLPDAFGTAAFLRNAPDWVADWTGFRPDSAPPIEGGERIIEWWKSKGKDPREKLLIFSDALDVDTIEETYRHFEGRVRMGFGWGTNLTNDFAGCAPQSIDGLKAISLVCKVTDANGHPAVKLSDNPQKATGDPKEVARYLRFFGNEERVEQLVRV

SEQ ID NO: 14139 - DNA, 1200 bp, Buchnera aphidicola
  CDS (1)..(1200): transl_table=11
atgaaacgatatgattatccaatagtaaaaacactgcttgatactgatgcatataaactgcatatgcaacaagctgttttttatcattataaaaatgtaaatgtagttgctgaatttctttgcagaggagataactttttaggttgctatgcaaatattttattagatcagattagtatgatgagatctttatctttaagtcatgaagaatatgtttatatgacctcttttcccttttttaaaaaagaatatttacattggttaaaaaaatttcgttataatgtttcgcaagtaaagatcaatagctatcaaggtcgattacatattcgtataagtggattatggaaagaagtaatattgtgggaagtacctattttagctttaattagcgaagtttttcatggaaatttttctccagaaattacttctcaatctgctttgcaatatttggatattaaattaaaaaaattctttaatcgtactaaatatatagatttatctcatttaaaaattgtagatttcggaacaagaagaagattttcttatgatgtgcaatattctattgttaaaagattaaaagaaagttttccctttttaattggttctagcaattaccatatagctcgtatattaaaaataaaaccagtaggaacacaagctcatgagtggtttcaagcacatcaacaaattggatcaaatttaaaaaatagtcagattttagcattacaaaaatggttatatcaatacaagaatcatctaggtattgctcttacagattcaatcactatggatgcatttttagatgattttaatttacattttgcttctttttaccaaggtattagacatgattcaggagatcctgtgaaatggggtgaaaaagctcttaaacattatgaaaaattaggtatagatccatgcacaaaaacattattgttttctgacaacttagattttaaaaaaattatatctttatataaaaaatttcataaaaaaattaatgttatttttggaataggtaccaaattaacttgtgatattccttatgtaaaaccgctaaatattgtcattaaattagtagaatgcaatggtaaacctgttgctaaaatatctgatagtccaggaaaaaccttttgtttagatcgaatttttttaaaaaatttatgtcaagtatttaatgtatcattaaaaaatagataa

SEQ ID NO: 14140 - protein, 399 aa, Buchnera aphidicola
MKRYDYPIVKTLLDTDAYKLHMQQAVFYHYKNVNVVAEFLCRGDNFLGCYANILLDQISMMRSLSLSHEEYVYMTSFPFFKKEYLHWLKKFRYNVSQVKINSYQGRLHIRISGLWKEVILWEVPILALISEVFHGNFSPEITSQSALQYLDIKLKKFFNRTKYIDLSHLKIVDFGTRRRFSYDVQYSIVKRLKESFPFLIGSSNYHIARILKIKPVGTQAHEWFQAHQQIGSNLKNSQILALQKWLYQYKNHLGIALTDSITMDAFLDDFNLHFASFYQGIRHDSGDPVKWGEKALKHYEKLGIDPCTKTLLFSDNLDFKKIISLYKKFHKKINVIFGIGTKLTCDIPYVKPLNIVIKLVECNGKPVAKISDSPGKTFCLDRIFLKNLCQVFNVSLKNR

SEQ ID NO: 14141 - DNA, 1197 bp, Buchnera aphidicola
  CDS (1)..(1197): transl_table=11
atgaaacaatataattatccaatagtgaaaacattacttgatactgatgcatataaattttatatgcagcaagctgttttttatcattataaaaatgtcgatgtagttgcagaatttatttgcagaggtcctaatattttaggttgttattctcatattttattagaccaaattaatatgatgtcttccttatctcttagtcatgaagagtatctttatatgactacttttccattttttaaaaaagaatatttacattggttaaaaaaatttcgttataatattacacaagttaaagttgataattatcatggtcaacttcatattcgtataagtggattatggaaagaagtaattttatgggaagtccctattttatcattaattagtgaaatttttcatagacattgttatccagaaattacttcgaatattgcagtacaacatttaaataaaaaattaaaagaattttttaaaaaaaacagagatgtagatttatctcgtttaaaaatagtagattttggaacaagaagacgattttcttatgatgtacaatattcaattatcaaaagattaaaagatacatttccatttttaattggttcaagtaactatcatatatcacgtattttaaaattattgccagtaggtacccaagctcatgaatggtttcaagcacaccaacaaattagttccaatctcagaaatagtcaaacattagcattaaaaacatggttgtctcaatataatcaacatttaagcatcgctcttacagattgtattacaatggattcgtttttacgtgattttaatttatttttttcaaaatcttatcaaggtatcagacatgattcaggagatccagtaaaatggggtgaaaaagctattgaacattatgaacgattaggtattgatcctactactaaaacgttattattttcagataatttaaattttagaaaaatgatatctctttataaaaaatttaataatagagtaaatattatatttggcatcggaacaaaattaacttgtgatattccaaatgttaagccgttaaatatagtaatcaaacttgtcaaatgtaatggtaaaccagttgctaaattatctgatagtcctggtaaaaccttttgtctagatagaaattttattaaatctttatgtaaagcatttgatttgtctttgacagtgtaa

SEQ ID NO: 14142 - protein, 398 aa, Buchnera aphidicola
MKQYNYPIVKTLLDTDAYKFYMQQAVFYHYKNVDVVAEFICRGPNILGCYSHILLDQINMMSSLSLSHEEYLYMTTFPFFKKEYLHWLKKFRYNITQVKVDNYHGQLHIRISGLWKEVILWEVPILSLISEIFHRHCYPEITSNIAVQHLNKKLKEFFKKNRDVDLSRLKIVDFGTRRRFSYDVQYSIIKRLKDTFPFLIGSSNYHISRILKLLPVGTQAHEWFQAHQQISSNLRNSQTLALKTWLSQYNQHLSIALTDCITMDSFLRDFNLFFSKSYQGIRHDSGDPVKWGEKAIEHYERLGIDPTTKTLLFSDNLNFRKMISLYKKFNNRVNIIFGIGTKLTCDIPNVKPLNIVIKLVKCNGKPVAKLSDSPGKTFCLDRNFIKSLCKAFDLSLTV

SEQ ID NO: 14143 - DNA, 1200 bp, Burkholderia mallei
  CDS (1)..(1200): transl_table=11
atgatcatcacttcgctgctcgataccgacctgtacaaattcacgatgatgcaggtcgtcctgcatcatttcccggccgcaagcgtcgaatatcgcttcaagtgccgcacgcccggcgtcgatctcgtgccgtacatcgacgagatccgcgccgaggttcgctcgctctgcgagctgcgcttcaccgattccgagctcgactatctgcgccggctgcgcttcgtcaagagcgatttcgtcgattttctcgcgctctttcacctgaacgagaagtacatctcgatcacgccgtcgcaaaagggcggcggcgagatcgacatcgagatcaaggggccgtggctgcacacgatccttttcgagattccggtactcgcgatcgtcaacgaggtgtacttccgcaacacgcagcgccggccggattaccgcgaagggcgcggccggctgcgcgagaagatcaagctgctcggcgcgaagcccgaattcgccgattgcaagatcgccgattacggcacgcgccgccgcttctcgaaggtctggcacgaggaggtgctgcgcacgctgcaggacgggctcgggccgcagttcgccggcacgagcaacgtctattacgcgatgacgcacgagatcacgccgctcggcacgatggcgcacgaatatctgcaggcgtgccaggcgctcggcccgcggctgcgcgattcgcagacctacggtctcgagatgtgggcgaaggaatatcgcggcgatctcggcatcgcgctgtccgacgtctacgggatggacgcgttcctgcgcgacttcgacatgtacttctgcaagctcttcgacggcgcgcgccacgattcgggcgatccgttcgactggggcgagcggctcatcaagcactacgaggagaaccgctgcgacccgcgcacgaaggtgctcgtgttctccgacgcgctcgatatcccgaaggtcatgcagctgtacgcacgctttcgcggacgctgcaagctcgcgttcggcgtcggcacgaacctcaccaacgatctcggctatcagccgttgcagatcgtcatcaagatggtgcgatgcaacgggcagccggtcgcgaagctgtcggattcgccgggcaagagcatgtgcgacgacaaggcctacctcgcgtatctgcgccaggtgttcgggatcacgcagccgcccgacgacgacgcgggcaagtaa

SEQ ID NO: 14144 - protein, 399 aa, Burkholderia mallei
MIITSLLDTDLYKFTMMQVVLHHFPAASVEYRFKCRTPGVDLVPYIDEIRAEVRSLCELRFTDSELDYLRRLRFVKSDFVDFLALFHLNEKYISITPSQKGGGEIDIEIKGPWLHTILFEIPVLAIVNEVYFRNTQRRPDYREGRGRLREKIKLLGAKPEFADCKIADYGTRRRFSKVWHEEVLRTLQDGLGPQFAGTSNVYYAMTHEITPLGTMAHEYLQACQALGPRLRDSQTYGLEMWAKEYRGDLGIALSDVYGMDAFLRDFDMYFCKLFDGARHDSGDPFDWGERLIKHYEENRCDPRTKVLVFSDALDIPKVMQLYARFRGRCKLAFGVGTNLTNDLGYQPLQIVIKMVRCNGQPVAKLSDSPGKSMCDDKAYLAYLRQVFGITQPPDDDAGK

SEQ ID NO: 14145 - DNA, 1209 bp, Chromobacterium violaceum
  CDS (1)..(1209): transl_table=11
atgcccaagaacacgcccatcatccggtcgctgctggataccgatctgtacaagttcaccatgctgcaggtggtgttgcaccaattccccgcagcccatggcgaatacgaattccgctgccgcaaccatccggacacgccgctgacccagctgaagcagcaactggaaacgcagctggacctgctgtgcgagctgcgcttcagccaggacgagctggattatctgcgcggcctgcgcttcatcaagagcgactacgtcgactacctggagctgttccacctgcagcgccgcttcatcagcgtcagcgaggaaggcgaacagctggccatccggatcaagggcccgatggtgcaggcgatgttcttcgagattttcgtgctggccatcgtcaacgagctgtatttccgccctctggacagcaaggccgtgcgcgaggaaggccgccgccggctggaagccaagctggcggagttggagcgcttccagcgcgaagaggcccccggccagcgctttccgctgctgatcgccgacttcggcacccgccgccgcttcagccgcgactggcaggcccacgtggtggagaggctgaaccacgcgctgccgcaggtgttccgcggcaccagcaacgtctacctagcccgcaagctgggcatcacgcctatcggcaccatggcccacgaattcttccaggccttccaggcgctgggcgtgcggctgcgggatttccagaaagcggcgctggaatcgtgggtgcaggaataccgcggcgacctgggcatcgcgctgaccgacgtggtcggcatggatgcctttctggccgatttcgatctctatttcgccaagctgttcgacggcctgcgccacgacagcggcgatccctacatctggggcgagaaggcgatcgcccattatcgcaagctgcggatagaccccgcgaccaagatgctgaccttcagcgacggcctcagcgtggacagcgcgctgcaactgcagcgccatttcagcccgcacatccaggtcagcttcggcatcggcacccacttcaccaacgacatggggctggagccgctgcagatcgtgctcaagctggtcagctgcaacggccagccggtagccaaactgtccgacagccccggcaaaaccatgtgcagcgacgaaactttcctggcctacctgcgccaggtattcaaggtccccgccctcgcctga

SEQ ID NO: 14146 - protein, 402 aa, Chromobacterium violaceum
MPKNTPIIRSLLDTDLYKFTMLQVVLHQFPAAHGEYEFRCRNHPDTPLTQLKQQLETQLDLLCELRFSQDELDYLRGLRFIKSDYVDYLELFHLQRRFISVSEEGEQLAIRIKGPMVQAMFFEIFVLAIVNELYFRPLDSKAVREEGRRRLEAKLAELERFQREEAPGQRFPLLIADFGTRRRFSRDWQAHVVERLNHALPQVFRGTSNVYLARKLGITPIGTMAHEFFQAFQALGVRLRDFQKAALESWVQEYRGDLGIALTDVVGMDAFLADFDLYFAKLFDGLRHDSGDPYIWGEKAIAHYRKLRIDPATKMLTFSDGLSVDSALQLQRHFSPHIQVSFGIGTHFTNDMGLEPLQIVLKLVSCNGQPVAKLSDSPGKTMCSDETFLAYLRQVFKVPALA

SEQ ID NO: 14147 - DNA, 1206 bp, Erwinia carotovora
  CDS (1)..(1206): transl_table=11
atgactttgcacacttccccgattctacactcattgctggataccgatgcctacaagctgcacatgcaacaggcagtgtatcatcactactatgatgtcgacgttgcggctgagtttcgctgtcgcggtgatgagttattaggcgtttacgccgacgagatagcccatcaggttgatctgatgcgtttcctgtcattgagtgacgatgaattcacctatctttcttctctgccgttctttcagcaggattatctcaactggctgcggaacttccgttttaatccacagcaggtttcgattaagaataatgctggcaagctggatatccgcatcaccgggccgtggcgtgaagtgatcttgtgggaagttcctctgcttgcggtgatcagcgaagtcgtgcatcggcatcgttcgcccaacgtcacgacagagcaggccgtcgctcagctttctacctcgttagaaagtttccgccagaacagcatgaatgttgatctcagtcagttcaaactgatggatttcggcacgcgtcgccgcttctcaggtgatatccagcaaaccatcgtgacggcactgcaagccgattttccttatctcatcggcaccagcaattacgatctggcgcgccgtttgggcatcacacctgtcggcacgcaggcgcacgagtggtttcaggcgcatcagcagattagtccgacgctggcaaacagccagcgtgccgcactacaaatgtggttacgtgaatatcccacgcatttgggcatcgcgttgaccgattgcatcaccatggatgccttcctgcgtgatttcgatttaccgttcgccgaggcctatcaggggctacgccacgattctggcgatcctgttgactggggagagaaagccattgctcattatcaacgcttgaacatcgatccgatgagcaaaacactggtcttctccgacaatctgaatctggataaagcgctggtgctttatcgtcacttctgccagcgcgtgaatttggtatttggcatgggtacacgcctgacgtgtgacattcccggcgtgaaaccgctgaatatcgtgatcaagctggtagaatgtaacggcaaaccggtagcgaaactctccgatagcccgggtaaaaccatctgtcaggatcagaacttcgtgtgcgagttacgcaaagcgtttgacttaccccgcgtgaaaaaggccagttaa

SEQ ID NO: 14148 - protein, 401 aa, Erwinia carotovora
MTLHTSPILHSLLDTDAYKLHMQQAVYHHYYDVDVAAEFRCRGDELLGVYADEIAHQVDLMRFLSLSDDEFTYLSSLPFFQQDYLNWLRNFRFNPQQVSIKNNAGKLDIRITGPWREVILWEVPLLAVISEVVHRHRSPNVTTEQAVAQLSTSLESFRQNSMNVDLSQFKLMDFGTRRRFSGDIQQTIVTALQADFPYLIGTSNYDLARRLGITPVGTQAHEWFQAHQQISPTLANSQRAALQMWLREYPTHLGIALTDCITMDAFLRDFDLPFAEAYQGLRHDSGDPVDWGEKAIAHYQRLNIDPMSKTLVFSDNLNLDKALVLYRHFCQRVNLVFGMGTRLTCDIPGVKPLNIVIKLVECNGKPVAKLSDSPGKTICQDQNFVCELRKAFDLPRVKKAS

SEQ ID NO: 14149 - DNA, 1215 bp, Methanosarcina acetivorans
  CDS (1)..(1215): transl_table=11
gtgataaaatcgatacttgataacgacctttataaattcaccatgcaaatggctgtactggaattatttccaaaagcagaggcagaatatcgttttaccaatcgtggatcccatcacttttccgaagagttcgtagaaaagctcaggagagtcatagacgaagatatctccgccctgatgctgacagaagacgaataccagtggcttggtgaaaactgctcttttttaaaaccgatgtaccttgaatacctcaaaaatttccgcttcaaacccggggaagtagaagtctgcctcaccgaagaaaaagaactggacatccgaataaaagggccctggcatagcacgattctctgggagattgttcttatggctgcggtctccgaactctacttcacgactatagaaaaggaatggaacggaaaggaatgggacggaaacatctccgcgacatccgaatccatccttacagcctatggagaaaaaatcctggaaatcggaaagatccttgaggaaaacggttgcctttttgccgagttcgggacccgcaggcgaagaagctttgaactccacgaccaggtgatgaaaacccttctgcagatagaaaccctcacagggaccagcaatgtcttttttgcaaaaaagtatggtttaaaacctataggtacggtaggccacgagtggattatgggcacttctgcgcttatagggctcaggtatgctaaccgcttcgctttcgaaaactgggtggaggtctacaaaggagaccttgggattgcccttacggataccttcggctctgaggccttttttaaggatatggatctgaaactgtcaaaaatctacgacgggttcagacacgacagtggagaccctttcacctttgtggacagggtgatagatcattacaggaaaatgggcatcgacccgatgaaaaaggtaatagttttcagcgatgccctcaacgccgaagccgcaatccggctcaaaaaatactgccaggacaaaatcaactgcagtttcgggataggtacaagccttaccaacaattcggaatttttccgggaaagtcctcccctgaatatggtgattaaactccacagtgttaacggcattccggtagtgaaattaagcgactctcccgaaaaagagacaggagaaagggacgccctgagggttgcaaactatatcgtcggaagaaaagggctggatgaatga

SEQ ID NO: 14150 - protein, 404 aa, Methanosarcina acetivorans
MIKSILDNDLYKFTMQMAVLELFPKAEAEYRFTNRGSHHFSEEFVEKLRRVIDEDISALMLTEDEYQWLGENCSFLKPMYLEYLKNFRFKPGEVEVCLTEEKELDIRIKGPWHSTILWEIVLMAAVSELYFTTIEKEWNGKEWDGNISATSESILTAYGEKILEIGKILEENGCLFAEFGTRRRRSFELHDQVMKTLLQIETLTGTSNVFFAKKYGLKPIGTVGHEWIMGTSALIGLRYANRFAFENWVEVYKGDLGIALTDTFGSEAFFKDMDLKLSKIYDGFRHDSGDPFTFVDRVIDHYRKMGIDPMKKVIVFSDALNAEAAIRLKKYCQDKINCSFGIGTSLTNNSEFFRESPPLNMVIKLHSVNGIPVVKLSDSPEKETGERDALRVANYIVGRKGLDE

SEQ ID NO: 14151 - DNA, 1209 bp, Neisseria gonorrhoeae
  CDS (1)..(1209)
atgaccggcatcatacattcgctgctcgacactgacctctacaaattcactatgctgcaagtagtcctgcaccagtttccgcagacgcacagcctttacgaattccgctgccgcaacgtctcgaccgtctatccgcttgccgacatcagggaagacttggaagccgaactcgacgcgctctgccggctgcgcttcacccacgacgaactcggctatctgcgctccctgcgtttcatcaaaagcgactttgtcgattatctcgaactcttccagctccaacgccgctttgtcgaagtcggcacagacgataaaggccgtctgaacatccgtatcgaaggcccgatgatacaggcgatgttttttgaaatcttcatcctcgccattgtcaacgaactttacttccgccggctggaaacccctgccgttatcgaagaaggcgaacgccggcttcaagccaaagccgcgcgcctgaaagaaatcgccgccgcacagaatccggacgaaccgcccttcctgatttccgacttcggcacgcgccgccgctacaagctcgcgtggcaggaacacgtcatccgcaccctgctcgaagccgccccaagcatcgtgcgcggcacaagcaacgtttacctcgccaaaaaactcggcatcacccccatcggcaccatggcgcacgaattcctccaagccttccaagccctcgacgtgcgcctgcggaatttccaaaaggccgcgctcgaaagctgggtgcacgaataccggggcgatttgggcgttgccctgaccgacgtggtcggtatggatgccttcctgcgcgatttcgacctctatttcgccaaactctttgacgggctgcgccacgacagcggcgacccttacgtttggggcgacaaagcctacgcccactatcaaaagctcaaaatcgacagccgcaccaaaatgctgaccttctccgacgggctggacatcgaacgctcttgggcattgcaccaatatttcaaaggccgcttcaaaaccggcttcggcatcggcaccaacctcaccaacgatatggggcatacgcccttgaatatcgtgttgaaactggtcgaatgcaacgggcagtccgtcgccaagctctccgactcgccgggcaaaaccatgaccaacaacagcaccttcctcgcctacctgcgccaagtgttcggcatacccgaacctagaacgccgtaa

SEQ ID NO: 14152 - protein, 402 aa, Neisseria gonorrhoeae
MTGIIHSLLDTDLYKFTMLQVVLHQFPQTHSLYEFRCRNVSTVYPLADIREDLEAELDALCRLRFTHDELGYLRSLRFIKSDFVDYLELFQLQRRFVEVGTDDKGRLNIRIEGPMIQAMFFEIFILAIVNELYFRRLETPAVIEEGERRLQAKAARLKEIAAAQNPDEPPFLISDFGTRRRYKLAWQEHVIRTLLEAAPSIVRGTSNVYLAKKLGITPIGTMAHEFLQAFQALDVRLRNFQKAALESWVHEYRGDLGVALTDVVGMDAFLRDFDLYFAKLFDGLRHDSGDPYVWGDKAYAHYQKLKIDSRTKMLTFSDGLDIERSWALHQYFKGRFKTGFGIGTNLTNDMGHTPLNIVLKLVECNGQSVAKLSDSPGKTMTNNSTFLAYLRQVFGIPEPRTP

SEQ ID NO: 14153 - DNA, 1209 bp, Neisseria meningitidis
  CDS (1)..(1209)
atgaccggcatcatacattcgttgcttgacaccgacctctacaaattcactatgctgcaagtagtcctgcaccagtttccgcagacgcacagcctttacgaattccgatgccgcaacgcctcgaccgtctatccgcttgccgacatcaaagaagacttggaagtcgaactcgacgcgctctgccaactacgcttcacccacgacgaactcgactatctgcgcagcctgcgtttcatcaaaagcgactttgtcgattatctcgaactcttccagctccaacgccgctttgtcgaagtcggcacagacgataaaggccgtctgaacatccgcatcgaaggtccgatgatacaggcgatgttttttgaaatcttcatcctcgccattgtcaacgaactttacttccgccggctggaaacccctgccgttatcgaagaaggtgaacgccggcttcaagccaaagccgcgcgcctgaaagaaatcgccgccgcacaaaaccccgacgaaccgcccttcctgatttccgacttcggcacgcgccgccgctacaagctcgcgtggcaggaacacgtcatccgcaccctgctcgaagccgccccaagcatcgtgcgcggcaccagcaatgtctttctcgccaaaaaactcggcatcacgcccatcggcaccatggcgcacgaattcctccaagccttccaagccctcgacgtgcgcctgcgtaatttccaaaaggccgcgctcgaaagttgggtacacgaataccggggcgatttgggcgttgccctgaccgacgtggtcggtatggatgccttcctgcgcgatttcgacctctatttcgccaaactctttgacgggctgcgccacgacagcggcgacccttacatttggggcgacaaagcctacgcccactatcaaaagctcaaaatcgacagccgcaccaaaatgctgaccttctccgacgggctggacatcgaacgctcttgggcattacaccaatatttcaaagaccgcttcaaaaccggcttcggcatcggcaccaacctcaccaacgatatggggcatacacccttaaatattgtgttgaaactggtcgaatgcaacgggcagtccgtcgccaagctgtccgactctccgggcaaaaccatgaccaacaacagcaccttcctcgcctacctgcgccaagtgttcgacgtacccgaacccgaaacgccgtaa

SEQ ID NO: 14154 - protein, 402 aa, Neisseria meningitidis
MTGIIHSLLDTDLYKFTMLQVVLHQFPQTHSLYEFRCRNASTVYPLADIKEDLEVELDALCQLRFTHDELDYLRSLRFIKSDFVDYLELFQLQRRFVEVGTDDKGRLNIRIEGPMIQAMFFEIFILAIVNELYFRRLETPAVIEEGERRLQAKAARLKEIAAAQNPDEPPFLISDFGTRRRYKLAWQEHVIRTLLEAAPSIVRGTSNVFLAKKLGITPIGTMAHEFLQAFQALDVRLRNFQKAALESWVHEYRGDLGVALTDVVGMDAFLRDFDLYFAKLFDGLRHDSGDPYIWGDKAYAHYQKLKIDSRTKMLTFSDGLDIERSWALHQYFKDRFKTGFGIGTNLTNDMGHTPLNIVLKLVECNGQSVAKLSDSPGKTMTNNSTFLAYLRQVFDVPEPETP

SEQ ID NO: 14155 - DNA, 1209 bp, Neisseria meningitidis
  CDS (1)..(1209): transl_table=11
atgaccggcatcatacattcgctgcttgacaccgacctctacaaattcactatgctgcaagtggttctgcaccagtttccgcagacgcacagcctttacgaattccgctgccgcaacgcctcgaccgtctatccgcttgccgacatcagggaagacttggaagccgaactcgacgcgctctgccaactacgcttcacccacgacgaactcggctatctgcgctccctgcgtttcattaaaagcgactttgtcgattatctcgaactcttccagctccaacgccgctttgtcgaaatcggcacagacgataaagaccgtctgaacatccgcatcgaaggtccgatgatacaggcgatgttttttgaaatcttcatcctcgccattgtcaacgaactttacttccgccgcctggaaacccctgcagtcatagaagaaggcgaacgccggcttcaagccaaagccgcgcgcctcaaagaaatcgccgccgcacaaaaccccgacgaaccgcccttcctgatttccgacttcggcacgcgccgccgctacaagctcgcgtggcaggaacacgtcatccgcaccctgcttgaagccgcccccggcatcgtacgcggcaccagcaatgtctttctcgccaaaaaactcggcatcacccccatcggcaccatggcgcacgagttcctgcaggcattccaggccctcgacgtacgcctgcggaatttccaaaaggccgcgctcgaaagctgggtgcacgaataccggggcgatttgggcgttgccctgaccgacgtggtcggtatggatgccttcctgcgcgatttcgacctctatttcgccaaacttttcgacgggctgcgccacgacagcggcgacccttacgtttggggcgacaaagcctacgcccactatcaaaagctcaaaatcgacagccgcaccaaaatgctgaccttctccgacgggctggacatcgaacgctcttgggcattgcaccaatatttcaaagaccgcttcaaaaccggcttcggcatcggcaccaacctcaccaacgatatggggcatacgcccttgaatatcgtcttgaaactggtcgaatgcaacgggcagtccgtcgccaagctgtccgactctccgggcaaaaccatgaccaacaacagcaccttcctcgcctacctgcgccaagtgttcgacgtacccgaacccgaaacgccgtaa

SEQ ID NO: 14156 - protein, 402 aa, Neisseria meningitidis
MTGIIHSLLDTDLYKFTMLQVVLHQFPQTHSLYEFRCRNASTVYPLADIREDLEAELDALCQLRFTHDELGYLRSLRFIKSDFVDYLELFQLQRRFVEIGTDDKDRLNIRIEGPMIQAMFFEIFILAIVNELYFRRLETPAVIEEGERRLQAKAARLKEIAAAQNPDEPPFLISDFGTRRRYKLAWQEHVIRTLLEAAPGIVRGTSNVFLAKKLGITPIGTMAHEFLQAFQALDVRLRNFQKAALESWVHEYRGDLGVALTDVVGMDAFLRDFDLYFAKLFDGLRHDSGDPYVWGDKAYAHYQKLKIDSRTKMLTFSDGLDIERSWALHQYFKDRFKTGFGIGTNLTNDMGHTPLNIVLKLVECNGQSVAKLSDSPGKTMTNNSTFLAYLRQVFDVPEPETP

SEQ ID NO: 14157 - DNA, 1215 bp, Photorhabdus luminescens
  CDS (1)..(1215): transl_table=11
atgacactagacgctaccccaattattaaatcactgcttgatactgacgcttataaacttcatatgcaacaagcagtgtaccaccgctacagccacatgcctgttgttgcagagtttcgctgccgcggcgacgaactgctaggtgaatatgccacagaattacgtcatcaagttaatatgatggctgatctggcattaaccgatgctgaatttaattacctttccagcctgccttttttcaaggctgattatctggactggttaaaaacctttcgttttaacccacagcaagtcaatatttctgttacaaatggcggccaattagctatccatatttcaggattatggtatgaagtgattatgtgggaagtcccattactggcgttaatcagtgaattaattcatcgtcatcactcaccagataatacggtggaaaatgccgtcaaccagctacgcaagttgatcaaactgttctatcaacatgctgaaaatgaaggaatcgatctctccagttttaaactgatggatttcggtacacgccgtcgtttctcacaccgtgttcaacacgctgtcgtcagtgagctgcaacagcatttcccttatctgattggcactagtaattaccaacttgcacaacagcttgggctccctcctgttggaacacaagcgcatgagtggtttcaagctcatcagcaaatcagcccggatctggctagcagtcaacgagaagcattacagagttggctgaaagaatatcctaaccaattaggtattgccttgactgactgcattacaatggacgcgtttctgcgggactttgatgcccagtttgccaaaaattatcaaggcttacgccatgattcgggtgatcccgttcaatggggtgaaaaagcgatcgcccactatcaaaaactgggtatcgacccaatgacaaagaccttagtgttctctgacagcttggactttcaaaaagcactagcgctctatcgtcatttccacaacagaataaacctgattttcggtatcggtacacagctcacctgcaatatcccaggggttaagccactgaacatcgtcatcaaacttgtcgagtgtaatggcaaaccggtcgcaaagctttcagacagccctggcaaaaccatttgtgaagataacgagtttgttaacaggctacgcgccgcttttgatataccccaggttaaacaagcttgttaa

SEQ ID NO: 14158 - protein, 404 aa, Photorhabdus luminescens
MTLDATPIIKSLLDTDAYKLHMQQAVYHRYSHMPVVAEFRCRGDELLGEYATELRHQVNMMADLALTDAEFNYLSSLPFFKADYLDWLKTFRFNPQQVNISVTNGGQLAIHISGLWYEVIMWEVPLLALISELIHRHHSPDNTVENAVNQLRKLIKLFYQHAENEGIDLSSFKLMDFGTRRRFSHRVQHAVVSELQQHFPYLIGTSNYQLAQQLGLPPVGTQAHEWFQAHQQISPDLASSQREALQSWLKEYPNQLGIALTDCITMDAFLRDFDAQFAKNYQGLRHDSGDPVQWGEKAIAHYQKLGIDPMTKTLVFSDSLDFQKALALYRHFHNRINLIFGIGTQLTCNIPGVKPLNIVIKLVECNGKPVAKLSDSPGKTICEDNEFVNRLRAAFDIPQVKQAC

SEQ ID NO: 14159 - DNA, 1218 bp, Photobacterium profundum
  CDS (1)..(1218): transl_table=11
atgaatcacacaaaactcattgggattattgactccctacttgataccgatgcgtataagctgcacatgcagcaagcgatttatcatcaatatccacacgtagaagccgttgctgaatttcattgccgaagcaaagaagacctccgtccctacgccaaggcaattcaagcacaaattcaacacatctcaacattgtcatttgcacaagaagagttagattaccttgcatcactctctttcttcaagaaagactaccttacttatttaaaagacttttcactcaacagtgaacaagtaacggtagatggttcaggcgatcagctttcaatcaagattaagggtaagtggattgatatcattttatgggaagtcccattacttgctatcatttgcgaaatacgttcatccatttgttacccacactccaccgcagatgacgcaattgcacagcttaaaactaagatcgaacgtttttacctaaatgctaaaacggtagatagtgcaacacaaacagccacggatttaagtcaatttgatctaattgattttggtagccgtcgacgtttctctaaagatgtgcaccacaaagttgtcgattatttagcggcaaacgtacctgagtttaaaggaacatcaaactaccatttggctcgaacacgaaatttaaccccctttggtacacaagcacatgaatggtttcaagctcaccaacaattaaccggtgaacttgccgattcacaacagttagcattaaaccgatggctacaagagtacccagattcgttaggtattgccctaaccgattgcattaataccgacgcgtttttacgtgattttaactcagagttatctgaacgtttcgtcgggttacgccacgatagcggcgacccaatcacttggggtgaaaaagccattaagcattatgaatctttggacattgatttaaggacaaaatctttaatcttttcagatagcttaacattggataaagcattaaacatttacaaacactttgcttcacgtattaacgtcagctttgggattggcactcaattaacgtgtgatttaccgggtgttgaaacattaaatgttgtgctaaaactaacgcaatgtgaaggtcgaccagtggctaaaatctctgatgaaccaggcaaaatcatgtgcagagatgaagattatttaacgcagcttcgccaagcatttaaaattgcgaactaa

SEQ ID NO: 14160 - protein, 405 aa, Photobacterium profundum
MNHTKLIGIIDSLLDTDAYKLHMQQAIYHQYPHVEAVAEFHCRSKEDLRPYAKAIQAQIQHISTLSFAQEELDYLASLSFFKKDYLTYLKDFSLNSEQVTVDGSGDQLSIKIKGKWIDIILWEVPLLAIICEIRSSICYPHSTADDAIAQLKTKIERFYLNAKTVDSATQTATDLSQFDLIDFGSRRRFSKDVHHKVVDYLAANVPEFKGTSNYHLARTRNLTPFGTQAHEWFQAHQQLTGELADSQQLALNRWLQEYPDSLGIALTDCINTDAFLRDFNSELSERFVGLRHDSGDPITWGEKAIKHYESLDIDLRTKSLIFSDSLTLDKALNIYKHFASRINVSFGIGTQLTCDLPGVETLNVVLKLTQCEGRPVAKISDEPGKIMCRDEDYLTQLRQAFKIAN

SEQ ID NO: 14161 - DNA, 1170 bp, Ralstonia solanacearum
  CDS (1)..(1170)
atgatcatccgctcgctgctcgacaccgatctgtacaagttcaccatgatgcaggtggtgttgcatcactttcccggtgcgcacgtcgaataccgcttcaagtgccgcaacccgggcgtcgacctggtgccgtacatcgaggcgatccgcgcggagatccgccacctgtgctcgctgcgcttcaccgaggcggaactggactacctgcgcgggctgcgcttcatcaagagcgatttcgtcgattttctcgacctgttccatctcagcgagaagtacatcgatatccgcccggcggcctccaacgacggccagatcgacatcgtcatcagcgggccgtggctgcacaccatcatgttcgaggtgccggtgctggccatcgtcaacgaggtgtacttcagccgcacccaggcccacccgcagtgggacgagggcaagcgccgcctgaccgagaagctcgcctcgctcacgcgcccgggcctggaggactgccgcatcgccgattacggcacgcgccgccgcttctcccacacctggcacgagcacgtgctgatggaggcgcgcagccagcttggcagccagtacgccggcaccagcaacgtctacttcgccatgaagcacaacatgacgccgctgggcaccatggcgcacgagtacctgcaggcgtgccagtcgctgggcccgcgcctgcgcgattcacaggtcttcgcgctggagacctgggcccgggaataccgtggcgacctgggcatcgcgttgtccgacacctacggattcgacgccttcctgcgcgacttcgacatgtttttctgcaagctcttcgatggcgtgcggcacgattccggtgatccgttcgagtggggcgagcgcatgctcaagcactacgagggcatgcgcgtcgacccgcaatccaaggcgctgatcttctccgacagcctggacatgcccaaggtggtgcgcctgtacgagcgcttccgcagccgctgcaagctggccttcggcgtcggcaccaacctgaccaacgacctcggctacacgccgctgcagatcgtcatcaagatggtccgctgcaacggccagccggtcgccaagctgtcggatgcgcccgagaagaccatgtgcgacgacccggcctacctggcctacctgaagcaggtgttcggcgtgcaatga

SEQ ID NO: 14162 - protein, 389 aa, Ralstonia solanacearum
MIIRSLLDTDLYKFTMMQVVLHHFPGAHVEYRFKCRNPGVDLVPYIEAIRAEIRHLCSLRFTEAELDYLRGLRFIKSDFVDFLDLFHLSEKYIDIRPAASNDGQIDIVISGPWLHTIMFEVPVLAIVNEVYFSRTQAHPQWDEGKRRLTEKLASLTRPGLEDCRIADYGTRRRFSHTWHEHVLMEARSQLGSQYAGTSNVYFAMKHNMTPLGTMAHEYLQACQSLGPRLRDSQVFALETWAREYRGDLGIALSDTYGFDAFLRDFDMFFCKLFDGVRHDSGDPFEWGERMLKHYEGMRVDPQSKALIFSDSLDMPKVVRLYERFRSRCKLAFGVGTNLTNDLGYTPLQIVIKMVRCNGQPVAKLSDAPEKTMCDDPAYLAYLKQVFGVQ

SEQ ID NO: 14163 - DNA, 1305 bp, Rhizobium loti
  CDS (1)..(1305): transl_table=11
atggcaagaaccgatatagcgcggcgtgtctacaaccacacctggaagctcgacccgatcgtgcgcagcctgctcgacacggacttctacaagcttttgatgctgcagatgatctggggcatgtacccaaaggtcgatgccaccttctcgctgatcaaccgcaccacctcggtgcggcttgccgacgagattgacgagggcgaactgcgcgagcagctcgatcatgcccgcaccttgcgcttctccaagaaggagatgatctggctcggcggcaacaatttctatggccgcaagcagatcttcgaaccggaattcctggcctggctggaaggtttccggctgccggactacgagctgtccaagcgtgacggccagtatgagctctccttcagcggcccgtggatgtacaccacgctgtgggaaatcccggcgctcgccatcatcaacgaactgcgctcccgggccgccatgcgggccttcggccccttcgcgctcgatgtgctctatgcccgcgccaaggccaagatgtgggccaagaccgagcggctgaaggcgctgccgggcatccgcatttccgatttcggcacgcgccgccggcattccttcctgtggcagcgctggtgcgtcgaagcgctgaaggaaggcataggcgaggcgttcaccggcacctccaacgtgctgcttgcgatggacaacgacctcgaagcgctcggcaccaatgcgcatgagctgccgatggtgtttgcagcccttgccaattcggagaaggagctgaaacaggctccctacaaggtgctgcaggactggcagcgctactatggcggcaacctcctgatcgtgctgcccgacgcttttggcaccgcctccttcctgcgcgacgcgccggactgggtggccgactggaccggatttcgccccgacagcgcgccgccgatcgagggcggcgaaaagatcctgtcctggtggcgcgagaggggcaaggacccgaagcaaaagctgctgatcttctccgacggtctcgaagtggaaaccatcgaggagacctaccgccacttcaagggcaaggtgcgcatgtccttcggctggggcaccaatctcaccaatgatttcgagggctgcgcgccgaccgaaaccaacagcctcgacgccatatcgctggtctgcaaggtgacggaagccaatggcaggccggcggtgaagctgtccgacaatcccgccaaggcgacgggggacgagaaggaaatcgagcggtatctcaggattttcggcgagaaggaccgggtggagcaactggtcaaggtgtga

SEQ ID NO: 14164 - protein, 434 aa, Rhizobium loti
MARTDIARRVYNHTWKLDPIVRSLLDTDFYKLLMLQMIWGMYPKVDATFSLINRTTSVRLADEIDEGELREQLDHARTLRFSKKEMIWLGGNNFYGRKQIFEPEFLAWLEGFRLPDYELSKRDGQYELSFSGPWMYTTLWEIPALAIINELRSRAAMRAFGPFALDVLYARAKAKMWAKTERLKALPGIRISDFGTRRRHSFLWQRWCVEALKEGIGEAFTGTSNVLLAMDNDLEALGTNAHELPMVFAALANSEKELKQAPYKVLQDWQRYYGGNLLIVLPDAFGTASFLRDAPDWVADWTGFRPDSAPPIEGGEKILSWWRERGKDPKQKLLIFSDGLEVETIEETYRHFKGKVRMSFGWGTNLTNDFEGCAPTETNSLDAISLVCKVTEANGRPAVKLSDNPAKATGDEKEIERYLRIFGEKDRVEQLVKV

SEQ ID NO: 14165 - DNA, 1305 bp, Rhizobium meliloti
  CDS (1)..(1305): transl_table=11
atgccaaagaccgatatcgcgcgacgggtctataaccatacctggaagctcgatccgatcgtccgcagcctgctcgatacggatttctacaagcttttgatgctgcagatgatctggcagctctatccggacgtggacgcgaccttttcgctgatcaaccgcacgaagacggtgcgccttgccgacgagatcgacgaacaggaactgcgcgaccagctcgaccacgcgcgaggcctgcgcttcaccaagaaagaaatgatatggcttgcgggtaacagcttctatggccgcacgcagatcttttcgccggaatttctcgcctggctcgcaagattccgccttccggaatacgagctgtcgcgtcgtgacggccaattcgaactgacctttcgtggccgctgggccgagacgacgatgtgggaaatccctgcgctcgcgatcatcaacgagttgcgctcgcgcgcggcgatgaaagggctcggcccattcacgctggacgtcctctatgcccgcgccaaggccaagatgtggtcgaaggtcgagcagttgcgggagcatccgaacctgcgcatttccgacttcggtacgcgccggcggcacagcttcctatggcagcgctggtgcgtcgaggcgctgaaggaaggcatcggctcgtccttcacaggctcgagcaacgtgctgctggcaatggacaatgatctggaggcggtcggcaccaatgcgcacgagctgccgatggtggctgcggcgcttacccgcaacgaccgcgagcttgcggccgcgccctacaaggttctgcaggactggaaccagctctatggcggcaacctcctgatcgtgctcccggacgcgttcgggacggccgcgttcctcagggatgcacccgactgggtggcggactggaccggcttccggccggacagtgccccgcccatcgagggaggcgagaagatcatcgcctggtggaagaagatgggccgagacccgcgggagaagcttctgatcttctccgacggcctcgacgtcgacacgatcatcaggacctactgccatttcgaagggcgcgtgcgcatgagcttcggctggggaacgaacctgacgaatgatttcgccggctgcgccccgaccgaaatcaacggcctcaacccgatctccatcgtatgcaaggtcagcgaggcaaatggccgtccggccgtcaagctctcggacaacccgcgcaaggcgacgggggatccagccgaggtcgagcgctatctgaaatttttcggcagcgaggatttcgtggagcaatccgtacgggtgtga

SEQ ID NO: 14166 - protein, 434 aa, Rhizobium meliloti
MPKTDIARRVYNHTWKLDPIVRSLLDTDFYKLLMLQMIWQLYPDVDATFSLINRTKTVRLADEIDEQELRDQLDHARGLRFTKKEMIWLAGNSFYGRTQIFSPEFLAWLARFRLPEYELSRRDGQFELTFRGRWAETTMWEIPALAIINELRSRAAMKGLGPFTLDVLYARAKAKMWSKVEQLREHPNLRISDFGTRRRHSFLWQRWCVEALKEGIGSSFTGSSNVLLAMDNDLEAVGTNAHELPMVAAALTRNDRELAAAPYKVLQDWNQLYGGNLLIVLPDAFGTAAFLRDAPDWVADWTGFRPDSAPPIEGGEKIIAWWKKMGRDPREKLLIFSDGLDVDTIIRTYCHFEGRVRMSFGWGTNLTNDFAGCAPTEINGLNPISIVCKVSEANGRPAVKLSDNPRKATGDPAEVERYLKFFGSEDFVEQSVRV

SEQ ID NO: 14167 - DNA, 1203 bp, Salmonella choleraesuis
  CDS (1)..(1203)
atgacacaattcgcttctcctgttctgcactcgttgctggatacagatgcttataagttgcatatgcagcaagccgtttttcaccactactatgatgtgcaggtagcggctgagtttcgttgccgtgacgacgacctgctgggtatttatgccgatgctattcgcgagcaggtggacgcgatgcagcacctgcgcctccaggaggacgagttccagtggctctccggcctgcccttttttaaaccggattatctgaactggttacgcgagtttcgctataacccggctcaagtctgtgtcaccaacgataacggcaagctgaatattcgcttaaccggcccgtggcgtgaagtcattatgtgggaagtgccgctgctggccgtgatcagtgagctggttcatcactaccgctcgccaaacgcgggcgttgatcaggcgctcgacgcgctggaaagtaagctggttgatttcactgcgttaaccgccaatctcgatatgtcccgcttccacctgatggacttcggcacccgccgccgtttctctcgtgaagtgcagcaggcgatagttaaacgtctccagcaggagtcatggttcgtcggcaccagcaactatgatctcgcgcgtcgcctggcgctgacgccgatgggcactcaggcgcacgaatggttccaggcgcatcaacaaatcagtccggacctggcgaccagccagcgtgccgcgttggccgcctggcttaacgaatatccggaccagcttggtatcgcattgacagattgcattacaatggatgcgtttttacgcgatttcggcattgaattcgccagccgttatcaggggttacgccacgactcaggagaccctgtcgcatggggcgaaaaggcgattgcccattatgaaaagctggggattgatccgctgacaaaaacgctggtcttttcagataaccttgatctgccaaaggcagtcgagctctatcgccatttcgcctctcgcgtgcagttaagcttcggcatcggtacccgcctgacatgcgatatccctcaggtaaaaccgctcaatatcgtgattaagctcgtggaatgtaacggaaagccggtggctaaactttccgacagccccggtaaaacgatctgtcatgataaagcgtttgtgcgcgcgctgcgtaaagcgttcgatctcccgcaggtgcgtaaagcaagttaa

SEQ ID NO: 14168 - protein, 400 aa, Salmonella choleraesuis
MTQFASPVLHSLLDTDAYKLHMQQAVFHHYYDVQVAAEFRCRDDDLLGIYADAIREQVDAMQHLRLQEDEFQWLSGLPFFKPDYLNWLREFRYNPAQVCVTNDNGKLNIRLTGPWREVIMWEVPLLAVISELVHHYRSPNAGVDQALDALESKLVDFTALTANLDMSRFHLMDFGTRRRFSREVQQAIVKRLQQESWFVGTSNYDLARRLALTPMGTQAHEWFQAHQQISPDLATSQRAALAAWLNEYPDQLGIALTDCITMDAFLRDFGIEFASRYQGLRHDSGDPVAWGEKAIAHYEKLGIDPLTKTLVFSDNLDLPKAVELYRHFASRVQLSFGIGTRLTCDIPQVKPLNIVIKLVECNGKPVAKLSDSPGKTICHDKAFVRALRKAFDLPQVRKAS

SEQ ID NO: 14169 - DNA, 1203 bp, Salmonella paratyphi
  CDS (1)..(1203): transl_table=11
atgacacaattcgcttctcctgttctgcactcgttgctggatacagatgcttataagttgcatatgcagcaagccgtttttcaccactactatgatgtgcaggtagcggctgagtttcgttgccgtggcgacgacctgctgggtatttatgccgatgctattcgcgagcaggtggacgcgatgcagcacctgcgcctccaggaggacgagttccagtggctctccggcctgcccttttttaaaccggattatctgaactggttacgcgagtttcgctataacccagctcaagtctgtgtcaccaacgataacggcaagctgaatattcgcttaaccggcccgtggcgtgaagtcattatgtgggaagtgccgctgctggccgtgatcagtgagctggttcatcactaccgctcgccaaacgcaggcgttgatcaggcgctcgacgcgctggaaagtaagctggttgatttcactgcgttaaccgccaatctcgatatgtcccgcttccatctgatggacttcggcacccgccgccgtttctctcgtgaagtgcagcaggcgatagttaaacgtctccagcaggagtcatggttcgtcggcaccagcaactatgatctcgcgcgtcgcctggcgctgacgccgatgggcactcaggcgcacgaatggttccaggcgcatcaacaaatcagtccggacctggcgaccagtcagcgtgccgcgttggccgcctggcttaacgaatatccggaccagcttggtatcgccttgacagattgcattacaatggatgcgtttttacgcgatttcggcattgaattcgccagccgttatcaggggttacgccacgactcaggagaccctgtcgcatggggcgaaaaggcgattgcccattatgaaaagctggggattgatccgctgacaaaaacgctggtcttttcagataaccttgatctgcaaaaggcggtcgagctctatcgccatttcgcctctcgcgtgcagttaagcttcggcatcggtacccgcctgacctgcgatatccctcaggtaaaaccgctcaatatcgtgattaaactcgtggaatgtaacggaaagccggtggctaaactttccgacagccccggtaaaacgatctgtcatgataaagcgtttgtgcgcgcgctgcgtaaagcgttcgatctcccgcaggtgcgtaaagcaagttaa

SEQ ID NO: 14170 - protein, 400 aa, Salmonella paratyphi
MTQFASPVLHSLLDTDAYKLHMQQAVFHHYYDVQVAAEFRCRGDDLLGIYADAIREQVDAMQHLRLQEDEFQWLSGLPFFKPDYLNWLREFRYNPAQVCVTNDNGKLNIRLTGPWREVIMWEVPLLAVISELVHHYRSPNAGVDQALDALESKLVDFTALTANLDMSRFHLMDFGTRRRFSREVQQAIVKRLQQESWFVGTSNYDLARRLALTPMGTQAHEWFQAHQQISPDLATSQRAALAAWLNEYPDQLGIALTDCITMDAFLRDFGIEFASRYQGLRHDSGDPVAWGEKAIAHYEKLGIDPLTKTLVFSDNLDLQKAVELYRHFASRVQLSFGIGTRLTCDIPQVKPLNIVIKLVECNGKPVAKLSDSPGKTICHDKAFVRALRKAFDLPQVRKAS

SEQ ID NO: 14171 - DNA, 1308 bp, Vibrio cholerae
  CDS (1)..(1308): transl_table=11
atgaatccacgcctgttttctccccacatcattcgtagcctgctcgatcttgatgcttataaaatcaatatgatgcaagcgatacaccatttttatccggatgtgtcggtgcgctatgaattgattgtacgcagtgaagaggatgccagcggacttcttgatgccatccgtcaagagatagctcatcttggcacattgcgtttttcggatgccgatattcattatttgactcagcatgcgccacatctcaaggcgaccttcttgcaatcgttgcgttatttccattttgtgcctcaagagcaagtagaaatggggattgtcaaacaaggcggaaaacagcaactgcggatcagtattcgtggcagttggcgtgacacgattttgtatgaaaccttagtcatggcgatcgtatctgaagtacgcagccgtcagcgttgggctgaggtgcctgctgatttaccactgaaggtgctcaaaaccaagcttgaccaattaaaagcggagattgagcgtcgtgggatcaacaacttttctttgaccgaaatggggacccgccgccgcttttctagccaagtacagcgtgatgtgttggcttgtcttaagcaagagatcccacaatgggtgctgggtaccagcaactaccatttcgctcgtgaatttgatttaaagccgattggcaccatcgcccatgaatggtttatggggcatcaagctttggttaatgagcgcgattcacaacaagtggcgctagagcgctggttgacggcgtttgatggtatgctcgccattgccccgaccgatactttaaccatcgatgcctttttaaatgatttcaaccgtcatctggcaaacgcttatgatggagtgcgccatgattcgggctgcccattccgttggggcgataaaatgattgcccactaccagcagttgggtattgatcctaccaccaagcttttcattttctcggatggtttagatttcgatcaagctctggaactgtgtgaatattttgctggacgggtgaagatttctttcgggatcggcacctttttaaccaatgatttagcaaattggcgcaacgcggcgggtgtggagtatcgcccactctcgattgtgattaagcttgctgagtgtcaaggtcgcccggtggcgaaaatcagcgatcaaccggaaaaagccatgtgtgaagatccaatctttttggccaatctcaaacggcgctttaacatcgaattggatgtggatgcgcttatccaagagctgcgtcatcaaaagcgttcaccacgacactatatttcagcggcctaa

SEQ ID NO: 14172 - protein, 435 aa, Vibrio cholerae
MNPRLFSPHIIRSLLDLDAYKINMMQAIHHFYPDVSVRYELIVRSEEDASGLLDAIRQEIAHLGTLRFSDADIHYLTQHAPHLKATFLQSLRYFHFVPQEQVEMGIVKQGGKQQLRISIRGSWRDTILYETLVMAIVSEVRSRQRWAEVPADLPLKVLKTKLDQLKAEIERRGINNFSLTEMGTRRRFSSQVQRDVLACLKQEIPQWVLGTSNYHFAREFDLKPIGTIAHEWFMGHQALVNERDSQQVALERWLTAFDGMLAIAPTDTLTIDAFLNDFNRHLANAYDGVRHDSGCPFRWGDKMIAHYQQLGIDPTTKLFIFSDGLDFDQALELCEYFAGRVKISFGIGTFLTNDLANWRNAAGVEYRPLSIVIKLAECQGRPVAKISDQPEKAMCEDPIFLANLKRRFNIELDVDALIQELRHQKRSPRHYISAA

SEQ ID NO: 14173 - DNA, 1311 bp, Vibrio parahaemolyticus
  CDS (1)..(1311): transl_table=11
atgacgaccacactattttcttctcgcatcattcaaagtgcattggactttgatgtgtacaaagtaaacatgatgagtgcagttgcggcgctttatcctgatgcgatggtgtcatacaaattcatcgtgcgtagcgaagaagatctgtcggaattgctgccagaggtaaaggcagaagttcttaaacttcaagatgttcgctttactgaagatgaaattgcgtacatgaagcgcgttgcgccgtacctaaagcccgagtttgtcgaagcgttacgtcacttccgttttaacccgcaaagcgatgtctctttccataacaaaaccatgtcggatggctcaagccagctacgcattacaatcaatggcttgtggaaggaaaccattctgtacgaaaccatcatcatgagcattgtgtcggaagttcgcagccgtcaacgttggtcagatatcccgttcgagcagttccaaaccgtattggaagacaaagttcgctatttgaaagccgaactagaacgtcgcaacattactaacttcaaattcgcagatatgtcgacgcgtcgccgtttctcttttcaagcgcagcgcaccatgttggagtacttaagcaaggaattgccacaatgcttgacgggaaccagtaactaccatttggcgagagagttagatcttaccccaattggcacggttgctcacgagtggtttatgggccatcaagcgttagtaaacgtacgtgattcgcagaaaattgccctgcaacgttggcaaaaaatgttcaatggcgcactgggtatcgcactgacggataccatcggcatcgatgcatttctcaaagacttcgatgaagagttgagtcatgcgtacgttggcgttcgtcacgacagcggttgcccattcacttggggcgaaaagatgattgcgcactatgagtcgcttggcatcgacccgatgacaaagacgctagtctttacggatggtttgaacttcgagcaagcgctagacatttgtgagcatttccaaggtcgtgtacaagtgagcttcggtatcggtacgtcgctggcaaacgacatgggtaattacgttaacgatcaaggcgaggcgtatcagccgctttccatcgtgattaaaatggtgacctgtaatggctctccagtcgccaagatcagtgacgagccagaaaaggcgatgtgtgaagatattttctttttgatgaatcttaaacgtcgctttgaacaaccgcttgatttaaatgaatgtcgtaagctcattgatcgcctcgaaagcgaagggcagaactaccttattgatgcgtaa

SEQ ID NO: 14174 - protein, 436 aa, Vibrio parahaemolyticus
MTTTLFSSRIIQSALDFDVYKVNMMSAVAALYPDAMVSYKFIVRSEEDLSELLPEVKAEVLKLQDVRFTEDEIAYMKRVAPYLKPEFVEALRHFRFNPQSDVSFHNKTMSDGSSQLRITINGLWKETILYETIIMSIVSEVRSRQRWSDIPFEQFQTVLEDKVRYLKAELERRNITNFKFADMSTRRRFSFQAQRTMLEYLSKELPQCLTGTSNYHLARELDLTPIGTVAHEWFMGHQALVNVRDSQKIALQRWQKMFNGALGIALTDTIGIDAFLKDFDEELSHAYVGVRHDSGCPFTWGEKMIAHYESLGIDPMTKTLVFTDGLNFEQALDICEHFQGRVQVSFGIGTSLANDMGNYVNDQGEAYQPLSIVIKMVTCNGSPVAKISDEPEKAMCEDIFFLMNLKRRFEQPLDLNECRKLIDRLESEGQNYLIDA

SEQ ID NO: 14175 - DNA, 1314 bp, Vibrio vulnificus
  CDS (1)..(1314): transl_table=11
atgtgcgcgccactttttcaaccagccattattcaaagtgttcttgatttagatgtgtataaaatcaatatgatgcaagccgcgtatcgattttatcctcaaacacaagtgcgctacgaactgatcgttcgctctgatgataacttgtctgatttagtggaagaggttcgtgaggaaatcaaccgcctcgcagagcttcgctttgatgctgcccagttggcttacttggcagagaaagcgccctatttaacggcagagtttctctcctatttagaaaccttccgcttccaccctcagcaacaagtctctgtcggtattttccgcaccgcacagggcgactgccagctcagagtcaccataaatggcatttggcacgaaaccattctctatgaaaccttagtgatgagtattatctcagagctgcgcaatcgtcgttattgggcacaaataccccagtctcaactgcacaaagtattagaggacaaactggactttttagattcggaacttaaacgccgtaatattactaatttccgtttctctgagatggggacacgacgccgatttagctttgctgcgcaaaaaacgatgcttgacgtattgcgtgcacgagtgccagaactgctcttaggcaccagtaattatcaccttgctcaagagttcaatttaacgccaattggcacggtcgcacatgaatggaccatggcacatcaagcgcttgtcgctattcaacactctcagcgtgtcgcattagacaaatggcttgaggcgtttaatggtagtcttggtatcgctctaaccgacaccatcggtattgatgcgtttcttagcgattttgacctagacaaagccactgcctatgcaggcgtgagacacgattccggcagtccatttgtttggggagataaaatcattgcccattacgaaagtctaggcatcgatccaaccactaaaaccttgatttttaccgatggactggattttgcgcgtgcgcttgatatttgcgagtatttcgccggacgcgcacagataagttttggcattggcactttcctcgccaatgatatggggaattggaccaatgacaaaggcacccgttaccaaccgatatcaatggtggtcaagatggcggaatgtaatggctccccagtggcaaaaatcagcgacgagccagagaaagccatgtgtgaagacatctttttcttgatgaacctcaagcaacgctttggcttagaagtggaccttgataaagcgatcgaaacgctaaagcagatgaaacgtcagcagaaaaagcgcattcaaagcgtcgcttaa

SEQ ID NO: 14176 - protein, 437 aa, Vibrio vulnificus
MCAPLFQPAIIQSVLDLDVYKINMMQAAYRFYPQTQVRYELIVRSDDNLSDLVEEVREEINRLAELRFDAAQLAYLAEKAPYLTAEFLSYLETFRFHPQQQVSVGIFRTAQGDCQLRVTINGIWHETILYETLVMSIISELRNRRYWAQIPQSQLHKVLEDKLDFLDSELKRRNITNFRFSEMGTRRRFSFAAQKTMLDVLRARVPELLLGTSNYHLAQEFNLTPIGTVAHEWTMAHQALVAIQHSQRVALDKWLEAFNGSLGIALTDTIGIDAFLSDFDLDKATAYAGVRHDSGSPFVWGDKIIAHYESLGIDPTTKTLIFTDGLDFARALDICEYFAGRAQISFGIGTFLANDMGNWTNDKGTRYQPISMVVKMAECNGSPVAKISDEPEKAMCEDIFFLMNLKQRFGLEVDLDKAIETLKQMKRQQKKRIQSVA

SEQ ID NO: 14177 - DNA, 1314 bp, Vibrio vulnificus
  CDS (1)..(1314): transl_table=11
atgtgcgcgccactttttcaaccagccattattcaaagtgttcttgatttagatgtgtataaaatcaatatgatgcaagccgcgtatcgattttatcctcaaacacaagtgcgctacgaactgatcgttcgctctgatgataacttgtctgatttagtggaagaggttcgtgaggaaatcaaccgcctcgcagagcttcgctttgatgctgcccagctggcttacttggcagagaaagcgccctatttaacggcagagtttctctcctatttagaaaccttccgcttccaccctcagcaacaagtctctgtcggtattttccgcaccgcacagggcgactgccagctcagagtcaccataaatggcatttggcacgaaaccattctctacgaaaccttagtgatgagtattatctcagagctgcgcaatcgtcgttattgggcacaaataccccaatctcaactgcacaaggtattagaggacaaactggactttttagattcggaacttaaacgccgtaatattactaatttccgcttctctgagatggggacacgacgccgatttagctttgctgcgcaaaaaacgatgcttgacgtattgcgtgcacgagtgccagaactgctcttaggcaccagtaattatcaccttgctcaagagttcaatttaacgccaattggcacggtcgcacatgaatggaccatggcacatcaagcgcttgtcgctgttcaacactctcagtgtgtcgcattagacaaatggcttgaggcgtttaatggcagccttggtatcgctctaaccgacaccatcggtattgatgcgtttcttagcgattttgacctagagaaagccactgcctatgcaggcgtgagacacgattccggcagtccatttgtttggggagataaaatcattgcccattacgaaagtctaggcatcgatccaagcactaaaaccttgatttttaccgatggactggattttgcgcgtgcgcttgatatttgcgagtatttcgccggacgcgcacagataagttttggcattggcactttcctcgccaatgatatggggaattggaccaatgacaaaggcatccgttaccaaccgatatcaatggtggtcaagatggcggaatgtaatggctccccggtggcaaaaatcagcgacgagccagagaaagctatgtgtgaagacatcttcttcttgatgaacctcaagcaacgctttggcttagaagtggaccttgataaagcgatcgaaacgctaaagcagatgaaacgtcagcagaaaaagcgcattcaaagcgtcgcttaa

SEQ ID NO: 14178 - protein, 437 aa, Vibrio vulnificus
MCAPLFQPAIIQSVLDLDVYKINMMQAAYRFYPQTQVRYELIVRSDDNLSDLVEEVREEINRLAELRFDAAQLAYLAEKAPYLTAEFLSYLETFRFHPQQQVSVGIFRTAQGDCQLRVTINGIWHETILYETLVMSIISELRNRRYWAQIPQSQLHKVLEDKLDFLDSELKRRNITNFRFSEMGTRRRFSFAAQKTMLDVLRARVPELLLGTSNYHLAQEFNLTPIGTVAHEWTMAHQALVAVQHSQCVALDKWLEAFNGSLGIALTDTIGIDAFLSDFDLEKATAYAGVRHDSGSPFVWGDKIIAHYESLGIDPSTKTLIFTDGLDFARALDICEYFAGRAQISFGIGTFLANDMGNWTNDKGIRYQPISMVVKMAECNGSPVAKISDEPEKAMCEDIFFLMNLKQRFGLEVDLDKAIETLKQMKRQQKKRIQSVA

SEQ ID NO: 14179 - DNA, 1179 bp, Xanthomonas axonopodis
  CDS (1)..(1179): transl_table=11
atgatcatccattcgctgctcgacaccgatctgtacaaattcaccatgatgcaggcggtgctgcaccagcacccggcagcgcaggtggattaccgcttcaaatgccgcactcccggcgtggacctggcgcagttcatcgatgagatctcgcgcgagatcgatgcgctgtgccggttgcggttgcgcgaggacgaagtggattacctgcgcagcctgcgcttcatcaagccggacttcgccgacttcctggcgctgttccatctggatcgcaagtatctgagcctgaccgcatcggccacccatccgggcgagatcgagctgaccatccgcgggccgtggttgcacaccatcctgttcgaggtgccgctgctggcgatcatcaacgaggtctggttccgcaatacctccgagccggatttcgaagagggccgcagccgcctgcgcgaaaaggtagccagcctgcgcagcatgccggccggctgcaagatcgccgattacggcacccggcggcgctactcgcggcaatggcatggcgagttgctgccgctgctgcgcgatggcctgggcgagcagttcgtcggcaccagcaacgtgtacttcgccaagcagtacgggctgaccccgctgggaaccatggcgcacgagtatctgcaggcgttccaggcgttggggccgcggctgcgcgattcgcaggtggcggcgctggaatcgtgggcgcgcgaataccgtggcgatctgggtatcgcgttgtcggacgtggtcgggctggatgcgttcctgcgcgatttcgatctgtatttctgcaagttgttcgatggcatgcgccacgattcgggcgacccgttcgaatggggcgagcgcgtcatcgcgcatctggaagcgcaccgcgtcgatccccggaccaaggtgctggtattcagcgacggcctcaatatcgacaaggtgatgcggctgtaccagcacttccacacgcgctgccggctggccttcggggtgggcaccagcctcaccaacgatctggggccgacgccgctgcagatcgtgatcaagatggtccgctgcaatggccagccggtggccaagctcagcgactcgcccggcaagagcatgtgcgaggacatcggatatctgcgctatctgcgcgacgtgttcgggttgccgccgatggcagagacatga

SEQ ID NO: 14180 - protein, 392 aa, Xanthomonas axonopodis
MIIHSLLDTDLYKFTMMQAVLHQHPAAQVDYRFKCRTPGVDLAQFIDEISREIDALCRLRLREDEVDYLRSLRFIKPDFADFLALFHLDRKYLSLTASATHPGEIELTIRGPWLHTILFEVPLLAIINEVWFRNTSEPDFEEGRSRLREKVASLRSMPAGCKIADYGTRRRYSRQWHGELLPLLRDGLGEQFVGTSNVYFAKQYGLTPLGTMAHEYLQAFQALGPRLRDSQVAALESWAREYRGDLGIALSDVVGLDAFLRDFDLYFCKLFDGMRHDSGDPFEWGERVIAHLEAHRVDPRTKVLVFSDGLNIDKVMRLYQHFHTRCRLAFGVGTSLTNDLGPTPLQIVIKMVRCNGQPVAKLSDSPGKSMCEDIGYLRYLRDVFGLPPMAET

SEQ ID NO: 14181 - DNA, 1197 bp, Xanthomonas campestris
  CDS (1)..(1197): transl_table=11
atgatcattcattcgctgctcgacaccgatctgtacaagttcaccatgatgcaggcggtgctgcatcagcacccggccgcgcaggtggactaccgcttcaagtgccgcacacccggcgtggatctggcgcagttcatcgacgagatctcgcgtgagatcgacgcgctgtgccggctgcgcctgcgcgaggacgaggtggactacctgcgcagcctgcgcttcatcaagccggacttcgccgactttctcgcgttgttccacctggaccgcaaatacctggccctggccgcctcggccgcccacccgggcgagatcgagctgaccatccgcgggccctggttgcacaccatcctgttcgaagtgccgctgctggcgatcatcaacgaggtgtggttccgcaacacctccgagccggattttgaagaaggccgcagccgcctgcgcgagaaggtacgcagcctgcgcagcatgccggccggttgcaagatcgccgattacggcacgcgccgccgctattcgcggcaatggcatggcgaactgctaccgctgctgcgcgatggtttgggcgagcaattcgtcggtaccagtaatgtgtttttcgccaagcaatacgggctgaccccactgggcaccatggcgcacgaatacctgcaggcattccaggcgctgggcccgcggctgcgggattcgcaggtcgcggcgttggactcgtgggcgcgcgaataccgcggcgacctcggcattgcgctgtcggatgtggtgggcctggacgcgttcctgcgcgacttcgatctgtatttctgcaagctgttcgacggcatgcgccacgattccggcgacccgttcgactggggcgagcgggtgatcgcgcatctggaagcgcaccgcgtggatccgcgcaccaaggtgctggtcttcagcgacgggctgaacatcgacaaggtgatgcggctgtacgaacacttcagcccgcgctgccggctggcgttcggcgtgggcaccagcctgaccaacgacctgggcccgacgcccttgcagatcgtcatcaagatggtccgctgcaatgggcagccggtggccaagctcagcgattcgccgggcaagagcatgtgcgaagacctgggctacctgcgctacctgcgcgatgtgttcggcctgccgccgatgccggaagcgggtgacccagcgcgtcagtga

SEQ ID NO: 14182 - protein, 398 aa, Xanthomonas campestris
MIIHSLLDTDLYKFTMMQAVLHQHPAAQVDYRFKCRTPGVDLAQFIDEISREIDALCRLRLREDEVDYLRSLRFIKPDFADFLALFHLDRKYLALAASAAHPGEIELTIRGPWLHTILFEVPLLAIINEVWFRNTSEPDFEEGRSRLREKVRSLRSMPAGCKIADYGTRRRYSRQWHGELLPLLRDGLGEQFVGTSNVFFAKQYGLTPLGTMAHEYLQAFQALGPRLRDSQVAALDSWAREYRGDLGIALSDVVGLDAFLRDFDLYFCKLFDGMRHDSGDPFDWGERVIAHLEAHRVDPRTKVLVFSDGLNIDKVMRLYEHFSPRCRLAFGVGTSLTNDLGPTPLQIVIKMVRCNGQPVAKLSDSPGKSMCEDLGYLRYLRDVFGLPPMPEAGDPARQ

SEQ ID NO: 14183 - DNA, 1185 bp, Xylella fastidiosa
  CDS (1)..(1185): transl_table=11
atggaatttattataaagtcgctcctcgacactgacttatataaattcacgatgatgcaggcggtgttgcatcaataccccggggcacaggtggagtacaggtttaaatgccgtacgcctggtgtggatctggcgcgtttcatcaacgaaatctctcatgagattgatgggctatgtgcgctacgtttttctaaggaggaactggattatttgcgcggcttgcgcttcatgaagccagatttcgttgattttcttgggctgttccatttagaccgtaaatacctgcaattgcgtgcttcgacccaggtgtcgggcgagattgaattggatattcgtggcccatggttacatacgattctgtttgaggtgccgttgttggcgattatcaatgaggtttggttccgcaatacaagcatgttgaatcttgacgtgggccgcgcccgattggatgccaaggtgcgtttgcttaaaggcgagagtggttatgaagagtgcagcatcgctgactatggcactcgccgccgttactcgcggcagtggcatgccgagttgctgccattgttggcacaaggtttagggtcgaacttcgttggtaccagtaatgtttatttcgccaagcagtatggctataccccattggggacgatggcacacgagtatctacaggcatttcaggcattgggaccgcgcctgcgtgattcccaggtggcagggttggaagcctgggcgcgtgagtaccgcggcgatttaggaattgcgttgtcggatgttgttgggttggacgcgtttttgggtgactttgacttgtacttttgcaagttgttcgacggaatgcgccacgactccggagatccattcaaatggggagagcgcatcattatgcatctggagtcgcatcgtatcgatccacgtaccaaggtgctggtattcagtgatggacttgatatgaataaggtcatgcggttgtaccagcacttccgtggccgttgtcgcttggcgtttggtgtaggcacgagtttgacgaatgatctcgggccgacgccattgcagatcgtgattaaaatggtccgttgcaatggtcagccagtggcgaagctcagtgattctccgggtaaaagcatgtgcgatgatccagcgtacctgcattacttgcgtcaggtgtttggggtatctgccgatgtttga

SEQ ID NO: 14184 - protein, 394 aa, Xylella fastidiosa
MEFIIKSLLDTDLYKFTMMQAVLHQYPGAQVEYRFKCRTPGVDLARFINEISHEIDGLCALRFSKEELDYLRGLRFMKPDFVDFLGLFHLDRKYLQLRASTQVSGEIELDIRGPWLHTILFEVPLLAIINEVWFRNTSMLNLDVGRARLDAKVRLLKGESGYEECSIADYGTRRRYSRQWHAELLPLLAQGLGSNFVGTSNVYFAKQYGYTPLGTMAHEYLQAFQALGPRLRDSQVAGLEAWAREYRGDLGIALSDVVGLDAFLGDFDLYFCKLFDGMRHDSGDPFKWGERIIMHLESHRIDPRTKVLVFSDGLDMNKVMRLYQHFRGRCRLAFGVGTSLTNDLGPTPLQIVIKMVRCNGQPVAKLSDSPGKSMCDDPAYLHYLRQVFGVSADV

SEQ ID NO: 14185 - DNA, 1185 bp, Xylella fastidiosa
  CDS (1)..(1185): transl_table=11
atggaatttattataaagtcgctcctcgacactgatttatataaattcacgatgatgcaggcggtgttgcatcaataccctggggcacaggtggagtacaggtttaaatgccgtacgcctggtgtggatctggcgcgtttcatcaacgaaatctctcatgagattgatgggctatgtgggctgtgtttttctaaggaggaactggattatttgcgcggcttgcgcttcatgaagccagatttcgttgatttccttggactgtttcatttagaccgtaaatacctgcaattgcgtgcctcgtcccaggtgccgggcgagattgaattggatattcgtggcccatggttacatacgattctgttcgaggtgccgttgttggcgattatcaatgaggtttggttccgcaatacaagcgtgttgaatcttgatgtgggtcgtgaccgattggatgccaaggtacgtttacttaaagacgagagtggttatgaggagtgcagcattgctgactatggcacccgccgccgttactcgcggcagtggcatgccgaattattgccgttgttggcgcaaggtttagggtcgaacttcgttggtaccagtaacgtttatttcgccaagcagtatggctataccccattggggacgatggcacacgagtatctacaggcatttcaggcattgggaccgcgcctgcgtgattcccaggtggcagggttggaagcctgggcgcgtgagtaccgcggcgatttaggaattgcgttgtcggatgttgttgggttggatgcgtttttgggtgactttgacttgtatttttgcaagttgtttgacggaatgcgccacgactccggagatccatttaaatggggggagcgcatcattatgcatctggagtcgcatcgtatcgatccacgtaccaaggtgctggtattcagtgatggacttgatatgaataaggtcatgcggttgtaccagcacttccgtggccgttgtcgcttggcgtttggcgtagggacgagtttgacgaatgatctcgggccgacgccattgcagatcgtgattaaaatggtccgttgcaatggtcagccagtggcgaagctcagtgattctccgggtaaaagcatgtgcgatgatccagggtacctgcattacttgcgtcaggtgtttggggtatctgccgatgtttga

SEQ ID NO: 14186 - protein, 394 aa, Xylella fastidiosa
MEFIIKSLLDTDLYKFTMMQAVLHQYPGAQVEYRFKCRTPGVDLARFINEISHEIDGLCGLCFSKEELDYLRGLRFMKPDFVDFLGLFHLDRKYLQLRASSQVPGEIELDIRGPWLHTILFEVPLLAIINEVWFRNTSVLNLDVGRDRLDAKVRLLKDESGYEECSIADYGTRRRYSRQWHAELLPLLAQGLGSNFVGTSNVYFAKQYGYTPLGTMAHEYLQAFQALGPRLRDSQVAGLEAWAREYRGDLGIALSDVVGLDAFLGDFDLYFCKLFDGMRHDSGDPFKWGERIIMHLESHRIDPRTKVLVFSDGLDMNKVMRLYQHFRGRCRLAFGVGTSLTNDLGPTPLQIVIKMVRCNGQPVAKLSDSPGKSMCDDPGYLHYLRQVFGVSADV

SEQ ID NO: 14187 - DNA, 24 bp, Artificial sequence
  Primer sequence
atgacacaattcgcttctcctgtt

SEQ ID NO: 14188 - DNA, 26 bp, Artificial sequence
  Primer sequence
ttaactggcttttttaatatgcggaa

SEQ ID NO: 14189 - protein, 581 aa, Artificial sequence
  Consensus
  Variant (3)..(3): Xaa in position 3 is any amino acid
  Variant (20)..(22): Xaa in position 20 to 22 is any amino acid
  Variant (23)..(24): Xaa in position 23 to 24 is any or no amino acid
  Variant (27)..(29): Xaa in position 27 to 29 is any amino acid
  Variant (31)..(31): Xaa in position 31 is any amino acid
  Variant (33)..(33): Xaa in position 33 is any amino acid
  Variant (35)..(36): Xaa in position 35 to 36 is any amino acid
  Variant (38)..(42): Xaa in position 38 to 42 is any amino acid
  Variant (43)..(53): Xaa in position 43 to 53 is any or no amino acid
  Variant (56)..(57): Xaa in position 56 to 57 is any amino acid
  Variant (60)..(60): Xaa in position 60 is any amino acid
  Variant (62)..(63): Xaa in position 62 to 63 is any amino acid
  Variant (68)..(68): Xaa in position 68 is any amino acid
  Variant (72)..(72): Xaa in position 72 is any amino acid
  Variant (75)..(76): Xaa in position 75 to 76 is any amino acid
  Variant (78)..(78): Xaa in position 78 is any amino acid
  Variant (80)..(88): Xaa in position 80 to 88 is any or no amino acid
  Variant (95)..(96): Xaa in position 95 to 96 is any amino acid
  Variant (100)..(103): Xaa in position 100 to 103 is any amino acid
  Variant (105)..(105): Xaa in position 105 is any amino acid
  Variant (107)..(109): Xaa in position 107 to 109 is any amino acid
  Variant (110)..(126): Xaa in position 110 to 126 is any or no amino acid
  Variant (128)..(128): Xaa in position 128 is any or no amino acid
  Variant (130)..(130): Xaa in position 130 is any or no amino acid
  Variant (132)..(132): Xaa in position 132 is any or no amino acid
  Variant (134)..(134): Xaa in position 134 is any or no amino acid
  Variant (136)..(137): Xaa in position 136 to 137 is any amino acid
  Variant (138)..(138): Xaa in position 138 is any or no amino acid
  Variant (153)..(154): Xaa in position 153 to 154 is any amino acid
  Variant (156)..(156): Xaa in position 156 is any amino acid
  Variant (158)..(161): Xaa in position 158 to 161 is any amino acid
  Variant (162)..(162): Xaa in position 162 is any or no amino acid
  Variant (164)..(172): Xaa in position 164 to 172 is any amino acid
  Variant (174)..(176): Xaa in position 174 to 176 is any amino acid
  Variant (178)..(183): Xaa in position 178 to 183 is any amino acid
  Variant (184)..(198): Xaa in position 184 to 198 is any or no amino acid
  Variant (208)..(208): Xaa in position 208 is any amino acid
  Variant (210)..(212): Xaa in position 210 to 212 is any amino acid
  Variant (214)..(215): Xaa in position 214 to 215 is any amino acid
  Variant (218)..(218): Xaa in position 218 is any amino acid
  Variant (221)..(222): Xaa in position 221 to 222 is any amino acid
  Variant (224)..(224): Xaa in position 224 is any amino acid
  Variant (225)..(236): Xaa in position 225 to 236 is any or no amino acid
  Variant (238)..(238): Xaa in position 238 is any or no amino acid
  Variant (244)..(245): Xaa in position 244 to 245 is any amino acid
  Variant (250)..(250): Xaa in position 250 is any amino acid
  Variant (252)..(252): Xaa in position 252 is any amino acid
  Variant (263)..(263): Xaa in position 263 is any amino acid
  Variant (265)..(266): Xaa in position 265 to 266 is any amino acid
  Variant (269)..(270): Xaa in position 269 to 270 is any amino acid
  Variant (271)..(288): Xaa in position 271 to 288 is any or no amino acid
  Variant (290)..(291): Xaa in position 290 to 291 is any amino acid
  Variant (294)..(295): Xaa in position 294 to 295 is any amino acid
  Variant (298)..(299): Xaa in position 298 to 299 is any amino acid
  Variant (302)..(303): Xaa in position 302 to 303 is any amino acid
  Variant (305)..(305): Xaa in position 305 is any amino acid
  Variant (306)..(316): Xaa in position 306 to 316 is any or no amino acid
  Variant (318)..(318): Xaa in position 318 is any amino acid
  Variant (326)..(329): Xaa in position 326 to 329 is any amino acid
  Variant (334)..(334): Xaa in position 334 is any amino acid
  Variant (337)..(337): Xaa in position 337 is any amino acid
  Variant (338)..(391): Xaa in position 338 to 391 is any or no amino acid
  Variant (394)..(394): Xaa in position 394 is any amino acid
  Variant (397)..(397): Xaa in position 397 is any amino acid
  Variant (401)..(401): Xaa in position 401 is any amino acid
  Variant (407)..(408): Xaa in position 407 to 408 is any amino acid
  Variant (416)..(416): Xaa in position 416 is any amino acid
  Variant (418)..(418): Xaa in position 418 is any amino acid
  Variant (419)..(427): Xaa in position 419 to 427 is any or no amino acid
  Variant (430)..(430): Xaa in position 430 is any amino acid
  Variant (433)..(442): Xaa in position 433 to 442 is any or no amino acid
  Variant (453)..(453): Xaa in position 453 is any amino acid
  Variant (455)..(455): Xaa in position 455 is any amino acid
  Variant (457)..(457): Xaa in position 457 is any amino acid
  Variant (459)..(459): Xaa in position 459 is any amino acid
  Variant (461)..(466): Xaa in position 461 to 466 is any amino acid
  Variant (468)..(474): Xaa in position 468 to 474 is any or no amino acid
  Variant (484)..(484): Xaa in position 484 is any amino acid
  Variant (489)..(491): Xaa in position 489 to 491 is any amino acid
  Variant (492)..(531): Xaa in position 492 to 531 is any or no amino acid
  Variant (541)..(542): Xaa in position 541 to 542 is any amino acid
  Variant (545)..(545): Xaa in position 545 is any amino acid
  Variant (553)..(553): Xaa in position 553 is any amino acid
  Variant (557)..(557): Xaa in position 557 is any amino acid
  Variant (559)..(560): Xaa in position 559 to 560 is any amino acid
  Variant (561)..(575): Xaa in position 561 to 575 is any or no amino acid
  Variant (578)..(579): Xaa in position 578 to 579 is any amino acid
IIXSLLDTDLYKLTMMQAVXXXXXFPXXXVXYXFXXRXXXXXXXXXXXXXXXXLRXXLDXLXXLRFTXDELXYLXXLXFXXXXXXXXXDFLDYLXXFRFXXXXVXVXXXXXXXXXXXXXXXXXXXXLXIXIXGXWXXXILWEIPLLAIISELXXRXLXXXXXLXXXXXXXXXKXXXLXXXXXXXXXXXXXXXXXXXXXISDFGTRRRXSXXXQXXVVXALXXGXXXXXXXXXXXXXFXGTSNVXXAKKYXLXPIGTMAHEWLXAXXALXXXXXXXXXXXXXXXXXXXXLXXSQXXALXXWVXXYXXXXXXXXXXXXGXLGIALTDXXXXDAFLXDFXXXXXXXXXXXXXXXXXXXXXXXXXXXXXXXXXXXXXXXXXXXXXXXXXXXXXXXFAXLFXGVRXDSGDPXXWGEKIIAXYXXXXXXXXXXLGXDPXXXXXXXXXXTKLLVFSDGLXLXKXLXLXXXXXXRXXXXXXXIKLSFGIGTXLTNDXXXXXXXXXXXXXXXXXXXXXXXXXXXXXXXXXXXXXXXXXXXPLNIVIKLVXXNGXPVVKLSDXPGKXMXXXXXXXXXXXXXXXXXVLXXLR

SEQ ID NO: 14190 - protein, 10 aa, Artificial sequence
  Consensus
  Variant (2)..(2): Xaa in position 2 is any amino acid
  Variant (3)..(3): Xaa in position 3 is Asn or Thr
  Variant (5)..(5): Xaa in position 5 is any amino acid
  Variant (7)..(7): Xaa in position 7 is any amino acid
  Variant (8)..(8): Xaa in position 8 is Phe, Ile, Leu or Val
  Variant (9)..(9): Xaa in position 9 is any amino acid
LXXDXYXXXM

SEQ ID NO: 14191 - protein, 25 aa, Artificial sequence
  Consensus
  Variant (2)..(4): Xaa in position 2 to 4 is any or no amino acid
  Variant (8)..(10): Xaa in position 8 to 10 is any amino acid
  Variant (11)..(11): Xaa in position 11 is Ala or Gly
  Variant (12)..(14): Xaa in position 12 to 14 is any amino acid
  Variant (15)..(15): Xaa in position 15 is Ala, Asp, Glu, Gly, Asn, Gln or Ser
  Variant (16)..(19): Xaa in position 16 to 19 is any amino acid
  Variant (22)..(22): Xaa in position 22 is any amino acid
  Variant (25)..(25): Xaa in position 25 is Ala, Glu, Gln or Ser
GXXXTSNXXXXXXXXXXXXGTXAHX

SEQ ID NO: 14192 - DNA, 1482 bp, Escherichia coli
  CDS (1)..(1482)
atgatgaagaaaacgcccacctctacgaaagactccttacccaacaaggagatgaatgatttgccccggctggcgagcgcggtgctgccactgtgttcgcaacatcccggtcagtgtggcctttttcctctggagaaaagtctggatgcgtttgccgcccggtatcgtctggccgaaatggcagagcatacgctcgatgttcagtattacatctggcaggacgatatgtcgggtcggttactgttttccgccctgttagccgcagcaaagcgtggcgttcgcgtccgtttgttgctggacgacaacaatacgcccggacttgacgacattttacgcttgcttgacagtcatccacgcattgaagtccggctttttaatcctttctcgtttcgcttgctgcgtccgcttggttatatcaccgacttttcccgtcttaatcgccgtatgcacaataaaagtttcactgtcgatggcgtggtgaccctggtgggaggacgaaatattggtgatgcctattttggagcaggggaggagccacttttttcggatttagatgtcatggcaataggacccgtggtagaggacgttgccgatgatttcgcccgctactggtattgcaaatcggtttcacccttacagcaggtgctggatgtcccggagggtgaaatggcggatcgcatcgagttacccgcctcctggcataacgatgccatgacgcatcgttatttacgcaaaatggaatccagtccatttataaatcatctggttgatggaacattgccgcttatctgggcgaagacacgtttattaagtgatgatccggcgaaaggggagggcaaggcaaaacggcattcactgttaccgcagcgcctgttcgatatcatgggctcacccagtgaacgcatcgatattatctcttcctattttgtaccgacacgcgcaggtgtggcgcaactcttacggatggtgagaaaaggggtaaagattgcgatcctaaccaattctcttgccgctaacgatgttgctgtcgtccatgccggatacgcgcgctggcgcaaaaaattgctccgctatggcgtggaattatatgaactcaagccgacgcgtgaacaaagtagtacgttacacgatcgcggcataaccggtaattccggagccagcctgcatgctaaaacctttagcatcgatggtaaaacggtgtttatcggctctttcaatttcgatccgcgttcaacattgctcaatactgaaatgggcttcgtgatagagagcgaaacgctggcacagttaattgataaacgctttattcagagccagtatgatgcggcctggcagctccgtctggacaggtggggacggatcaactgggttgatcgtcatgcaaagaaagagattattctcaaaaaagaacccgccaccagtttctggaagcgggttatggtcagactggcgtcgatattgcccgtggaatggttattgtaa

SEQ ID NO: 14193 - protein, 493 aa, Escherichia coli
MMKKTPTSTKDSLPNKEMNDLPRLASAVLPLCSQHPGQCGLFPLEKSLDAFAARYRLAEMAEHTLDVQYYIWQDDMSGRLLFSALLAAAKRGVRVRLLLDDNNTPGLDDILRLLDSHPRIEVRLFNPFSFRLLRPLGYITDFSRLNRRMHNKSFTVDGVVTLVGGRNIGDAYFGAGEEPLFSDLDVMAIGPVVEDVADDFARYWYCKSVSPLQQVLDVPEGEMADRIELPASWHNDAMTHRYLRKMESSPFINHLVDGTLPLIWAKTRLLSDDPAKGEGKAKRHSLLPQRLFDIMGSPSERIDIISSYFVPTRAGVAQLLRMVRKGVKIAILTNSLAANDVAVVHAGYARWRKKLLRYGVELYELKPTREQSSTLHDRGITGNSGASLHAKTFSIDGKTVFIGSFNFDPRSTLLNTEMGFVIESETLAQLIDKRFIQSQYDAAWQLRLDRWGRINWVDRHAKKEIILKKEPATSFWKRVMVRLASILPVEWLL

SEQ ID NO: 14194 - DNA, 1401 bp, Mesorhizobium loti MAFF303099
  CDS (1)..(1401): transl_table=11
atggacgtctcgattacgcaaacatcggccgataaaatcaaagcaggtaagagcggcctgctgctgatttctgacaattacgatgcgttcgccgcgcgtgttttagcggcaaggggcgcggctcgcactctcgatctcatgtactatctctggcatgacgaccacacggggcgcttgcttttgcaggaagttgtccgggcggcccagcgaggcgtacgggtcagaatgctgctcgacgacgtcaatccgcgcaagagcgatgccgcctatttggcgctgagcaaccatccaaacatcgaactcaaattgttcaacccgagcggcatcagagcgcgcggcctcatgcgcggcgcggaagtcctcttgcggctttttgcattgacaaggcggatgcacaacaaggcgtggattgccgacgacaacatcgcaattgtcggtgggcgcaatgtcggcgatgcatattttgacgcggcggagacgaatttccgtgacctcgacatgctgcttctcggtcccgccgtccagcaaaccgcacagatcttccaaactttctgggtatgccaggacgcgaagccaatagccgaactcggtgcagccgctccaggctcgcatgccccttatttcgagggaagagaggagaaaaccgagtcgacgcttctgagcgggatcagggacaagggctccatcgccgagttcatatcggcgagcagcaacgtacattgggtcgagcgcgtgcgcgtgatctccgaccctccggaaaaggtccgaggctggagaccgcgcagttggctgatgaaggagttgctcccaatcattcaatcggcgcgcaagcgtgttgaaatcgtgtccccgtattttatccccggcaagaagggatcaaaaatcctcggcgacctcgtcgacgacggggtgcaggtcgctgtgttgaccaactccttggccgcgaccgatgtcgccgcggtccacggggcatacgccaactatcgcaagcgcttgctgagaatgggcgtgcagcttttcgagctccaaccctttagccggcagcccaagatttccgtatttggatccaagggtgccagcctgcacaccaaagcgttcagcgtcgacaacaggatcggtttcgtcggatcttttaacttcgatccgcggtccgtatccctgaattcggaaatgggagtgctttttgaagacgagaatctggtcgcggaactgcggcataggttcaaatcggagatagcgccggaagcgagctaccggctcgaattgaagaacgaggttcttcgctggcatggcagcgatgaaggcaggctgcaaacctatactcgcgaacccgaggcagcatggttccgccgcatcctggccgccctggtcaggcacctccccatcgaatctcagctttag

SEQ ID NO: 14195 - protein, 466 aa, Mesorhizobium loti MAFF303099
MDVSITQTSADKIKAGKSGLLLISDNYDAFAARVLAARGAARTLDLMYYLWHDDHTGRLLLQEVVRAAQRGVRVRMLLDDVNPRKSDAAYLALSNHPNIELKLFNPSGIRARGLMRGAEVLLRLFALTRRMHNKAWIADDNIAIVGGRNVGDAYFDAAETNFRDLDMLLLGPAVQQTAQIFQTFWVCQDAKPIAELGAAAPGSHAPYFEGREEKTESTLLSGIRDKGSIAEFISASSNVHWVERVRVISDPPEKVRGWRPRSWLMKELLPIIQSARKRVEIVSPYFIPGKKGSKILGDLVDDGVQVAVLTNSLAATDVAAVHGAYANYRKRLLRMGVQLFELQPFSRQPKISVFGSKGASLHTKAFSVDNRIGFVGSFNFDPRSVSLNSEMGVLFEDENLVAELRHRFKSEIAPEASYRLELKNEVLRWHGSDEGRLQTYTREPEAAWFRRILAALVRHLPIESQL

SEQ ID NO: 14196 - DNA, 1401 bp, Mesorhizobium loti MAFF303099
  CDS (1)..(1401): transl_table=11
atggacgtctcgattacgcaaacatcgaccgataaaatcaaagcaggtaagagcggcctgctgctgatttcagacaattacgatgcgttcgccgcgcgtgttttggcggcaaggggcgcggttcgcacgctcgatctcatgtattatctctggcacgacgaccacacgggacgcttgcttttgcaggaagttgtccgggcggcccagcggggcgtgcgcgtcagaatgctgctcgacgacgtcaatccgcgcaagagcgatgccgcttatttggcgctgaacaaccacccaaacatcgaactcagattgttcaatccgagcggcatcagagcgcgcggcatcatgcgcggcgcggaagtcctcttgcggctttttgcattgacaaggcggatgcacaacaaggcgtggattgccgacgacagcatcgccatcgtcggtgggcgtaatgtcggagatgcctattttgacgcggcggagacgaatttccgtgacctcgatgtgctggtcctcggtcccgccgtgcaacaaactgctcgaatcttccagactttctgggcatgccaggacgccaagccaataggtgaactcggcgcagccgcgccgggctcgcatgcccctaatttcgagagaagcgacgccgaaaccgagtcgacgcttttgagcggtatcggcgacaagggctccaccgccgagtttatagcagcgagcagcgacgtacattgggtcgaccgcgtgcgcgtgatctctgaccctccggagaaggtccgaggctggagaccgcgcggttggctgatgaaggagttgctcccaatcattcagtcggcgcgcaagcgcgtggaaatcgtgtccccgtattttatccccggcaagaagggttcaaaaatcctcggcgacctcgtcgacgacggagtgcaagtcgctgttttgaccaactccttggccgcgaccgatgtcgccgccgtccacggagcctacgccaactatcgcaagcgcttgttgagaaagggcgtacagctcttcgagcttcagccctttagtaggcagcccaagatttctgtatttggatcaaagggcgccagcctccacaccaaagcgttcagcgtcgacgacaggatcggtttcgtgggatcattcaacttcgatccgcggtccgtatcgttgaactcggaaatgggagtgctttttgaagaccagaaactggtcatggaactgcggcaccgcttcaaatccgagactgcgccggaagcaagctaccggcttgaactcaagaacggggttctgcgctggcatggcagcgatgaaggcagaccgcaaacctatgctcgcgaacccgaggcagcattgttccgccgcatcctgtccgccctggtcaggtacctcccgatcgaatcccagctttag

SEQ ID NO: 14197 - protein, 466 aa, Mesorhizobium loti MAFF303099
MDVSITQTSTDKIKAGKSGLLLISDNYDAFAARVLAARGAVRTLDLMYYLWHDDHTGRLLLQEVVRAAQRGVRVRMLLDDVNPRKSDAAYLALNNHPNIELRLFNPSGIRARGIMRGAEVLLRLFALTRRMHNKAWIADDSIAIVGGRNVGDAYFDAAETNFRDLDVLVLGPAVQQTARIFQTFWACQDAKPIGELGAAAPGSHAPNFERSDAETESTLLSGIGDKGSTAEFIAASSDVHWVDRVRVISDPPEKVRGWRPRGWLMKELLPIIQSARKRVEIVSPYFIPGKKGSKILGDLVDDGVQVAVLTNSLAATDVAAVHGAYANYRKRLLRKGVQLFELQPFSRQPKISVFGSKGASLHTKAFSVDDRIGFVGSFNFDPRSVSLNSEMGVLFEDQKLVMELRHRFKSETAPEASYRLELKNGVLRWHGSDEGRPQTYAREPEAALFRRILSALVRYLPIESQL

SEQ ID NO: 14198 - DNA, 1197 bp, Bacillus halodurans C-125
  CDS (1)..(1197): transl_table=11
atgatcggagtcgtactcttatttcttatcgttgcgattattttgtggttacgctttgattacacccaagggttaaagaaacaacgggggaaagccgttagacgaaaccaaccaatccgccacgggacagttcgactattgccaactggcgatgagtttatcggttccctcattcatgacataaaagctgctgaacaccacattcacattttattttatatctttcgtgacgatcacatcgggaaaaaaattcttcagcaccttgaacaaaaagcaaaggaaggggtggctgtccggttgctcgtcgatcgattcggcgccgatgtgaaaaatcgttccattcagagcctgaagcaagcaggggcgcaatttgagtacgctcatcggatcagctttccgtactggtttttctctttaaatcgccgtaatcatcggaaaatcactgtcattgatggaaagatcggctacattggtggctataacatcggggatgagtatttagggcgtgatccgaagttaggtttttggcgtgactaccatcttcgactgacaggggatggcgttcaagatttacaggatcaatttattcaagactgggagcgagagtcccgactccctgtcacaagagatcgctggctgtatccgccattggcaaaaggaccccatgaactacggatcattccaacgaacggctcttttttagaagacagttttcttcaactcgtcgaacaagcggaggaaacgattacgatcggaaccccttacttcattcctggggaaaaattgcaccatgcccttttggatgcagccgctagaggggtggctgttcgtctactcgtaccgaaaaaaggcgatcacccactcgtgaaggaagcagcgttcccttactttaaggagctccttgaagggggcatcaacatttatcgttactatcgcggcttttttcatggaaaggcaatcgtaatcgatgataagctggccgatgtaggaacagccaattttgataagcgcagctttcggttgaattatgaaatcaactgtcttttatatgacaaagagatgattcagctcgttcgcgaagaattggattatgatttttccatatcggaacggcttcaaatggaggacctcgcgaaccgctccttcttccatcgtacgaaagaacaagtagctaccctgttctctggttttttttag

SEQ ID NO: 14199 - protein, 398 aa, Bacillus halodurans C-125
MIGVVLLFLIVAIILWLRFDYTQGLKKQRGKAVRRNQPIRHGTVRLLPTGDEFIGSLIHDIKAAEHHIHILFYIFRDDHIGKKILQHLEQKAKEGVAVRLLVDRFGADVKNRSIQSLKQAGAQFEYAHRISFPYWFFSLNRRNHRKITVIDGKIGYIGGYNIGDEYLGRDPKLGFWRDYHLRLTGDGVQDLQDQFIQDWERESRLPVTRDRWLYPPLAKGPHELRIIPTNGSFLEDSFLQLVEQAEETITIGTPYFIPGEKLHHALLDAAARGVAVRLLVPKKGDHPLVKEAAFPYFKELLEGGINIYRYYRGFFHGKAIVIDDKLADVGTANFDKRSFRLNYEINCLLYDKEMIQLVREELDYDFSISERLQMEDLANRSFFHRTKEQVATLFSGFF

SEQ ID NO: 14200 - DNA, 1545 bp, Pasteurella multocida subsp. multocida str. Pm70
  CDS (1)..(1545): transl_table=11
atgctgatcgtgattatcaaaaaactgtttcttttactcgccctgattctgtttagcctcgtgatacttgccctaataagctaccaacgattacccacatccgatcgtccaatcagtacgcatcctccccttaatcccaacgggctgttagcacgccatatcttgccgcaagttgcccaacatcccaacttaacgggattgtatcctttaggcgatgggaaagatgcctttctcgctcgcttggcgctcagcgaacatgccgaacatacactcgacttacagtattatatttggcataacgatgtgtctggtcacttactcttacaaagtctatataaagccgcagtccgcggagtaaaagtccgtttattattggacgacaataataccaaaggcatggacacgatcttggcttcactcaatgcacaccctaatatccaaatccgcttattcaatccctttatgcaacgtcaatatcgttggttaggctttttgagcgacttttttagactcaatcgtcgtatgcacaataagtccttcaccgcagatggcgtcatgagtattcttggcgggcgtaatattggtgatgaatattttgatgtgggtaatggtgtattatttgctgatcttgatgttgccgcaaccggcgccgtcgttacacacattcagactgattttgatcgctattggaatagcccatcaagttatcctttagaaagcattatcatacgcgatcctattacgccttttaatccgttgcctgcattagatgatgaaacccaaacttatttaaaacaactcactgaactgccctttgctaaaagcttaaaagcaggcaccttagcttttacatgggcagaggcagaattaatcagcgatgatcctaaaaaggcactaggcaaatcattgattcaagacagtgtcttagcacatattgctcccacaatgttaaatgcgaaaaacaacttaatcattgtgtcgccttattttgtaccaacccatgttggtgtggatttcttaagtcgtatcagccagactggcacacaggtttccattctaaccaattcactggaagcaaccgatgttagcattgtacattctggttatgctaaacaccgcaaaacattgttacaaaagcaaatccaactgtatgagctgaaacctcatgcaaccattcaaatggaatcctcagggcatttattaaaaggagccagtagcgccagtttacatgccaaaacatttactcttgataatcgctatttatttgttggttcctttaatatggatccgcgctctgctatgttgaatacggaaatgggattactcattgacagccctgaattggctcgcttactcagtgatggactgcaacaaaatcaagcaaattatgctttttcggttaagttaaatgaggcgcaagcactgtattgggaaacgcaagaaaatgggaaatggattcgctatgaaaatgagccacacaccagttggtttaagcgttttagtgtgtggtgtttatcttggttacctgttgaacatttgctataa

SEQ ID NO: 14201 - protein, 514 aa, Pasteurella multocida subsp. multocida str. Pm70
MLIVIIKKLFLLLALILFSLVILALISYQRLPTSDRPISTHPPLNPNGLLARHILPQVAQHPNLTGLYPLGDGKDAFLARLALSEHAEHTLDLQYYIWHNDVSGHLLLQSLYKAAVRGVKVRLLLDDNNTKGMDTILASLNAHPNIQIRLFNPFMQRQYRWLGFLSDFFRLNRRMHNKSFTADGVMSILGGRNIGDEYFDVGNGVLFADLDVAATGAVVTHIQTDFDRYWNSPSSYPLESIIIRDPITPFNPLPALDDETQTYLKQLTELPFAKSLKAGTLAFTWAEAELISDDPKKALGKSLIQDSVLAHIAPTMLNAKNNLIIVSPYFVPTHVGVDFLSRISQTGTQVSILTNSLEATDVSIVHSGYAKHRKTLLQKQIQLYELKPHATIQMESSGHLLKGASSASLHAKTFTLDNRYLFVGSFNMDPRSAMLNTEMGLLIDSPELARLLSDGLQQNQANYAFSVKLNEAQALYWETQENGKWIRYENEPHTSWFKRFSVWCLSWLPVEHLL

SEQ ID NO: 14202 - DNA, 1206 bp, Pseudomonas aeruginosa PAO1
  CDS (1)..(1206): transl_table=11
atgaacttcccctggcgcgacggcaaccgcgtagaactgctgatcaacggcgaagagtactttccgcgcctgttccagtgcatcgccgaggcgcgccgggagatcctcctggaaaccttcatcatcttcgaggacgaggtcggccggcagttgcaggaagccctcagcgccgccgccgagcgcggtgtcgaggtgcaggtcaccgtggacggctacggcaccgcctcgctcagcccggactacctggccaggctgaccgcctccggggttcgcgtgcacctgttcgacccgcgcccgcgcctgctcggcatgcgcaccaacctgtttcgccggttgcaccgcaagctggtggtgatcgatcgccggcaggccttcgtcggtggcatcaattacggcgaggaccacctggtacgtcgcggcaacatggccaagcaggactacgcggtgcgcgtcgagggcccggtggtgcgcgatatccgccaggcctgcctggcgctgctcgaaccggacgccgactacccgccgttgcggccgtcgggcgccgggcagccggcgcgggtgcgcctggtgatccgcgacaacgaccagtccagcgacgacatcgagcgcgagtacctgcaggcgatccgccaggcgcggcgacgcctgctgatcgccaacgcctatttcttccccggctaccgcctgcttcgcgagctgcgcgatgcggcgcgccgcggcgtgcgcgtcgacctggtactacagggcatgccggacatgccgctggtgcgcctgtgcagccggctgctctacgactacctgctgcgcgagggcgtgcgtatccacgaatactgccagcgtccgctgcacggcaaggtcgcggtgatcgacgacgactggtcgaccatcggctcgagcaatctcgatcccctcagcctgtcgctgaacctggaggccaacctggtgatccgcgacgtcgccttcaacggccagctctaccagcacctgcgcgagctggcgcgccgccactgccggcgcatcagccgccgccacgcgaggcgcggctactggtggcgagcgccgctgatcttcctcggcttccacttttccaggcactttccggctatcgccggttgggtacccgcccatctgccgcgcctgaaatcgctggagccgcgtccgtcgcggcgctggcaggaacgccagggccagcggggcaacccatga

SEQ ID NO: 14203 - protein, 401 aa, Pseudomonas aeruginosa PAO1
MNFPWRDGNRVELLINGEEYFPRLFQCIAEARREILLETFIIFEDEVGRQLQEALSAAAERGVEVQVTVDGYGTASLSPDYLARLTASGVRVHLFDPRPRLLGMRTNLFRRLHRKLVVIDRRQAFVGGINYGEDHLVRRGNMAKQDYAVRVEGPVVRDIRQACLALLEPDADYPPLRPSGAGQPARVRLVIRDNDQSSDDIEREYLQAIRQARRRLLIANAYFFPGYRLLRELRDAARRGVRVDLVLQGMPDMPLVRLCSRLLYDYLLREGVRIHEYCQRPLHGKVAVIDDDWSTIGSSNLDPLSLSLNLEANLVIRDVAFNGQLYQHLRELARRHCRRISRRHARRGYWWRAPLIFLGFHFSRHFPAIAGWVPAHLPRLKSLEPRPSRRWQERQGQRGNP

SEQ ID NO: 14204 - DNA, 1080 bp, Pseudomonas aeruginosa PAO1
  CDS (1)..(1080): transl_table=11
atgctgctggccatcgaggcggcgcagcggagcatcgagctggagctgtacctggtggaagacgggcattgcgccgaactgtttctcgtcgccctgctggatgcccgccgccggggcgtcgccgtgcgctgcctgttcgacggcttcggctgcctcggcctgggcagcgcctggatccagcgcctgcgcgaggccggcggcgaactgcggctgtacaacccgctgcgctggaagctgactggcggcaatctctaccgcgaccatcgcaagctgctgctggtggacgggcgcctcggttatgtcggcggcgccgggatcaccgacgaattctgggaaccggtcagcgacgtcagcgcctggcgcgaggtgatggtcgagatggacggcccggtggtggcggactgggcggcgctgttcgagcggcaatggctggcctgtctcgaagagaaagcctggaagccccgcgagggcatgacccttacccgccttccgccgcagccgggggcggcccgtgggttgggccgggtggcctacgccgacgcccgccagcaccgcgacatcctgcaatcgctggtccgcgcgctgaacggctcgcgccgacggatctggctggcgacgccgtacttcctgccgacctggaaggttcgccgggccctgcgcaaggccgcccagcgcggcgtggaggtgcgcctgctgctggccgggcggctcaccgaccacgccccggtgcgctatgccgggcagcgctactacccgcgcctgctgcgcgccggcgtgcgcatccacgaataccagccgcgcttcctgcacctgaagatggtcatggtcgacgattgggtgagcgtcggctcctgcaacttcgatcattggaatctacgcttcaacctcgacgccaatctcgaggccctcgacccggacttcaccaatgaggcggcggcgagcctgctggcggacttcgccgacagccgcgaggtgaccctggcgatgtggcgcgcgcgacccctgtggatgcgcctgcaccagcgcctgtggggttggcttgaccgggtagtggtgaatttcctcgaccgccggcgctag

SEQ ID NO: 14205 - protein, 359 aa, Pseudomonas aeruginosa PAO1
MLLAIEAAQRSIELELYLVEDGHCAELFLVALLDARRRGVAVRCLFDGFGCLGLGSAWIQRLREAGGELRLYNPLRWKLTGGNLYRDHRKLLLVDGRLGYVGGAGITDEFWEPVSDVSAWREVMVEMDGPVVADWAALFERQWLACLEEKAWKPREGMTLTRLPPQPGAARGLGRVAYADARQHRDILQSLVRALNGSRRRIWLATPYFLPTWKVRRALRKAAQRGVEVRLLLAGRLTDHAPVRYAGQRYYPRLLRAGVRIHEYQPRFLHLKMVMVDDWVSVGSCNFDHWNLRFNLDANLEALDPDFTNEAAASLLADFADSREVTLAMWRARPLWMRLHQRLWGWLDRVVVNFLDRRR

SEQ ID NO: 14206 - DNA, 1590 bp, Pseudomonas aeruginosa PAO1
  CDS (1)..(1590): transl_table=11
atgagccggtcgttcgagtttccacgggagatatccttgcttcgccgattcctcctgctggccctcctggccctctccggctgcgccagcactcctccgccgcaaccgtcgtcggcactgcccgccgagggtacctggctggccaggcaggccgaaatccagggacgcgaccaccccggccagtccggcttccacctcctgagcgccagcgaggatgccttcgtcgcccgcgcggcgctgattcgcgcagcccagcgcagcctcgacatccagtactacatcgtccacgacggactgaccacgcgcgccctcgcctacgagttgctcaaggcagccgaccgtggcgtgcgggtacgcatcctcatcgacgacaccgccagcgatggctgggactacgagatcggtgtgctctccgcccatccgaacatccaggtgcgcctgttcaacccattgcacctgggccgcgccaccggcatcacgcgaggcgtcggccgcctgttcaacctgtcccagcaacaccggcgcatgcacaacaagctgtggctggccgacggcacggcggccatcgtcggcggacgcaacctcggcgacgagtatttcaacgccaagccggagatgaacttcaccgacctcgacctgctcggcgtcggccccatcgccaaccagctctcgcacagcttcgaccagtactggaacagcgccatcagccggccgatcgaggatttcctctggcgcgcgccctatcccggcgaactggagtcggcccgacgcaagttgcagcgctacctgcgcaaggagtcggtgaaggagtccggctacatccgccacctgttcgaccgcggcgaccagccacgcctgggcaactggctggagaatctcacctgggcccgcgccgaggcgatctgggatgcgccgctgaaggtattgagccgcggcgagcccgacccgcacctattgctcagtccgcacctggcgggcctgttcaagggcgtgcagaaggaactgatcctggtctcggcgtatttcgttccggccaaggacggtctcaactacctcaccggcaaggccgacagcggcgtccgcgtgcgcctgctgaccaactccctggaagccaccgacgtgcccgccgtgcatgccggctacgcgccctatcggatggcgctgcttgagcatggcgttaagctctacgagctgcgcgccaatcccgaccagccgctgagcggcgcgccctggcgcctgcacggatcgagcagcgccagcctgcacagcaaggcgatggtcttcgaccggcgcaaggtattcatcggttcgttcaacttcgatccgcgctcgatcctgtggaacaccgaggtcggggtcatcgtcgacagtccgctgctggccgagcaggtccgccaactggcgctggagggcatggcgccgagcgtcagctaccaggttcgcatcgaccgcagcggcagccggccgaagctggtctggatcgacgaacgcgacggccgggcccaggtcctgcgccacgagccgggtagcctgtggcgacgcctgaacgcctgggtcgcgggaatgatcggactggaaaagatgctctga

SEQ ID NO: 14207 - protein, 529 aa, Pseudomonas aeruginosa PAO1
MSRSFEFPREISLLRRFLLLALLALSGCASTPPPQPSSALPAEGTWLARQAEIQGRDHPGQSGFHLLSASEDAFVARAALIRAAQRSLDIQYYIVHDGLTTRALAYELLKAADRGVRVRILIDDTASDGWDYEIGVLSAHPNIQVRLFNPLHLGRATGITRGVGRLFNLSQQHRRMHNKLWLADGTAAIVGGRNLGDEYFNAKPEMNFTDLDLLGVGPIANQLSHSFDQYWNSAISRPIEDFLWRAPYPGELESARRKLQRYLRKESVKESGYIRHLFDRGDQPRLGNWLENLTWARAEAIWDAPLKVLSRGEPDPHLLLSPHLAGLFKGVQKELILVSAYFVPAKDGLNYLTGKADSGVRVRLLTNSLEATDVPAVHAGYAPYRMALLEHGVKLYELRANPDQPLSGAPWRLHGSSSASLHSKAMVFDRRKVFIGSFNFDPRSILWNTEVGVIVDSPLLAEQVRQLALEGMAPSVSYQVRIDRSGSRPKLVWIDERDGRAQVLRHEPGSLWRRLNAWVAGMIGLEKML

SEQ ID NO: 14208 - DNA, 1446 bp, Lactococcus lactis subsp. lactis Il1403
  CDS (1)..(1446): transl_table=11
ttgagttttattgcactttttgagctggcgctttttttccttaatgttatattatcctttgtcattatttttagggaaagaaaatcaacagcggcaacttggtcatggctctttgtagttaatttactgcctatcataggctttattttatatttactcattggacgtggcatttcgcattatcgtatttttaaagaccgaaaaaggtttcagttgggttttgaaaaacaattagaacatgctgaaaaatcttacacagatcgattatttattaaaaaaatgagacaaaatcatgtaattggtcagttgattcatatgctttatgttgaagaaaaatcaattatttcaacaaatactggtgtgaaaatcttcaatgatggacgtcagaaatttaatgctctgattgatgatattaataaagcaaaacatcacgttcatatggaatattatatttttcggatggatcgaatgggtcatgaaatctatgatgctttacttgcagctgcaaaacgaggagtcgaagttaaacttttaattgacgcttggggttcaaataaaacaaaaatgtctaattttaaagaacttcaggaggctggtgggcatgtagcgcaattttttccattaattatgcctttagttaatccacgaacaaactatcgtttacaccgtaaaattgtagttattgatggaattattggatacacaggtggatttaatgttggtgatgaatatgcttcaattacaaagaaatttggctattggcgtgacaatcatttacgtttgactggtgatattgtttatagtctacaacatcgttttattttagactggaattctcaacatcattttgaagtgaccgagggagagccttatttcccagattcgattgttgaaggtcatgtagcgactcaacttgtaacttcgggaccagatgaggacaaagagcaaattaaattaacttacatgaagatgatttcaggtgcagagcgagagattatcattcaaaccccttattatattccgtctgatgctttacatgaatctataaaattagcattgttatcgggtgtacaggttaaattattgattccaaataagccggaccatccactggtttattgggcgacttatttccatgctgctgatttagttaaatatggcgcgaaagtttatacttacgaaaatggatttgttcactctaaaacattgattattgatggagagtatgcctcagttgggtcagctaatttagattatcgaagtttgcaattatgttttgaagctaatgttgttatctatgattatgacatttctcaaaaattacgaaatgattttatgaaggatttgaaattgagtcgtccattaactttagagcgttatgaggaacgctctaagttagttcgttttaaagaaggtttagctcgtttaattgcaccaatgctctga

SEQ ID NO: 14209 - protein, 481 aa, Lactococcus lactis subsp. lactis Il1403
MSFIALFELALFFLNVILSFVIIFRERKSTAATWSWLFVVNLLPIIGFILYLLIGRGISHYRIFKDRKRFQLGFEKQLEHAEKSYTDRLFIKKMRQNHVIGQLIHMLYVEEKSIISTNTGVKIFNDGRQKFNALIDDINKAKHHVHMEYYIFRMDRMGHEIYDALLAAAKRGVEVKLLIDAWGSNKTKMSNFKELQEAGGHVAQFFPLIMPLVNPRTNYRLHRKIVVIDGIIGYTGGFNVGDEYASITKKFGYWRDNHLRLTGDIVYSLQHRFILDWNSQHHFEVTEGEPYFPDSIVEGHVATQLVTSGPDEDKEQIKLTYMKMISGAEREIIIQTPYYIPSDALHESIKLALLSGVQVKLLIPNKPDHPLVYWATYFHAADLVKYGAKVYTYENGFVHSKTLIIDGEYASVGSANLDYRSLQLCFEANVVIYDYDISQKLRNDFMKDLKLSRPLTLERYEERSKLVRFKEGLARLIAPML

SEQ ID NO: 14210 - DNA, 1464 bp, Lactococcus lactis subsp. lactis Il1403
  CDS (1)..(1464): transl_table=11
atggagaaatattttatgtcacttgcgacaatttatagtttgatgggaacactaataacgattaacacattgcttgcccttgtgacaatttttcggaaacctaggtctattgccagtatttttgcgtggtctatgttcttgttctttttaccaggggttggtttccttggctatctttttttaggaagagggcttgatcgaacaacaacaaatcgttttgaagaagaaaataaatataatctgtctattcttgctcaaagggtgcgtgaaaataatgaaaaatttgagccaaaagaaatggcaccccatgaaagattactgaaaaggtattttaataatatggaacgtacaccactttgtcgtgggaataaagtgaatttttatctgaatggagaagataaattttcagccttgtttgatgacataaagaatgctaaagataatattcatgtagaatactatgcattctttaatgacaaaattggaactgcttttcgcgataatctaattgaaaaagctaaagaaggggtggaagttagagtagtttacgatccatggggaggaaaaacgagaaaggatttctttaaacctttggaagaggcaggaggtaaggtcacagcctttatcacatcgcgtaatacactaacaaaaacccgacttaactatcatttacatcgtaaaattgtagtgatagatggtcaaattggttggactggcggatttaatgttggtgatcaatatatttataacagtaaaaagtttggcttctggcgcgatacacacggtagaattgttggtacagcagcttttggtcttcaagaaacatttattcgagattggaatgtttcagtcagagatcctaaagataagcttgaaagagaagattcatattttgtggtaccggaagaagaagggaacattgatattcagattgtcgctaacggaccaaagagtgataataaaaccttaagaacaggttttattaaaatgattatggatgcggaagactatatttggcttcaatcgccttacttgatacctgatgactctatgataacagcgcttgtagcagcggcgaattctggtgttgatgtaagaattatgattcccaatatgccagatcatccgtttatttttagagcaacacaatattacgcaaattatctacataaacacggtgtgaaaatatacaattatacaaatggcttcatacactctaaaactcttgtaatggatggaaaattaggagtatttggtacaactaatcaagatattcgcagttatgaattaaatttcgagataagtgctttttgttatgatgaaactgtagcaaaagagatgagcaggacctttgagggagacttaagaaattcaaagctacttactgatgaagaaattgcccaacaatctatctggcttaaaatcaagcaaaacttttcgagattacttagtccgatattataa

SEQ ID NO: 14211 - protein, 487 aa, Lactococcus lactis subsp. lactis Il1403
MEKYFMSLATIYSLMGTLITINTLLALVTIFRKPRSIASIFAWSMFLFFLPGVGFLGYLFLGRGLDRTTTNRFEEENKYNLSILAQRVRENNEKFEPKEMAPHERLLKRYFNNMERTPLCRGNKVNFYLNGEDKFSALFDDIKNAKDNIHVEYYAFFNDKIGTAFRDNLIEKAKEGVEVRVVYDPWGGKTRKDFFKPLEEAGGKVTAFITSRNTLTKTRLNYHLHRKIVVIDGQIGWTGGFNVGDQYIYNSKKFGFWRDTHGRIVGTAAFGLQETFIRDWNVSVRDPKDKLEREDSYFVVPEEEGNIDIQIVANGPKSDNKTLRTGFIKMIMDAEDYIWLQSPYLIPDDSMITALVAAANSGVDVRIMIPNMPDHPFIFRATQYYANYLHKHGVKIYNYTNGFIHSKTLVMDGKLGVFGTTNQDIRSYELNFEISAFCYDETVAKEMSRTFEGDLRNSKLLTDEEIAQQSIWLKIKQNFSRLLSPIL

SEQ ID NO: 14212 - DNA, 1527 bp, Neisseria meningitidis MC58
  CDS (1)..(1527): transl_table=11
atgaaaacacgcagcctaatttcccttttatgcctccttctctgttcatgttcttcatggttgcccccactggaagaacggacggaaagccgtcatttcaatacttccaaacccgtccgcctggacaacatcctgcaaatccggcacacccctcataccaacgggctatccgatatctatctgttgaacgacccccacgaagcctttgccgcccgcgccgcccttatcgaatctgccgaacacagcctcgatttgcaatactacatctggcgcaacgacatttccggcaggctgctgttcaacctcgtgtaccttgccgcagaacgcggtgtgcgcgtacgcctgctgttggacgacaacaacacgcgcggattggacgacctcctgcttgccctcgacagccatcccaatatcgaagtgcgcctgttcaaccccttcgtcttacgaaaatggcgcgcactcggctacctgaccgacttcccccgcctcaaccgccgcatgcacaacaaatcctttaccgccgacaaccgcgccaccatactcggcggacgcaatatcggcgacgaatacttcaaagtcggtgaggacaccgttttcgccgatttggacatcctcgccaccggcagcgtcgtcggcgaagtatcgcacgacttcgaccgctactgggcaagccattccgcccacaacgccacgcgcatcatccgcagcggcgacatcggcaagggtcttcaagcactcggatacaacgacgaaacgtccagacacgcgctcctgcgctaccgcgaaaccgtcgaacagtcgcccctctaccaaaaaatacagacaggatgcatcgactggcagagcgtccgaacccgcctcatcagcgacgaccctgcaaaaggactcgaccgcgaccgccgcaaaccgccgattgccgggcggctgcaagacgcgctcaaacagcccgaaaaaagcgtctatctggtttcaccctatttcgttcccacaaaatccggcacagacgcactggcaaaactggtgcaggacggcatagacgttaccgttctgaccaactcgctgcaggcgaccgacgttgccgccgtccattccggctatgtcaaataccgaaaaccgctgctcaaagccggcatcaaactctacgagctgcaacccaaccatgccgtccccgccacaaaagacaaaggcctgaccggcagctccgtaaccagcctgcacgccaaaaccttcattgtggacggcaaacgcatcttcatcggttcgttcaacctcgacccccgttccgcgcgtctcaacaccgaaatgggcgttgttatcgaaagccccaaaatcgcagaacagatggagcgcacccttgccgataccacacccgcctacgcctaccgcgttaccctcgacaggcacaaccgcctgcaatggcacgatcccgccacccgaaaaacctacccgaacgaacccgaagccaaactttggaaacgcatcgccgcaaaaatcctatccctgctgcccatagaaggtttattatag

SEQ ID NO: 14213 - protein, 508 aa, Neisseria meningitidis MC58
MKTRSLISLLCLLLCSCSSWLPPLEERTESRHFNTSKPVRLDNILQIRHTPHTNGLSDIYLLNDPHEAFAARAALIESAEHSLDLQYYIWRNDISGRLLFNLVYLAAERGVRVRLLLDDNNTRGLDDLLLALDSHPNIEVRLFNPFVLRKWRALGYLTDFPRLNRRMHNKSFTADNRATILGGRNIGDEYFKVGEDTVFADLDILATGSVVGEVSHDFDRYWASHSAHNATRIIRSGDIGKGLQALGYNDETSRHALLRYRETVEQSPLYQKIQTGCIDWQSVRTRLISDDPAKGLDRDRRKPPIAGRLQDALKQPEKSVYLVSPYFVPTKSGTDALAKLVQDGIDVTVLTNSLQATDVAAVHSGYVKYRKPLLKAGIKLYELQPNHAVPATKDKGLTGSSVTSLHAKTFIVDGKRIFIGSFNLDPRSARLNTEMGVVIESPKIAEQMERTLADTTPAYAYRVTLDRHNRLQWHDPATRKTYPNEPEAKLWKRIAAKILSLLPIEGLL

SEQ ID NO: 14214 - DNA, 1959 bp, Xylella fastidiosa 9a5c
  CDS (1)..(1959): transl_table=11
ttgaatatattcatacgtttgttattgctagcagctattttgttgggcagtgcttgcgctagcttgtcgcatgcccagttggatcatgctgcgtcggttgccgtggctgcgcgcccggccacgctggattgcgacaggcccaatcattgtgcgttggattcgccgttgtacgcgcttgggagccgagcgctgagtgaatctacgcctgtgacaccacttcactatgtgaccatcctcgataaaggcgagagcgcgttggttgcacggatcaatttgatccgcagtgctacccgcagtatcgatatgcagacttacatttttgacaaggacgatagtgcccggttgattatggatgagctattgactgctgctagacgtggtgttcgagttcgtttactgattgaccagctttcggcgatttctgatctgaatattctgggtgccttggctggtgcacacgttaatttccaactgcgtatctacaacccgatttttggcaaagccaagctgaactatggcgactatgttgccagcgtgctgtgttgttttcgtcgctttaatcagcgcatgcacaataaattgttggtcattgatgaaatgatcggcgtggtcggcgggcgtaattaccaagatgactattatgattgggatcttgaatataactttcgtgaccgtgatgtgcttgtcgccggaccggcggtgctgcaaatggcagttaactttgatgcgttttgggcggctgagcgcagcgtaccggtagagtgcctcagggatgttggacgcatggtgctgcaggatggggtgccgatgctgccatcagctgtcttccatccactggaacgggtccagcgtgttactgctgaggccaacgatccggactatgtcaagcgtacctttgtcgatcctgccttggctgtgaacaaagtgcaatatgttgctgacctgccgcaaaagcatcgccatgagcacaatgcaaatccggtttccattgggccacggttggatagtttgatttctaatgcgcgtcatgaggtgatcttgcagaccccatatctggtgttatccaaaccagcgctgaacatcttccgtcgcctcaatcggactcaggacaaaccgcgtgtggttgtggtgaccaacagtttggctgctaccgataatcccatcgtctatgccttattttacaaatacaagcggcgtaacatgcgtgacctggggttcgacatttacgagtacaagccgtttccgcaaaatccgccaatcgacctgacgggcgttgttccgatggatggatggaacaatgactctcttcagacgcgacaggaccttttggctgctgccaaagtctccgatgattcagacaatgctcgtcagttaccctcgcttgaaaataaaggtcaagtggataggcgtgtgttacgtactgaaacgcgtccaccctttttgggcattcacactgtcaataaaccattgcctgtgactcgcccgggcgcacgcatgggcttgcatgcaaaatcattggtggttgatcgtaaggttggggtgattggtacccacaacttcgatccgcgcggtgagagttacaatactgaagctgttgtggtgattgaggatccagcgttcgcccgtctgctggcttccagcattgagggtgatatggatccaggtaatgcgtgggttgtggcaccgcggaagaagttacctgggctctataagctcaattattcggtaggtaaactgtctgaggcattgcctgtgctggacctgtggccttggcgttatgcaaccaactatgaattcaaacccgggttggattgtccaatgccattgccacgttgggatccgagttttatgcaatgttatgaacctgtcggtgactttcctgaagtcaatgttggtccaaagtggttgttggtccggatgctgattgcattcggtgctgggctggtgcctatcttgtaa

SEQ ID NO: 14215 - protein, 652 aa, Xylella fastidiosa 9a5c
MNIFIRLLLLAAILLGSACASLSHAQLDHAASVAVAARPATLDCDRPNHCALDSPLYALGSRALSESTPVTPLHYVTILDKGESALVARINLIRSATRSIDMQTYIFDKDDSARLIMDELLTAARRGVRVRLLIDQLSAISDLNILGALAGAHVNFQLRIYNPIFGKAKLNYGDYVASVLCCFRRFNQRMHNKLLVIDEMIGVVGGRNYQDDYYDWDLEYNFRDRDVLVAGPAVLQMAVNFDAFWAAERSVPVECLRDVGRMVLQDGVPMLPSAVFHPLERVQRVTAEANDPDYVKRTFVDPALAVNKVQYVADLPQKHRHEHNANPVSIGPRLDSLISNARHEVILQTPYLVLSKPALNIFRRLNRTQDKPRVVVVTNSLAATDNPIVYALFYKYKRRNMRDLGFDIYEYKPFPQNPPIDLTGVVPMDGWNNDSLQTRQDLLAAAKVSDDSDNARQLPSLENKGQVDRRVLRTETRPPFLGIHTVNKPLPVTRPGARMGLHAKSLVVDRKVGVIGTHNFDPRGESYNTEAVVVIEDPAFARLLASSIEGDMDPGNAWVVAPRKKLPGLYKLNYSVGKLSEALPVLDLWPWRYATNYEFKPGLDCPMPLPRWDPSFMQCYEPVGDFPEVNVGPKWLLVRMLIAFGAGLVPIL

SEQ ID NO: 14216 - DNA, 1404 bp, Xylella fastidiosa 9a5c
  CDS (1)..(1404): transl_table=11
atggaaggaacttggctgtttgcattggattgggtgatccgtttggttgcgttgctttggattccagcacgaaccacccctagtgctgcacgcagctggttattgctgattggtttcgtccctgtatttggtttgccgctttacttggtgtttggccatccttggctgtcacgtaagcgtgtgttgcgtcaggcgttggcttctcaggtgatccgtgagtggcagcgtgggttgagtgcgttgcgctggcagcctcaggagaatagtgtcgccgcggaattggtgcctttggtggagcatcagggcgattttatgccaacacgtggtaacgccttggatctattggatgattaccaatcttcgctgcgtttgttgatcaatgatattgattccgcgtgcgaacgtgtgcacttgctgtattacttgatgttcgatgatgcggtgggtgatgcggttgtggctgcattacagcgtgctgcggcgcgtggcgtttcttgccgattgctgctggatgcagttggtgctaaacgcggtctacgtgcctatcagcagtgccttcgtgcgcatggtgtcgaggtgcacgctatgttgcctggtgggttgcgctggcgtcgcagtgggcgtatggatttgcgtaaccatcgtaaaattgctgtgattgacaatcgtgtcgcttatatcggttcgcagaatttggcctgcccagattttgtgccgcatttccctaaccgtgaactggtcgcacgcgtgtgcggtcccgcggtaagtcatctggaggcggtgtttctcagtgattggtttgttgaaactggtcaacgtttgaggatgcgttcagatgttcccatatgtgagcaaaatgttgcggcccagctagtggccagcggtccggcttacccgtacgagaatgcgcgtgatgcggtgaatacaatgatccatttggcacggcggcgtgttgtcttgacgacgccgtatttcgtgcctgatgaggctacactcagtgcgttgcgtattgccggcacgtctggagtagacgtgcagttgatcctgtccgagagtaataatcagtttctgatggcctgggctcaggaggcgtacttcgaggagctgttgcgcgcaggaatcaaaatcgcattgtatcgtccccatttcctacatgctaagcatctaagtgtggatgatgatattgcgttgttcggatcgattaatttggacatccgctcgtttgcgcttaacgctgagatcggcatgatttgttacgactcacgtattgtgagtcggttacgcgaggtggagagtgattatctggccaatgcgtgccagcttaatttggttgagtggcagcaacgtcccgcttggcgtcgtagccgtgagggtattgcacgcttggcagatgctctgatgtag

SEQ ID NO: 14217 - protein, 467 aa, Xylella fastidiosa 9a5c
MEGTWLFALDWVIRLVALLWIPARTTPSAARSWLLLIGFVPVFGLPLYLVFGHPWLSRKRVLRQALASQVIREWQRGLSALRWQPQENSVAAELVPLVEHQGDFMPTRGNALDLLDDYQSSLRLLINDIDSACERVHLLYYLMFDDAVGDAVVAALQRAAARGVSCRLLLDAVGAKRGLRAYQQCLRAHGVEVHAMLPGGLRWRRSGRMDLRNHRKIAVIDNRVAYIGSQNLACPDFVPHFPNRELVARVCGPAVSHLEAVFLSDWFVETGQRLRMRSDVPICEQNVAAQLVASGPAYPYENARDAVNTMIHLARRRVVLTTPYFVPDEATLSALRIAGTSGVDVQLILSESNNQFLMAWAQEAYFEELLRAGIKIALYRPHFLHAKHLSVDDDIALFGSINLDIRSFALNAEIGMICYDSRIVSRLREVESDYLANACQLNLVEWQQRPAWRRSREGIARLADALM

SEQ ID NO: 14218 - DNA, 1506 bp, Mycoplasma pulmonis UAB CTIP
  CDS (1)..(1506): transl_table=4
atggacaaaaaaaacttcactagatttctttgatattttttatcatttttgtttcttgtaattaacatagtagttttttgacttatttttcatctaaattatgtttattttagtttaatgattgctattgtttatttaattaacactggagtggtagtttttatttttatgcaaaataggaactcttcatcaaagctttcttgaattgttgtaattactattttgcctttttttggacatcttctttattttctagttggtcaaaaatatagacatagaaaagactatgatgcttattataaaaattttaataacatcttaaaagatgggaccaacattgatgatttttcaactatgattcatgactttggagaaaaaaatttatttaatcaactctcacttttaagtcaaaagccaatacttccagctaaattcaaaatgtttagtcatccttataaatattttaattctctttttgagcatattgaaaaagctcaaaaagaaatttgaattgtttcttactatgcaaaagatggtgaattagttgatgaatttttttcacttctaattaaaaaagcaactaatggtgtaaaaattaaatgactaattgatgattttggtcaaaggcatttaaaaagaaaaaccttagataggctaaaacatcctaatattgaaattgaatttattggtagattacgctttggttttttgatctcttcaaatttctacagaaaccatagaaaattttttatcattgataaaaaaatagtttttaacggaggatcaaatatatcagatagatatatttcactagactctcaatttggttattaccatgatattaactatatgattaagggtccttatgttcattcttacatcatcatttttatttacatgtgaaaaagatgaagaaatatagaactacgatataaagagccaattggtgaattagaaaataactttgagtcaagagcaattatctttgaagatggtcctgagttaaatgactcaattattgaagactcacttatcaaattaattgcaaatgctaaagaagaaataaaaatatcaactccttatttttctctttcaaatggtcttttcaatgcttttaaaatagctcttctttcaggggtaaaggtatctattttttatcctggttattcagctcaaaaacttgttcaccaaataggattagttgagcttaaaaaacttgaaaaatatggaatcaaaatttattttacaaatggctttttcaatcactcaaaaatgggaatttttgataaaaatattgcttacataggaactttaaattttgatattagaagtttttatgctcaatatgaaacaattgatattgttgaaggtgaagttgtcaaagatattcaaaaactttttgatgatcttgaacaaagatcagtgcactttttaaaagactatcaaaatatgagaagttttttaccaaaacaaattctttttaaaattttaaaacctcttacttag

SEQ ID NO: 14219 - protein, 501 aa, Mycoplasma pulmonis UAB CTIP
MDKKNFTRFLWYFLSFLFLVINIVVFWLIFHLNYVYFSLMIAIVYLINTGVVVFIFMQNRNSSSKLSWIVVITILPFFGHLLYFLVGQKYRHRKDYDAYYKNFNNILKDGTNIDDFSTMIHDFGEKNLFNQLSLLSQKPILPAKFKMFSHPYKYFNSLFEHIEKAQKEIWIVSYYAKDGELVDEFFSLLIKKATNGVKIKWLIDDFGQRHLKRKTLDRLKHPNIEIEFIGRLRFGFLISSNFYRNHRKFFIIDKKIVFNGGSNISDRYISLDSQFGYYHDINYMIKGPYVHSYIIIFIYMWKRWRNIELRYKEPIGELENNFESRAIIFEDGPELNDSIIEDSLIKLIANAKEEIKISTPYFSLSNGLFNAFKIALLSGVKVSIFYPGYSAQKLVHQIGLVELKKLEKYGIKIYFTNGFFNHSKMGIFDKNIAYIGTLNFDIRSFYAQYETIDIVEGEVVKDIQKLFDDLEQRSVHFLKDYQNMRSFLPKQILFKILKPLT

SEQ ID NO: 14220 - DNA, 1533 bp, Clostridium acetobutylicum ATCC 824
  CDS (1)..(1533): transl_table=11
ttgagattttttataaaatttatatttcatagagctacctttgtagttatttcagcattaatacagctatttgttttgatttttgtaattataaaatttaacgagtattttgtgttcttttatggaattagcattgtagtaagcataattgcagtattgtatatactttacaataatagtaatccagcatataaaattgtgtggattattccaatattagtatttcctctttttgggggattattttatttattttttggcggaagtaagttaagcagaagaactagaaaaaagatggagtgtatagtagctaagtcaagagcggtattgataaagggtgaagtgataataaatgagataaggaataataatgaaacagcagcgaatcaatcaagttatattcaaaattattctctttttcctccatataaatacacaaaggcagaatatttttcaacaggagaagaaacatttaacgaacttatagaacaacttaaaaaagcaaaacaatatattttccttgaatactttattattaaagaaggagttatgtggaatagtgttttacaaatattaagagataaggtacaagaaggagtggaggtcagagttatatatgatgacatagggtgtatgtttactctgcctaacggatatcataaagaacttgagaaaattggcattaaatgctgcgtattcaatcctctcattcctatggtatcttttaaatttaataatagagatcataggaaaattgcagtaattgatggtttggtaggatttactggtggaataaatctatcggatgagtacataaataaatatcaaaagtatggctattggaaggatactgcaattaaagtggaaggaaaagcagcttggaatttatcagttatgtttttatctatgtggagctttcttagaggaatagatgaggactttaatacattcaaaaagaatattgaaaaagaattttcttctagagagggatatgttcagccatttgcggatagcccattagacggagaacctgttggggaaattatatatatgaacttgataagtaaggctacaaaatatgtttatattactacaccttatttagttataggaaacgagatggtaacagcactgacctctgccgcaaagggaggagtagatgttagaattattaccccacacataccagacaaaaaaattgttcattctgtaactaaatcctactataaagttttaattgagagcggagttaaaatttatgagtatatgccaggcttcatacattcaaaaacttatgtttgtgataatgaatacggagttgtaggcagtataaatatggattttagaagtctttatcttcattttgagtgcggtgtttggatgtataaaaccaatactgtatacgatattaagaaggattttatggatacattagataaaagtaaagagataactttagaagagattaacaaagttaagtggtatagtactttatggcgcgtggttctaagagtttttgcacctttgatgtaa

SEQ ID NO: 14221 - protein, 510 aa, Clostridium acetobutylicum ATCC 824
MRFFIKFIFHRATFVVISALIQLFVLIFVIIKFNEYFVFFYGISIVVSIIAVLYILYNNSNPAYKIVWIIPILVFPLFGGLFYLFFGGSKLSRRTRKKMECIVAKSRAVLIKGEVIINEIRNNNETAANQSSYIQNYSLFPPYKYTKAEYFSTGEETFNELIEQLKKAKQYIFLEYFIIKEGVMWNSVLQILRDKVQEGVEVRVIYDDIGCMFTLPNGYHKELEKIGIKCCVFNPLIPMVSFKFNNRDHRKIAVIDGLVGFTGGINLSDEYINKYQKYGYWKDTAIKVEGKAAWNLSVMFLSMWSFLRGIDEDFNTFKKNIEKEFSSREGYVQPFADSPLDGEPVGEIIYMNLISKATKYVYITTPYLVIGNEMVTALTSAAKGGVDVRIITPHIPDKKIVHSVTKSYYKVLIESGVKIYEYMPGFIHSKTYVCDNEYGVVGSINMDFRSLYLHFECGVWMYKTNTVYDIKKDFMDTLDKSKEITLEEINKVKWYSTLWRVVLRVFAPLM

SEQ ID NO: 14222 - DNA, 1518 bp, Staphylococcus aureus subsp. aureus Mu50
  CDS (1)..(1518): transl_table=11
atgttttttgtgcctttctttataggagaaaagactatgcgatatacattttcaaatgatttaggaacactttttaccattattttagccattggattcatcattaatttagtattggcttttattattatctttttagaaagaaatagacgtacagcgagttcaacttgggcatggctatttgtactttttgtcttaccattgattggttttattctttacttgttttttggtagaaccgtttcggcacgtaaattgaataaaaacaatggtaacgtgttaacggatttcgatggacttttaaaacaacaaatagaaagctttgataaaggtaattatggtactgataacaaacaagttcaaaaacatcatgatttagtaagtatgcttttgatggatcaagatggttttttaactgaaaataataaagttgatcatttcattgatggaaatgatttatatgatcaagttttaaaagatattaaaaatgcaaaagaatatatccatttagagtactatactttcgctttagatggtttaggtaaaagaattttacatgctttagaagaaaaattgaaacaaggtctagaagtaaaaatattatatgatgatgttggatctaaaaatgttaagatggcaaattttgatcactttaaatcattaggtggcgaagttgaagcattttttgcttctaaattacccttattaaatttccgtatgaataacagaaatcatagaaaaatcatcgtaatcgatggtcaactaggttatgtcggaggatttaacattggtgatgaatatctaggattaggtaaactagggtattggagagatacgcatttacgtatacaaggggatgcggttgatgcactgcagttgcgatttattttagactggaattcgcaagcgcaccgtccacagtttgaatatgatgttaagtatttccctaaaaagaacggaccattgggcaattcaccaattcaaatagctgcaagtggcccagctagtgactggcatcaaattgaatatggttatacaaaaatgattatgagcgctaagaagtcggtatatttgcaatcgccttatttcattccggataactcatatataaatgccattaaaattgcagctaaatcaggtgtagatgttcatctaatgattccatgtaagccagatcatcctttagtttattgggcgacattttcaaatgcctctgacttattatcaagtggtgttaaaatttatacgtatgaaaatggatttatacattctaaaatgtgcttaattgatgatgaaatcgtatcagtgggcacagcaaatatggactttagaagttttgaattaaattttgaagtaaatgcctttgtatatgatgaaaatcttgctaaggatttaagggtggcttatgaacatgatattacaaaatcaaaacaactaaccaaagaatcatatgccaatagaccgctgtctgttaaattcaaagaatcgttagcaaaattagtttcgccaattttataa

SEQ ID NO: 14223 - protein, 505 aa, Staphylococcus aureus subsp. aureus Mu50
MFFVPFFIGEKTMRYTFSNDLGTLFTIILAIGFIINLVLAFIIIFLERNRRTASSTWAWLFVLFVLPLIGFILYLFFGRTVSARKLNKNNGNVLTDFDGLLKQQIESFDKGNYGTDNKQVQKHHDLVSMLLMDQDGFLTENNKVDHFIDGNDLYDQVLKDIKNAKEYIHLEYYTFALDGLGKRILHALEEKLKQGLEVKILYDDVGSKNVKMANFDHFKSLGGEVEAFFASKLPLLNFRMNNRNHRKIIVIDGQLGYVGGFNIGDEYLGLGKLGYWRDTHLRIQGDAVDALQLRFILDWNSQAHRPQFEYDVKYFPKKNGPLGNSPIQIAASGPASDWHQIEYGYTKMIMSAKKSVYLQSPYFIPDNSYINAIKIAAKSGVDVHLMIPCKPDHPLVYWATFSNASDLLSSGVKIYTYENGFIHSKMCLIDDEIVSVGTANMDFRSFELNFEVNAFVYDENLAKDLRVAYEHDITKSKQLTKESYANRPLSVKFKESLAKLVSPIL

SEQ ID NO: 14224 - DNA, 1566 bp, Sinorhizobium meliloti 1021
  CDS (1)..(1566): transl_table=11
atgtggtcgtgggttgcactttttctcgtagcgctctgcgggctcttcctggtcgcggtcctctatgtctacggctggtttggccgcaggccgcggaccgaaccctcattcgcgctccccatcggcggagacgagacgggcatcgatcggcaattgggcccactgctgggtgccgcccaccccggcgagagcgtggtcgcgctcatttccgataacatcgaagccttcgttgcgcgggcgctttcggcgcgccgggcggggcgcagcctcgacctgcaatattactactggaaggacgacctgacggggtttctgctgacgcgcgagatcatccgggcggccgaccgcggcgttcgcgtccgcctgctgctcgacgatatcaatgcaggaatccatgatcgtctctgcatttcgctcgacgcccatccgaatgtcgacgtgcgcctcttcaatccaagccgggcacgaacggaccgcttccgccgcgggttcgaaatggcgatacgggccttcagtgcgacgcgccggatgcacaacaagctgtgggttgccgatggccggctggcgatatccggtgggcgcaacatcggtgacgcctatttcgacgcggccgaactgtcgaacttccgtgacctcgacgtctggatggcgggtccggtcgtcgaccaggcgacggccatgttcgatctctactggaacagcacgtcggtgctgccgatcgcagccctcaggacgccgcgcaagcagtaccttccggcgctgcgagaggcgctggacgggctggcgcgcacggcggccgcgcgcttctatctggaaagggtcgcagacgcggcggctgcgggtcccggctcctactggggaagccggaccctccatcgcagcgcggatgtgcgcatggcgttcgacccgccggaaaaggcgctgatgcagaagcggcagaactggctgctgcgcgaactgttcccgctgatcaagggcgccagccatgatctgcggatcatctcgccctacttcatccccggcgcagcggggacgcgcgtgctggcgctcctcgcgggaaagggcgcgagggtggcggtactgacgaattcgctcgctgcaaccgatgtcgcggcagtgcatggcggctacgtgaagtatcgcaaagggctgcttgacggcggtgtcgagctctacgagctcaaggagcgcggtgatttcttcgatcgtcaccgtatgtcgctgttcggagcgcgaaacgcgagcctccacaccaaggccttcgtcgtcgatggcctctgcggctacgtcggctccatgaatttcgatccgcgttccgcgtcgctcaacaccgagatgggcatcgtcttttccgacgaggcgctcgccgccgagctccaatcgatattcgacgaggaaacggcgccggaacggagctatcgcctgatgctgaaggacggccggcccgcatggcgggatcggacgaacggctcgctgcggctgctgcggcgcgagccggacgcaggcattctccggcggctgatcgctggcgtgatccgctttctgccgttggagtcacagctttga

SEQ ID NO: 14225 - protein, 521 aa, Sinorhizobium meliloti 1021
MWSWVALFLVALCGLFLVAVLYVYGWFGRRPRTEPSFALPIGGDETGIDRQLGPLLGAAHPGESVVALISDNIEAFVARALSARRAGRSLDLQYYYWKDDLTGFLLTREIIRAADRGVRVRLLLDDINAGIHDRLCISLDAHPNVDVRLFNPSRARTDRFRRGFEMAIRAFSATRRMHNKLWVADGRLAISGGRNIGDAYFDAAELSNFRDLDVWMAGPVVDQATAMFDLYWNSTSVLPIAALRTPRKQYLPALREALDGLARTAAARFYLERVADAAAAGPGSYWGSRTLHRSADVRMAFDPPEKALMQKRQNWLLRELFPLIKGASHDLRIISPYFIPGAAGTRVLALLAGKGARVAVLTNSLAATDVAAVHGGYVKYRKGLLDGGVELYELKERGDFFDRHRMSLFGARNASLHTKAFVVDGLCGYVGSMNFDPRSASLNTEMGIVFSDEALAAELQSIFDEETAPERSYRLMLKDGRPAWRDRTNGSLRLLRREPDAGILRRLIAGVIRFLPLESQL

SEQ ID NO: 14226 - DNA, 1464 bp, Sinorhizobium meliloti 1021
  CDS (1)..(1464): transl_table=11
atgatcgtgttcatagagagttactggccgcattttctggcgctgctttcggtcgtcctcggcgtcccggcaatcatccatgcggcgatgacgaaagacgatgtgcgggcggccgccggctgggtcggggttgtgctgctctcaccggtcatcggtgcggtcatctacgcggttgccggcatcaatcggatgcgccgctcgtctatcggcttgcagcgctcgctgctgcgctcgaccgagcgggaccctttcgggcgcttcgatgtcacgcatgatcaggtggtggcccgtttcggacagcgtttcgcggcaatgaagatgcttggagaccgcgttgcgcgcttcacgatgtcggcgggaaaccacatcaccatgctcgagggcggcgacgcggtctatgcggcgatgctcgacgagatctcctccgcccgtcgcagcattctcatcgagagctatattttcgaccgcgatcccatcggcatgcgtttcgccgatgccctgatcgccgcagtgaaacgcggcgtcgccgtgcgcgtcctgatcgacgccgtgggtgcgcgctattccgtgccgtccattgtgggctatctgaaggaaggaggcgtgccgaccgccgtcttcaacggcaatatcatcatgggcctgaggctgccctatgccaatctcaggacacaccgcaagatcatggttgtcgacggcgcggtcgctttcgccggcggcatgaacatccgcgcgggctttgccgctgaaatcgcaggcaaggctgcttctttcgacacgcatttccgcgtgaccggacccgttgtcgccgatatctttcaggttgccgcggaagactggcagttttcgagcaaggaggtactgacaggcgacggctggcggctcgccgaccttccggcggagccggacgggcgatcggtgctgatgcgggccgttccctcaggtcctgacaataccaacgagacaaatcacaagatgcttatgggcgccttttcgatggcgcgaaaacatatccggttgatgtcgccctatttcctcccggacaaggaattggtcagcgcgctcgtgacggcggcgaggaagggcgtcgaagtcgacatcgtcgtgccctctgtcaacaatctgacactcgtcgaccgcgcgatgacggcacagttcgaccaggtgctgaaaggtcattgccgcgtctggcgggcaaagggcgccttcaaccattccaagctgatggtcatcgacgatcgctgggcctatgtcggttcgaccaatctcgatccccgctccctgcgcctcaatttcgagttcgacctcgaaatactcgacgaagccttcgcacgcgcaatcggcgaaaaggtctgtgccatacgcgcggccgcggatgaagtgacccttgcagggctccgcgcgcagccgctcgtaaaccgtctggcaaaccgattgctctggctcggatcgccctacctttag

SEQ ID NO: 14227 - protein, 487 aa, Sinorhizobium meliloti 1021
MIVFIESYWPHFLALLSVVLGVPAIIHAAMTKDDVRAAAGWVGVVLLSPVIGAVIYAVAGINRMRRSSIGLQRSLLRSTERDPFGRFDVTHDQVVARFGQRFAAMKMLGDRVARFTMSAGNHITMLEGGDAVYAAMLDEISSARRSILIESYIFDRDPIGMRFADALIAAVKRGVAVRVLIDAVGARYSVPSIVGYLKEGGVPTAVFNGNIIMGLRLPYANLRTHRKIMVVDGAVAFAGGMNIRAGFAAEIAGKAASFDTHFRVTGPVVADIFQVAAEDWQFSSKEVLTGDGWRLADLPAEPDGRSVLMRAVPSGPDNTNETNHKMLMGAFSMARKHIRLMSPYFLPDKELVSALVTAARKGVEVDIVVPSVNNLTLVDRAMTAQFDQVLKGHCRVWRAKGAFNHSKLMVIDDRWAYVGSTNLDPRSLRLNFEFDLEILDEAFARAIGEKVCAIRAAADEVTLAGLRAQPLVNRLANRLLWLGSPYL

SEQ ID NO: 14228 - DNA, 1488 bp, Salmonella typhimurium LT2
  CDS (1)..(1488): transl_table=11
atgatgaagaaactgcccggctttacgcaagattacttactcagcaaggcgacgaccctgcctgataaaacacgcctggagcgtgccgttgaaccgctatgcgcgcgccatcccggagagtgcggcattctcgcgctggataacagtctggacgcttttgccgcccgctaccgcctgaccgaaatggcggcgcggacgctggatgtgcagtattatatttgggaagacgatatgtccgggcggctgctcttttcggtactgctgtcggcggcgaagcgcggcgttcatgttcgtctgctgctggatgataacaatacgcctggtctggatgatacgttgcgcttgctggatagccatcctaatatcgaagttcgtctgtttaatcctttctcttttcgtacgctacgcgcgctgggatatttgacggattttgcgcggctgaatcggcggatgcacaataaaagttacactgccgacggcgtagtgacgctggtcggtgggcgcaacatcggcgatgcctatttcggcgctggcgaggagccgctattttccgatctggacgtgatggccattggcccggtggtcaatgatgtcgccaatgattttgaacgttactggcgctgtagttcagtgtcgacattgcagcaagtattatccctttctgagcaggaactgacgcagcgtatcgaacttcccgaatcctggtataacgatgagatcacccgccgttatctgcataagctggaaaccagccagtttatggcggatctcgatcgcggaacgttgccgctgatttgggcaaaaacacgcttgcttagcgatgacccttctaaaggcgaggggaaggcgcagcgccattcgcttcttccgcagcgattatttgacgtgatggggtcgccgacggagcgtatcgacattatttccgcttactttgtccctacgcgcgcaggcgtggcgcagttgcttaatctggtcaggaaaggcgtgaagatcgccatcttaactaactctctggcggccaacgatgtggcggtcgttcacgcagggtacgcgcgctggcgcaagaaattactgcgctatggcgtggagctctacgaactgaaaccgacccgcgaacatgaaaccgccgtacatgatcgcggactcaccgggaactcaggttccagcttacatgctaaaacgttcagtattgatggtagtaaggtgtttatcgggtcgcttaattttgatccccgttcaacgcttttaaataccgaaatgggctttgtcattgaaagtgaaacgctggcgacgcttatccataagcgttttacacagagccaacgcgatgcggcctggcaactgcggctggatcgctggggacgaattaactggatcgatcgtcagcaagaagaggaaaaggtgttaaagaaagaacccgctacgcgtttctggcaacgagttctggtacggttggcggcaattttacctgtggaatggttgctgtga

SEQ ID NO: 14229 - protein, 495 aa, Salmonella typhimurium LT2
MMKKLPGFTQDYLLSKATTLPDKTRLERAVEPLCARHPGECGILALDNSLDAFAARYRLTEMAARTLDVQYYIWEDDMSGRLLFSVLLSAAKRGVHVRLLLDDNNTPGLDDTLRLLDSHPNIEVRLFNPFSFRTLRALGYLTDFARLNRRMHNKSYTADGVVTLVGGRNIGDAYFGAGEEPLFSDLDVMAIGPVVNDVANDFERYWRCSSVSTLQQVLSLSEQELTQRIELPESWYNDEITRRYLHKLETSQFMADLDRGTLPLIWAKTRLLSDDPSKGEGKAQRHSLLPQRLFDVMGSPTERIDIISAYFVPTRAGVAQLLNLVRKGVKIAILTNSLAANDVAVVHAGYARWRKKLLRYGVELYELKPTREHETAVHDRGLTGNSGSSLHAKTFSIDGSKVFIGSLNFDPRSTLLNTEMGFVIESETLATLIHKRFTQSQRDAAWQLRLDRWGRINWIDRQQEEEKVLKKEPATRFWQRVLVRLAAILPVEWLL

SEQ ID NO: 14230 - DNA, 1515 bp, Listeria monocytogenes EGD-e
  CDS (1)..(1515): transl_table=11
atgcgcaaactgattcaatttctgtttatagcagtagttttatttttagtggaatatgttttaatcaatcaagcagctatattattcttagtaacaagtgggattatccaactatgcggggttattatcgccattcgactactcctatttgaccaacggaatactagctcaaaagtcgcctgggttgcggttatttttattttgcctgtactcggaacgattagttaccttgtgttcggtagaaatccagcaactagaaaattcagcacagctcaagtaaaggaaaaaacaaaattaattaatgcgattcatgcaattccaaacaacactaatgaaaaattgccacgactatcaaaaagaatagcgcatttaacgtccatagagccaatcaaggggaataaaatcgaaatattaacaaatggtgaggaaacttttccagtgctcctagacgcgcttagaaaggctgaaaaccacattcacattcaatattacattttcaaaacggatgcgatttctactgaaattcgtgatattttggtggaaaaggcgaaatctggtgttgaggttagatttatgtttgatggtctcggatcaagcaaactgggtaaagcctttttagctcctttgaaagaggctggagttagtattcacgcatttgatccaattgcctccccctggattgtaagaacagccaatttaagaaatcaccgtaaaatcgtggtgattgatggccaaattggctttacaggtgggcttaatattggggaagaatatcgttccaatacacctgattttcgtgtttggcgcgatacacacataaaaataacaggccaagctgtaatcgaactccaagaatccttcctaaacgattgggtatacatggaaaatcaagctggcgccgctgacgggtttattagcgaatctggttcaaaacaatatttttctccagtcgatatgggtgatgaatgggctcaagttatttacggcggaccatatgataaagaaaaatgggttcgggattcgatgcttgatttgattgattccgctaaagaatcagtttggattgtatcaccctatttcgttccagatgaggagtcgcttgcggttattcgccgggttgcgatgagtggtgttgacgtgcgggttattattcctggtaaaggcgatcgcgggatttcattccacggaagtaatgcttatgtaaaaacaatgattgaagcaggcgcgaaaatgtatgcttatgccgatgactcttttgttcatgccaaagcaatgcttgtggacggaacacgtgcggctattggaactgccaattttgacgtgcgtagttttagattgaatcatgaattaatggtattcttatatgatgaaagcgaggctatgcatcatttaaaacgtgacttcaaaaaagattttgaagatagccgactatttacgatgaaagatatggaaaacaaaccattattgactcgtataaaagaagttctatccagtttactatcaccaattttataa

SEQ ID NO: 14231 - protein, 504 aa, Listeria monocytogenes EGD-e
MRKLIQFLFIAVVLFLVEYVLINQAAILFLVTSGIIQLCGVIIAIRLLLFDQRNTSSKVAWVAVIFILPVLGTISYLVFGRNPATRKFSTAQVKEKTKLINAIHAIPNNTNEKLPRLSKRIAHLTSIEPIKGNKIEILTNGEETFPVLLDALRKAENHIHIQYYIFKTDAISTEIRDILVEKAKSGVEVRFMFDGLGSSKLGKAFLAPLKEAGVSIHAFDPIASPWIVRTANLRNHRKIVVIDGQIGFTGGLNIGEEYRSNTPDFRVWRDTHIKITGQAVIELQESFLNDWVYMENQAGAADGFISESGSKQYFSPVDMGDEWAQVIYGGPYDKEKWVRDSMLDLIDSAKESVWIVSPYFVPDEESLAVIRRVAMSGVDVRVIIPGKGDRGISFHGSNAYVKTMIEAGAKMYAYADDSFVHAKAMLVDGTRAAIGTANFDVRSFRLNHELMVFLYDESEAMHHLKRDFKKDFEDSRLFTMKDMENKPLLTRIKEVLSSLLSPIL

SEQ ID NO: 14232 - DNA, 1515 bp, Listeria innocua Clip11262
  CDS (1)..(1515): transl_table=11
atgcgcaaactggtccaatttctgtttatagcagtagttttatttttagtggaatatgttttaatcaaccaagcagctatcttattcttaataacaagtggaatcatccaactatgcggggttattatcgcaattcggctacttctgttcgatcagcggaatactagctcaaaagtcgcttggattgccgttattttcattttgccagtgcttggaacaattagttaccttgtgtttggtagaaatccagcaactagaaaattcagtacagctcaagtgatggaaaaagctaaattaattaatgcgattcatgcaattccaaacaacaccaatgaaaaattaccaaggctttctaaaagaattgcgcatttaacgtccatagagccgattaagggaaataaaattgaaatattaacaaatggtgaggaaacttttccagtgctcctagacgcgcttagaaaggctgaaaaccatattcacattcaatattacatttttaaaacggatgcgatttctacagagattcgtgatattttggtggaaaaagcgaaatccggtgttgaggttaggtttatgtttgacggtcttggatcaagcaaactgagtaaagcctttttagctcctttgaaagaagctggagttagtattcacgcatttgacccaattgcctccccttggattgtaagaacagccaacttaagaaatcaccgtaaaattgttgtgattgacggacaaattggctttacaggtggacttaacattggggaagaatatcgctctaatacaccagattttcgtgtctggcgtgatacacacatgaaaatcacaggacaggctgttatcgaacttcaagaatcttttctaaatgattggatttatatggaaaatcaggctggggctgctgatcaatttattagtgaagctggattacaacaatatttttcaccagttgatgtaggtgatgaatgggcgcaagtgatatacggcggaccatatgataaagaaaaatgggttcgtgattcgatgcttgatttgattgattccgctaaagaatcagtttggattgtatcgccctattttgttccagatgaggaggctcttgcggttattcgccgggttgcaatgagtggtgtcgacgtacgggttattattcctggaaaaggcgatcgcgggatttcattccacggaagtaatgcttatgtaaaaacgatgattgaagcaggcgcgaaaatgtatgcttatgccgatgactcttttgttcatgcaaaagcaatgcttgtggacggaacacgtgcggctattggaactgccaattttgacgtgcgaagttttagattgaatcatgaattaatggtattcttatatgatgaaagtgaggctatgcttcatttaaaacgtgattttaagaaagattttgaagatagccgactatttacgatgaaagatatggaaaataaaccattattgactcgtataaaagaagttctatccagtttactatcaccaattttataa

SEQ ID NO: 14233 - protein, 504 aa, Listeria innocua Clip11262
MRKLVQFLFIAVVLFLVEYVLINQAAILFLITSGIIQLCGVIIAIRLLLFDQRNTSSKVAWIAVIFILPVLGTISYLVFGRNPATRKFSTAQVMEKAKLINAIHAIPNNTNEKLPRLSKRIAHLTSIEPIKGNKIEILTNGEETFPVLLDALRKAENHIHIQYYIFKTDAISTEIRDILVEKAKSGVEVRFMFDGLGSSKLSKAFLAPLKEAGVSIHAFDPIASPWIVRTANLRNHRKIVVIDGQIGFTGGLNIGEEYRSNTPDFRVWRDTHMKITGQAVIELQESFLNDWIYMENQAGAADQFISEAGLQQYFSPVDVGDEWAQVIYGGPYDKEKWVRDSMLDLIDSAKESVWIVSPYFVPDEEALAVIRRVAMSGVDVRVIIPGKGDRGISFHGSNAYVKTMIEAGAKMYAYADDSFVHAKAMLVDGTRAAIGTANFDVRSFRLNHELMVFLYDESEAMLHLKRDFKKDFEDSRLFTMKDMENKPLLTRIKEVLSSLLSPIL

SEQ ID NO: 14234 - DNA, 1443 bp, Nostoc sp. PCC 7120
  CDS (1)..(1443): transl_table=11
atgctgatagacagtagcgtccttgctttttttagcgcagctacagttgttattcatggtttgggaattgcccatgctgcccatgccgtgatggatgtgcgttcttctcgtggggcgatcgcttggagtatttccttaatcacttttccctggctgactattcctttatattggatcttaggcagaactaagtttcatggatattctgaagctatccgctcagtttacgcccaacattatcaatttgttcgtcaaacttatattgagattacaaaatttcaggtggtagtttcggcaaaattggaaccattgcaactattagctgaggccttcattggtattccttttacatctggtaataatgccaaattactaattaatggtcagcaaacttatgcagccatgttgagtgcgatcgcatctgccaatagttatattttgctgcaatcctacattgttgttgatgacaaagctgggaatgagtttaaagatgctctaattgccaaggcaaagcaaggaataagagtttacttaatttatgatgaaattggttctaataaaatctctcgcctttatgttaaatctctgcaaaaatatgatattcaagtgagtgcatttcatactaccagaggcagaggtaatcgttttcaattaaatttccgcaaccatcgcaaaattttagtagttgatgggagaactgcgtttattggtggtttgaatattagtgatgaatatctaggtaaaaatcctcgcctgagtccttggcgtgatacccacatgatgttagaaggccccactgtccaaagtctgcaaggatgttttttgcaagattggtattgggcgactcgtcaagttatcgatgtaaactggcaagtgcaacccaattgggaaagtgactacacagcattggtatttcctacaggccccgcagataagctgaaagcttgtaaactgtttttcgtcagcgctatcaatcaagcacaaactcgtctctggattgctactccctattttgtgccggatgattccactttgacagccttgaaattggcagcactacgcggcgtggatgtgcgaattattttaccaaatcgacccgatcatttacttgtgtacttgtgttccttttcttattacacagagatgaaggcaacgaatattaaattatatcgatataaacatggatttatgcaccagaaggtaatactgattgacaaagaaatggcaggtgtgggaacagttaatctagataatcgctcattctttctcaattttgaagttatgggttttgttgccaattctcagtttgtgaaaagtgtggaggagatgttacaagctgatttaaaggctgctttggctgtggatttttctgattatgagaggaaatatttgtggtttaagttagctgtgagaatatctagtttgttgaaacctttgttgtga

SEQ ID NO: 14235 - protein, 480 aa, Nostoc sp. PCC 7120
MLIDSSVLAFFSAATVVIHGLGIAHAAHAVMDVRSSRGAIAWSISLITFPWLTIPLYWILGRTKFHGYSEAIRSVYAQHYQFVRQTYIEITKFQVVVSAKLEPLQLLAEAFIGIPFTSGNNAKLLINGQQTYAAMLSAIASANSYILLQSYIVVDDKAGNEFKDALIAKAKQGIRVYLIYDEIGSNKISRLYVKSLQKYDIQVSAFHTTRGRGNRFQLNFRNHRKILVVDGRTAFIGGLNISDEYLGKNPRLSPWRDTHMMLEGPTVQSLQGCFLQDWYWATRQVIDVNWQVQPNWESDYTALVFPTGPADKLKACKLFFVSAINQAQTRLWIATPYFVPDDSTLTALKLAALRGVDVRIILPNRPDHLLVYLCSFSYYTEMKATNIKLYRYKHGFMHQKVILIDKEMAGVGTVNLDNRSFFLNFEVMGFVANSQFVKSVEEMLQADLKAALAVDFSDYERKYLWFKLAVRISSLLKPLL

SEQ ID NO: 14236 - DNA, 1269 bp, Ralstonia solanacearum GMI1000
  CDS (1)..(1269): transl_table=11
atgaaggtcgcgcgcgatgccgggccgttgcgttcggagtggcggcggggcaagcccctgccgggcaaccggatcgacctgctgcacggcggcgccgcgttctttcccgcgctgatcgaagccatcgatgccgcgcgccgccgcatcgcgctggaaacctacatctatatcgacgacgacaccgggcgccgcgtgaccgaggcgctggcgcgcgcggcgcggcgcggcgtggacgtgcgcgtcaccgtggacggctttggtaccggcacgctgcccgccggcatcgcggcgatgctggatgcggccggcgcggcctggcgggtgtaccggccggtgcgcggctttcgcctgcagcgccgctacctgcgccgcctgcatcgcaaggtcgccgtgatcgatgacgaggtggcgttcgtcggcggcatcaacatcatcgacgacctgaaccacaccccgttccgcgacgacgcactgggtgcccgctatgacttcgccgtgcgcgtgcgcgggccgctggtcggccagatcgcgctgatggtcgaccggctgtggtggcagacgggcctgctcgccggcgtgcgcgaggtgggcgtgaccggcgtggccgccgagtttccggtgatgaccgacacgcccaagccggggcggcgcggtgcctcggggacgcagcacgatcaggcgccggacaacgtgctggcgtcgctggtgctgcgcgacaacgtgcgcaaccgccgcgccatcgagcgcgagtacctgcgcgcgctgggcacggcgcggcacgaggtgatcatcgccaatgcctatttcctgccgggcgtgcgcttcatgcgcgcgctggccgcgtgccggcgccgcggcgtgcgggtgcgcatgctgctgcagggccatgtcgaatatgcggtgcagcattacgcaacgcgttcgctgtatcacatgctgctgcgcgacggcgtggagatccacgaatacacggccagcttcctgcacgccaaggtcgcggtcgtggatgggcgctgggcgacggtgggttcgagcaacatcgatccgttcagcctgctgctggcgcgcgaagccaacgtggtcgcctgggacgcgggggtcgccgggcagctgcgcgccgcgctggaagacgccattgcgcgccatgcgcggccgatcctcgccgatgcgcatgcggcccggccctggtggtggcgcgtggtcgactggtgcgcgtatcggctggtgcggctgggcgtcgtcatcagcggccgcgcggcgcactactga

SEQ ID NO: 14237 - protein, 422 aa, Ralstonia solanacearum GMI1000
MKVARDAGPLRSEWRRGKPLPGNRIDLLHGGAAFFPALIEAIDAARRRIALETYIYIDDDTGRRVTEALARAARRGVDVRVTVDGFGTGTLPAGIAAMLDAAGAAWRVYRPVRGFRLQRRYLRRLHRKVAVIDDEVAFVGGINIIDDLNHTPFRDDALGARYDFAVRVRGPLVGQIALMVDRLWWQTGLLAGVREVGVTGVAAEFPVMTDTPKPGRRGASGTQHDQAPDNVLASLVLRDNVRNRRAIEREYLRALGTARHEVIIANAYFLPGVRFMRALAACRRRGVRVRMLLQGHVEYAVQHYATRSLYHMLLRDGVEIHEYTASFLHAKVAVVDGRWATVGSSNIDPFSLLLAREANVVAWDAGVAGQLRAALEDAIARHARPILADAHAARPWWWRVVDWCAYRLVRLGVVISGRAAHY

SEQ ID NO: 14238 - DNA, 1557 bp, Agrobacterium tumefaciens str. C58
  CDS (1)..(1557): transl_table=11
gtgactgcatttacggtcttcatcatcattcttctcatgctcattgggccgagcctgttcgtcgtcatcggcaaacagcgggaaaaagccattcccaaacgcccctccaccgctctgccggttaccgaagacgaaacggcgctggaccggcactggcaatcgatcagaaacggctggaacgagaagaatgcactctgcctcttacattccaacctcgatgcctttgccgtgcgtgtggcggcggcgcgggccgccgggcgcagcctcgatctcatgtattacatgtggaatgccgacctgaccgggcggctgatgatgcgcgaggtcatcgccgccgctgatcgcggcgtgcgggtgcggctgctgctcgatgatctcggcgtctccatgtcagaccgcatcttccatgccatcgacagccaccccaatatcgaactccgcctgttcaatcccacccgggcacgggaaaacatcctgcatcgcagcctcgaactggtgctgcgctttcgaagcgtcaaccggcgcatgcacaacaaggcatggattgccgatggccgcgccgtgatcgtcggcggccgaaatattggcgacgcttacttcgacgccgccgaacgggcaaatttccacgatttcgacattctcggtttcggcgggatcgttgccgacgccaccgaaatcttcgacgattactggaacagcgccgtttccgtgccagtacgctcgctgctggcgcgccgaccgaacaaacttgccaaactgcggcgcgaactggacgccctgccgcaaagcgaagccgcgagaccctatctggagcgggtggagagccaatatggtcgtgatcatttcctgatgtcggaccgcctgcactgggtcgatacggcagatgtgcttgccgatccgcccgaaaaagcggcgggaaaacgccgcaagggccataatttcctgatggaaagcctattgccgctgatgcaggcggcgggagagagcctgcacattacttctccctatttcattcccggtaaacagggtgtggagatttttctcgatctcgccgaacgcggcgtgtcgctcgccatcctcaccaattcactggccgcaaccgatgtcgccgccgttcacgccggttatgcgcgttaccggaaaccgcttctctccggcggggtacgtttgcatgaattgcgttcgcaggcggatcagggcagcttcaccctgcgcggttcgggacaggcaagcctgcacaccaaggccttcacccgcgatggcgagaccggctatatcggctcactcaatttcgatccccgctccgcctcgctcaatacggaaatgggcgtggtgttcaattcagccccgctggtggcccgcatggacgagatattcgccgaagaaatccgccgcacgatgagcttcgaacttgatatcgacagcgccaaccgtatcgtctggatgacggaagaacgggggcagccaaagatctaccggcgcgaacccgacgcggcgatcagccgccggatcatcgccggcatcatgcgtgtcctgccgcttgaatctcagctttga

SEQ ID NO: 14239 - protein, 518 aa, Agrobacterium tumefaciens str. C58
MTAFTVFIIILLMLIGPSLFVVIGKQREKAIPKRPSTALPVTEDETALDRHWQSIRNGWNEKNALCLLHSNLDAFAVRVAAARAAGRSLDLMYYMWNADLTGRLMMREVIAAADRGVRVRLLLDDLGVSMSDRIFHAIDSHPNIELRLFNPTRARENILHRSLELVLRFRSVNRRMHNKAWIADGRAVIVGGRNIGDAYFDAAERANFHDFDILGFGGIVADATEIFDDYWNSAVSVPVRSLLARRPNKLAKLRRELDALPQSEAARPYLERVESQYGRDHFLMSDRLHWVDTADVLADPPEKAAGKRRKGHNFLMESLLPLMQAAGESLHITSPYFIPGKQGVEIFLDLAERGVSLAILTNSLAATDVAAVHAGYARYRKPLLSGGVRLHELRSQADQGSFTLRGSGQASLHTKAFTRDGETGYIGSLNFDPRSASLNTEMGVVFNSAPLVARMDEIFAEEIRRTMSFELDIDSANRIVWMTEERGQPKIYRREPDAAISRRIIAGIMRVLPLESQL

SEQ ID NO: 14240 - DNA, 1479 bp, Agrobacterium tumefaciens str. C58
  CDS (1)..(1479): transl_table=11
gtgctctatagtcttatcatgctcgatctcgtcattgcctattggccgcatatccttgccgttctctccatcttgatgggtaccgtggcggccgtgcatgccacgatgacgaaggaggaggtgcgttccgcgctgggctgggtgggcgtcatcgtgctgtcgccgatcgtcggcgcggtcatctacgccatcgccggcatcaaccgcattcgccggtcgaacatcacgcagcagcggtccttcatgctggacgagatcatggatcgcgtggcgcgcctcgatgccagcaacgatatgatcgcgacgcgtttcggccgccgtttcgaggcgatgaagacgcttggcgaccgggtgacgcgccacgcgctgacgaccggtaacggcatcgagccgctggtgagcggggatgtcgcctatgccgccatgctggaggcgatcggggaggcgaagcggtcgatcattctcgaaacatatattttcgataatgaccggatcggcgcccgtttcgtcgcggcgcttgaaagggcgaagctgcgtggcgtggaggtgagggtgctcatcgatgcggtcggcgcccgttattcggttccgagcatcctgccgacactcagggataaggacatcgttgccgatgtcttcaacggcaatgtcatcatggggctgcggctgccctatgccaatctgcgtacccaccgcaagatcctcgtggtggacggacgtatcgccttcagcggcggcatgaatatccgcgagggtttcaccctggaattcggtggcgaaagccagtcgcacgacacccatttcaagattaccgggccggtggtctccgattttttctccatcgctgcggaggactggcgcttcacgacgggggaggttctcgacgcaccggtctgggatatcgccattcccgatggcgtgccggggtcgcaaatcgttgcccgcgtctgctcctcggggccggacaaaagcatcgagaccagtcacaagatgctgatgggggccttttcggtggcgcgttcctccattctcatcatgtcgccctattttctccccgatcgggagcttatttcggcgctcattaccgcagcaaggcgggggtgcgtggtggatatcatcgtgccgaaaagcaacaatctggtgcttgtcgacagggcgatgacggcgcagttcgaccagatgctgaagaattattgccgcatctggcgggcgaccggggctttcaatcattccaagcttctggtgatcgacgggcgctggagctatattggctcctccaatctcgatccgcgatcgctgcggttgaacttcgagatcgatctcgaagtcatggacgaagaatttgccggggcgatcggagatcgtatccggaatgcgcgtgcaactgccttgcccgtccggctcagcgaactgaatgctcggccattcgttgtccgttttgtggagcgtgtgctgtggctcgcttcaccctatctttag

SEQ ID NO: 14241 - protein, 492 aa, Agrobacterium tumefaciens str. C58
MLYSLIMLDLVIAYWPHILAVLSILMGTVAAVHATMTKEEVRSALGWVGVIVLSPIVGAVIYAIAGINRIRRSNITQQRSFMLDEIMDRVARLDASNDMIATRFGRRFEAMKTLGDRVTRHALTTGNGIEPLVSGDVAYAAMLEAIGEAKRSIILETYIFDNDRIGARFVAALERAKLRGVEVRVLIDAVGARYSVPSILPTLRDKDIVADVFNGNVIMGLRLPYANLRTHRKILVVDGRIAFSGGMNIREGFTLEFGGESQSHDTHFKITGPVVSDFFSIAAEDWRFTTGEVLDAPVWDIAIPDGVPGSQIVARVCSSGPDKSIETSHKMLMGAFSVARSSILIMSPYFLPDRELISALITAARRGCVVDIIVPKSNNLVLVDRAMTAQFDQMLKNYCRIWRATGAFNHSKLLVIDGRWSYIGSSNLDPRSLRLNFEIDLEVMDEEFAGAIGDRIRNARATALPVRLSELNARPFVVRFVERVLWLASPYL

SEQ ID NO: 14242 - DNA, 1479 bp, Brucella melitensis 16M
  CDS (1)..(1479): transl_table=11
ttgcttaaagtttgctggatgcttgatctcgtttcccattattggccgcacattctgtttgtcctgtcgatcgttctcggagcgattgccgccattcatgcgacgatgaccaaggaggaagtgcgcacggccattggctgggtcggcgtgatcgtgctgtcgcccatcgtgggggcggttgtctatgcgattgcgggcgtcaaccgtatccggcgttcgacactgagctatcagcgcgccaatctcagcaatatcgcgctctaccacctctcgcatttcgacacgacgaacgaccgggtgcgggccgctttcgggcggcagttcggcgcgatgaaaattctgggcgatgcggtgagcctttatgattttaccagcggcaacactattgaaatgctggaagcgggtgatgaagcctatgccgcaatgcttggcgccataggccgggccgagcgcagcattgtgctggaaacctatattttcgaccatgacgccattggtaaaaaatttgccgatgcgcttggcgatgcggtgcagcgcggcgtggaagtgcgggtgctggtggatgcggtgggcgcgcgttattcctttccaagcattgtgaagcttttgaaagaaaagggcgtcaaggtcgctgtgttcaacggcaatatcatcatcggcctgcgtctgccctatgcgaacctgcgcacccaccgcaagatgctgattgtcgatggtcagactgcctttaccggcggcatgaatattcgcgccgggtttgtgagggctatcgcaggcgatgcggttgccttcgatacacatttcaaactcgaagggcctgccattgccgacctcttccatattgcctcggaagactggcgttttgcgaccggcgagcttttgacgggcgaagcctggagcatcgcgccaccggaaaatccacccggaacgggaacgctggtgcgtgtcgtcgggtcagggccggacaagaacctcgaaacgaaccatcgcatgatgatgggggcgttttcgattgcccagcagcatattctcatcatgacgccctatcttttgccggaccgcgaattgataagtgcgctggtgacggcggcacggcgcggcgtatcggtcgatatcgtggtgccgggtgtcaacaatctgaagctggtggaccgcgccatgcgcgcccagtttgatcagcttttgcgggacggctgccgcatctggcgtgctggcggggccttcaatcactcaaagctcatgaccatcgatggcgcctggtcctatgtcggctcgtccaatatcgatccgcgctcgctgcggctcaatttcgaggtcgatcttgaaatcctcgaccgggatgtggcacggcaggtggaagagcgtatcggacgggtgatcgagaaaagccgtgaggtcaaccttgtgcgcctgaagaaccgcccttttctggagcggctgcttgacaggatcatctggctcggctcaccttttctttga

SEQ ID NO: 14243 - protein, 492 aa, Brucella melitensis 16M
MLKVCWMLDLVSHYWPHILFVLSIVLGAIAAIHATMTKEEVRTAIGWVGVIVLSPIVGAVVYAIAGVNRIRRSTLSYQRANLSNIALYHLSHFDTTNDRVRAAFGRQFGAMKILGDAVSLYDFTSGNTIEMLEAGDEAYAAMLGAIGRAERSIVLETYIFDHDAIGKKFADALGDAVQRGVEVRVLVDAVGARYSFPSIVKLLKEKGVKVAVFNGNIIIGLRLPYANLRTHRKMLIVDGQTAFTGGMNIRAGFVRAIAGDAVAFDTHFKLEGPAIADLFHIASEDWRFATGELLTGEAWSIAPPENPPGTGTLVRVVGSGPDKNLETNHRMMMGAFSIAQQHILIMTPYLLPDRELISALVTAARRGVSVDIVVPGVNNLKLVDRAMRAQFDQLLRDGCRIWRAGGAFNHSKLMTIDGAWSYVGSSNIDPRSLRLNFEVDLEILDRDVARQVEERIGRVIEKSREVNLVRLKNRPFLERLLDRIIWLGSPFL

SEQ ID NO: 14244 - DNA, 1443 bp, Clostridium perfringens str. 13
  CDS (1)..(1443): transl_table=11
attataaactatacaacaacatttttatacttggcatttataattaatgtaatcttgtctgtcataattgtggtactagaaagaaaacaaccggaaaaaacaatagcatggttactaatactaactctattgcctcctataggattaatactttatatattcttaggacgtaattggaaaagaaataaacttaatgatagggttaatcctgagattaatgagttaataaatcctattttagatgaatatcctgaaaaacaatatgtacctttaatggagcttttagcttttaacagtgattctcctatctttgttaataatgatataaagatatataaggatggtgttgaaaagtttaaagatttaaaagaggaacttcttaaggctaagcatcatattcatcttgagtactatatagtaaatagtgatgaaataggtaatgaaattaaagatatattgataaagaaagctctagaaggagttaaggttagatttattattgataaagttggttcaagcagcttaaaaagaagctacattaaagatttaaaaaaagcaggaatctcagttattatgtattcatacttcttagcaccccttcttaaagtaataaatactcaaattaactatagaaatcatagaaaaatagttgttatagatggtcaagttggttttttaggtggtattaatataggagatgaatatttaggaagaaacaaaaagtttggttattggagagatactcacataatgattaaaggtgattttgttttagcactacaagcagttttcctagatgacttcataaccatagaaaaagctaataatagttatactttttatgataaagaatttgataaatattttcctgaaaatatagttgctaaggaaagagttttaatgcagttagttaaaagcggacctgattcaacatttcctgcaataatgcaaagcgttttaaaaatgattatgactgcaagggaaaatatttatataactactccttattttgtacctccatcaagcataatagaagctcttagaatagcttctttaagcggggttgatgtaaagattatttttcctgaaaaatcagatcactttatggtaaataaggcatctaaaagttatttagccgaacttatggattgtggaattgaagtttatttttatgataaaagttcttttatacattctaaaacaatgacaatagatggaaaaatatgtactttaggaacagctaatatggacatacgtagttttgaacttaattatgaaataaatactgttatatatgataaggaaataacatgtaagttagatgccttattttttgaagatttacttaagtctagacattttaaaattgaagaatatgaaaaatcaactaagtttgataagtttatagagggatttgctagaattttctcatcattattataa

SEQ ID NO: 14245 - protein, 480 aa, Clostridium perfringens str. 13
MINYTTTFLYLAFIINVILSVIIVVLERKQPEKTIAWLLILTLLPPIGLILYIFLGRNWKRNKLNDRVNPEINELINPILDEYPEKQYVPLMELLAFNSDSPIFVNNDIKIYKDGVEKFKDLKEELLKAKHHIHLEYYIVNSDEIGNEIKDILIKKALEGVKVRFIIDKVGSSSLKRSYIKDLKKAGISVIMYSYFLAPLLKVINTQINYRNHRKIVVIDGQVGFLGGINIGDEYLGRNKKFGYWRDTHIMIKGDFVLALQAVFLDDFITIEKANNSYTFYDKEFDKYFPENIVAKERVLMQLVKSGPDSTFPAIMQSVLKMIMTARENIYITTPYFVPPSSIIEALRIASLSGVDVKIIFPEKSDHFMVNKASKSYLAELMDCGIEVYFYDKSSFIHSKTMTIDGKICTLGTANMDIRSFELNYEINTVIYDKEITCKLDALFFEDLLKSRHFKIEEYEKSTKFDKFIEGFARIFSSLL

SEQ ID NO: 14246 - DNA, 1536 bp, Clostridium perfringens str. 13
  CDS (1)..(1536): transl_table=11
atggaaaagtttctgaaaaaactactaagtagagcatttatagttggatttcttatattcatacagtttgttatacttatgggggcaatatggaaagtaagcgaagatttcatatatgtgtattttctgtttatctttattagtatagtagtatttatttatattgttagtagaaaagataatccatcctataaattagcatgggcagttcctgtattattagttcctgtctttggaggattattttatttaatatttgggggaaataagacaagcaaaaagtttagaaaacaaataaaagcttcttatgatgaaacggcacacttattatatgatgatagaacagttttagaggagctagaaaacttagataaaagcatagctaatcaatcaaggtacatagctgattactctcagtttccagtatataaaaatactacaactgagtatttatctcctggagaggtattttttgaaaggttaaaggaagagttaaaaaaggcaaagcactacatatttatggaatatttcatagtacatgaaggagttatgtggaactctattttagaaatattagaggaaaaggttaaagaaggggtagaggttagattcgtttatgatgatatgggatgcttaggaactttaccatataagtataatgaagttttagaggctaagggaattaaatgtatggtatttaatccttttgtgccccttttatccttaagaatgaataaccgtgatcatagaaaaataactgttatagatgggcatactgggtttactgggggaataaacttagctgatgaatacataaatgaaattgttagatttggacattggaaggatgcctccataatgataaagggggatgctgtttggaatttaacagttatgtttcttcaaatatggaatttctatagtgaaggaaaagagcaatatgaaaaatattacccatattttcatcatgaagatgaatttgaaagtgatggatatgttcagccctatggagatagtcctttagatgatgaaatagtaggggagaatgtatatttaaatattataaataaggcaaaggactatgtttatataaatactccataccttattattgataatgagcttgttacagcgcttactcttgctgctaaaagtggaatagatgttagaatagttactcctcacattgaggacaaatggtatgctcatatagttacaagggcctattatcctcagcttatagaatctggtgttaagatatatgaatatactccaggatttattcactcaaagacctttgtctctgatgatgaaataggaatagtaggtactataaatatggattatagaagtttataccttcactttgaatgtggagtttggttatataaaactaaatcagtaggacagataaaggatgatttcttaaaaactttagaaaaatgtcaaagaataactttagaagattgtgctaaggttaaagttcctactagaattttaagatctataataagagtatttgctccacttatgtaa

SEQ ID NO: 14247 - protein, 511 aa, Clostridium perfringens str. 13
MEKFLKKLLSRAFIVGFLIFIQFVILMGAIWKVSEDFIYVYFLFIFISIVVFIYIVSRKDNPSYKLAWAVPVLLVPVFGGLFYLIFGGNKTSKKFRKQIKASYDETAHLLYDDRTVLEELENLDKSIANQSRYIADYSQFPVYKNTTTEYLSPGEVFFERLKEELKKAKHYIFMEYFIVHEGVMWNSILEILEEKVKEGVEVRFVYDDMGCLGTLPYKYNEVLEAKGIKCMVFNPFVPLLSLRMNNRDHRKITVIDGHTGFTGGINLADEYINEIVRFGHWKDASIMIKGDAVWNLTVMFLQIWNFYSEGKEQYEKYYPYFHHEDEFESDGYVQPYGDSPLDDEIVGENVYLNIINKAKDYVYINTPYLIIDNELVTALTLAAKSGIDVRIVTPHIEDKWYAHIVTRAYYPQLIESGVKIYEYTPGFIHSKTFVSDDEIGIVGTINMDYRSLYLHFECGVWLYKTKSVGQIKDDFLKTLEKCQRITLEDCAKVKVPTRILRSIIRVFAPLM

SEQ ID NO: 14248 - DNA, 1458 bp, Clostridium perfringens str. 13
  CDS (1)..(1458): transl_table=11
atgatttttacttttttctctaatttagttcatattgtaaatttattaactattttttatatgatttttaaagagaatcgttcttctaagagtataatttcttggacattagtattaattatattaccatacataggttttattctatttttaatcttaggaagaaaagttaatactaaagatatttttataatgaaaaaatctgaacttactctctttgataaatatataaaaaaattaaaaagtgctgataattcaaatgatgatttaaaaagagccaagcattctgatatgattaaagctattgaaagtatggagtactcaccttatagaaaagatgtggaaactaaagtattttttgatggtaaggaattatttgatgatattttagaaagcttaaagaaagcacaaaaaagcataaatatagaattttacatatttaaaaatgatgatattggttcaaaagtcttagatattcttaaagaaaaagctaaatctggcgttgaagtaagattattatatgactctgtaggaagtagaactaccaatagaaaaaaacttcagtctgcaattgatgctagtgtaaaagttggtgaattcttcccttccctacttagattaataaacataaacatgaactttagaaaccatcgtaaaataatagttatagataataaagtaggctatgttggtggctttaatgtaggagatgaatatttaggtaaagatcctaagtttggttactggagagatactcatataaaattcatgggtgactcagtaagagacttagatttaagattttgggctgattggagatatgctactaaggaagatattgatttaagccacttaatagattataaaaatgaacaagccccttctacaatggctaattattcaaagtgtggtatgcaaataatatctagtggccctaaccctgataacttttatgaaatcaaattatcatatttagaaatgattcaaaaagctaaaaaatatatttatatacaatcaccatacttaattttagataacagcatatctgatagtttaaaacttgcatctatttctggagttgatgtaagaataatgatacctggtaaaggtgatcacccctttgtttattgggcaaatctaaaatacgctggagatttactaaactttggagtaaaaatatatcattatgacaaaaatgctttccttcactctaaaaccttagttatagatgatgaagtatgttcaataggaactgccaatatggatacaagaagctttgaactaaactttgaagtaattgctatgctatactcagatgaaatagcaaaaatacaacgtaaacagtttgaaaaggacatgcttatttcaaaagaattgactaggaaagactatcttaagagaggaacttctgttaaaattaaagaatcattttcaaagctcttctcagctttactttaa

SEQ ID NO: 14249 - protein, 485 aa, Clostridium perfringens str. 13
MIFTFFSNLVHIVNLLTIFYMIFKENRSSKSIISWTLVLIILPYIGFILFLILGRKVNTKDIFIMKKSELTLFDKYIKKLKSADNSNDDLKRAKHSDMIKAIESMEYSPYRKDVETKVFFDGKELFDDILESLKKAQKSINIEFYIFKNDDIGSKVLDILKEKAKSGVEVRLLYDSVGSRTTNRKKLQSAIDASVKVGEFFPSLLRLININMNFRNHRKIIVIDNKVGYVGGFNVGDEYLGKDPKFGYWRDTHIKFMGDSVRDLDLRFWADWRYATKEDIDLSHLIDYKNEQAPSTMANYSKCGMQIISSGPNPDNFYEIKLSYLEMIQKAKKYIYIQSPYLILDNSISDSLKLASISGVDVRIMIPGKGDHPFVYWANLKYAGDLLNFGVKIYHYDKNAFLHSKTLVIDDEVCSIGTANMDTRSFELNFEVIAMLYSDEIAKIQRKQFEKDMLISKELTRKDYLKRGTSVKIKESFSKLFSALL

SEQ ID NO: 14250 - DNA, 1503 bp, Corynebacterium glutamicum ATCC 13032
  CDS (1)..(1503): transl_table=11
atgatctttcagatcaacctcgaatcttggcaaaccgttggtttgatcatcgactacaccatcaaaatcatcgccattggctacgtacccgaaggacgccgacccagctcctccaccgcgtggctcctggcaattttgctgctcccctacgtcggactcccactgttcctgcttatgggatcgccatacatcaaccggcgacgccaccgcatccaacaagaaatcaacgacctcatcgaagacgtccacgacgacgtccccgacatccccaccggaatggatgtctccgcggaagttgaatctgtcatcaaactcaaccgccgcctcacccgcatgccagcagtgaccggcggaaacaacggcttctactccgactaccgtgaatccctcaaacggatgaccgccgcaatcgacgaagccgaagaatacatctacgtcgagatctacatcatggcctgggattcctacacccaaccattcttcgcagcactcgaacgagcccacaaccgcggcgtcaaagtccgactccttttcgaccacgtcggcagctggaaataccccggctaccaccgcctcaaaaaagaactcaaccgcatgggcttcgcctggtacctcatgctccccctccaaccctggcgacgccgcttccgccgacccgacctgcgcaaccaccgcaaaatgctcatcatcgacggccacaccgcattcatgggctcccaaaatctcatcgccccgagttacctacaaaagaaaaacatcaaactcggccgcgaatggaaagacctcatggtcgaactcaccggccccatcgtctcctccatggaaatgatcttcgccggcgactggtacgtcgaatccaacgaagccctcgacatccgcgaccacgcagaagcccacggctacatcggcaacactcaaaaagactccgccaccaacctcgtgcagctcatcccctccggccctggttacaccacagaacccaacctgcgcatgttcaactccatcgttcaccacgccaaagaacgactcatcttgtgcagcccctacttcatccccgacgaatccctcctcgaagccgtcacctcagcctgctaccgcggagtaaccgtcgaactattcgtctctgaacaagccgaccaattcgccatcgaccacgcccaatcctcctactaccaggcactccttgaagccggcgtgaaaatctaccaattccccaaacccgacgtcctccacaccaagtacatgatcgccgaccccgacgacaccaccggcaacgaagccctcggagtcctcggatcctccaacctcgacatccgcagctttggcctcaactacgaaatctccctgatgatcgccaaaggcaacctcatccacgaactcaacgccctcaccgaccgttaccgcacagtaagtttcaagctcaccttggataagtggaaccagcgcagttggcggcgccgctacgtggacaatgtcatgcgtttgacctcggcgctgcagtag

SEQ ID NO: 14251 - protein, 500 aa, Corynebacterium glutamicum ATCC 13032
MIFQINLESWQTVGLIIDYTIKIIAIGYVPEGRRPSSSTAWLLAILLLPYVGLPLFLLMGSPYINRRRHRIQQEINDLIEDVHDDVPDIPTGMDVSAEVESVIKLNRRLTRMPAVTGGNNGFYSDYRESLKRMTAAIDEAEEYIYVEIYIMAWDSYTQPFFAALERAHNRGVKVRLLFDHVGSWKYPGYHRLKKELNRMGFAWYLMLPLQPWRRRFRRPDLRNHRKMLIIDGHTAFMGSQNLIAPSYLQKKNIKLGREWKDLMVELTGPIVSSMEMIFAGDWYVESNEALDIRDHAEAHGYIGNTQKDSATNLVQLIPSGPGYTTEPNLRMFNSIVHHAKERLILCSPYFIPDESLLEAVTSACYRGVTVELFVSEQADQFAIDHAQSSYYQALLEAGVKIYQFPKPDVLHTKYMIADPDDTTGNEALGVLGSSNLDIRSFGLNYEISLMIAKGNLIHELNALTDRYRTVSFKLTLDKWNQRSWRRRYVDNVMRLTSALQ

SEQ ID NO: 14252 - DNA, 1440 bp, Fusobacterium nucleatum subsp. nucleatum ATCC 25586
  CDS (1)..(1440): transl_table=11
atgcaagatatttctaaaattttattaacattagtacaactttttttacagtatgtttgggtggcaaatttattttttatcattgttattattatgatagagaaaaaaaatccattgtatacaattttatggatatttttattaacgcttgtgccttatgttggattttttatttatttattctttggtttaacttttaagaaaaaaagagttgcaaataaaatttataaaataaaaaaattaaaaagtagaaaagatgtttctaaatctgataatgaagaattaaaaagatggaagggacttataacttatcttgaaatgagtactgataaccatatttcttctaataatgatattcaagtttattttactggtgaagatttttttcctgaattaaaaaaagaaatagctaatgcaaaaaaatttataaatatggagtactttatttttcaatttgatggtataggaaaagaaatagcagatttattaattgaaaaagctaaggaaggagtagaagtaaatttaataatagatggagttaatttggccaattttagattaaaacaatattttaagaatactggagttaatttacatctattttttagaacatatattccaatatttaatatcagattaaattatagaaaccatagaaaagttacaataatagataatagaattgcctttgttggtggaatgaatataggagatgaatatttaggtaaaggaaaaatcggttattggagagatacttcagtaaaaatttatggagatatagtttcatcttttgaaaaagaattttatttttcattaagtatagtaaaaaatgaatttttaaaagatgagaaattttcaaatgaaatttccttaaaatatgaagaagatgaaggtatttatatgcaacttataagttcgggacctaattatgaatttccagctataagagataattatataaaacttattcaagaagctagaaaatctgtatttattcaaacaccttattttgttcctgatgatttattattagatacattgaaatcagctgttttatcaggtatagatgttaaaattatgatacctaataaagctgatcacccatttatttattgggttaatcaatattatgtttgggaacttttaagattaggggcgaatatttatagatatgaaaatggttttatacattctaagactatattagttgatgaagaagtagtttcagttggaacttgtaattttgattatagaagtttttatctaaactttgaaattaatttaaatatctataataaagaagttgctaattcttttaaagcacaatactacaaagatattacaatatccaaaaaattaacatttgctgattttaaaaagagaagtatttttacaaaagtgaaagaatcagtatttagattactatcacctataatgtag

SEQ ID NO: 14253 - protein, 479 aa, Fusobacterium nucleatum subsp. nucleatum ATCC 25586
MQDISKILLTLVQLFLQYVWVANLFFIIVIIMIEKKNPLYTILWIFLLTLVPYVGFFIYLFFGLTFKKKRVANKIYKIKKLKSRKDVSKSDNEELKRWKGLITYLEMSTDNHISSNNDIQVYFTGEDFFPELKKEIANAKKFINMEYFIFQFDGIGKEIADLLIEKAKEGVEVNLIIDGVNLANFRLKQYFKNTGVNLHLFFRTYIPIFNIRLNYRNHRKVTIIDNRIAFVGGMNIGDEYLGKGKIGYWRDTSVKIYGDIVSSFEKEFYFSLSIVKNEFLKDEKFSNEISLKYEEDEGIYMQLISSGPNYEFPAIRDNYIKLIQEARKSVFIQTPYFVPDDLLLDTLKSAVLSGIDVKIMIPNKADHPFIYWVNQYYVWELLRLGANIYRYENGFIHSKTILVDEEVVSVGTCNFDYRSFYLNFEINLNIYNKEVANSFKAQYYKDITISKKLTFADFKKRSIFTKVKESVFRLLSPIM

SEQ ID NO: 14254 - DNA, 1188 bp, Streptomyces coelicolor A3(2)
  CDS (1)..(1188)
atgaccgtcgttgaaccgactcccggtgccgaccgggtcagcatccaacggctgcgtcgccgtttggaaaggctgatcggtgtcgccgccaccgaagggaacgaactcgtcgcgctgcgcaacggcgacgagatcttccccgccatgctgggggcgatccgggcggccgagcacacgatcgacatgatgacgttcgtgtactggcgcgggcagatagcccgcgacttcgccgccgctctcgccgaccgggcccggtcgggagtacgggtccggctgctgctggacggcttcggcgccaaggagatcgaacaggacctgctggacgctatggaggccgcgggagtacagatcgcctggttccgtaaaccgctgtggctgtcgccgttcaagcagaaccaccgctgccaccgcaaggccctcgtcattgacgagcacactgccttcaccggaggcgtcggcatcgccgaggagtggtgcggcgacgcccgcggccccggcgagtggcgcgacacccacgtccaggtgcgcggcccggccgtggacggcgtcgccgccgccttcgcccagaactgggccgagtgccacgacgagttgtacgacgaccgggaccggttctccgatcacacccagcccggcacatccatcgtccaggtggtgcgcggttcggccagcttcggttggcaggacatgcagaccctcatccgcgtcatgctcacctccgcggagcaccgcttccgcctggcgaccgcctacttcgccccggatacatacttcatcgacctgctctgcgccaccgcccggcgcggtgtcacggtggagatcctgctccccggcccgcatacggaccagcgggcctgccaactggccggccagtaccactacacccgtttgctggacgccggggtgtcaattcgcgagtaccagccgaccatgatgcacgccaagatcatcaccgtggacgggctggccgccctgatcgggtccaccaacttcaaccggcgctccatggaccacgacgaggagatcatgctcgccgtcctggaccaggagttcaccaacggcctggaccgggacttcgacgccgacctggaacgcagcaccgccatcgagccgacccgctggaagcgccgcgccaccctgcgacgcctccgggagacggccgtcctgcccctgcgccggttcctgtga

SEQ ID NO: 14255 - protein, 395 aa, Streptomyces coelicolor A3(2)
MTVVEPTPGADRVSIQRLRRRLERLIGVAATEGNELVALRNGDEIFPAMLGAIRAAEHTIDMMTFVYWRGQIARDFAAALADRARSGVRVRLLLDGFGAKEIEQDLLDAMEAAGVQIAWFRKPLWLSPFKQNHRCHRKALVIDEHTAFTGGVGIAEEWCGDARGPGEWRDTHVQVRGPAVDGVAAAFAQNWAECHDELYDDRDRFSDHTQPGTSIVQVVRGSASFGWQDMQTLIRVMLTSAEHRFRLATAYFAPDTYFIDLLCATARRGVTVEILLPGPHTDQRACQLAGQYHYTRLLDAGVSIREYQPTMMHAKIITVDGLAALIGSTNFNRRSMDHDEEIMLAVLDQEFTNGLDRDFDADLERSTAIEPTRWKRRATLRRLRETAVLPLRRFL

SEQ ID NO: 14256 - DNA, 1461 bp, Xanthomonas campestris pv. campestris str. ATCC 33913
  CDS (1)..(1461): transl_table=11
atgctcgcacttgcacagggcgcgtgggattggctggccgacattccccacctcaaagcgctcctcttcgccgcctacgtgctgtatctgctgtggatcgtcagctggatcatcctgcagaagcgcgagccggtggccacgctgagctgggtgctgtcgctggccgcgctgccgtatctgggcctgctgatctactactggctgggcccgcaaaaggtcaaacgccagcgtctacgccgcgggcggtcgcgttcgggtatggaaagctacagcagcgtgtgtccgcccgatgccgattgcaccgagctggccaagatcgcccaatccaccaccggcctggccccaagcagcgcgacagaagccttgtggctggtggatggcgcgtccacctatgcggcgatcatcgaggcgatcacacaggcgcgcgaccacatccacctggagtactacattttccagcccgaccgcagcggcatgccgatctgcgaggccttgatggaacgcgcgcgggcgggggtcaaggtgcggctgttgatggatgcagtcggttcctcggcgatgacccggcgcaccctgcgcacgctgcgtgcggccggcgtggagaccgcctggttccatcccacccagctgctcaagccgttcaagcggccgtggttgaacctgcgtacgcaccgcaagttgatcgtcatcgacggccgcatcgcgttcaccggcggcatcaatgtcaccgacgaagagaacgaacaggttcgccccgacgcgtttcgcgacctgcatgtgcgtctgcagggccacgtggtgcgcagcctgcagctggtgttcctggaggactggctctacgccacccgccaggcccagggcgccttccatggccaacaactgtggccggaggatgtgcccacccgcaagcagggcagcatcgatgcgcaggtgctggtgtccggccccgattcgtcctgggaagcgatccaccggctgatggtggccgccatccacgaagccaggcatcgggtctggctggtcacgccgtacttcgtgccgggcgaggccgcgcgcatggcgctcacctctgcggcgctgggcgggctggacgtgcgcctgctgatcccgcgcgtcagcgattcgcgcctggtcacctatgccgcgcgctcgtatttcgatgaactgctggaggccggcgtgcgtatctacgagtacggcccgcgcatgttgcacaccaaggcgctgatcgccgacgacgatgtctgcatcgtcggtagcgccaatttcgacagccgcagcttccggctgaacttcgagctgtcgatgctgttccgcgaccaggcagtagccgccgagctcgccggcatgatcggcaccgacatggcccaggcacaggaagtgcgcttcaacctgcgccggccgttctggcgatcgcgcctgccggaagccttcgcgcggctgctatcgccgctgctctga

SEQ ID NO: 14257 - protein, 486 aa, Xanthomonas campestris pv. campestris str. ATCC 33913
MLALAQGAWDWLADIPHLKALLFAAYVLYLLWIVSWIILQKREPVATLSWVLSLAALPYLGLLIYYWLGPQKVKRQRLRRGRSRSGMESYSSVCPPDADCTELAKIAQSTTGLAPSSATEALWLVDGASTYAAIIEAITQARDHIHLEYYIFQPDRSGMPICEALMERARAGVKVRLLMDAVGSSAMTRRTLRTLRAAGVETAWFHPTQLLKPFKRPWLNLRTHRKLIVIDGRIAFTGGINVTDEENEQVRPDAFRDLHVRLQGHVVRSLQLVFLEDWLYATRQAQGAFHGQQLWPEDVPTRKQGSIDAQVLVSGPDSSWEAIHRLMVAAIHEARHRVWLVTPYFVPGEAARMALTSAALGGLDVRLLIPRVSDSRLVTYAARSYFDELLEAGVRIYEYGPRMLHTKALIADDDVCIVGSANFDSRSFRLNFELSMLFRDQAVAAELAGMIGTDMAQAQEVRFNLRRPFWRSRLPEAFARLLSPLL

SEQ ID NO: 14258 - DNA, 1983 bp, Xanthomonas campestris pv. campestris str. ATCC 33913
  CDS (1)..(1983): transl_table=11
gtgacgtccttgttgaggattcttgtgctggcaaccttgttgctcggcaccggatgcgccggcctgtcgcaaaccgaacgtcaccgcgccgccggcattgccgtggccgcgcgcagcaccgtggtgacctgcacccaggccgatcgctgcgcccagccctcgccgctgcgtgcgctgggcggcgacgccatcgccgcctccaccgctgcagcgccacgccactacgccaccatcgtggaccacggcgaggaatcgctggttgcgcggttgaacctgatccgcagcgccacccgcagcatcgacctgcagacctacatcttcgacaaggacgacagcgcccgcatggtgctggacgcgctgaccgccgccgcgcaacgtggggtcaaggtgcggatcctgatcgatcagctctcggcgatcgccgatctgcagatcctgggcgcgctggccagcagccacgaaaacctgcagctgcgcatctacaaccccaccttcggcaaggtgaagctcaactacttcgactacgccggcagcgtggtgtgctgtttccgccgcttcaatcagcgcatgcacaacaagctgctggtggtggacgatgtgctcggcgtggttggtgggcgcaactaccaggacgactacttcgactgggacagcgagtacaactttcgcgaccgcgatgtgattctggccgggccggaagtgcgcgcgatggcggtcaacttcgatgcgttctggaacgcgcgccgcagtgtcccggccgagcggctcaacgatgtcgggcggttgttgctggacgacggcccacagaccatgccgccggccaagttccgccggcccgagcgggtggcgcgggtggaccgcgaagccaatgacccgcagttcgtgcaggctgccttcgtggccccggcaatgccggtacagcgtgtgctgtacgtggccgacctgccgcagaaacaccgcaaggaacatggcgccaaggcggtatccaccgcgccggagctggacagcctgatcgccggagcgcagcaggaagtgctgctgcagacgccgtatctggtgttgtccgatcccgcgcaggaaatcttccgcaccttgcgcaagcgcgcgcagccgccgcgcatcgtggtgtccaccaacagcctggcggccaccgataaccccatcgtgtatgcgctgtcgtacaagttcaaacgccgcaacatgcgcgagttgggcttcaacgtgtatgagttcaaaccgttcccgctggatgcgccggtggactacgccaacctgctgcccgacccgctgacggccgccgcgggcgaggccgccgagaacgaccgcagcaatcgcctgatcggcggcagcgcggccggcaatgcggtgcgtggtagcagcggtggtagtggtggcggcgggcgtacgcccggcggcagcgatgtcgaccgccgcgtgctgcgcaccgaaacccggccctcgttcctgggcacccgcgcggtcaacaagccgttgccggtgacgcgcgccggtgcgcgcatggggctgcacgccaaatcgctggtggtggaccgccgcatcggcgtgatcggcacgcacaacttcgatccgcgcagcgagaactacaacaccgaggcggcggtggtgatcgacgatccgcgctttgcacaggcgctggccgccagcatcgagcgcgacatcgcccccgacaacgcctggacggtggcgccgcgggaaaagccgccggtgctcagcggcttgaactacagcgtgggcaaggtgtccgaagcgttgccggtgctggatttctggccgtggcgctacgccaccaactacgaattccagccgggcccgggctgcccgttcccgctcaagcgccaggacccgcagttccgccagtgctacgtggcggtgggcgatttccccgaggtcaatgttggcccgaagtggctgctggtgcggatgctgaccgccttcggcgccgggctggtgccgatcctctga

SEQ ID NO: 14259 - protein, 660 aa, Xanthomonas campestris pv. campestris str. ATCC 33913
MTSLLRILVLATLLLGTGCAGLSQTERHRAAGIAVAARSTVVTCTQADRCAQPSPLRALGGDAIAASTAAAPRHYATIVDHGEESLVARLNLIRSATRSIDLQTYIFDKDDSARMVLDALTAAAQRGVKVRILIDQLSAIADLQILGALASSHENLQLRIYNPTFGKVKLNYFDYAGSVVCCFRRFNQRMHNKLLVVDDVLGVVGGRNYQDDYFDWDSEYNFRDRDVILAGPEVRAMAVNFDAFWNARRSVPAERLNDVGRLLLDDGPQTMPPAKFRRPERVARVDREANDPQFVQAAFVAPAMPVQRVLYVADLPQKHRKEHGAKAVSTAPELDSLIAGAQQEVLLQTPYLVLSDPAQEIFRTLRKRAQPPRIVVSTNSLAATDNPIVYALSYKFKRRNMRELGFNVYEFKPFPLDAPVDYANLLPDPLTAAAGEAAENDRSNRLIGGSAAGNAVRGSSGGSGGGGRTPGGSDVDRRVLRTETRPSFLGTRAVNKPLPVTRAGARMGLHAKSLVVDRRIGVIGTHNFDPRSENYNTEAAVVIDDPRFAQALAASIERDIAPDNAWTVAPREKPPVLSGLNYSVGKVSEALPVLDFWPWRYATNYEFQPGPGCPFPLKRQDPQFRQCYVAVGDFPEVNVGPKWLLVRMLTAFGAGLVPIL

SEQ ID NO: 14260 - DNA, 1020 bp, Xanthomonas campestris pv. campestris str. ATCC 33913
  CDS (1)..(1020): transl_table=11
atgagccggcagcccgcgctctgctggcgccaagggcatcgcatgcgtctgctggaaaatggcgagaactacttcgcacgcttttaccagatgatcgccgccgcgcaagacgagattctgctggaaacgttcatcctgttcgaggatgcggtgggcctgcaattgcagcagcacctgatcgacgcggcacaacgcggcgtgcgggtacacctgctggtggatgcattcggctcgtgcgcattgtccccgcggtacgcacgcgaccttgccgaggcgggcgtgcagctgcgcctgttcgacccggagcccacaccgctgcgcaggcgcatcaatatgttccgccgcctgcatcgcaagctgctcgtcgtcgatcaggccattgccttcgtcggcggcatcaattattcggccgatcaactggccgggtcagggccgcagggcaaacaggattacgccatcgagctgcaggggccggtggtgtgtgatatcgctgccttcatgcagcaggccgcgcgtggcagcggggccggcgagggctggacgccggatccgtcatcacccgcatcaacagctgccgagagcggcgaggtttgctttatcgcgcgtgacaacggctcacgctcgcgcagcatcgaacaggcgtaccggcaggcatttgccgatgcgcggcaggaaatcatcatcgccaacgcgtacttcttcccgggctacggatgtctgcgtgatctgtgtgcggccgcgcggcgcggcgtccacgtgcgcctcatcgtgcagggacaacccgacaccccgcttgccttgttggcagcgcgtttgctgtaccgccagttgctcgctgccggggtgcagatcttcgagtactgcgagcgaccgttccatggcaaggttgcggtgatcgatgggtattggagcacggtcggttccagcaacctggacccactcagcctggcactgaacctggaggcgaacgtgctggtacgcaaccatgccttcgcagaggtcttgcgtgagcgcttgtaa

SEQ ID NO: 14261 - protein, 339 aa, Xanthomonas campestris pv. campestris str. ATCC 33913
MSRQPALCWRQGHRMRLLENGENYFARFYQMIAAAQDEILLETFILFEDAVGLQLQQHLIDAAQRGVRVHLLVDAFGSCALSPRYARDLAEAGVQLRLFDPEPTPLRRRINMFRRLHRKLLVVDQAIAFVGGINYSADQLAGSGPQGKQDYAIELQGPVVCDIAAFMQQAARGSGAGEGWTPDPSSPASTAAESGEVCFIARDNGSRSRSIEQAYRQAFADARQEIIIANAYFFPGYGCLRDLCAAARRGVHVRLIVQGQPDTPLALLAARLLYRQLLAAGVQIFEYCERPFHGKVAVIDGYWSTVGSSNLDPLSLALNLEANVLVRNHAFAEVLRERL

SEQ ID NO: 14262 - DNA, 1563 bp, Xanthomonas campestris pv. campestris str. ATCC 33913
  CDS (1)..(1563): transl_table=11
gtgaccaaacgcaagatcttcaagtgggcgggcatcggcgtgctggtgctggcgctgggcagcgtgctgtcgctgtatggctacggccgctttgccgatcgcgagcgcggccctgccagccatgccttgccggtggcggcgcaggcaacgccaatcgaccaggtcgtcgctccgttgcagcaggcgcatgccggcaagaccggcatggtgatcctgtccgacaacatcgatgcgtttgcggtgcgcgcgttgaccgcgcgtgcggccggccgcagcctggatctgcagtactacatctggcatgccgacttcaccggcaacctgttgcacaacgaattgctgcgtgcggccgaccgtggcgtgcgcgtgcgcctgttgctggacgacatgaacatccatggcagcgactcggtgctggccgcgttggacagccatccgctgatcgagatccgcctgttcaaccccacccgtgcacgcgagggcacgctgatgcgcggcgtggaaatggtgctgcgcatgttcagcatcaaccgacgcatgcacaacaaggcgtggattgccgatggccgcatcgcggtggtgggtgggcgcaatgtgggcgacgaatatttcgacgccgcgcgcgacaccaacttcatggacatggacgcggccttgatcggcccgacggtgcgtcagtccgaacaggtgttcgatgcctactggaacagccccaatgcattgccgctggcggcgctggtcaccgccaagccgcaggcgctggagcaactgcgcggcagcctggacgccgggatggcgtcggtgggcgcgcacccgtacgtggagcgcctgcgccaatcgccaagcgtgcatgccttgatgcagggcaatcgcccggtgcattgggtgcagcaggcgcgcatcgtggccgacccgccggagaaggccgaaggtgcgccaccgcaaccggactggatgacgccgatcctgatcggcgagatggccaacgcacgccgcgaactgaaattgatctcaccttatttcgtgcccggcgacgacggcatgcgctggatcggtggcctgcgcaagcgcgatgtacgcgtcagcgtattgaccaattcactggccgccaacgatgtcgtggccgtgcacagcggctatgcggactaccgcattccgctgctgcaacaaggcgtgcgcctgcacgagctcaagccgatggggcgcccggatggcagcctgttcggttccagtggtgcgagcctgcataccaaggccttcgtggtggacgacagcgccggtttcatcggttcgttcaacctggacccgcgggcgatgaatctcaacaccgagatgggcctgctattcgaagaccgcaccgtgaccgcggagctggagcggctatacaaccacaaggtgagcgcgccggtgagctaccgggtgacgttggagcagggcggattgcgctggcacgacgatgccgcgcagccaccggcggtgtggacgcgcgaaccggccgccagtgtgtggcgtcgcggcgcggccaaggtgttgggctggttgccgctggattcgcagttgtaa

SEQ ID NO: 14263 - protein, 520 aa, Xanthomonas campestris pv. campestris str. ATCC 33913
MTKRKIFKWAGIGVLVLALGSVLSLYGYGRFADRERGPASHALPVAAQATPIDQVVAPLQQAHAGKTGMVILSDNIDAFAVRALTARAAGRSLDLQYYIWHADFTGNLLHNELLRAADRGVRVRLLLDDMNIHGSDSVLAALDSHPLIEIRLFNPTRAREGTLMRGVEMVLRMFSINRRMHNKAWIADGRIAVVGGRNVGDEYFDAARDTNFMDMDAALIGPTVRQSEQVFDAYWNSPNALPLAALVTAKPQALEQLRGSLDAGMASVGAHPYVERLRQSPSVHALMQGNRPVHWVQQARIVADPPEKAEGAPPQPDWMTPILIGEMANARRELKLISPYFVPGDDGMRWIGGLRKRDVRVSVLTNSLAANDVVAVHSGYADYRIPLLQQGVRLHELKPMGRPDGSLFGSSGASLHTKAFVVDDSAGFIGSFNLDPRAMNLNTEMGLLFEDRTVTAELERLYNHKVSAPVSYRVTLEQGGLRWHDDAAQPPAVWTREPAASVWRRGAAKVLGWLPLDSQL

SEQ ID NO: 14264 - DNA, 1425 bp, Xanthomonas campestris pv. campestris str. ATCC 33913
  CDS (1)..(1425): transl_table=11
atgccgatgctgcctgactggttgcaagggacctggctgctggcgctggactgggcgatccgcctggccgcgctgctgtggatccccacccgcaccacgcctggggcggcgcgcagctggttgctgctgatcggcttcgtgccggtggtgggcctgccgctgtacctgttgttcggccacccgtggctatcgcggcagcgcgtacaacgccaggccacggcctcgcaggtgatccgtgagcagcagctgccattgcacgccttgcgctggaccccgcagccggacaccagcagcgccgaggtggtgccgttgatcgagcggcagggcgatttcatgcccacgctgggcaatgcggtggaactgttggacgactacgaggcctcgctgcaggcgttgattaccgcgatcgaccaggcgcaggaacgtgtgcatctgctgtattacctgatgttcgacgatgcggtgggcgaggcggtggtggctgcgctggaacgcgcctgcgcacgcggcgtgcgctgccgcttgctgctggatgccatgggcgccaagcgtggcctgcgccgttatcgccagcgcctgcaggccagtggcgtggaggtgctggccttgctgcccggcgggctgcgctggcgccgcagcgggcgcatggacctgcgcaaccaccgcaagattgcggtgatcgacaaccaggtcggctttgtcggctcgcagaacctggccgcacccggcttcatcgccggcgcgcccaatcgcgaactggtcgcgcgcgtacgcgggccggtggtcaaccacctggaagcggtgttcgccagcgactggttcaccgaaaccgggcagcgcctggacgtgtggccggacgcaccggtgtacgacgacaacatcgccacccagttgctgcccagcgggccggcgtatccgttcgagaacgcgcgcgatgcaatcaacgcagtgatccatctggcgcgccgcaaggtggtgctggtcacgccgtatttcgtgccggacgaagccatgctcagtgcgctgcgcattgccgggatgtctggcgtggacgtgcagttgatcctgtccgaacacaacaaccagcggctggcggcgtgggcgcaggaggcctatttcgaagagttgctgcgctgtggagtgaagattgcgctgtaccggccgcactttctgcatgccaagcatctgagcgtggatgaagacattgcgttggtgggctcgatcaacctggacatccgctcgttcgcgctcaatgccgagatcggcatgctctgctacgaccgcaacgtggtgctacgcctgcgcgagatcgagcaggattacctggcgcagtcgcagccggtggacatcgcgcagtggcgccgccgcccggcctggcggcgaagccgcgaaggcatcgcacgcctggcggatgcattgatgtag

SEQ ID NO: 14265 - protein, 474 aa, Xanthomonas campestris pv. campestris str. ATCC 33913
MPMLPDWLQGTWLLALDWAIRLAALLWIPTRTTPGAARSWLLLIGFVPVVGLPLYLLFGHPWLSRQRVQRQATASQVIREQQLPLHALRWTPQPDTSSAEVVPLIERQGDFMPTLGNAVELLDDYEASLQALITAIDQAQERVHLLYYLMFDDAVGEAVVAALERACARGVRCRLLLDAMGAKRGLRRYRQRLQASGVEVLALLPGGLRWRRSGRMDLRNHRKIAVIDNQVGFVGSQNLAAPGFIAGAPNRELVARVRGPVVNHLEAVFASDWFTETGQRLDVWPDAPVYDDNIATQLLPSGPAYPFENARDAINAVIHLARRKVVLVTPYFVPDEAMLSALRIAGMSGVDVQLILSEHNNQRLAAWAQEAYFEELLRCGVKIALYRPHFLHAKHLSVDEDIALVGSINLDIRSFALNAEIGMLCYDRNVVLRLREIEQDYLAQSQPVDIAQWRRRPAWRRSREGIARLADALM

SEQ ID NO: 14266 - DNA, 1461 bp, Xanthomonas axonopodis pv. citri str. 306
  CDS (1)..(1461): transl_table=11
atgctcgcacttgcacagggcgcgtgggagtggctggccaccattccccacctcgaagcgctcctcctcgccgcctatgtgctgtacctgctatggatcgccggctggatcgtgctgcagaagcgcgaaccggtggccacgctgagctgggtgttgtcgctggcggcgctgccgtacctggggctgctgatctactactggctcgggccgcaaaaggtcaaacggcagcggctgcggcgcgggcgctcgcgctcgggcatggagagctacagcagcgtctgcccgccggatgccgattgcaccgagctggccaagatcgcccagtccaccaccgggctagcgcccagcagcgccaccgaagtgcactggctggtggatggcgctgccacgtacgccgccatcatcgaagcgatccggggcgcacgcgaccatatccatctggagtactacatcttccagcccgaccacagcggcaccgcgatctgcgctgcgctgatggaacgtgcccgtgccggggtcaaggtgcggctgctgatggatgcgatcggctcatcggcaatgacccgacgcgccttgcgcacgctgcgcgaggccggggtggaaaccgcctggttccacccctcgcagttgctcaagccattcaagcggccgtggttgaacctgcgcacccaccgcaaggtgatcgtcatcgatggccgcatcggtttcaccggtggcatcaacgtcaccgacgacgagaacgagcaggtgcgcaagcaggcgtatcgcgatctgcacgtgcgcctgcaaggccatgtagtgcgcagtctgcagctggtgttcctggaggattggctctatgccaccagccagggccgcgcagctttccacggccagcagctatggcccgacgatatgcccacccgcgcgcaaggcacggtcgatgcgcaggtgctggtgtcgggtccggattcgtcgtgggaagcgatccaccgtctgatggtcgccgccatccatgaagccaagcaccgcgtgtggctggtgactccatacttcgtgcccggcgaggcggcgcgtatggcgctgacctcggccgcgctcggcgggctggacgtgcgcctgttggtgccgcgggtcagcgattcgcgcctggtcacctacgcggcacgctcgtatttcgacgagctgctggaagccggtgtccgcatctacgagtacgggccgcgcatgctgcacaccaaggcgctgctggccgacgacgatgtctgcatcgtcggcagcgccaatttcgacagccgcagcttccggctgaatttcgagctgtcgatgctgttccgcgaccaggccgtggcggcagagatggccgggctgatcggcaccgatctgcaacaggcgcaggaagtgcaattcgcgcgacaccggccgttatggcgctcgcgcctgcccgaagcgtttgcccggctgctgtcgccgctgctctga

SEQ ID NO: 14267 - protein, 486 aa, Xanthomonas axonopodis pv. citri str. 306
MLALAQGAWEWLATIPHLEALLLAAYVLYLLWIAGWIVLQKREPVATLSWVLSLAALPYLGLLIYYWLGPQKVKRQRLRRGRSRSGMESYSSVCPPDADCTELAKIAQSTTGLAPSSATEVHWLVDGAATYAAIIEAIRGARDHIHLEYYIFQPDHSGTAICAALMERARAGVKVRLLMDAIGSSAMTRRALRTLREAGVETAWFHPSQLLKPFKRPWLNLRTHRKVIVIDGRIGFTGGINVTDDENEQVRKQAYRDLHVRLQGHVVRSLQLVFLEDWLYATSQGRAAFHGQQLWPDDMPTRAQGTVDAQVLVSGPDSSWEAIHRLMVAAIHEAKHRVWLVTPYFVPGEAARMALTSAALGGLDVRLLVPRVSDSRLVTYAARSYFDELLEAGVRIYEYGPRMLHTKALLADDDVCIVGSANFDSRSFRLNFELSMLFRDQAVAAEMAGLIGTDLQQAQEVQFARHRPLWRSRLPEAFARLLSPLL

SEQ ID NO: 14268 - DNA, 2019 bp, Xanthomonas axonopodis pv. citri str. 306
  CDS (1)..(2019): transl_table=11
gtgacgtatctgttgagggtttgcgtgctggcaacgttgttgctcggcaccggatgcgccagcctgtcacaaaccgaacgcaaccgtgccgccggtgtcgccgctgcggcacgcagcacggtggtcaattgcacccaggccaatcgctgtgcgcaaccctcgccattgcgcgcgctgggcggcgaagcgatcaccgcctccacaccaggagcgccgcggcattacgccaccatcgtcgaccatggcgaagaatcgctggtggcccggctcaacctgatccgcagcgccacccgcagcatcgatctgcagacctacattttcgataaggacgacagcgcgcgcatggtgctggacgcactggtggacgccgcccagcgcggggtcaaggtgcgcatcctgatcgatcagttgtcggcgatcgccgatctgcagattctcggtgcgctcgccagcagccatgaaaacctgcagctgcgcatctacaaccccaccttcggcaaggtcaagctcaattacttcgattatgctggcagcgtgctgtgttgcttccgccgcttcaaccagcgcatgcacaacaagctgctggtggtggacgacgtgctgggcgtggtcggtgggcgcaattaccaggacgactattacgactgggacagcgagtacaacttccgcgaccgcgacgtgattctggccgggccggaagtgcgcgccatggccgccaatttcgatgcgttctggcgtgcccggcgcagcgtaccggccgagcgtctgaacgatgtcgggcgcctgctgctggagcagggcgtgccgacgatgccgccggccgagttccgccggcccgaccgggtggcgcgagtggaccgcgaagcgcacgacccgcaattcgtgcgcgacgccttcgtgaccccggccatgccggtgaagcgtgtgctgtacgtggccgatctgccgcaaaaacaccgccgggaacatgcggccaaggcagtgtccacggcgccggaactggatggcctgattgccggcgcgcagcaggaagtgctgctgcagaccccctacctggtcttgtccgaccaggcgcaggcgatcttccgcacgttgcgcaaacacccgcagccgccgcgcatcgtggtgtcgaccaatagcctggccgccaccgacaaccccatcgtgtatgcgctgtcgtacaagttcaaacgccgcaacatgcgcgagctgggcttcaatgtgtacgagttcaagccgtttccgctcgatgccccggtggattacgccaacctggtgacggacccgctcaaccccgcctccgacgtcaatcaggacagccgcaacaatcgcctgatcggcggcagcgcagcgggcaatgcgatgcgcggcagcagcggcccggagggcaacgccagcgcgagcgccggcagcgtgctgcgcggcagtggtggcggccgtgcgccgggcgggagcgaagtcgatcggcgcgtgttgcggaccgaaacgcggccctcgttcctgggcacgcgcgcggtcaacaagccgctgccggtgacccgcgccggtgcgcggatgggcttgcatgccaagtcgttggtggtggatcgccgcatcggcgtgatcgggacgcacaacttcgacccgcgcagcgaaaactacaacaccgaagcggccgtggtgatcgacgatgcgcgctttgcgcaggcgttggctgccagcatcgaacgcgacatcgctccggaaaatgcgtggacggtggcgccgcgcgaaaagccgccggtgctgagcgggttgaactacagcgtgggcaaggtctccgaagccttgccggtgctggacttctggccatggcgctacgccaccaactaccagttccagcccggcccggattgtccgtttccgctcaagcggcaggacccgcagttccgccagtgctatgtggcggtgggcgatttcccggaggtcaatgtcggcccgaagtggctgctggtgcgcatgctgaccgctttcggcgccgggctggtaccgattctctga

SEQ ID NO: 14269 - protein, 672 aa, Xanthomonas axonopodis pv. citri str. 306
MTYLLRVCVLATLLLGTGCASLSQTERNRAAGVAAAARSTVVNCTQANRCAQPSPLRALGGEAITASTPGAPRHYATIVDHGEESLVARLNLIRSATRSIDLQTYIFDKDDSARMVLDALVDAAQRGVKVRILIDQLSAIADLQILGALASSHENLQLRIYNPTFGKVKLNYFDYAGSVLCCFRRFNQRMHNKLLVVDDVLGVVGGRNYQDDYYDWDSEYNFRDRDVILAGPEVRAMAANFDAFWRARRSVPAERLNDVGRLLLEQGVPTMPPAEFRRPDRVARVDREAHDPQFVRDAFVTPAMPVKRVLYVADLPQKHRREHAAKAVSTAPELDGLIAGAQQEVLLQTPYLVLSDQAQAIFRTLRKHPQPPRIVVSTNSLAATDNPIVYALSYKFKRRNMRELGFNVYEFKPFPLDAPVDYANLVTDPLNPASDVNQDSRNNRLIGGSAAGNAMRGSSGPEGNASASAGSVLRGSGGGRAPGGSEVDRRVLRTETRPSFLGTRAVNKPLPVTRAGARMGLHAKSLVVDRRIGVIGTHNFDPRSENYNTEAAVVIDDARFAQALAASIERDIAPENAWTVAPREKPPVLSGLNYSVGKVSEALPVLDFWPWRYATNYQFQPGPDCPFPLKRQDPQFRQCYVAVGDFPEVNVGPKWLLVRMLTAFGAGLVPIL

SEQ ID NO: 14270 - DNA, 1563 bp, Xanthomonas axonopodis pv. citri str. 306
  CDS (1)..(1563): transl_table=11
gtgacaaagcggaaatttttcaaatggttcggcattgcgctgctggtgctggtgctggccagcgcgttatcgctgtacggctacgggcgctttgccgaccgccaacgcgggccggtcagtcatgtgctgcctgccacggcggtcgcgacgcccatcgacaaggtggtggcgccattgcaacaggcgcatgccgatcagaccggcatggtgatcctgccggacaacgtcgatgcatttgcggtacgtgcgctcaccgcgcgtgcggccgggcgcagcctggatctgcagtactacatctggcacgccgatttcaccggcaacctgctgcacaacgagttgctgcgcgcggccgatcgcggcgtacgcgtgcgattgctgctggacgacatgaatatccatggcagcgattcggtgctggccgccctggatagccatccgctgatcgagattcgcctgttcaacccgacccgcgcgcgcgaaggcaccttgatgcgcggcgtggagatggtgctgcgcatgttcagcatcaaccgccgcatgcacaacaaggcctggattgccgatggccgcatcgcggtggtgggtgggcgcaacgtgggcgacgaatatttcgatgcggcgcgcgacaccaatttcatggatatggatgcggcgctgatggggccggcggtgggccaggccgagcaggtattcgatgcgtactggaatagccccaatgccttgccgctgtctgcgctggtcaccgcaaaaccgcaggcactggaggccttgcgtggcagcctggacgccggcatggcatcggtgcgcgcgcatccgtatgtggagcggctcaagcgctccccaagcgtgcgcgaactgatgcagggcgaccgcccggtgcactgggtgtcgcaggcgcgcatcgtttccgacccgccggaaaaagccgaaggtgcgccgccgcaagccgattggatgacgccagtgctgatcggcgaaatggcgcacgcacagcgcgaactgaaagtgatttcgccgtatttcgtgccgggcgacgagggcatgcgctggatcggccatctgcgccagcgcaacgtgcgcgtgagcattctgaccaattcgctggcagccaacgacgtggtggcagtgcacagcggctacgccggctatcgcgtgccgcttctgcagctgggcgtgcgcctgcatgagctcaagccgatgggcaagccggacggcagcctgttcggttccagcggtgccagcttgcataccaaggcgtttgtcgtggacgacagcagcggtttcatcggctcgttcaacctggacccgcgttcgatgaacctcaataccgaaatgggcctgttgttcaacgaccgtgtggtcaccgcggagctggagcggctgtacaaccacaaggtcagtgcgccagtgagttaccgcgtcaccctggaccggggcgaactgcgttggcacgacgatgccgcgcagccgcccgaggtgtggtcgcgcgagccggccgcgagcgtgtggcgacgtggtgcagcagcggtgatgggctggttgccgctggagtcgcagctgtag

SEQ ID NO: 14271 - protein, 520 aa, Xanthomonas axonopodis pv. citri str. 306
MTKRKFFKWFGIALLVLVLASALSLYGYGRFADRQRGPVSHVLPATAVATPIDKVVAPLQQAHADQTGMVILPDNVDAFAVRALTARAAGRSLDLQYYIWHADFTGNLLHNELLRAADRGVRVRLLLDDMNIHGSDSVLAALDSHPLIEIRLFNPTRAREGTLMRGVEMVLRMFSINRRMHNKAWIADGRIAVVGGRNVGDEYFDAARDTNFMDMDAALMGPAVGQAEQVFDAYWNSPNALPLSALVTAKPQALEALRGSLDAGMASVRAHPYVERLKRSPSVRELMQGDRPVHWVSQARIVSDPPEKAEGAPPQADWMTPVLIGEMAHAQRELKVISPYFVPGDEGMRWIGHLRQRNVRVSILTNSLAANDVVAVHSGYAGYRVPLLQLGVRLHELKPMGKPDGSLFGSSGASLHTKAFVVDDSSGFIGSFNLDPRSMNLNTEMGLLFNDRVVTAELERLYNHKVSAPVSYRVTLDRGELRWHDDAAQPPEVWSREPAASVWRRGAAAVMGWLPLESQL

SEQ ID NO: 14272 - DNA, 1416 bp, Xanthomonas axonopodis pv. citri str. 306
  CDS (1)..(1416): transl_table=11
ttgcccgattgggtcacaggcacttggctgctggcactggactgggcgatccgcctggccgcactgctctggattcccgcccgcaccacgccgggtgcggcgcgcagctggctgctgctgatcggcttcgtaccggtggtcggcctgccgctgtatctgttgttcggccacccgtggttgtcgcggctgcgggtggagcgccaagccactgcctcgcaggtgattcgcgaacaacaactgcccttgcatgcgttgcgctggatgccccaggcagacaccagcagtgccgaagtggtgccgctgatcgaacgcgaaggcgatttcatgcccacgctgggcaacgcggtggaattgctcgacgactatgcgcagtcgttgcaggccctgatcgcggcgatcgacgcggccgacaaacgtgtgcacttgctgtactacctgatgttcgacgatgcggtgggcgaggcggtggtcgtggcgctggaacgcgccagcgcgcgcggcgtgcgttgtcgcgtgctgctggatgcggtgggcgccaagcgcggcctgcgtcgctaccgcaagcgcctgcaggacggtggcgtgcaggtgttggcggtattgccgggcggcctgcgctggcgtcgcagcggccgcatggatctgcgcaaccatcgcaagattgcggtgctcgacaaccgggtggcgtttgtcggttcgcagaatctggccgaggccggcttcattgatggcgtgcccaatcgcgaactggtggcacgcgtgcgcgggccggtggtcaatcatctggaagcggtcttcgccagcgactggttcaccgaaaccggagagcggctggacgtgtggcccgatgcaccggtgtgcgaggccaatatcgccacgcaattgctgcccagcgggccggcgtatccgttcgaaaatgcgcgcgatgcgatcaatgcggtgatccatctggcgcggcgcaaggtggtgctggtcacgccgtacttcgtgcccgacgaagccttgctgagcgcattgcgcatcgccccagtctcgggagtggatgtgcagttgatcctgtccgagcacaacaaccaacgcttggccgcgtgggcgcaggaggcctatttcgaagagctgctgcgttgcggggtgaagattgcgctgtatcgcccgcactttctgcatgccaagcacctgagcatggatgaagacatcgcgctggtgggctcgatcaatctggacatccgctcgttcgcgctcaacgccgagatcggcatgctctgctacgacactggcgtggtgcagcggttgcgcgagatcgagcaggactatctggccaacgcgcggcaactgacgttggaacagtggcgccgccgcccggcctggcgccgcagtcgcgagggcattgcgcggctggccgatgcgttgatgtag

SEQ ID NO: 14273 - protein, 471 aa, Xanthomonas axonopodis pv. citri str. 306
MPDWVTGTWLLALDWAIRLAALLWIPARTTPGAARSWLLLIGFVPVVGLPLYLLFGHPWLSRLRVERQATASQVIREQQLPLHALRWMPQADTSSAEVVPLIEREGDFMPTLGNAVELLDDYAQSLQALIAAIDAADKRVHLLYYLMFDDAVGEAVVVALERASARGVRCRVLLDAVGAKRGLRRYRKRLQDGGVQVLAVLPGGLRWRRSGRMDLRNHRKIAVLDNRVAFVGSQNLAEAGFIDGVPNRELVARVRGPVVNHLEAVFASDWFTETGERLDVWPDAPVCEANIATQLLPSGPAYPFENARDAINAVIHLARRKVVLVTPYFVPDEALLSALRIAPVSGVDVQLILSEHNNQRLAAWAQEAYFEELLRCGVKIALYRPHFLHAKHLSMDEDIALVGSINLDIRSFALNAEIGMLCYDTGVVQRLREIEQDYLANARQLTLEQWRRRPAWRRSREGIARLADALM

SEQ ID NO: 14274 - DNA, 1224 bp, Xanthomonas axonopodis pv. citri str. 306
  CDS (1)..(1224): transl_table=11
gtggggctgctgctgctcaacttcgccacgccggagaaaaagctcgagcacatccccaaacacctctacgacgttgccgatccgcaattcaaacgcgagatgtcggtgttgctggggccggccatcctgcccggcaacaggatcgacgtgctcaataacggccgcgagatctttccggccatgctggaggccatccgcagcgcgcagcacaccatcacgttcgaaacctatatctattggtcgggcgagatcggccgagaattcagcgacgccttgtccgagcgcgcgcgcgccggggtggatgtgcgggtcaccatcgactggggcggcagcctgaagatggaccatgcactggtagacaccatgaccgaggccggcgtggacgtgcaccgctaccgcccgctggcctggtacaacctgcaccgcatcaacaaccgcacgcaccgcaagctgctggtgatcgacggccgtatcggcttcaccggcggcgtgggcgtggccgaccagtggatgggcgacgcgcaggatccggaccattggcgcgacacccactaccgcatcgaaggcccggtggtggcgcaggtgcagaccgccttcaacgacaactggatcaagaccaccggccgcgtggtcaatggcgcccggtactacccggcgctggaggcggtcggcgacagcgatgcgcagttgttcgtggcctcgccggccggcggcagcgaaagcatgcacctgatgtatctgatcgccatcgccgccgcatgcagcaccatcgacctggccgcggcgtatttcgtgcccgatgcgctgatcacccgcgcgctgctggaagcgcgcagtcgcggcgtcagcatccgcgtgctgctgcccggcaagcacatcgatgcggtgtcggtgcggctggcctccaaggccagctgggagccactgctgcaggccggcatcgagatccacgaataccagcccaccatgctgcataccaaactgctgatcatcgacggcctgttggtctcggtaggctccaccaatttcgacatccgctcgttccgcctcaacgacgaggccagcctgaatgtctacgaccgcacgctggctgcacgcatgaccgaggtgttcgagcgcgatctgcaacgcgccgagcagtattcgctggagcgctggcgcgcgcggccgttgcggcagaagcttggcgagaaactggtgttcccgttccgctcgcaggtgtga

SEQ ID NO: 14275 - protein, 407 aa, Xanthomonas axonopodis pv. citri str. 306
MGLLLLNFATPEKKLEHIPKHLYDVADPQFKREMSVLLGPAILPGNRIDVLNNGREIFPAMLEAIRSAQHTITFETYIYWSGEIGREFSDALSERARAGVDVRVTIDWGGSLKMDHALVDTMTEAGVDVHRYRPLAWYNLHRINNRTHRKLLVIDGRIGFTGGVGVADQWMGDAQDPDHWRDTHYRIEGPVVAQVQTAFNDNWIKTTGRVVNGARYYPALEAVGDSDAQLFVASPAGGSESMHLMYLIAIAAACSTIDLAAAYFVPDALITRALLEARSRGVSIRVLLPGKHIDAVSVRLASKASWEPLLQAGIEIHEYQPTMLHTKLLIIDGLLVSVGSTNFDIRSFRLNDEASLNVYDRTLAARMTEVFERDLQRAEQYSLERWRARPLRQKLGEKLVFPFRSQV

SEQ ID NO: 14276 - DNA, 1518 bp, Staphylococcus aureus subsp. aureus MW2
  CDS (1)..(1518): transl_table=11
atgttttttgtgcctttctttataggagaaaagactatgcgatatacattttcaaatgatttaggaacactttttaccattattttagccattggattcatcattaatttagtattggcttttattattatctttttagaaagaaatagacgtacagcgagttcaacttgggcatggctatttgtactttttgtcttaccattgattggttttattctttacttgttttttggtagaaccgtttcggcacgtaaattgaataaaaacaatggtaaggtgttaacggatttcgatggacttttaaaacaacaaatagaaagctttgataaaggtaattatggtactgataacaaacaagttcaaaaacatcatgatttagtacgtatgcttttgatggatcaagatggttttttaactgaaaataataaagttgatcatttcattgatggaaatgatttatatgatcaagttttacaagatattaaaaatgctaaagaatacatccatttagagtattatacattcgctctagatggcttgggccaaagaattttaaaagcgttagaagagaaattgaaacaaggtctagaagtgaaaattttatatgatgacgttggttcaaagaaagttaagatggctaattttgatcattttaaatcgttaggtggagaagttgaagcattttttgcttctaaattaccgttattgaatttcagaatgaataacagaaatcatagaaaaatcatcgtaatcgatggtcaactaggttatgtcggaggatttaacattggtgatgaatatctaggattaggtaaactagggtattggagagatacgcatttacgtatacaaggggatgcggttgatgcactgcagttgcgatttattttagactggaattcgcaagcgcaccgtccacagtttgaatatgatgttaagtatttccctaaaaagaacggaccattgggcaattcaccaattcaaatagctgcaagtggtccggctagtgactggcatcaaattgaatatggttatacaaaaatgattatgagcgctaagaagtcggtatatttgcaatcgccttatttcattccggataactcatatataaatgccattaaaattgcagctaaatcaggggtagatgttcatctaatgattccatgtaagccagatcatcctttagtttattgggcgacatattcaaatgcttcagatttactatctagtggcgtaaaaatttacacgtatgaaaatggatttatacattctaaaatgtgtttaatagatgatgaaatggtttcagtcggaactgctaatatggactttagaagttttgaattgaatttcgaagtcaatgcttttgtatatgatgaaaagcttgctaaagatttaagggtggcttatgaacatgatattacaaaatcaaaacaactaaccaaagaatcatatgccaatagaccgctgtctgttaagtttaaagaatcgttagctaaattagtttcgccaattttataa

SEQ ID NO: 14277 - protein, 505 aa, Staphylococcus aureus subsp. aureus MW2
MFFVPFFIGEKTMRYTFSNDLGTLFTIILAIGFIINLVLAFIIIFLERNRRTASSTWAWLFVLFVLPLIGFILYLFFGRTVSARKLNKNNGKVLTDFDGLLKQQIESFDKGNYGTDNKQVQKHHDLVRMLLMDQDGFLTENNKVDHFIDGNDLYDQVLQDIKNAKEYIHLEYYTFALDGLGQRILKALEEKLKQGLEVKILYDDVGSKKVKMANFDHFKSLGGEVEAFFASKLPLLNFRMNNRNHRKIIVIDGQLGYVGGFNIGDEYLGLGKLGYWRDTHLRIQGDAVDALQLRFILDWNSQAHRPQFEYDVKYFPKKNGPLGNSPIQIAASGPASDWHQIEYGYTKMIMSAKKSVYLQSPYFIPDNSYINAIKIAAKSGVDVHLMIPCKPDHPLVYWATYSNASDLLSSGVKIYTYENGFIHSKMCLIDDEMVSVGTANMDFRSFELNFEVNAFVYDEKLAKDLRVAYEHDITKSKQLTKESYANRPLSVKFKESLAKLVSPIL

SEQ ID NO: 14278 - DNA, 1482 bp, Yersinia pestis KIM
  CDS (1)..(1482): transl_table=11
gtgaacaggatttacgcccttatgacgacattttataccgtaatcagttggctttccgtttttggctactggttactcattgccggggtaacattgcgtattctgatgaaacgcagggccgttccttctgctatggcttggttactgattatctacattctgccattggtggggataattgcttacctttcattcggtgaattgcatttgggtaagcggcgtgctgaacgagctaaagccatgtggccatcgaccgctcgctggctgagtgaactcaaggaatgccaacatatctttgctaactctaatagcgaagttgccagcccactgtttcaattatgtgaacggcgtcaaggaataaacggtgttaaaggaaatcaactacaactattaacaacaaccgatgacacactaaaagcgctagtacgagatattgaactcgcccgccacaatatagaaatggtgttttatatttggcaacctggtggtctggtcgatcaggtggctgaatcgttgatggctgcggctcgacgcggcgttcattgccggctgttactcgattcagcgggtagcaagcaatttttccgcagcccttatcccgcaatgatgcgtaatgcaggtattgaggtggttgaggcacttaaagttaatgtatttcgtatgttcttgcgccgaatggatctgcgccaacatcggaaaattgtgttaatcgacaactatgttgcttataccggcagtatgaacatggtagatccccggttcttcaaacaagatgccggggttggtcagtggattgatatgatggcgcgcatggaaggcccggtagccacaaccctaggtattgtttatgcctgtgactgggaaattgaaacaggcaaacgtattttacccccgccccccgacgcgaatattatgccattcgaagaagagactggtcatacgattcaagtcatcgcttctggccctggtttcccagaagaaatgatccaccaggcattattaacagctgtgtatgccgcacgtgaacagttaattatgactacgccatattttgtccccagtgatgacttattacatgccatctgtaccgcggcacaacgcggggttgatgtcagtattattgtcccgcgtgagaatgattcgatgatggttcgctgggccagccgagcattcttcaccgaattgctgaatgcaggcgttaaaatttatcagtttgaaggcggcctattacacagtaaaagtgttctggtcgatggacagctaagtttagtcggcactgttaatctggatatgcgcagtttgtggctgaattttgaaatcacactggtgattgatgatgatggctttggggctgatttagcacaagttcaggatgattatatcgcccgctctgccttattggatggtgaacggtggaacaagcgccctctttggcaccgagtaactgagcgtttattctattttttcagcccattattgtaa

SEQ ID NO: 14279 - protein, 493 aa, Yersinia pestis KIM
MNRIYALMTTFYTVISWLSVFGYWLLIAGVTLRILMKRRAVPSAMAWLLIIYILPLVGIIAYLSFGELHLGKRRAERAKAMWPSTARWLSELKECQHIFANSNSEVASPLFQLCERRQGINGVKGNQLQLLTTTDDTLKALVRDIELARHNIEMVFYIWQPGGLVDQVAESLMAAARRGVHCRLLLDSAGSKQFFRSPYPAMMRNAGIEVVEALKVNVFRMFLRRMDLRQHRKIVLIDNYVAYTGSMNMVDPRFFKQDAGVGQWIDMMARMEGPVATTLGIVYACDWEIETGKRILPPPPDANIMPFEEETGHTIQVIASGPGFPEEMIHQALLTAVYAAREQLIMTTPYFVPSDDLLHAICTAAQRGVDVSIIVPRENDSMMVRWASRAFFTELLNAGVKIYQFEGGLLHSKSVLVDGQLSLVGTVNLDMRSLWLNFEITLVIDDDGFGADLAQVQDDYIARSALLDGERWNKRPLWHRVTERLFYFFSPLL

SEQ ID NO: 14280 - DNA, 1461 bp, Brucella suis 1330
  CDS (1)..(1461): transl_table=11
atgcttgatctcgtttcccattattggccgcacattctgtttgtcctgtcgatcgttctcggagcgattgccgccattcatgcgacgatgaccaaggaggaagtgcgcacggccattggctgggtcggcgtgatcgtgctgtcgcccatcgtgggggcggttgtctatgcgattgcgggcgtcaaccgtatccggcgttcgacactgagctatcagcgcgccaatctcagcaatatcgcgctctaccacctctcgcatttcgacacgacgaacgaccgggtgcgggccgctttcgggcggcagttcggcgcgatgaaaattctgggcgatgcggtgagcctttatgattttaccagcggcaacactattgaaatgctggaaacgggtgatgaagcctatgccgcaatgcttggcgccataggccgggccgagcgcagcattgtgctggaaacctatattttcgaccatgacgccattggtaaaaaatttgccgatgcgcttggcgatgcggtgcagcgcggcgtggaagtgcgggtgctggtggatgcggtgggcgcgcgttattcctttccaagcattgtgaagcttttgaaagaaaagggcgtcaaggtcgctgtgttcaacggcaatatcatcatcggcctgcgtctgccctatgcgaacctgcgcacccaccgcaagatgctgattgtcgatggtcagactgcctttaccggcggcatgaatattcgcgccgggtttgtgagggctatcgcaggcgatgcggttgccttcgatacacatttcaaactcgaagggcctgccattgccgacctcttccatattgcctcggaagactggcgttttgcgaccggcgagcttttgacgggcgaagcctggagcatcgcgccaccggaaaatccacccggaacgggaacgctggtgcgtgtcgtcgggtcagggccggacaagaacctcgaaacgaaccatcgcatgatgatgggggcgttttcgattgcccagcagcatattctcatcatgacgccctatcttttgccggaccgcgaattgataagtgcgctggtgacggcggcacggcgcggcgtatcggtcgatatcgtggtgccgggtgtcaacaatctgaagctggtggaccgcgccatgcgcgcccagtttgatcagcttttgcgggacggctgccgcatctggcgtgctggcggggccttcaatcactcaaagctcatgaccatcgatggcgcctggtcctatgtcggctcgtccaatatcgatccgcgctcgctgcggctcaatttcgaggtcgatcttgaaatcctcgaccgggatgtggcacggcaggtggaagagcgtatcggacgggtgatcgagaaaagccgtgaggtcaaccttgtgcgcctgaagaaccgcccttttctggagcggctgcttgacaggatcatctggctcggctcaccttttctttga

SEQ ID NO: 14281 - protein, 486 aa, Brucella suis 1330
MLDLVSHYWPHILFVLSIVLGAIAAIHATMTKEEVRTAIGWVGVIVLSPIVGAVVYAIAGVNRIRRSTLSYQRANLSNIALYHLSHFDTTNDRVRAAFGRQFGAMKILGDAVSLYDFTSGNTIEMLETGDEAYAAMLGAIGRAERSIVLETYIFDHDAIGKKFADALGDAVQRGVEVRVLVDAVGARYSFPSIVKLLKEKGVKVAVFNGNIIIGLRLPYANLRTHRKMLIVDGQTAFTGGMNIRAGFVRAIAGDAVAFDTHFKLEGPAIADLFHIASEDWRFATGELLTGEAWSIAPPENPPGTGTLVRVVGSGPDKNLETNHRMMMGAFSIAQQHILIMTPYLLPDRELISALVTAARRGVSVDIVVPGVNNLKLVDRAMRAQFDQLLRDGCRIWRAGGAFNHSKLMTIDGAWSYVGSSNIDPRSLRLNFEVDLEILDRDVARQVEERIGRVIEKSREVNLVRLKNRPFLERLLDRIIWLGSPFL

SEQ ID NO: 14282 - DNA, 1503 bp, Corynebacterium efficiens YS-314
  CDS (1)..(1503): transl_table=11
atgagcatatccatcgacctggaagtctggcagaccatcggtctgatcgtggactacacgatcaagatcatcgccatcggttatgtccccgagggccgccgccccagcacctccaccgcctggctgctggccattctcctcatccccttcctgggcctgccgctgttcctgctcatggggtcgccctatatcaataaacggcgacaccgcatccagcaggagatcaatgatctcatcgaggacgtccacgatgatgtccccgactatcccgacggggtcagtgtccacccggagctcgaatccgtcatccgcctgaaccggcgcctgaccaacatgcccgccgtgatcggtgtcaaccacggggtgcactccgactatgacgccaccatcaaacgcatgaccgcggccgtggatgaggcacaggactacatctacgtcgagatctacatcatggcctgggatgacacgaccaagcccttcttcgaggccctggaacgcgccgagaaacgcggggtgaaggtgcgtctgctcttcgaccacgtgggcagctggaaataccccggctaccgcaaactgaagaagaacctcaccgccatgggcatcgagtggtacctcatgctgcccctgcagccgtggcgccgacgcttccgccgacccgacctgcgcaaccaccgcaagatgctcatcatcgacggacacctcggtttcatggggtccctcaacatgatcgatgccagctacctgcagcgcaagaacatcaagatcggccgcaaatgggtggacctcatggtggaactctccggccccatcgtgtcctccatggagatggtcttcgccggtgactggtacgtcgaatccaatgaggccctggagatccgcgaccacgaggaggcccacaccaccatccccgacaccgcccagaactcccagaagaacctggtgcagctggtgccgtccggccccgggtacaacaccgaacccaacctgcggatgttcaactccatcgtgcaccacgcgaaatcacggctggtgctgtgcagcccctatttcatccccgatgaatccctcctggaagccgtcacctccgcctgctaccggggtgtgcaggtggaactgttcgtctccgaggaggccgaccagttcatggtcaaccatgcccagtcctcctactaccaggcgctgctggaggccggggtgaaaatctacatgtaccccaagcccttcgtcctgcacaccaaatatgtcctcgcggatcccgaccactccgccgacggtgtgccggtgggcgtggtcggatcctccaacctggatatgcgcagtttcggcctgaactatgagatctccatgatggtggccaagggcgatctgatcaacgatctcaacgacctgaccgagcactacaaggacatctgcctccggctcaccctggaccagtggaaccagcgcagctggggaaggcgttatctggacaatgtcatgcggctgacctcggcgctgcagtag

SEQ ID NO: 14283 - protein, 500 aa, Corynebacterium efficiens YS-314
MSISIDLEVWQTIGLIVDYTIKIIAIGYVPEGRRPSTSTAWLLAILLIPFLGLPLFLLMGSPYINKRRHRIQQEINDLIEDVHDDVPDYPDGVSVHPELESVIRLNRRLTNMPAVIGVNHGVHSDYDATIKRMTAAVDEAQDYIYVEIYIMAWDDTTKPFFEALERAEKRGVKVRLLFDHVGSWKYPGYRKLKKNLTAMGIEWYLMLPLQPWRRRFRRPDLRNHRKMLIIDGHLGFMGSLNMIDASYLQRKNIKIGRKWVDLMVELSGPIVSSMEMVFAGDWYVESNEALEIRDHEEAHTTIPDTAQNSQKNLVQLVPSGPGYNTEPNLRMFNSIVHHAKSRLVLCSPYFIPDESLLEAVTSACYRGVQVELFVSEEADQFMVNHAQSSYYQALLEAGVKIYMYPKPFVLHTKYVLADPDHSADGVPVGVVGSSNLDMRSFGLNYEISMMVAKGDLINDLNDLTEHYKDICLRLTLDQWNQRSWGRRYLDNVMRLTSALQ

SEQ ID NO: 14284 - DNA, 1158 bp, Pseudomonas putida KT2440
  CDS (1)..(1158): transl_table=11
atggcggggccggtcttcccctggcgggatggcaatcagttcgaactgcttatcgacggccctgcgttctttccgcgcatgctcctggcgatcatgcgtgccgagttccaggttgacctggagctgtacctggtcgaggccggtgcctgtgccgaggcggtggtcgacgcgctggagcaggctgcccggcgtggcgtgcgggtgcggtgcctgttcgatgactacggttcattggccttcaacagcgcgttgcgtcagcgcctgctggacgctggcgtgtacttgcgctggtataaccgcctgcgctggaagcgtggcctgcgtaacctctaccgtgatcatcgcaaattgctactggttgacgaacgttgggcagtggtgggggggacgggcgttaccgacgagttctggacgccgggtgaggcgaccagcgaatggcacgaagtgatggtgcagatgcaggggccggtggtgagcgactggcagttgctgttcgaccgtcagtggcaagccaacaaccgccgcaccgcctggcgccctgctgaaggctttggcctgccgcgtctgcccaaggtgcctgcgcaggggcagggcatgggccgggtcgcttatgccgacgcccgccagcaccaggacatcctgcacgcgctggtacgggcgctgaacagcggccagaaacgggtgtggctggccacgccgtacttcttgccgacctggagcgtgcgccggtcgttgcgccgggctgccagcaagggcctggacgtgcgtctgttgttgaccggcccgcgtaccgatcacccctcggtacgctacgccgggcatcgttactacccgcgtctgttgcgcgcgggcgtacggattttcgagtaccagccgtgcttcctgcacctgaagatggctgtggtagacgactgggtcagcgtcggttcgtgcaacttcgaccactggaacttgcgcttcaaccttgaagccaacatcgaagcgctcgacccgccgttgacagcggcggtggtggccagcttcgagcgcgacttcgcccagagcgaagaagtcgacctcgcccactggcatgcgcgcccttggtggcgcagggtgaagcaacggatctggggctggctcgatcggctggtggtcaacttcctcgaccgccgtgactga

SEQ ID NO: 14285 - protein, 385 aa, Pseudomonas putida KT2440
MAGPVFPWRDGNQFELLIDGPAFFPRMLLAIMRAEFQVDLELYLVEAGACAEAVVDALEQAARRGVRVRCLFDDYGSLAFNSALRQRLLDAGVYLRWYNRLRWKRGLRNLYRDHRKLLLVDERWAVVGGTGVTDEFWTPGEATSEWHEVMVQMQGPVVSDWQLLFDRQWQANNRRTAWRPAEGFGLPRLPKVPAQGQGMGRVAYADARQHQDILHALVRALNSGQKRVWLATPYFLPTWSVRRSLRRAASKGLDVRLLLTGPRTDHPSVRYAGHRYYPRLLRAGVRIFEYQPCFLHLKMAVVDDWVSVGSCNFDHWNLRFNLEANIEALDPPLTAAVVASFERDFAQSEEVDLAHWHARPWWRRVKQRIWGWLDRLVVNFLDRRD

SEQ ID NO: 14286 - DNA, 1554 bp, Pseudomonas putida KT2440
  CDS (1)..(1554): transl_table=11
ttgagactccagcgagccttgcctctgctgctggtgttgttgctcggcgttgccggttgcacaagcatcagcgcgccccgcgaaaccagccaggcgttgcctgcccacgaatcggcctttggccgctcggtgctgcgccaggccgcgccctatggcggccgctcgggctttcgcctgctgcccaacagcaacgaggcatttcgcgcccgcgccgaactgatacgcaacgcccaggcgagcatcgacctgcagtactacatcgtccacgacggtctcagtacccgcgcccttgtgcatgaactgctgcgcgctgccgaccgtggcgtgcgcgtgcgcatcctgctcgacgacaccaccagcgacggcctggacaccgtcatgggcaccctcgatgcccatccgaacatccacattcgcgtgttcaacccactgcatctggggcgcagtaccggcgttacgcgcgccgtgggccggctgttcaacttgtcgcgccagcaccggcgcatgcacaacaagctgttcctggtggacaacagcatggccatcgtcggcgggcgcaacctgggcgacgagtatttcgatgccgagcccaacctcaacttcaccgacatcgacctgctgggcgtgggcccggtagccgagcagctggggcacagcttcgaccagtactggaacagcgccctcagccggccgatcaccgatttcctctggcatgacccggatgccaacgacctgcgggctagccgccagcgcctggaagtgtcgctggccaaagccaggacccagcgcaaggccctgtacgaccgcttgatggcctatcagtcgcagccgcgcctggatgtgtggcgcaacgagctgatctgggctcacgcacaggccctatgggatgcgcccagcaaggtgttggccgaagacgaaccggacccgcaattactgctgagccagcaactggctccggacctggctaacgtgcaccgcgagttggtcctggcatcggcctactttgtaccgggcgaaccggggctgctgtacctgaccggccgcgccgacgctggcgtttcggtgaagctgctgaccaactcgctggaagccaccgacgtgccggcagtgcatggaggctatgcaccctatcgtcgtgccttgcttgagcacggggtgcagctttacgagcttcgccgccagccaggcgaccccagcgcggggcgactgagtttccgtggcagctcggattcgagcctgcacaccaaggcgatcgtgttcgaccggcgcaagaccttcatcggctcgttcaacttcgacccgcgctcagtattgtggaacaccgaggtcggggtactggtggacagcccggagctggccgaatacacccgcgaactggcccagcagggtatggcgcctgcgctgagctatcaggtgaaactgataggtaacaagctggtgtgggcgaccgaggacaatggccaacggcacgtgctgacgtctgagccgggcgggatctggcgacgcttcaatgcctggatcagcaaggcggttggcttggagaagatgctatag

SEQ ID NO: 14287 - protein, 517 aa, Pseudomonas putida KT2440
MRLQRALPLLLVLLLGVAGCTSISAPRETSQALPAHESAFGRSVLRQAAPYGGRSGFRLLPNSNEAFRARAELIRNAQASIDLQYYIVHDGLSTRALVHELLRAADRGVRVRILLDDTTSDGLDTVMGTLDAHPNIHIRVFNPLHLGRSTGVTRAVGRLFNLSRQHRRMHNKLFLVDNSMAIVGGRNLGDEYFDAEPNLNFTDIDLLGVGPVAEQLGHSFDQYWNSALSRPITDFLWHDPDANDLRASRQRLEVSLAKARTQRKALYDRLMAYQSQPRLDVWRNELIWAHAQALWDAPSKVLAEDEPDPQLLLSQQLAPDLANVHRELVLASAYFVPGEPGLLYLTGRADAGVSVKLLTNSLEATDVPAVHGGYAPYRRALLEHGVQLYELRRQPGDPSAGRLSFRGSSDSSLHTKAIVFDRRKTFIGSFNFDPRSVLWNTEVGVLVDSPELAEYTRELAQQGMAPALSYQVKLIGNKLVWATEDNGQRHVLTSEPGGIWRRFNAWISKAVGLEKML

SEQ ID NO: 14288 - DNA, 1575 bp, Vibrio vulnificus CMCP6
  CDS (1)..(1575): transl_table=11
atgcctgccgtgccacttccagaatatctgaagaatccattttttgggcttggtccgttgcgaacatttatccataaagcattgacgtattgttctgtgatgttgctctgcgcgtgtacatcactcgaaaatcactcaccgttcgacaagcaaccgagctaccaactgggctaccaagccgactctcgcctttcggcctatcttaaccatcatcctcaagacagagaaaacttgaccgcttttttccctctggacaaagggcatgatgcgcttctcgcgagattggcgttaatcgaggcagccgataaaacgctcgatttgcaatactacatcttccgcaatgacgaaaccggacaattactgacatggcgtttatttgaagctgcccaacgaggggtccgagttagaattctcctcgatgatatgcagaaaaggaacgatgaaggattggctcgattaagcgctcatcccaacattcagattcgcttgtttaacccgcatcaatatcgaacggcacgtacgcttgcgatggccagtgatttttcacgactcaatcggcgcatgcacaataagtccctcaccgcagacagtgtggtggccattgttggtggccgtaacatcggtaacgagtatttttcggttaactctccagtcgaatttggggattttgatttgatgctttatggcaacagcgttgaacagaccgccgagcaatttgatttgtattggaacagtctccatgccgtaccaattgagtggctcaccgacaaccccattcccgtcaccgaagaggaattgcaagcttggctaaaagaaacccaactagaacaaaagtttactcaaggtcgatacgactttactcagttgcaactgtaccaacagtttaccgataagagtttggtttggtattggggtaaagggcaggtttggtatgatctgcctgacaaagtcgacacacaagcaccacaattagcagacaacctcgcttcgcttttaagaaccgtgaaggattccctcgtccttatctcgccctatttcgttccaacggaacgcggcacacaagccttggtagaagcggcccatcgcggcgtcgacatcactattgtcaccaacagcttggcctcaaatgacgtctttgctgtgcacggctggtacgccaagtatcgacaagatcttgtcgaagcgggcattcagttatgggaaaccaaagccagcgcaagaattgacagcaaatggagtttcactggcagcagccgctcaagcctgcatgctaaagtgctgttaatcgaccaccgattgctgtttgccggctccatgaactgggatcctcgttcggctttgctcaacaccgaaatggcagcagtgatcgaacatcctgattacgttcaatcgtcagaagccaaattgcctatgggtttagaaaccaatgcctatcaggtgcgaatgaaaaacggtgaagtggcttggtttgatcaccaatctcaagtttggtttgattccgaaccggaagccacggtatggcggaaaatcggcgcttggtttgctggcattttacccattgaagagcaactttag

SEQ ID NO: 14289 - protein, 524 aa, Vibrio vulnificus CMCP6
MPAVPLPEYLKNPFFGLGPLRTFIHKALTYCSVMLLCACTSLENHSPFDKQPSYQLGYQADSRLSAYLNHHPQDRENLTAFFPLDKGHDALLARLALIEAADKTLDLQYYIFRNDETGQLLTWRLFEAAQRGVRVRILLDDMQKRNDEGLARLSAHPNIQIRLFNPHQYRTARTLAMASDFSRLNRRMHNKSLTADSVVAIVGGRNIGNEYFSVNSPVEFGDFDLMLYGNSVEQTAEQFDLYWNSLHAVPIEWLTDNPIPVTEEELQAWLKETQLEQKFTQGRYDFTQLQLYQQFTDKSLVWYWGKGQVWYDLPDKVDTQAPQLADNLASLLRTVKDSLVLISPYFVPTERGTQALVEAAHRGVDITIVTNSLASNDVFAVHGWYAKYRQDLVEAGIQLWETKASARIDSKWSFTGSSRSSLHAKVLLIDHRLLFAGSMNWDPRSALLNTEMAAVIEHPDYVQSSEAKLPMGLETNAYQVRMKNGEVAWFDHQSQVWFDSEPEATVWRKIGAWFAGILPIEEQL

SEQ ID NO: 14290 - DNA, 1485 bp, Staphylococcus epidermidis ATCC 12228
  CDS (1)..(1485): transl_table=11
atgatagaagtctttactatggcacttcatcaatctaatattataattaatattttattagttagtgcctttttattaaatttagtttttgcattcattattattttcatggagaggcgtacagcaaattctatatgggcgtggttattggttttagtttttctacctttagtaggattcatattgtatttattattaggtcgccaaatacagagagaacatatatttaaactcgccaaagaggataaagttggtcttgaaatgattgttgacgagcaattagaggcattgaaaaagcaagacttttctaagggtaatcatcaaattgttaaatttaaagaaatggtacaaatgttactttataataatgctgcttttttaacaactgataatgatctaacaatttatacagatggtcatcagaagttcgatgatttaattaatgatattagacacgcacaatcatatattcacatccaatactacattattcatagtgataatctcggaaagcaattgttacatgaattagaaaaaaaagctgaagaaggtatagaagttaaaatgctatacgatgatatgggctcaagagatttacgaaagaaagatctaaaaaagtttcgtcaaaaaggcggtcacgctgaatctttctttccatcaaaattaccacttattaatttaagaatgaataatagaaaccacagaaaaatagtagtcattgacggtacgattggatatgttggtggttttaatgtaggagatgaatatataggtaaatctaagaaatttggttattggagggacacacacttacgtattaaaggtgacgcggtaaatgcccttcaacttagattcatcttagattggaactcacaatcaactcgtgacaatttaacttatgaatctcgatattttcctgatgttgactctggtggtacgataggcatacaaattgcttcaagtgggcctgatgaagattgggaacaaattaaatatggttatttaaaaatgatttcatcagccaaagaatctatatacattcaatcaccatacttcattcccgatcaagcttttttagattcgattaaaattgcagcgcttggtggtgtggatgttaacatcatggttcctaacaaacgtgatcatccctttgtttattgggctacgcttaaaaacgtagcgtctttacttgaagctggcgttaatgtctatcattatgataatggttttctacattcaaaaacacttgtcattgatgatgaggtagcaagtgtaggaactgccaatatggataatcgaagctttacattaaactttgaggtcaatgcttttatttatgatgaaggcgtagcacgatcattaaaacaagctttcattaatgatatgaaattatctaacaagctcacttctgaagaatatgctaaacgaaatctgctagttaaattcaaagaagggatttcacaactactttctccaattttataa

SEQ ID NO: 14291 - protein, 494 aa, Staphylococcus epidermidis ATCC 12228
MIEVFTMALHQSNIIINILLVSAFLLNLVFAFIIIFMERRTANSIWAWLLVLVFLPLVGFILYLLLGRQIQREHIFKLAKEDKVGLEMIVDEQLEALKKQDFSKGNHQIVKFKEMVQMLLYNNAAFLTTDNDLTIYTDGHQKFDDLINDIRHAQSYIHIQYYIIHSDNLGKQLLHELEKKAEEGIEVKMLYDDMGSRDLRKKDLKKFRQKGGHAESFFPSKLPLINLRMNNRNHRKIVVIDGTIGYVGGFNVGDEYIGKSKKFGYWRDTHLRIKGDAVNALQLRFILDWNSQSTRDNLTYESRYFPDVDSGGTIGIQIASSGPDEDWEQIKYGYLKMISSAKESIYIQSPYFIPDQAFLDSIKIAALGGVDVNIMVPNKRDHPFVYWATLKNVASLLEAGVNVYHYDNGFLHSKTLVIDDEVASVGTANMDNRSFTLNFEVNAFIYDEGVARSLKQAFINDMKLSNKLTSEEYAKRNLLVKFKEGISQLLSPIL

SEQ ID NO: 14292 - DNA, 1959 bp, Xylella fastidiosa Temecula1
  CDS (1)..(1959): transl_table=11
ttgaatatattcatacgtttgttgctgctagcagctgttttgttgggcagtggttgcgctagcctgtcgcatgcccagttggattatgctgcgtcggtcgccgtggctgcgcgcccggctacgctggattgtgacaggcccaatcgttgtgcgttggattcgccgttgtacgcgcttgggagccgagcgctgagtgaatctacgcctgtgacaccacttcactatgtcaccatcctcgataaaggcgagagcgcgttggtcgcacggatcaatttgatccgcagtgctacccgcagtatcgacatgcagacttacatttttgacaaggacgatagtgcccggttgatcatggatgagctattgactgctgccagacgtggtgttcgagttcgtttactgattgaccagctttcggcgatttctgatctgaatattctgggtgccttggctggtgcacacgttaatttccaactacgtatctacaacccgatttttggcaaagccaagctgaactatggtgactatgttgccagcgtgctgtgttgttttcgtcgatttaatcagcgcatgcacaataaattgttggtcattgatgaaatgatcggcgtggtcggcgggcgtaattaccaagatgactattatgattgggatcttgaatataattttcgtgaccgtgatgtgcttgtcgccggaccggcggtgctgcaaatggcagttaactttgatgcgttttgggcggctgagcgcagcgtaccggtagagcgcctcagggatgttggacgtatggtgctgcaggatggggtgccgatgctgccatcagctgtcttcaatctgttggaacgggtccagcgtgttactgctgaggccaacgatccggactatgtcaagcgcacttttgtcgatgcggccttggctgtgaacaaagtgcaatatgttgctgacctgccgcaaaagcatcgctatgagcacaacgcaaatccggtttccatcgggccacggttggatagtttgatttctaatgcgcgtcatgaggtgatcttgcagaccccatatctggtgttgtccaaaccagcgctgaacatcttccgtcgcctcaatcggactcaggacaaaccgcgcgtggttgtggtgaccaacagtttggctgctaccgataatcccatcgtctatgccttattttacaaatacaagcggcgtaacatgcgtgacctggggttcgacatttacgagtacaagccgtttccggaaaatccgccaatcgacctgacgggcgttgttccgattgaaggatggaacaatgactctcttcagaggcgacaggaccttttggctgctgccaaagtctccgatgattcagacaatgctcgtcagttacctcagcttgaaaataaaggtcaagtggataggcgtgttttacgtactgaaacgcgtccgcccttttggcgcattcacactgtcaataaaccattacctgtgacccgtccgggcgcacgcatgggcttgcatgcaaaatcattggtggttgatcgtaaggttggagtgattggtacccacaacttcgatccgcgcagtgagagttacaatactgaagctgttgtggtgattgaggatccagcgtttgccggtctgttggcttccagtattgagggtgacattgctccaggtaatgcgtgggtcgtggcaccgcggaagaagttacctgggctctataagctcaattattcggtaggtaaactgtctgaggcattgcctgtgctggacctgtggccttggcgctatgcaaccaactatgaattcaaacccgggttggattgtccaataccattgccacgtcgggatccgaatttcatgcaatgttatgaacctgtcggtgactttcctgaagtcaatgttggtccaaagtggttgttggtgcggatgctgattgcattcggtgctgggctggtgcctatcttgtaa

SEQ ID NO: 14293 - protein, 652 aa, Xylella fastidiosa Temecula1
MNIFIRLLLLAAVLLGSGCASLSHAQLDYAASVAVAARPATLDCDRPNRCALDSPLYALGSRALSESTPVTPLHYVTILDKGESALVARINLIRSATRSIDMQTYIFDKDDSARLIMDELLTAARRGVRVRLLIDQLSAISDLNILGALAGAHVNFQLRIYNPIFGKAKLNYGDYVASVLCCFRRFNQRMHNKLLVIDEMIGVVGGRNYQDDYYDWDLEYNFRDRDVLVAGPAVLQMAVNFDAFWAAERSVPVERLRDVGRMVLQDGVPMLPSAVFNLLERVQRVTAEANDPDYVKRTFVDAALAVNKVQYVADLPQKHRYEHNANPVSIGPRLDSLISNARHEVILQTPYLVLSKPALNIFRRLNRTQDKPRVVVVTNSLAATDNPIVYALFYKYKRRNMRDLGFDIYEYKPFPENPPIDLTGVVPIEGWNNDSLQRRQDLLAAAKVSDDSDNARQLPQLENKGQVDRRVLRTETRPPFWRIHTVNKPLPVTRPGARMGLHAKSLVVDRKVGVIGTHNFDPRSESYNTEAVVVIEDPAFAGLLASSIEGDIAPGNAWVVAPRKKLPGLYKLNYSVGKLSEALPVLDLWPWRYATNYEFKPGLDCPIPLPRRDPNFMQCYEPVGDFPEVNVGPKWLLVRMLIAFGAGLVPIL

SEQ ID NO: 14294 - DNA, 1404 bp, Xylella fastidiosa Temecula1
  CDS (1)..(1404): transl_table=11
atggaagggacttggctgtttgcattggattgggtgatccgtttggttgcgttgctttggatcccggcacgaaccacccctagtgctgcgcgcagctggttgttactgattggtttcgtccctgtgtttggcttgccactttacttggtgtttggccatccttggctgtcacgtaagcgtgtgttgcgtcaggcgttggcttctcatgtgatccgtgagtggcagcgtgggttgggtgcattgcgctggcagcctcaggagaatggcgtcgctgcggaattggtacctttggtggagcatcagggcgattttatgccaacacgtggtaacgccttggatctattggatgattaccaagcttcgctgcatttgttgatcaatgatattgattccgcgtgcgaacgtgtgcacttgctgtattacttgatgttcgatgatgcggtgggtgatgcggttgtggctgcattacagcgtgctgcggcgcgtggcgtttcttgccgattgctgctggatgcagtcggtgctaaacgcggtctacgtgcctatcagcagtgccttcgtgcccatggtgtggaggtgcacgctatgttgcctggtgggttgcgctggcgtcgcagtgggcgtatggatttgcgcaaccaccgtaagattgctgtgatcgacaatcgggtcgcttatatcggttcgcagaatttggcatgtccagattttgtgccgcatttccccaaccgtgaattggtcgcacgcgtgtgcggccctgcggtaagtcatctggaggcggtgtttctcagtgattggtttgttgaaactggtcaacgtttggggatgcgtccagatgttcccatatgtgagcaaaatgttgcggcccagctagtggccagcggtccggcttacccgtacgagaatgcgcgtgatgcggtgaatacaatgatccatttggcacggcggcgtattgtcttgacgacgccgtacttcgtgcctgatgaggccacactcagtgcgttgcgtattgcaggcacatctggagtagacgtgcagttgatcctgtccgagagtaataaccagtttctgatggcctgggctcaggaggcgtactttgaggagctgttgcgcgcaggaatcaaaattgcgttgtatcgtccccatttcctgcatgccaagcatctgagtgtggatgatgatattgcgttgttcggatcgattaatttggacatccgctcgttcgcgcttaacgctgagattggcatgatttgttacgactcacgtattgtgactcagttacgtgaggtggagagtgattatctggccaatgcgcgccagcttaatttggttgagtggcagcaacgtcccgcttggcgtcgtagccgtgagggtattgcacgcttggcagatgctctgatgtag

SEQ ID NO: 14295 - protein, 467 aa, Xylella fastidiosa Temecula1
MEGTWLFALDWVIRLVALLWIPARTTPSAARSWLLLIGFVPVFGLPLYLVFGHPWLSRKRVLRQALASHVIREWQRGLGALRWQPQENGVAAELVPLVEHQGDFMPTRGNALDLLDDYQASLHLLINDIDSACERVHLLYYLMFDDAVGDAVVAALQRAAARGVSCRLLLDAVGAKRGLRAYQQCLRAHGVEVHAMLPGGLRWRRSGRMDLRNHRKIAVIDNRVAYIGSQNLACPDFVPHFPNRELVARVCGPAVSHLEAVFLSDWFVETGQRLGMRPDVPICEQNVAAQLVASGPAYPYENARDAVNTMIHLARRRIVLTTPYFVPDEATLSALRIAGTSGVDVQLILSESNNQFLMAWAQEAYFEELLRAGIKIALYRPHFLHAKHLSVDDDIALFGSINLDIRSFALNAEIGMICYDSRIVTQLREVESDYLANARQLNLVEWQQRPAWRRSREGIARLADALM

SEQ ID NO: 14296 - DNA, 1437 bp, Clostridium tetani E88
  CDS (1)..(1437): transl_table=11
atgaaaattagtttcacatcctttttgtccatattcttctttataaatattataataattacattagttataatattagaaagaaaaagaccagaaaaaaccattgcatggcttttaataataactctattaccacctataggtatttttttatatgtatttttaggccgaaattggaaaattcataaattaaataatgatttttctcctaaaattagagaacttatctatagatctatggataaaatagatgatcctgattatgtaccccttattcatttaatagctgaaaatagtgaatctcctttatttctaaataattcaatagaaatatttaaagatggtacagaaaaatttcaagctttgaaaagagaaatattaaatgctaaacatcatatacatttagaatattacatcgtaaaaaatgacataataggtaatgaaataaaaaatttgttaatagaaaagtctttagaaggtgtcgaagtacgatttattttggatagagtaggatccataaagcttggtaaagaattcattaatgatatgattaaaaatggtattgatgtagttcagtactcatattttcttgctcctttactaaagaaaataaatactcaagttaactatagaaaccatagaaaacttgtcattatagacggtgaagttggatttattggtggtattaatattggagacgaatatttaggaaaaggcgaattaggatattggcgagatactcacataatggtcaaaggagactttgtattaggactccaagccgtgtttatagatgacttttggacaataaaaaaagcaaataatgatagtattttaataaatacagactttcattcctactttcctaaggttaatcaatctgggaaaaaattaatgcagctagctaaaagtggccctaattctccatattcatcaattatgcaaggaatattaaaaatgatatatatggctactgatcatatatacatcacaacaccatattttgttccttccgaaagtattatggaagctttaaaaatagcttgtttgagtggaatagatgtaagaattttatttcctggtcaatatgatcattttacagtatactctgcttcgagaacttatttagctgaactcctaaagtctggagccaaagttcatttttatgacgaaaattcctttgttcacgcaaaaattattactgtagatggaaaggtgtctactataggtactgctaatatggatattagaagttttgatttaaattatgaaataaatgctataatatatgatgaagaaacaactattaagttagaagaaatgttttttgaagatcttaaccatagtaaaaatgtaacagaacaggatttcaatgaaacctctaactttatgaagtttatagaagctataactaggttgttttcttctctgctataa

SEQ ID NO: 14297 - protein, 478 aa, Clostridium tetani E88
MKISFTSFLSIFFFINIIIITLVIILERKRPEKTIAWLLIITLLPPIGIFLYVFLGRNWKIHKLNNDFSPKIRELIYRSMDKIDDPDYVPLIHLIAENSESPLFLNNSIEIFKDGTEKFQALKREILNAKHHIHLEYYIVKNDIIGNEIKNLLIEKSLEGVEVRFILDRVGSIKLGKEFINDMIKNGIDVVQYSYFLAPLLKKINTQVNYRNHRKLVIIDGEVGFIGGINIGDEYLGKGELGYWRDTHIMVKGDFVLGLQAVFIDDFWTIKKANNDSILINTDFHSYFPKVNQSGKKLMQLAKSGPNSPYSSIMQGILKMIYMATDHIYITTPYFVPSESIMEALKIACLSGIDVRILFPGQYDHFTVYSASRTYLAELLKSGAKVHFYDENSFVHAKIITVDGKVSTIGTANMDIRSFDLNYEINAIIYDEETTIKLEEMFFEDLNHSKNVTEQDFNETSNFMKFIEAITRLFSSLL

SEQ ID NO: 14298 - DNA, 1458 bp, Lactobacillus plantarum WCFS1
  CDS (1)..(1458): transl_table=11
gtgcctccattgcaatatattcagccaattttctatacaattatcgttttaaacgcggccgcggcgttcgttaccgtgttccgggatcgtaatcgggacatcgcggccacttgggcttggctactcgtgttgatttggttgccgattattgggtttatcgcgtacgcctttgtcggtcgtaagttaccgaaaaaccggttatttcggttacgtaaagagacgcaaattagactcgaacagatgattcagcggcaacgtgaagccctgggaacggaattgatgcccgcagatgcggtcactagctcggttcgtgggatggtcagtttattcttgaattccgatggcgcgttactaagccgtaaaaaccgggtcaagatttatacggatggacatgagaagttccatgcgatgttccaagatattgaagcagctaagaatcatattcatattgaatattacacattttataatgaccagattggaaatgaattattacaccttttagaacggaaagcagcccaaggcgtcgacgttcgtgtcttgtatgatccgtgggggtcgatgggcacgttccgcagcttctttaagcatttagaagaacttggtgggcatgcccgaccgttcttgggtgctcattcagcgattttggacttccgtctcaacttccgtgatcaccgtaagatcgtggtaacggatggccgggtcggctacgtcggtggttttaacgttggtgaccagtaccttggtcgtagtaagaagtttggttactggcgtgatacccatttgcggatcgtcggttcaggagtttttgaattgcaggaacgtttcattcgtgattggaacgccaccgatgcggaacatcgaatcgtgccagacgttaatatgttcccagtcattcgcgttaaagggaatacttcgttacagatcgtctccagtggtccggacagtgatgcgcaacagattaaattgggttatattaaaatgattatgacagctcaacaccgtttatggattcagtcgccatacctaattccggacgattccgtattagatgcgattaaaatcgctgcgatgtcaggggttgacgtccgcattatggtgccggacaaacctgatcatgcctttgtttaccgggcaactcagtactatgcccgggagctggcagatgctggtgtaaaaatctattattataataatggttttattcatgccaagaccatcgtgattgatggtcaggtggcgtcagtgggctcagctaatatggacttccggagctttaagctcaactttgaagtgaacgcctttttatatgatgctgatttagcacaagaattggaacggattttcttagaagatcaaaaaatcagtagtttgattaccgttcaagactttaaaaatcaatcattctggttgaagttcaagcagacattttcacggttgttatcaccaattttataa

SEQ ID NO: 14299 - protein, 485 aa, Lactobacillus plantarum WCFS1
MPPLQYIQPIFYTIIVLNAAAAFVTVFRDRNRDIAATWAWLLVLIWLPIIGFIAYAFVGRKLPKNRLFRLRKETQIRLEQMIQRQREALGTELMPADAVTSSVRGMVSLFLNSDGALLSRKNRVKIYTDGHEKFHAMFQDIEAAKNHIHIEYYTFYNDQIGNELLHLLERKAAQGVDVRVLYDPWGSMGTFRSFFKHLEELGGHARPFLGAHSAILDFRLNFRDHRKIVVTDGRVGYVGGFNVGDQYLGRSKKFGYWRDTHLRIVGSGVFELQERFIRDWNATDAEHRIVPDVNMFPVIRVKGNTSLQIVSSGPDSDAQQIKLGYIKMIMTAQHRLWIQSPYLIPDDSVLDAIKIAAMSGVDVRIMVPDKPDHAFVYRATQYYARELADAGVKIYYYNNGFIHAKTIVIDGQVASVGSANMDFRSFKLNFEVNAFLYDADLAQELERIFLEDQKISSLITVQDFKNQSFWLKFKQTFSRLLSPIL

SEQ ID NO: 14300 - DNA, 1497 bp, Tropheryma whipplei str. Twist
  CDS (1)..(1497): transl_table=11
gtgaagccctatttgtttatattggcggccctgctattggccgaccttgtcatccgtattggctgcctttttgttgttcctcgcaatagacgtcctaattctgccaacgcctggcttctcacaatattctttctgccgtttattggatggtttctttttttgataataggcagctacaagctcccaaaatcaagaagagaaaaacaggctcttataaaccagcttgttgcaaatgcactgtcagatcatgcagtattggacaatgtagatctgcaatggctaccatctctggtaaaactaaacagaaatcttggatctatgccgatggttgcgggaactcgtgtacatattcttactgatacaagtgtgattatggagcagatggtatctgccattgattcagctaaaagcagtgtacacgttgagttctacatcttttcgctggatgaatttacgcagggctttttcacaagccttgaaaatgcgaccgcccgcggggtaaaggttcgggttttatatgatcacatcgcaactttgcgcgtccctggatatctgaatatgaagtctcgccttaagcgcaatgggattgaattttatccgatgcttccgattcagcccttcaagttgaaatatcagaggcctgacctgcgcaatcatcgaaaattgcttgtaattgatgatgcaattgcatttgttggatcgctaaacattattgatcctttttataacacgaggggtcgcaagaaaatgttttggcaagatgcgatgctgcgccttgaaggacccgttataagcgggataagcgcggtttttgtctctgattggtacgcagaaacaggccagctcctgagagactacagaattgtaaaaacttcatccggcgattccttcacagaaaaccgcacacaatcaaacagtgttgataggagttgcccgagtacaaataacgttttatgtcaagtagttccttctggtcctggatttgagggggaaaataacctccaattgtttctaatgctcctttatgcatcgcaaaaacgggttgcaattacatcaccgtacttcgtgccggacgaggcaatgactttagcaatcgcgtcggcgactaaaaggggggttagtgtcgaactgtttttatctgaaaaccatgaccaaaaaattgtttaccacgctcagtgttcgtactacgaacagctattgagaagcggcgtaaagatttggctataccgtgcaccaaatttcttacacagcaaatatgtaactgttgatgatgatgttgccgtttttggatcaagcaattttgatatgcgctctttcaatctgaatatggaaatgtcactgttgctctacagcaaggaatttgttgcaaaactgcaggcggttgaacaggaaaaccgagcaaatagctccctgctcaccctcgatgaatggatgcaccgcgggaaaatggaccgcttgaaagataatctagctagacttacatccgccctgcaatag

SEQ ID NO: 14301 - protein, 498 aa, Tropheryma whipplei str. Twist
MKPYLFILAALLLADLVIRIGCLFVVPRNRRPNSANAWLLTIFFLPFIGWFLFLIIGSYKLPKSRREKQALINQLVANALSDHAVLDNVDLQWLPSLVKLNRNLGSMPMVAGTRVHILTDTSVIMEQMVSAIDSAKSSVHVEFYIFSLDEFTQGFFTSLENATARGVKVRVLYDHIATLRVPGYLNMKSRLKRNGIEFYPMLPIQPFKLKYQRPDLRNHRKLLVIDDAIAFVGSLNIIDPFYNTRGRKKMFWQDAMLRLEGPVISGISAVFVSDWYAETGQLLRDYRIVKTSSGDSFTENRTQSNSVDRSCPSTNNVLCQVVPSGPGFEGENNLQLFLMLLYASQKRVAITSPYFVPDEAMTLAIASATKRGVSVELFLSENHDQKIVYHAQCSYYEQLLRSGVKIWLYRAPNFLHSKYVTVDDDVAVFGSSNFDMRSFNLNMEMSLLLYSKEFVAKLQAVEQENRANSSLLTLDEWMHRGKMDRLKDNLARLTSALQ

SEQ ID NO: 14302 - DNA, 1497 bp, Tropheryma whipplei TW08/27
  CDS (1)..(1497): transl_table=11
gtgaagccctatttgtttattttggcggccctgctattggccgaccttgtcatccgtattggctgcctttttgttgttcctcgcaatagacgtcctaattctgccaacgcctggcttctcacaatattctttctgccgtttattggatggtttctttttttgataataggcagctacaagctcccaaaatcaagaagagaaaaacaggctcttataaaccagcttgttgcaaatgcactgtcagatcatgcagtattggacaatgtagatctgcaatggctaccatctctggtaaaactaaacagaaatcttggatctatgccgatggttgcgggaactcgtgtacatattcttactgatacaagtgtgattatggagcagatggtatctgccattgattcagctaaaagcagtgtacacgttgagttctacatcttttcgctggatgaatttacgcagggctttttcacaagccttgaaaatgcgaccgcccgcggggtaaaggttcgggttttatatgatcacatcgcaactttgcgcgtccctggatatctgaatatgaagtctcgccttaagcgcaatgggattgaattttatccgatgcttccgattcagcccttcaagttgaaatatcagaggcctgacctgcgcaatcatcgaaaattgcttgtaattgatgatgcaattgcatttgttggatcgctaaacattattgatcctttttataacacgaggggtcgcaagaaaatgttttggcaagatgcgatgctgcgccttgaaggacccgttataagcgggataagcgcggtttttgtctctgattggtacgcagaaacaggccagctcctgagagactacagaattgtaaaaacttcatccggcgattccttcacagaaaaccgcacacaatcaaacagtgttgataggagttgcccgagtacaaataacgttttatgtcaagtagttccttctggtcctggatttgagggggaaaataacctccaattgtttctaatgctcctttatgcatcgcaaaaacgggttgcaattacatcaccgtacttcgtgccggacgaggcaatgactttagcaatcgtgtcggcgactaaaaggggggttagtgtcgaactgtttttatctgaaaaccatgaccaaaaaattgtttaccacgctcagtgttcgtactacgaacagctattgagaagcggcgtaaagatttggctataccgtgcaccaaatttcttacacagcaaatatgtaactgttgatgatgatgttgccgtttttggatcaagcaattttgatatgcgctctttcaatctgaatatggaaatgtcactgttgctctacagcaaggaatttgttgcaaaactgcaggcggttgaacaggaaaaccgagcaaatagctccctgctcaccctcgatgaatggatgcaccgcgggaaaatggaccgcttgaaagataatctagctagacttacatccgccctgcaatag

SEQ ID NO: 14303 - protein, 498 aa, Tropheryma whipplei TW08/27
MKPYLFILAALLLADLVIRIGCLFVVPRNRRPNSANAWLLTIFFLPFIGWFLFLIIGSYKLPKSRREKQALINQLVANALSDHAVLDNVDLQWLPSLVKLNRNLGSMPMVAGTRVHILTDTSVIMEQMVSAIDSAKSSVHVEFYIFSLDEFTQGFFTSLENATARGVKVRVLYDHIATLRVPGYLNMKSRLKRNGIEFYPMLPIQPFKLKYQRPDLRNHRKLLVIDDAIAFVGSLNIIDPFYNTRGRKKMFWQDAMLRLEGPVISGISAVFVSDWYAETGQLLRDYRIVKTSSGDSFTENRTQSNSVDRSCPSTNNVLCQVVPSGPGFEGENNLQLFLMLLYASQKRVAITSPYFVPDEAMTLAIVSATKRGVSVELFLSENHDQKIVYHAQCSYYEQLLRSGVKIWLYRAPNFLHSKYVTVDDDVAVFGSSNFDMRSFNLNMEMSLLLYSKEFVAKLQAVEQENRANSSLLTLDEWMHRGKMDRLKDNLARLTSALQ

SEQ ID NO: 14304 - DNA, 1629 bp, Pseudomonas syringae pv. tomato str. DC3000
  CDS (1)..(1629): transl_table=11
gtgggtcatatcgccaagtcgagccatctccagacgcggaaggtcaatttgaacaactcatgggccttgcccttttgcttgctggtggctgtgtgcgtcagtggttgcgcgcaccagcagatcgccagcgagccgagccaggccatgccgccctcggattctgcctttggccgttcgattcaggccatggcgatgccgcacgaggggcgttcgggttttcggctgttgcctgacagcagcgacgccttcaaggcccgcgccgaactgatccgtaacgccaaaaccagcctcgacctgcagtattacatcgtccacgacggccttagcacgcgcgcgctgatcgacgagctgctcaaggcggcagaccgtggcgtgcgggtgcgcatcctgctggacgacaccaccagcgatggcctcgatcaggccatcgccacgcttgctgcgcatccgaacattcagattcgcctgttcaacccgcaaaacctgggccgcgaaaccggcgtcacccgtagcctgggacgcttgatgaacctgtcgcgtcagcaccggcgcatgcacaacaagctgtggctggccgacagcagtgcggccatcgtcggcgggcgcaatctgggcgatgaatacttcgacgccgagcccaatctcaatttcaccgacatcgacatgctcagcgtcgggccggtcgccgagcagctcggccacagctttgatcagtactggaacagcacgctcagcaagcccatcgatcaattcatgtacttcctgcccgatggccaggacctggccgaggcccggcagcggctggacgattcgcttgagcaggctcatcagcagcacaaggcgctgtatgagcggttgatggcctacaagactcagccacgcatgaaaacctggctcaacgagttggtctgggcgcataaccaggcgctgtgggatgcgccgactaaagtgctggcacagggcgagcctgatccacacctgctgttgaccacgcaactggcccccgagctgctgaacactcgcaaggagctgatgctgatttctgcgtactttgtgcccggtcaggaaggcttgctgtacctgactggccgtgccgatgccggggtcaacgtcagcctgctgaccaattcgctggaagccaccgatgtgcccgccgtgcatggtggttatgcgccgtatcgcaaggcgctgctggagcacggtgtgaagctgtatgaactgcgtcgccagcccggtgagaccgaaaccatgcgcagtagcggcccgcatttgttcaggaaaagccattcactggtcagctcggaatcgagcctgcacagcaaggcgatgatctttgaccggcagaaagtgtttgtcggctcattcaacttcgacccacgctcagtgttgtggaacaccgaagtcggcgtattggtcgacagcccgcaactggcggaagaactgcgcgagctgacgctgcagggcatggccccgtcgctcacgtacgaagctcggctggaagacggcaaagtggtgtgggtgaccgaggacaacgggcagatccacacgctgcacaccgagccgggcgactggtggcggcgcttcaatgcctggatgagccgtgccatcggtcttgagagaatgctttag

SEQ ID NO: 14305 - protein, 542 aa, Pseudomonas syringae pv. tomato str. DC3000
MGHIAKSSHLQTRKVNLNNSWALPFCLLVAVCVSGCAHQQIASEPSQAMPPSDSAFGRSIQAMAMPHEGRSGFRLLPDSSDAFKARAELIRNAKTSLDLQYYIVHDGLSTRALIDELLKAADRGVRVRILLDDTTSDGLDQAIATLAAHPNIQIRLFNPQNLGRETGVTRSLGRLMNLSRQHRRMHNKLWLADSSAAIVGGRNLGDEYFDAEPNLNFTDIDMLSVGPVAEQLGHSFDQYWNSTLSKPIDQFMYFLPDGQDLAEARQRLDDSLEQAHQQHKALYERLMAYKTQPRMKTWLNELVWAHNQALWDAPTKVLAQGEPDPHLLLTTQLAPELLNTRKELMLISAYFVPGQEGLLYLTGRADAGVNVSLLTNSLEATDVPAVHGGYAPYRKALLEHGVKLYELRRQPGETETMRSSGPHLFRKSHSLVSSESSLHSKAMIFDRQKVFVGSFNFDPRSVLWNTEVGVLVDSPQLAEELRELTLQGMAPSLTYEARLEDGKVVWVTEDNGQIHTLHTEPGDWWRRFNAWMSRAIGLERML

SEQ ID NO: 14306 - DNA, 1251 bp, Pseudomonas syringae pv. tomato str. DC3000
  CDS (1)..(1251): transl_table=11
atgaacaataccaaaacgccgtggtgcgatggcaactcggtcgagctgctgatcaatggcgaagattttttcacccgagtattcgagtgcatacgcgccgcccgcaaagaagtgctgatcgaaaccttcatcatctttgaagaccggatcggcgagggcctgcagcaggcgctgctgcaggcggccgccaatggcgcgaacgtggtggtcacggtggatgactacggcacttcggatttgagttctacctttgtcagaaccatgattgacgccggcatccagattcagttgttcgacccgcgcccgcgtttcatgggcatgcgcaccaacctgttccgtcgcctgcaccgcaaggtggtggtgatcgacggcgagctgggctttatcggcggcatcaattacagcgtcgatcacatgaccgacaccggcctgaccgccaaacaggactacgccgttctggtacgcggcccgatcgttggtcgtattcatcagagtgcgatgaacatgctcagcaaggcagtgcgcgccagactgacgcccacgccgctcaagctggaccgtgccggtgacgcgcagatgctgctggccgaacgtgacaatggcgaacacaccaccgatatcgaagagcaatacctcgaggcgattcgtggtgcgacgcaacgcattaccctggccaatgcctatttcttccccagctaccgttttctgcgcgaactgcgtaacgcatcacggcgcggcgtgaaggtcacgctgattctgcagggccagccggacatgccgttcgtgcgggtctgttcgcgtctgacctacacctacttgctgcgcgacggcgtggtcatccatgagtacaagcagcgcgcactgcacggcaaggtggcgctgatcgatcaggaatggtccacggtcggctccagcaacctcgacccgctcagccttgcacttaatctggaagccaatctgttcattcgtgacaaggcgctgaatcagcacctgcaaggccacctgatggagcttgccgctgcgcacagcacacagatgagcctgaagggcgcggcacgcggtcaatggtggcgggcgccgatgatcgttttgagcttcttttttctgcgccgttttccggcgattgccggtctgttcccggttcacggcgtgcggctcaagcccttgcgtgccggcgatgtggtgcctgaagccaaagtgatcgagcagcagcagaacaatcatccgctggaccaggagaaaaccttatga

SEQ ID NO: 14307 - protein, 416 aa, Pseudomonas syringae pv. tomato str. DC3000
MNNTKTPWCDGNSVELLINGEDFFTRVFECIRAARKEVLIETFIIFEDRIGEGLQQALLQAAANGANVVVTVDDYGTSDLSSTFVRTMIDAGIQIQLFDPRPRFMGMRTNLFRRLHRKVVVIDGELGFIGGINYSVDHMTDTGLTAKQDYAVLVRGPIVGRIHQSAMNMLSKAVRARLTPTPLKLDRAGDAQMLLAERDNGEHTTDIEEQYLEAIRGATQRITLANAYFFPSYRFLRELRNASRRGVKVTLILQGQPDMPFVRVCSRLTYTYLLRDGVVIHEYKQRALHGKVALIDQEWSTVGSSNLDPLSLALNLEANLFIRDKALNQHLQGHLMELAAAHSTQMSLKGAARGQWWRAPMIVLSFFFLRRFPAIAGLFPVHGVRLKPLRAGDVVPEAKVIEQQQNNHPLDQEKTL

SEQ ID NO: 14308 - DNA, 1158 bp, Pseudomonas syringae pv. tomato str. DC3000
  CDS (1)..(1158): transl_table=11
atgaacggtgcgatttttccgtggcgtgaagacagccgctttcaattgctgattgatggcccggcttttttcccgcgcatgattgcagccatcgatcgcgcagagcagcaggtcgatctggagctgtacctggtcgaagccggggcctgcgccgatgcggtggtgcgggcgctggtcgaggcgggcaggcgcggtgtgatcgtgcgctgcctgtttgacgatttcggctcgaaagcgtttgatgccgggctgcgcaaacagctgactgacgcaggcgtcatcctgcgcttttacaacccgatccactggcggcgcggcgtgcgcaatttctaccgcgaccatcgcaagatactggtggtggacaaggcccttgccgtggtcggcggcaccggtgtaaccgacgaattctgggagcccgacaaggatgtcagccagtggcacgaggtcatggtggaaatcgccgggccgctggtgctcgactggcaagcgctgttcgaccgtcagtttcacgccaacgcccgacgctttgcctggcgcccgaaacaaaactttggtctcgatcacctgcccaaagcgcctgtcactggcgaggggctggggcgggtagcgtatgccgactcccgccagcaccgggacattctgcaatcgctggtgcgcaccctgcacagcggccagaaacgcatctggctggcgacaccgtattttctgcccacctggaaagtccgccgcgcattgcgcagcgcggcggcgcgtggtgtcgatgtacgtttgctgctgaccgggccgcgcaccgatcacccgtccgtgcgctacgccggtcaccgctactacccgcgcctgctccgcgccggggtcaaagtctttgaataccagccgtgctttctgcacctgaaaatggtcctgatcgacgactgggtaagcatcggctcgtgcaacttcgatcactggaacctgcacttcaacctggaagccaacctcgaagcccacgatccaggcctgacccgggacgtagccgccagcttcgaaaaagacttcgccctgagcaccgaaatcaccctggaagactggaaagcccggcccctgtggcgacgcgtcaaacagcgcctgtggggctggattgaccggctggtggttaacttgttggatcagcgtaattga

SEQ ID NO: 14309 - protein, 385 aa, Pseudomonas syringae pv. tomato str. DC3000
MNGAIFPWREDSRFQLLIDGPAFFPRMIAAIDRAEQQVDLELYLVEAGACADAVVRALVEAGRRGVIVRCLFDDFGSKAFDAGLRKQLTDAGVILRFYNPIHWRRGVRNFYRDHRKILVVDKALAVVGGTGVTDEFWEPDKDVSQWHEVMVEIAGPLVLDWQALFDRQFHANARRFAWRPKQNFGLDHLPKAPVTGEGLGRVAYADSRQHRDILQSLVRTLHSGQKRIWLATPYFLPTWKVRRALRSAAARGVDVRLLLTGPRTDHPSVRYAGHRYYPRLLRAGVKVFEYQPCFLHLKMVLIDDWVSIGSCNFDHWNLHFNLEANLEAHDPGLTRDVAASFEKDFALSTEITLEDWKARPLWRRVKQRLWGWIDRLVVNLLDQRN

SEQ ID NO: 14310 - DNA, 1197 bp, Bacteroides thetaiotaomicron VPI-5482
  CDS (1)..(1197): transl_table=11
atgacgcatcccagagactccatagctctgacaagtgactcccttgtattacgtttcttatcggagtcagggattcctatatccgacaataacaaggtcagattactgaaaagcggacgagaaaaattcattgatttattcagcgccatccgcgacgccaaacaccacatccatctggaatatttcaatttccgcaatgactctatagccaatgcgctgttcgacctgctggccgaaaaagtgaaagaaggcgtggaagtacgagccatgttcgatgcgttcggcaactggtcgaacaataaaccgctcaagaagagacatctcaaaaaaatacgagagcagggaatcgagattgtcaagttcgacccgttcacctttccctacatcaatcatgcggcacaccgtgatcaccgcaaaatagccgtcatcgacggtgaagtcgcctatacgggaggaatgaacatcgccgactactacatcaacggactccccaaaatcggtacatggcgtgatatgcacatgagaatagaaggcgatgccgtcaatgacctgcaagaaatatttcttaccatatggaacaaggagactaaacaaaatattggcggcgaagcatacttccccaagcacaaggagcagtcggacagcaccaatgtagtcgtcgccatcgtagaccgcacaccgaagaaaaacagccgtatgctcagtcatgcttatgccatgtcgatctattcggcacagaaaaacgtgcacatcgtcaacccgtattttgtgcccacatcctccatcaacaaggcgcttcaacgcaccatcgaacgaggtgtggatgtcacgattatggtttcttctgcctccgacatcccgtttactccggacgccgccctctacaaacttcacaaactgatgaaaaggggggccaccgtctatatgtacaatggcggtttccaccattccaaaatcatgatggtcgacgatattttctgcacggtaggcaccgcaaacctgaacagccgcagcctccggtacgactacgagacgaacgctttcatctttaacaaggaaattacaggcgaactgaacgaaatgtttcggaacgatatagaacactgtacgcagctaacaccggaattctggaaaaagcgctcaccgtggaagaagttcgtcggatggtttgccaatttattcacgccatttttgtaa

SEQ ID NO: 14311 - protein, 398 aa, Bacteroides thetaiotaomicron VPI-5482
MTHPRDSIALTSDSLVLRFLSESGIPISDNNKVRLLKSGREKFIDLFSAIRDAKHHIHLEYFNFRNDSIANALFDLLAEKVKEGVEVRAMFDAFGNWSNNKPLKKRHLKKIREQGIEIVKFDPFTFPYINHAAHRDHRKIAVIDGEVAYTGGMNIADYYINGLPKIGTWRDMHMRIEGDAVNDLQEIFLTIWNKETKQNIGGEAYFPKHKEQSDSTNVVVAIVDRTPKKNSRMLSHAYAMSIYSAQKNVHIVNPYFVPTSSINKALQRTIERGVDVTIMVSSASDIPFTPDAALYKLHKLMKRGATVYMYNGGFHHSKIMMVDDIFCTVGTANLNSRSLRYDYETNAFIFNKEITGELNEMFRNDIEHCTQLTPEFWKKRSPWKKFVGWFANLFTPFL

SEQ ID NO: 14312 - DNA, 1425 bp, Bacteroides thetaiotaomicron VPI-5482
  CDS (1)..(1425): transl_table=11
atgaggtggatatggtattgtacattgttagcgtatatcgcattcctattagggctgatttacactattataattgattacgacgacaaaaatcctgtgaagacgatctgctggattctagttgttatattcttaccattactgggtatatctgcctattatattgtaggacgtaatgtaagcaaaaagcgttcaaaatttcagttttggagagaagaattcaacaggcaccaacaatccgtttctaccaacgtggaaacagagccaatacatcccgatcattataaagaactaaaatcactcatattgaatctggaacagtcaccagtattcggaggtaacaaagtaactgtctatccgggtggtaaaagtaagttttacagtcttttcgaagatatcgactgtgccgaatcgcatattcatatcttctattatgctattggcgacgaccatatcggcaacgaattaaaagagaagattatcaataaggtaaaacaaggcatcaaagtacgactgctttacgacggactgggatgcaataaaacgaacagaaaatatttcaagcaaatgatagaagcaggcgtggaagtgaaaacgttcctcccgcttagttttccccgcttcctgcgaagtgtcaattaccgcaatcataaaaagatagtcatcatcgacggcagaatcgcctataccggtggcatcaatgtaaaagacgtatacatagacggacttctctggggaaaatggaatgacatacacttcaaggttgaaggttccggagcttcggggctgcaatctgtgtttctggcagactggtattatgcttccggacaatatctgtcttcaccggagtattatcccaatgtcgaagtcttcggagaagtaccaattcaagtagtcaacgcggaaccgttgggaatgcattccaatgtaatggaagccatgtttacagctataacgcgggcgaaaaagaatgtatatatcgagactccctacttcataccgacggaatgtctgcttcaggcaatacagaccgcatcaatgagcggaatagacgttcgccttgtcatgcctaaaagatcagacaatgattttgtgcaatatgcctctaactcatatgtggagaaactattaagaaataaagtcagagtctatcaatatgtcaatggatttacacattcaaagttgatgattgtcgatgatgaactggtggtagtcggttcagccaatatggatataagaagccttgaacttcttttcgagaccaatctgttcatttacgacaagaaagttgctcagaccgtcagagacatttatcacaccgatatgaataatagtaaagaactaaatctacgcgactggctccaacgcaaccgttcggttaaatttcgcgaagcgtgtttccggttgttttctccggtatattag

SEQ ID NO: 14313 - protein, 474 aa, Bacteroides thetaiotaomicron VPI-5482
MRWIWYCTLLAYIAFLLGLIYTIIIDYDDKNPVKTICWILVVIFLPLLGISAYYIVGRNVSKKRSKFQFWREEFNRHQQSVSTNVETEPIHPDHYKELKSLILNLEQSPVFGGNKVTVYPGGKSKFYSLFEDIDCAESHIHIFYYAIGDDHIGNELKEKIINKVKQGIKVRLLYDGLGCNKTNRKYFKQMIEAGVEVKTFLPLSFPRFLRSVNYRNHKKIVIIDGRIAYTGGINVKDVYIDGLLWGKWNDIHFKVEGSGASGLQSVFLADWYYASGQYLSSPEYYPNVEVFGEVPIQVVNAEPLGMHSNVMEAMFTAITRAKKNVYIETPYFIPTECLLQAIQTASMSGIDVRLVMPKRSDNDFVQYASNSYVEKLLRNKVRVYQYVNGFTHSKLMIVDDELVVVGSANMDIRSLELLFETNLFIYDKKVAQTVRDIYHTDMNNSKELNLRDWLQRNRSVKFREACFRLFSPVY

SEQ ID NO: 14314 - DNA, 1440 bp, Bacteroides thetaiotaomicron VPI-5482
  CDS (1)..(1440): transl_table=11
atgattgactggaacatactagttagccagatagctacggttgcttttgatatcgtttattttggagccattatcagtacgattgtcgttatcattcttgataaccggaatccggtgaagactatggcatggatactcatattacttttcctcccaattgtcggtcttgttttttatttcttctttggtcggagtcagcgtcgggaacgtatcatcggtcaaaaaagttatgaccgccttttgaagaaacctatggcggaatacatggcgcaagactgttcggatgtacctgaagaatatgcccgccttatccaacttttccagcataccaatcaagcttttccatttgagggaaaccgtattgctgtctatacggaaggctataccaaattgcaatcattgcttcgtgagctccaaaaggcgaaacaacacattcatatagaatactatatctttgaagatgatgctataggacgtttggtaagggatgtactaatcgaaaaagcatctcagggggttgaagtaagagtaatttatgatgatgtggggtgctggcatgtacctaaccgctttttcgaggaaatgcgtaatgcaggtattgaagtcaggagtttcttgaaagtacgcttccctttgtttacaagcagggtcaattatcgtaaccacagaaaaatagtcgtgatagacggacgtatcggttttgtgggaggtatgaacctggcagaacgttatatgcgtggtttctcatgggggatttggcgtgacacccatattctgatagaaggaaaggctgtgcatggtctgcaaacggcctttttgctcgactggtatttcgttgaccgtacattgattacagcttcacgttatttcccaaagatagaatcttgtggaagttcattagttcaggtggttaccagtgaacccattggcccctggaaagaaatcatgcaggggctgactatggcgatcaatggagcgaagaagtatttctatatgcaaaccccttatttcctgccgacagagcaagtacttgccgctatgcagacagctgcactggcaggagtagatgtgcgtttgatgttgccggaacgtgccgacaaccgaatcactcatttgggatcgcattcttacctggcagatgtgatgcaggcaggtgtcaaagtctatttttataagaaagggtttctgcactccaaactgatggtttctgatgatatgctctctacagtagggtctaccaatgttgacttccgtagttttgagcataattttgaagtaaatgcctttatgtatgatgtggaaacggctcttgaaatgaaggagatattccttcaggatcagcgggaaagtacacagatctttctgaaaaactgggtgaaacgttcgtggaggaggagggcagcagagtctgtcgttcgtttgttggctccgctgctttaa

SEQ ID NO: 14315 - protein, 479 aa, Bacteroides thetaiotaomicron VPI-5482
MIDWNILVSQIATVAFDIVYFGAIISTIVVIILDNRNPVKTMAWILILLFLPIVGLVFYFFFGRSQRRERIIGQKSYDRLLKKPMAEYMAQDCSDVPEEYARLIQLFQHTNQAFPFEGNRIAVYTEGYTKLQSLLRELQKAKQHIHIEYYIFEDDAIGRLVRDVLIEKASQGVEVRVIYDDVGCWHVPNRFFEEMRNAGIEVRSFLKVRFPLFTSRVNYRNHRKIVVIDGRIGFVGGMNLAERYMRGFSWGIWRDTHILIEGKAVHGLQTAFLLDWYFVDRTLITASRYFPKIESCGSSLVQVVTSEPIGPWKEIMQGLTMAINGAKKYFYMQTPYFLPTEQVLAAMQTAALAGVDVRLMLPERADNRITHLGSHSYLADVMQAGVKVYFYKKGFLHSKLMVSDDMLSTVGSTNVDFRSFEHNFEVNAFMYDVETALEMKEIFLQDQRESTQIFLKNWVKRSWRRRAAESVVRLLAPLL

SEQ ID NO: 14316 - DNA, 1446 bp, Enterococcus faecalis V583
  CDS (1)..(1446): transl_table=11
ttgattcttagcgtcttaacagttatttattttattaatgcaattattgcgggaattaccattttgttaaaacctcgagatgtagcagcaatttgggcatggctactcgtactgattgctctacccgtttttggttttttcttatatttattctttggtcgaggtttaaccgacaaaaagaaattttatttgcaacaaagtgatttacgggaattagagaatttccagaatttccaagaagaaagttttgaactttatagtcaaaagatgccgacggaggagcaacaacagtttacagactttttttcctcgttaaataggatgcctctgactaagaaaaatgatgttgaaatttttacggatggtacggaaaaattcaatgcgttgatggcggatataaaaaaagctcagcactccattcatattgaatattatgcctttgtaacggatcatatcggcaccaaaattttgaacttattagaagaaaaggcggctgaaggggttgaagtgcggttgctttacgatgcctttggctcaaagggcaccaaggttcatcatttgaatgaattgaaaaaaaacggtggttttgtccaaacgtttattacttctcaaaaagcacttttgaagtttcgtttgaattatcatgatcaccggaaaattgttgttattgacggaaaagtaggctacattggcggctttaatgttgccgatcaatatgccggaacgactaaaaagtttggctattggcgggatacacatttacggattcaagggccagcagcctcattactgcaaatgcgttttttaatggattggaacgtctcttcccccgagaaaaatcgtgtggcgtatcaattggattatttctttaaacttgaagcattggtgccagaggcaaatacatccattcagatgattgccagtggtcctaacagtgaccgtgaacaaattaaattggcctttattaaattgattacttctgccaagaaaagagtctggattcaaacgccgtatttagttcctgatgatagtgtcttggctgctttaaaggttgctgcggcttcaggagtagatgttaaaattatgattccagataagcccgaccatccgtttatttatcgagcaacacagtattacggccgcttattgatgaaagaaaatattgaaattttaatttataacggtggtttcttacatgcgaaaacaatgatcatggatgatgaagtctgcacagttggttcagccaatcaagatatccgaagttacaaattaaactttgaagcaaatgctgtgttatatgataaaaaaatcattgatcaattagaagcaattttcttagaagatcgaaaaaaatgtacaacaatgactccagaagttgttcgcgacatgtcaaaatggttgatttttaaacaacaaatttcacgattattttcaccaattctttaa

SEQ ID NO: 14317 - protein, 481 aa, Enterococcus faecalis V583
MILSVLTVIYFINAIIAGITILLKPRDVAAIWAWLLVLIALPVFGFFLYLFFGRGLTDKKKFYLQQSDLRELENFQNFQEESFELYSQKMPTEEQQQFTDFFSSLNRMPLTKKNDVEIFTDGTEKFNALMADIKKAQHSIHIEYYAFVTDHIGTKILNLLEEKAAEGVEVRLLYDAFGSKGTKVHHLNELKKNGGFVQTFITSQKALLKFRLNYHDHRKIVVIDGKVGYIGGFNVADQYAGTTKKFGYWRDTHLRIQGPAASLLQMRFLMDWNVSSPEKNRVAYQLDYFFKLEALVPEANTSIQMIASGPNSDREQIKLAFIKLITSAKKRVWIQTPYLVPDDSVLAALKVAAASGVDVKIMIPDKPDHPFIYRATQYYGRLLMKENIEILIYNGGFLHAKTMIMDDEVCTVGSANQDIRSYKLNFEANAVLYDKKIIDQLEAIFLEDRKKCTTMTPEVVRDMSKWLIFKQQISRLFSPIL

SEQ ID NO: 14318 - DNA, 1461 bp, Enterococcus faecalis V583
  CDS (1)..(1461): transl_table=11
atgaaaatttttgtttggattttgttatttttattagtaattaacgttattgctgccttaattactgtttttagaaaacctcgtagtatttccagcgttttagcatggatgatgacgttgattttcttgcctggtatcggctttattatttacttattctgtgggcgaggtatcgatggacaagaagtttttaaattgtctgatgatgaaaaacaaatggttcaacgaattaaagaaaaagtggacgttgataacaaaaaagcagggcgcgataaacgttatgatttactttatgatgcgaaagttttaaatcgttatttccggaatatggacgcatcaccgttggccaaaagaaatagtttgcaattattcacagatggccaagaaaaattccaagcattatttgaagatattcgtgcagcgaaagaaaccgttcatgtggagtattatgcgttttttaatgacacaattggcaatcaatttttagatgtattaatcgaaaagttgcatgaaggcgtggaagtttacttaatttacgatccttggggttcacccggcgcaaataaaaagttttttgctcgttacgttgacgctggaggaaaagtagctccctttattacttctcgtgatatgatccgtaaaacacgtctaaattatcacttgcatcgaaaaattgttgtcatcgatgggaaaattggctggaccggcgggttcaatgttggggatcaatatttgaatgtcaccgaaaaatttggttactggcgagatacccatattcgtttggtcgggacggccgtattttcattgcaagagatatttatcatggattggaatgcttcagtcaaatatcctgaagaacgtatgacgtatcatgaaaaatattttaaattaccagaagatcatgaagtggagcatttgtccttacaagttgtttcagatggtcctgattcagaagaagaaattttgaaaagcgggtttgttcggatgattttctctgcagaaaagagtgtctggattcaaacaccgtatttaatccctgatgatagtatgattaatgcgttgttagtggcggttcgttcaggtgtcgacgtgcgaattatgattccttgtatgcctgaccatccctttatttaccgcgcgacacaatattacgcaaattacttacacaaacgcggcattaaaatttatatttatgatagtgggtttattcatgcaaaaacaatggtgattgatgatgaattagctatggttgggacaacaaaccaagatattcgcagttattcattgaattttgaggtaagtacgtttatttacaatcccgacattgcgtggatgttagcgcaagtctttgaagaagatatagaaaaaagtgtcttactaaccgacgagataattaaaaaacaagggtactggctacgattcaagcaaaacttttcacgcttgttgtccccagtcttgtaa

SEQ ID NO: 14319 - protein, 486 aa, Enterococcus faecalis V583
MKIFVWILLFLLVINVIAALITVFRKPRSISSVLAWMMTLIFLPGIGFIIYLFCGRGIDGQEVFKLSDDEKQMVQRIKEKVDVDNKKAGRDKRYDLLYDAKVLNRYFRNMDASPLAKRNSLQLFTDGQEKFQALFEDIRAAKETVHVEYYAFFNDTIGNQFLDVLIEKLHEGVEVYLIYDPWGSPGANKKFFARYVDAGGKVAPFITSRDMIRKTRLNYHLHRKIVVIDGKIGWTGGFNVGDQYLNVTEKFGYWRDTHIRLVGTAVFSLQEIFIMDWNASVKYPEERMTYHEKYFKLPEDHEVEHLSLQVVSDGPDSEEEILKSGFVRMIFSAEKSVWIQTPYLIPDDSMINALLVAVRSGVDVRIMIPCMPDHPFIYRATQYYANYLHKRGIKIYIYDSGFIHAKTMVIDDELAMVGTTNQDIRSYSLNFEVSTFIYNPDIAWMLAQVFEEDIEKSVLLTDEIIKKQGYWLRFKQNFSRLLSPVL

SEQ ID NO: 14320 - DNA, 1176 bp, Coxiella burnetii RSA 493
  CDS (1)..(1176): transl_table=11
gtgattaaaaaaaaaggtattatggaaagtcgtccgctgccgacaaactattgcgaacgcctcttcacagacggacagaagcacttcgatgagctgctattggatatcgaagaggcgaaacattccatcgatctggaaacttacttattccacaacgatgcgttaggacaacgggtggcggttaaactcgctgaagccgccgagcgcggtgttaaagttcgaatcatggtggatggcgccggcagtcccttgtggagcaccaatttcgcccgtcttcttgaaagtgcgggcgcacgaactaaggtttttcatccctttccgtggcagctttgggattggagccgctctatcattaaattaccctttctaataaggtggatttaccttattttaaaaataaatttccgcaaccatcgaaaagtctgcattatcgataaaaagatcgcttatattggcagtcttaacattagcaaacaccatctttctaaagccgaaggaggcgacgcatggcgagatacgtcggtgcgtctttctggaattaacttggacgaacttattaaagcgtttgatgccgcttggtatcaccgtaccattaaagagcgtttacgggaaatttttcgtcaaattcgcaaagaccccttgattcgtctgaattattcacggcaccgtcgacgcattttccataaagatctgttgcgcaaaatggcgaattgccaccaccgaatttggatcaccaacgcttactttgtgccagataattttttattaaaaagacttcaagaagcggctcacgccggtattgatgtccgtattttgctgccgcgtaaatcagatgttcccataatgccttgggcctcgtcgacgttttattataatctcttaaatgccggtgtcaggatttttgaatatttacccagcatgttgcatgcaaaatcgctaattattgatgattggatgctggttggctccagtaatttaaatcatcgcagcctcattcatgatttagaagctgatgttaatattacgtctcccgaagccaaaaaaatgttggaggggcaatttctcgaagaccttaaaaattctcgggaagtttctttagacagttggcaaacgctgcgccctcgacgccaacgcattttaggtcgtttggttctttatattaagtactggatataa

SEQ ID NO: 14321 - protein, 391 aa, Coxiella burnetii RSA 493
MIKKKGIMESRPLPTNYCERLFTDGQKHFDELLLDIEEAKHSIDLETYLFHNDALGQRVAVKLAEAAERGVKVRIMVDGAGSPLWSTNFARLLESAGARTKVFHPFPWQLWDWSRSIIKLPFLIRWIYLILKINFRNHRKVCIIDKKIAYIGSLNISKHHLSKAEGGDAWRDTSVRLSGINLDELIKAFDAAWYHRTIKERLREIFRQIRKDPLIRLNYSRHRRRIFHKDLLRKMANCHHRIWITNAYFVPDNFLLKRLQEAAHAGIDVRILLPRKSDVPIMPWASSTFYYNLLNAGVRIFEYLPSMLHAKSLIIDDWMLVGSSNLNHRSLIHDLEADVNITSPEAKKMLEGQFLEDLKNSREVSLDSWQTLRPRRQRILGRLVLYIKYWI

SEQ ID NO: 14322 - DNA, 1215 bp, Streptomyces avermitilis MA-4680
  CDS (1)..(1215)
atgctcgagtcggttgcagctgaaccccggcgcgccgcggcgacggaccaggcgggcaccgaggcacgcaagcagcgtctgcgaagacgtctggagagactcatcggtatcgccgcgaccgagggcaacgagctcgtacccctgcgcaacggtgacgagatcttccccgccatgctccgagccatccgtacggccgagcacaccgtcgacatgatgacgttcgtgtactggcgcgggcagatagcgcgggacttcgcggccgcactggcggagcgtgcccgcgcgggagttcgcgtgcggctgctcctggacggcttcggtgccaagcagatcgaggagggcctcctcgagtccatgaactccgccggcgtagaggtcgcctggttccgcaaaccgctgtggctgtcccccctcaagcagaaccaccgctgccatcgcaaggtgctcgtcgtggacgagcacaccgctttcaccggcggcgtcggcatcgccgaggagtggggcggcgacgcccgcaatccctccgaatggcgcgacacccatgtgcaggtccgcggtccggccgtcgacggcatcgccgccgccttcgcccagaactgggcggagtgccacgacgagctgttcgacgagcgggaccgcttcaccgagcacgagcagtccggtcgggcaaccgtccaggtggtccggggctcggccagcttcggctggcaggacatgcagaccctcgtccgggtcatgctcgcctcggccgaggagcgcttccgcctgtccaccgcctatttcgcgccggacagctacttcgtcgacctgctgtgcgcgaccgcccgccgtggcgtacaggtgcagatcctgctgcccggcccgtatacggaccagcgggcgtgccggctcgccggtcagcactactacggcacgcttctggatgccggggtggagatccgccagtaccagccgacgatgctccacaccaagatcatgaccgtggacggggtcgccgccctgatcggctccagcaacttcaaccgccgctcgatggagcacgacgaggagatcatgctcgccgtgctggacgagaccttcacggcggccctggaccgggacttcgaggaggaccgggagcgggccgaggccatcgtcgcggcacgctggaagcaccgctcccctgtgcagcgcctcaaagaggcgatcgtcgctcccgtacgccgtttcctctag

SEQ ID NO: 14323 - protein, 404 aa, Streptomyces avermitilis MA-4680
MLESVAAEPRRAAATDQAGTEARKQRLRRRLERLIGIAATEGNELVPLRNGDEIFPAMLRAIRTAEHTVDMMTFVYWRGQIARDFAAALAERARAGVRVRLLLDGFGAKQIEEGLLESMNSAGVEVAWFRKPLWLSPLKQNHRCHRKVLVVDEHTAFTGGVGIAEEWGGDARNPSEWRDTHVQVRGPAVDGIAAAFAQNWAECHDELFDERDRFTEHEQSGRATVQVVRGSASFGWQDMQTLVRVMLASAEERFRLSTAYFAPDSYFVDLLCATARRGVQVQILLPGPYTDQRACRLAGQHYYGTLLDAGVEIRQYQPTMLHTKIMTVDGVAALIGSSNFNRRSMEHDEEIMLAVLDETFTAALDRDFEEDRERAEAIVAARWKHRSPVQRLKEAIVAPVRRFL

SEQ ID NO: 14324 - DNA, 1098 bp, Bacillus cereus ATCC 14579
  CDS (1)..(1098): transl_table=11
atgccgacagagtatgcgcctcattatagtgactttcaattatatgtagaagggaagtctttttataaacaattatttactgatataagtgaagcgaaaagctccatttacacgtatttcttcattttgtcggatgataaaagtagccatacttttttaaacttattaaaagagaaggcaaaagaaggagtaaacgtctatttatccgttgatcgcattaatgatttatcatttgaaagaaagatgaaaaatgaattgcaggaaaatggtgtgcattttacatatagtagaaaacctgaattaccattcggcttttattctcttcatcatcgtaatcatcgccgtattacgacgattgatggggagattggctatacaggcggatttaatataggagatgagtacttagggaaagataagcgatttggatattggcgtgattatcatgtacgacttaaaggagaaggagcaaaagatttagaacagcaattcgctttagactggaaacgagatacgaaagaagagataaagagaagtacgaataaagctagtaaagggaatacattacatactatgactagttacaatgggcattacgttgctgaaaaatatatagagctcataaaacaagctcagcactccattgtaattgcaacaccgtattttatagcgaaaaataaagaatctatgaatgctttaatcgcagcacaaaagcgtggtgttacagtaaaaatactttggtcatataaaccagatctacctcttataaaagaagcggcgtatccatacatacgtcaagctgttaataatgggattactgtatatgggtataaaaaaggaatgttccatggtaaattaatgcttattgataatgaattaaccgttattggtacaacaaactttacttcgcgtagcttcaatataaatgatgaaatgaatttttatatttatggtggtcctattgtaggacaagttaataaggcgttaacagaggattttcatgattcgaaagaaatgacgaaagagttttttgaaaagttatctttttgggagcgttgtaaggagaaagtggcgggattggttgacttctatttgtga

SEQ ID NO: 14325 - protein, 365 aa, Bacillus cereus ATCC 14579
MPTEYAPHYSDFQLYVEGKSFYKQLFTDISEAKSSIYTYFFILSDDKSSHTFLNLLKEKAKEGVNVYLSVDRINDLSFERKMKNELQENGVHFTYSRKPELPFGFYSLHHRNHRRITTIDGEIGYTGGFNIGDEYLGKDKRFGYWRDYHVRLKGEGAKDLEQQFALDWKRDTKEEIKRSTNKASKGNTLHTMTSYNGHYVAEKYIELIKQAQHSIVIATPYFIAKNKESMNALIAAQKRGVTVKILWSYKPDLPLIKEAAYPYIRQAVNNGITVYGYKKGMFHGKLMLIDNELTVIGTTNFTSRSFNINDEMNFYIYGGPIVGQVNKALTEDFHDSKEMTKEFFEKLSFWERCKEKVAGLVDFYL

SEQ ID NO: 14326 - DNA, 1194 bp, Bacillus cereus ATCC 14579
  CDS (1)..(1194): transl_table=11
atgctctacttatctcttttgttaatatccgttgctctttggattacaattgacctttcatacgggagacttcttcatttaaaacgagtaagctctcgcactttccctttacgtcaaagtgattttcacctttatacatacgggaaagatttgtatgacgctttatttactgatataaaacaagcacagcatcacattcatattttattcttcattgtaaaaaacgataaaatcagtcgtgaatttttaaaattgctgattgataaggctcaggaaggaattgaagtacgacttttacttgatcgatttggcagccattctttatcaaacgaagctattcgctccctgcaaaaacatggtgtatctttttcattttgtcataaggtaaaatttcctctgcctttcttttctgccaatcaacgaaatcataggaaaattacagtgattgatgggaaaaccggctatatcgggggatttaatatcggtgaagagtatctagggcataatgaatatttaggattatggcgagactaccatttacgtcttacaggagaaggggttcaagatttacaaaagcaatttttgcatgactggtttgatgatacgaaacaaaatttattagatgcttctctttattttccaaaacaaaacccaggtaccatcctgcatcaatttattccgactgatggggcttatttacagcatacttttttacatttaattaacgcggcaaaaaaagaaatctgtatcggtacaccatatttcattcctggaaaaaaaattatgaatgccttattaaaagcaagagaaagaggggttcaaatcacaattcttgttccagaaaaagctgatcaccctcttgttcgagaagccaaatttccgtactgccgaaaattaatacaggcgggttgcaatatttatgcatttcaacaaggtttttttcacgccaaaattattatagtagacgatgatatttgcgatatcggaacagcaaactttgatatgagaagtttatatattaaccatgaaataaactgcctgttatataataaacatttcattcaaacagtaaaaaagaaattccatgaagatctagataatgcatctgtactttcctatagcgatgtaaacccgccttctcttatcgatagaggaaaggaatggattggaacaatatttgctttctttttatag

SEQ ID NO: 14327 - protein, 397 aa, Bacillus cereus ATCC 14579
MLYLSLLLISVALWITIDLSYGRLLHLKRVSSRTFPLRQSDFHLYTYGKDLYDALFTDIKQAQHHIHILFFIVKNDKISREFLKLLIDKAQEGIEVRLLLDRFGSHSLSNEAIRSLQKHGVSFSFCHKVKFPLPFFSANQRNHRKITVIDGKTGYIGGFNIGEEYLGHNEYLGLWRDYHLRLTGEGVQDLQKQFLHDWFDDTKQNLLDASLYFPKQNPGTILHQFIPTDGAYLQHTFLHLINAAKKEICIGTPYFIPGKKIMNALLKARERGVQITILVPEKADHPLVREAKFPYCRKLIQAGCNIYAFQQGFFHAKIIIVDDDICDIGTANFDMRSLYINHEINCLLYNKHFIQTVKKKFHEDLDNASVLSYSDVNPPSLIDRGKEWIGTIFAFFL

SEQ ID NO: 14328 - DNA, 1242 bp, Shigella flexneri 2a str. 2457T
  CDS (1)..(1242): transl_table=11
atgaaatgtagctggcgcgaaggcaataagatccagttgctggaaaacggcgagcaatattatcccgcggtgtttaaggcgattggcgaggcacaagaacgcatcattcttgaaacgtttatctggtttgaggataacgtcggcaaacagctgcatgcggcactactggcagcagcgcaacgcggggttaaagcggaagtcttgctggatggctacggttcgccggatctcagcgatgagtttgtcaatgaactgacggcagctggcgtagtgttccgctactacgatccccgccctcgcctttttggtatgcgcaccaatgtgtttcgccggatgcatcgcaaaattgtggtgatcgacgcgcgtatcgcctttattggcgggctgaattactccgccgagcatatgtccagctacggtccagaggctaaacaggattacgcggtacgccttgaagggccgattgtcgaagatattctccagtttgagctggaaaacctgcctggacagagcgcggcacgacgctggtggcgacgtcatcacaaagcggaagagaaccgccagccgggagaagcgcaggtattgctggtctggcgcgataacgaagaacatcgcgatgatattgaacgccattatctgaaaatgctcactcaggcgcagcgggaagtgattatcgccaacgcctacttcttccccggctatcgatttttacacgccttgcgtaaagcggcacggcgcggggtgcggatcaaactgatcattcagggcgaaccggatatgccgattgtcagagtcggtgcgcgcttgctgtataactatctggttaaaggcggcgttcaggtttttgagtaccgccgccgcccgctccacggcaaagtggcattgatggacgatcactgggcgacagtagggtccagtaatctcgatccgctcagtttgtcactgaatctcgaagcaaatgtcatcatccacgatcgtcattttaaccagacgctgcgcgataatctgaacggcattattgccgcagattgtcagcaggtggatgaaaccatgctgcccaaacgcacctggtggaacctgaccaaaagcgtgctggcgttccactttttacgccacttcccggcgctggttggctggcttccggcacacacaccacgtctgacgcaggttgatccccccgcacaaccgacaatggaaacgcaggatcgggtagaaactgaaaacacgggggtaaacccctga

SEQ ID NO: 14329 - protein, 413 aa, Shigella flexneri 2a str. 2457T
MKCSWREGNKIQLLENGEQYYPAVFKAIGEAQERIILETFIWFEDNVGKQLHAALLAAAQRGVKAEVLLDGYGSPDLSDEFVNELTAAGVVFRYYDPRPRLFGMRTNVFRRMHRKIVVIDARIAFIGGLNYSAEHMSSYGPEAKQDYAVRLEGPIVEDILQFELENLPGQSAARRWWRRHHKAEENRQPGEAQVLLVWRDNEEHRDDIERHYLKMLTQAQREVIIANAYFFPGYRFLHALRKAARRGVRIKLIIQGEPDMPIVRVGARLLYNYLVKGGVQVFEYRRRPLHGKVALMDDHWATVGSSNLDPLSLSLNLEANVIIHDRHFNQTLRDNLNGIIAADCQQVDETMLPKRTWWNLTKSVLAFHFLRHFPALVGWLPAHTPRLTQVDPPAQPTMETQDRVETENTGVNP

SEQ ID NO: 14330 - DNA, 1158 bp, Nitrosomonas europaea ATCC 19718
  CDS (1)..(1158): transl_table=11
atgagttggcccgattttgtcgaaggtaatcagataacgttattacactccggtacggagtattttccggcactggaatcggccatcgattctgccaggcaggaaatccacctcgaaacctacatttttcagtatgacgcaaccggtgcccgtattgccgctgcactcaagcgggcagcgcagcgtggagtagccgtccacctgctgatcgatgggttcggttctcacggactgtccagaatagtgattcaggagatgcttgcagcgggtgtgcaggtgctgatctaccggcaggaatttttttcgttccggttcaaacgttaccgcctgcgccgaatgcatcgcaaactggcagtaatggatgccagcgtggcgtttgtaggggggatcaacatcattgatgattgctctgagcctgatgcttcgtttccccgctttgattatgctgtccaggttgcaggcccgctgttggcagaaattcatgctgcagcaagacatctgtggatgctggctgcatgggtgtatttcaaaaaacgctggacaaactgttcacccgtcatggccagccgtctgccggcaggtcatcagcgtgcatcgctggttatcagggataatctgcgtaaccggcacagtatcgagcgttgctatctcagatcgattgcggccgcgcgcagggaaatcattcttgccaatgcctattttcttcctggcaagcatttccggcaggctcttgcccgggcagcacagcgaggtgtttcagtcatacttctgctgcagggaaaatcggaataccgcttgcagcattacgccatgcacgcgctctatggccacttgctggatgccggtatcagtatttacgaataccggcatgggtatctgcacgccaaggtggccgttattgacagtgcctggtctactgtcggttcttccaatatcgacccgttcagtctgttactggcgcgtgaggccaacgtcgttatcagtgatcaggtatttgcggtggaattgcggagcagtctgcaacaggcattggaggagtcttacccggtgtcgctgcattcctggaaaagccgctcgcgaatcaagcgttcgctgaactggatgtgttactacttcgtacgtatcctgcaggggttgttgggatatcgacgggaataa

SEQ ID NO: 14331 - protein, 385 aa, Nitrosomonas europaea ATCC 19718
MSWPDFVEGNQITLLHSGTEYFPALESAIDSARQEIHLETYIFQYDATGARIAAALKRAAQRGVAVHLLIDGFGSHGLSRIVIQEMLAAGVQVLIYRQEFFSFRFKRYRLRRMHRKLAVMDASVAFVGGINIIDDCSEPDASFPRFDYAVQVAGPLLAEIHAAARHLWMLAAWVYFKKRWTNCSPVMASRLPAGHQRASLVIRDNLRNRHSIERCYLRSIAAARREIILANAYFLPGKHFRQALARAAQRGVSVILLLQGKSEYRLQHYAMHALYGHLLDAGISIYEYRHGYLHAKVAVIDSAWSTVGSSNIDPFSLLLAREANVVISDQVFAVELRSSLQQALEESYPVSLHSWKSRSRIKRSLNWMCYYFVRILQGLLGYRRE

SEQ ID NO: 14332 - DNA, 1218 bp, Bacillus anthracis str. Ames
  CDS (1)..(1218): transl_table=11
atgaacatgattaaaaaaatattgcgagttacttctattattattgctattttcgcttttattttaatttgtatgcatattgatgttactttaggtaggaaaatggaagctgggaaaaacatgccgacagagtatgcacctcattatagtgattttcaattatatgtagaaggaaagtcattttataaacagttatttactgatataaaagaagcgaaacaatctatttacacttatttttttattttatcggatgataaaagtagccatacttttttaaatttattaaaagagaaggcaaaagaaggagtaaacgtatatttatctgtcgatttacttaacgatttatcatttgaaagaaagatgaaaaaagaattacaggaaaatggtgtgcattttacatatagtagaaaacaggaattaccattcgggttttattcccttcaccatcgtaatcatcgccgcattacaacgattgatggagagattggttatacgggtggttttaatataggggatgaatacttagggaaagataaacactttgggtactggagagactatcatgtacggataaaaggtgaaggtgcaaaagacttagaggaacaatttgctttagattggaaacgagatacgaaagaagatataaagagaagtacggataaagctagtaaagggaatacattacatactatggttagttataatgggcatcacgtcgctgaaaaatatatagatcttataaaacaagctcggcactcaattgtaattgcaacgccgtattttatagcgaaaaataaagaatccatgaatgctttaatcgcagcacaaaagcgtggtgttacagtaaaaatactttggtcatataaaccagatctacctcttataaaagaagcggcgtatccatacatacgtcaagctattaataatgggattactgtatatgggtataaaaaaggaatgttccatggcaaattaatgcttattgataatgaattaaccgttattggcacaacaaactttacttcgcgtagcttcaatataaatgatgaaatgaatttttatattcatggtggtcctattgtagggcaagttaataaggcgttaacagaggattttcgtgactcaaaagaaatgacgaaagaattttttgagaagttatctttttgggagcgttgtaaggagaaatttgcagggatggtggatttttatttataa

SEQ ID NO: 14333 - protein, 405 aa, Bacillus anthracis str. Ames
MNMIKKILRVTSIIIAIFAFILICMHIDVTLGRKMEAGKNMPTEYAPHYSDFQLYVEGKSFYKQLFTDIKEAKQSIYTYFFILSDDKSSHTFLNLLKEKAKEGVNVYLSVDLLNDLSFERKMKKELQENGVHFTYSRKQELPFGFYSLHHRNHRRITTIDGEIGYTGGFNIGDEYLGKDKHFGYWRDYHVRIKGEGAKDLEEQFALDWKRDTKEDIKRSTDKASKGNTLHTMVSYNGHHVAEKYIDLIKQARHSIVIATPYFIAKNKESMNALIAAQKRGVTVKILWSYKPDLPLIKEAAYPYIRQAINNGITVYGYKKGMFHGKLMLIDNELTVIGTTNFTSRSFNINDEMNFYIHGGPIVGQVNKALTEDFRDSKEMTKEFFEKLSFWERCKEKFAGMVDFYL

SEQ ID NO: 14334 - DNA, 1104 bp, Bacillus anthracis str. Ames
  CDS (1)..(1104): transl_table=11
atggctagtgaatatgaattaggacaagttcgattgggtgaatttcaactgtatacgaacggtgaagaattatatacgaaattatttgaggatatacgcaatgcagaaaagtacatatatatccatttttatattgtaggtaaagacgaaataagcaaagagtttttgcagttgctcgagaaaaaggcatcaggtggagtagaagtgaaattgtcagtcgatcgaataggtggatataagctgaagaaaaagataattcgtcaactaaaaagcaatggtgtccagtttacatttagtaaaaaacctaaactgaaacatatattctactcgttgcatcaacggaaccatagacgcattgttacgatagatggaaaagtatcatacgtcggcggctttaacattggaaaggaataccttggacaaaatccgaaatttggtccgtggcgtgattatcatgtacgagtcaaggggaatggtgccacggatatggaaagaaaattctctgctgactggaaagaagatactggagaaaaaatgcctgtacatgaaagtttacctgcaatagggaatgtaaagtatcaatatttattttcagaaggaaaaggtttatgggaaaaatatggagcgcttataaagcaggctaaaacgtctttaattattgctacaccatattttgtaccaagtaaagaaatgataaaagcgttaaaagatgcattaaaccgtggtgtcaatgtaaaaattctcgtaccatttaaaagtgatgcagtattgttaaaacaagctgcctatccgtatttgaaagacatgttacatgctggagcagagatttatcaatatcagaatggtttttttcatgggaaagtaacaatcattgatggggaaagtgttgatattggtaccgcaaactttgataatagaagtttttatttaaatatggaatccaattgtgttatctatgataagggagtaacagcggacgtatggagtcgattaaaagaagactttcataaatcaaaaagattttcggaagaagattttgagaaaattagtaaatgggattggtttttagcaagaatagcaaatgttatagcatcatatttatag

SEQ ID NO: 14335 - protein, 367 aa, Bacillus anthracis str. Ames
MASEYELGQVRLGEFQLYTNGEELYTKLFEDIRNAEKYIYIHFYIVGKDEISKEFLQLLEKKASGGVEVKLSVDRIGGYKLKKKIIRQLKSNGVQFTFSKKPKLKHIFYSLHQRNHRRIVTIDGKVSYVGGFNIGKEYLGQNPKFGPWRDYHVRVKGNGATDMERKFSADWKEDTGEKMPVHESLPAIGNVKYQYLFSEGKGLWEKYGALIKQAKTSLIIATPYFVPSKEMIKALKDALNRGVNVKILVPFKSDAVLLKQAAYPYLKDMLHAGAEIYQYQNGFFHGKVTIIDGESVDIGTANFDNRSFYLNMESNCVIYDKGVTADVWSRLKEDFHKSKRFSEEDFEKISKWDWFLARIANVIASYL

SEQ ID NO: 14336 - DNA, 1194 bp, Bacillus anthracis str. Ames
  CDS (1)..(1194): transl_table=11
atgttcttcttacctctcttattaataggtattgctctctggattataatcgatctttcttatgggagaattgttcatttaaggcgtgtacgttctcgttctttccctttacgtcaaagtgattttcacctttatacatacggaaaagatttgtatgacactctatttactgatataaaacaggcgaaacaccatgtgcatgttttgttcttcattgtaaaaaacgataaaatcagccgggaatttttaaagttacttattgataaggcaaaggaaggaattgaagtaagacttttactcgatagattgggaagccatcatttatcaaacgaggccattcgctccctgcaaaaacatggtgtctctttttcattttgtcacaaagtaaagtttccttttcctttcttttctgcaaatcaaagaaaccatagaaaaattacagttatcgacgggaaaattggttacattgggggatttaatattggtgaagagtatttgggacataatgaacggttaggattatggagggactatcatttacgtcttacaggcgaaggagtacaagatttacaaaagcaatttttacatgactggtttgatgatacaaaccaaaatttattggtcgcttctctttattttccgaaacagcaacccggtactatccaacatcaatttattccgactgatggtgcctatttacaacatacttttttacatttaattgaaggggcaaaaaaggaactctttatcggcacaccctatttcattcctggaaggaaaattatgaacgcattattagaagcacgaaaacgcggggttcaaatcacgattctcgttccagaaaaagcggatcatgcccttgttcgagaagcaaaattcccgtattgccgaaagttaatacaagctggatgtaatatttacgcatttcaacaaggtttttttcacgctaaagttattatagttgatgactacatttgtgatatcggaactgcaaactttgatatgagaagtttatatattaaccatgaaattaactgccttttatatgataaacattttatacaaacagtaagaaacaaattccataaggatctaggaaacgcatcattactttcctttaaagatgttagcccgcattctcttattgatagaggaaaagaatggataggaacaatactcgctttcttcctatag

SEQ ID NO: 14337 - protein, 397 aa, Bacillus anthracis str. Ames
MFFLPLLLIGIALWIIIDLSYGRIVHLRRVRSRSFPLRQSDFHLYTYGKDLYDTLFTDIKQAKHHVHVLFFIVKNDKISREFLKLLIDKAKEGIEVRLLLDRLGSHHLSNEAIRSLQKHGVSFSFCHKVKFPFPFFSANQRNHRKITVIDGKIGYIGGFNIGEEYLGHNERLGLWRDYHLRLTGEGVQDLQKQFLHDWFDDTNQNLLVASLYFPKQQPGTIQHQFIPTDGAYLQHTFLHLIEGAKKELFIGTPYFIPGRKIMNALLEARKRGVQITILVPEKADHALVREAKFPYCRKLIQAGCNIYAFQQGFFHAKVIIVDDYICDIGTANFDMRSLYINHEINCLLYDKHFIQTVRNKFHKDLGNASLLSFKDVSPHSLIDRGKEWIGTILAFFL

SEQ ID NO: 14338 - DNA, 1563 bp, Helicobacter hepaticus ATCC 51449
  CDS (1)..(1563): transl_table=11
atgcaatctatttattctgtctttttttcatcaacaaatattgctttgctttgtcttatatgtctttttatctttgctggttgttcttctattgtcgcttctaccaaagacattaaagacccacttgcacttcaatcaaatccaacacctgtttttgaccctgtgctcactgctattggtatgccttatcagaataaacttaaacaaaacccaactattacgggaggaatgctcgtaagtgatgggttagacgcatttttgcatcgcgcttatctcgctcgtatggcagaaaaaagcattgttttacaaacttatatttataaaaatgacctcgcttcacgtattcttatgcacgagatttggcttgctgcacaaagaggggtgattgttaaaatgctcattgatgataatggattagattctgatttttcagatattattgctcttaattctcacccaaatattgaagtaaaaatcttcaacccctataaaaatcgctcaaaaatcctacgttatccagaaatggtgtttgattttaatcgcattaatcatcgtatgcacaataaactctttattgtagatgatattgcccttatcattggtggacgaaatatcgcagataattattttgaccaaaatcatcatattaattttgttgataccgatgtgctttttattggtaatgtagcaatggagggcaaaaaaaatttttatgaatattggaattttcatcgctctattcctgtttcacttcttaaattcaaaacgccacttaaaaaacttaaatcctctatggaaagtcttaaagcgaatcctgagtgggcacattatgaggaaaaaatcaatacccttattaaaaaatacaaaaacaaatcttttgaggtattttggggcaacgccgtgtttattgctgataaaccagaaaaaattcaagacccacaagcgccaaaacccattgccaaagcacttgcaaagattctcaactttacatataacaatctttatatttctgccgcctattttgtgccaagcaaagagggtataaaacgttttaaaaccttgattgcttcgggtgtggatattaatattcttacaaattctcttgcctctacggattctcttgtcgtatatagtgcgtgggaacgttatcgtggcactcttattaaagagggtgcaaatatatatgaatatcaatatcaaggtagaggtaaatcaaagttacgtgataaaatatcaaagtccaaagcttctttgcatagtaaaagcattgtatttgatgattctattacttggattgggagttttaatcttgacccacgttcaactcatctcaatactgaatgcgttgttatctttgataatcctaaatttgcaaaagtctttaaggctgatttgatgacagatatggaaagtgcgtggcacgtatataataaaaatggaaaaacgctttgggagggagatgatgaaagcaagacagagatttttacctatcctcctgatacagggatttggacaaggattctaaaaacacttgcaaaaattctccctgaaagccaaatttaa

SEQ ID NO: 14339 - protein, 520 aa, Helicobacter hepaticus ATCC 51449
MQSIYSVFFSSTNIALLCLICLFIFAGCSSIVASTKDIKDPLALQSNPTPVFDPVLTAIGMPYQNKLKQNPTITGGMLVSDGLDAFLHRAYLARMAEKSIVLQTYIYKNDLASRILMHEIWLAAQRGVIVKMLIDDNGLDSDFSDIIALNSHPNIEVKIFNPYKNRSKILRYPEMVFDFNRINHRMHNKLFIVDDIALIIGGRNIADNYFDQNHHINFVDTDVLFIGNVAMEGKKNFYEYWNFHRSIPVSLLKFKTPLKKLKSSMESLKANPEWAHYEEKINTLIKKYKNKSFEVFWGNAVFIADKPEKIQDPQAPKPIAKALAKILNFTYNNLYISAAYFVPSKEGIKRFKTLIASGVDINILTNSLASTDSLVVYSAWERYRGTLIKEGANIYEYQYQGRGKSKLRDKISKSKASLHSKSIVFDDSITWIGSFNLDPRSTHLNTECVVIFDNPKFAKVFKADLMTDMESAWHVYNKNGKTLWEGDDESKTEIFTYPPDTGIWTRILKTLAKILPESQI

SEQ ID NO: 14340 - DNA, 1476 bp, Rhodopirellula baltica SH 1
  CDS (1)..(1476): transl_table=11
atgatggatctcggacaatactttcaaattcatatcgatgcggtttcgatcgggttggtcgcgcacgtcaccatagaagccatcaccatcattcgcgtgatgacgcggccccatcgcgaaccggcgtctcgtgtcgcttgggtcaccatcattgcagcggtgccgtttttaggtgtgctgctgtatgtgttgtttggcgaaaccaacatcggtcgtcgccgaatggaacgcatgaagcaagtgatcaaacgcttgccgacgatgccagagatcaatcctgaggaatctcggaacacattggccaacgtcccaatccgataccagcatttgtttcgaatgggtgaatcaatcaatggattcgaagcgatcggtggcaactccggaacgttgatgcaagattctaactccgccgtcgactccatgatcgccgacatcgatcgagcaaccgaccatgtgcatttgctcttctacatttggttgcccgacaacaacggattgaagatggtggaggcactcaaacgagcggcgaagcgaggcgttacttgccgagcgatggcggatgacttggggtcacggacaatcattcgatcgactcattggaaggagatgcaggaagccggcgttcatctttcgagaactttgccaattggcaacttgatgctacgtgcacttcgcggacgcatcgaccttcgcaatcaccgaaaaatcctggtgatcgatggatcggtcacgtactgcggaagccagaactgcgccgatcccgaattccgcgtcaaacccaagtacgctccctgggtcgacgctgtgattcgtttcgaaggaccggtggtcagacagaaccaagaactctttgtcgctgattggatggccggtaccgatgacgacctgaccgatctgctcgaccgaccgcttcccaacaccgggcctggtttttcagcgcaagtcattggaacgggaccaaccgttcgcgattctgccatgcccgaggttttcgaaacgttgttccacacggcgagacgcaaactgacaatttcaacgccgtactacgtgcccaacgaatccatgcaacaagctctctgcgccgcggcatggcgaggcgtcgaaacaaccatcatcctgcccgccaacaatgattcgcgaattgttgggggagccagccgaagctactacgcgggactgctagaagccggcgtccgaatctacgaatacaccggtgggttgttgcataccaagtctgtgactctggatgacgaagtcactctgatcggttccgccaacatggatcgccgcagctttgatctgaactacgaaaacaacattttgtttcatgacccgcaactgaccgctgatgtcttcgcgagacaacgcgtctatatcgaacgctccaacgagatcacggcacagcaggtttccgactggtcgcttccccggcgactgtggaacaacgtgctggcgacactcggcccgattctttag

SEQ ID NO: 14341 - protein, 491 aa, Rhodopirellula baltica SH 1
MMDLGQYFQIHIDAVSIGLVAHVTIEAITIIRVMTRPHREPASRVAWVTIIAAVPFLGVLLYVLFGETNIGRRRMERMKQVIKRLPTMPEINPEESRNTLANVPIRYQHLFRMGESINGFEAIGGNSGTLMQDSNSAVDSMIADIDRATDHVHLLFYIWLPDNNGLKMVEALKRAAKRGVTCRAMADDLGSRTIIRSTHWKEMQEAGVHLSRTLPIGNLMLRALRGRIDLRNHRKILVIDGSVTYCGSQNCADPEFRVKPKYAPWVDAVIRFEGPVVRQNQELFVADWMAGTDDDLTDLLDRPLPNTGPGFSAQVIGTGPTVRDSAMPEVFETLFHTARRKLTISTPYYVPNESMQQALCAAAWRGVETTIILPANNDSRIVGGASRSYYAGLLEAGVRIYEYTGGLLHTKSVTLDDEVTLIGSANMDRRSFDLNYENNILFHDPQLTADVFARQRVYIERSNEITAQQVSDWSLPRRLWNNVLATLGPIL

SEQ ID NO: 14342 - DNA, 1476 bp, Candidatus Blochmannia floridanus
  CDS (1)..(1476): transl_table=11
atgacgctaacgatttacagtatactgaattatacttttatatgtagttactggatattaaccattataataataattcgagtgttaataaaacgtcgaactgtatcatcctttatggcgtggttattaacaatctatattgtaccattcatgggaattattctatacttattatgcggagaatctaatcttggtaaaaaacgatcacttagaagtaagatagcacaatccactagcattcgtcgtatacaagaactcaaaaaccataaacatatattctcaaataaaaacagtaaaattgcttcttctttatttaaactatgtgaacttcgacaaggaataggagcattaaaaggtaaccaaatacaattattcaaaaaaatcgataatactcttgcatctttaataaaagatatagatttagccaaacacaatatcgatatggtattttatatttgggaacctggtggactagtagatcatattgtaactaaattaattatcgctgctcaacgaggtgtaaaatgccgtttaatactagattctgttggatgtataaatttttttaatagttcatatccaaaaatactaaaaaaagctggaataaacattgccgaagcactacatattaatttattacgaatattcttcaggcgtatggatttaagacagcaccgtaaaatgatattgattgacaatcatattgcttatactggtagtatgaatatggtcgatccgaaattatttaaacaaaatattggagttggtcaatggattgatatcatgattcgtatagatggccccgcaaccacagttatgagaataatttttgaatttgattgggaaatagaaacaggggaacatattgttcctgtattatctagttctcaacatttaatgcaacaaaaaactaccttaatatcaactggtcacaccattcaaattattccttcggggccaggttttccagaaggaataattcatcaagtactcattacatcattatataaagctcgtaaacaattaattatcacaacaccatatttagtacccagtgatgatttattatatgctatttgtgcagcagctcaaagaggagtaaaagtacatatcattattccaaaaaacaacgattctgtattagttaattgggcaagtcgagctttttttagtgaattattagacgctggagtattgattcatcgatttcaaaaaggattattacatgtaaaaagtatactaattgatcatcaactcagtttaataggtaccgtaaatttagatgttcgtagtatatggttaaattttgaaattactttattaatcgatagtaaactttttaataaagatttagaaaaaatacaattagactatattgcccattcaaaactaattgatgcacaaaaatggtcaaaacgaccttattggaaacgcattattgaacgtttattttatttcttcagtcctttattataa

SEQ ID NO: 14343 - protein, 491 aa, Candidatus Blochmannia floridanus
MTLTIYSILNYTFICSYWILTIIIIIRVLIKRRTVSSFMAWLLTIYIVPFMGIILYLLCGESNLGKKRSLRSKIAQSTSIRRIQELKNHKHIFSNKNSKIASSLFKLCELRQGIGALKGNQIQLFKKIDNTLASLIKDIDLAKHNIDMVFYIWEPGGLVDHIVTKLIIAAQRGVKCRLILDSVGCINFFNSSYPKILKKAGINIAEALHINLLRIFFRRMDLRQHRKMILIDNHIAYTGSMNMVDPKLFKQNIGVGQWIDIMIRIDGPATTVMRIIFEFDWEIETGEHIVPVLSSSQHLMQQKTTLISTGHTIQIIPSGPGFPEGIIHQVLITSLYKARKQLIITTPYLVPSDDLLYAICAAAQRGVKVHIIIPKNNDSVLVNWASRAFFSELLDAGVLIHRFQKGLLHVKSILIDHQLSLIGTVNLDVRSIWLNFEITLLIDSKLFNKDLEKIQLDYIAHSKLIDAQKWSKRPYWKRIIERLFYFFSPLL

SEQ ID NO: 14344 - DNA, 1206 bp, Bordetella pertussis Tohama I
  CDS (1)..(1206): transl_table=11
gtgaaggcccagatcgtcaggttgcactggaccgatggcaacgccatccgcctgctgcaaaacggcggcgatttctttcccgcgctatgcgaggccatcgacgcggcgcgcctgtcggtgcatatggagacctacatcttcctgctcgaccgcaccgggcgacagatgctcgaatgcctggagagcgctgcccgccgcggcgtcaaggtgcgcgtggtgctcgacggtttcggcagcgccggcacggccgagacgatacgcctgcgcatcacccaggccggcggccagtgccgcatcttccggcccgagccccgctggctgggccacctggcgttctcgcgcagccgcttgcgccgcctgcatcgcaaggtggccgtggtcgacgccgagctggcgttcgtcggcggcatcaatatcgtcgacgactacgacgacctcgaccccggcgacgacatccccgcgccgcgcttcgacttcgccgtggcggtgcagggccccctggtgccgcacatactctatgcccaggacctgttgtgggtacggctgaactgggcccgcctgcgccgccacccaggggactggatgcgcctgttcaagccggtgcacgccgacgcctcgccggccggcaagctgcgcgcggcattgctgctgcgcgacaacctgcgctttcggcagaccttcgagcaggcctacctttatggcatccagcatgcgcgccgcgacatcctgatcgccaacgcctatttcttccccgggcatcaattccgcaagagcctcatgcaggccgccgcgcgcggcgtgcgcgtgcggctgctactgcagggcaagcccgaataccgcatgcagtacttcgccacgcgcgcgctgtacgaccggctgctgcgcggcggcatcgagatctacgaatacatgccgggctacctgcacgccaaggtcgccgtcatcgacaacatggctaccgtcggctcgtccaatctcgatcccttcagcctgctgctggcccgcgaagccaacgtggtcgtcgacgaccagcccttcgcctgggacctgcaggaacgcctagagcgcgccattgccctgggcggccagttcatccggcccctggactaccagcggcgcggctggctgcggcgatgcgtcgacgtcgcggcctacaccatgctgcgcatcggcgtggcgctgaccgggcgcgcggggcggtactaa

SEQ ID NO: 14345 - protein, 401 aa, Bordetella pertussis Tohama I
MKAQIVRLHWTDGNAIRLLQNGGDFFPALCEAIDAARLSVHMETYIFLLDRTGRQMLECLESAARRGVKVRVVLDGFGSAGTAETIRLRITQAGGQCRIFRPEPRWLGHLAFSRSRLRRLHRKVAVVDAELAFVGGINIVDDYDDLDPGDDIPAPRFDFAVAVQGPLVPHILYAQDLLWVRLNWARLRRHPGDWMRLFKPVHADASPAGKLRAALLLRDNLRFRQTFEQAYLYGIQHARRDILIANAYFFPGHQFRKSLMQAAARGVRVRLLLQGKPEYRMQYFATRALYDRLLRGGIEIYEYMPGYLHAKVAVIDNMATVGSSNLDPFSLLLAREANVVVDDQPFAWDLQERLERAIALGGQFIRPLDYQRRGWLRRCVDVAAYTMLRIGVALTGRAGRY

SEQ ID NO: 14346 - DNA, 1458 bp, Bordetella pertussis Tohama I
  CDS (1)..(1458): transl_table=11
atggacccattggaacaattgctgcgcgactattggccgcatatcgtctttgcgatcagcgtggtcgccggcaccggcgccgccgtgcatgccgccatgaccaaacaggatgtgcgcgccgccatcgcctgggtcggggtcgccctgttctcgccgctctttggcgccctgctctatttcgtcgccggcatcaaccgcatccgccgttcgctggtgtcgcagcagcacgacgacgccatgctggcctacacgggccatcccgacgcccaggtcgaggacgtggtcccctgcagcggtccgcaattcgcctcgctgcgcgtgctgggcgaccaggtcagccgcttccgcctgctgggcggcaaccaggtgcggccgctggccggcggcgacgaggcctatcccgccatgatgcaggcgatacgcgaggcgcgcgtctcgatcgccatgcaaagctatatcttcgactgcgatccgatcggccgcgaaatggcgcaggccctggtcgaggcgcagcagcgcggcgtgcaggtgcgcgtgctcatcgatgccatcggcagcaagtactcccgtccgccgatcgttcgtacgctggtgcgcggcggcgtgcgcaccgcgcgcttcatgaccaacccgctgggcgtcatgcgcatgccctacgccaacctgcgcagccaccgcaagatcctggtggtcgacggacatgtcggcttcaccgggggcatgaacatccgcgccgccttcgtgacggccctggccggcaaggccgccaacggcgatacccacttccgcctggaaggtccggtggtggcgcaactgatggcggttttcgcgcacgactggaatttcacgacccgcgaatccctggaaggcccgacctggttcccgccggctcccgaacgcgcgccgggctcggtgccgatgcgctgcgtggcctcggggccggacagcgccctgggcagcacgcacaagatgctgctgggcgcgctggcggtggcgcagcgccatgtgcggatccaatccccctatttcctgcctgaccagacgctgatcggcgcactggggaccgccgcgcgccgcggcatcaaggtcgatatcgtgattccgggctcgaacaacctgcgcctggtcaactacgccatgagcgcacaactggaccaggtcatccgcacgggctgccgcgtatggcgctcggccggcgccttcgaccactcgaagctgctgacggtggacgatgcctggtcctatgtgggctcgtccaacatggacccgcgcagcctgcgcctgaacttcgagctggacaccgaaatctacgatcgtgagctggccggctggatcgggcagcgcatcgacgcgcagatccgccacgcgcggcaggaaacactgcaggccctgaacgcgcagccgttcatcaagcgcctgcgcaacaaggtgatctggctggctacgccatatctctag

SEQ ID NO: 14347 - protein, 485 aa, Bordetella pertussis Tohama I
MDPLEQLLRDYWPHIVFAISVVAGTGAAVHAAMTKQDVRAAIAWVGVALFSPLFGALLYFVAGINRIRRSLVSQQHDDAMLAYTGHPDAQVEDVVPCSGPQFASLRVLGDQVSRFRLLGGNQVRPLAGGDEAYPAMMQAIREARVSIAMQSYIFDCDPIGREMAQALVEAQQRGVQVRVLIDAIGSKYSRPPIVRTLVRGGVRTARFMTNPLGVMRMPYANLRSHRKILVVDGHVGFTGGMNIRAAFVTALAGKAANGDTHFRLEGPVVAQLMAVFAHDWNFTTRESLEGPTWFPPAPERAPGSVPMRCVASGPDSALGSTHKMLLGALAVAQRHVRIQSPYFLPDQTLIGALGTAARRGIKVDIVIPGSNNLRLVNYAMSAQLDQVIRTGCRVWRSAGAFDHSKLLTVDDAWSYVGSSNMDPRSLRLNFELDTEIYDRELAGWIGQRIDAQIRHARQETLQALNAQPFIKRLRNKVIWLATPYL

SEQ ID NO: 14348 - DNA, 1575 bp, Bordetella pertussis Tohama I
  CDS (1)..(1575): transl_table=11
atgcctcgtctcctctcgcgtatccgggccgcccgcgcgcgggcggccgcgctgctggcgctggccggctgcgccattctgctgggagcctgtaccttgccgccgcctgtcgaccgcaccgcctcgcacgccctggacgccacgcaggcgcgcgccacgccactgggccagggcgtcggcgagctggccgacacgcatccggggcttagcggctttcatgtgctgggcgacgcgcaggacgccttcgccgcgcgcatgctgctggcgcgcgcggccacgcgcacgctggacgtgcagtactacatctggcgcaacgacatgaccggcaccctgttgctgcaggccttgcacgcggccgccgagcgcggcgtgcgggtgcggctgctgctcgacgacaacggcatctccggcctggacgacgcgctggccgcgctggacgcgcatcccaacgccgaagtgcggctgttcaatccgtttcccacgcgctcgttcaaggcgctgggctacctgacggatttctcgcgcctgaaccggcgcatgcacaacaaatcattcaccgtcgacaaccaggccaccatcatcggcgggcgcaatatcggcgacgagtacttcggcgcgaccgacggcgtgctgttcgccgacctggacgtgctggcggtggggccggtggtgggcgatgtgtccgccgagttcgacgcctactgggccagcgagtccgcctggccggccggcccgctgctgcccgcgccgggcgcgcagacactgcgcgccctggccgagcgcgccgcgcgcatcgaacaggacccggccgccggcgactacatgagcgcgctgcgcgagttgcccttcatccgcgaattgatggccggccgcctgccgctgcaatgggcgccggcccgcatggtcagcgacgatccggccaagggcctgggcaaggcgccgccggccggcctgctgacgcagcagctcaggaacatcctgggcgagccgcgccgcacgctcgacctggtgtcgccgtatttcgtgcctgccgaggccggcacgcaggcgttcgccgcgctggcccggggcggcgcgcaggtgcgcgtgctcaccaatgcgctggaagcgaccgacgtggccgtggtgcattccggctacgccaagcgccgcaaggcgctgctgcaggcgggcgtgcggctttacgaaatgcggcgcagctacgccgggcccaagccgcagggcaggggccgattcggcagctccgggtccagcctgcacgccaagaccttcggcgtcgacggcgagcgcgtcttcataggctcgttcaacttcgatccgcgctcggccaatctcaacaccgaactgggcttcgtgatcgaaagccccgacatggcgcgccacatcgccgccacgttcgaccaggatattcccgccgccacttacgaggtgcgcctggacgacgacggcagcctgtactggctggaacagcgcgacggcgccaccgtgcggcacgacagcgagccgggcgtcagcctgtggcggcgcttcagcgtgtggctgttctcgctgctgccgctcgagccgctgctgtag

SEQ ID NO: 14349 - protein, 524 aa, Bordetella pertussis Tohama I
MPRLLSRIRAARARAAALLALAGCAILLGACTLPPPVDRTASHALDATQARATPLGQGVGELADTHPGLSGFHVLGDAQDAFAARMLLARAATRTLDVQYYIWRNDMTGTLLLQALHAAAERGVRVRLLLDDNGISGLDDALAALDAHPNAEVRLFNPFPTRSFKALGYLTDFSRLNRRMHNKSFTVDNQATIIGGRNIGDEYFGATDGVLFADLDVLAVGPVVGDVSAEFDAYWASESAWPAGPLLPAPGAQTLRALAERAARIEQDPAAGDYMSALRELPFIRELMAGRLPLQWAPARMVSDDPAKGLGKAPPAGLLTQQLRNILGEPRRTLDLVSPYFVPAEAGTQAFAALARGGAQVRVLTNALEATDVAVVHSGYAKRRKALLQAGVRLYEMRRSYAGPKPQGRGRFGSSGSSLHAKTFGVDGERVFIGSFNFDPRSANLNTELGFVIESPDMARHIAATFDQDIPAATYEVRLDDDGSLYWLEQRDGATVRHDSEPGVSLWRRFSVWLFSLLPLEPLL

SEQ ID NO: 14350 - DNA, 1263 bp, Bordetella parapertussis 12822
  CDS (1)..(1263)
atgggcgcgcctgtcggatcattcgccgctgctggccgagctcgaattgccgtgaagggccagatcgtcaggttgcactggaccgatggcaatgccatccgcctgctgcaaaacggcggcgatttctttcccgcgctatgcgaggccatcgacgcggcgcgcctgtcggtgcatctggagacctacatcttcctgctcgaccgcaccgggcggcaggtgctcgaatgcctggagagcgctgcccgccgcggcgtcaaggtgcgcgtggtgctcgacggtttcggcagcgccggcacggccgaggcgatacgcctgcgcatcacccaggccggcggccagtgccgcatcttccggcccgagccccgctggctgggccacctggcgttctcgcgcagccgcttgcgccgcctgcaccgcaaggtggccgtggtcgacgccgaactggcgttcgtcggcggcatcaatatcgtcgacgactacgacgacctcgaccccggcgacgacatccccgcgccgcgcttcgacttcgccgtagcggtgcagggccccctggtgccgcacatactctatgcccaggacctgttgtgggtacggttgaactgggcccgcctgcaccgccacccaggggactggcaccgcatgcgcctgttcaagccggtgcacgccgacgcctcgccggccggcaagctgcgcgcggcattgctgctgcgcgacaacctgcgctttcggcagaccttcgagcaagcctacctttatggcatccagcatgcgcgccgcgacatcctgatcgccaacgcctatttcttccccgggcatcaattccgcaagagcctcatgcaggccgccgcgcgtggcgtgcgcgtgcggctgctgctgcagggcaagcccgaataccgcatgcagtacttcgccacgcgcgcgctgtacgaccggctgctgcgcggcggcatcgagatctacgaatacatgccgggctacctgcacgccaaggtcgccgtcatcgacaacatggctaccgtcggctcgtccaatctcgaccccttcagcctgctgctggcccgcgaagcgaacgtggtcgtcgacgaccagcccttcgcctgggacctgcaggaacgcctggagcgcgccatcgccctgggcggccagttcatccggcccctggactaccagcggcgcggctggctgcggcgatgtatcgacgtcgcggcctacaccatgctgcgcatcggcgtggcgttgaccgggcgcgcggggcggtactga

SEQ ID NO: 14351 - protein, 420 aa, Bordetella parapertussis 12822
MGAPVGSFAAAGRARIAVKGQIVRLHWTDGNAIRLLQNGGDFFPALCEAIDAARLSVHLETYIFLLDRTGRQVLECLESAARRGVKVRVVLDGFGSAGTAEAIRLRITQAGGQCRIFRPEPRWLGHLAFSRSRLRRLHRKVAVVDAELAFVGGINIVDDYDDLDPGDDIPAPRFDFAVAVQGPLVPHILYAQDLLWVRLNWARLHRHPGDWHRMRLFKPVHADASPAGKLRAALLLRDNLRFRQTFEQAYLYGIQHARRDILIANAYFFPGHQFRKSLMQAAARGVRVRLLLQGKPEYRMQYFATRALYDRLLRGGIEIYEYMPGYLHAKVAVIDNMATVGSSNLDPFSLLLAREANVVVDDQPFAWDLQERLERAIALGGQFIRPLDYQRRGWLRRCIDVAAYTMLRIGVALTGRAGRY

SEQ ID NO: 14352 - DNA, 1431 bp, Bordetella parapertussis 12822
  CDS (1)..(1431)
atggcaaccctgaggcgcggcttcgcgtgccgcctggcgcgccaagtggccgtcatgttcatgttggcggcgttgggcgcatgcgccacggtgccgggcatgcaggggctgcgcgagcggcgcgcccaggccgggctgtccaccgactacggctggcaaagcctgcagcgcagccacacgatcgtgacggacgcgaccggcggggacggggacgatgccatggcgcgccacctggccgtcgaggcggccatcagcggcgcccccttggtggcgggcaaccaggtccgcctgctggccgacgggccggcgacctaccgcagcatgctcgacgccatcgcgcaggcccgccgctatatccacatggaaacctacatcttcgaagatgacgaggccggccagcgtttcgccgacgccctgatggcggcgcgccagcgcggcgtcgaggtggcggtgatggtcgatgcggtgggcacgctgaatacgccgcggcagtggttcgagcgtctcaagcagggcggaatcaaggtggcggtgttcaatccggtcaacccggcgcgcgccggcctgggctgggcgcccaaccagcgcaaccaccgcaagctgctggtggtcgacggtcaggtgggcttcctgggcgggctgaatatcagcagcgtctattcgtccggatcgcgctctggctcgggttcggggcgtgcggcgcaggcgcccgggccggccgcgtcccgtgccgataccgcgccgtggcgcgatacccatatcgcggtgcgcggaccggcggtggcggagatcgagcgcgtcatccaggacggctggctgcggcagaccggcgcgccgctgggcggcggcgcggtgcggctgagcgtgcccgcgccgggcgatctgcatgtgcgcatcctggccaacgagcccaacgagcgcgacggctataccgtttacctgacgctgatgtcggcgttcgaaagcgcgcggcagtcgattcacatcaccatggcctatttcgtgcccgatccggccttcgtgcgcgtgctggccgatgccgcgcggcgcggggtcgatgtggcgctggtcctgccgggattcagcgattcatcgctggtctggtacgcgggacgctcgcattaccaggccctgctcgatgccggcgtcaagctgtacgagcggcgcgatgcgctgttgcacgccaagacggcggtggtcgacggcgtgtggtccacggtcgggtcgagcaacatggattggcgcagttttgcattgaactacgagctcaacgcggtcatcgtcggggcccgcttcggcgccgagatggaggcgctgttcgaacgcgaccgcgccgccgccgtgccgatcgacccgcgcaactgggccgatcgcggcgccgacgatcgcttcatggaggcgttttcgcgcctgttcgagcgctggctgtag

SEQ ID NO: 14353 - protein, 476 aa, Bordetella parapertussis 12822
MATLRRGFACRLARQVAVMFMLAALGACATVPGMQGLRERRAQAGLSTDYGWQSLQRSHTIVTDATGGDGDDAMARHLAVEAAISGAPLVAGNQVRLLADGPATYRSMLDAIAQARRYIHMETYIFEDDEAGQRFADALMAARQRGVEVAVMVDAVGTLNTPRQWFERLKQGGIKVAVFNPVNPARAGLGWAPNQRNHRKLLVVDGQVGFLGGLNISSVYSSGSRSGSGSGRAAQAPGPAASRADTAPWRDTHIAVRGPAVAEIERVIQDGWLRQTGAPLGGGAVRLSVPAPGDLHVRILANEPNERDGYTVYLTLMSAFESARQSIHITMAYFVPDPAFVRVLADAARRGVDVALVLPGFSDSSLVWYAGRSHYQALLDAGVKLYERRDALLHAKTAVVDGVWSTVGSSNMDWRSFALNYELNAVIVGARFGAEMEALFERDRAAAVPIDPRNWADRGADDRFMEAFSRLFERWL

SEQ ID NO: 14354 - DNA, 1479 bp, Bordetella bronchiseptica RB50
  CDS (1)..(1479)
atgccgccgcccgtcgaccgcaccgcctcgcacgccctggatgcctcgcaggcgcgcgccacgccactgggccagggcatcggcgatctggccgacgcccatcccgggctcagcggtttccatgcgctgggcgatgcgcaggacgccttcgccgcgcgcatgctgctggcgcgcgcggccacccgcacgctggatgtgcagtactacatctggcgcaacgacatgaccggcaccctgttgctgcaggccctgcacgcggccgccgagcgcggcgtgcgggtgcggctgctgctcgacgacaacggcatctccggcctggacgacgcgctggccgcgctggacgcgcatcccaacgccgaagtgcggctgttcaatccgtttcccacgcgctcgttcaaggcgctgggctacctgacggatttctcgcgcctgaaccggcgcatgcacaacaaatcattcaccgtcgacaaccaggccaccatcatcggcgggcgcaatatcggcgacgagtacttcggcgcgaccgacggcgtgctgttcgccgacctggacgtgctggcggtggggccggtggtgggcgatgtgtccgccgagttcgacgcctactgggccagcgagtccgcctggccggccggcccgctgctgcccgcgccgggcgcgcagacactgcgcgccctggccgagcgcgccgcgcgcatcgaacaggacccggccgccggcgactacatgagcgcgctgcgcgagttgcccttcatccgcgaattgatggccggccgcctgccgctgcaatgggcgccggcccgcatggtcagcgacgatccggccaagggcctgggcaaggcgccgccggccggcctgctgacgcagcagctcaggaacatcctgggcgagccgcgccgcacgctcgacctggtgtcgccgtatttcgtgcctaccgaggccggcacgcaggcgttcgccgcgctggcccggggcggcgcgcaggtgcgcgtgctcaccaatgcgctggaagcgaccgacgtggccgtggtgcattccggctacgccaagcgccgcaaggcgctgctgcaggcgggcgtgcggctttacgaaatgcggcgcagctacgccgggcccaagccgcagggcaggggccgattcggcagctccgggtccagcctgcacgccaagaccttcggcgtcgacggcgagcgcgtcttcataggctcgttcaacttcgatccgcgctcggccaatctcaacaccgaactgggcttcgtgatcgaaagtcccgacatggcgcgccacatcgccgccacgttcgaccaggatattcccgccgccacttacgaggtgcgcctggacgacgacggcagcctgtactggctggaacagcgcgacggcgccaccgtgcggcacgacagcgagccgggcgtcagcctgtggcggcgcttcagcgtgtggctgttctcgctgctgccgctcgagccgctgctgtag

SEQ ID NO: 14355 - protein, 492 aa, Bordetella bronchiseptica RB50
MPPPVDRTASHALDASQARATPLGQGIGDLADAHPGLSGFHALGDAQDAFAARMLLARAATRTLDVQYYIWRNDMTGTLLLQALHAAAERGVRVRLLLDDNGISGLDDALAALDAHPNAEVRLFNPFPTRSFKALGYLTDFSRLNRRMHNKSFTVDNQATIIGGRNIGDEYFGATDGVLFADLDVLAVGPVVGDVSAEFDAYWASESAWPAGPLLPAPGAQTLRALAERAARIEQDPAAGDYMSALRELPFIRELMAGRLPLQWAPARMVSDDPAKGLGKAPPAGLLTQQLRNILGEPRRTLDLVSPYFVPTEAGTQAFAALARGGAQVRVLTNALEATDVAVVHSGYAKRRKALLQAGVRLYEMRRSYAGPKPQGRGRFGSSGSSLHAKTFGVDGERVFIGSFNFDPRSANLNTELGFVIESPDMARHIAATFDQDIPAATYEVRLDDDGSLYWLEQRDGATVRHDSEPGVSLWRRFSVWLFSLLPLEPLL

SEQ ID NO: 14356 - DNA, 1545 bp, Bordetella bronchiseptica RB50
  CDS (1)..(1545)
atgttgctatccttgcgcatccgtacccacataccggacccgccgctggcggccccggctgccacgcaagcctttctcccggacgccatggacccattggaacaattgctgcgcgactattggccgcatatcgtctttgcgatcagcgtggtcgccggcaccggcgccgccgtgcatgccgccatgaccaaacaggatgtgcgcgccgccatcgcctgggtcggggtcgccctgttctcgccgctctttggcgccctgctctatttcgtcgccggcatcaaccgcatccgccgctcgctggtgtcgcagcagcacgacgacgccatgctggcctacacgggccatcccgacgcccaggtcgaggacgtggtcccctgcagcggtccgcaattcgcctcgctgcgcgtgctgggcgaccaggtcagccgcttccgcctgctgggcggcaaccaggtgcggccgctggccggcggcgacgaggcctatcccgccatgatgcaggcgatacgcgaggcgcgcgtctcgatcgccatgcaaagctatatcttcgactgcgatccgatcggccgcgaaatggcgcaggccctggtcgaggcgcagcagcgcggcgtgcaggtgcgcgtgctcatcgatgccatcggcagcaagtactcccgtccgccgatcattcgtacgctggtgcgcggcggcgtgcgcaccgcgcgcttcatgaccaacccgctgggcgtcatgcgcatgccctacgcgaacctgcgcagccaccgcaagatcctggtggtcgacggacatgtcggcttcaccgggggcatgaacatccgcgccgccttcgtgacggccctggccggcaaggccgccaacggagatacccacttccgcctggaaggtccggtggtggcgcaactgatggcggttttcgcgcacgactggaatttcacgacccgcgaatccctggaaggcccgacctggttcccgccggctcccgaacgcgcgccgggctcggtgccgatgcgctgcgtggcctcggggccggacagcgccctgggcagcacgcacaagatgctgctgggcgcgctggcggtggcgcagcgccatgtgcggatccaatccccctatttcctgcctgaccagacgctgatcggcgcactggggaccgccgcacgccgcggcatcagggtcgatatcgtgattccgggctcgaacaacctgcgcctggtcaactacgccatgagcgcacaactggaccaggtcatccgcacggggtgccgcgtatggcgctcggccggcgccttcgaccactcgaagctgctgacggtggacgatgcctggtcctatgtgggctcgtccaacatggacccgcgcagcctgcgcctgaacttcgagctggacaccgaaatctacgatcgtgaactggccggctggatcgggcagcgcatcgacgcgcagatccgccacgcacggcaggaaacactgcaggccctgaacgcgcagccgttcatcaagcgcctgcgcaacaaggtgatctggctggccacgccatatctctag

SEQ ID NO: 14357 - protein, 514 aa, Bordetella bronchiseptica RB50
MLLSLRIRTHIPDPPLAAPAATQAFLPDAMDPLEQLLRDYWPHIVFAISVVAGTGAAVHAAMTKQDVRAAIAWVGVALFSPLFGALLYFVAGINRIRRSLVSQQHDDAMLAYTGHPDAQVEDVVPCSGPQFASLRVLGDQVSRFRLLGGNQVRPLAGGDEAYPAMMQAIREARVSIAMQSYIFDCDPIGREMAQALVEAQQRGVQVRVLIDAIGSKYSRPPIIRTLVRGGVRTARFMTNPLGVMRMPYANLRSHRKILVVDGHVGFTGGMNIRAAFVTALAGKAANGDTHFRLEGPVVAQLMAVFAHDWNFTTRESLEGPTWFPPAPERAPGSVPMRCVASGPDSALGSTHKMLLGALAVAQRHVRIQSPYFLPDQTLIGALGTAARRGIRVDIVIPGSNNLRLVNYAMSAQLDQVIRTGCRVWRSAGAFDHSKLLTVDDAWSYVGSSNMDPRSLRLNFELDTEIYDRELAGWIGQRIDAQIRHARQETLQALNAQPFIKRLRNKVIWLATPYL

SEQ ID NO: 14358 - DNA, 1518 bp, Chromobacterium violaceum ATCC 12472
  CDS (1)..(1518): transl_table=11
atgagcaaagacgagcagtcgcaacaaaccctgcaattcgtccgccagctggcggaacaggcgctttcgcgctccgccggcgcgccgctgatggccggaaaccgagtgcggctgctgtacgacagcgtggaaaactttcccgcctgggagaacgcgctctcagaatgccgggattccatctttatcgaaatgtatatattcgccaatgaccaatttggcttgaaaatccgtaatatccttatagaaaaagcaaaacaaggcatccaagtttgcctgttgtatgactggctgggcagctggcgcgcgcacttgtccggcttcctcaagccgctgcaggaagccggagccgaggtgcgcgcctaccatccccccagcctgggcggcgggctcacgctgttggggcgcaaccaccgcaagatgatcatcgtcgaccggcaagagctgttcgtttccgggctgtgcatcagccagagctggcaaggccagcctgaaaagggactggcgccatggcgcgacaccggcctggcgctgagcggcccgctgctggcgccggcgctggcggcctttgccgacagctgggccagttgcggcgagccgctggacgcgcgctggctggttccggccgacacgcagcccgccggcgaggccgccgcgaggttgatcgccaccacgccttccaccgcgcggatgatgcggctggatctgttggtggccagcttcgcccgccgcacgctgtggctgaccgacgcctacttcatggccaccagcctctatctgtcggcgttgaagcaggcggcgcgggacggcgtcgacgtgcgcctcctggtgccgcgctccagcgacatccgctggatcgccgccgtgtcccgcacccagtaccgcccgctgctggaagccggggtgcgggtgttcgagtggaacgggccgatgatccacgccaaaaccgctgtcgccgacggccgctgggcccgcatcggctccaccaacctcaatctgtccagctggctggtcaaccgcgaactggacatcgcgctggaggacgagggcctggccggagaactcgcggaacgcttcctgcaggacctggaacagtcgaccgagatcgtgctgcgccaggagcggcgcaagccggtgccgcggccggtcagcaagcaggaacggcggatgcgcggcacgcccaaggaaatggcgctcagcggcgccagcgcggcggcgcgccaggcgatgcgcatcggcgacgcgctgggctccgtggtgcgcggcagccgcatggtggaaagcagcgaggccccggccttcctcagcataggcgtcgccctgtgcctgctggcgctggccatcgcctactttccgtggctggcggccgcgccgttggtcgcgctgctggccgcgggcggcctggccgtggtgttcaaggcctgcgggctatatctggaaaaacggaagaaaaaacaacagtcgaggctggcggagtgcagcagcggaagcgacaagccgacgccggacgactctcaatga

SEQ ID NO: 14359 - protein, 505 aa, Chromobacterium violaceum ATCC 12472
MSKDEQSQQTLQFVRQLAEQALSRSAGAPLMAGNRVRLLYDSVENFPAWENALSECRDSIFIEMYIFANDQFGLKIRNILIEKAKQGIQVCLLYDWLGSWRAHLSGFLKPLQEAGAEVRAYHPPSLGGGLTLLGRNHRKMIIVDRQELFVSGLCISQSWQGQPEKGLAPWRDTGLALSGPLLAPALAAFADSWASCGEPLDARWLVPADTQPAGEAAARLIATTPSTARMMRLDLLVASFARRTLWLTDAYFMATSLYLSALKQAARDGVDVRLLVPRSSDIRWIAAVSRTQYRPLLEAGVRVFEWNGPMIHAKTAVADGRWARIGSTNLNLSSWLVNRELDIALEDEGLAGELAERFLQDLEQSTEIVLRQERRKPVPRPVSKQERRMRGTPKEMALSGASAAARQAMRIGDALGSVVRGSRMVESSEAPAFLSIGVALCLLALAIAYFPWLAAAPLVALLAAGGLAVVFKACGLYLEKRKKKQQSRLAECSSGSDKPTPDDSQ

SEQ ID NO: 14360 - DNA, 1422 bp, Porphyromonas gingivalis W83
  CDS (1)..(1422): transl_table=11
atgattgcactcttaataatcgtatacatgctgatgacggctgccgtcagtgctgtcattatcagcgagaatcgcaatccactgaaggctacttcgtggattctggtcgtctcttttgtacccgtcttggggcttattgtctatatctttttcggacaggatcagcgcagacggcgtattgtcagccgccgtatatacaagcgcatcatgctgaagcctcactatctgtccatccccgaagcacagttggaagccatgaacaatatccagctgaatcccatcatgaagctgatcaacaacaactcggacagccccgtcatgctcagctcgccgccggatatattcacggcagggaaggatatgttcgactgcttctttcgcgacatagaggctgcccgccaccatgtgcatattcagttctacgtcatagaggatgaccatctgggcagtcgcctgtccgatctgcttatacgcaaggtgcaagagggcgtgaaggtgagggtcatattcgatcatgtgggttcgtgggctacgggccgtggctactggaaacgactgcgccgagccggagtggaagcctatccttttatgccggtcttcttccccatactgtccagccgcgtaaactaccgcaatcaccggaaggtagccgttatagatggtaaaataggctatttgggcggtatgaatgtggccgatcgctattactcgggcaacaggctcggtctgtggcgcgatactcacttccgtatgatgggcaatgtggtggccggtttgcagagcagtttcctgctggactggtatgtcgtatcgcgacgagtcatcaatctctccggctactatcccgatctgccgatacccgtatccgacgagggtgtgaagatacagctcgtacgctccggccccgtggggcaatggcgtaccatcgagcaggccaccatctactgtatcgagcgtgcctgcgaacatgtctatatcgagactccttacttccttccgaccgaaggactgaataatgctctcatcacggcagctttggccggcatcgatgtacacctgctggtgcccaaacgaagcgatgcccgtctgccacaagtggcggccttctcctatgtggaggatctcttgcaggccggtgtacatgtacacctctataccaacggctttctccattccaagctgataatggtggatagtcaggtggcttcgatcggctctacgaatatggacttccgcagcttggaaaataacttcgaattcaatggtatcatctatgacgagcctactgtccaccgattggaagccatcttcttcgaggacttgttgcagagcgaaccgctcgatctcaaacgctggcgaaagagaagccggataaaaaaattcagcgaatcctttgttcgccttttctctcctctgctctaa

SEQ ID NO: 14361 - protein, 473 aa, Porphyromonas gingivalis W83
MIALLIIVYMLMTAAVSAVIISENRNPLKATSWILVVSFVPVLGLIVYIFFGQDQRRRRIVSRRIYKRIMLKPHYLSIPEAQLEAMNNIQLNPIMKLINNNSDSPVMLSSPPDIFTAGKDMFDCFFRDIEAARHHVHIQFYVIEDDHLGSRLSDLLIRKVQEGVKVRVIFDHVGSWATGRGYWKRLRRAGVEAYPFMPVFFPILSSRVNYRNHRKVAVIDGKIGYLGGMNVADRYYSGNRLGLWRDTHFRMMGNVVAGLQSSFLLDWYVVSRRVINLSGYYPDLPIPVSDEGVKIQLVRSGPVGQWRTIEQATIYCIERACEHVYIETPYFLPTEGLNNALITAALAGIDVHLLVPKRSDARLPQVAAFSYVEDLLQAGVHVHLYTNGFLHSKLIMVDSQVASIGSTNMDFRSLENNFEFNGIIYDEPTVHRLEAIFFEDLLQSEPLDLKRWRKRSRIKKFSESFVRLFSPLL

SEQ ID NO: 14362 - DNA, 1443 bp, Gloeobacter violaceus PCC 7421
  CDS (1)..(1443): transl_table=11
atgctcgctcaggaggcgacactttttagcctgctggtccttgctgtccatgggctggggattgccaacgccgcccatgccgtgatgcatgtgcgctcatctcggggggcagtggcctggagcattgggctgattacttttccgtggctcgccatcccgctgtactgggtctttgggcgcaaccgctttttgggctacgccgaggccatccgtaccgcctacgagcagcaccaccgccgcatcgacagagcctacgacggcctgctggagcatcgagcacagcttcctgcgcgcttggccccggtggaacaactgggcgaacaactcgccagtctgccgtttttgaccggcaacaccgcccggttgctcatcgacggccgcgaaacgtacgacgcgatgctctcggccattgccggggccgagcactatgtgttgttgcagtcgtacatcgtcgaggcggatcgctcgggtgaagtgttcaaacaggcgctcatcgagcgggtcggggccggagtgcgggtgtatgtgctctacgacgaaatcggcagcaaccacctgccccgttcctacatcgacgatttgcgccgccacggcgtcgaggtgagtgcctttcacagcaccaagggttggaagaaccggctgcagatcaactttcgcaaccacacgaagatcctggtggtggatggtcgggtcgcctgcgtgggcggactcaacatcggcgatgcatatcttggagagggcaaaaacccgcagctgcgcccctggcgagacacccatttgcgcctcaccggtcccgccgtccagtgtttgcagttgattttcctgcgcgactggtactgggcgacgggcgaatcgccgccggtcgaatggcgggtgcacgccgagcgggaagcgggggcggcggccctggtgctgcgcaccggtccggcggacagcttgcccgcctgcacgctgttttttgtggatctgatccagcaggcccgcgagcgcctgtggcttgccagtccttacttcgtgcccccggaaccggtgttgcttgccttgcaactggcggcgatgcggggagtcgatgtgcgcataatgctcccggagcatccggatcacctgctggtctatctgtgtgccttttcgttctacgacgacctggcccgcaccgacatcaagctctaccgctaccagaaaggtttcatgcaccagaaggtgatcctggtggaccgcgaaattgccggggtcggcaccgccaacctcgacaaccgctcgttcaccctcaacttcgaggtaatgaactacattgtggatcccgattttgtgaaaagcgtcgaagcgatgctgatggcggatctggacgtctgccgccaggtcgattaccgggaataccgccgcaaacctttgtggtttcgcctcgcggtgcgcatttcccgtctcctggcaccggtgctgtag

SEQ ID NO: 14363 - protein, 480 aa, Gloeobacter violaceus PCC 7421
MLAQEATLFSLLVLAVHGLGIANAAHAVMHVRSSRGAVAWSIGLITFPWLAIPLYWVFGRNRFLGYAEAIRTAYEQHHRRIDRAYDGLLEHRAQLPARLAPVEQLGEQLASLPFLTGNTARLLIDGRETYDAMLSAIAGAEHYVLLQSYIVEADRSGEVFKQALIERVGAGVRVYVLYDEIGSNHLPRSYIDDLRRHGVEVSAFHSTKGWKNRLQINFRNHTKILVVDGRVACVGGLNIGDAYLGEGKNPQLRPWRDTHLRLTGPAVQCLQLIFLRDWYWATGESPPVEWRVHAEREAGAAALVLRTGPADSLPACTLFFVDLIQQARERLWLASPYFVPPEPVLLALQLAAMRGVDVRIMLPEHPDHLLVYLCAFSFYDDLARTDIKLYRYQKGFMHQKVILVDREIAGVGTANLDNRSFTLNFEVMNYIVDPDFVKSVEAMLMADLDVCRQVDYREYRRKPLWFRLAVRISRLLAPVL

SEQ ID NO: 14364 - DNA, 1470 bp, Photorhabdus luminescens subsp. laumondii TTO1
  CDS (1)..(1470): transl_table=11
ttgccgaatatgacaaccttttattccgtcctaagttggcttgctattttcttttattggctgattgttgccagtatcactttacgcattctgataaaacgccggccggtcacttctgctatgacctggctgctgattatctatatcctacccttagttggaatcatcgcttacctgtcatttggtgagctgcatttgggaaaacgcagagttgaacaagcaaaagccatgtggccttcaacaaccgtatggcttgaagaattgcgcaaatctcgccatatcttcgcgacagaaaatagcgaagtcgcgacaccactattccagctttgcgaacgacggcaagggctggcgggtgttaaaggtaacaagatccaactactgaaaacctatgaccattcactaaaaaccattatcaaagatattgagaatgccaaacacagtattgatatggtgttttacatctggcaaaccggcggcttggttgagcaagtgacggatgctcttatggccgcagcacaccgaggagtcagatgccgtattatggtggattcagccggtagctggttatattgccgtagccaatacccggatatcatgcgccaggcgggaattgaatttgttgaagctttgcaagtcaatatattccgtctatttctacgccgtatggatctgcgccagcatcgtaaaattatcttgatagacgattatatctcttatgccggcagtatgaatatggtcgatccacgcttttttaaacaagatgccggtgttgggcaatggatcgatatcatggtacgaatggaaggaccggttactacaaccatgggggttatttacgcttgtgactgggaaatggaaacaggtcaacgtatctttccgccatcaccagataacaatatcatgccatttgaacaggccagtggacacacaactcaggttattgcatccggccccggattccctgaggagttgattcaacaatctttaatgacggctattttctctgcccgtaagcaactgattttaactaccccttattttgttcccagtgatgacctgacaaatgctatttgcaccgccgctttacgaggggttgaggttattattatcgttccacgcagaaataatttctttttagttcgttgggcaagccgggcattttttgctgaactattaaacgccggtgttaagatttatcaatttgaagatggattgctacatactaaaagcgttttagttgatggccaactcagcatggtgggttccgttaatctcgatatgcgtagcctgtggctaaatttcgaaattaccgtggtgattgatgatgaaaactttggtaatgatctgacgctggtgcaatacgattatatcgcccattctacattgctggaaactcatgagtgggaacaacgccctttgtggcatcggattattgagcgtatttgttacttctttagcccgctactgtga

SEQ ID NO: 14365 - protein, 489 aa, Photorhabdus luminescens subsp. laumondii TTO1
MPNMTTFYSVLSWLAIFFYWLIVASITLRILIKRRPVTSAMTWLLIIYILPLVGIIAYLSFGELHLGKRRVEQAKAMWPSTTVWLEELRKSRHIFATENSEVATPLFQLCERRQGLAGVKGNKIQLLKTYDHSLKTIIKDIENAKHSIDMVFYIWQTGGLVEQVTDALMAAAHRGVRCRIMVDSAGSWLYCRSQYPDIMRQAGIEFVEALQVNIFRLFLRRMDLRQHRKIILIDDYISYAGSMNMVDPRFFKQDAGVGQWIDIMVRMEGPVTTTMGVIYACDWEMETGQRIFPPSPDNNIMPFEQASGHTTQVIASGPGFPEELIQQSLMTAIFSARKQLILTTPYFVPSDDLTNAICTAALRGVEVIIIVPRRNNFFLVRWASRAFFAELLNAGVKIYQFEDGLLHTKSVLVDGQLSMVGSVNLDMRSLWLNFEITVVIDDENFGNDLTLVQYDYIAHSTLLETHEWEQRPLWHRIIERICYFFSPLL

SEQ ID NO: 14366 - DNA, 1455 bp, Vibrio vulnificus YJ016
  CDS (1)..(1455): transl_table=11
atggacaagttctaccattttctcaccctcgcagggatcggactttattgggtcctgattgctggtgtgacgttccgtgtcgtgttaaagcgtcgtgccgtgagcgtttcgctcgcatggctaatgatcatttacattctccctgtgctgggcgtcgcctgctattttctgtttggtgagctaaatctaggccgcaaacgagccgagcgtgccaaagagatgtttgccccctttgccacttggttctcgcaactgaatgactgccaagcccatgcgccagagtcgatgggacgccatatctatcgtattgacgaattgtgcaatactcggctgggcttacccgcactcagcggcaacacgctctctttgcaacgttcgcctgaagagattcttcattccgtcattcaagatatcgaaaacgcgcaaagtagtattcgtatggtgttttacatctggcatcctggaggcttagcggattctgtcgcttcagcgcttatccaagccgccaaacgaggtgtggatgtcaaactgttgctggattcagcggggagtccacgatttttccgtagccattggcatcagatgatggtgaacgcaggcattcacgtggtacaagcgctagaagtgagcccatggcgtatttttctacgtcgtctcgatttaagacaacaccgaaaaatcatcgttatcgacgatgagattgcctacacaggttcaatgaatttggtcgaccccgcctacttcaaacaaagcagcggcgttgggcaatgggtggatatcatggtgcgtttgactggtccaacggtgaacgtgctttccgccattcattgctgggattgggaagtagaaactggacatcgccaattacccagactgcctgaatgcccgttagactcgacgcaataccaaaaccccattcaagtggttccatcgggccccggcatgccggagaacttgatttctcaagtgttgattctcgccatcaaccaagcgaaccactcggtcacgattaccacgccttactttgtgccaagcatcaatctgctcgacacattaaaaatgacggcacagcgtggcattgatgtacaactgatcatcccacataaaaatgactccctcatggtgcaatgggcttctcgttccttttacagcgagcttatggaagcgggcgtgaagatcttcgaattttatggtggattgctgcacactaaatccgtcgtgatcgaccaagagttttgtctcgtcgggacggtcaacatcgacatgcgcagtttgtggctcaattttgaactcacactggcggtagatgatgagcagttcactcaacaaatgcaccaattgcaacaaaactacaaatcgcgcgctcatcctgttcatctgagcgaatggaacaaacgctcactttactcgcgctttttagagcgactctactacctctttaatcctttgctgtga

SEQ ID NO: 14367 - protein, 484 aa, Vibrio vulnificus YJ016
MDKFYHFLTLAGIGLYWVLIAGVTFRVVLKRRAVSVSLAWLMIIYILPVLGVACYFLFGELNLGRKRAERAKEMFAPFATWFSQLNDCQAHAPESMGRHIYRIDELCNTRLGLPALSGNTLSLQRSPEEILHSVIQDIENAQSSIRMVFYIWHPGGLADSVASALIQAAKRGVDVKLLLDSAGSPRFFRSHWHQMMVNAGIHVVQALEVSPWRIFLRRLDLRQHRKIIVIDDEIAYTGSMNLVDPAYFKQSSGVGQWVDIMVRLTGPTVNVLSAIHCWDWEVETGHRQLPRLPECPLDSTQYQNPIQVVPSGPGMPENLISQVLILAINQANHSVTITTPYFVPSINLLDTLKMTAQRGIDVQLIIPHKNDSLMVQWASRSFYSELMEAGVKIFEFYGGLLHTKSVVIDQEFCLVGTVNIDMRSLWLNFELTLAVDDEQFTQQMHQLQQNYKSRAHPVHLSEWNKRSLYSRFLERLYYLFNPLL

SEQ ID NO: 14368 - DNA, 1191 bp, Geobacter sulfurreducens PCA
  CDS (1)..(1191): transl_table=11
atgtccatcgttcgccgcaaaatgattatgggcactccccgcgccccccgctttctgagggtcttcaggcggaacgccgaggcagcccattcccggggaaacagggtgaaactgttcacctcgggggctgatttctttccggccatgctcggcgcctttgccgaggcgcgccaccatatccacgccgagttctatattgtgcgcgacgacgccacgggcgcggcctttgccgaagcactgctggccgccgctgcccgcggggtggaagtctcccttatctatgactacattggttgcttcgacacaccttccgcctatttccgccggctggaacagggcggagttcgctgcctcgccttcaatcctccccccttcaaggggggaatcgcttggttcgacaagcgggatcaccgcaagatggctgtggtcgacggggaaaccgcgttcacgggcggagtcaatgtcggcgacgagtattcggggttcggctttccccatgaacggtggagggatgtgggcatcaggatcgacggaccggcggtcatagatctgtcgcggctctttcgggggttctggcttgctgagaaggggagttcctcaccggcttggcatcaggagcgcctgcccgtggccgcggtcggtgatgccgacgtaatggtcatcagtgacggcccttaccatgcccgttcctttatccgcaatgccttccgtatcgccatggccggcgcgggcgagtcgatccggatcatgaatccttacttcgtgccgggaccgcgggtggttcggtctctgctgcgggccgtccggcggggcgtcagagtccagatcatacttcccgccaagaacgatgtgcccatcgtgcgtctcgtgagccgcagctactatacccccctcctgcgggagggaatcgaactcttcgagcgccaggggccggttctccacgccaaggtcatgctcattgacgacgcctggggggtcgtcggctcggcaaatctcgaccagcgcagttttcaccgcaactatgaggtgaataccatcgttgccagccacgagttcggcagccaggtggcggaaatgttcgccgaggaccttgccggatcgcgacgtgtggtccttgaggaacacgagcagcggggctggcatgtacgcttgctggagcgtctctgcggatcggtgagctggtttctgtag

SEQ ID NO: 14369 - protein, 396 aa, Geobacter sulfurreducens PCA
MSIVRRKMIMGTPRAPRFLRVFRRNAEAAHSRGNRVKLFTSGADFFPAMLGAFAEARHHIHAEFYIVRDDATGAAFAEALLAAAARGVEVSLIYDYIGCFDTPSAYFRRLEQGGVRCLAFNPPPFKGGIAWFDKRDHRKMAVVDGETAFTGGVNVGDEYSGFGFPHERWRDVGIRIDGPAVIDLSRLFRGFWLAEKGSSSPAWHQERLPVAAVGDADVMVISDGPYHARSFIRNAFRIAMAGAGESIRIMNPYFVPGPRVVRSLLRAVRRGVRVQIILPAKNDVPIVRLVSRSYYTPLLREGIELFERQGPVLHAKVMLIDDAWGVVGSANLDQRSFHRNYEVNTIVASHEFGSQVAEMFAEDLAGSRRVVLEEHEQRGWHVRLLERLCGSVSWFL

SEQ ID NO: 14370 - DNA, 1443 bp, Geobacter sulfurreducens PCA
  CDS (1)..(1443): transl_table=11
gtgatttcatacttggatgacgtatttttatttgtgtgcgcaggaatcgcgattgccctttcggtgggctctgccggtcatgcccttgtcatgaagcgagacccccggtcagcactcgggtggatcgttgtctgcctcacggtcccgctgttcggtcccattttctactggagcatgggggtaaaccgcatcttccgccgggcccgcaagtggcaggaaacagggcgccgtctggctgggggagagcacttccgctcagcccaggagcatgaaagtgcgccgactcctccggcgggggccgaatacctctccgagctgcgccatctggccgatcgggtggtgggagcccctctggtccagggaaaccgtataatccccctggatggtggcgaaggggcgtaccccgccatgctggaagccatcgcccatgcccgatcctcggtccacctttctacctatatcttcgattccgacagcaccggccgccggttcatcactacgctggccgccgccgcggcgcgtggtgtcatcgtgcgggtgatcgtcgacggcgtcggtgaaaagtattcatggccccgtgccaggactctcatggaggggacgggaatcagggttgagcggttcctgccgttgcgacaggggatctacatgaatctgcgcaaccaccgcaaagtcttggtggtggacggccagctggcatttacgggggggatgaatatcggggaccggcatgtggctgaaaaggcgggtgacgccgtgtcgcgggatgttcacttctcggtggcgggtccggtggtggcggggcttcagcaggtcttccttgaggattggcacttcgtcaccggcgaacttcttgatgacacccggtatttccctccgatccagccggccggtcatgccctggcccgtcccatcggcgacgggcccgacaaggaataccatacgctccattggatcatcatgggagccctgtcgtgcgccactcggacggttcagatcatgacaccgtacttcatccccgaccgctcacttgtttcggccctggtcactacggcgttgcggggggtggaggtcaccctcgttttgcctgagaagaacaatcttccctttgtccactgggccaccagggcctatctctgggagcttatccagcagggaatcagagtgttttaccagccgcccccttttgcccacaccaagcttttcatcgtcgacggcctctggagcatgatcggctcggccaacctggatccccgcagccttcggctcaacttcgagctcaatctggaggtttacgatcgggagttggccggaaccctttcccgtcacttcgccgtaaccgttgcccgctcgcgacaggtgagcctgaccgagatggacggccgcccactccctgaaaaagtgcgggacgccacggccaagctcttttctccctatctgtag

SEQ ID NO: 14371 - protein, 480 aa, Geobacter sulfurreducens PCA
MISYLDDVFLFVCAGIAIALSVGSAGHALVMKRDPRSALGWIVVCLTVPLFGPIFYWSMGVNRIFRRARKWQETGRRLAGGEHFRSAQEHESAPTPPAGAEYLSELRHLADRVVGAPLVQGNRIIPLDGGEGAYPAMLEAIAHARSSVHLSTYIFDSDSTGRRFITTLAAAAARGVIVRVIVDGVGEKYSWPRARTLMEGTGIRVERFLPLRQGIYMNLRNHRKVLVVDGQLAFTGGMNIGDRHVAEKAGDAVSRDVHFSVAGPVVAGLQQVFLEDWHFVTGELLDDTRYFPPIQPAGHALARPIGDGPDKEYHTLHWIIMGALSCATRTVQIMTPYFIPDRSLVSALVTTALRGVEVTLVLPEKNNLPFVHWATRAYLWELIQQGIRVFYQPPPFAHTKLFIVDGLWSMIGSANLDPRSLRLNFELNLEVYDRELAGTLSRHFAVTVARSRQVSLTEMDGRPLPEKVRDATAKLFSPYL

SEQ ID NO: 14372 - DNA, 1578 bp, Geobacter sulfurreducens PCA
  CDS (1)..(1578): transl_table=11
atggcaagcaggcagaggatcatgcccttcggcaacaccaagcagtcaccgcggggaaccgtatggcaactccagctcgccgtcgccgcgctgctggcccttgccgtcgcactgctcacgcccgggccgggcggagcgctgggcgctcccgatggcgtcacgcagggggcgtccctgtcccggagcatccagccgctcttggacgcccatcccgggaaaacgggccttcatgttctggagaagggggaggagtcgctgctggcccgggcgtggcttgccgaccacgccacggagaccattgatgtccagtatttcatctggagcactgacaatattggcatcctggcctcggaagccctgctgcgggcggcggagcgcggggtcagggtacgggtgctggtggacgatctgttgatcgacgccccccctgagtcactcctggccctggcccgtcacccgcggatcgatatccggatctacaatcccacaatgaccgtggggacctcgaaggttaagcgcctcggtaatgtggtgaccggcttccgctcggtaaatcagcggatgcacgacaaaaccgccctgttcgacggggtggtcggcatcacgggcgggcgcaatatggccgacgagtactacgattacgatcaggaatacaccttccgggaccgggacatcctgatgctggggccggcggtggccgaagcggaggccagcttcgccaggttctgggaaagcccccttgcggtaccggtggaaaagctcctgaaaaagggtatgaagaagatgacgccggagcggacggcccgggtttatgccgatctccacgcctatgccggcaagccggagaactttgcgtcggaggtgcgccaggcgctgcgtgacctgcccgacaggttcgacgggctgctgcgggagatggtgtgggacgaagcccgcttcatttccgatctgccgggcaagaacagcggccgcgatgggctcgggggcggcggccagagcactaccgccctggttgaagcggtgcgcagcgccaagcggcgggtcaccatccaatctccctatctcgtgatgccggcgggagggttggagctgttccgcgcgctggttgagcggggggtagaggtacggatcgtcaccaattccctggctgcaaccgacaaccttcaggcattcagcgggtaccgaaagcagcgggaaaaacttttacgggcagggatcaccatccgggaattccgtcccgacccggccgtgctaaaggaactgatcgaccgttacccgaagctgaagaaaaagccccccaccttcgctctccatgccaagaccctggtaatcgacggtgaaactctctacgtcggcaccttcaatctggacccgcgttccgccaacctgaacactgaggtcgggatcctggtcaccagtccgactctggcccggcgggtggaagagcggatcgagcgtgacatgctgccggaaaacagctggaatccagccacggacaaccccgaccggtacgcttcggcggccaagcgtagcaaaatgcgcttctggaagtccctgccgctggatccgattctgtga

SEQ ID NO: 14373 - protein, 525 aa, Geobacter sulfurreducens PCA
MASRQRIMPFGNTKQSPRGTVWQLQLAVAALLALAVALLTPGPGGALGAPDGVTQGASLSRSIQPLLDAHPGKTGLHVLEKGEESLLARAWLADHATETIDVQYFIWSTDNIGILASEALLRAAERGVRVRVLVDDLLIDAPPESLLALARHPRIDIRIYNPTMTVGTSKVKRLGNVVTGFRSVNQRMHDKTALFDGVVGITGGRNMADEYYDYDQEYTFRDRDILMLGPAVAEAEASFARFWESPLAVPVEKLLKKGMKKMTPERTARVYADLHAYAGKPENFASEVRQALRDLPDRFDGLLREMVWDEARFISDLPGKNSGRDGLGGGGQSTTALVEAVRSAKRRVTIQSPYLVMPAGGLELFRALVERGVEVRIVTNSLAATDNLQAFSGYRKQREKLLRAGITIREFRPDPAVLKELIDRYPKLKKKPPTFALHAKTLVIDGETLYVGTFNLDPRSANLNTEVGILVTSPTLARRVEERIERDMLPENSWNPATDNPDRYASAAKRSKMRFWKSLPLDPIL

SEQ ID NO: 14374 - DNA, 1470 bp, Lactobacillus johnsonii NCC 533
  CDS (1)..(1470): transl_table=11
ttgggagggatacttattttttcgaatgaattttgggcacttctttgggctgtcaacacaatcttagccttctatgttgtattccaccgaaaaagatctgtcgctacctcttgggcatggttaattattttactaatttttccaattttaggctttattttatatggttttattggacgtggattatcacaagaaaatctttttgccattaacaatcaaaaacacattggtttaaataaagtaaataagatgatcccgcgtgttcctaaatccgctgggccaacagatacttctaaagaagccaaaattttaattgattactttaactttaagcacgattcccccctttctaaaaacaacaaaatcagtttttatactgatggcgaaaagaagtttgaagctctttttaaagacatcgaacaagctcaagaaacagttaatgttgaatattattccttcatgaatgatgatttaggtaataaatttcttaatttattaattaaaaaagctcgcgaaggtgttaaggtaagacttatctatgatccttggggttctcctggagcttcaaagacttggtttaaacctttaactgatttgggcggtgaagttgtagcctttatcacagctcaaaacatgattaaaaagtatcggatgaattatcaccttcaccgtaaaattgtcgttatagacgggcgaatatcttggacgggcggctttaatgtcggagaccaatatgtcagcaaaagcaaaaaatttggctactggcgtgatactcatcttagaatcgtcggctccgcgtccctgctgttgcaggagcgttttgtaatggattggaatgcttcaattactgataaaaatcagacaatttcatttaatgaaaaactatttccaaaaattgaagaaaatcagctaacagaagatgatgttgcaactcaaattgtttcagatggtcctgatacttctacgccatatttacgtaatggcatgattagaatgatgatgatggctagaaaaacactctggattcaaacaccctatcttgttccagacgatccaatgattgccacttgggttattgcggctcattcaggcgttgacgtgcgtatcatgattccttcaatgcctgatcatccctttatttaccgcgctacacagtggtatgcaaattacctgctccatgagggaataaagatctatgtttatgataatggttttattcatgcaaaaaccgtcatggttgatgatcgcttcgctgcagctggatcaatgaatcaagactttaggtcatatagcttaaactttgagactgatgcagtcttctacgataaaaatattacccgggaattaaatcatatttttgaaaaagatttagctaaatgtacagaattgactttagaaattaccgataactggtcgcgttatcttcgatttaaacaagctttttctagattactttctcccattctataa

SEQ ID NO: 14375 - protein, 489 aa, Lactobacillus johnsonii NCC 533
MGGILIFSNEFWALLWAVNTILAFYVVFHRKRSVATSWAWLIILLIFPILGFILYGFIGRGLSQENLFAINNQKHIGLNKVNKMIPRVPKSAGPTDTSKEAKILIDYFNFKHDSPLSKNNKISFYTDGEKKFEALFKDIEQAQETVNVEYYSFMNDDLGNKFLNLLIKKAREGVKVRLIYDPWGSPGASKTWFKPLTDLGGEVVAFITAQNMIKKYRMNYHLHRKIVVIDGRISWTGGFNVGDQYVSKSKKFGYWRDTHLRIVGSASLLLQERFVMDWNASITDKNQTISFNEKLFPKIEENQLTEDDVATQIVSDGPDTSTPYLRNGMIRMMMMARKTLWIQTPYLVPDDPMIATWVIAAHSGVDVRIMIPSMPDHPFIYRATQWYANYLLHEGIKIYVYDNGFIHAKTVMVDDRFAAAGSMNQDFRSYSLNFETDAVFYDKNITRELNHIFEKDLAKCTELTLEITDNWSRYLRFKQAFSRLLSPIL

SEQ ID NO: 14376 - DNA, 1488 bp, Lactobacillus johnsonii NCC 533
  CDS (1)..(1488): transl_table=11
atgattttaacttgggatataattagaagaataatcgaaatcctttggttaattaatgtcggtctagcaatttggacagtttttcgtagtcatcgtgatattgcttctacttgggcatggctcttgattttgtctatcttgccttatgttggttttgttttatatttatttactggtcggcaattatcacatgatgatatcttttcaattgaaactgaacagaaaaaaattcgtgatcattttcttaatgaacaaaatagactattaagaatccatgacttgctaccaagtaaagcccagaatccacgcgcaagacgcttagtagaactgaatctaaataatgatgatgcccttttaacttttaataacgaagtcgagacttttatcgacggacaagctttatttccaaatcttataaaaaatattgatgaagcaaagagaaccattaatgtagaattttatacattttatgatgatcaattaggaaatcaggtcttacaatctttagaaaaagcagccagtcgaggcgttaaagttagagttttatatgatgcaagcggctctcgtggtacacgaccatctttttttaaagaacttcgtcaactaggtggagaagctcaacctttcatttcaacagctggaaaccgtctttttactactcctcgcgctaactatcatttacacagaaaactggtaatcatcgacaatgaaattggatatattggcggcttcaatattggtgatcaatatattgatcgaagtaagaaatttggacactggcgtgatacccaccttcgcgtagtaggacaagcagctttattaatggaaattcgctttgcaatggattggaatactagttgccgtaaatctcatcttccaaaatataatattgataacttaattgaaacatttgaattaaaaatagttcaatctaaagacttggtcccaatgcaaattgtttcatcgggaccagataatagtcactttggtattcggcgagcttatgaagaaataattgctcaagcacaaaattatgtctacattcaaactccctacttaatcccgggtgattcaatcctggaagctttaattattgcagcaaaaagtggagttgatgtacgaattatgatcccttctatgcccgatcatccctttgtctaccgagcaactgaatactacgcaaagtacctagttaatcaaggagttaaagtttataaatacgataatggatttattcatgcgaaaactatggttagcggttctaatattgcttcagtcggatcggcaaatcaagattttcgtagttatcaattaaactttgaagtaaatgcttttacatatagcgcagctctcaccaaggaattaaaagaaatttttgaagaagatttaaaagagtcaactttactcacaaaagagtactttgacaaacaatctcattggcgtaaatttaaacaatacttttcaagattattatcaccaattttataa

SEQ ID NO: 14377 - protein, 495 aa, Lactobacillus johnsonii NCC 533
MILTWDIIRRIIEILWLINVGLAIWTVFRSHRDIASTWAWLLILSILPYVGFVLYLFTGRQLSHDDIFSIETEQKKIRDHFLNEQNRLLRIHDLLPSKAQNPRARRLVELNLNNDDALLTFNNEVETFIDGQALFPNLIKNIDEAKRTINVEFYTFYDDQLGNQVLQSLEKAASRGVKVRVLYDASGSRGTRPSFFKELRQLGGEAQPFISTAGNRLFTTPRANYHLHRKLVIIDNEIGYIGGFNIGDQYIDRSKKFGHWRDTHLRVVGQAALLMEIRFAMDWNTSCRKSHLPKYNIDNLIETFELKIVQSKDLVPMQIVSSGPDNSHFGIRRAYEEIIAQAQNYVYIQTPYLIPGDSILEALIIAAKSGVDVRIMIPSMPDHPFVYRATEYYAKYLVNQGVKVYKYDNGFIHAKTMVSGSNIASVGSANQDFRSYQLNFEVNAFTYSAALTKELKEIFEEDLKESTLLTKEYFDKQSHWRKFKQYFSRLLSPIL

SEQ ID NO: 14378 - DNA, 1593 bp, Bdellovibrio bacteriovorus HD100
  CDS (1)..(1593): transl_table=11
ttgagccttcacgcaaaaccccgtatcctgctcgggacggggtttttctttgtgataaaaatactgcccattcccattttgcttggactttctgcagggtgtgcctcacttcctgcgaatacaaaccggccctactctgaagccctgcctcccgatcccaagaccccgttggctcaagccacagaaactcagatcaaaggtcatcctggtcagtccggcttctatcctctggcatcgggtctggaggccctggtggcgcgcatggcggctgtcgtcgtttctgatcgcagcatcgatctgcagtactatatctgggaaaatgatctgaccggacgaatgctgttgcatgaggtcttgcgggccgccgaccgcggtgtgcgggtgcgtgtcctgctcgatgacttaaatcagagccgctacgaaaagggccttgcgattctggattatcacccgaacgtcgaagtgcgcatggccaaccctttcgccggtcgcacttggaaaattctagatgccatgcgcttttccactgtcaatcgacgcatgcacaacaaagtctttgtcgtcgacaaccagaccgcgattgtcggcgggcgcaatatcggggatgaatacttcggtgccagtgaagagatgaattttggtgacttcgacctgtgggccatcggcccggtggtgcaggaactgtcgcgacattttgatacatactggaacagcgaaatcgcttatcccatatctgttctagttaagggattcaaacccacccttgaagacctgcaaaaactgaaagacgacgccgctgccgccatcactgaagccgaaaagacccagtatgccgacgccctcaaagaaaccccgatagtgaaaaagttcacccacgagccaatgaaactttactggggaaaagccgacgtggtgatggatccccccgagaaattccaccaggactccaaagaccaggtcgacaatctcgcacgacaactttatcccctgatagaaaagactgaaaaagagctgattctggtttcgccatacttcgttcccggcaagaagggtgtgaagttcttcaaacatttaaacgaccgaggcgttcaatcgctggttctgaccaattcactggcctccagcgatgtcgccacggtgttttccgggtacaagggctatcgcaaagacttgctggatcaaggtgtcagcctgtatgaactaaaacccaacagccccacgaccacacccaaaaagaatcgtgtcggttcaagtttttccagcgccggtctgcacggaaagatctttgttttcgaccgaaaaaaggtttttgtcggatccatgaatctggatccccgctcggccactttaaacagtgaaatgggggtcgtcgtggacagccccgagctggctgaaatgatcagcacgaatctaatcgcccatcttcgtagggacagctatcaggttttgctgaatgaaaaaaacaatctgatctggaaaaccaccgatgactgcgggctggaacatgtctttagcaaagatccggaaaccagctggtggaagagatttaaagccagcctcagcgcgattttcattcccgaatcctggttgtaa

SEQ ID NO: 14379 - protein, 530 aa, Bdellovibrio bacteriovorus HD100
MSLHAKPRILLGTGFFFVIKILPIPILLGLSAGCASLPANTNRPYSEALPPDPKTPLAQATETQIKGHPGQSGFYPLASGLEALVARMAAVVVSDRSIDLQYYIWENDLTGRMLLHEVLRAADRGVRVRVLLDDLNQSRYEKGLAILDYHPNVEVRMANPFAGRTWKILDAMRFSTVNRRMHNKVFVVDNQTAIVGGRNIGDEYFGASEEMNFGDFDLWAIGPVVQELSRHFDTYWNSEIAYPISVLVKGFKPTLEDLQKLKDDAAAAITEAEKTQYADALKETPIVKKFTHEPMKLYWGKADVVMDPPEKFHQDSKDQVDNLARQLYPLIEKTEKELILVSPYFVPGKKGVKFFKHLNDRGVQSLVLTNSLASSDVATVFSGYKGYRKDLLDQGVSLYELKPNSPTTTPKKNRVGSSFSSAGLHGKIFVFDRKKVFVGSMNLDPRSATLNSEMGVVVDSPELAEMISTNLIAHLRRDSYQVLLNEKNNLIWKTTDDCGLEHVFSKDPETSWWKRFKASLSAIFIPESWL

SEQ ID NO: 14380 - DNA, 1212 bp, Bacillus cereus ATCC 10987
  CDS (1)..(1212): transl_table=11
atgattaaaaaaatattgcgagttacttctattattgttgctattgttgtttttattttaatttgcatgcatatcgatgttaccttaggtagaaaaatggaagtcgggaaaaacatgccgacagagtatgcacctcattatagtgactttcaattatatgtagaagggaagtcattttataaacagttatttactgatataagagaggcgaagagatctatttatacgtacttttttattttgtcagatgataaaagtagccatacttttttaaacttattaaaagaaagggcaaaagaaggagtaaatgtctatttatcggttgatcgcattaatgatttatcatttgaaagaaagaagataaatgaattgcgggaaagtggtgtacattttacatatagtagaaaacctgaattaccattcgggttttattcacttcaccatcgtaatcatcgccgtattacgacgattgatggagtgattggttatacgggtggttttaatataggggatgagtacttaggaaaagataagcgatttggatattggcgtgactatcatgtgcgacttaaaggagagggcgcaaaagatttagaagaacaattcgctttagattggaaacgagatacgaaagaaaagataaaaagaagtacgaataaagcgagtaaagggaatacattacatacgatggctagttacaatggacatcacgtcgctgaaaaatatatagaattaataaaagaagcaaagcattcaattgtcattacaacaccttactttatagccaaaaataaagaagtaatgaatgctttaatggaagcacaaaaacgtggagttactgtaaaaatactttggtcatataaaccagatattcctcttattaaagaggcggcgtatccgtatattcgccaagctgttaataatggaattaaagtatatggttataaaaaagggatgtttcatggcaaattaatgcttattgataatgaactaactgttattggtacgacaaattttacttcgcgaagtttcaatataaatgatgaaatgaatttgtatattcatggtggttcaattgtaggacaagttaatgaggcgttaacggaggattttcataattcaaaagaaatgacgaaagaattttttgagaagttatcgttttgggagcgttgtaaggaaaagttggggggattggctgatttttatttctaa

SEQ ID NO: 14381 - protein, 403 aa, Bacillus cereus ATCC 10987
MIKKILRVTSIIVAIVVFILICMHIDVTLGRKMEVGKNMPTEYAPHYSDFQLYVEGKSFYKQLFTDIREAKRSIYTYFFILSDDKSSHTFLNLLKERAKEGVNVYLSVDRINDLSFERKKINELRESGVHFTYSRKPELPFGFYSLHHRNHRRITTIDGVIGYTGGFNIGDEYLGKDKRFGYWRDYHVRLKGEGAKDLEEQFALDWKRDTKEKIKRSTNKASKGNTLHTMASYNGHHVAEKYIELIKEAKHSIVITTPYFIAKNKEVMNALMEAQKRGVTVKILWSYKPDIPLIKEAAYPYIRQAVNNGIKVYGYKKGMFHGKLMLIDNELTVIGTTNFTSRSFNINDEMNLYIHGGSIVGQVNEALTEDFHNSKEMTKEFFEKLSFWERCKEKLGGLADFYF

SEQ ID NO: 14382 - DNA, 1446 bp, Desulfovibrio vulgaris subsp. vulgaris str. Hildenborough
  CDS (1)..(1446): transl_table=11
atgaccacgctgcactggatactgctgcccatctcctacgcgccatctgtggtcgctgcgctgcatgccctgctcaccaagcgcgacccgcgttcggccctcggctggattgccgtgagcctcacgttcccattggctggccccttcttctatttcatcttcggcatcaaccgcgtccatagccgtgcggcccagcttctggcagccacggagaacaggaggcgtcgtcagggtgagaggttgcatggagggccggaagaggacgacccgccgggtaccgtttcggatacctacatacccccacggtttcgcgccctggcacgtgtcggacgcatggtcaccggaagaccccttgcggggggcaataccgtgcgtccgctgtataatggcgaagacgcctatcccgccatggtcgaggccatcgacaaggccgaacacagtgtctttctcaccacgtacatcttcggtggccggcgcataggcgaacagttcgtggattccctcgccgatgcggctgaacgcggggtcgacgtccgggtcatcatcgacggtgtggggggactctattcgtggccgagggcgtggtcgcgcctgaagcgtcgcggagtgcgcgtcgagagattcctgccgccgcacctgttgccaccgcagctttccgtgaacctgcgcaaccaccgcaaggtgctggtctgcgacgggcatgtcggtttcacgggcggcatgaacgtgggtgaccatcacctcatggccaccgacaatccgcgccgtgtgcaggatgtgcatttcctgttcacgggccccatcgtggcacagttgcaggaggtcttcctgcgtgactggggtttcctcacgggagactatgccctgacggccccggttcacgatgaaccctgtggcgattcgctctgtcgtacggtgctcgaagggccgggcgaccgcgcagaacgtctgcacgacctgctatgcggcatcatctccagcgcctcgcgctcggtgcgcatcgtgaccccgtacttcctgccgtcgcgtgagatcatcagcgccctgcgggcagcggccctgcgcggggtcgatgtgcgcgtcatgctgcctgcccgcaacaaccttcccttcgtgcactgggccacacgacacctgctggaaagccttgtggacagcggggtgcgcgtcttctaccagccgccgcccttctcgcattccaagctgttgctggtcgacggctactatgcgcaggtcgggtcggccaacatcgacacgcgcagtctgcggctcaacttcgaattgacggtggaggtcttcgacaccagcgtcgtgcggcagttgaacaggcatttcgacacggtgcggcgcatgagcgaagaggttcaggccagtatgctggccagtagacccttcgccacgcgggtgcgggatgccctgttctggctcttctctccgtatctgtga

SEQ ID NO: 14383 - protein, 481 aa, Desulfovibrio vulgaris subsp. vulgaris str. Hildenborough
MTTLHWILLPISYAPSVVAALHALLTKRDPRSALGWIAVSLTFPLAGPFFYFIFGINRVHSRAAQLLAATENRRRRQGERLHGGPEEDDPPGTVSDTYIPPRFRALARVGRMVTGRPLAGGNTVRPLYNGEDAYPAMVEAIDKAEHSVFLTTYIFGGRRIGEQFVDSLADAAERGVDVRVIIDGVGGLYSWPRAWSRLKRRGVRVERFLPPHLLPPQLSVNLRNHRKVLVCDGHVGFTGGMNVGDHHLMATDNPRRVQDVHFLFTGPIVAQLQEVFLRDWGFLTGDYALTAPVHDEPCGDSLCRTVLEGPGDRAERLHDLLCGIISSASRSVRIVTPYFLPSREIISALRAAALRGVDVRVMLPARNNLPFVHWATRHLLESLVDSGVRVFYQPPPFSHSKLLLVDGYYAQVGSANIDTRSLRLNFELTVEVFDTSVVRQLNRHFDTVRRMSEEVQASMLASRPFATRVRDALFWLFSPYL

SEQ ID NO: 14384 - DNA, 1137 bp, Bacillus anthracis str. Sterne
  CDS (1)..(1137): transl_table=11
ttggatgaacatcgatgtggaaatggggaaaaaatggctagtgaatatgaattaggacaagttcgattgggtgaatttcaactgtatacgaacggtgaagaattatatacgaaattatttgaggatatacgcaatgcagaaaagtacatatatatccatttttatattgtaggtaaagacgaaataagcaaagagtttttgcagttgctcgagaaaaaggcatcaggtggagtagaagtgaaattgtcagtcgatcgaataggtggatataagctgaagaaaaagataattcgtcaactaaaaagcaatggtgtccagtttacatttagtaaaaaacctaaactgaaacatatattctactcgttgcatcaacggaaccatagacgcattgttacgatagatggaaaagtatcatacgtcggcggctttaacattggaaaggaataccttggacaaaatccgaaatttggtccgtggcgtgattatcatgtacgagtcaaggggaatggtgccacggatatggaaagaaaattctctgctgactggaaagaagatactggagaaaaaatgcctgtacatgaaagtttacctgcaatagggaatgtaaagtatcaatatttattttcagaaggaaaaggtttatgggaaaaatatggagcgcttataaagcaggctaaaacgtctttaattattgctacaccatattttgtaccaagtaaagaaatgataaaagcgttaaaagatgcattaaaccgtggtgtcaatgtaaaaattctcgtaccatttaaaagtgatgcagtattgttaaaacaagctgcctatccgtatttgaaagacatgttacatgctggagcagagatttatcaatatcagaatggtttttttcatgggaaagtaacaatcattgatggggaaagtgttgatattggtaccgcaaactttgataatagaagtttttatttaaatatggaatccaattgtgttatctatgataagggagtaacagcggacgtatggagtcgattaaaagaagactttcataaatcaaaaagattttcggaagaagattttgagaaaattagtaaatgggattggtttttagcaagaatagcaaatgttatagcatcatatttatag

SEQ ID NO: 14385 - protein, 378 aa, Bacillus anthracis str. Sterne
MDEHRCGNGEKMASEYELGQVRLGEFQLYTNGEELYTKLFEDIRNAEKYIYIHFYIVGKDEISKEFLQLLEKKASGGVEVKLSVDRIGGYKLKKKIIRQLKSNGVQFTFSKKPKLKHIFYSLHQRNHRRIVTIDGKVSYVGGFNIGKEYLGQNPKFGPWRDYHVRVKGNGATDMERKFSADWKEDTGEKMPVHESLPAIGNVKYQYLFSEGKGLWEKYGALIKQAKTSLIIATPYFVPSKEMIKALKDALNRGVNVKILVPFKSDAVLLKQAAYPYLKDMLHAGAEIYQYQNGFFHGKVTIIDGESVDIGTANFDNRSFYLNMESNCVIYDKGVTADVWSRLKEDFHKSKRFSEEDFEKISKWDWFLARIANVIASYL

SEQ ID NO: 14386 - DNA, 1572 bp, Bartonella quintana str. Toulouse
  CDS (1)..(1572): transl_table=11
ttgactctgctacagattgttatcagttttatcatatttttttttattgcgtctatgttagcgatctatacatatggacgttttgttaaaaatgctcggggggagtgttcttatgcattgactgttaagaaagatgaaaccaagcttgaccgtataataagtcaattggcggaggaaacggatggattgggggttgataaagatgctctttcactcatcattagcaatttggatgcattttgtgttcgtgcgataggagcagcacaggctgggcgtagtcttgatctaatgtattatatttggaatgatgacttaacagggcgcttattattaagtgaaatagtggaggcagctgatcgtggtgttcgggtgcgccttcttttagatgatattaatgctcaggcacgtgatccagcttatattgcgctggataaacatcctcgtattgaggtgagaatgtttaatccagggcgatcacgtaagggtggtttacgccgtggtttagagattatattacgggcaattactgtaacacgcagaatgcataataaagcttttattgtggatggccgagtggcttttgtaggaggacgcaatcttgcagattcttattttgacgctggtgaagaatcacattttcgagatttagatttgatgttaattggtccatcggttaaaaaggtggaaaccatctttgatgacttttggaatagcgctgtagttttaccaattcatactttggttgttcctaaaagtacaagcgaccttggttattggaaggagaaattacgaaaatttcgtgattccaaggttgcaaaggtttatctggattatgttaaggagcatattaattttgactgttttattcaaacaggaaagcgattatttttagcagataaagttgttgttctttctgatcctccggagaaagcattgcgcaaaaaagctggaaattggcttatgaaagcactttcacaggttattggagatgcccaaaaaactgttcaaattacatcaccttattttgttcctggtaaggtcggtacgcagagttttagaaatttagtttcaaaaggtgttgatgttaaaattcttacaaattccttagcggctaccgatgtggcactcgtgcatggtggttatgtaccatatcgtaaagcgcttttgaaaagtggtgttaagctctatgagttaaagccggatggaaacatgcatgggttgcgattgtttcgatcaagtaaggccattttacatactaaagcttttttggttgatcgtaaaactgcttttattggatctttaaattttgatcctcggtcagctgcgttgaatacggaaatgggcattctttttgaatgtgcaccgattacagcgaggttagatttgcttttttctgaagaaacgaccggtgaaatgagttataatctccgtcttgataataacaaccgcatttattgggattttattgaaaacgaaaagcaatacagcattgattatgagccagaaagcaacttttggcgtcgtgcctttacaagaataataagttggttgcccattgaatcacaattgtag

SEQ ID NO: 14387 - protein, 523 aa, Bartonella quintana str. Toulouse
MTLLQIVISFIIFFFIASMLAIYTYGRFVKNARGECSYALTVKKDETKLDRIISQLAEETDGLGVDKDALSLIISNLDAFCVRAIGAAQAGRSLDLMYYIWNDDLTGRLLLSEIVEAADRGVRVRLLLDDINAQARDPAYIALDKHPRIEVRMFNPGRSRKGGLRRGLEIILRAITVTRRMHNKAFIVDGRVAFVGGRNLADSYFDAGEESHFRDLDLMLIGPSVKKVETIFDDFWNSAVVLPIHTLVVPKSTSDLGYWKEKLRKFRDSKVAKVYLDYVKEHINFDCFIQTGKRLFLADKVVVLSDPPEKALRKKAGNWLMKALSQVIGDAQKTVQITSPYFVPGKVGTQSFRNLVSKGVDVKILTNSLAATDVALVHGGYVPYRKALLKSGVKLYELKPDGNMHGLRLFRSSKAILHTKAFLVDRKTAFIGSLNFDPRSAALNTEMGILFECAPITARLDLLFSEETTGEMSYNLRLDNNNRIYWDFIENEKQYSIDYEPESNFWRRAFTRIISWLPIESQL

SEQ ID NO: 14388 - DNA, 1572 bp, Bartonella henselae str. Houston-1
  CDS (1)..(1572): transl_table=11
ttgactctgttacagattgttatcagttttatcatatttttttttattgcgtctatgttagcgatttacacttatgggcgttttgttaaaaatgctcggggggagcattcttatgcgctgactgttaagaaagatgaaaccaagcttgaccgtataataagtcaattagcggagaaaaccgatgggttaggggttgataaagatgctctttcgcttatcatcagcaacttggatgcgttttgtgttcgtgcggtaggagcagcaaaggctgggcgtagtcttgatctcatgtattatatttgggacgatgatttaacaggacgcttattattaagtgaaatagtggaggctgctgatcggggtgttcgtgtgcgccttcttttagatgatattaacgctcaggcacgtgatccagcttatatggcgctagataaacatccccatattgaagtaagaatgtttaatccagggcgatcacgtaagggtggtgtacgccgtggtttagagattatattgcgggcaattactgtaacacgcagaatgcataataaggcttttattgtggatggtcgtatggcttttgtagggggacgtaatcttgcagactcttattttgacgctggtaaagaatcacattttcgagacttagatttgatgttaataggtccttcggttaaaaaggtggaaaacatctttgatgatttttggaatagcgctgtcgttttaccgattcacactttagttgttcctaaaagtgtaaatgatcttgctttttggagggaaaaattacgacaatttcgtgattccaaagctgcaaaagtttatttagattatgtcaagaagcatattagttttgactgttttattcagacaggaaagcgattatttttagcagataaagttgttgttctttctgatcctccggaaaaagtattgcgcaaaaaagcagaaaattggctcatgaaagcactctcacaggttattgaagacgcccaaaaaacggttcagattacatcaccttattttgttcctggtaaggtaggtacgcagaattttagcaatttggtttcaaaaggtgttgatgtcaaaattcttacgaattctttagcagccactgatgtggcactcgtgcatggtggttatgtaccttatcgtaagatgttattgaaaagtggtgttaagctctatgagttaaaaccaggtggaaatatgcacgggttgcgactgtttcgatcaagtaaggctagtttacataccaaagcttttttagttgatcgtaaaactgcttttattggatctttaaactttgatcctcgatcagctgcgttgaatacagaaatgggtattctttttgaatgtgcccccattacaacgcgattagatttgctttttgctgaagaaacgacgggtgaaatgagttatcatctccgtcttaatgacaacaaccgcatttattgggattttattgaaaacgaaaaacagtatagcgttaattatgagccagaaagcaatttttggcgtcgtgcgtttgcaaaaataataagttggttaccgattgaatcacaattgtaa

SEQ ID NO: 14389 - protein, 523 aa, Bartonella henselae str. Houston-1
MTLLQIVISFIIFFFIASMLAIYTYGRFVKNARGEHSYALTVKKDETKLDRIISQLAEKTDGLGVDKDALSLIISNLDAFCVRAVGAAKAGRSLDLMYYIWDDDLTGRLLLSEIVEAADRGVRVRLLLDDINAQARDPAYMALDKHPHIEVRMFNPGRSRKGGVRRGLEIILRAITVTRRMHNKAFIVDGRMAFVGGRNLADSYFDAGKESHFRDLDLMLIGPSVKKVENIFDDFWNSAVVLPIHTLVVPKSVNDLAFWREKLRQFRDSKAAKVYLDYVKKHISFDCFIQTGKRLFLADKVVVLSDPPEKVLRKKAENWLMKALSQVIEDAQKTVQITSPYFVPGKVGTQNFSNLVSKGVDVKILTNSLAATDVALVHGGYVPYRKMLLKSGVKLYELKPGGNMHGLRLFRSSKASLHTKAFLVDRKTAFIGSLNFDPRSAALNTEMGILFECAPITTRLDLLFAEETTGEMSYHLRLNDNNRIYWDFIENEKQYSVNYEPESNFWRRAFAKIISWLPIESQL

SEQ ID NO: 14390 - DNA, 1530 bp, Bacillus thuringiensis serovar konkukian str. 97-27
  CDS (1)..(1530): transl_table=11
atgaagaaacctatcatccaattactattaatatttacaattgtatctatcgttcttttcctattaaatacatcttatatttcgttatatacatttgtcggcgttctctggtccatcacaattgtaggaatttcattcgttatttttatcgaaaatagatctcctcaaagtaccttagcctggtttttagtattagcacttcttcccgttataggtgtgcttttatactctattttcgggcgtagccgttggagaagaaaaaagcatctccatcgttcagaagagcaaagaaagttattccgtgaaatattagaaggaagacgactagagttatcactcaaagtcccattaagtgaacgctctgtccatttaacagaagtcgtacaaaaatttggaggcggccctgcagcagatagaacgactaccaaacttttaacaaacggagatcaaacattctcagaaattttgcaagcgatcgagcaagcaaaacatcacatacatattcaatactatatttataaatctgatgagattggtacaaaagttcgggatgcgttaatcaaaaaggcaaaagatggtgttattgtacgcttcctttatgatggactcggaagtaatacgttgagaagacggtttttacaacctatgaaagaagctggaattgaaattgttgaatttgatcctattttttcagcttggttacttgaaaccgtcaattatcgtaaccaccgtaaaatcgtcattgtagatggagaaatcggttttactggtggactcaacgtcggtgatgaatatcttggtcgttcaaaaaaatttcccgtttggcgtgacagtcatttaaaagtagaaggaaaagcgctatataaattacaagcaatctttctagaggattggctctatgcatctagtggattgaatacttattcttgggatccatttatgaatagacaatacttccctggtaaagaaatttcaaatgcagaaggtgctgtgcaaattgtagcgagcggaccaagctcagatgataaaagcattcgcaatacattattagctgttatgggctcggcaaaaaaatctatttggattgctacaccatactttattccagatcaagaaactttaacattactacgtttaagtgcaatatctggcatagatgtacgcattttatatcctggtaaaagtgatagtattattagtgaccaagcatctcagtcctacttcactccacttttaaaagctggtgcctccatttatagttataaagatggctttatgcatgcaaaaattgtacttgttgatgataaaatcgcaacaatcggaacagcaaatatggacgtacgcagctttgaattgaattacgaaattattagcgtactgtatgaatcagaaactgttcatgatattaaacgtgattttgaagatgactttaagcattctactgaaattaaatggaacgctttccaaaagagaagtatcaaaaaacgaatattagaatcttttatgaggctcatttctcctttactataa

SEQ ID NO: 14391 - protein, 509 aa, Bacillus thuringiensis serovar konkukian str. 97-27
MKKPIIQLLLIFTIVSIVLFLLNTSYISLYTFVGVLWSITIVGISFVIFIENRSPQSTLAWFLVLALLPVIGVLLYSIFGRSRWRRKKHLHRSEEQRKLFREILEGRRLELSLKVPLSERSVHLTEVVQKFGGGPAADRTTTKLLTNGDQTFSEILQAIEQAKHHIHIQYYIYKSDEIGTKVRDALIKKAKDGVIVRFLYDGLGSNTLRRRFLQPMKEAGIEIVEFDPIFSAWLLETVNYRNHRKIVIVDGEIGFTGGLNVGDEYLGRSKKFPVWRDSHLKVEGKALYKLQAIFLEDWLYASSGLNTYSWDPFMNRQYFPGKEISNAEGAVQIVASGPSSDDKSIRNTLLAVMGSAKKSIWIATPYFIPDQETLTLLRLSAISGIDVRILYPGKSDSIISDQASQSYFTPLLKAGASIYSYKDGFMHAKIVLVDDKIATIGTANMDVRSFELNYEIISVLYESETVHDIKRDFEDDFKHSTEIKWNAFQKRSIKKRILESFMRLISPLL

SEQ ID NO: 14392 - DNA, 1218 bp, Bacillus thuringiensis serovar konkukian str. 97-27
  CDS (1)..(1218): transl_table=11
atgaacatgattaaaaaaatattgcgagttacttctattattattgctattttcgcttttattttaatttgtatgcatattgatgttactttaggtaggaaaatggaagctgggaaaaacatgccgacagagtatgcacctcattatagtgattttcaattatatgtagaaggaaagtcattttataaacagttatttactgatataaaagaagcgaaacaatctatttacacttatttttttattttatcggatgataaaagtagtcatatttttttaaacttattaaaagaaaaggcaagagaaggagtaaacgtatatttatctgtcgatttacttaacgatttatcatttgaaagaaagatgaaaaaagaattacaggaaaatggtgtacattttacatatagtagaaaacaggaattaccattcgggttttattcacttcaccatcgtaatcatcgccgcattacaacgattgatggagagattggttatacgggtggttttaatataggggatgaatacttagggaaagataaacactttgggtactggagagactatcatgtacggataaaaggtgaaggtgcaaaagacttagaggaacaatttgctttagattggaaacgagatacgaaagaagatataaagaggagtacgaataaggctagcaaagggaatacactacatactatggttagttataatgggcatcacgtcgctgaaaaatatatagatcttataaaacaagctcagcactcaattgtaattgcaacgccgtattttatagcgaaaaataaagaatccatgaatgctttaatcgcagcacaaaagcgtggtgttacagtaaaaatactttggtcatataaaccagatctacctcttataaaagaagcggcgtatccatacatacgtcaagctattaataatgggattactgtatatgggtataaaaaaggaatgttccatggcaaattcatgcttattgataatgaattaaccgttattggcacaacaaactttacttcgcgtagcttcaatataaatgatgaaatgaatttttatattcatggtggtcctattgtagggcaagttaataaggccttaacagaggattttcgtgactcaaaagaaatgacgaaagaattttttgagaagttatctttttgggagcgttgtaaggaaaagttggcagggttgatggatttttatttgtga

SEQ ID NO: 14393 - protein, 405 aa, Bacillus thuringiensis serovar konkukian str. 97-27
MNMIKKILRVTSIIIAIFAFILICMHIDVTLGRKMEAGKNMPTEYAPHYSDFQLYVEGKSFYKQLFTDIKEAKQSIYTYFFILSDDKSSHIFLNLLKEKAREGVNVYLSVDLLNDLSFERKMKKELQENGVHFTYSRKQELPFGFYSLHHRNHRRITTIDGEIGYTGGFNIGDEYLGKDKHFGYWRDYHVRIKGEGAKDLEEQFALDWKRDTKEDIKRSTNKASKGNTLHTMVSYNGHHVAEKYIDLIKQAQHSIVIATPYFIAKNKESMNALIAAQKRGVTVKILWSYKPDLPLIKEAAYPYIRQAINNGITVYGYKKGMFHGKFMLIDNELTVIGTTNFTSRSFNINDEMNFYIHGGPIVGQVNKALTEDFRDSKEMTKEFFEKLSFWERCKEKLAGLMDFYL

SEQ ID NO: 14394 - DNA, 1134 bp, Bacillus thuringiensis serovar konkukian str. 97-27
  CDS (1)..(1134): transl_table=11
atgaacatcgatgtggaaatggggaaaaaaatggctagtgaatatgaattaggacaagttcgattgggtgaatttcaactgtatacgaacggtgaagaattatatacgaaattatttgaggatatacgcaatgcagaaaagtacatatatatccatttttatattgtaggtaaagacgaaataagcaaagagtttttgcagttgctcgagaaaaaggcatctagcggagtagaagtgaaattgtcagtcgatcgaataggtggatataagctgaagaaaaagataattcgtcaactaaaaagcaatggtgtccagtttacatttagtaaaaaacctaaactgaaacatatattctactcgttgcatcaacggaaccatagacgcattgttacgatagatggaaaagtatcatacgtcggcggctttaacattggaaaggaataccttggacaaaatccgaaatttggtccgtggcgtgattatcatgtacgagtcaaggggaatggtgccacggatatggaaagaaaattctctgctgactggaaagaagatacgggagaaaaaatgcctgtacatgaaagtttacctgcaatagggaatgtaaagtatcaatatttattttcagatggaaaaggtttatgggaaaaatatggagcgcttataaagcaggctaaaacgtctttaattattgctacaccgtattttgtaccaagtaaagaaatgataaaagcgttaaaagatgcattaaaccgcggtgtcaatgtgaaaattctcgtaccatttaaaagtgatgcagtattgttaaaacaagctgcctatccgtatttgaaagacatgttacatgctggagcagagatttatcaatatcagaatggtttttttcatggaaaagtaacaatcattgatggggaaattgttgatattggtaccgcaaactttgataatagaagtttttatttaaatatggaatccaattgtattatctatgataagggagtaacagcggacgtatggagtcgattaaaagaagactttcataaatcaaaaagattttcggaagaagattttgagaaaattagtaaatgggattggtttttagcaagaatagcaaatgttatagcatcatatttatag

SEQ ID NO: 14395 - protein, 377 aa, Bacillus thuringiensis serovar konkukian str. 97-27
MNIDVEMGKKMASEYELGQVRLGEFQLYTNGEELYTKLFEDIRNAEKYIYIHFYIVGKDEISKEFLQLLEKKASSGVEVKLSVDRIGGYKLKKKIIRQLKSNGVQFTFSKKPKLKHIFYSLHQRNHRRIVTIDGKVSYVGGFNIGKEYLGQNPKFGPWRDYHVRVKGNGATDMERKFSADWKEDTGEKMPVHESLPAIGNVKYQYLFSDGKGLWEKYGALIKQAKTSLIIATPYFVPSKEMIKALKDALNRGVNVKILVPFKSDAVLLKQAAYPYLKDMLHAGAEIYQYQNGFFHGKVTIIDGEIVDIGTANFDNRSFYLNMESNCIIYDKGVTADVWSRLKEDFHKSKRFSEEDFEKISKWDWFLARIANVIASYL

SEQ ID NO: 14396 - DNA, 1482 bp, Staphylococcus aureus subsp. aureus MSSA476
  CDS (1)..(1482): transl_table=11
atgcgatatacattttcaaatgatttaggaacactttttaccattattttagccattggattcatcattaatttagtattggcttttattattatctttttagaaagaaatagacgtacagcgagttcaacttgggcatggctatttgtactttttgtcttaccattgattggttttattctttacttgttttttggtagaaccgtttcggcacgtaaattgaataaaaacaatggtaaggtgttaacggatttcgatggacttttaaaacaacaaatagaaagctttgataaaggtaattatggtactgataacaaacaagttcaaaaacatcatgatttagtacgtatgcttttgatggatcaagatggttttttaactgaaaataataaagttgatcatttcattgatggaaatgatttatatgatcaagttttacaagatattaaaaatgctaaagaatacatccatttagagtattatacattcgctctagatggcttgggccaaagaattttaaaagcgttagaagagaaattgaaacaaggtctagaagtgaaaattttatatgatgacgttggttcaaagaaagttaagatggctaattttgatcattttaaatcgttaggtggagaagttgaagcattttttgcttctaaattaccgttattgaatttcagaatgaataacagaaatcatagaaaaatcatcgtaatcgatggtcaactaggttatgtcggaggatttaacattggtgatgaatatctaggattaggtaaactagggtattggagagatacgcatttacgtatacaaggggatgcggttgatgcactgcagttgcgatttattttagactggaattcgcaagcgcaccgtccacagtttgaatatgatgttaagtatttccctaaaaagaacggaccattgggcaattcaccaattcaaatagctgcaagtggtccggctagtgactggcatcaaattgaatatggttatacaaaaatgattatgagcgctaagaagtcggtatatttgcaatcgccttatttcattccggataactcatatataaatgccattaaaattgcagctaaatcaggggtagatgttcatctaatgattccatgtaagccagatcatcctttagtttattgggcgacatattcaaatgcttcagatttactatctagtggcgtaaaaatttacacgtatgaaaatggatttatacattctaaaatgtgtttaatagatgatgaaatggtttcagtcggaactgctaatatggactttagaagttttgaattgaatttcgaagtcaatgcttttgtatatgatgaaaagcttgctaaagatttaagggtggcttatgaacatgatattacaaaatcaaaacaactaaccaaagaatcatatgccaatagaccgctgtctgttaagtttaaagaatcgttagctaaattagtttcgccaattttataa

SEQ ID NO: 14397 - protein, 493 aa, Staphylococcus aureus subsp. aureus MSSA476
MRYTFSNDLGTLFTIILAIGFIINLVLAFIIIFLERNRRTASSTWAWLFVLFVLPLIGFILYLFFGRTVSARKLNKNNGKVLTDFDGLLKQQIESFDKGNYGTDNKQVQKHHDLVRMLLMDQDGFLTENNKVDHFIDGNDLYDQVLQDIKNAKEYIHLEYYTFALDGLGQRILKALEEKLKQGLEVKILYDDVGSKKVKMANFDHFKSLGGEVEAFFASKLPLLNFRMNNRNHRKIIVIDGQLGYVGGFNIGDEYLGLGKLGYWRDTHLRIQGDAVDALQLRFILDWNSQAHRPQFEYDVKYFPKKNGPLGNSPIQIAASGPASDWHQIEYGYTKMIMSAKKSVYLQSPYFIPDNSYINAIKIAAKSGVDVHLMIPCKPDHPLVYWATYSNASDLLSSGVKIYTYENGFIHSKMCLIDDEMVSVGTANMDFRSFELNFEVNAFVYDEKLAKDLRVAYEHDITKSKQLTKESYANRPLSVKFKESLAKLVSPIL

SEQ ID NO: 14398 - DNA, 1563 bp, Acinetobacter sp. ADP1
  CDS (1)..(1563): transl_table=11
atgaacttaaaaaataatttatctcatacattaaaaatatattttagctttatcgtcttttgtctcatatgttggacacctttaaaaacttttgcatctcagggtgagaaaattttgataaatagccaatggttaaatgatccacacactgacgaaaatcttcaaaagggtttgactgcctacattcctcttgatgatgcatttattagtattgcttctcgtatttatctgattaggcatgcaaaacatcaaattgatttacaatactatatttggcataacgatttcgttggtcagttaatattaaacgaattattgaaagcagctgatcgtggcgtcaaaattcgcctattaattgacgatcagaacggaacgcgactcgattctaccttccaagcactgttacaacatcctctttttgaaattaaggtatttaacccttataaatttcgtaagcttagatttgtagattttttatttcgtcccaatcaaatcaatcaccgcatgcataacaaattgattattgcggacaacacaattgcggtgactggaggacgcaatatcagcagtgaatactttgatgccagctatcaattccagtttacagatctcgatattttgttttatggtacagccgcatctcaggcagagaaagtctttcaaactttctgggatagtccactcagtgtcactacacaaaaactcatcacgaaaggtcagccaaatgatctacttcaattgcgatctaaatataaggaaatcgaacgtgttgatacgcctacggaagataaaatcaatgaagctcaaattgaactgaatgaagctttaaaacaacgttattcggtaaaatgggctaaggcgcattttgtggcagattctcctaaaaaaatacacgggcatgctataggcaatgaacttatctataatcagatgtttagtattatgggacatccccaaaaacatctggaacttgtatcagcttactttgttcccactcaggctggtacacaatacttaagcaatttaagccaacaagacgttaagataagggttttaaccaattcttttgctgcaaatgatgtcgctattgtgcatgccttttatagtcaatatcgaaaagagcttatcaagaacggcattcaactctacgaattcaaacctatcattgatcgaaaagaacctacttggtatgaaaaaatgacaggtcgtgtgattcctgccaaaggtaagaaaagctcgagcctgcatgcaaagttttttgatgtagatggaaaagtctttattggttcttttaatttcgatccacgttctgcatatctgaataccgaagtgggattggtggttgaatctgaagatcttcaaaacgaaattaccaaagttcttgatgaatacttgcctacgattgcataccaattaaaactcgacaaaaatggcaatctcgtatggttagatcacaatgcagatggccaaaccatcgaatatcatcatgatccagaaaccaccagatttcagcgttttatgatgaaagctgtgtcatatttacccattgaatggatgatgtag

SEQ ID NO: 14399 - protein, 520 aa, Acinetobacter sp. ADP1
MNLKNNLSHTLKIYFSFIVFCLICWTPLKTFASQGEKILINSQWLNDPHTDENLQKGLTAYIPLDDAFISIASRIYLIRHAKHQIDLQYYIWHNDFVGQLILNELLKAADRGVKIRLLIDDQNGTRLDSTFQALLQHPLFEIKVFNPYKFRKLRFVDFLFRPNQINHRMHNKLIIADNTIAVTGGRNISSEYFDASYQFQFTDLDILFYGTAASQAEKVFQTFWDSPLSVTTQKLITKGQPNDLLQLRSKYKEIERVDTPTEDKINEAQIELNEALKQRYSVKWAKAHFVADSPKKIHGHAIGNELIYNQMFSIMGHPQKHLELVSAYFVPTQAGTQYLSNLSQQDVKIRVLTNSFAANDVAIVHAFYSQYRKELIKNGIQLYEFKPIIDRKEPTWYEKMTGRVIPAKGKKSSSLHAKFFDVDGKVFIGSFNFDPRSAYLNTEVGLVVESEDLQNEITKVLDEYLPTIAYQLKLDKNGNLVWLDHNADGQTIEYHHDPETTRFQRFMMKAVSYLPIEWMM

SEQ ID NO: 14400 - DNA, 1560 bp, Acinetobacter sp. ADP1
  CDS (1)..(1560): transl_table=11
atgctgacattgagtctagtcaccgtggtgggaatcaatggatgcagtacccttccaaaacatggtccagaagtaactcaatatgcgtatgatattgatacatcacagacctcactcgcacaaatcattacgccattaaaacaacaaaatctaggcttaactggataccatatgctgtatgaaccccttgaagcgctggctgctcgcctcagattaatcgataaggcagaaaaaaccctcgatctacaatattacatctgggataacgataaaattggcgcgttagcattacatgccctgatccgtgccgcagatcgtggggtaaaagtccgtctcttgatcgatgacaacaacgccaaacagatcgaaggtgtcttactcgccttgtcccagcatcagaatattgaagtcaaactgtttaatccttatcgcttccgtaaataccgtgcaatggacatgattctggatttaaaacgtatcaatcggcgtatgcataacaaaagctttattgcagacaatcaggttgcgctcattggcgggcgcaacatgaccaatcagtactacaatgttagtgataattatcagttttcagacgttgatgttttactggttggggctgctgtcgatgatatcgtcaaatcatttgatgactactggaacgatgaatatgcctattcggttcaaaacatcgtcaaccccgaacagcatcgcttacgttatcaaagtctaaagcaacagcttgatgattattatcaggaagtgaccgtacaaaattatctggatctgaccacacgctcacatgcttttgatcaatggctcaataacaatatccagcttgattgggtcaaagcgacagtggtcaaagacgctcccgataaaattcgtgccaaagccaacaaagaacaacatctcaattttcagctcatcaaacatcttgaaaagccagaagataacgtcgatctcatctctgcctattttgttccagaaaaacagggggccaaacatttgagtgatatggcacaggatggcattaaagtacgtgttctgaccaactcctttaaagccaacgatgtccctgtggtccatgcgttttatgccaaatatcgtcaggaacttctggaaaatggcgtgcaactttatgagtttttacccacacttgaaaaagaagaactggacaaatataccgatgaactggttaaaaaagccaaggtcagtattaaagggcttagccgctctagtttacatgccaagatgatggcattagatcagaaacaagtgtttattggatcctttaactttgacccacgttcggcctatctcaataccgaaataggcgtcatcctgaatagtccaccattagcgatggccgtacatcagacgatggatcaacaactgacccactatgcttataaattggtactagatgccaatcacaaaattaattggtatcggcagacatccactggtaccaaaatctataccaaagaaccccgcatgaaatggtggcaaaaagctggaattaagttgatttcatggctgcctattgaaggtttcatgtaa

SEQ ID NO: 14401 - protein, 519 aa, Acinetobacter sp. ADP1
MLTLSLVTVVGINGCSTLPKHGPEVTQYAYDIDTSQTSLAQIITPLKQQNLGLTGYHMLYEPLEALAARLRLIDKAEKTLDLQYYIWDNDKIGALALHALIRAADRGVKVRLLIDDNNAKQIEGVLLALSQHQNIEVKLFNPYRFRKYRAMDMILDLKRINRRMHNKSFIADNQVALIGGRNMTNQYYNVSDNYQFSDVDVLLVGAAVDDIVKSFDDYWNDEYAYSVQNIVNPEQHRLRYQSLKQQLDDYYQEVTVQNYLDLTTRSHAFDQWLNNNIQLDWVKATVVKDAPDKIRAKANKEQHLNFQLIKHLEKPEDNVDLISAYFVPEKQGAKHLSDMAQDGIKVRVLTNSFKANDVPVVHAFYAKYRQELLENGVQLYEFLPTLEKEELDKYTDELVKKAKVSIKGLSRSSLHAKMMALDQKQVFIGSFNFDPRSAYLNTEIGVILNSPPLAMAVHQTMDQQLTHYAYKLVLDANHKINWYRQTSTGTKIYTKEPRMKWWQKAGIKLISWLPIEGFM

SEQ ID NO: 14402 - DNA, 1461 bp, Erwinia carotovora subsp. atroseptica SCRI1043
  CDS (1)..(1461)
atgtcgacattttataccgtaataagttggttactggtttttagctactggttgctgatcgcaggtgtgaccttgcgtattctgatgaaacgtcgggcagtgccttcagcgatggcctggctactggtgatttatattctgccacttgtcggtattgtcgcttatctttcatttggcgaactccatctcggtaaacgtcgggctgaacgcgcgagcaaaatgtggccatcaacggcaaaatggctgcgcgaattaaaggaatatcgccgtattttcgcgacggaaaacagtgaagtcgccagcgcactatttcagctctgtgaacgccgacaaggggttggcggcgtcaaaggcaaccagttgcaattgatgaccacatttgatgacaccattaaggcgttattacgtgatattgaactcgcgcgtaataacatcgaaatggtgttctatatctggcaacccggtggtctggtcgagcaagtcacgtcttcccttatctcggccgcacgacgcggcgtacattgccgcatcctgctggactcggccggcagcgttcaatttttccgccaacatcatcccgaactgatgcgcaccgctggaatagaagtggtcgaagcgctgaaagtgaatctgttccgtgctttcctgcgccgcatggatttacgacagcaccgtaaaattattctgatcgacagccgcattgcttataccggcagcatgaatatggtcgatccacgtctcttcaagcaggatgctggcgttgggcaatggattgacctcatggcgcgtattgaaggcccggtagcgactaccctgggcatcatttactgctgtgactgggagatggaaacgggcaaacgcctgctcccgccgccgcctgatgttaacgtcatgccgttcgaacaggagagcggccacaccattcaggttatagcttccggccctggttacccggaagaaatgattcatcaggcgctgctgacgtccgtctattcggcgcgtaagcaattgatcatgacgaccccctacttcgtgcccagcgacgatctgctgcatgccatctgcaccgccgcccagcgcggggtcgatgtcagcattattgttccgcacaagaacgactccgtactggtcggctgggccagccgtgcgttcttcacggaactgctggccgcaggcgtaaaaatttaccaattcaaagacggactgctgcacaccaaaagtgtgctggtcgacggacagctcagcttggtcggcacggtgaatctcgatatgcgcagcctgtggctgaattttgaaattacgctggtgattgacgatgctggattcggcagcgacttagcctgcgtgcaggaagactatatcgcccgctcacgcctgttaaacgcgacgcagtggcaaaaccgtccttattggcaacgcattgtcgagcggctgttctactttttcagccccctgctatga

SEQ ID NO: 14403 - protein, 486 aa, Erwinia carotovora subsp. atroseptica SCRI1043
MSTFYTVISWLLVFSYWLLIAGVTLRILMKRRAVPSAMAWLLVIYILPLVGIVAYLSFGELHLGKRRAERASKMWPSTAKWLRELKEYRRIFATENSEVASALFQLCERRQGVGGVKGNQLQLMTTFDDTIKALLRDIELARNNIEMVFYIWQPGGLVEQVTSSLISAARRGVHCRILLDSAGSVQFFRQHHPELMRTAGIEVVEALKVNLFRAFLRRMDLRQHRKIILIDSRIAYTGSMNMVDPRLFKQDAGVGQWIDLMARIEGPVATTLGIIYCCDWEMETGKRLLPPPPDVNVMPFEQESGHTIQVIASGPGYPEEMIHQALLTSVYSARKQLIMTTPYFVPSDDLLHAICTAAQRGVDVSIIVPHKNDSVLVGWASRAFFTELLAAGVKIYQFKDGLLHTKSVLVDGQLSLVGTVNLDMRSLWLNFEITLVIDDAGFGSDLACVQEDYIARSRLLNATQWQNRPYWQRIVERLFYFFSPLL

SEQ ID NO: 14404 - DNA, 1269 bp, Propionibacterium acnes KPA171202
  CDS (1)..(1269): transl_table=11
gtgcacatgacccgggcccctcgccaaagattcactgttcgccgcgcactgcactgggtggcaggcgggatggttgccgcccagatggctacgatggccggactggtcacctacaacggcattaagcgacgaggccgtcgcccataccgtttccccactgcgccggcagagcccctcaaggtgtctggtcatcaggttgagatcttcactttcggacgcgatctttacgcggcgatgatcttcgacattaaatcagctcaacacaccgtttaccttgagaccttcatctggaaaaacgacgaagtcgggcgtcattttcggcaggcactcgtagaagccgccgcacgcggggtcaaggtctatgcgatgtgggacaccttcgccaacctcgttgtggacccacgattctttcggcagctcgaaggggtgcaggtgcgagcccaacctctcgtaaccccctcatggataccgacgctacgcaatctggggcgagaccaccgcaagctcctcatcgtcgattccaaggtcgcctacatcggtgggtacaacatcggctccctctacgccgaccgctggcgtgacacccacgctcgtattaccgggcctgccgtcggggagctcgaaaacgtctttgttgacatgtggaatcaacgccccaagggggccctcatctcccggcgcaaccagcccgtactaccttctcccggcgtccgctattgggatacgcctttcgctgtacaccgcaactccccccggatggcggtctatcccatccggaacatgtacctggaggccatcgaccgcgcgagtgagcgaatctggatgacccagggctacctcatccccgatgacgacgttgtcgcagccctccaccaagccgcatctcgcggggttgacgttaggatcgtcattccggctgaatcgaaccatgtcatcgccgactggctgagccggggctactacgaccgcctcctccaccagggtgtgcgactgttcctttaccagggagctatggtccacgcgaagacctgcactattgacggcatttggtccacgattggtacagcgaacctcgaccggttatccctccaaggtaactatgaggtaaacgtcgctatcactgactccaccgtcgcccaacgaatggctgagattttcgagatcgacatggccaactgtgtggaactgaccttagacgaatggcagtcgcgctctcacatagcgaaactcactgaagctctactgtcaccttggcgaccatttttctag

SEQ ID NO: 14405 - protein, 422 aa, Propionibacterium acnes KPA171202
MHMTRAPRQRFTVRRALHWVAGGMVAAQMATMAGLVTYNGIKRRGRRPYRFPTAPAEPLKVSGHQVEIFTFGRDLYAAMIFDIKSAQHTVYLETFIWKNDEVGRHFRQALVEAAARGVKVYAMWDTFANLVVDPRFFRQLEGVQVRAQPLVTPSWIPTLRNLGRDHRKLLIVDSKVAYIGGYNIGSLYADRWRDTHARITGPAVGELENVFVDMWNQRPKGALISRRNQPVLPSPGVRYWDTPFAVHRNSPRMAVYPIRNMYLEAIDRASERIWMTQGYLIPDDDVVAALHQAASRGVDVRIVIPAESNHVIADWLSRGYYDRLLHQGVRLFLYQGAMVHAKTCTIDGIWSTIGTANLDRLSLQGNYEVNVAITDSTVAQRMAEIFEIDMANCVELTLDEWQSRSHIAKLTEALLSPWRPFF

SEQ ID NO: 14406 - DNA, 1464 bp, Leifsonia xyli subsp. xyli str. CTCB07
  CDS (1)..(1464): transl_table=11
atgggcgacggggtcttggccacggtcatcgtggtcttcctgctcctgttcgactttgtgatccgtgttgtcgcgatcatcgtggtcccccggaatcgcaagcccacctcggcgaccgcctggctgctggccattttcctcatcccgtacatcggagtgctgttcttcctgctgatcggcagctacaagctcccgaaggcgcgccgggagaagcagaaggagatcaactccttcatcatcgacagcaccgagggcatggagcgtgtgcggcgtgaccacccctggccgccgtggctccagtcggtcgtcgaactgaaccgcaatctcggggcgatgcccctggtgggcggcaaccgggcctcgctcaatggcgactatgtgggctcgctcgcggcgatgacggaggagatcgcggccgcgcgccgctacgtccacgtcgaattctacatcctgaccctcgacaagacgacagcgccgttcttcgacgcgctggaacgtgcggtgcagcggggggtgaccgtgcgggtgctgctcgaccacatcgcgtcgctccggacgcccggctacaccgccacgatccgccggctcaccgagatgggcgtgaagtggcatctcatgcttccggtgcagccgttccggggaaagtatcagcggcccgacctccgcaaccaccggaagctgctcgtggtcgacgggcgggtcgccttcgtgggctcgcagaacgtcatcgaccgcagttacaacaagcgctccaacatcaagcgcggtctcaagtggaaagagctgatcgtccggctcgagggtccgatcgtcgccggtctgaacgcgatcttcatcacggactggtacagcgagaccgacgaactcctgcggcgggagacggagccgatcgcggtcgaactcgacgcggacgaactcgacgcgcaggtcgtgccttcgggtcccggattcgccggcgagaacaatctccgactgttcctggcgctgctctactacgcgcaggagcgcatcgtcatcacatcgccgtacttcgtccccgacgagtccatgctcaccgcgatcaccactgcgacgcagcggggtatcgcggtcgatctgttcgtctcggagatcggggaccaggcgctcgtctaccacgcccagcggtcttactacgaagccttgctgcgcgccggagtgaggatctggatgtacaaggcgccgtacatcctgcatgccaagcacttcacgatcgacgatgaggtcgcggtgatcgggtcgagcaacatggacatgcgctccttccagctgaacatggaggtctctctgatggtcaggggccgtccgttcgtgcagcagatgcgggctatcgaggacggctaccggcgggacagccgcgagctgacgctggatgagtggatgcggcagccgctgcgttcgaccgtgctggacaacctcgcgcgattgacttccgcgctgcaataa

SEQ ID NO: 14407 - protein, 487 aa, Leifsonia xyli subsp. xyli str. CTCB07
MGDGVLATVIVVFLLLFDFVIRVVAIIVVPRNRKPTSATAWLLAIFLIPYIGVLFFLLIGSYKLPKARREKQKEINSFIIDSTEGMERVRRDHPWPPWLQSVVELNRNLGAMPLVGGNRASLNGDYVGSLAAMTEEIAAARRYVHVEFYILTLDKTTAPFFDALERAVQRGVTVRVLLDHIASLRTPGYTATIRRLTEMGVKWHLMLPVQPFRGKYQRPDLRNHRKLLVVDGRVAFVGSQNVIDRSYNKRSNIKRGLKWKELIVRLEGPIVAGLNAIFITDWYSETDELLRRETEPIAVELDADELDAQVVPSGPGFAGENNLRLFLALLYYAQERIVITSPYFVPDESMLTAITTATQRGIAVDLFVSEIGDQALVYHAQRSYYEALLRAGVRIWMYKAPYILHAKHFTIDDEVAVIGSSNMDMRSFQLNMEVSLMVRGRPFVQQMRAIEDGYRRDSRELTLDEWMRQPLRSTVLDNLARLTSALQ

SEQ ID NO: 14408 - DNA, 1533 bp, Desulfotalea psychrophila LSv54
  CDS (1)..(1533): transl_table=11
atgcaaatacaagcgctgcactggacctccccactgatctcaacagtttttttcaccgcagatctcatcctgcgcattggtctctccctacgggtaatcatgtgtaaaaaaaactatggggtttcatacgcatggttggtcgttgtccttcttgtcccctttctcggcggcctgctctacctctgcttcggagaaaatcgactctccgaacggcgaatcaaaagaatactcaaggcaaaaaaatactactataagtggttgcaacaactagccgaaggcccgcaggtagactggtctgcgctcaaccctgagtttgcccccatccaactgcacacccaaaacctcgttggcatccccgccatggctggcaataacatcagcctgctccacagtcaggacaatatactggacagtattatcaaagacatagaggcatcacagtccacatgtcatctccaattttatatttgggaagctggcggccgtattaaagagataagcgaggccctgatcagagctaggaaaagaggggtcatctgccgaatactactggacgccattggcagcagaggttttttcagctccgcctcggccagacgaatggagcaggcaggaatcaaaattcaagcatcccttcccgctggcatatacagggctatttttgctcgaatggatatccgtaaccatcgaaaaattatcgtcattgatggcaaaatcgcctatacgggaagccaaaatatggttgacgcaatcttcttcaaacaagagagcggcgtaggtcactgggttgacatagtcgcacgtattcgtggccctgtggtagagacccttgccgcgacctttgccagcgactggtacctggaggcagagcaggatacatttcagcagatagacgacgtacaggagttgcgccatattggcgacatatacccacaaactgcccaaggaacaagcgccgtccaactggtaccatccggtcccggttttactcaggatgccatccacagcttactcctcaccgtcatctattccgctcgcaaagagcttattatgacaacaccatacttcatccccgatgagtctctgctcactgctctaaaagctgctgccctgcgtggggtccgggttattttaataattccccagagcaatgattcaaaactcgtcaaatatgccagccgggcaaagtacgatgacctcacctacgccggagtggaaataatgctctttaatggcggactcctccactcaaagaccatcaccgttgacggtgatctggccctctttggctcggtaaaccttgatatgcgaagtttttggcttaacttcgaggtaacactggtgatctattgcagagagacaacccaggacattcgacgggcacagatggcatacctacgacaatcagcccctcttgacctccgccattttcaccgtcgtcacttctttgagaaactcaaagaaaactgtgcactactggtttcacccactactataacgcaccccaacaactgttcagcgcaacagttatag

SEQ ID NO: 14409 - protein, 510 aa, Desulfotalea psychrophila LSv54
MQIQALHWTSPLISTVFFTADLILRIGLSLRVIMCKKNYGVSYAWLVVVLLVPFLGGLLYLCFGENRLSERRIKRILKAKKYYYKWLQQLAEGPQVDWSALNPEFAPIQLHTQNLVGIPAMAGNNISLLHSQDNILDSIIKDIEASQSTCHLQFYIWEAGGRIKEISEALIRARKRGVICRILLDAIGSRGFFSSASARRMEQAGIKIQASLPAGIYRAIFARMDIRNHRKIIVIDGKIAYTGSQNMVDAIFFKQESGVGHWVDIVARIRGPVVETLAATFASDWYLEAEQDTFQQIDDVQELRHIGDIYPQTAQGTSAVQLVPSGPGFTQDAIHSLLLTVIYSARKELIMTTPYFIPDESLLTALKAAALRGVRVILIIPQSNDSKLVKYASRAKYDDLTYAGVEIMLFNGGLLHSKTITVDGDLALFGSVNLDMRSFWLNFEVTLVIYCRETTQDIRRAQMAYLRQSAPLDLRHFHRRHFFEKLKENCALLVSPTTITHPNNCSAQQL

SEQ ID NO: 14410 - DNA, 1461 bp, Yersinia pseudotuberculosis IP 32953
  CDS (1)..(1461): transl_table=11
atgacgacattttataccgtaatcagttggctttccgtttttggctactggttactcattgccggggtaacattgcgtattctgatgaaacgcagggccgttccttctgctatggcttggttactgattatctacattctgccattggtggggataattgcttacctttcattcggtgaattgcatttgggtaagcggcgtgctgaacgagctaaagccatgtggccatcgaccgctcgctggctgagtgaactcaaggaatgccaacatatctttgctaactctaatagcgaagttgccaccccactgtttcaattatgcgaacggcgtcaaggaataaacggtgttaaaggaaatcaactacaactattaacaacaaccgatgacacactaaaagcgctagtacgagatattgaactcgcccgccacaatatagaaatggtgttttatatttggcaacctggtggtctggtcgatcaggtggctgaatcgttgatggctgcggctcgacgcggcgttcattgccggctgttactcgattcagcgggtagcaagcaatttttccgcagcccttatcccgcaatgatgcgtaatgcaggtattgaggtggttgaggcacttaaagttaatgtatttcgtatgttcttgcgccgaatggatctgcgccaacatcggaaaattgtgttaatcgacaactatgttgcttataccggcagtatgaacatggtagatccccggttcttcaaacaagatgccggggttggtcagtggattgatatgatggcgcgcatggaaggcccggtagccacaaccctaggtattgtttatgcctgtgactgggaaattgaaacaggcaaacgtattttacccccgccccccgacgcgaatattatgccattcgaagaagagactggtcatacgattcaagtcatcgcttctggccctggtttcccagaagaaatgatccaccaggcattattaacagctgtgtatgccgcacgtgaacagttaattatgactacgccatattttgtccccagtgatgacttattacatgccatctgtaccgcggcacaacgcggggttgatgtcagtattattgtcccgcgtgagaatgattcgatgatggttcgctgggccagccgagcattcttcaccgaattgctgaatgcaggcgttaaaatttatcagtttgaaggcggcctattacacagtaaaagtgttctggtcgatggacagctaagtttagtcggcactgttaatctggatatgcgcagtttgtggctgaattttgaaatcacactggtgattgatgatgatggctttggggctgatttagcacaagttcaggatgattatatcgcccgctctgccttattggatggtgaacggtggaacaagcgccctctttggcacagagtaactgagcgtttattctattttttcagcccattactgtaa

SEQ ID NO: 14411 - protein, 486 aa, Yersinia pseudotuberculosis IP 32953
MTTFYTVISWLSVFGYWLLIAGVTLRILMKRRAVPSAMAWLLIIYILPLVGIIAYLSFGELHLGKRRAERAKAMWPSTARWLSELKECQHIFANSNSEVATPLFQLCERRQGINGVKGNQLQLLTTTDDTLKALVRDIELARHNIEMVFYIWQPGGLVDQVAESLMAAARRGVHCRLLLDSAGSKQFFRSPYPAMMRNAGIEVVEALKVNVFRMFLRRMDLRQHRKIVLIDNYVAYTGSMNMVDPRFFKQDAGVGQWIDMMARMEGPVATTLGIVYACDWEIETGKRILPPPPDANIMPFEEETGHTIQVIASGPGFPEEMIHQALLTAVYAAREQLIMTTPYFVPSDDLLHAICTAAQRGVDVSIIVPRENDSMMVRWASRAFFTELLNAGVKIYQFEGGLLHSKSVLVDGQLSLVGTVNLDMRSLWLNFEITLVIDDDGFGADLAQVQDDYIARSALLDGERWNKRPLWHRVTERLFYFFSPLL

SEQ ID NO: 14412 - DNA, 1545 bp, Bacillus cereus E33L
  CDS (1)..(1545): transl_table=11
atgaaaaatacgttaaagttgattttctttgttttactattgttcgcattatttgtttcattacgtatgtttattgatgtggcattttattcggatgtaattgggataaaagatgtttcaattttaggtattattagtattttatttacggtatctgcatttttaattggctgtgttattttcttagagaaccgtcatccgtcaaaaacacttacatggctcattgtattaggtatttttcccgtatttggattcttcgcttatttattattcggacaaaacttccggaggaagagaatgttccaaaagaaggcgttgctcgatgaacaagcgtttttacaatataagggacatgaagattacgaagaacggattttgcgcaatcataagcatcaagagctattatttcgtttagcggatcgcttaggcgctttaaatatttcatttcaaactgaaacgagaacattaacaaatggagatgaaacgtttcaggccattttagatggattaaaacgagcgaaacatcacattcatatggaatattacattgtgcgtgatgataagcttggaacagaaattaaagatattttaatacaaaaatcaaaagagggcgtagttgttcgttttttatatgatgcggttggaagttttaaattatcaaaatcgtatattgaagaattaaacgatgcaggtgtcgaagtaattccgttcttccctgtgcgctttccaattttaaacgataagattaattatcgaaaccaccgaaaaatcgttattattgatggaaatgaagggtttgtaggtggattaaatattggcgatgaatatttagggaaggataagtacttcggcttttggcgagacacacatttatatttgcgtggtgaagctgtacaaagtttgcaacttattttccttcaagattggttttatatgactggtgaggctgtgctagcccctgaatatttacaagcgaaagcagttgagggagagcattggggaggcgtgcagctcgttgcaggtgggccggataataaatgggaaacaatcaaacatttatattttgctatgattgcttctgcgcggaaatccatttggattgcaacgccgtatttcattccggatgatgatattttatctgcattaaaggtagctgcgcttgctggtatcgatgttcgtttgttaatgccgagtaagcctgataagcgcactgtcttttacgcatcgagatcgtatttcccagagcttttagatgcaggggtaaagatatatgaatacgagaaaggttttctccatagtaaagttgtcattgtcgattctgatttagcttcaattgggacagcgaatatggatatgagaagttttcatttgaactttgaagtaaatgcctttttatatgatacagatagcattcgaaaacttgttcaagattttaaagacgatttagaagaatcaagtgaaattcatgtcgatcgttttcataaaaggcgtcttcatagacgaattgttgaatcaacgtaccgattattatcacctttattataa

SEQ ID NO: 14413 - protein, 514 aa, Bacillus cereus E33L
MKNTLKLIFFVLLLFALFVSLRMFIDVAFYSDVIGIKDVSILGIISILFTVSAFLIGCVIFLENRHPSKTLTWLIVLGIFPVFGFFAYLLFGQNFRRKRMFQKKALLDEQAFLQYKGHEDYEERILRNHKHQELLFRLADRLGALNISFQTETRTLTNGDETFQAILDGLKRAKHHIHMEYYIVRDDKLGTEIKDILIQKSKEGVVVRFLYDAVGSFKLSKSYIEELNDAGVEVIPFFPVRFPILNDKINYRNHRKIVIIDGNEGFVGGLNIGDEYLGKDKYFGFWRDTHLYLRGEAVQSLQLIFLQDWFYMTGEAVLAPEYLQAKAVEGEHWGGVQLVAGGPDNKWETIKHLYFAMIASARKSIWIATPYFIPDDDILSALKVAALAGIDVRLLMPSKPDKRTVFYASRSYFPELLDAGVKIYEYEKGFLHSKVVIVDSDLASIGTANMDMRSFHLNFEVNAFLYDTDSIRKLVQDFKDDLEESSEIHVDRFHKRRLHRRIVESTYRLLSPLL

SEQ ID NO: 14414 - DNA, 1212 bp, Bacillus cereus E33L
  CDS (1)..(1212): transl_table=11
atgattaaaaaaatattgggagttacttctattattattgctatcttcgcttttattttaatttgtatgcatattgatgttactttaggtaggaaaatggaagctgggaaaaacatgccgacagagtatgcacctcattatagtgattttcaattatatgtagaaggaaagtcattttataaacagttatttactgatataaaagaagcgaaacaatctatttacacttatttttttattttatcggatgataaaagtagtcatacttttttaaacttattaaaagaaaaggcaaaagaaggagtaaacgtatatttatctgtcgatttacttaacgatttatcatttgaaagaaagatgaaaaaagaattacaggaaaatggtgtacattttacatatagtagaaaacaggaattaccattcgggttttattcacttcaccatcgtaatcatcgccgcattacaacgattgatggagagattggttatacgggtggttttaatataggggatgaatacttagggaaagataaacactttgggtactggagagactatcatgtacggataaaaggtgaaggtgcaaaagacttagaggaacaatttgctttagattggaaacgagatacgaaagaagatataaagaggagtacgaataaggctagcaaagggaatacactacatactatggttagttataatgggcatcaagtggctgaaaaatatatagatcttataaaacaagctcagcactcaattgtaattgcaacgccgtattttatagcgaaaaataaagaatccatgaatgctttaatcgcagcacaaaagcgtggtgttacagtaaaaatactttggtcatataaaccagatctacctcttataaaagaagcggcgtatccatacatacgtcaagctattaataatgggattactgtatatgggtataaaaaaggaatgttccatggcaaattcatgcttattgataatgaattaaccgttattggcacaacaaactttacttcgcgtagcttcaatataaatgatgaaatgaatttttatattcatggtggtcctattgtagggcaagttaataaggcgttaacagaggattttcgtgaatcaaaagaaatgacgaaagaattttttgagaagttatctttttgggagcgttgtaaggagaaatttgcaggaatggtggatttttatttataa

SEQ ID NO: 14415 - protein, 403 aa, Bacillus cereus E33L
MIKKILGVTSIIIAIFAFILICMHIDVTLGRKMEAGKNMPTEYAPHYSDFQLYVEGKSFYKQLFTDIKEAKQSIYTYFFILSDDKSSHTFLNLLKEKAKEGVNVYLSVDLLNDLSFERKMKKELQENGVHFTYSRKQELPFGFYSLHHRNHRRITTIDGEIGYTGGFNIGDEYLGKDKHFGYWRDYHVRIKGEGAKDLEEQFALDWKRDTKEDIKRSTNKASKGNTLHTMVSYNGHQVAEKYIDLIKQAQHSIVIATPYFIAKNKESMNALIAAQKRGVTVKILWSYKPDLPLIKEAAYPYIRQAINNGITVYGYKKGMFHGKFMLIDNELTVIGTTNFTSRSFNINDEMNFYIHGGPIVGQVNKALTEDFRESKEMTKEFFEKLSFWERCKEKFAGMVDFYL

SEQ ID NO: 14416 - DNA, 1104 bp, Bacillus cereus E33L
  CDS (1)..(1104): transl_table=11
atggctagtgaatatgaagtaggacaagttagattaggtgaatttcaactgtatacgaacggtgaagagttatatacgaatttatttgaggatatacgtaatgcggagaagtacatatatatccatttttatattgtaggtaaagatgaaataagcaaagagtttttgcagttgctcgagaaaaaggcatcgggtggagtagaagtgaaattgtcagtcgatcgaataggtggatataagctgaagaaaaaggtaattcgtcaactacaaagcaatggtgtccagtttacgtttagtaaaaaacctaaattgaaacatttattctattcgttgcatcagcgaaatcatagacgaattgttacgatagacggaaaagtatcatatatcggcggctttaacatcggaaaggaataccttggacaagatccgaaatttggcccgtggcgtgattatcatgtgcgagttaaggggaatggtgccacggatatggaaagaaaatttgctgctgactggaaagaagatacgggagaaaaaatgcctgtacatgaaagtctacctgcaattgggaatgtaaaatatcaatatttattttcagatggaaaagggttatgggaaaaatatggagcgtttttaaagcaggctaaaaagtctttaattattgctacaccatattttgtaccaagtaaagaaatgatgaaagagttaaaaggtgcattaaaccgcggtgtcaatgtgaaaattctcgtaccatttaaaagtgatgcagtattgttaaaacaagctgcctatccgtatttgagagagatgaaccatgctggagcggagatttatcaatatcggaatggtttttttcatgggaaagtaacaatcattgatggagaaattgttgatataggtacagcgaattttgataatagaagtttttatttaaattgtgaatctaactgtgtcatatatgatagaacagttgttgctgacgtatgggatcgattaaaagaagacttccataaatcaaaaagattttcggaagaagattttgagaaaattagtaaatgggattggtttttagcaagaatagcaaatgttatagcatcatatttatag

SEQ ID NO: 14417 - protein, 367 aa, Bacillus cereus E33L
MASEYEVGQVRLGEFQLYTNGEELYTNLFEDIRNAEKYIYIHFYIVGKDEISKEFLQLLEKKASGGVEVKLSVDRIGGYKLKKKVIRQLQSNGVQFTFSKKPKLKHLFYSLHQRNHRRIVTIDGKVSYIGGFNIGKEYLGQDPKFGPWRDYHVRVKGNGATDMERKFAADWKEDTGEKMPVHESLPAIGNVKYQYLFSDGKGLWEKYGAFLKQAKKSLIIATPYFVPSKEMMKELKGALNRGVNVKILVPFKSDAVLLKQAAYPYLREMNHAGAEIYQYRNGFFHGKVTIIDGEIVDIGTANFDNRSFYLNCESNCVIYDRTVVADVWDRLKEDFHKSKRFSEEDFEKISKWDWFLARIANVIASYL

SEQ ID NO: 14418 - DNA, 1536 bp, Mannheimia succiniciproducens MBEL55E
  CDS (1)..(1536): transl_table=11
atgatgataaaatccctatgtttatgtataattttgaattcttgcataaagttctcaaaaagtgcggttagaatgaatattaatttagactcgattatagcatatattgtgccggtgattatgtggacattaatagtcaccatcacgttgcgccaaattatcaaacggcaatcctcctcggcaatgctctcctggttgatgattatttatattgtgccggtagtcggcatcctggcttatttggtactgggcgaaattaatttgggcaaacggcgggcaaatgcctctaaacaattattacccaaatatatgaaatggttcgccggccttaaaaaccaacaacatttactgattaacgatcaacaaccgtcgcttgccagccctttatttgctcttgcccaacgccgtttaagcattccctgtattaacggcaacgaattacatattctggacactccggaaagcattattcaaaatattattgatgacattcaccaggctcaatattctatcaatatggtattctatatttggtcaaacggcggtctggtggagcaggtacagcaagcgttgattcaagccaagcaacgcggcgtgaaaattcatattctgctggactccgtaggaagccgggcgtttttcaaaagcgaaaattaccaaaaaatgaccgcacttggtattgaaattgaagaagccctgcacgtaaatttgctgcgggttttcctgcgccgtattgatttacgtcaacatcgcaaaattattgtgatcgataatcaaatctcttataccggtagcatgaatatggttgatccgaatttctttaagcaagacagccatgtaggaaaatggatcgacattatggtacgtatcgacggcccggtttccgccgtgctgaacggtttgcattcatgggattgggaaatggaacgcgggcaaggactttatgtgccgttgccaagcccccaacatccgatggataattataatattcacgcggtacaaattctcgccaccggccccgggttgccggcggatttaatggaacaatcccttgctacggcgatttttgccgccaaggaaagtattacaatcaccacgccttattttgtgccgagtcagaatattgtagatgcgttgcaaattgccgcgctgcgaggcgtgaatgtgtcactgattttgccggtgcataacgattcccttatggttcgctgggcaagccgtacttattttgatgatctactcaccgccggtgtaaaaatttataactttacggaaggactgttgcatacaaaaagtatcctggttgataacaaaatggcactggtcggtacggtaaacatggatattcgcagtttttcgctgaatttcgaagtgaccatggtagttgaagaccaaactttcgccaatgaaatcagtttgctccatgaaaactatatgaatggtgccacgttgctggacgaacaacgctggttaaaccgcccggtgtttacacgaattattgaaaaactgtttttcttattcagcccattattatag

SEQ ID NO: 14419 - protein, 511 aa, Mannheimia succiniciproducens MBEL55E
MMIKSLCLCIILNSCIKFSKSAVRMNINLDSIIAYIVPVIMWTLIVTITLRQIIKRQSSSAMLSWLMIIYIVPVVGILAYLVLGEINLGKRRANASKQLLPKYMKWFAGLKNQQHLLINDQQPSLASPLFALAQRRLSIPCINGNELHILDTPESIIQNIIDDIHQAQYSINMVFYIWSNGGLVEQVQQALIQAKQRGVKIHILLDSVGSRAFFKSENYQKMTALGIEIEEALHVNLLRVFLRRIDLRQHRKIIVIDNQISYTGSMNMVDPNFFKQDSHVGKWIDIMVRIDGPVSAVLNGLHSWDWEMERGQGLYVPLPSPQHPMDNYNIHAVQILATGPGLPADLMEQSLATAIFAAKESITITTPYFVPSQNIVDALQIAALRGVNVSLILPVHNDSLMVRWASRTYFDDLLTAGVKIYNFTEGLLHTKSILVDNKMALVGTVNMDIRSFSLNFEVTMVVEDQTFANEISLLHENYMNGATLLDEQRWLNRPVFTRIIEKLFFLFSPLL

SEQ ID NO: 14420 - DNA, 1197 bp, Bacteroides fragilis YCH46
  CDS (1)..(1197): transl_table=11
atgcagcgggaggacaccacacaattcatccgaagcgactccctcgtgttacaatttctggaatactcgaatatccccataaccgataataataaggtgaaacttatcaaaagcggacgggaaaaatttgaggacttgttcgaagccatccgtggggcaaaacaccacattcatctggaatattttaattttcgcaatgactccatagccaatgcactgttcgacctgctgggcgaaaaagtgaaggaaggtgtcaaagtaagggcgatgttcgatgcattcggtaactggtcgaacaacaaaccactcaagaaaaggcatctgaaagcaatccgggagaaaggaatcgaaatcgtaaaattcgatccgttcaagttcccgtatatcaatcatgcggctcaccgcgaccatcggaagattgcagtcatcgacggcaaaataggatataccggcggaatgaatattgccgactattatatcaacggactccccaagataggcacctggcgcgatatgcatatccgcattgaaggcgatgcggtaaacatccttcaagaaatcttcctcgacatctggaataaaaccaccaagcaaaacatcgtgggcgaagaatattttccgaaccacccggagcgggccgacagctgcaatacggtcatttcgattgtagaccgcactccgaaacggaattcccgcatgttgagccatacgtatgccatgtccatctatgcagcgcaacatgatgtacgcatcgtgaacccgtattttgtaccgacttcatccatccgcaaggcactcaaaagggctttgaaccggggaacgaaagtggaaattatgatttcttccaaatccgacatccctttcacaccggatgcttcgctctatgccgtacagaaactgatgaaaaaaggggcaatgatctatttgtacaacggcggatttcatcactcgaaaatcatgatggtggacgacctgttctgtaccgtgggtacagccaacctgaacagccgcagcctgcgatatgattacgaaacgaatgcgttcatcttcgacaaggacattacgcagcaactgaatgacgttttcgaagccgacatgctgcactgcacccgcctgaccccggaaatgtggaaacaaaaatcagcctggaagaagtttaagtgctggtttgcgaacttattcacaccattcctgtaa

SEQ ID NO: 14421 - protein, 398 aa, Bacteroides fragilis YCH46
MQREDTTQFIRSDSLVLQFLEYSNIPITDNNKVKLIKSGREKFEDLFEAIRGAKHHIHLEYFNFRNDSIANALFDLLGEKVKEGVKVRAMFDAFGNWSNNKPLKKRHLKAIREKGIEIVKFDPFKFPYINHAAHRDHRKIAVIDGKIGYTGGMNIADYYINGLPKIGTWRDMHIRIEGDAVNILQEIFLDIWNKTTKQNIVGEEYFPNHPERADSCNTVISIVDRTPKRNSRMLSHTYAMSIYAAQHDVRIVNPYFVPTSSIRKALKRALNRGTKVEIMISSKSDIPFTPDASLYAVQKLMKKGAMIYLYNGGFHHSKIMMVDDLFCTVGTANLNSRSLRYDYETNAFIFDKDITQQLNDVFEADMLHCTRLTPEMWKQKSAWKKFKCWFANLFTPFL

SEQ ID NO: 14422 - DNA, 1440 bp, Burkholderia mallei ATCC 23344
  CDS (1)..(1440): transl_table=11
atgaccctcgactggctccatctcggcaccctcatcggcctcgcgcacgtgctcggcgtgatcgcggcctgccatgcgatcctgaacacgcgcacgtcgcaaggcgcgatcgcgtgggcggtgtcgttgacggcgatgccgtacctgacgctgatcccgtatctgttcctcggccgcagcaagttctccggctatgtcgacgcgcgccgccacgagaccgcggcgctgcgcacccgcacgcatcccgcgccgtgggacgccgaaggctcgacgctcggcgcgccgaaggaagcgctcggcgccgcgcgcgtacgcgcgctcacgcgcctggtcggcatgccgttcgtcgccggcaacgcggtgcgcacgctcgtcaacggcgacgcgacgttctccgcgatcctcgccgcgatcgacgccgcgcgcagctacgtgatcgtccagttcttcatcgtccgcgacgacgcgctcggcgcgatgctgcgcgacacgctgatcgcgcgcgcgaaggcgggcgtgcgctgctatctgctgtacgacagcatcggcagcttcgatctgccgtcgagctacgtgcacgcgctgcgcgaaggcggcgtcgaagtgcatccgttcgcgaccaacaagcagttcgtcaaccgcttccagctgaatttccgcaatcaccggaagatcgtcgtcgtcgacggcgagcgcgcgttcgtcggcgggcacaacgtcggcgtcgaatatctcggcggcaacccgcgcctgtcgccgtggcgcgacacgcacatcgaagtgcgcggcccggcggccgcgaacatccagtacgtgttcgccgaggactggcactgggcaacccagtcgctccccccgcaggcaccgccgcccgcgccggttcccgacgccgacatgcactgcctcgtcgtgccgatgggccccgccgacaagcaggagacgggctcgctcttcttcgcggaggcgatcaacgccgcgcgcgagcgcgtgtggatcacgacgccctacctcgtgcccgacgaagcggtgatttccgcgctgaagctcgcggtgatgcgcggcgtggacgtgcgggtgatgattccgagccggcgcgatcactatgtcgttttcgaagcgtcgaagctctatgcgcgcgatctcgtcgacgcgggcgtgcgaatcttccgctaccgccccggcttcctgcaccagaaggtcgtgctgatcgaccgggcggccgccgccgtcggcagcgcgaacctcgacaaccgttcgttccggctgaatttcgagatcatggtgctgaccgtcgacgcgggcttcgccgccgaagtcgaagcgatgctcgcgcgcgacttcgatcaagcgttcgaggtcgacctgagcgagtaccggcgctcgcctgcgtggcggcgcgtggcgatgcacgtcgcacggctgttcgcgccgatcctctga

SEQ ID NO: 14423 - protein, 479 aa, Burkholderia mallei ATCC 23344
MTLDWLHLGTLIGLAHVLGVIAACHAILNTRTSQGAIAWAVSLTAMPYLTLIPYLFLGRSKFSGYVDARRHETAALRTRTHPAPWDAEGSTLGAPKEALGAARVRALTRLVGMPFVAGNAVRTLVNGDATFSAILAAIDAARSYVIVQFFIVRDDALGAMLRDTLIARAKAGVRCYLLYDSIGSFDLPSSYVHALREGGVEVHPFATNKQFVNRFQLNFRNHRKIVVVDGERAFVGGHNVGVEYLGGNPRLSPWRDTHIEVRGPAAANIQYVFAEDWHWATQSLPPQAPPPAPVPDADMHCLVVPMGPADKQETGSLFFAEAINAARERVWITTPYLVPDEAVISALKLAVMRGVDVRVMIPSRRDHYVVFEASKLYARDLVDAGVRIFRYRPGFLHQKVVLIDRAAAAVGSANLDNRSFRLNFEIMVLTVDAGFAAEVEAMLARDFDQAFEVDLSEYRRSPAWRRVAMHVARLFAPIL

SEQ ID NO: 14424 - DNA, 1275 bp, Burkholderia pseudomallei K96243
  CDS (1)..(1275): transl_table=11
atgagtggcgagacccggcaccgcctcgcgcaactgcgccagatgttcctgcaggagcgcggctccgcgtcgcggctcgcgttcacgtccggcaacgcggtgcgcctctgcgacggcggcgcggcgttctttccggcgctgatcgaacggatcgacgccgcgcgcgagcgcgtcgcgctcgaaacctacatcttctgcgacgacgccgtcggccgcgcggtgtccgacgcgctcgtccgcgcggccgcgcgcggcgttcacgtgcgcgtcatcaccgatggaatcggcaccgagcgcctgccgcttttcggcacctggccggacgcgggcgtcgagcaccggatctacaatccctatctgttcggccgcttcggtttttcgcgcacgcaccgcaagctcgcggtgatcgacgacgcctgcgcgttctgcggcggcatcaacatcgtcgacgatttcgagcagaacggcgagcgcctgccgcatccgcgctgggacttcgcggtcgaactggccgggcccgccgtcgccgacgtgcgcgccgcgttcgaggtgcagtggcaccggatcgccgccggccacaagcgctacgcgcaatatctgccgcatgacgtcgatggtcccgcgttcgccgcgcgctttcgccgctggatgcgcagccaccgctgggtgaaggcgggcgcgctgcgcgtcgtgaccgagccgagcgtggcgttcgtcgcgcgcgacaatatcgtgaaccgccgggcgatcgagaaggcgtatctcgcggcgatcggccgcgcgcgccagtcgatcctgctcgctaacccttacttcatgccggggcgcaagctgcggcgcgcgctcgccggcgcggcgcgccgcggcgtcgacgtgcggatcctgctcgggcgcaacgagttcgcgtcgctcgatatggcggtgccgttcctatatcatgcattgctgcgctcgggcgtgcgcgttgccgaatacgacaagacgatgctgcacggcaaggtcgcggtgatcgacgatcattgggcgaccgtcggctcgtcgaatctggatgcgctcagcctgatgctgaacaacgaggcgaacgtcgtgctcgtgcgccaccgcgaggagacggccgcgctgcgcgacgcgatcgcggcggcgttcgccgacggccgcgagatcgacccggcgctctacgcggcgcggcccgccgccgagcggtttctgaactggttcgcgtacaacgcgtaccggagtgcgatgaagctgctgacggtcggcggatacgactaa

SEQ ID NO: 14425 - protein, 424 aa, Burkholderia pseudomallei K96243
MSGETRHRLAQLRQMFLQERGSASRLAFTSGNAVRLCDGGAAFFPALIERIDAARERVALETYIFCDDAVGRAVSDALVRAAARGVHVRVITDGIGTERLPLFGTWPDAGVEHRIYNPYLFGRFGFSRTHRKLAVIDDACAFCGGINIVDDFEQNGERLPHPRWDFAVELAGPAVADVRAAFEVQWHRIAAGHKRYAQYLPHDVDGPAFAARFRRWMRSHRWVKAGALRVVTEPSVAFVARDNIVNRRAIEKAYLAAIGRARQSILLANPYFMPGRKLRRALAGAARRGVDVRILLGRNEFASLDMAVPFLYHALLRSGVRVAEYDKTMLHGKVAVIDDHWATVGSSNLDALSLMLNNEANVVLVRHREETAALRDAIAAAFADGREIDPALYAARPAAERFLNWFAYNAYRSAMKLLTVGGYD

SEQ ID NO: 14426 - DNA, 1653 bp, Burkholderia pseudomallei K96243
  CDS (1)..(1653): transl_table=11
gtgccggatcgccccgccctccgcggtctcgcgccgcgccatccaccgcgcatcgtcaaggccgccgcgcgcgcgctcgtcctgtgcgcggcgctcgcgctctccggctgcgcgacgcatccgcccgccaccacgctcgagcgcaccgtctcccacgcgctgccgcccgacgcatcgacgccgctcgccgacgcgctcgccgtgcaggcgcgcgcgcatccgggcgaatcgggcttcgtcgtgctgccgcgcggcgacgaggcgctgcaaatgcggatcgcggtggcgcgcgcggcgacgaagacgctcgacatccagtactacatcgccgccgaggacacgacgggcaagctgctgctcggcgccgcgctgtacgcggccgaccgcggcgtgcgcgtgcgcatgctcgtcgacgcgctgaacttcaaggacatcggcaggctgatggcggcactcgacgcgcacgcgaacctcgaagtccgcgtgttcaatccgttcggcgccccgcgcctcggcatgttcgcgcgcaccgcgaacgtcttcacgcggatcgacaatttcacgcgccggatgcacaacaaggcgatgatctcggacaaccagatcgcgatcgtcggcggccgcaatctcggcgacgaatatttcaacgcgagcccgacgctgcaattccgcgacctcgacgtgctcgcggccggccccgtcacccgcgccgtctcggcgagcttcgacgcgtactggtcgagcgcgctcacgtatccgctgccggcgctgaatcgccggcgctacgacgcgaaggatctggacgcggcgcgcgacgcgctgcgcgcgcactggcgcgcgaacgcgacgccgtacaacgcgaagccgctgaacgcgacgccgctcgccgcgcagatcgcgcgcaacgagctcggcctggtatgggcgagcgcggagttcaccgccgattcgcccgagaagatcgccgcgcccgacgacagctacaagagcccgccgatgcagcggctcttcgcgctcacgcgcgacgcgcagcgcgaattcctcgtgctgtcgccgtatttcgttccgcacgatgccggcgtgaacgcgctcggccggctgaccgcgcgcggcgtgcgcgtcgcgatcctgacgaattcgctcgcggcgacggacgcgatcgccgtgcaggcgggctacgcgccgtatcgcgtgccgatgctcgagcgcggcgtcgagctgtacgaatacaagccggacccgggccgctcgcgcatcggcatgctgggttcgcgctcgcgcgcgagcctgcacgcgaaggcgtacgtgatcgaccggaagattctcgtgatcggctcgatgaacctcgatccgcgctccgcgcatctgaacacggagctcgcgctcgtgatccacagcccgcggctcgcgaacgaagtcgcgaatctgttcgacgaagtgacgaagccgacgatcagctaccgcgtgacgctcgcgcccgacacgccgggcgcggcgcagacgaccggcgcgggcgcgccggcatggccgctcgtgtggaccgaaatcgccgacggccaggtacgcacgtacagcgtcgatccgaacgcgggcttctatcgcaacctgctcacggggctctgcctgctgctgccgatcgacgatcagctttga

SEQ ID NO: 14427 - protein, 550 aa, Burkholderia pseudomallei K96243
MPDRPALRGLAPRHPPRIVKAAARALVLCAALALSGCATHPPATTLERTVSHALPPDASTPLADALAVQARAHPGESGFVVLPRGDEALQMRIAVARAATKTLDIQYYIAAEDTTGKLLLGAALYAADRGVRVRMLVDALNFKDIGRLMAALDAHANLEVRVFNPFGAPRLGMFARTANVFTRIDNFTRRMHNKAMISDNQIAIVGGRNLGDEYFNASPTLQFRDLDVLAAGPVTRAVSASFDAYWSSALTYPLPALNRRRYDAKDLDAARDALRAHWRANATPYNAKPLNATPLAAQIARNELGLVWASAEFTADSPEKIAAPDDSYKSPPMQRLFALTRDAQREFLVLSPYFVPHDAGVNALGRLTARGVRVAILTNSLAATDAIAVQAGYAPYRVPMLERGVELYEYKPDPGRSRIGMLGSRSRASLHAKAYVIDRKILVIGSMNLDPRSAHLNTELALVIHSPRLANEVANLFDEVTKPTISYRVTLAPDTPGAAQTTGAGAPAWPLVWTEIADGQVRTYSVDPNAGFYRNLLTGLCLLLPIDDQL

SEQ ID NO: 14428 - DNA, 1458 bp, Photobacterium profundum SS9
  CDS (1)..(1458): transl_table=11
atggaacagttttatcaagttttagtttgggtcggtgttttcctttactggctaattattgctggtgtaaccatgcgtgtggtattccaacgtcgtattgtcggcgtgtctcttgcttggttaatgataattttcatcattcctattggtggggtattcgcctacctactatttggcgaattgaatttaggtaagaaacgggcagagcgtgctcgcgacatgttccatccatttgcggaatggtttcagcggctcaatgattgtcctagccaccaacctcaactaatgagtcagaatgcgcgccctattagtgacttgtgtgagaaacgtcttggggtgcctggtttagtgggtaataccctctcgttacaagattctccccagcaaattctgcattcaattattgacgatattcaacaagcgaaagagtctatccatctagagttttatatttggcacgcaggcggattggcagacgctgttggcgttgcattaattcaagcggcaaaaagaggtctatccgtccggttactgcttgattctgcgggtagttcacgattcttccgttcacattggccaaagctcatgcgccaagcaggcattgaaataactcaagctctggccgtgtctccgctacgtatgttttttcgtcggttagatttacgtcaacatcgaaaaattatcgtcattgataataccatcgcatacacaggttcaatgaatttagttgacccagcgtttttcaaaacaaatgcagatgtaggtcagtgggttgacgtgatggtgcgcttaacgggaccaacagttccacttctcaattgcattcaagcatgggattgggaggtcgaaacggggcaacgtttcctacctgaattaccagcttgtggtatcgatacatcacccgataccattgataccgttcaagtgatcccatcaggcccaggcatgcctgacgaaattattcaccaagtactgttattaagtatttaccaagcacaaaaaagtgttgttattacgacgccctacttcgtaccaagcgagcatctacagcatgcactaaaaggtgccgctgaacgggggcttagcgtccatattgttgtaccagataaaaatgattcaacaatggttgagtgggcaagccgatctttttttggagagttattacaagcaggcgtgaaaattcatcgttttcatggcgggttactacacactaaatcagtggttatcgatgatactcattgcttaattggtactgttaaccttgatatgcgcagtttatggctcaactttgaagtcaccttggccgttgatagtcttgaatttacccagcaactgagttggctacagcaagaatatattaaaaattcaacgagtattgataataatgaatggacaaaacgcccaatgttaaacaaattgggtgaacgattcttttatatgtttagcccattactttaa

SEQ ID NO: 14429 - protein, 485 aa, Photobacterium profundum SS9
MEQFYQVLVWVGVFLYWLIIAGVTMRVVFQRRIVGVSLAWLMIIFIIPIGGVFAYLLFGELNLGKKRAERARDMFHPFAEWFQRLNDCPSHQPQLMSQNARPISDLCEKRLGVPGLVGNTLSLQDSPQQILHSIIDDIQQAKESIHLEFYIWHAGGLADAVGVALIQAAKRGLSVRLLLDSAGSSRFFRSHWPKLMRQAGIEITQALAVSPLRMFFRRLDLRQHRKIIVIDNTIAYTGSMNLVDPAFFKTNADVGQWVDVMVRLTGPTVPLLNCIQAWDWEVETGQRFLPELPACGIDTSPDTIDTVQVIPSGPGMPDEIIHQVLLLSIYQAQKSVVITTPYFVPSEHLQHALKGAAERGLSVHIVVPDKNDSTMVEWASRSFFGELLQAGVKIHRFHGGLLHTKSVVIDDTHCLIGTVNLDMRSLWLNFEVTLAVDSLEFTQQLSWLQQEYIKNSTSIDNNEWTKRPMLNKLGERFFYMFSPLL

SEQ ID NO: 14430 - DNA, 1533 bp, Photobacterium profundum SS9
  CDS (1)..(1533): transl_table=11
atgtctgtgttccaacgtattaatataacgatgtttttagtcgctattctcactgggtgcgcatcacttcccgaagaggttaatcatcctaatgagcctgtagccatgtcactaacgagtacattatccgaattgagtgacatttatcggcttcaacagcctacacaagaaacgagtgcggttctgctgcaagatactggctgggacgcattggctcagcggttggcattaatcgaaaccgccgaacacagcattgatatccagtattacatatggaattcagatgcgtcgggtcactacctagcaaaccgtttgatagcagctgccgatcgtggcgttaaagtccgtgtaatgttggatgatatcaatcttaatgaacgagaggatctactagtagctcttgattctcaccatcaaatagagatccgcatatttaatcctatcccaactcgtcgtggtgtcacaaagtggctaaatttcttaggtgatttttctcgtctaaaccgccgcatgcacaataaatcatttaccgttgatggtgctttttccattgttggtgggcgtaatatcggtgatgaatattttgatctttctgataaaatcaattttcgtgaccgcgatgtattggtaatgggctcggtagttaccgatatccaagctagttttggagaatactgggacagccgttggtcttacccagttgatttactgggaggtgaagcctcatcagatatgccagtgtttggtgaggtggctgctcctcgttatatgaattatcccgtcttgccagaaggaaataaaacagcaaatcgattcttaaaagagttgatgggcgagatgacttgggttcaagctcgttttgtttctgaccgaccagtaccagtcgatgaagataacaccagtgaactgaaggcgactgccagagtattggctgaattagctcgtgaatctgagcaagaaatattattggaatctgcatatctcatatttgatgatcgtcaattagaagaggtgcaggaattgaccagcaatggagttcagataaaagcattgactaattcaatggcttcgaatgacctaacgactaaccactctggctacgcaggtcgacgtcaggatatgcttgaacacggcatacagttgtttgagttgaaaccagagacgagtttatgtgaagagtctactcgagacgtatccaaatgcgcaccgacaatagcttatggccttcatgcaaagtctgctgtttttgatagacgtgtggctagtatcggctcttttaacttcaatttacgttcaacctacctcaatactgagtctattctagtcattgaaaatcaaagtgttgctgaaagtcttgctgatgatatagatcaggcgatgaacgaggataatagctggcgtttgaagttacaagaaggcgaagtccgttggtattctggtcaaaaaagttgggaaagcgaaccagagacaggtcgatgggagcgatttcaatcacgtttcttacagttactgccaatagagaagtatttgtga

SEQ ID NO: 14431 - protein, 510 aa, Photobacterium profundum SS9
MSVFQRINITMFLVAILTGCASLPEEVNHPNEPVAMSLTSTLSELSDIYRLQQPTQETSAVLLQDTGWDALAQRLALIETAEHSIDIQYYIWNSDASGHYLANRLIAAADRGVKVRVMLDDINLNEREDLLVALDSHHQIEIRIFNPIPTRRGVTKWLNFLGDFSRLNRRMHNKSFTVDGAFSIVGGRNIGDEYFDLSDKINFRDRDVLVMGSVVTDIQASFGEYWDSRWSYPVDLLGGEASSDMPVFGEVAAPRYMNYPVLPEGNKTANRFLKELMGEMTWVQARFVSDRPVPVDEDNTSELKATARVLAELARESEQEILLESAYLIFDDRQLEEVQELTSNGVQIKALTNSMASNDLTTNHSGYAGRRQDMLEHGIQLFELKPETSLCEESTRDVSKCAPTIAYGLHAKSAVFDRRVASIGSFNFNLRSTYLNTESILVIENQSVAESLADDIDQAMNEDNSWRLKLQEGEVRWYSGQKSWESEPETGRWERFQSRFLQLLPIEKYL

SEQ ID NO: 14432 - DNA, 1509 bp, Geobacillus kaustophilus HTA426
  CDS (1)..(1509): transl_table=11
ttgcgaaacacatcgagagtggcgattctcgtcgtcattgtcggcgcgttgctggcattgacgaacgggttttgggaagggaagctgcttggtcttttcagcgtattgatgtcttgttccgtcatctttattgcgctggtcatttctcttgagaatcgaaagccggcgcagacgatcgcttggctggcggtgctggggagctttccgattgtcggctttttgttttatttattgttcggacgcaactattggcaacaacggcgctataaaaagaaagccgattttgatgaggcggtgctgctcaagtttcaagagccgtcgccgattgccgtcgagcggctgccgatggcgccccatcagcgtccgcttttgcgccttgcttatcgcatcggccagcatccggtttcacttgcttcgcagacggcggtgttgacgaacggagaggagacattttcttctatttttgctgaactggaaaaagcggaacaccatattcatttagaatattatattgtccgtcatgatgaaatcggccaacagttgaagcgcgtcttgatggaaaaagcgcgtcaaggtgtgcgcgtccgttttttgtacgacgccgttggaagttggaagttgtcaaacgcctatatcgaggagctgcgcgcggctggagtcgagatgatcccgttttcaccagtgcgcctcccgtttttaagcaaccaaatcaatttccgcaatcaccgaaagatcattgtcatcgatggaggcgtcggctttgtcggcgggctgaacatcggagatgagtatttaggaaaaaacaaatatttcggattttggcgcgatacgcacttattgatccgcggtgaagccgtccggacgcttcagctcatttttttgcaagattggtattacatgacgggagaacgcttgttgacgccggactatttgtcgccgccgctcatcgtcgaggaagggcaaggcggggtgcagctcattgccggcggtccggaccaaaagtgggaagtgatcaaacagctgtattttgccatgattacgtcggccaaacggtcgatttgggttgcctcgccgtactttgtgccggatgaagacattttgacggcgctcaaagtggcggcgttaagcggcatcgatgttcgcctgctggcgccaaagcgtccggataaaaaaattgtcttttacgcttcgcgctcgtattttcccgagctgctcgaggctggggtgaaaatttacgagtatgagaaagggtttttgcacagcaaagtcatcgtcgtcgatggcgagctcgcctcgatcggcacggcgaacatggatatgcgcagtttccatttaaactttgaagtgaacgcctttttgtattataccgacagcattcataaactcgtccgcgactttttggaagattttcgccacgcttccatgatcgactacgaacagtttcaacagcgcccgttccgggtgcgtatcgctgaatcggtctcccggctgttgtcgcctctgttgtaa

SEQ ID NO: 14433 - protein, 502 aa, Geobacillus kaustophilus HTA426
MRNTSRVAILVVIVGALLALTNGFWEGKLLGLFSVLMSCSVIFIALVISLENRKPAQTIAWLAVLGSFPIVGFLFYLLFGRNYWQQRRYKKKADFDEAVLLKFQEPSPIAVERLPMAPHQRPLLRLAYRIGQHPVSLASQTAVLTNGEETFSSIFAELEKAEHHIHLEYYIVRHDEIGQQLKRVLMEKARQGVRVRFLYDAVGSWKLSNAYIEELRAAGVEMIPFSPVRLPFLSNQINFRNHRKIIVIDGGVGFVGGLNIGDEYLGKNKYFGFWRDTHLLIRGEAVRTLQLIFLQDWYYMTGERLLTPDYLSPPLIVEEGQGGVQLIAGGPDQKWEVIKQLYFAMITSAKRSIWVASPYFVPDEDILTALKVAALSGIDVRLLAPKRPDKKIVFYASRSYFPELLEAGVKIYEYEKGFLHSKVIVVDGELASIGTANMDMRSFHLNFEVNAFLYYTDSIHKLVRDFLEDFRHASMIDYEQFQQRPFRVRIAESVSRLLSPLL

SEQ ID NO: 14434 - DNA, 1242 bp, Salmonella enterica subsp. enterica serovar Paratyphi A str. ATCC
  CDS (1)..(1242): transl_table=11
atgaaatgcggctggcgtgaaggtaatcaaattcagctactggaaaacggcgaccagttctatcctgccgtgtttgaggctatcgctcaggcacagcaaaaaatcattctggaaacctttatcttgtttgaagatgaggtgggtaaaaaactccatgccgctctgctaaaagccgcacagcgcggcgtaaaagccgaagtattactcgacggctacggctctcccgatctcagcgacgcgtttgtcggcgaattaacctcggcgggcgtgattttccgctattacgacccccgcccgcgtctactgggattgcgaaccaatatcttccgccgaatgcaccgcaaaattgtggtgattgatgatcgtattgcttttgtcggcggcattaactactccgccgaacatatgtcggattacggcccgcaggcgaaacaagactacgcggtacgggtcgaagggcctgtagtggccgatatcctgcaattcgaagtcgagaatctgccggggcaaagccccgcgcgccgctggtggaagcgccatcatcaggctgaagaaaatcgccaccccggcgaagcgcaggcgctgtttgtctggcgggataatgaagagcaccgcgacgatatcgaacgtcattatctgaaaatgctgacccaggcaaagcgtgaagtgattatcgctaacgcctattttttccccggctatcgcttgctccacgcaatgcgtaaagccgcccgccgtggcgtgagcgtaaaactgattgtccagggggaaccagacatgccgatagtcaaagtcggcgcgcggttgctctataactatctggtgaagggcggcgtgcaggtttatgaataccgacgccgtccgctgcatggcaaagtggcgctgatggacgatcactgggctacggtggggtcgagtaatctcgatccgctcagcctgtcgcttaaccttgaagctaacctgatcattcacgatcgtacttttaaccagaccctgcgcgataacttacaaggcatcatcgtgaatgattgtaagcaggtcgatgagtctatgctgccgaaacgcacctggtggaacctgaccaaaagcgtgctggtgttccactttttacgccatttcccggcgctggtcggctggctaccggcgcataccccgcatctggcgcaggttcccccgcctgcccagccggaaatggaaacccaggatcgcgttgatccagaaaatacaggagtgaagccctaa

SEQ ID NO: 14435 - protein, 413 aa, Salmonella enterica subsp. enterica serovar Paratyphi A str. ATCC
MKCGWREGNQIQLLENGDQFYPAVFEAIAQAQQKIILETFILFEDEVGKKLHAALLKAAQRGVKAEVLLDGYGSPDLSDAFVGELTSAGVIFRYYDPRPRLLGLRTNIFRRMHRKIVVIDDRIAFVGGINYSAEHMSDYGPQAKQDYAVRVEGPVVADILQFEVENLPGQSPARRWWKRHHQAEENRHPGEAQALFVWRDNEEHRDDIERHYLKMLTQAKREVIIANAYFFPGYRLLHAMRKAARRGVSVKLIVQGEPDMPIVKVGARLLYNYLVKGGVQVYEYRRRPLHGKVALMDDHWATVGSSNLDPLSLSLNLEANLIIHDRTFNQTLRDNLQGIIVNDCKQVDESMLPKRTWWNLTKSVLVFHFLRHFPALVGWLPAHTPHLAQVPPPAQPEMETQDRVDPENTGVKP

SEQ ID NO: 14436 - DNA, 1395 bp, Idiomarina loihiensis L2TR
  CDS (1)..(1395): transl_table=11
atgacacctttactgcccgcgtgcccggacaatcagtttcaattgctggaaaatgctcaccgggcgctgattgaacgggtgaggttaatacgtcaggccaggcatcatattgcgttacaatactatttgtggcgtcccgacagcagtggccttaccctgcttaaggaattactggatgccgtcgagcgtggcgtgcgggtcgaccttctgctggatgatttgcacagcaaacctttagaacctttattgcgagatttatcctcccgcgctaatttcaatattaggctttttaatccgtttaagcacagacgctggcgctggctaaactggttaaccgactttaagcgcatgaatcggcgaatgcataataaatcgatgctggtcgatgcggaagtggggattgttggtgggcgaaatgttggtaacgagtattttggtacacatgcgggacaactgttttccgatcttgatgtaatagcgaaaggcaaaatcgttaagacgttacttgatgactggcggcaatactggaactgcactttatcggttgcggttaacgcaataagctcgtcggataaaccgagattgtttaacgatatttggaaaggttatcaaaaacaaccggaacttcgagatttacaccagtttgttctttctgacgaacacttgacagacactccccagagcgacgctgaaacctggtatcaggcaaccgcaacggttgtcagtgatgatcctttaaaggctctgcctgatagtaagccgagccggttggtgacgcagcagttaacgcaaactcttggcttggcaaagcaatctattgttttggtttctccttattttgtgccgacgcctacaggtgttaaagagctggagaatttgtcggagcagggagtaaaagttcgcgtgctgactaattcactggcagtgacagatgtcccggccgtacatgcgggctaccagcgacaccgacgaaggctgttgttgtcaggtgtaaaactgtttgagctgaaacgaaccgaggaaaaacctttacgcaaagatgtgcgtccttatttcagacgctcggcgtctagcctgcatgctaaaaccgtgacagtggacagtgagaaagtctttgttggatcatttaattttgacccgcgttctgcgcaaattaacacagagtcggggcttttaattgagtcagcggagatggcagagagaattaacgcgatgtttgagcacgaactaccgctgcgatcgtatgaggctcgactcaaccgtttttataaactgtattggctggataaaagtaaaataccggcgttacggctctataaagagccgggagccggtatttggcgacggttggcggtttggttaaccgccaggttgccggttgatcatttactctag

SEQ ID NO: 14437 - protein, 464 aa, Idiomarina loihiensis L2TR
MTPLLPACPDNQFQLLENAHRALIERVRLIRQARHHIALQYYLWRPDSSGLTLLKELLDAVERGVRVDLLLDDLHSKPLEPLLRDLSSRANFNIRLFNPFKHRRWRWLNWLTDFKRMNRRMHNKSMLVDAEVGIVGGRNVGNEYFGTHAGQLFSDLDVIAKGKIVKTLLDDWRQYWNCTLSVAVNAISSSDKPRLFNDIWKGYQKQPELRDLHQFVLSDEHLTDTPQSDAETWYQATATVVSDDPLKALPDSKPSRLVTQQLTQTLGLAKQSIVLVSPYFVPTPTGVKELENLSEQGVKVRVLTNSLAVTDVPAVHAGYQRHRRRLLLSGVKLFELKRTEEKPLRKDVRPYFRRSASSLHAKTVTVDSEKVFVGSFNFDPRSAQINTESGLLIESAEMAERINAMFEHELPLRSYEARLNRFYKLYWLDKSKIPALRLYKEPGAGIWRRLAVWLTARLPVDHLL

SEQ ID NO: 14438 - DNA, 1383 bp, Azoarcus sp. EbN1
  CDS (1)..(1383): transl_table=11
atgcgcttctgtgtttcaatttcccacgtgaccggcagaacgcgagcctgccgcgtcggactgtctgcatctcgccgaaagggcctttcgatgccacgaaaatggatgtccaaacgcatgctctggaccgccgcgatcacggcggtgggcaccggagtcgtggcgttggtggggatgaacttctccacgccggaaaagaagctggaacaggtgctcgcgcaccgcttccccgtcgccgcgccgcagttccggcgcgagatgtcggtgctgctcgggccgccgatcatcgcgggcaatcgcgtcactgcactgcagaacggtgatgagatattcccggcgatgttgcaggccattcgtggcgctcgcacttcgatcacgttcgagacgtacatctactggtccggcgaaatcggcagggaattctccgatgcgctggccgagcgcgcgcaggccgggattccggtccatgtcacgatcgactgggcgggcagcatcaagatggacgagcgcctgctgcggaagatggagcaggccggggtgcgggtccatcgctaccggccgttgcactggtactcgctcgaccggctcaacaaccgtacgcaccgcaagttgctggttgtcgacggacgcatcggcttcaccggcggcgtcggggtcgcggaccaatggctcggacacgcgcaggatcccgaacattggcgcgattcccattaccgcatcgagggcccggccgtcgcgcagatgcaggcggcgttcaacgacaactggatcaagacgaccggcgaagtgctcagcggtccggcctatttcccggagctgtcgccggtcggagacgtggccgcgcatctcttcctcgcgtcgccgtcgggcggcagcgagagcatgcacctgatgtacatgatggcagtgagcgccgcgaaacattcgatcgacctcgccgcatcgtacttcgtgccggacgagctgatcgtcaaggcgttgatcgccgcccgggaacgcggggtgcgcgtccgcgtgctgctgcccggcccgtacatcgattcggacgcagtgcggttcgcgtcgaaagccggatgggggccgctgctgcaggccgacatcgagatccacgaataccagccgacgatgctgcacacgaagctgctggtgatcgaccgcgaggtggtgtcggtcggatccaccaatttcgacatccgttcgttccgcctcaacgatgaggcgagcctcaatctctacgaccggccgttcgccgagaaaatgatcgcggtcttcgagtccgacctcgcgcaggcgcagcgctacacctatgaaatgtggcaacagcggccgatgaaggacaagctgatcgagaaattcgtgctgccgctgaagtcgcagctgtga

SEQ ID NO: 14439 - protein, 460 aa, Azoarcus sp. EbN1
MRFCVSISHVTGRTRACRVGLSASRRKGLSMPRKWMSKRMLWTAAITAVGTGVVALVGMNFSTPEKKLEQVLAHRFPVAAPQFRREMSVLLGPPIIAGNRVTALQNGDEIFPAMLQAIRGARTSITFETYIYWSGEIGREFSDALAERAQAGIPVHVTIDWAGSIKMDERLLRKMEQAGVRVHRYRPLHWYSLDRLNNRTHRKLLVVDGRIGFTGGVGVADQWLGHAQDPEHWRDSHYRIEGPAVAQMQAAFNDNWIKTTGEVLSGPAYFPELSPVGDVAAHLFLASPSGGSESMHLMYMMAVSAAKHSIDLAASYFVPDELIVKALIAARERGVRVRVLLPGPYIDSDAVRFASKAGWGPLLQADIEIHEYQPTMLHTKLLVIDREVVSVGSTNFDIRSFRLNDEASLNLYDRPFAEKMIAVFESDLAQAQRYTYEMWQQRPMKDKLIEKFVLPLKSQL

SEQ ID NO: 14440 - DNA, 1458 bp, Azoarcus sp. EbN1
  CDS (1)..(1458): transl_table=11
atgacatcagggtcaagccggcgtactgacagctgctttggaaacgcttcctttgacggcgggcgcgaatgcttcgacggcgcgtggtgcgtgctgctcgttccgttcgcgcttgcggcctgcgccacgagcccggccgtcgatacggtgggtctcccggtgcgtccctcgccggcctcggtcgaagttcgcgtcgagcacgcggacggggcactgcgcaccgatccgtcaccgaaagtcgtgcagcagctcgatgccgaccgtgtcgggaaggaactgctcgtacatcatctcgcccatgtcgaggacgcgctcgcgacgccgctggttctcggcaacgacgcgcacctgcttgtcgacggcccggcgacgtatcgggcgatgttcgcggcgatcgagaaagcgcggcgccgcatccatctggaaacctacatcctcgagtcgggggagcagggcgaccgcctcgcccgtctccttgcagcgaagcgccggcagggcgtggagattcgcgtcctgtacgacagtgtcggctcgctcgacacgcctccccgatatttcgaggacctcgtcgccgccggcatcgcggtatgcgaattcaatcccgtcaatccgctgaaactcgcaggtgatccgcggctgagcctcaacaaccgcgaccatcgcaagctgctcgtcatcgatggtcaaatcgcctttaccggcggcatcaacatcagcggcgtgtatcgcgccggttcgttcggcagcaagcgccgcgtgccgactcgcgacgaggggtggcgcgacacccacgtgatggtgcggggaccggtcgtgagccagttcgaagagctgttcaacgacgcatggcgcgagcagcgctgcccgtctccggtagtgcggcaggcgacccgcaccgagcgtgccgggagcatggcaatgcgcctggtcgccgccgatccagtgtcggaacgcagtgagctgtatgtcgcgctgatgtccgcgctcgaccatgcgcgcaagcgggtgtggctgacctacggatatttcgtgccggacgaacgcaccctgcagtcgctgcgcgacgcggcgcaacggggcgtcgacgtgcggctcgtgctgcccggtttcagcgatttctgggcgccgttccacgccggtcgttcgcattaccaggacttgctgagcgccggggtgcacatctacgaacggcgcgacgcgctgctgcatgcaaagaccgcagtcatcgacggggtgtggtcgagcgtcggatcgacgaacctcgactggcgcagcttcgtgcataacttcgaagccgacgtgctggtgctcgacggcgcattcgcacaagaaatggaagaactcttccgcctcgaccaatcggcttcccacgaagtgacgcccgagcagtggaaggatcgcggcgtgcgcgcccggctgctcgaatggctcgcacgacgctgggaatatctcctgtag

SEQ ID NO: 14441 - protein, 485 aa, Azoarcus sp. EbN1
MTSGSSRRTDSCFGNASFDGGRECFDGAWCVLLVPFALAACATSPAVDTVGLPVRPSPASVEVRVEHADGALRTDPSPKVVQQLDADRVGKELLVHHLAHVEDALATPLVLGNDAHLLVDGPATYRAMFAAIEKARRRIHLETYILESGEQGDRLARLLAAKRRQGVEIRVLYDSVGSLDTPPRYFEDLVAAGIAVCEFNPVNPLKLAGDPRLSLNNRDHRKLLVIDGQIAFTGGINISGVYRAGSFGSKRRVPTRDEGWRDTHVMVRGPVVSQFEELFNDAWREQRCPSPVVRQATRTERAGSMAMRLVAADPVSERSELYVALMSALDHARKRVWLTYGYFVPDERTLQSLRDAAQRGVDVRLVLPGFSDFWAPFHAGRSHYQDLLSAGVHIYERRDALLHAKTAVIDGVWSSVGSTNLDWRSFVHNFEADVLVLDGAFAQEMEELFRLDQSASHEVTPEQWKDRGVRARLLEWLARRWEYLL

SEQ ID NO: 14442 - DNA, 1419 bp, Zymomonas mobilis subsp. mobilis ZM4
  CDS (1)..(1419): transl_table=11
atgaccttaatgacgcttggaagtttttatgaagtagtcgcgtggctgatacgcttgacgatgctcgtcatcgttcccatgcgccggacaccacaagccgccagtagctggctgctgctgattttttttcaaccggctctgggcttgcttctttatttgatgattggtcaggcacgttttccgtcatggcgcgcagaacgttttgccaatctcaaatcttttctggaagaacaaaggcaaaaattacaaaattcggtagcctctctccctgcagaagcggccttggctgccgatcttgctgaaaatcttggtcatatgcccgccttatcgggtaaccggatgctttatatttctgattatcaggcgctttttgatcatctcgccgccgatattgataaagccgaacaacatgttcatctcgttatctatatttttgatagcgaccgctccggccaacagattattgccgccttgggacgcgccgcgaaaagaggcgttaattgtcagatattgattgatgccttgggatcacgccgctccggtaaacaggttatccagcaactaaaaaaccttggagttgatgcaagggaagccctgccctttcgcctgttaagagggcggacacgcggggatatgagaaatcatcgaaaattattcattatagacggcaaaattggctatgctggatcacaaaatattatcaatcgcgactggcggccgggcgttgttaatcaggaactaacagtcagggtcgaagggcccatcgtttttgaaatggaaacgctcttcgcgataaactggtatctcgaaagcggggcattacctgatagaatgagggacacacctcatttggtgccccccaaagaaggtagccatattttacagctgttacccagcggggcagattaccgtttggccggtttcgaaacgatgctggttaccggcatttacgccgcaaaaaaacagatagtgctcgttacaccctatcttattcctgatagcgatttactagcggctttaaaaacggcggccttacgcggggtcaggatagacattattgtctcgaaaattgccgaccaaatcttggttagcatggcacaaaaaagctattatcaagaattgctaagcgccggtattcatatccatcgctacagagacaagctcctccatgccaagcatatcagtgttgataacaaattggcgatggttggctccagtaatgtcgatattcgctctttcttgctcaatgaagaagtcagcctaatcatttacgataaagaagccattgcccagcttcaaaatatcgaaatggattatctaaaaaatgccgatgaagtcagtaaggcagcatggcgcctgcgcccctgctattgtaaagtcatggaaaatctggcgcgattagttagtccgctgttataa

SEQ ID NO: 14443 - protein, 472 aa, Zymomonas mobilis subsp. mobilis ZM4
MTLMTLGSFYEVVAWLIRLTMLVIVPMRRTPQAASSWLLLIFFQPALGLLLYLMIGQARFPSWRAERFANLKSFLEEQRQKLQNSVASLPAEAALAADLAENLGHMPALSGNRMLYISDYQALFDHLAADIDKAEQHVHLVIYIFDSDRSGQQIIAALGRAAKRGVNCQILIDALGSRRSGKQVIQQLKNLGVDAREALPFRLLRGRTRGDMRNHRKLFIIDGKIGYAGSQNIINRDWRPGVVNQELTVRVEGPIVFEMETLFAINWYLESGALPDRMRDTPHLVPPKEGSHILQLLPSGADYRLAGFETMLVTGIYAAKKQIVLVTPYLIPDSDLLAALKTAALRGVRIDIIVSKIADQILVSMAQKSYYQELLSAGIHIHRYRDKLLHAKHISVDNKLAMVGSSNVDIRSFLLNEEVSLIIYDKEAIAQLQNIEMDYLKNADEVSKAAWRLRPCYCKVMENLARLVSPLL

SEQ ID NO: 14444 - DNA, 1413 bp, Silicibacter pomeroyi DSS-3
  CDS (1)..(1413): transl_table=11
atgtgggccgctctactctcgctgatcgtgttctgcctttacggggcggcgatcgtctgcgcggtgcaggcggcacgcaccgcgcgcacgccgcaaggcgcggttggctgggtggtgttcctgctcaccctgccctgggcctcggtgccgctttacatgtttctggggcatcaccggtttcacggctatcgcatcgcgcgccgcgagagtgaacgggtggtcgccgggctgcgcgcccatgccgatgccaccgcccccgatcccgatcgggtcatggtcaacacccgccccttcgagaagatcgcccatatggcggtcagccggggcaatggcgcccggctgctggtcgatggcgaggccacctttgccgcgctgttcgccgccctggacgcggcgcgccactatgtgctgatccagttctatatcgtgcgcgacgacgatctggggctggaactgcgcgaccgtctgatcgcggcggcgcagcgcggggtcaaggtgcggttccttaccgacgccatcggcagctatggcctttcggacaattatatcgaggatctgcgcgccgcaggcatcgacatcgccaatccgcgcaagcagcgcgggcccaatacccgctttcaggtcaattaccgcaaccaccgcaagacggtggtggtagacggccagactgggttcatcggcggccacaatgtgggtgtcgaatatctgggtcaggatccggtgatgggccgttggcgcgacacccatgttcagatcaccggcccctctgtgctgcagctccagctggtctttgccgaggactggcactgggcgcggggcgaggatctgctcgatcttctcagctgggaaacccggctcgacccgcaggatgccgatgcgctgatcgtcgccaccggccccggcgaccgcaccgaaagcggcgccatgatgttctttgccgcgatcaccgctgccgagcgccgctgctggatcgcctcgccctatttcgtgcccgatctcgacattctggcggcgctgaaacatgccgcgctgcggggggtcgatgtgcgcctgctggtgcccgacgaggccgatcacaccatcccctggctggcggctttcgcctatttcgacgaggtgcgcgaggccggggtgcgcgtgatgcgctataccgacgggttcctgcatcaaaaggtgttcgtggtcgatgacaccatcgccgccgtgggcacaaccaatctggacaaccgctcgttccgcctgaatttcgaggcgatggcgctgttctttgatgcgacagtggccggtcaggtgacggcgatgctggagcatgattttgccagcagcaccgaactgacccgcagcctggcggcacagccggtattcatccgctacggcgcgccgctggcgcggctgtttgcgccgatcctgtga

SEQ ID NO: 14445 - protein, 470 aa, Silicibacter pomeroyi DSS-3
MWAALLSLIVFCLYGAAIVCAVQAARTARTPQGAVGWVVFLLTLPWASVPLYMFLGHHRFHGYRIARRESERVVAGLRAHADATAPDPDRVMVNTRPFEKIAHMAVSRGNGARLLVDGEATFAALFAALDAARHYVLIQFYIVRDDDLGLELRDRLIAAAQRGVKVRFLTDAIGSYGLSDNYIEDLRAAGIDIANPRKQRGPNTRFQVNYRNHRKTVVVDGQTGFIGGHNVGVEYLGQDPVMGRWRDTHVQITGPSVLQLQLVFAEDWHWARGEDLLDLLSWETRLDPQDADALIVATGPGDRTESGAMMFFAAITAAERRCWIASPYFVPDLDILAALKHAALRGVDVRLLVPDEADHTIPWLAAFAYFDEVREAGVRVMRYTDGFLHQKVFVVDDTIAAVGTTNLDNRSFRLNFEAMALFFDATVAGQVTAMLEHDFASSTELTRSLAAQPVFIRYGAPLARLFAPIL

SEQ ID NO: 14446 - DNA, 1467 bp, Bacillus clausii KSM-K16
  CDS (1)..(1467): transl_table=11
atgatgattgaatctgcatttgcaataccaacatatttgcttgtcgccctcatgatcgtcaatatcttgcttgccgccattttaatttttattgaacggaaagatgcacaggcgacttgggcatggctgcttattctattttttattccactaggcggctttattatttacattttcctcgggcaaacattaacacggaggaaaatgtttgaatgggaaggaataaaaaaagtaggactcgagcatttcattgaagaacaaaagcgtgaccttttagacacttcgttccgcttttatagccctactgttgataaaaatcgcgaattgatctatatgcatctaatgagcaacgacgcgctgctaacaaaagagaaccgtgtcgatattttcagcgacggcaaagaaaaatttgcgcaattgttaaaggacatcaaacaagccgagacgttcatccacatccagtattatattttccgttacgatgagatcggaaaaacgatcgtggatgcgctgacagaaaaagcgcgccaaggcgtaaaagtccgcttgctctatgatgacctcggttcccggtctttgcgcaaaaagtatttaaaagcgtttcgtgaagcaggcggagaaatcgggatttttttcccatctaggtttacgattgttaacttgcgtttgaacttccgcaaccaccgtaaactcgttaacatagatggcaaatgcggttatgtcggcggctttaacgttggagatgagtatttaggaaaaagcaaaaaatttggctactggcgcgatacccatttgcgtatcgtcgggcctgctgtccaagcgattcaaacacgctttatcttagattggaaccaggcttccaaacaataccatatttcctaccatgatcgttattttccagaagtgcagcctgctggcgatacgcctgtacaaattgtctcaagcggaccagactcggaatttgaacaaatcaaaaatggctatttaaaaatgatcatggatgcgcgaaagtcgattttaatccagacgccttactttattcccgaccaaacgttgcttgatgcccttcgtgtcgctgcacaaacaggcatagaagtaaaactgatgattccaaacaaaccggaccatatgtttgtttactgggcaaccacttcccatattggcgaaatgctaagagctggcgcaacggtctatcagtatgaaaatggctttattcataataaagtgttgatcgtcgatgaaacggtttgttctgtcggtaccgctaacattgatcaacggagctttaagctcaattttgaagtgaatgcctttatttatgacagtcaaatcgctggccagctaatagcggactttgagaatgatgtaaaacactctactcaaattacgccagaaatgtatgaaaacaggccaataagcgtccgctttaaagagtcaatttcacggctgttgtcgccgattttataa

SEQ ID NO: 14447 - protein, 488 aa, Bacillus clausii KSM-K16
MMIESAFAIPTYLLVALMIVNILLAAILIFIERKDAQATWAWLLILFFIPLGGFIIYIFLGQTLTRRKMFEWEGIKKVGLEHFIEEQKRDLLDTSFRFYSPTVDKNRELIYMHLMSNDALLTKENRVDIFSDGKEKFAQLLKDIKQAETFIHIQYYIFRYDEIGKTIVDALTEKARQGVKVRLLYDDLGSRSLRKKYLKAFREAGGEIGIFFPSRFTIVNLRLNFRNHRKLVNIDGKCGYVGGFNVGDEYLGKSKKFGYWRDTHLRIVGPAVQAIQTRFILDWNQASKQYHISYHDRYFPEVQPAGDTPVQIVSSGPDSEFEQIKNGYLKMIMDARKSILIQTPYFIPDQTLLDALRVAAQTGIEVKLMIPNKPDHMFVYWATTSHIGEMLRAGATVYQYENGFIHNKVLIVDETVCSVGTANIDQRSFKLNFEVNAFIYDSQIAGQLIADFENDVKHSTQITPEMYENRPISVRFKESISRLLSPIL

SEQ ID NO: 14448 - DNA, 1197 bp, Bacillus clausii KSM-K16
  CDS (1)..(1197): transl_table=11
atgaatatcctcattacgattctcgccttagtggttgtgattggcgtttggctttatttcgattacaaactgggcctcagagcacttcggaaaaaatcgcaagccacttcaacaggccctcttgcaagcaagattgaattgatcacaaatggtgaagactttatcgataggcttcttgaagacatccagaaggcaaataaacacattcacattcagttttatatttttcgcgatgattatatcggaaaacggatggtagacacattggtcgctaaggcggaggcggggatagacactcgtttgctcattgaccaatttggctgcaagctccggcgagggacaaaaaagcagttacgggctgccggcgttgatgtggcaatagcagcaaaagtgcacggcccgtggtttttcttttccttgaatcgccgcaaccaccgcaagcttgctgtcattgacggtcatacaagctacttaggcggctataacgtcggcgatgaatatttagggcgcaatcccttttttggcttttggcgcgattttcatgtccgtataacgggtgaaggcagccgtgccattcaaacacaatttttggctgactttgaagcggcgactggcaaacatattgaaagaaaatcgtttttcccagacttacaagcgggtagccaaacattgcagtttataagcacacaagggatggagtttgaacaaacactgcttaagcttattcgtagcgctaaaaacagcttaatcatcggcagcccttattttatcccgacacgggccgtaatggatgccatcattgacgtggcgcaaagaggcgtcttcgtttccttaatcctccctgaaaaagcagatcatccccttgttaagcatggggccactccttatgtaattgaagcgctacaggcaggtgtgcttgtctaccactattatcgaggattttatcatgttaaagcggtagtagccgatcaatctacatgtttagtggggacgccgaatatcgataaacgcagttttcatctaaacgatgaaatgtcatgcttaacccatgaccagacatttattgaaacagttctcgctgtgctccatgctgatatgcacgcttccatgactgttacaatcgaacagctccagaagcgcccactccttgaccgtgtgaaagaagttaccgcagcccccctttcaccattgctgtga

SEQ ID NO: 14449 - protein, 398 aa, Bacillus clausii KSM-K16
MNILITILALVVVIGVWLYFDYKLGLRALRKKSQATSTGPLASKIELITNGEDFIDRLLEDIQKANKHIHIQFYIFRDDYIGKRMVDTLVAKAEAGIDTRLLIDQFGCKLRRGTKKQLRAAGVDVAIAAKVHGPWFFFSLNRRNHRKLAVIDGHTSYLGGYNVGDEYLGRNPFFGFWRDFHVRITGEGSRAIQTQFLADFEAATGKHIERKSFFPDLQAGSQTLQFISTQGMEFEQTLLKLIRSAKNSLIIGSPYFIPTRAVMDAIIDVAQRGVFVSLILPEKADHPLVKHGATPYVIEALQAGVLVYHYYRGFYHVKAVVADQSTCLVGTPNIDKRSFHLNDEMSCLTHDQTFIETVLAVLHADMHASMTVTIEQLQKRPLLDRVKEVTAAPLSPLL

SEQ ID NO: 14450 - DNA, 1482 bp, Staphylococcus aureus subsp. aureus COL
  CDS (1)..(1482): transl_table=11
atgcgatttacattttcaaacgatttaggaacgttatttactattattttagccattggattcatcattaatttagtattggcttttattattatctttttagaaagaaataggcgtacagcgagttcaacttgggcatggctatttgtactttttgtcttaccattgattggttttattctttacttgttttttggtagaaccgtttcggcacgcaaattgaataaaaacaatggtaacgtgttaacggatttcgatggacttttaaaacaacaaatagaaagctttgataaaggtaattatggtactgataacaaacaagttcaaaaacatcatgatttagtacgtatgcttttgatggatcaagatggttttttaactgaaaataataaagttgatcatttcattgatggaaatgatttatatgatcaagttttaaaagatattaaaaatgcaaaagaatatatccatttagagtactatactttcgctttagatggtttaggtaaaagaattttacatgctttagaagaaaaattgaaacaaggtctagaagtaaaaatattatatgatgatgttggatctaaaaatgttaagatggcaaattttgatcattttaaatcgttaggtggagaagttgaagcattttttgcttcaaaattaccgttattgaatttcagaatgaataatagaaatcatagaaaaatcatcgtaatcgatggtcaactaggttatgtcggaggatttaacattggtgatgaatatctaggattaggaaaattaggatattggagagatacgcatttacgtatacaaggggatgcggttgatgcactgcagttgcgatttattttagactggaattcgcaagcgcaccgtccacaatttgaatatgatgttaagtatttccctaaaaagaacggaccattgggcaattcaccaattcaaatagctgcaagtggcccggctagtgactggcatcaaattgaatacggttatacaaaaatgattatgagtgcaaagaaatctgtatatttacaatcaccatatttcattccggataattcatatataaatgccattaaaattgctgctaaatcaggtgtagatgtacatttaatgattccatgtaagccagatcatccattagtatattgggcgacattttcaaatgcctctgacttattatcaagtggtgttaaaatttatacgtatgaaaatggatttatacattctaaaatgtgcttaattgatgatgaaatcgtatcagtgggcacagcaaatatggactttagaagttttgaattaaattttgaagtaaatgcctttgtatatgatgaaaatcttgctaaagatttaagggtggcttatgaacatgatattacaaaatcaaaacaactaaccaaagaatcatatgccaatagaccgctgtctgttaaattcaaagaatcgttagcaaaattagtttcgccaattttataa

SEQ ID NO: 14451 - protein, 493 aa, Staphylococcus aureus subsp. aureus COL
MRFTFSNDLGTLFTIILAIGFIINLVLAFIIIFLERNRRTASSTWAWLFVLFVLPLIGFILYLFFGRTVSARKLNKNNGNVLTDFDGLLKQQIESFDKGNYGTDNKQVQKHHDLVRMLLMDQDGFLTENNKVDHFIDGNDLYDQVLKDIKNAKEYIHLEYYTFALDGLGKRILHALEEKLKQGLEVKILYDDVGSKNVKMANFDHFKSLGGEVEAFFASKLPLLNFRMNNRNHRKIIVIDGQLGYVGGFNIGDEYLGLGKLGYWRDTHLRIQGDAVDALQLRFILDWNSQAHRPQFEYDVKYFPKKNGPLGNSPIQIAASGPASDWHQIEYGYTKMIMSAKKSVYLQSPYFIPDNSYINAIKIAAKSGVDVHLMIPCKPDHPLVYWATFSNASDLLSSGVKIYTYENGFIHSKMCLIDDEIVSVGTANMDFRSFELNFEVNAFVYDENLAKDLRVAYEHDITKSKQLTKESYANRPLSVKFKESLAKLVSPIL

SEQ ID NO: 14452 - DNA, 2016 bp, Xanthomonas oryzae pv. oryzae KACC10331
  CDS (1)..(2016): transl_table=11
gtgaagtgcctgttgagggttctcgtgctggcaacggtgttgctcggcaccggatgcgccagcctgtcgcaaaccgaacgcaaccgtgctgccggcgtcgccgctgcggcacgcagtaccgtggtgaattgcacccaggccaatcgttgcgcgcaaccttcgccgctgcgcgcgctgggcggcgaggcgatcaccgcctccacaccggcggcgccgcggcactacgccaccatcgtcgaccacggcgaagaatcgctggtggctcggctcaatctgatccgcagcgctacccgcagcatcgacctgcagacctatatcttcgacaaggacgacagcgcgcgcatgatcatggacgcgctgatggacgccgcgcaacgcggcgtcaaggtgcgcatcctgatcgatcagctgtcggcgatcgccgatctgcagattctcggtgcgctggccagcagccacgaaaacctgcagctgcgcatctacaaccccaccttcggcaaggtcaaactcaactacttcgactatgccggcagtgtgctgtgctgcttccgtcgcttcaatcagcgcatgcacaacaagctgttggtggtggacgacgtgctcggtgtggtcggcgggcgcaattaccaggacgactattacgagtgggacagcgagtacaactttcgcgaccgcgacgtgattctggccggtccggaagttcgtgcgatggccgctaatttcgatgcgttctggcgtgcccggcgcagtgtgccggccgagcgtttgaacgatgtcgggcgcgtgctgctggagcagggcgtaccgcagatgccgccagcgaacttccgccggcccgaccgggtggcgcgtgtggatcgcgaagcgcgcgatccgcagttcgtacgcgatgccttcgtgaccccggccatgccggtgcagcgtgtgctgtatgtggccgatctgccgcaaaagcaccgcaaggaacatgctgccaaggcggtttccacggcgccggaactggatggcctgattgccggcgcgcagcaggaagtgctgctgcagacgccgtatctggtgttgtccgacgcggcgcaggcgatctttcgcacgctgcgcacgcacccgcagccgccgcgcatcgtggtgtcgaccaatagcctggccgccaccgacaatcccatcgtgtatgcgctgtcgtacaagttcaaacgccgcaacatgcgcgagctgggcttcaacatctacgagttcaagccgttcccgctcgatgttccggtggattacgccaacctggtgccggatacactcaaccctgcttccgacatcaacgaagacagccgcaccaatcgcctgatcggcggcagtgcggccggcaatgcgatgcgcggcagcagcggtgcagacgggaacacaagcgcacgtgctggcagcgtgctacgcggcagcggtggccgcgcgccgggcggtagcgaggttgatcggcgcgtgctgcgtaccgaaacgagaccctcgttcctgggcacgcgtgcggtcaacaagccgctgccggtgacccgcgccggtgcgcgcatgggcttgcatgccaagtcgctggtggtggatcgccgcatcggcgtgatcggcacgcacaacttcgacccgcgcagcgagaactacaacaccgaagcggccgtggtgatcgacgacgcgcgctttgcgcaggcgctggccgccagcatcgaacgcgatatgtcgccggaaaacgcctggacggtggccccgcgcgaaaagccgccgatgttgagcggattgaactacagcgtgggtaaagtttccgaagccttgccggtgctggacttctggccgtggcgctacgccaccaattacgagttccagcccggcccggattgcttgttcccgctcaagcgccaggatacgcagttccgtaagtgctacgtcgcggtgggcgacttcccggaggtcaatgtcggcccgaagtggcttttggtacgcatgctcaccgccttcggcgccgggctggtgccgattctttga

SEQ ID NO: 14453 - protein, 671 aa, Xanthomonas oryzae pv. oryzae KACC10331
MKCLLRVLVLATVLLGTGCASLSQTERNRAAGVAAAARSTVVNCTQANRCAQPSPLRALGGEAITASTPAAPRHYATIVDHGEESLVARLNLIRSATRSIDLQTYIFDKDDSARMIMDALMDAAQRGVKVRILIDQLSAIADLQILGALASSHENLQLRIYNPTFGKVKLNYFDYAGSVLCCFRRFNQRMHNKLLVVDDVLGVVGGRNYQDDYYEWDSEYNFRDRDVILAGPEVRAMAANFDAFWRARRSVPAERLNDVGRVLLEQGVPQMPPANFRRPDRVARVDREARDPQFVRDAFVTPAMPVQRVLYVADLPQKHRKEHAAKAVSTAPELDGLIAGAQQEVLLQTPYLVLSDAAQAIFRTLRTHPQPPRIVVSTNSLAATDNPIVYALSYKFKRRNMRELGFNIYEFKPFPLDVPVDYANLVPDTLNPASDINEDSRTNRLIGGSAAGNAMRGSSGADGNTSARAGSVLRGSGGRAPGGSEVDRRVLRTETRPSFLGTRAVNKPLPVTRAGARMGLHAKSLVVDRRIGVIGTHNFDPRSENYNTEAAVVIDDARFAQALAASIERDMSPENAWTVAPREKPPMLSGLNYSVGKVSEALPVLDFWPWRYATNYEFQPGPDCLFPLKRQDTQFRKCYVAVGDFPEVNVGPKWLLVRMLTAFGAGLVPIL

SEQ ID NO: 14454 - DNA, 1419 bp, Xanthomonas oryzae pv. oryzae KACC10331
  CDS (1)..(1419): transl_table=11
atgctgcccgattgggtgacaggcacttggctgctggcactggactgggcgatccgtctggctgcattgctatggattcccgcccgcaccacgccggatgcggcgcgcagctggctgctgttgatcggcttcgtgccggtggtcggcctgccgctgtatctgctgttcggccacccatggttgtcgcggctgcgggtggagcggcaagccaccgcctcgcaggtgattcgcgagcagcaactgccactgcacgcgctgcgctggaccccgcaggcagacaccagcagtgccgaagtggtgccgctgatcgagcgcgaaggcgatttcatgccgacgctgggcaatgcggtggagttgctcgacgactacgcgcactccttgcaaaccctgatcgcggcgatcgacgcggccgaaaaacgcgtgcacttgttgtactacctgatgttcgacgatgcggtgggcgaggcggtggtggcggcgctggaacgcgccagtgcgcgcggcgtgcgctgccgtgtgctgctggatgcggtgggcgccaagcgcggcctgcgtcgctacagcaagcgcctgcaggacggtggcgtgcaggtgctggcggtattgcccggcggcctgccctggcgtcgcagtgggcgcatggatctgcgcaaccatcgcaagattgcggtgatcgacaaccagatggcgtttgtcggctcgcagaatctggccgaggccggcttcatcgatggcgtgcccaatcgcgaattggtggcacgcgtgcgcgggccggtggtcaatcatcttgaagcggtgttcgccagcgactggttcaccgaaaccggcgagcgcctggacgtctggccggacgcgccggtgtgcgaggccaatatcgccacgcaattgctgcccagcgggccggcgtatccgttcgacaatgcgcgcgatgcgatcaatgcgatgatccatctggcgcggcgcaaggtggtgctggtgacgccgtacttcgtgcccgacgaggccttgctgagcgcgttgcgcattgccggcgtctcgggtgtggatgtgcagttgattttgtcggagagcaacaaccagcgcctggccgcgtgggcgcaggaagcctatttcgaagaactgctgcggtgtggggtgaagattgcgctgtatcgcccgcattttctgcatgccaagcacctgagcatggacgagaacattgcgctggtcggctcgatcaatctggacatccgttcgttcgcgctcaacgccgagatcggcatgctctgctacgacactggcgtggtgcagcggctgcgcgagatcgaacaggactatttggccaatgcgcggcaattggagctggatcagtggcgccgccgcccggcctggcgtcgcagccgcgagggcattgcgcggctggccgatgcgttgatgtag

SEQ ID NO: 14455 - protein, 472 aa, Xanthomonas oryzae pv. oryzae KACC10331
MLPDWVTGTWLLALDWAIRLAALLWIPARTTPDAARSWLLLIGFVPVVGLPLYLLFGHPWLSRLRVERQATASQVIREQQLPLHALRWTPQADTSSAEVVPLIEREGDFMPTLGNAVELLDDYAHSLQTLIAAIDAAEKRVHLLYYLMFDDAVGEAVVAALERASARGVRCRVLLDAVGAKRGLRRYSKRLQDGGVQVLAVLPGGLPWRRSGRMDLRNHRKIAVIDNQMAFVGSQNLAEAGFIDGVPNRELVARVRGPVVNHLEAVFASDWFTETGERLDVWPDAPVCEANIATQLLPSGPAYPFDNARDAINAMIHLARRKVVLVTPYFVPDEALLSALRIAGVSGVDVQLILSESNNQRLAAWAQEAYFEELLRCGVKIALYRPHFLHAKHLSMDENIALVGSINLDIRSFALNAEIGMLCYDTGVVQRLREIEQDYLANARQLELDQWRRRPAWRRSREGIARLADALM

SEQ ID NO: 14456 - DNA, 1548 bp, Vibrio fischeri ES114
  CDS (1)..(1548): transl_table=11
atgtcagtgcttaaacgcattcatgtcactctattttttgtcgctattctttctggctgtggttcgcttcctaatgaaattgaacacacgaacgaatcggtatcagcaccattaagcagttcgctttctgagttaagtgcttctttccaaacagttccctcaacagcagaaaccagtgctgttttgttgcaagattcgggatgggatgcattagcgcaacgtttagcattaattgagactgcagagcacagcattgatatccaatattatatttggaactcagacgcttcaggtcattaccttgccagtcgtttattagcggcggcagatcgtggtgttaaagtgcgtgtcatgctggatgatatcaatctcaatgaacgtgaagatctacttgtggcattaaacgcgcatcctcacgttgagatacgagtatttaaccctattcccactcgccgtggcgttacaaagtgggtgaacttcttaggggatttttctcgtttaaatcgtcgtatgcacaataaatcattcaccgttgatggcgtgttctctgttgttggtggacgtaatattggtgatgagtattttgatctttctaacgagattaactttcgagaccgtgatgtgttagttcgaggttctgtcgtttatgatatacaaaccagctttatcgagtattgggacagccgttggtcttaccctgtggatttattagcaaaagaagcttcgcaagaaccactcttacaaaaacaaccagtattagatgagattgatgcacctgtttataaaaactacccagctttaccagagggaaataaaacagcgcatcaatacttaactaatctaatggataaaatgacttgggttaatgctaagttcgtatttgatcgcccagtaccgcttgataaagacaataccgatgagcctaaagagaccgcaaaagccctcggcaaattggccagtgaatccaagaaagagatcttattagaatcggcttaccttatttttgatgataaccaacttaaagggtggcaagcgcttattaatacaggtgttgagataaaagcgcttaccaactcaatggcatcgaacgatttaaccactaaccactcaggttacgcaggtcgccgtcaagatatgcttgagcacggcattcaactttatgaattaaagcctgaaacagagctatgtgaagagtcgaccaaagacgtttctaaatgtgcaccaatattaccttatggacttcacgccaagtccgcagtttttgatgacaaaatcgcaagtatcggctcttttaacttcaatttgcgttcaacgtacttgaatacagaatcgattttaattattgaaaatcaaaaaatcgcagagcaactcactcaagatattgaacacgccatggatgaagaaaatagttggcacctaaaactgcaagaaggggatgttcgttggtattctggtgataaaagttgggaaagtgaaccagaaactgggcgttgggagcgatttcaatctggattcttacagttattaccaatagaaaagtatttgtga

SEQ ID NO: 14457 - protein, 515 aa, Vibrio fischeri ES114
MSVLKRIHVTLFFVAILSGCGSLPNEIEHTNESVSAPLSSSLSELSASFQTVPSTAETSAVLLQDSGWDALAQRLALIETAEHSIDIQYYIWNSDASGHYLASRLLAAADRGVKVRVMLDDINLNEREDLLVALNAHPHVEIRVFNPIPTRRGVTKWVNFLGDFSRLNRRMHNKSFTVDGVFSVVGGRNIGDEYFDLSNEINFRDRDVLVRGSVVYDIQTSFIEYWDSRWSYPVDLLAKEASQEPLLQKQPVLDEIDAPVYKNYPALPEGNKTAHQYLTNLMDKMTWVNAKFVFDRPVPLDKDNTDEPKETAKALGKLASESKKEILLESAYLIFDDNQLKGWQALINTGVEIKALTNSMASNDLTTNHSGYAGRRQDMLEHGIQLYELKPETELCEESTKDVSKCAPILPYGLHAKSAVFDDKIASIGSFNFNLRSTYLNTESILIIENQKIAEQLTQDIEHAMDEENSWHLKLQEGDVRWYSGDKSWESEPETGRWERFQSGFLQLLPIEKYL

SEQ ID NO: 14458 - DNA, 1455 bp, Vibrio fischeri ES114
  CDS (1)..(1455): transl_table=11
atggataaattttatcaagcacttacaattgttagcttcgttttatattggcttctcgtagcaggcgtaacaattcgtgttgttttcaaaccaagacccgtaggcgtatcattagcttggcttatgattatttacattcttcctgttattggggtcatggcttattttttaattggtgagcttaacttaggtcgaactcgtggtgaacgtgcacgagctatgtttacgccttatgaacagtggtttgcacaaattcatcattgccaatatcaccaaccacattcgatttcccatcgtatctcagcgattcacaatttatgctctaatcgcctcgggatccctgcattaagtggcgatacactctcgctattaaataccccttcagaaattctcaatgcgattatttctgatatagaaaaagccgaacatgaaataaatatggagttttatatttggcatcacggtgggctggctgacagtgttgcaagcgcactaattgtagctgcaaaacgaggcgtaactgtcaatgtgctgcttgactccgcaggtagtatggatttttttaagagtcactggcctaaattactcaagcaatccggtgtcaacattgtagaagctctaagtgttagtccatttcgtatgttctttcgacgcctagatctacgcttgcatcgaaaaattgttgtgattgataaccgtatcgcttataccggctcaatgaacctagttgatccacagtacttcaaacaaaactcaggtgttggccaatggattgacgtaatggttcgccttacaggacctaatgtcgctattttaaatactattcatgcgtgggattgggaagttgaaacgggtattcgcgagctacctcatttaccggagtgccctgcctctattgacccatttaatcatacaactcaagtggttccttctggcccaggtatgccagatgacattattcagcaagtgcttattactgctatttgccaagcaagaaaatccattaccatcaccacgccgtattttgtgcctagtgagattttattgcacaccttaagaaccactgcacaccgcggtgttgaagtgaaactcatactgcctaagaaaaatgactcattaatggtgaactgggcatcaaaatctttttttgaaaccctcttaaaagccggagttcaaatacatgaatttaatggtggtttattacatacaaaatcggtcgttattgatgaaagccattgtattattggaaccgtaaacttagatatgcgcagcttctggctcaactttgaagtaagtttgatcgtcgatgatcctgagtttacaaaacaattatcatgggttttagatggctacctagagcaatcaactcaagtctgttttgatacatggcgtcatagaagttggggaaatcgctttaccgaacgattcttctctatgttcagcccattactctaa

SEQ ID NO: 14459 - protein, 484 aa, Vibrio fischeri ES114
MDKFYQALTIVSFVLYWLLVAGVTIRVVFKPRPVGVSLAWLMIIYILPVIGVMAYFLIGELNLGRTRGERARAMFTPYEQWFAQIHHCQYHQPHSISHRISAIHNLCSNRLGIPALSGDTLSLLNTPSEILNAIISDIEKAEHEINMEFYIWHHGGLADSVASALIVAAKRGVTVNVLLDSAGSMDFFKSHWPKLLKQSGVNIVEALSVSPFRMFFRRLDLRLHRKIVVIDNRIAYTGSMNLVDPQYFKQNSGVGQWIDVMVRLTGPNVAILNTIHAWDWEVETGIRELPHLPECPASIDPFNHTTQVVPSGPGMPDDIIQQVLITAICQARKSITITTPYFVPSEILLHTLRTTAHRGVEVKLILPKKNDSLMVNWASKSFFETLLKAGVQIHEFNGGLLHTKSVVIDESHCIIGTVNLDMRSFWLNFEVSLIVDDPEFTKQLSWVLDGYLEQSTQVCFDTWRHRSWGNRFTERFFSMFSPLL

SEQ ID NO: 14460 - DNA, 1578 bp, Neisseria gonorrhoeae FA 1090
  CDS (1)..(1578): transl_table=11
atgcatacagaccccaaaatacaggcaatgccgtctgaaactatatccccgatgaaaacacgcagcctcatttcccttttatgcctccttctctgttcatgttcttcatggttgcccccactggaagaacggacggaaagccgtcattttaatacttccaaacctgtcctcctggacaacatcctgcaaatccggcacacccctcataacaacgggctatccgacatctacctgctcgacgacccccacgaagcctttgccgcccgcgccgcccttatcgaatctgccgaacacagcctcgatttgcaatactacatttggcgcaacgacatttccggcaggctgctgttcaacctcatgtaccttgccgcagaacgcggcgtgcgcgtacgcctgctgttggacgacaacaacacgcgcggcttggacgatctcctgctcgccctcgacagccatcccaatatcgaagtgcgcctgttcaaccccttcgtcctacgcaaatggcgcgcactcggctacctgaccgacttcccccgcctcaaccgccgcatgcacaacaaatcctttaccgccgacaaccgcgccaccatactcggcggacgcaatatcggcgacgaatacttcaaagtcggtgaggacaccgttttcgccgacctggacatcctcgccaccggcagcgtcgtcggcgaagtatcgcacgacttcgaccgctactgggcaagccattccgcccacaacgccacgcgcatcatccgcagcggcaacatcggcaagggtcttcaagcactcggatacaacgacgaaacatccagacacgcgctcctgcgctaccgcgaaaccgtcgaacagtcgcccctctaccaaaaaatacagacgggacgcatcgactggcagagcgtccaaacccgcctgatcagcgacagccctgcaaaaggactcgaccgcgaccgccgcaaaccgccgattgccgggaggctgcaagacgcgctcaaacagcccgaaaaaagcgtctatctggtttcaccctatttcgtccctacaaaatccggcacagacgcactggcaaaactggtgcaggacggcatagacgttaccgtcctgaccaactcgctacaggcgaccgacgttgccgccgtccattccggctacgtcaaataccgaaaaccgctgctcaaagccggcatcaaactctacgagctgcaacccaaccatgccgtccccgccacaaaagacaaaggcctgaccggcagctccgtaaccagcctgcatgccaaaaccttcattgtggacggcaaacgcatcttcatcggctcattcaacctcgacccccgttccgcacggctcaataccgaaatgggcgtcgtcatcgaaagccccaaaatcgcagaacagatggagcgcaccctcgccgataccacacccgaatacgcctaccgcgttaccctcgacaaacacaaccgcctgcaatggcacgatcccgccacccgaaaaacctacccgaacgaacccgaagccaaactttggaaacgcatcgccgcaaaaatcctatccctgctgcccatcgaaggtttattatag

SEQ ID NO: 14461 - protein, 525 aa, Neisseria gonorrhoeae FA 1090
MHTDPKIQAMPSETISPMKTRSLISLLCLLLCSCSSWLPPLEERTESRHFNTSKPVLLDNILQIRHTPHNNGLSDIYLLDDPHEAFAARAALIESAEHSLDLQYYIWRNDISGRLLFNLMYLAAERGVRVRLLLDDNNTRGLDDLLLALDSHPNIEVRLFNPFVLRKWRALGYLTDFPRLNRRMHNKSFTADNRATILGGRNIGDEYFKVGEDTVFADLDILATGSVVGEVSHDFDRYWASHSAHNATRIIRSGNIGKGLQALGYNDETSRHALLRYRETVEQSPLYQKIQTGRIDWQSVQTRLISDSPAKGLDRDRRKPPIAGRLQDALKQPEKSVYLVSPYFVPTKSGTDALAKLVQDGIDVTVLTNSLQATDVAAVHSGYVKYRKPLLKAGIKLYELQPNHAVPATKDKGLTGSSVTSLHAKTFIVDGKRIFIGSFNLDPRSARLNTEMGVVIESPKIAEQMERTLADTTPEYAYRVTLDKHNRLQWHDPATRKTYPNEPEAKLWKRIAAKILSLLPIEGLL

SEQ ID NO: 14462 - DNA, 1440 bp, Bacteroides fragilis NCTC 9343
  CDS (1)..(1440): transl_table=11
atgatagattggaactacatagcaagtgtaatagctaccgttgcctttgatattatttatttcggggctattatcggtacgattgtcatcgtgattctcgacaatcgtaatccggtgaagacaatggcatggattctgatcctgatgtttcttccggttgtagggttggttttctatttcttttttgggcgtagccaaaggcgtgagaagattatcggtaagaaaagttatgaccgtttgcttaaaaaaccgatggcagagtatttggcgcagaactgctgtgaaacgccgaaggaatatgcacggctgatacagctgttccagaatacgaaccaggcttttccgtttgagggaaatcgggtcgatatttacactggcggatattctaaactacaagctctgttgagagagctgcaaaaggcgaggcttcatattcatatggaatattacatctttgaggatgatcctgtgggacgattggtacgtgatgtactgatcgagaaagcgcgggagggagtcgaggtgcgtgtgatctatgacgatgtaggatgttggcatgttcctcatcgctttttcgaagagatgagagatgcaggaattgaggtacgcagttttttgaaggtccgttttcccttgttcacgagtaaagtgaattatcgcaatcaccggaagattgtggtgattgacggacgtattggatttatcggtggaatgaatcttgccgaacgttatatgcgtggcttttcgtggggaatctggagagatacgcatatattgcttgaaggaaaagcggtacatggtcttcagactgcttttttgctcgattggtatttcgtggatcgcactctgatcactgcttcgcgctactttcctaagatagaagcttatggcaattctttggtacagattgtgacaagtgaaccgatcggtccctggaaagagattatgcaagggttgacagtagccatatccggtgctaagaaatatttctatatgcagacgccttacttcttacctaccgaacaaattttgggtgcaatgcagactgctgcattggcaggagtagatatccggttaatgttgcctgagcatgcggataatcgtgttacacatttgggctcctgttcttatctggcagatgtattgcgtgcaggagtcaaggtctatttttataaaaagggtttcctgcattctaaattaatggtttcggatgatatgctttcgacagtggggtctaccaatctcgatttccgtagttttgaacataattttgaagtaaatgcctttatgtacgatatggagacagcattgcagatgcgggagattttcttgcaggatcagcgggaaagtactcagattttcctgaagagctgggaaaaacgttcttcgcgtcagaaggcaatggagtctgtagttcgattattggctccgttgctataa

SEQ ID NO: 14463 - protein, 479 aa, Bacteroides fragilis NCTC 9343
MIDWNYIASVIATVAFDIIYFGAIIGTIVIVILDNRNPVKTMAWILILMFLPVVGLVFYFFFGRSQRREKIIGKKSYDRLLKKPMAEYLAQNCCETPKEYARLIQLFQNTNQAFPFEGNRVDIYTGGYSKLQALLRELQKARLHIHMEYYIFEDDPVGRLVRDVLIEKAREGVEVRVIYDDVGCWHVPHRFFEEMRDAGIEVRSFLKVRFPLFTSKVNYRNHRKIVVIDGRIGFIGGMNLAERYMRGFSWGIWRDTHILLEGKAVHGLQTAFLLDWYFVDRTLITASRYFPKIEAYGNSLVQIVTSEPIGPWKEIMQGLTVAISGAKKYFYMQTPYFLPTEQILGAMQTAALAGVDIRLMLPEHADNRVTHLGSCSYLADVLRAGVKVYFYKKGFLHSKLMVSDDMLSTVGSTNLDFRSFEHNFEVNAFMYDMETALQMREIFLQDQRESTQIFLKSWEKRSSRQKAMESVVRLLAPLL

SEQ ID NO: 14464 - DNA, 1275 bp, Bacteroides fragilis NCTC 9343
  CDS (1)..(1275): transl_table=11
ttgaaattatacgttttaataatagcgatcattctctctataggcactgcccgaacacagaatattgacagcctgttgatgcagcgggaggacaccacacaattcatccgaagcgactccctcgtgttacaatttctggaatactcgaatatccccataaccgataataataaggtgaaacttatcaaaagcggacgggaaaaatttgaggacttgttcgaagccatccgtggggcaaaacaccacattcatctggaatattttaattttcgcaatgactccatagccaatgcactgttcgacctgctaggcgaaaaagtgaaggaaggtgtcaaagtaagggcgatgttcgatgcattcggtaactggtcgaacaacaaaccactcaagaaaaggcatctgaaagcaatccgggagaaaggaatcgaaatcgtaaaattcgatccgttcaagttcccgtatatcaatcatgcggctcaccgcgaccatcggaagattgcagtcatcgacggcaaaataggatataccggcggaatgaatattgccgactattatatcaacggactccccaagataggcacctggcgcgatatgcatatccgcattgaaggcgatgcggtaaacatccttcaagaaatcttcctcgacatctggaataaaaccaccaagcaaaacatcgtgggcgaagaatattttccgaaccacccggagcgggccgacagctgcaatacggtcatttcgattgtagaccgcactccgaaacggaattcccgcatgttgagccatacgtatgccatgtccatctatgcagcgcaacatgatgtacgcatcgtgaacccgtatttcgtaccgacttcatccatccgcaaggcactcaaaagggctttgaaccgggggacgaaagtggaaattatgatttcttccaaatccgacatccctttcacaccggatgcttcgctctatgccgtacagaaactgatgaaaaaaggggcaatgatctatttgtacaacggcggatttcatcactcgaaaatcatgatggtggacgacctgttctgtaccgtgggtacagccaacctgaacagccgcagcctgcgatatgattacgaaacgaatgcgttcatcttcgacaaggacattacgcaacaactgaatgacgttttcgaagccgacatgctgcactgcacccgcctgaccccggaaatgtggaaacaaaaatcagcctggaagaagtttaagtgctggtttgcgaacttattcacaccattcctgtaa

SEQ ID NO: 14465 - protein, 424 aa, Bacteroides fragilis NCTC 9343
MKLYVLIIAIILSIGTARTQNIDSLLMQREDTTQFIRSDSLVLQFLEYSNIPITDNNKVKLIKSGREKFEDLFEAIRGAKHHIHLEYFNFRNDSIANALFDLLGEKVKEGVKVRAMFDAFGNWSNNKPLKKRHLKAIREKGIEIVKFDPFKFPYINHAAHRDHRKIAVIDGKIGYTGGMNIADYYINGLPKIGTWRDMHIRIEGDAVNILQEIFLDIWNKTTKQNIVGEEYFPNHPERADSCNTVISIVDRTPKRNSRMLSHTYAMSIYAAQHDVRIVNPYFVPTSSIRKALKRALNRGTKVEIMISSKSDIPFTPDASLYAVQKLMKKGAMIYLYNGGFHHSKIMMVDDLFCTVGTANLNSRSLRYDYETNAFIFDKDITQQLNDVFEADMLHCTRLTPEMWKQKSAWKKFKCWFANLFTPFL

SEQ ID NO: 14466 - DNA, 1242 bp, Salmonella enterica subsp. enterica serovar Choleraesuis str
  CDS (1)..(1242): transl_table=11
atgaaatgcggctggcgtgaaggtaatcaaattcagctactggaaaacggcgaccagttctatcctgccgtgtttgaggctatcgctcaggcacagcaaaaaatcattctggaaacctttatcttgtttgaagatgaggtgggtaaaaaactccatgccgctctgctaaaagccgcacagcgcggcgtaaaagccgaagtattactcgacggctacggctctcccgatctcagcgacgcgtttgtcggcgaactgacctcagcgggcgtgatttttcgctattacgacccccgcccgcgtctactggggttgcgaaccaatatcttccgccgaatgcaccgcaaaattgtggtgattgatgatcgtattgcctttgtcggcggcattaactactccgccgaacatatgtcggattacggcccgcaggcgaaacaagactacgcggtacgggtcgaagggcctgtcgtggccgatatcctgcaattcgaagtcgagaatctgccggggcaaagccccgcgcgccgctggtggaaacgccatcatcaggccgaagaaaaccgccaccccggcgaagcgcaggcgctgtttgtctggcgagataacgaagagcaccgcgacgatatcgaacgtcattatctgaaaatgctgacccaggcaaagcgtgaagtgattatagctaacgcctattttttccccggctatcgcttgctccacgcaatgcgtaaagccgcccgccgtggcgtgagcgtaaaactgattgtccagggggaaccagacatgccgatagtcaaagtcggcgcgcggttgctctataactatctggtgaagggcggcgtgcaggtttatgaataccgacgacgtccgctgcatagcaaagtggcgctgatggacgatcactgggccacggtagggtcgagtaatctcgatccgctcagcctgtcgcttaaccttgaagctaacctgatcattcacgatcgtacttttaaccagaccctgcgcgataacttacaaggcatcatcgtgaacgattgtaagcaggtcgatgagtctatgctgccgaaacgcacctggtggaacctgaccaaaagcgtgctggcgttccactttttacgtcatttcccggcgctggtcggctggctacctgcgcataccccgcatctggcgcaggttcccccgcctgcccagccagaaatggaaacccaggatcgcgttgatccagaaaatacaggagtgaagccctaa

SEQ ID NO: 14467 - protein, 413 aa, Salmonella enterica subsp. enterica serovar Choleraesuis str
MKCGWREGNQIQLLENGDQFYPAVFEAIAQAQQKIILETFILFEDEVGKKLHAALLKAAQRGVKAEVLLDGYGSPDLSDAFVGELTSAGVIFRYYDPRPRLLGLRTNIFRRMHRKIVVIDDRIAFVGGINYSAEHMSDYGPQAKQDYAVRVEGPVVADILQFEVENLPGQSPARRWWKRHHQAEENRHPGEAQALFVWRDNEEHRDDIERHYLKMLTQAKREVIIANAYFFPGYRLLHAMRKAARRGVSVKLIVQGEPDMPIVKVGARLLYNYLVKGGVQVYEYRRRPLHSKVALMDDHWATVGSSNLDPLSLSLNLEANLIIHDRTFNQTLRDNLQGIIVNDCKQVDESMLPKRTWWNLTKSVLAFHFLRHFPALVGWLPAHTPHLAQVPPPAQPEMETQDRVDPENTGVKP

SEQ ID NO: 14468 - DNA, 1587 bp, Salmonella enterica subsp. enterica serovar Choleraesuis str
  CDS (1)..(1587): transl_table=11
atggctatccacgcgcctaggccgctgaagtcgccgtcaggacggtttcagattttattacccgttacgctctgcctgaacaggtatactttgtctgttatgatgaagaaactgcccggctttacgcaagattacttactcagcaaggcgacgaccctgcctgataaaacacgcctggagcgtgccgttgaaccgctatgcgcgcgccatcccggagagtgcggcattctcgcgctggataacagtctggacgcttttgccgcccgctaccgcctgaccgaaacggcggcgcggacgctggatgtgcagtattatatttgggaagacgatatgtccgggcggctgctcttttcggtactgctgtcggcggcgaagcgcggcgttcatgttcgtctgctgctggatgataacaatacgcctggtctggatgatacgttgcgcttgctggatagccatcctaatatcgaagttcgtctgtttaatcctttctcttttcgtacgctacgcgcgctgggatatttgacggattttgcgcggctgaatcggcggatgcacaataaaagttacactgctgacggcgtagtgacgctggtcggtgggcgcaacatcggcgatgcctatttcggcgctggcgaggagccgctattttccgatctggacgtgatggccattggcccggtggtcaatgatgtcgccaatgattttgaacgttactggcgctgtagttcagtgtcgacattgcagcaagtattatccctttctgagcaggaactgacgcagcgtatcgaacttcccgaatcctggtataacgatgagatcacccgccgttatctgcataagctggaaaccagccagtttatggcggatctcgatcgcggaaggttgccgctgatttgggcaaaaacacgcttgcttagcgatgacccttctaaaggcgaggggaaggcgcagcgccattcgcttcttccgcagcgattatttgacgtgatggggtcgccgacggagcgtatcgacattatttccgcttactttgtccctacgcgcgcaggcgtggcgcagttgcttaatctggtcaggaaaggcgtgaagatcgccatcttaactaactctctggcggccaacgatgtggcggtcgttcacgcagggtacgcgcgctggcgcaagaaattactgcgctatggcgtggagctctacgaactgaaaccgacccgcgaacatgaaaccgccgtacatgatcgcggactcaccgggaactcaggttccagcttacatgctaaaacgttcagtattgatggtagtaaggtgtttatcgggtcgcttaattttgatccccgttcaacgcttttaaataccgaaatgggctttgtcattgaaagtgaaacgctggcgacgcttattcataagcattttacgcagagccaacgcgatgcggcctggcaactgcggctggatcgctggggacgaattaactggatcgatcgtcagcaagaagaggaaaaggtgttaaagaaagaacccgctacgcgtttctggcagcgagttctggtacggttggcggcaattttacctgtggaatggttgctgtga

SEQ ID NO: 14469 - protein, 528 aa, Salmonella enterica subsp. enterica serovar Choleraesuis str
MAIHAPRPLKSPSGRFQILLPVTLCLNRYTLSVMMKKLPGFTQDYLLSKATTLPDKTRLERAVEPLCARHPGECGILALDNSLDAFAARYRLTETAARTLDVQYYIWEDDMSGRLLFSVLLSAAKRGVHVRLLLDDNNTPGLDDTLRLLDSHPNIEVRLFNPFSFRTLRALGYLTDFARLNRRMHNKSYTADGVVTLVGGRNIGDAYFGAGEEPLFSDLDVMAIGPVVNDVANDFERYWRCSSVSTLQQVLSLSEQELTQRIELPESWYNDEITRRYLHKLETSQFMADLDRGRLPLIWAKTRLLSDDPSKGEGKAQRHSLLPQRLFDVMGSPTERIDIISAYFVPTRAGVAQLLNLVRKGVKIAILTNSLAANDVAVVHAGYARWRKKLLRYGVELYELKPTREHETAVHDRGLTGNSGSSLHAKTFSIDGSKVFIGSLNFDPRSTLLNTEMGFVIESETLATLIHKHFTQSQRDAAWQLRLDRWGRINWIDRQQEEEKVLKKEPATRFWQRVLVRLAAILPVEWLL

SEQ ID NO: 14470 - DNA, 1581 bp, Pseudomonas syringae pv. syringae B728a
  CDS (1)..(1581)
atgaataactcatgggccttgcccttttgcttgctggttgcgttgtgcgtcagcggttgcgcgcatcaacaggtcaccagtgagccaagccaggccatgccgtcttcaggttccgcgttcggccgttcgatccaggcaatggccgtgccgcatgagggacgttctggcttccgcctgctgcctgacagcagtgacgcgttcaaggctcgcgccgaactgatccgcaacgccaaaagcagccttgatctgcagtattacatcgtccacgacggcctgagtacgcgcgccctgatcgacgaactgctcaaggcggctgaccgtggcgttcgtgtgcgcatcctgctggacgacaccaccagcgacggtctggatcaggccatcgccaccctcgccgctcacccgaacatccagattcgcctgttcaatccgcaaaacctggggcgcgagaccggcatcacccgcagcctcgggcgcctgatgaacctgtcgcgccagcaccggcgcatgcacaacaagctgtggctggccgacagcagtgtggccatcgtcggcgggcgcaacctgggcgatgaatacttcgatgccgagccgaacctgaacttcaccgatatcgacatgctcagcgtggggccggtggccgagcagctcggccacagcttcgaccagtactggaacagcacgctcagcaagcctatcggtgaattcatctatttcctgcccgacggcgaggatctggccgaggcccggcgcaagctggacgattctctggagcaggcgcaccagcagcacaaggcgctgtatgagcgactgatggcctacaagacccagccgcgcatgaaaacctggctcaacgagctggtctgggcatacaaccaggcgctgtgggacgcaccgaccaaggtactggcgcagggcgagcctgacccgcatctgctgctgaccacgcaactggcgcctgaactgctgaacactcacaaggaactgatgctgatctcggcctactttgtaccgggcccggaaggcttgctgtacctcaccggccgggccgatgccggcgtcaatgtcagcctgctgaccaattccctggaagccaccgacgtgcccgccgtgcatggcggctatgcgccgtaccgcaaggcactgctggagcatggcgtgaagctgttcgagctgcgccggcagcctggcgataccgagacgatgcgcggcagcggtccgcatctgttcaagaaaagccattccctggtcagttccgaatcgagcctgcacagcaaggcgatgatcttcgatcggcagaaagtctttgtcggctcattcaacttcgacccgcgctctgtgctgtggaataccgaagtcggcgtgctggtcgacagcccgcaactggctgaagaattgcgcgaactgaccttgcagggcatggccccgtcgctcacctatgaagcgcggctggaggacggcaaagtggtgtgggtgaccgaagacaacggccagatccacactctgcataccgaaccgggcgactggtggcggcgtttcaacgcgtggatgagccgcgccatcggcctggaaagaatgctttaa

SEQ ID NO: 14471 - protein, 526 aa, Pseudomonas syringae pv. syringae B728a
MNNSWALPFCLLVALCVSGCAHQQVTSEPSQAMPSSGSAFGRSIQAMAVPHEGRSGFRLLPDSSDAFKARAELIRNAKSSLDLQYYIVHDGLSTRALIDELLKAADRGVRVRILLDDTTSDGLDQAIATLAAHPNIQIRLFNPQNLGRETGITRSLGRLMNLSRQHRRMHNKLWLADSSVAIVGGRNLGDEYFDAEPNLNFTDIDMLSVGPVAEQLGHSFDQYWNSTLSKPIGEFIYFLPDGEDLAEARRKLDDSLEQAHQQHKALYERLMAYKTQPRMKTWLNELVWAYNQALWDAPTKVLAQGEPDPHLLLTTQLAPELLNTHKELMLISAYFVPGPEGLLYLTGRADAGVNVSLLTNSLEATDVPAVHGGYAPYRKALLEHGVKLFELRRQPGDTETMRGSGPHLFKKSHSLVSSESSLHSKAMIFDRQKVFVGSFNFDPRSVLWNTEVGVLVDSPQLAEELRELTLQGMAPSLTYEARLEDGKVVWVTEDNGQIHTLHTEPGDWWRRFNAWMSRAIGLERML

SEQ ID NO: 14472 - DNA, 1251 bp, Pseudomonas syringae pv. syringae B728a
  CDS (1)..(1251)
atgagcaatacgacagggcagtggcgcgacggcaactcggtagagttgctgatcaatggcgaggatttctacgcccgcgtattcgaatgcatacgtgccgcgcgcaaagaagtgctgatcgagaccttcatcatttttgaagaccggatcggcgagagcctgcaacaggcgttgctcgaagccgccgcgaatggcgcgaaggtggtcgtcacggtggatgactatggcacctcggacctgagttcgacgtttgtcaaaaccatgatcgacgccggtatccagattcagctgttcgatccgcgcccgcggttcatgggcatgcgcaccaatctgtttcgccgtctgcaccgtaaggtggtggtgatcgatggcgaactgggctttatcggcggcatcaactacagcgttgatcatatgaccgacaccggtctgacggccaaacaggactacgccgttctggtgcgcgggccgattgttggcgacattcaccacagcgcgttgaatatgctcagcaaggtcgttcgtgacaaattgccgcccattgcactcaagctggaccgcgccggtgacgccagcatgctgctcgccgagcgcgacaatgacgagcacagcaccgatatcgaagagcagtacctggaggcgattcgcgctgctaagcaacgcatcaccctggccaatgcgtatttttaccccagctaccgctttctgcgtgagctgcgcaacgcctcacggcggggcgtcaaggtcaccctgatcctgcaaggccagcccgacatgccgttcgtgcgggtctgctcgcgactgacctacacctacctgctgcgcgatggcgtggccattcacgaatacaagcaacgtgcattgcacggcaaggtcgcgctgatcgaccaggactggtccaccgtgggttccagcaatctcgacccgctgagcctggcgctgaacctggaagccaacctgttcattcgtgatcgcaccctcaatgagcatctgcaaaatcatctgatggagcttgccgcggcgcacagcaaacagatgagcctcaagggtgcggcgcgtggccagtggtggcgtgcgccgatgatcgtcttgagtttctttttcctgcgccgtttcccggccattgccggtttgttcccggttcacggtgtgcgcctcaagcctttgcgtgccggtgatgtagtgcccgaagcgaaagtgatcgaacagcagcagaacaaccatccgatggatcaggagaaaaccctatga

SEQ ID NO: 14473 - protein, 416 aa, Pseudomonas syringae pv. syringae B728a
MSNTTGQWRDGNSVELLINGEDFYARVFECIRAARKEVLIETFIIFEDRIGESLQQALLEAAANGAKVVVTVDDYGTSDLSSTFVKTMIDAGIQIQLFDPRPRFMGMRTNLFRRLHRKVVVIDGELGFIGGINYSVDHMTDTGLTAKQDYAVLVRGPIVGDIHHSALNMLSKVVRDKLPPIALKLDRAGDASMLLAERDNDEHSTDIEEQYLEAIRAAKQRITLANAYFYPSYRFLRELRNASRRGVKVTLILQGQPDMPFVRVCSRLTYTYLLRDGVAIHEYKQRALHGKVALIDQDWSTVGSSNLDPLSLALNLEANLFIRDRTLNEHLQNHLMELAAAHSKQMSLKGAARGQWWRAPMIVLSFFFLRRFPAIAGLFPVHGVRLKPLRAGDVVPEAKVIEQQQNNHPMDQEKTL

SEQ ID NO: 14474 - DNA, 1158 bp, Pseudomonas syringae pv. syringae B728a
  CDS (1)..(1158)
atgaacggtgcgattttcccgtggcgtgaaaacaaccgctttcaattgctgatcgacggccctgcgttctttccgcgcatgatcgcagccattgatcgcgccgagcagcaggtcgatctggagttgtacctggtcgaagccggggcttgcgccgacgccatcgtgcgcgcgctggtcgaggcgggcagacgtggcgtgatcgtgcgctgcctgttcgatgacttcggttcaaaagccttcgacgccggcctgcgcaagcaactgaccgatgccggtgtgattctgcgtttctacaatccgatccactggcggcgcggcgtgcgcaacttctaccgcgaccatcgcaaactgctggtggtggacaaggccttggccgtggtgggcggcaccggcgtgaccgacgagttctgggagccggacaaggacgccagccagtggcacgaagtgatggtcgaaatcaccgggccgctggtgattgactggcaggcgctgttcaaccggcagttccacgccaacgcccggcgtttcgcctggcgtccgaaagaaaacttcggccttgatcacctgcccaaggccccgacaaccggcgaggggctgggccgcgtggcgtatgccgattcccgccagcaccgcgacattctgcaatcgctggtgcgtgcgctgcacaccgggcaaaagcggatctggctggcaaccccttactttctgcccacctggaaagtccgccgcgccttgcgccgggccgcggcgcgtggcgttgatgtgcgtttgctgctgaccgggccgcgcaccgatcacccgtccgtacgctatgccggtcaacgctactacccgcgcctgttgcgcgccggggtcaaggtgttcgaataccagccctgctttctgcacctgaaaatggtcctgatcgacgactgggtgagtctcggctcgtgcaacttcgatcactggaacctgcgcttcaacctggaagccaacctcgaagccctcgaccccggactgacccgcgacgtggtcgccagcttcgaaaaagacttcgccctgagcgccgaaaccacgttggcagactggaaggccagaccgctgtggcgacgggtcaagcagcgcttgtggggctggatcgaccggctggtggtgaacttgctggatcagcgtaactga

SEQ ID NO: 14475 - protein, 385 aa, Pseudomonas syringae pv. syringae B728a
MNGAIFPWRENNRFQLLIDGPAFFPRMIAAIDRAEQQVDLELYLVEAGACADAIVRALVEAGRRGVIVRCLFDDFGSKAFDAGLRKQLTDAGVILRFYNPIHWRRGVRNFYRDHRKLLVVDKALAVVGGTGVTDEFWEPDKDASQWHEVMVEITGPLVIDWQALFNRQFHANARRFAWRPKENFGLDHLPKAPTTGEGLGRVAYADSRQHRDILQSLVRALHTGQKRIWLATPYFLPTWKVRRALRRAAARGVDVRLLLTGPRTDHPSVRYAGQRYYPRLLRAGVKVFEYQPCFLHLKMVLIDDWVSLGSCNFDHWNLRFNLEANLEALDPGLTRDVVASFEKDFALSAETTLADWKARPLWRRVKQRLWGWIDRLVVNLLDQRN

SEQ ID NO: 14476 - DNA, 1440 bp, Pseudomonas syringae pv. syringae B728a
  CDS (1)..(1440)
atggattatcacgacccgtactttttcggttacgtcctgggtttcattcatttactcggtacaggtgccgccatccatgcattgctgacggtgcggacttcccaaggcgcaattgcctgggcgatgccgctgctgttcattccctatttcaccttgctgccttatctggtgttcggccgaagctcattcgacgcgtacatcaaggcgcgccgccaggccaaccaggaaatgcggatcgcgatcggcgacctcaactggcgcccatggatggaagaagctgtggctgcgcgtcgatcagaggcgtatgcggcgctgcgtgcaatgcccaagctgggcaacatgccggcgctggccaacaacaaggtcaagttgctgatcaatggcgaagaaaccttcggggccatttttcaggccatccgtgaagcgaaaaagaccatcctggttcagttcttcatcattcatgacgacaaacttggccgcgaactgcaatcgctgctgctggaaaaagccgccgaaggcgtggcgatctttgtactttacgaccgcatcggcagccacgctctgccaggtgcctatatcgataagctacgcgacggtggcgtgcagataaaagccttcgccacacgcggcggctggctcaatcgctttcagatcaacttccgcaaccaccgcaagatcgtcgtcgtcgatggcctgaaaggctatataggcggtcataacgtgggtgatgaatacatgggcctgaagccgccgctggccccatggcgcgatactcacgtgcaagtcatcggcccggtggtcgcctgcttgcaggagtcgtttgccgaggactggttctgggccacccgcgaactgcccccgctcagcctgcctgatgaatttcccgaagacggtgtgctttgccagttgctgaccagtggcccggctgatgctcaggaaacctgctcgctgttcttcgttgaagccatccatgctgccgaagagcgcgtgtggatcaccagcccctacttcatccctgacgaagccgtcactgctgcgctgaccctggcagtgttgcgcggcgtggacgtgcgcctgctgctgccgtcgcgccccgaccactacgtggtgtatgccgcttcaagtctgtacgcctttgatgctgtgcgtgccggagtgcgggtattccgctacgaaccgggcttcctgcatcagaaggtcgtcctggtcgacaacgagattaccgccatcggcagcgccaacctcgacaaccgctcgttccgcctcaacttcgaattgatgctgctgaccgtcgacagcgacttttccagccaggtggaatccatgctcaccgccgacttcaacctcgcccgcgaaatctccgtacaggaaagccatgaaacgcggcgtctgcatcaactgggtatgcgcgtggcgcggctgatttcaccgattctgtga

SEQ ID NO: 14477 - protein, 479 aa, Pseudomonas syringae pv. syringae B728a
MDYHDPYFFGYVLGFIHLLGTGAAIHALLTVRTSQGAIAWAMPLLFIPYFTLLPYLVFGRSSFDAYIKARRQANQEMRIAIGDLNWRPWMEEAVAARRSEAYAALRAMPKLGNMPALANNKVKLLINGEETFGAIFQAIREAKKTILVQFFIIHDDKLGRELQSLLLEKAAEGVAIFVLYDRIGSHALPGAYIDKLRDGGVQIKAFATRGGWLNRFQINFRNHRKIVVVDGLKGYIGGHNVGDEYMGLKPPLAPWRDTHVQVIGPVVACLQESFAEDWFWATRELPPLSLPDEFPEDGVLCQLLTSGPADAQETCSLFFVEAIHAAEERVWITSPYFIPDEAVTAALTLAVLRGVDVRLLLPSRPDHYVVYAASSLYAFDAVRAGVRVFRYEPGFLHQKVVLVDNEITAIGSANLDNRSFRLNFELMLLTVDSDFSSQVESMLTADFNLAREISVQESHETRRLHQLGMRVARLISPIL

SEQ ID NO: 14478 - DNA, 1512 bp, Corynebacterium jeikeium K411
  CDS (1)..(1512): transl_table=11
atgcccttccccgacctcctcggcctgtttagcgagttcaccgacgacctgcagtggtggcaggtcacgctggttgttctggactacgcgctgaaaatctttgcgttgggctgggttcctaaggaacgacgcccaacgtccgccatggcctggctgctggccatcttcctgatcccctttatcggcatcttcctattcctgctgatgggatccccagcgatcaaccgacggcgccaccgcattcagaatcaggcaaatgagctgatccgcacgatgagtgctgacgagcctgacgttcccgagggcagcgagctcagcgacgagctgcgttccttggtgcggctcaaccgggaactcactgcactgcccgccgtgaacggcaccatgcaggcattgcattcggactacgaagaatctattgccgcgatggcctgtgcagtggactcggccgaagactacgtgaacgtcgaaatttacatcatggcctgggacgatacgactaacccctttttcgaagcgctcggacgagcagcgcaacggggagtgaccgtgcgcgtgctgtgggatcacatcggcgcgcacaagtacaagggcaacaaaaagctgggcaagaagctgaaggccatgggagtggactggcaggtcatgctgcccctgcaacccttcaagtggcgcttccgccgccccgatctgcgcaaccaccgcaagctggtagtcgtcgacggccgggtggctttcatgggctcgcagaacatgattgaggccccgtaccagaaggcgaagaaccacaagatcggccgcgaatgggtagacgtaatggcggaactgaccgggccgatcgtcaccaccatcaactcagtattcgccgtggactggtacaccgaaacaaacgaggaactggacctcatcaaccccacggacgtcaaacagcgactggataccaacaacgaagacacaggtgcggacatcatgcagatcgtgccctctgggcccggcttcaccacggagccgaacctgcgcctgttcacctccattgcccaccacgccaagcacaccctcaagctgattagcccttacttcatccccgacgagtccctcatggaggccgtgaccaccgcctgctatcggggagtccgggtggagctttatgtctccgagaaatccgatcagccgatggtgggccacgcacaggcctcctactactcggaactgctgaaggctggggtgcacatgtacctgtacccctacccgaaggtcctgcactctaagttcgccattgccgacggcgaggtagcagttatgggcagctccaacatggatatgcgcagcttcggcctgaactacgagatctcgctgatggtcggcaagggcgagctattggacgccctgcgctccctgaccgacgactaccgggagcgctccgcgctgctgactgccgaacagtggagcacccggcctctgcacaagcagtacgtggataacgtggctcgtctaacgagtgcgctgcagtaa

SEQ ID NO: 14479 - protein, 503 aa, Corynebacterium jeikeium K411
MPFPDLLGLFSEFTDDLQWWQVTLVVLDYALKIFALGWVPKERRPTSAMAWLLAIFLIPFIGIFLFLLMGSPAINRRRHRIQNQANELIRTMSADEPDVPEGSELSDELRSLVRLNRELTALPAVNGTMQALHSDYEESIAAMACAVDSAEDYVNVEIYIMAWDDTTNPFFEALGRAAQRGVTVRVLWDHIGAHKYKGNKKLGKKLKAMGVDWQVMLPLQPFKWRFRRPDLRNHRKLVVVDGRVAFMGSQNMIEAPYQKAKNHKIGREWVDVMAELTGPIVTTINSVFAVDWYTETNEELDLINPTDVKQRLDTNNEDTGADIMQIVPSGPGFTTEPNLRLFTSIAHHAKHTLKLISPYFIPDESLMEAVTTACYRGVRVELYVSEKSDQPMVGHAQASYYSELLKAGVHMYLYPYPKVLHSKFAIADGEVAVMGSSNMDMRSFGLNYEISLMVGKGELLDALRSLTDDYRERSALLTAEQWSTRPLHKQYVDNVARLTSALQ

SEQ ID NO: 14480 - DNA, 1404 bp, Xylella fastidiosa Ann-1
  CDS (1)..(1404)
atggaagggacttggctgtttgcattggattgggtgatccgtttggttgcgttgctttggatcccggcacgaaccacccctagtgctgcgcgcagctggttgttactgattggtttcgtccctgtgtttggcttgccactttacttggtgtttggccatccttggctgtcacgtaagcgtgtgttgcgtcaggcgttggcttctcatgtgatccgtgagtggcagcgtgggttgagtgcattgcgctggcagcctcaggagaatggcgtcgctgcggaattggtacctttggtggagcatcagggcgattttatgccaacacgtggtaacgccttggatctattggatgattaccaagcttcgctgcatttgttgatcaatgatattgattccgcgtgcgaacgtgtgcacttgctgtattacttgatgttcgatgatgcggtgggtgatgcggttgtggctgcattacagcgtgctgcggcgcgtggcgtttcttgccgattgctgctggatgcagtcggtgctaaacgcggtctacgtgcctatcagcagtgccttcgtgcccatggtgtggaggtgcacgctatgttgcctggtgggttgcgctggcgtcgcagtgggcgtatggatttgcgcaaccaccgtaagattgctgtgatcgacaatcgggtcgcttatatcggttcgcagaatttggcatacccagattttgtgccgcatttccccaaccgtgaattggtcgcacgcgtgtgcggccctgcggtaagtcatctggaggcggtgtttctcagtgattggtttgttgaaactggtcaacgtttggggatgcgtccagatgctcccatatgtgagcaaaatgttgcggcccagctagtggccagcggtccggcttacccgcacgagaatgcgcgtgatgcggtgaatacaatgatccatttggcacggcggcgtattgtcttgacgacgccgtacttcgtgcctgatgaggccacactcagtgcgttgcgtattgcaggcacgtctggagtagacgtgcagttgatcctgtccgagagtaataaccagtttctgatggcctgggctcaggaggcgtactttgaggagctgttgcgcgcaggaatcaaaattgcgttgtatcgtccccatttcctgcatgccaagcatctgagtgtggatgatgatattgcgttgttcggatcgattaatttggacatccgctcgttcgcgcttaacgctgagattggcatgatttgttacgactcacgtattgtgactcggttacgtgaggtggagagtgattatctggccaatgcgcgccagcttaatttggttgagtggcagcaacgtcccgcttggcgtcgtagccgtgagggtattgcacgcttggcagatgctctgatgtag

SEQ ID NO: 14481 - protein, 467 aa, Xylella fastidiosa Ann-1
MEGTWLFALDWVIRLVALLWIPARTTPSAARSWLLLIGFVPVFGLPLYLVFGHPWLSRKRVLRQALASHVIREWQRGLSALRWQPQENGVAAELVPLVEHQGDFMPTRGNALDLLDDYQASLHLLINDIDSACERVHLLYYLMFDDAVGDAVVAALQRAAARGVSCRLLLDAVGAKRGLRAYQQCLRAHGVEVHAMLPGGLRWRRSGRMDLRNHRKIAVIDNRVAYIGSQNLAYPDFVPHFPNRELVARVCGPAVSHLEAVFLSDWFVETGQRLGMRPDAPICEQNVAAQLVASGPAYPHENARDAVNTMIHLARRRIVLTTPYFVPDEATLSALRIAGTSGVDVQLILSESNNQFLMAWAQEAYFEELLRAGIKIALYRPHFLHAKHLSVDDDIALFGSINLDIRSFALNAEIGMICYDSRIVTRLREVESDYLANARQLNLVEWQQRPAWRRSREGIARLADALM

SEQ ID NO: 14482 - DNA, 1488 bp, Lactobacillus gasseri
  CDS (1)..(1488)
atgattttaacctgggatatcataagacgcattattgaaatactttggttaattaatgttggcttagctatttggacagtttttcgcagccatcgtgatattgcctcaacctgggcttggcttttaattctatcgctcttaccatatattggttttattctatatttattcactggtcgtcaactatctcatgatgatattttttcaattaaagctgaacagcaaaaattccgagaccaattcttaaatgagcaaaataaattattaaaattacacgatctattacctaataaagatcaaaatccccgggcacgaagacttgttgaattaaatttaaataatgatgatgccctcctgacctttaacaatgaagtagaaacttttattgatggaaaagttttatttaaaaatcttatcaaaaatatcgaccaagcaaaaagtagtattaatattgaattttatactttttatgatgaccaattaggtaaccaagttctaaaagcactagaaaaagctgctaatcgcggtgttaaagttagagttctgtacgatgctagtggctctcgcggtacaaaaccttcttttttcaataaacttcgacaactaggtggaaacgctcaaccattcatttcaacagctggtaatcgtttctttactacccctcgtgctaactatcatttacaccgaaaactggttatcatcgacaatcaaattggttatattggtggttttaatattggagaccagtatgttgatcgaagcaaaaaattcggtcattggcgtgacacgcatttacgagtaacaggacaagctgctctcctgatggaaattaggtttgcaatggattggaatacaagttgtcgtaaatcccatcttcctacgtatagtgtcgataatttaattgaaaaattcagattaaaagttgtccaggaaaaaaatttagttccaatgcaaattgtttcttcaggtcctgacaacagtaattttggtattcgtcgagcttatgaagaaataattgcgcaagcacaaaactacgtttacattcaaacaccatatttaattccaggtgactccatcttagaggccttaattattgctgcaaagagtggtgtagacgttcgaatcatgattccatctatgccagatcatgctttcgtttatcgagcaaccgaatattacgctaagtacttagttaatcatggcgtaaaagtatataagtatgataatggcttcatccatgctaaaactattgtaagtggttctaatattgcctcagtcggttcggctaatcaagattttcggagttaccagcttaattttgaggtaaatgcttttacatacaatcctgcccttgcaactgaattaaaagaaatatttgaaaaagatctaaaagagtcaacattattaactaagcaatactttaataaacaatctcattggcgtaagtttaaacaatatttctcaagattactatcaccaattttataa

SEQ ID NO: 14483 - protein, 495 aa, Lactobacillus gasseri
MILTWDIIRRIIEILWLINVGLAIWTVFRSHRDIASTWAWLLILSLLPYIGFILYLFTGRQLSHDDIFSIKAEQQKFRDQFLNEQNKLLKLHDLLPNKDQNPRARRLVELNLNNDDALLTFNNEVETFIDGKVLFKNLIKNIDQAKSSINIEFYTFYDDQLGNQVLKALEKAANRGVKVRVLYDASGSRGTKPSFFNKLRQLGGNAQPFISTAGNRFFTTPRANYHLHRKLVIIDNQIGYIGGFNIGDQYVDRSKKFGHWRDTHLRVTGQAALLMEIRFAMDWNTSCRKSHLPTYSVDNLIEKFRLKVVQEKNLVPMQIVSSGPDNSNFGIRRAYEEIIAQAQNYVYIQTPYLIPGDSILEALIIAAKSGVDVRIMIPSMPDHAFVYRATEYYAKYLVNHGVKVYKYDNGFIHAKTIVSGSNIASVGSANQDFRSYQLNFEVNAFTYNPALATELKEIFEKDLKESTLLTKQYFNKQSHWRKFKQYFSRLLSPIL

SEQ ID NO: 14484 - DNA, 1416 bp, Leuconostoc mesenteroides subsp. mesenteroides ATCC 8293
  CDS (1)..(1416)
ttggttatcaatacaattatttcatttattgctgtttttcggcaaaaacgtgaaattgctacaatttgggcatggatgcttgtgcttttgttgttacctgttgtaggatttgccatcttctttttggctggtagtcgtatttctagtaaaaagatatttcgcctacggacccaagaacaacgtggtttagatcagattgctttaaatcaaaaaaaacagttacaagatattgagaacttacttcctattccatacagtgcaacagaattgttgaaattatttttatcatctgatcgcgcagttttgacacgtggtaataaaattacaatttttagtgatggacaaaaaaagtttgataaattattctcagatattagggctgcaaaggaacatattcatttagaatatttttctatttttgatgataaaataggacatcagctagttgacctattaactgaaaaagctggtgaaggtgttgaagttcgcgttatttacgatcagtttggttctcatggacaacatcctaaaatgtatagacaattacgtgcagctgggggtgttgctgtaccgttcttaatgcgacgctttcagctactaactttgcgcttcaacttcagaaatcaccgtaaaattgctattattgatggtaaaattggatacatcggcggatttaatgtcggtgatcaatatattggtgaatctaaaaaatttggttattggcgtgatactcatactcgaattattggggatgcagtattatcattgcaaagtcgatttttaatggattggaacgccaccgctgaaggtagagagttattgacccagacgacaaagtacttccctgaaaacttctcgttaccagggaagtctatggttcaaattgtttccagtggtcctgatgacgatatgaagcagatcaaacaaggttacatgagaatgttttcttctgcccgtgagagcataagtattcaaaccccttatttcattccggacggtcctgtgttagaaacgcttgaagttgctattttatccggggttaaggtgaaattaatgatacctaatcagcccgatcatcctttagtttatcgggcaacagaatattatgctcaagaattaattgatctcggcgcgacagtttaccgctatgatggtggttttttacatagcaaggttgtgatcattgataacgaggtagcaactgtcgggtcagctaatatggatatccgttcattttctcttaattttgaaggcaacgcatttatatatgatccggactttgcagctgatctagaagatttatttgagcaagatgtattaaagtccacaaaattaacaatggaatattttgagaaacagtctgcctggatgaagtttaagcaaaagtttagtagacttttctcaccaatactatga

SEQ ID NO: 14485 - protein, 471 aa, Leuconostoc mesenteroides subsp. mesenteroides ATCC 8293
MVINTIISFIAVFRQKREIATIWAWMLVLLLLPVVGFAIFFLAGSRISSKKIFRLRTQEQRGLDQIALNQKKQLQDIENLLPIPYSATELLKLFLSSDRAVLTRGNKITIFSDGQKKFDKLFSDIRAAKEHIHLEYFSIFDDKIGHQLVDLLTEKAGEGVEVRVIYDQFGSHGQHPKMYRQLRAAGGVAVPFLMRRFQLLTLRFNFRNHRKIAIIDGKIGYIGGFNVGDQYIGESKKFGYWRDTHTRIIGDAVLSLQSRFLMDWNATAEGRELLTQTTKYFPENFSLPGKSMVQIVSSGPDDDMKQIKQGYMRMFSSARESISIQTPYFIPDGPVLETLEVAILSGVKVKLMIPNQPDHPLVYRATEYYAQELIDLGATVYRYDGGFLHSKVVIIDNEVATVGSANMDIRSFSLNFEGNAFIYDPDFAADLEDLFEQDVLKSTKLTMEYFEKQSAWMKFKQKFSRLFSPIL

SEQ ID NO: 14486 - DNA, 1455 bp, Desulfovibrio desulfuricans G20
  CDS (1)..(1455)
atggatttcactcttctcagcggcctgctggtggtgatcaacctgtgcgtgtcgttcaccgctgcgggccatgccctgctgaacaagcgggagcccagagcctctctcgggtgggtggcggtgtgccttacctttcctctggcggggccgttgctctatttcgtgttcggcatcaaccgtgtgcgcagcaaggcagaacggttgaatgaagaaaattcggccagaggcaccgccacaaaagggcggctgcacggcggaacccatccctttctgccgcccggctccatggacgattatcttattgcgccggtctaccgcacgctgcagcgttccggtctggctgtcaccggaatgccgctggtgggcggtaacgatgtgcgcataatgcataacggcgagcaggcctacccccgcatgatcgaagcggtggaatgtgccgaagactcactgtaccttgccacatatatttttgaaaccggaccggaaggccggcgctttatcgaagctctgagctccgctgcggcacggggcgttgatgtgcgtgtgctggtggacggcgtgggcgagctgtacgcctttccccgcgcgggaaccctgctgcagcggcggggagtgcgcgtggcgcgtttccttccgcctcgtctttttcctccccagcttagtgtcaatctgcgcaaccaccgcaaggtgctggtggccgacgggcaggtaggctttaccggcggcatgaatctgggtgacaggcatatggtggacaatccggaaaacagacgccccgtggtggacattcatttcggattttccggccctgtggtggcccagctgcaggaagcttttctggatgactgggggtttgccacgggcgaatatacgctgccccgccgcgtgacggaagagccgtgcggcgatacgctgtgccgcgtggtcaaaggcggtcccgggcaggatatcgaccgtatttcggctttgatgacgggcgtcatctccagtgcgtgccgctcggtacgcatcatgactccgtattttctgccgtccggcgatctgataagcgccatgcaggcagctgccctgcgcggggtgcgggtggatgtggtgctgcccggaaaaaataatctgccggcagtgcactgggccacacgcaacatgctgtggcagctgctgcggttcggggtgcatgtctactaccagcccggcccttttgtacattccaagatcatgctcatcgacggcagttacgcgcaggtggggtctgccaatctggacccccgcagcctgcggcttaatttcgagctgaatgtggagatatttgatacgtccgtcgtgcgtccgctggtaaggcatttcgacaacgtgcggcgcaatgcgcgcagcataaccctgagcgaactggaaaaccgttccctgccggtgcgtatgcgcgatgccgcattctggctgttcaccccgtatttgtag

SEQ ID NO: 14487 - protein, 484 aa, Desulfovibrio desulfuricans G20
MDFTLLSGLLVVINLCVSFTAAGHALLNKREPRASLGWVAVCLTFPLAGPLLYFVFGINRVRSKAERLNEENSARGTATKGRLHGGTHPFLPPGSMDDYLIAPVYRTLQRSGLAVTGMPLVGGNDVRIMHNGEQAYPRMIEAVECAEDSLYLATYIFETGPEGRRFIEALSSAAARGVDVRVLVDGVGELYAFPRAGTLLQRRGVRVARFLPPRLFPPQLSVNLRNHRKVLVADGQVGFTGGMNLGDRHMVDNPENRRPVVDIHFGFSGPVVAQLQEAFLDDWGFATGEYTLPRRVTEEPCGDTLCRVVKGGPGQDIDRISALMTGVISSACRSVRIMTPYFLPSGDLISAMQAAALRGVRVDVVLPGKNNLPAVHWATRNMLWQLLRFGVHVYYQPGPFVHSKIMLIDGSYAQVGSANLDPRSLRLNFELNVEIFDTSVVRPLVRHFDNVRRNARSITLSELENRSLPVRMRDAAFWLFTPYL

SEQ ID NO: 14488 - DNA, 1434 bp, Pseudomonas aeruginosa UCBPP-PA14
  CDS (1)..(1434)
atgacctccaccacctacctcggcctgctgctggtcggcatccaggtactcggcttcgtcgccgccatccatgccgtgctcaccgtgcgcaccgcacagggcgcgatcgcctgggccacctcgctggtattcatgccgtacctgaccctgctgccgtacctggtgttcggtcgcagccgtttcgacgcctacatcgaggcgcggcgccaggccaaccgcgagatgcacctggcggccgccgagctggactggcgtccctgggtcgaggaggccctggcggcccgccaggtcagcggctacaaggggctcaaggcgctggtgcggatgacccgcacgccgaccctggcgaacaatcgggtgcgcctgctggtcaacggcgaggccagcttcgaggcgatgttcaaggcgatttccgccgcccgccaggtgatcctggtgcagttcttcatcgtccgcgacgacgccctcggccagcgcctccagcaactgctgctggaacgcgcggccaacggcgtcgaggtgttcttcctctatgacgccatcggcagccacgcgctgccgcaccgctatgtcgagcggctgcgccagggcggcgtgcagatgcatggcttcagcaccggcagcggcatgctcaaccgcttccaggtgaatttccgcaaccaccgcaaggtcgtggtggtggatggcgagtgcggtttcgtcggcgggcataacgtcggcgtcgagtacctcggcgagaagccgccgctggcgccctggcgcgacacccacatggaactgcgcgggccggcggtggcgtgcctgcaggaaagcttcgccgaggactggtactgggcgacccacagcctgccgccgctgatcctgccgccgcagtacgacagcgagggcgcgctctgccaggtggtcgccagcggcccggcggatgcccaggaaacctgctcgctgttcttcgtcgagatgatcaacgccgcccacgagcgggtctggatcacctcgccgtatttcgttcccgacgaagcggtgatggccgccctgcgcctggcggtgctgcgcggcgtcgacgtgcgcctgctgatcccctcgcgcccggaccaccgcacggtgtatgccgcgtccagcctctacgcgctggaagcgatccgtgccggggtcaaggtgttccgctaccagcccggcttcctccaccagaaggtggtgctggtggaccgcgacaccgccgccgtcggcagcgccaacctggacaaccgttcgttccggctgaatttcgaggtgatggtggtgaccgtcgacgagggcttcgccggcgaggtggaggcgatgctcgaggcggacttcgccgagtcgctcgaattcactccggaagaccgccgcagcgtgcgccgcctgcagcaactggggatgcgcgtggcgcggctggtctcgccgatcctctga

SEQ ID NO: 14489 - protein, 477 aa, Pseudomonas aeruginosa UCBPP-PA14
MTSTTYLGLLLVGIQVLGFVAAIHAVLTVRTAQGAIAWATSLVFMPYLTLLPYLVFGRSRFDAYIEARRQANREMHLAAAELDWRPWVEEALAARQVSGYKGLKALVRMTRTPTLANNRVRLLVNGEASFEAMFKAISAARQVILVQFFIVRDDALGQRLQQLLLERAANGVEVFFLYDAIGSHALPHRYVERLRQGGVQMHGFSTGSGMLNRFQVNFRNHRKVVVVDGECGFVGGHNVGVEYLGEKPPLAPWRDTHMELRGPAVACLQESFAEDWYWATHSLPPLILPPQYDSEGALCQVVASGPADAQETCSLFFVEMINAAHERVWITSPYFVPDEAVMAALRLAVLRGVDVRLLIPSRPDHRTVYAASSLYALEAIRAGVKVFRYQPGFLHQKVVLVDRDTAAVGSANLDNRSFRLNFEVMVVTVDEGFAGEVEAMLEADFAESLEFTPEDRRSVRRLQQLGMRVARLVSPIL

SEQ ID NO: 14490 - DNA, 1440 bp, Fusobacterium nucleatum subsp. vincentii ATCC 49256
  CDS (1)..(1440): transl_table=11
atgcaagatatttctaaaattttattaacatttgtacaatttttcttacagtatgtttgggtggcaaatctattttttataattgttattataatgatagagaaaaaaaatccactatatacaattttatggatatttttattaacacttatgccttatgttggtttttttatttatttattctttggtttaacttttaagaaaaaaagagttgctaataaaatttataaattaaaaaaattaaaaagtaggaaaaatgtttccaaagctgatagagaagaactgagaagatggaaagggcttataacttatcttgaaatgagcactgataactatattacttccaataatgatattgaagcttactttacagggaaggaatttttttctaatttaaaaaaagaaatagctaatgcaaaaaaatttataaatatggaatattttatctttcaatttgatgggataggaaaagaaatagctgatttattaattgaaaaagctaaggaaggaatagaagtcaatctaataatagatggagttaatttagctaatcgtaaacttaatgaatattttaaaaatacaggagttaatttacatctattttttagaacatatattccaatatttaatattagattaaattatagagatcatagaaaagttacaataatagataatagagttgcttttgttggtggaatgaatataggagatgaatatttaggtaaaggggaaataggatattggagagatacttctgtaaaaatttatggagatattgtttctagttttgaaaaagaattttatttctcattaagtatagtaaaaaataaatatttgaaagatgaaaaaccctctaatgaaatttctcttaaatatgaagaagaagatagtgtctatatgcagcttataagttctggacctaattatgaatttccagttataagagataactatattaaacttattcaagaagctagaaaatctgtatttattcaaacaccatattttgttccagatgatttattactggatactttaaagtctgctgttttatcaggtatagatgtaaaaattatgatacctaataaggcagatcatccatttatttattggataaatcaatattatgttgctgaacttttaagattaggtgcaaatatttatagatatgaaaatggttttatacattctaaaactatattagttgatgaagaagtagtttcagttggaacttgtaattttgattatagaagtttctacctaaactttgaaattaatttgaatatctacaataaagatgttgctaattcttttaaaactcaatattataaagatattgcaatatcaaaaaaattgacatttgctgattttaaaaagagaagtatttttacaaaagtaagggaatctgtatttagattactatcacctataatgtag

SEQ ID NO: 14491 - protein, 479 aa, Fusobacterium nucleatum subsp. vincentii ATCC 49256
MQDISKILLTFVQFFLQYVWVANLFFIIVIIMIEKKNPLYTILWIFLLTLMPYVGFFIYLFFGLTFKKKRVANKIYKLKKLKSRKNVSKADREELRRWKGLITYLEMSTDNYITSNNDIEAYFTGKEFFSNLKKEIANAKKFINMEYFIFQFDGIGKEIADLLIEKAKEGIEVNLIIDGVNLANRKLNEYFKNTGVNLHLFFRTYIPIFNIRLNYRDHRKVTIIDNRVAFVGGMNIGDEYLGKGEIGYWRDTSVKIYGDIVSSFEKEFYFSLSIVKNKYLKDEKPSNEISLKYEEEDSVYMQLISSGPNYEFPVIRDNYIKLIQEARKSVFIQTPYFVPDDLLLDTLKSAVLSGIDVKIMIPNKADHPFIYWINQYYVAELLRLGANIYRYENGFIHSKTILVDEEVVSVGTCNFDYRSFYLNFEINLNIYNKDVANSFKTQYYKDIAISKKLTFADFKKRSIFTKVRESVFRLLSPIM

SEQ ID NO: 14492 - DNA, 1713 bp, Psychrobacter sp. 273-4
  CDS (1)..(1713)
atgtcgatgttcagtatagaacccagcaacttatcgttgagcctgacactcggtctcaccttaggtcttagtggatgccaaagcttaccaaagcagccgcacttgcctgaaagccaagcactatcagcaagggttaatgctttataccaatcagacattagcaaacaagataacatagaaaaagacgtccaaaaagatggcgattctatagataccacgaaagataccacgaatgtcagcacagacactgtcaccccaaatacggatagccttgatttggtagccgccatcagtcaacaaagtaagattcaccctgatttgtcaggctaccatccgattgtaactggtgccaatgcttttgcctcacgcagtatattgacaggtatggccacacgcaatatcgatgcccagtactatatttggcacgatgatcaggccggtcagctgatgctcaaagacttatgggatgctgcggagcgtggcgttattgtgcgcttattgcttgatgattttaataataatgctaaatttgatcagcatttattacgttttgccagtcaccctaatgtcgctgtgcgtattattaatccactcatataccgtaaatttaaaagcttaaactttttaaccggactgccgcgtatcaatagacgcatgcataataaaagcatgatttttgataagcaaatcaccatcattggtggccgtaatatcggtgatggatacttaagtaatgataaaaacagccagttcgcagacttagatgtactactgattggtaaagtcgtggcagatattgataatagctttgccagctactggtcagcgccaatatcatttgatattcaaaccttagcgactcttgataaaggagagacgactgattttgtaaaagggctcgataagttaaaaacagatgagaagagtagtagtaatggcagtttgtcgatttataaagcagccattgaagactcctctatcgatactgatttgattaacaaacgagtgccgtttcgctggacggacatgcagtttttaagtgatgatgtcggcaagctaaccaaaaccgtgccagcagacaccaatttagtgcatcaactgcgcactttgcttggcagtccatcaaagaaactcactattatctcatcttactttgtaccgactaaagacggtgttaatacgttgaacgcattggcagaatctggtatcgaaatcaaaattctaaccaattcatttgatgccaccgatgtaacggcggtacattctggctatagccaatggcgtcctagtttgctgcgcgcgggcgtaaaaatttatgagctaaaatcaaccgcttctgaagaaaagcgcgaaaacaaactttggaaaggtcgtagtcaatcctcaactagcttacatgctaaagcttttgccgttgatgactaccaagttttcattggctcatataatgttgacccacgctcggctaatatcaataccgagatgggcgtgattatcaatgatgatgagcttgctactcagttgcatgatgcactaagcgatgacttattaaaccaagcgtatgaagtgaagttactagaaaacggtaacttacaatggcataccatggaaaaagataagaaagtcatctatgattcagagccgcgcgtcgctgtcagtgaccatgtttggctgactatcatgtcatggctacctattgattggctgttatag

SEQ ID NO: 14493 - protein, 570 aa, Psychrobacter sp. 273-4
MSMFSIEPSNLSLSLTLGLTLGLSGCQSLPKQPHLPESQALSARVNALYQSDISKQDNIEKDVQKDGDSIDTTKDTTNVSTDTVTPNTDSLDLVAAISQQSKIHPDLSGYHPIVTGANAFASRSILTGMATRNIDAQYYIWHDDQAGQLMLKDLWDAAERGVIVRLLLDDFNNNAKFDQHLLRFASHPNVAVRIINPLIYRKFKSLNFLTGLPRINRRMHNKSMIFDKQITIIGGRNIGDGYLSNDKNSQFADLDVLLIGKVVADIDNSFASYWSAPISFDIQTLATLDKGETTDFVKGLDKLKTDEKSSSNGSLSIYKAAIEDSSIDTDLINKRVPFRWTDMQFLSDDVGKLTKTVPADTNLVHQLRTLLGSPSKKLTIISSYFVPTKDGVNTLNALAESGIEIKILTNSFDATDVTAVHSGYSQWRPSLLRAGVKIYELKSTASEEKRENKLWKGRSQSSTSLHAKAFAVDDYQVFIGSYNVDPRSANINTEMGVIINDDELATQLHDALSDDLLNQAYEVKLLENGNLQWHTMEKDKKVIYDSEPRVAVSDHVWLTIMSWLPIDWLL

SEQ ID NO: 14494 - DNA, 1644 bp, Psychrobacter sp. 273-4
  CDS (1)..(1644)
ttggaggcgaaaacaatagaagctttatctactactgagcagcaagtggcagcatggtcatggacagactttgctgggcttggtctgatatttcatattattcttatgattgtgatgactttgcgtattgtctcggtacagcgcaacattggggtggcaatcgcatggatagcggtgttgttcaccttgccaatatttggcttgattgcttatgtgctcgtcggtgagccgatgattggtcgacgctatcgtcagcgtatggatcaagcgcggctattgatgaatgagatggcgcagcgcgagcacttgatatttgataaagggcaagaggtactgccaactcattatcgcggagtcagtcacattggtacgcgttggacagggtttggggtgttttcagaccatgacatgcagctgttgacgcatgtcaatattatttttaagcgtatgattgatgacatcgatgccgctcagcgcagtattttgatggagttttatattatttatcctaaggggcaagtgcttgatgtgatagatgcgttgatggcagcggctcagcgcggagttgaatgtcatattctgattgatagtgtgggtagttttagcttttttaatagtaaagcgcatcgaaaattagaaaaagcgggcgtttttgtccatcagtcattgccagtagggctgtttaaaaccttgtttaaacgctcagatttgcgcaatcatcgcaaaatcgtggtcattgatgagtatatcggctatatcggtagctttaacttggttgatcctaagttttttaagcaagataaggcggtcggtgaatggattgatgtggcgatacgcagtgtcagtgatactgacatcagtattgctaccgcgatggcaaaagtattagtaaccgatattggggcggaaaatagcgacaatctagacgcgctgcatcaacgagtcaatagctatacgcgtaagctgtatctgcgcaatccgacgattaatgatctcaatagtcgcatcaaagtattggatgacgcgatagagaatgtagaaatgccttgtattggcgcgatgtcgacagtgattccgcagctgccggtggtaaaaggcgtagtcgcacagcttattccttcagcgccacaagtaaccgctcatgtcatctataacaccttagtaacagtgttgcatcgtgctaatcaccgtatttgtatcacaacgccatattttgtaccggacgaagctttatcaggtgcgctggtaacggcggctaagcgcggcgtcgaagtcacgctgattatccctgaaaaggttgattcttttttggttcagcacgcctcgcaagcctattatcaagagttgttagaggtgggagtgaccattgccttgtttaagggtggtctactgcatgcgaagacggttgttattgacgacgattattgcctatttggtaccgtaaatatcgatatgcgcagtttttatctgaatatggaagtcagtttggcgatttatacgcctgaaatggttgcacaagttgccgcttgccaagagtcgtatttacaaagctgtcattttttgggcttggatgagtggcaacagcgtcataaggctgagcgcttgtttgataatgtgatacgattatttagtccattattgtag

SEQ ID NO: 14495 - protein, 547 aa, Psychrobacter sp. 273-4
MEAKTIEALSTTEQQVAAWSWTDFAGLGLIFHIILMIVMTLRIVSVQRNIGVAIAWIAVLFTLPIFGLIAYVLVGEPMIGRRYRQRMDQARLLMNEMAQREHLIFDKGQEVLPTHYRGVSHIGTRWTGFGVFSDHDMQLLTHVNIIFKRMIDDIDAAQRSILMEFYIIYPKGQVLDVIDALMAAAQRGVECHILIDSVGSFSFFNSKAHRKLEKAGVFVHQSLPVGLFKTLFKRSDLRNHRKIVVIDEYIGYIGSFNLVDPKFFKQDKAVGEWIDVAIRSVSDTDISIATAMAKVLVTDIGAENSDNLDALHQRVNSYTRKLYLRNPTINDLNSRIKVLDDAIENVEMPCIGAMSTVIPQLPVVKGVVAQLIPSAPQVTAHVIYNTLVTVLHRANHRICITTPYFVPDEALSGALVTAAKRGVEVTLIIPEKVDSFLVQHASQAYYQELLEVGVTIALFKGGLLHAKTVVIDDDYCLFGTVNIDMRSFYLNMEVSLAIYTPEMVAQVAACQESYLQSCHFLGLDEWQQRHKAERLFDNVIRLFSPLL

SEQ ID NO: 14496 - DNA, 1470 bp, Ralstonia eutropha JMP134
  CDS (1)..(1470)
atgccgcttccaccgttcctgtcctcgctgcccgatcctgccctgtggtggggcccgctgttcacggtgaccgaatgggcgatccgcctgacgatgctggtctacgtgccgcagcgccgtgcgccggctgccgcgcgcacgtggctgctgctggtgttcttcctgccgtggctgggcctgatactttatgcgctgttcggacgcatctactatccgaagtcacgccgcctgaaactggcccgcatcaaccaggggatcgagcagctgcgcgcgcgcatcagccatgaactgccacagggtccattgccggatgggctgtgccagacgggttcctgcctgattgaacgggtcggctcattcgcgccgatgcgcggcaacgatgtcacgctgatcgaccgctacgacgacgtgattgccgcaatggtggccgacatcgacgccgcgaagcagtcggtgcacatcctgatgtacatctacgcggacgatgcgacgggccgaaggattaccgacgccgtgctgcgcgccgcgcgccgtggcgtacgctgcagcgtgctgatggacgcgctcggtgcgcgcgacggactgaaggcctttaccggcaagctgcgctctgccggcgtgcaggtggtaccggtgctgccgatgcgctcgctgtcggcagtgctcaagggcaagagtgcgcgcttcgacctgcgcaatcaccgcaagatcgtcgtgctcgatggcagcgtcggctatatcggctcgcagaacgtcgtcgatgccgaatcgatgccgggtctgcccaatgaggaactggtggcccgcgtgaccggcccggtggtatcgcaactgcaggctgtgttcctcgcggaccgctacctcgagaccggcgacaaggacctcggcgctgccgatttcccgccgctggcgccggacgggccgtgcattgcgcagatgctcccgagcgggcctggctacggcacgcagaatgcgcagatggtgctggtgtcgatgatccacaatgccgtgcgccgcgtggtcatcaccacgccttatttcgtgcccgacgagtcgttcctgcaagcgctgcacgtcgcgtgctatcgcggcgtggaggtgcatctggtgctgtcccagcgcatcgaccagcgcttcacgcaggccgcgcaggaagcgtatttcggtgtgctgctggaatcgggcgtgaaggtccacctgtaccggcccgcgttcctgcatgccaagcatgtgaccatcgacgacacggtggcgatggtcggctcgacgaacatggacatccgctcgttcgcgctcaatgcggaatcggcgctggtgatttacgacagggatgtggtggcgaagatggtgcgcattcagcagcgctatctggctgcgagcgacaccgtggtacgcgagaaatgggccgcgcggccgttgcgcacgcggacctggcagaacctttgccggttggcggattcgttgttgtga

SEQ ID NO: 14497 - protein, 489 aa, Ralstonia eutropha JMP134
MPLPPFLSSLPDPALWWGPLFTVTEWAIRLTMLVYVPQRRAPAAARTWLLLVFFLPWLGLILYALFGRIYYPKSRRLKLARINQGIEQLRARISHELPQGPLPDGLCQTGSCLIERVGSFAPMRGNDVTLIDRYDDVIAAMVADIDAAKQSVHILMYIYADDATGRRITDAVLRAARRGVRCSVLMDALGARDGLKAFTGKLRSAGVQVVPVLPMRSLSAVLKGKSARFDLRNHRKIVVLDGSVGYIGSQNVVDAESMPGLPNEELVARVTGPVVSQLQAVFLADRYLETGDKDLGAADFPPLAPDGPCIAQMLPSGPGYGTQNAQMVLVSMIHNAVRRVVITTPYFVPDESFLQALHVACYRGVEVHLVLSQRIDQRFTQAAQEAYFGVLLESGVKVHLYRPAFLHAKHVTIDDTVAMVGSTNMDIRSFALNAESALVIYDRDVVAKMVRIQQRYLAASDTVVREKWAARPLRTRTWQNLCRLADSLL

SEQ ID NO: 14498 - DNA, 1617 bp, Ralstonia eutropha JMP134
  CDS (1)..(1617)
atgcccgccgtccaggaccgcccccgactgacgcatcgctggcagcaccgcctcacggtgctgctggccaccgcgctgctgctggccggctgtgcgagcctgccgccgcaggatgggcgcgtaggcacctacgcggtgacgccagcggacacggccagtacgctgctggcccgcaccatggcgccgatgctctcggcgcacccgggccagtccgggttctatccgctcgccagcggcccggacgcactagtggcacgcatcgcgctggccagggccgcgcaacgcacgctggacgtgcagtattacatctacgacggcgacctgaccggcaagacgctgctcgccaacatcatcgccgccgcagaccgcggcgtacgcgtgcggctgctgctcgacgacctgcacgtggccggacaggaccgcatcctgtcggcgctcgatgaccacccgaacatcgaagtccggctgttcaacccattcgcctcgcgcagcctgcgcatggccgcgatggcgctcgactacagccggctgaaccgccgcatgcacaacaagtcaatgaccgccgacaaccagctcacgatcgtcggcggccgcaatatcggcgatgcgtatttctccgccgacaagggctcggatttcaccgatctggacctgctgctggcgggccccgtggtgcccgaggtctcggcggtgttcgacgactactggaacggcgcccccgcctaccccgtcagtgcgctggtcaagccgcccgaggacgccgcggcgcagctgcaggccttgcgcgactacctcgacaagcacgtcgccgaagcgcgcggcggcgagtattcgcagaccctgctgtcctcggggctcgcgcaggcgctcgaaagcggcaagctgcccgcgtactggggccaggccacggtgattgccgacaaggccgcgaaggtcacgctgccgcccgaagacgattccagccatgcgattcccaagctcgtgaagctgcttggcagtgcgcaacaggaactggcgctggtatcgccctatttcgtgccgaaccgcaaggccgtcgaatggtttgcgcagatgacgcagcgcggcgtgacggtgcgtatcctgaccaactccttcgctgcgacggatgtcagcgccgtgcacgcaggttattcgccgtggcgcaagaacctgctcgaagcgggcgtggaactgtacgaactcaagccgtccgcctatgcggagatggcgcgcgaaggcaagcagggccaccgcagcatggtcagcaagagccgcgcgagcctgcatgccaagagctatatggtggaccggcgcctgctattcgtcggatcgctgaacctggacccgcgctccgcccggctcaatacggaaatgggcgtggtcgtcgacagcgcgccgctgtgcgtggcactcggcaaggacctggaccaggcgctgctggatgtcgcctacaaagtcatgctcgcgccggacgccgacggtagtggctcgcatctggtgtgggtcacacgcgagaacggcctgctgcgcacctatgacagcgaaccggacatgggcgcgctgcagcatctcggacagggactgctgcggatgttgccgatcgaagaggaactgtag

SEQ ID NO: 14499 - protein, 538 aa, Ralstonia eutropha JMP134
MPAVQDRPRLTHRWQHRLTVLLATALLLAGCASLPPQDGRVGTYAVTPADTASTLLARTMAPMLSAHPGQSGFYPLASGPDALVARIALARAAQRTLDVQYYIYDGDLTGKTLLANIIAAADRGVRVRLLLDDLHVAGQDRILSALDDHPNIEVRLFNPFASRSLRMAAMALDYSRLNRRMHNKSMTADNQLTIVGGRNIGDAYFSADKGSDFTDLDLLLAGPVVPEVSAVFDDYWNGAPAYPVSALVKPPEDAAAQLQALRDYLDKHVAEARGGEYSQTLLSSGLAQALESGKLPAYWGQATVIADKAAKVTLPPEDDSSHAIPKLVKLLGSAQQELALVSPYFVPNRKAVEWFAQMTQRGVTVRILTNSFAATDVSAVHAGYSPWRKNLLEAGVELYELKPSAYAEMAREGKQGHRSMVSKSRASLHAKSYMVDRRLLFVGSLNLDPRSARLNTEMGVVVDSAPLCVALGKDLDQALLDVAYKVMLAPDADGSGSHLVWVTRENGLLRTYDSEPDMGALQHLGQGLLRMLPIEEEL

SEQ ID NO: 14500 - DNA, 1809 bp, Ralstonia eutropha JMP134
  CDS (1)..(1809)
atgcacgagccctgcaatgtgagcgtgtcgtcggtgacccgtcatggccgctcacggcatgcgtggcgcgcggcctggcggcgcgcggcctcgctggtgacaacgctgttttgcgccggtgtgctggcgggttgcgcgagcctgccagcgtcggccgaacgtacgccttcgacggcgccaaccgataccagcgacacgccactcggcaaggcgctcgcgcccaggctggcgcagcatccgggcgattcgctgttctatccgctatcgtccggtcccgacgcgctggccgcacgactggccatggcgcgggcggcgcagcgcagcctggacctgcagacctatattttcgagcctaccggcaccggcgctgccgtgctcggcgacatcatcaacgccgccgaccgcggggtgcgcgtgcggctgttgctggatgacatgcataccggtggcctggacaaggtgctggccgcgatcgactcgcatcccaatatcgaggtcaggctgttcaacccgttcgcgaaccggggcgcgcgctggctggaaatgctgtggagcttcagccggctggaccgccgcatgcacaacaagtcgatgacggtggacaaccagatctcgctggttggcgggcgcaatgtgggcgatgcctatttctccgcgcgtgccgacatggacttcagcgatctggacgtgcttgtcgcgggaccggtcgtgccgcaggtgtccgcggtgttcgatgcttactggaacgatccgtcgtcctaccccgtggccgcgctgattcccgaaggcaaggatgcgcccgaagaaatgcgcgcgttgcgtaagcgcctcgaagcgcgcggcgagcaggcgcgcgccagcccctatgtgcaggaactgcttgattcgggtctggcgaaaggtatcgaaagcggccacatgcccggctacacgggcaaggccaccgtggtgtcggacagcgcgtccaaggctaccgggaagaccgagggcgatggctatgccacggtgcggctggagcacatgatcagtgcggcgaagaacgaagtggtgctggtatcgccgtacttcgtgccggacgatgacggcgaagcgtggcttgtcgcgcttgcccgtcgcggcattcacgtgcgcatcctgaccaattcgttcgcggccaacgacgtgagcgccgtgcacgccggctacatgcctcaccgcgaggcgctggtggcggccggcatcgaactgtacgagctcaagccgagtgcctacgcggaactcgcccagcgcggcaagccggccgaatcgggatcgggaacgggcgcgggaacgcgcgctggcgcggggacgggttcgggatcggggacggggacggggacggggacggggacggggacgggttcgggatccggattgggctcggggtccgggtcgagagtgacttcgggctcgagctcgggttcgcgttcatggcttgcgtcgagccgcgccagcctgcatgccaaaaactacatcgtcgaccagcatcttgtattcatcggttcgctcaacatggatcagcgttcggccaagctgaataccgagatgggcatcgtcctggatagcgcgccgctggcccagcgcatcctcaagggcatgaatgatggcttgctcgacatcgcctaccgggtcgaactgcgtgcgaacccggacgggagctcgcgccatctgacgtgggtcacgcgcgagagcggccagttgaaaacctacgacagtgagccggggatgggcccgctgcaacaccttggcatcggcttcctgcgcgtgctgccgatcaaggaagagttgtag

SEQ ID NO: 14501 - protein, 602 aa, Ralstonia eutropha JMP134
MHEPCNVSVSSVTRHGRSRHAWRAAWRRAASLVTTLFCAGVLAGCASLPASAERTPSTAPTDTSDTPLGKALAPRLAQHPGDSLFYPLSSGPDALAARLAMARAAQRSLDLQTYIFEPTGTGAAVLGDIINAADRGVRVRLLLDDMHTGGLDKVLAAIDSHPNIEVRLFNPFANRGARWLEMLWSFSRLDRRMHNKSMTVDNQISLVGGRNVGDAYFSARADMDFSDLDVLVAGPVVPQVSAVFDAYWNDPSSYPVAALIPEGKDAPEEMRALRKRLEARGEQARASPYVQELLDSGLAKGIESGHMPGYTGKATVVSDSASKATGKTEGDGYATVRLEHMISAAKNEVVLVSPYFVPDDDGEAWLVALARRGIHVRILTNSFAANDVSAVHAGYMPHREALVAAGIELYELKPSAYAELAQRGKPAESGSGTGAGTRAGAGTGSGSGTGTGTGTGTGTGSGSGLGSGSGSRVTSGSSSGSRSWLASSRASLHAKNYIVDQHLVFIGSLNMDQRSAKLNTEMGIVLDSAPLAQRILKGMNDGLLDIAYRVELRANPDGSSRHLTWVTRESGQLKTYDSEPGMGPLQHLGIGFLRVLPIKEEL

SEQ ID NO: 14502 - DNA, 1329 bp, Ralstonia eutropha JMP134
  CDS (1)..(1329)
atgtcacggatatccgacaccgacccaccgaatgccgcacgatccaacggcgcggcgcatgttgcggcgcgggatgacagcgccggtcccgcagcacgcgcggggcggcggcgtctgctgcgctgggccggacggcacggcaagccggtcggcggcaatcaggtaaggctgctgtgcggcgggcgcgacttcttcccagcgctgatcgaggcgatcgacgcggcggttctccaggtcatcattgaaacctacatctacgccgacgacgacgtcgggcgcgccgtcagcgatgcgctgatccgggccgcggcgcgtggcgtagccgtgcggctgaccgtggacggtttcggtgccggcgacatgtctgccgaactcatgcagcgcctgcgcgacgcgggcgtgcagctgcgtgtctaccgcgtgatgcgcggcttccggctggcgcgcaggcacctgcgccgcctgcaccgcaagcttgccgtggtcgaccggcgcgtagcgttcgtaggcggcatcaacatcatcgacgactacaatcacggcccgttcgagcaggagggactcggggcacgctacgacttcgccgtggaagtgcgcggcccgctggtcgaccgcattgcgctgacggcggagcgcctctggtggcggctgtcgctgcgcgccgaactgcatgacgttggtttggcgggcgcggcagcgggatacccgcttgtgaccgacctgccgccgcggcgcgatacggaaggcggcatgcgggcggcgcttctcctccgggacaacttgcgcaaccgccgcaccatcgagcgcgaatatctgcacgcgctgggtgctgcgcgcgacgacgtgattctcgccaacgcgtatttcctgccgggccacaagatgcggcgcgcgctgctggcctgccgcaagcgcggcgtgcgggtacgattgttgttgcagggtcgcgtcgaataccggctgcagcatttcgccacgcacgcgctgtacgcgagcttgcttgatgccggcatcgagatctacgagtacgcgcagagcttcctgcacgccaaggtcggtgtggtggatgaatcctgggccacggtcggatccagcaatatggatccgttcagcctgctgctcgcacgcgaggccaacgtctgcgtctatgatcctgccttcgccgccgtcctgcgcacgcagctggagcgcgccattgccgagcgcagcgtgcgcgttatgccggaggcgcatgcccggcgctcggcggtgcaccgtgtggcgaactgggccgcctacatggtgttgcgtcttggcgtcgttattgccggtgtgacggggcgctattga

SEQ ID NO: 14503 - protein, 442 aa, Ralstonia eutropha JMP134
MSRISDTDPPNAARSNGAAHVAARDDSAGPAARAGRRRLLRWAGRHGKPVGGNQVRLLCGGRDFFPALIEAIDAAVLQVIIETYIYADDDVGRAVSDALIRAAARGVAVRLTVDGFGAGDMSAELMQRLRDAGVQLRVYRVMRGFRLARRHLRRLHRKLAVVDRRVAFVGGINIIDDYNHGPFEQEGLGARYDFAVEVRGPLVDRIALTAERLWWRLSLRAELHDVGLAGAAAGYPLVTDLPPRRDTEGGMRAALLLRDNLRNRRTIEREYLHALGAARDDVILANAYFLPGHKMRRALLACRKRGVRVRLLLQGRVEYRLQHFATHALYASLLDAGIEIYEYAQSFLHAKVGVVDESWATVGSSNMDPFSLLLAREANVCVYDPAFAAVLRTQLERAIAERSVRVMPEAHARRSAVHRVANWAAYMVLRLGVVIAGVTGRY

SEQ ID NO: 14504 - DNA, 1254 bp, Ralstonia eutropha JMP134
  CDS (1)..(1254)
atggaccacggatggacgacgggcaaccggtttcgcttactggagaacggggaggaatacttccccaggctgattgcggccctgaacgccgcgcataccagtgtgctgctggaaacgttcatcctggccgaggatgacgtcggttgccggctcgccgaagcgctggccgccgcagcgcgacggggcgtgcaggtagcgctgaccgtcgatggtttcggatcggccgatctgtctgccgactatatggtgaggttgacgcaggcaggcgttgcggtgcgcatgttctcgccgggccgccggctgttgggcaaacgtgccaatctcttccgccggttgcaccgcaagctggtggccatcgacgcatccgtcgcgttcgtcggcgggatcaacctgtgcgtcgatcatcttgtccaggcaagccccatcgccaaacaggactacgcggtggaggtacaagggcccgctgcagaagccatccacaggttcatgctggaagcgattggcgccggggccaaatggccacaggccatgcgctggcggcgtccggcggcgcgcggcaacgcggcttttgacgctgacttgccaggtgccgccttgcttgtgacacgggacaaccgggcacatcggagcgacatcgagcggcactacctgatggcgatccgcgcggcgcggcgcgagatcgtcattgccaatgcgtacttcctgcccggctatcgcctgctgcaggcgatctgcgccgcggcgcagcgcggcgtcgatgtgaggctgatcttgcaaggcaggccggacatggtgtgggtcaagcgcaccgtcgacatgttgtacgcccacttgcgtgaatcgggtgtgcggattttcgagtactgcgagcgtcccaaccatagcaaggtggccgtggtggacgatgactgggccacggtgggatcgagcaatctcgatcccctgagcctgtcgctgaacctcgaagccaatctcgtgattcgcgatggcgcgttcgtcgccacgctaaaggacaccctgcgcgacctgatggtccgcagttgcacggagatatccgccgtcgagcgcggacagggcgcgtggtggcatggcatcgccacgccgctgatcttccacttcctgcgcaagtttcccgcctgggccggatggctgccggcccatacgccccggttggtgtcgccggagattccggcggccggcgttgcgccgccggcagacatggccgtgcacaacgttcaacgggatggctcatga

SEQ ID NO: 14505 - protein, 417 aa, Ralstonia eutropha JMP134
MDHGWTTGNRFRLLENGEEYFPRLIAALNAAHTSVLLETFILAEDDVGCRLAEALAAAARRGVQVALTVDGFGSADLSADYMVRLTQAGVAVRMFSPGRRLLGKRANLFRRLHRKLVAIDASVAFVGGINLCVDHLVQASPIAKQDYAVEVQGPAAEAIHRFMLEAIGAGAKWPQAMRWRRPAARGNAAFDADLPGAALLVTRDNRAHRSDIERHYLMAIRAARREIVIANAYFLPGYRLLQAICAAAQRGVDVRLILQGRPDMVWVKRTVDMLYAHLRESGVRIFEYCERPNHSKVAVVDDDWATVGSSNLDPLSLSLNLEANLVIRDGAFVATLKDTLRDLMVRSCTEISAVERGQGAWWHGIATPLIFHFLRKFPAWAGWLPAHTPRLVSPEIPAAGVAPPADMAVHNVQRDGS

SEQ ID NO: 14506 - DNA, 1551 bp, Burkholderia cepacia R18194
  CDS (1)..(1551)
atgaccatgctgcgttcgtggggtgcgattctttcgttgctggcgctcgttgcatgcgcgagcctgccgctgcaggccgatcgcgcgcagacgcacgcatacaccgatacggacaacacgcggctgggtgtcgcgttccagcagcaggccagtacgcatccggggcaggacgcgtttcatctgctgaccgatccggtcgacgcgctggatgcgcgcgtgttgctggccgatcgcgcagaccgttcgctcgaccttcagtactacatctggcacgacgacctgaccggacatgaactggccgacgcgatcattcgcgcggccgatcgcggcgtgcgcgtccgtgcgctgctcgacgacctcggcacgaacgcggacgatcgcaagctgctcgagatcagttcacatccgaacatcgagatccggctgttcaatccggtcgccacgcgccggttcaagaagatcggcacggtgttcgagttctcgcgcgtcaatcggcgcatgcacaacaaggcgatgattgcggacaaccaggcggcgatcgttggtggccgcaatatcggcgacgagtatttcggcgcatcgtcgatgctggagttcggcgatctcgacgtcgtcgttcacggcccggtcgtgaagaacatctcgaccgaattcgatacgttctggaattccccgtacgcgtacccgatcagtgcactggtcgggcatgacgcggcgcctggcgggctggaccgcgagcgcgaacggttgcgcgactacctgagggccatggaggacaatccgtacgtgctcgaggccaggcagcgactcgaccggatcgttcatgggcagggcacggaactgtcgtggggccatgcgacggtgctgtacgacgatccgtcgaagatcgcgcacgcgccgaaggacagcgatgggcacctgatgccgcagttgcgggcactcgcattgcagcccgaacacgacctgctgatcgtgtcgccgtatttcgtgccgggcaaggaagtcgtcgagcggctgcgcgcgctcacggcgcgcggcgtgcgcgtgacggtgctgaccaattcgctcgcgtcgaccgacgtggcggccgtgcatgcgggctaccggcactaccgaagcgatctcgtggccgccggcgtgcggctttacgaacggcggccgtcgggcgacaagagcatttcgaagcaggtcatcatcgggtcgtcgcgtgcgtcgctgcatgcgaagacctatgtgttcgatcacaagagcattttcatcggatcgatgaatctcgatccgcgctcgctgaacctcaatacggagatcggcgtttactgcgagagcccggcgattgcgtcgcaggtggccaacgatcttgaagcgcggctcgatcgaatcgcgtggcgcgtcgagccaaggaccgatccggcgggcaaagggccgctcaagtggattcagaccgattcggacggcaaggtcaccgtgctcgatcacgaaccggaagtgtccgccgcgcggcggatggaagtctggttccttgggctgttcccgatcgaatcgcaactgtga

SEQ ID NO: 14507 - protein, 516 aa, Burkholderia cepacia R18194
MTMLRSWGAILSLLALVACASLPLQADRAQTHAYTDTDNTRLGVAFQQQASTHPGQDAFHLLTDPVDALDARVLLADRADRSLDLQYYIWHDDLTGHELADAIIRAADRGVRVRALLDDLGTNADDRKLLEISSHPNIEIRLFNPVATRRFKKIGTVFEFSRVNRRMHNKAMIADNQAAIVGGRNIGDEYFGASSMLEFGDLDVVVHGPVVKNISTEFDTFWNSPYAYPISALVGHDAAPGGLDRERERLRDYLRAMEDNPYVLEARQRLDRIVHGQGTELSWGHATVLYDDPSKIAHAPKDSDGHLMPQLRALALQPEHDLLIVSPYFVPGKEVVERLRALTARGVRVTVLTNSLASTDVAAVHAGYRHYRSDLVAAGVRLYERRPSGDKSISKQVIIGSSRASLHAKTYVFDHKSIFIGSMNLDPRSLNLNTEIGVYCESPAIASQVANDLEARLDRIAWRVEPRTDPAGKGPLKWIQTDSDGKVTVLDHEPEVSAARRMEVWFLGLFPIESQL

SEQ ID NO: 14508 - DNA, 1275 bp, Burkholderia cepacia R18194
  CDS (1)..(1275)
atgacggcggaagcccgcaagcgcttcgcgcaattgcggcagatgttcctgcaggaacgcggttccgcgtcgcggctcgccttcacgtcgggcaataccgtgcggctgtgcgaaggcggcggcgcgttcttccgggcattgatcgagcggattgatgccgcccgcgagcaggtgatgctcgaaacctacatcttctgcgacgacgcggccggccggccggtgtcggacgcgctgatccgcgcggcgcagcgcggcgtgcgcgtgcgcgtgatcaccgacggcatcggcaccgcacgcctgccgctgttcgacacgtgggtcgcggccggcgtcgagcactgcatctacaaccgtttcctgttcggccgcttcggcttctcgcgcacgcatcgcaagcttgcggtgatcgatcacgcggtcgcattctgcggcggcatcaacatcatcgacgactatgcgcagaacggcacgacgctgccgtttccacgctgggatttcgcggtcgagatggcggggcccgcggtgtccgacgtgcgcgccgcgttcgaactgcagtggcaccggatcatgttcggccacaagccgtatgcgcaatacgcggccgggctgcatggcggcgaagcattccccgacatgttccggcgctggatgcgcagccatcggtggatcaaggccggcgcgctgcgggtcgtgacggagccgagcgtcgcgttcgtcgcgcgcgacaatgtcgtgaatcgccgcgcgatcgagaaggcgtatctcgcggcgatcggccaggcgcgccagcggatcctgctcgctaatccgtacttcatgccgggccgcaagctgcgccgcgcgctgacgggcgccgcgcgacgcggcgtcgacgtgcggatcctgatcggccgcaaggagttcgcggcactcgatacggccgtgccgttcctctatcacgcgctgctgcgcgcaggcgtgcgcgtggccgaatacgacaagacgatgctgcacggcaaggtggccgtgatcgacgacaattgggcgacggtcggttcgtcgaacctggacgcgctgagcctgatgctgaacaatgaagcgaatgtcgtgctggtgcgctacgatgctgtcacgaacgaactgcgcgacgcgatcgcggccgcattcgccgacggccgggaaatcgaccccgcccgattcgccgcgcgcccgcgtatcgagcgcatgctgaactggcttgcctatacggcgtatcgtctcgtgatgaaggcgctgacggtcggtggttacgactga

SEQ ID NO: 14509 - protein, 424 aa, Burkholderia cepacia R18194
MTAEARKRFAQLRQMFLQERGSASRLAFTSGNTVRLCEGGGAFFRALIERIDAAREQVMLETYIFCDDAAGRPVSDALIRAAQRGVRVRVITDGIGTARLPLFDTWVAAGVEHCIYNRFLFGRFGFSRTHRKLAVIDHAVAFCGGINIIDDYAQNGTTLPFPRWDFAVEMAGPAVSDVRAAFELQWHRIMFGHKPYAQYAAGLHGGEAFPDMFRRWMRSHRWIKAGALRVVTEPSVAFVARDNVVNRRAIEKAYLAAIGQARQRILLANPYFMPGRKLRRALTGAARRGVDVRILIGRKEFAALDTAVPFLYHALLRAGVRVAEYDKTMLHGKVAVIDDNWATVGSSNLDALSLMLNNEANVVLVRYDAVTNELRDAIAAAFADGREIDPARFAARPRIERMLNWLAYTAYRLVMKALTVGGYD

SEQ ID NO: 14510 - DNA, 1515 bp, Listeria monocytogenes str. 4b H7858
  CDS (1)..(1515): transl_table=11
atgcgcaaactgattcaatttctgtttatagcagtagttttatttttagtggaatactttttaatcaatcaagcagctatattattcttagtaacaagtggacttatccaattatgcggattaattattgtgattcggctactactctttgatcaacggaatactagctcaaaagtcgcctggattgcggttattttcattttacctgtacttggaacgattagttaccttgtgtttggtagaaatccagcaactagaaaattcagcacagctcaagtaatggaaaaagctaaattaattaatgcgattcacgcaattccaaacaacactaatgaaaaattaccacgactatctaaaagaattgcgcatttaacgtccatagagccaattaaggggaataaaatcgaaatattaacaaatggcgaagaaacttttccagtgctcttagacgcgcttagaaaggctgaaaaccacattcatattcaatactatattttcaaaacggatgaaatttctacagagattcgtgatattttggtagaaaaggcgaaatccggtgttgaggttaggtttatgtttgatggacttggttcaagcaaacttcataaggcatttttagcgcctctaaaagaagctggagttagtattcatgcgtttgatccaatcacatccccatggattgtaaggactgccaacttgcgaaatcaccgtaaaattgtcgtgattgatggtcaaattggctttacaggcgggcttaatattggagaagaatatcgttctaatacaccagatttccgtgtttggcgcgatacacatattaaaatcacaggccaagctgttatcgaacttcaagaatcttttctaaatgattgggtctatatggaaaaccaagcaggtgctgcagatcaatttattagtgaagctggattacaacaatatttttcaccagttgatgtgggtgacgaatgggcgcaagtgatttacggcggaccatatgataaagaaaaatgggttcgcgattcgatgcttgatttaattgattccgctaaagaatctgtttggattgtgtcgccttactttgttccagatgaggagtcgcttgcagttattcgccgggttgcgatgagcggtgttgacgtgcgagttattattccaggcaaaggtgatcgcgggatttcattccacggaagtaatgcgtatgtgaaaacaatgattgaagcaggcgcgaaaatgtatgcttatgccgatgattcttttgttcatgcgaaggcaatgctagtggacgggacgcgtgcagctataggtactgccaattttgacgtgcgtagttttagattgaatcatgaattaatggtattcttatatgatgaaagcgaggctatgcatcatttaaaacgtgattttgagaaagattttgaagatagccgactgtttacgatgaaagatatggaaaacaaaccattattgactcgtataaaagaagttctatctagtttactatcaccaattttataa

SEQ ID NO: 14511 - protein, 504 aa, Listeria monocytogenes str. 4b H7858
MRKLIQFLFIAVVLFLVEYFLINQAAILFLVTSGLIQLCGLIIVIRLLLFDQRNTSSKVAWIAVIFILPVLGTISYLVFGRNPATRKFSTAQVMEKAKLINAIHAIPNNTNEKLPRLSKRIAHLTSIEPIKGNKIEILTNGEETFPVLLDALRKAENHIHIQYYIFKTDEISTEIRDILVEKAKSGVEVRFMFDGLGSSKLHKAFLAPLKEAGVSIHAFDPITSPWIVRTANLRNHRKIVVIDGQIGFTGGLNIGEEYRSNTPDFRVWRDTHIKITGQAVIELQESFLNDWVYMENQAGAADQFISEAGLQQYFSPVDVGDEWAQVIYGGPYDKEKWVRDSMLDLIDSAKESVWIVSPYFVPDEESLAVIRRVAMSGVDVRVIIPGKGDRGISFHGSNAYVKTMIEAGAKMYAYADDSFVHAKAMLVDGTRAAIGTANFDVRSFRLNHELMVFLYDESEAMHHLKRDFEKDFEDSRLFTMKDMENKPLLTRIKEVLSSLLSPIL

SEQ ID NO: 14512 - DNA, 1212 bp, Bacillus cereus G9241
  CDS (1)..(1212): transl_table=11
atgattaaaaaaatattaagagttacttctattattattgctattttcttttttattttaatttggatgcatattgacgttaccttaggaaggaaaatggaagctggcaaaaatatgccgatagagtatgctcctcactatagtgattttcaattatatgtagaagggaagtcgttttataaacagttatttgctgatataagagaagcgaagcaatctatttatacatatttttttattttgtcggatgataaaagtagccatacttttttaaatttattaaaagagaaggcaaaagaaggagtaaacgtctatttatcagtggatcgcattaatgatttatcatttgaaagaaagatgataaatgaattgcgggaaagtggtgttcattttacgtatagtagaaaacctgaattaccattcgggttttattcacttcaccatcgtaatcatcgccgtattacgacgattgatggggagattggttatacgggtggttttaatataggagatgagtacttaggaaaagataagcgatttggatattggcgtgactatcatgtgcggcttaaaggagaaggagcaaaagatttagaggaacaatttgctttagattggaaacgagatacgaaagaggatataaagaggagcacaaataaggctagcaaagggaatacattacatactatggggagttacaatggacattacgttgctaaaaaatatatagagctaataaaacaagctcagcactcaattgtaattgcaacgccgtattttatagcgaaaaataaagaatcaatgaatgctttaattgcagcacaaaagcgtggtgttacagtaaaaatactttggtcatataaaccagatttacctcttataaaagaagcggcgtatccatatatacgtcaagctgttaataatgggattactgtatatgggtataaaaaaggaatgttccatggtaaattaatgcttattgataatgaattaaccgttattggcacaacaaactttacttcgcgtagctttaatataaatgatgaaatgaacttgtatattcatggtggaactattgtatcagaagtgaacgaagcattagcccaagattttcatgattcaaaagaaatgacgaaagagttttttgagaagttatctttttgggagcgttgtaaggagaaatttgcgggatggattgatttttatttgtga

SEQ ID NO: 14513 - protein, 403 aa, Bacillus cereus G9241
MIKKILRVTSIIIAIFFFILIWMHIDVTLGRKMEAGKNMPIEYAPHYSDFQLYVEGKSFYKQLFADIREAKQSIYTYFFILSDDKSSHTFLNLLKEKAKEGVNVYLSVDRINDLSFERKMINELRESGVHFTYSRKPELPFGFYSLHHRNHRRITTIDGEIGYTGGFNIGDEYLGKDKRFGYWRDYHVRLKGEGAKDLEEQFALDWKRDTKEDIKRSTNKASKGNTLHTMGSYNGHYVAKKYIELIKQAQHSIVIATPYFIAKNKESMNALIAAQKRGVTVKILWSYKPDLPLIKEAAYPYIRQAVNNGITVYGYKKGMFHGKLMLIDNELTVIGTTNFTSRSFNINDEMNLYIHGGTIVSEVNEALAQDFHDSKEMTKEFFEKLSFWERCKEKFAGWIDFYL

SEQ ID NO: 14514 - DNA, 1530 bp, Bacillus cereus G9241
  CDS (1)..(1530): transl_table=11
atgaagaaacctatcgtccaattactattaatatttacaattgtatctatcgttcttttcctattaaatacatcgtatatttcgttatatacatttgtcggcgttctctggtccatcacaattgtaggaatttcattcgttatttttatcgaaaatagatctcctcaaagtaccttagcgtggtttttagtattagcgcttcttcccgttataggtgtgcttttatactctattttcggacgtagccgttggagaagaaaaaagcatctccatcgttcagaagaacaaagaaaattattccgtgaaatattagaaggaagacggctagagttatcactcaaagtcccattaagtgaacgctctgcccatttaacagaagtcgtacaaaaatttggaggtgggcctgccgcagatagaacaactacaaaacttttaacaaacggagatcaaacattctcagaaattttgcaagcgatcgagcaagcaaaacatcacatacatattcaatactatatttataaatctgatgagattggtacaaaagttcgggatgcgttaataaaaaaagcaaacgctggtgttattgtacgcttcctttatgatggattaggaagtaatacgttaagaagacgctttttaaaacctatgaaagaagctgggattgaaattgttgaatttgaccctattttttctgcttggttacttgaaacagttaattatcgtaaccaccgtaaaatcgtcattgtagatggagaaatcggttttacggggggactcaatgtcggtgatgaatatcttggccgttcaaaaaaatttcccgtttggcgtgatagtcatttaaaaatagaaggaaaagcgttatataaattacaagcaatttttctagaggactggctctatgcatctagtggtttgaaaacttattcttgggatcaatttatgaatagacaatacttcccaggtaaagaaatttcaagtgcagaaggtgcggtgcaaattgtagctagcggaccaagctcagatgataaaagcattcgtaatacgttattagctattatgggctctgcaaaaaaatctatttggattgctacaccatattttattccagatcaagaaactttaacattattacgtttaagtgcaatatctggcatagatgtacgcattttatatcctggtaaaagtgatagtattattagtgatcaagcatcccagtcctacttcactccacttttaaaagctggtgcctccatttatagttataaagatggctttatgcatgcaaaaattgtaattgttgatgataaaattgcaacaatcggaacagcaaatatggatgtacgcagctttgaattgaattacgaaattattagcgtactgtatgaatcagaaactgttcatgatattaaacgtgattttgaagaagactttaaacattccactgaaattaaatggaacgctttccaaaaaagaagtatcaaaaaacgaatattagagtcttttatgaggctcatttctcctttactataa

SEQ ID NO: 14515 - protein, 509 aa, Bacillus cereus G9241
MKKPIVQLLLIFTIVSIVLFLLNTSYISLYTFVGVLWSITIVGISFVIFIENRSPQSTLAWFLVLALLPVIGVLLYSIFGRSRWRRKKHLHRSEEQRKLFREILEGRRLELSLKVPLSERSAHLTEVVQKFGGGPAADRTTTKLLTNGDQTFSEILQAIEQAKHHIHIQYYIYKSDEIGTKVRDALIKKANAGVIVRFLYDGLGSNTLRRRFLKPMKEAGIEIVEFDPIFSAWLLETVNYRNHRKIVIVDGEIGFTGGLNVGDEYLGRSKKFPVWRDSHLKIEGKALYKLQAIFLEDWLYASSGLKTYSWDQFMNRQYFPGKEISSAEGAVQIVASGPSSDDKSIRNTLLAIMGSAKKSIWIATPYFIPDQETLTLLRLSAISGIDVRILYPGKSDSIISDQASQSYFTPLLKAGASIYSYKDGFMHAKIVIVDDKIATIGTANMDVRSFELNYEIISVLYESETVHDIKRDFEEDFKHSTEIKWNAFQKRSIKKRILESFMRLISPLL

SEQ ID NO: 14516 - DNA, 1545 bp, Bacillus cereus G9241
  CDS (1)..(1545): transl_table=11
atgaaaaatacgttaaagttgattttctttgttttactattgttcgcattatttgtttcattacgtatgtttattgatgtagcattttattcggatgtaattgggataaaggatgtttcgattttaggtattattagtattttatttacagtatctgcatttttaattggctgcgttattttcttagagaaccgtcatccgtctaaaacacttacatggctcattgtgttagggatctttccggtatttggattcttcgcttatttattattcggacagaactttcggaggaagagaatgttccaaaagaaggcgttgctcgatgaacaagcgtttttacaatataaggggcatgaagattatgaagaactgattttgcgcaatcataagcatcaagagctgttatttcgtttagcggatcgcttaggcgctttaaatatttcatttcaaactgaaacgagaacattaacaaatggagatgaaacgtttcaggccattttagatggattaaaacgagcaaaacatcacattcatatggaatattacattgtgcgtgatgataagcttggaacagaaattaaagatattttaatacaaaaatcaaaagagggcgtagtcgttcgttttttatatgatgcggttggaagttttaaattatcaaaatcgtatattgaagaattaaacgatgcaggtgtcgaaatgattccgttctttcctgtgcgctttccgattttaaacgataagattaattatcgaaatcaccggaaaatcgttattattgatgggaatgaaggatttgtaggtggattaaatattggtgatgaatatttaggaaaggataagtacttcggcttttggcgagacacgcatttatatttgcgtggggaagctgtacaaagtttgcagcttattttccttcaagattggttttatatgactggtgaggctgtgctagcccctgaatatttacaagcgaaagcagttgagggggagcattggggcggcgtgcagctcgttgcaggtggaccggataataaatgggaaacaattaaacatttatattttgccatgattgcttctgcacgaaaatccatttggattgcaacgccgtatttcatcccggatgatgatattttatccgcattaaaagtagcggcacttgctggtattgatgttcggttgttaatgccgagtaagcctgataagcgaactgtcttttatgcatcgagatcgtacttcccagagcttttagatgcaggggtaaagatatatgaatacgaaaaaggttttctccatagtaaagtagttattgtcgattctgatttagcttcaattgggactgctaatatggatatgagaagttttcatttgaactttgaagtaaatgcctttttatatgatacagatagcattcgaaaacttgttcaagattttaaagatgatttagaagaatcaagtgaaattcacgtcgatcgttttcataaaaggcgtcttcatagacgaattgttgaatcaacgtaccggttattatcgcctttattataa

SEQ ID NO: 14517 - protein, 514 aa, Bacillus cereus G9241
MKNTLKLIFFVLLLFALFVSLRMFIDVAFYSDVIGIKDVSILGIISILFTVSAFLIGCVIFLENRHPSKTLTWLIVLGIFPVFGFFAYLLFGQNFRRKRMFQKKALLDEQAFLQYKGHEDYEELILRNHKHQELLFRLADRLGALNISFQTETRTLTNGDETFQAILDGLKRAKHHIHMEYYIVRDDKLGTEIKDILIQKSKEGVVVRFLYDAVGSFKLSKSYIEELNDAGVEMIPFFPVRFPILNDKINYRNHRKIVIIDGNEGFVGGLNIGDEYLGKDKYFGFWRDTHLYLRGEAVQSLQLIFLQDWFYMTGEAVLAPEYLQAKAVEGEHWGGVQLVAGGPDNKWETIKHLYFAMIASARKSIWIATPYFIPDDDILSALKVAALAGIDVRLLMPSKPDKRTVFYASRSYFPELLDAGVKIYEYEKGFLHSKVVIVDSDLASIGTANMDMRSFHLNFEVNAFLYDTDSIRKLVQDFKDDLEESSEIHVDRFHKRRLHRRIVESTYRLLSPLL

SEQ ID NO: 14518 - DNA, 1167 bp, Bacillus cereus G9241
  CDS (1)..(1167): transl_table=11
atgttcttcttatctctcttattactaggcagcactctctggattgtaattgatttttcttatgggagaattgttcatttaaagcgtgtacgttctcgttctttccctttacgtcaaagtgattttcacctttatacatatggaaaagatttgtatgacgctctatttactgatataaaacaggcgaaacaccatgtgcacgttttgttcttcattgtaaaaaacgataagatcagccgggaatttttaaagttacttattgataaggcaaaggaaggaattgaagtaagacttctactcgatcgattgggaggccatcatttatcaaacgaggccattcgctccctacaaaaacatggtgtctctttttcattttgtcacaaagtaaagtttccttttcctttcttttctgcaaatcaaagaaaccatagaaaaattacagttatcgacgggaaaattggttatattgtkggatttaatattggggaagaatatttagggcataatcaaaaattaggattatggcgcgattatcatttacgtcttacaggagaaggaatacaagatttacaaaagcaatttttacatgattggctcgacgatacggaccaaaatttattagatgcatctctttatttccctaagcaacaaccgggaagcattattcatcgttttatccctactgatggtgcttatttgcaaaatacatttgtgctggaaagcggtacaccatatttcattcctgggaaaaaaattatgaatgcattattagaagcacgaaaacgcggcgttcaaatcacgattctcgttccagaaaaagcggatcacgcccttgttcgagaagcaaaattcccgtattgccgaaagttaatacaagctggatgtaatatttacgcatttcaacaaggtttttttcacgctaaagttattatagttgatgactacatttgtgatatcggaactgcaaactttgatatgagaagtttatatattaaccatgaaatcaactgccttttatatgataaacattttatacaaaccgtaaaaaacaaattccatgaagatctaggaaacgcgtcattactttccttgaaagatgttagcccgaattctcttattgatagaggaaaagaatggataggaacaatacttgctttcttcctatag

SEQ ID NO: 14519 - protein, 388 aa, Bacillus cereus G9241
MFFLSLLLLGSTLWIVIDFSYGRIVHLKRVRSRSFPLRQSDFHLYTYGKDLYDALFTDIKQAKHHVHVLFFIVKNDKISREFLKLLIDKAKEGIEVRLLLDRLGGHHLSNEAIRSLQKHGVSFSFCHKVKFPFPFFSANQRNHRKITVIDGKIGYIVGFNIGEEYLGHNQKLGLWRDYHLRLTGEGIQDLQKQFLHDWLDDTDQNLLDASLYFPKQQPGSIIHRFIPTDGAYLQNTFVLESGTPYFIPGKKIMNALLEARKRGVQITILVPEKADHALVREAKFPYCRKLIQAGCNIYAFQQGFFHAKVIIVDDYICDIGTANFDMRSLYINHEINCLLYDKHFIQTVKNKFHEDLGNASLLSLKDVSPNSLIDRGKEWIGTILAFFL

SEQ ID NO: 14520 - DNA, 1194 bp, Bacillus cereus G9241
  CDS (1)..(1194): transl_table=11
atgttcttcttatctctcttattactaggcagcactctctggattgtaattgatttttcttatgggagaattgttcatttaaaagcgttacgttctcgttctttccctttacgtcaaagtgattttcacctttatacatatggaaaagatttgtatgacgctctatttactgatataaaacaggcgaaaacacctgtgcacgttttgttcttcattgtaaaaaacgataagatcagccgggaatttttaaagttacttattgataaggcaaaggaaggaattgaagtaagacttctactcgatcgattgggaggccatcatttatcaaacgaggccattcgctccctacaaaaacatggtgtctctttttcattttgtcacaaagtaaagtttccttttcctttcttttctgcaaatcaaagaaaccatagaaaaattacagttatcgacgggaaaattggttatattggtggatttaatattggggaagaatatttagggcataatcaaaaattaggattatggcgcgattatcatttacgtcttacaggagaaggaatacaagatttacaaaagcaatttttacatgattggctcgacgatacggaccaaaatttattagatgcatctctttatttccctaagcaacaaccgggaagcattattcatcgttttatccctactgatggtgcttatttgcaaaatacatttttatatttaatcgaaagcgcggaaaaagaactctttatcggtacaccatatttcattcctgggaaaaaaattatgaatgcattattagaagcacgaaaacgcggcgttcaaatcacgattctcgttccagaaaaagcggatcacgcccttgttcgagaagcaaaattcccgtattgccgaaagttaatacaagctggatgtaatatttacgcatttcaacaaggtttttttcacgctaaagttattatagttgatgactacatttgtgatatcggaactgcaaactttgatatgagaagtttatatattaaccatgaaatcaactgccttttatatgataaacattttatacaaaccgtaaaaaacaaattccatgaagatctaggaaacgcgtcattactttccttgaaagatgttagcccgaattctcttattgatagaggaaaagaatggataggaacaatacttgctttcttcctatag

SEQ ID NO: 14521 - protein, 397 aa, Bacillus cereus G9241
MFFLSLLLLGSTLWIVIDFSYGRIVHLKALRSRSFPLRQSDFHLYTYGKDLYDALFTDIKQAKTPVHVLFFIVKNDKISREFLKLLIDKAKEGIEVRLLLDRLGGHHLSNEAIRSLQKHGVSFSFCHKVKFPFPFFSANQRNHRKITVIDGKIGYIGGFNIGEEYLGHNQKLGLWRDYHLRLTGEGIQDLQKQFLHDWLDDTDQNLLDASLYFPKQQPGSIIHRFIPTDGAYLQNTFLYLIESAEKELFIGTPYFIPGKKIMNALLEARKRGVQITILVPEKADHALVREAKFPYCRKLIQAGCNIYAFQQGFFHAKVIIVDDYICDIGTANFDMRSLYINHEINCLLYDKHFIQTVKNKFHEDLGNASLLSLKDVSPNSLIDRGKEWIGTILAFFL

SEQ ID NO: 14522 - DNA, 1314 bp, Rubrivivax gelatinosus PM1
  CDS (1)..(1314)
atgaccgctccggccggcgccccgccgccggacgaccccgtgctgtccgaggccctggcctggtatgcccatgcccgggccgtgttcagcggcggcaacgaggtgcagttgctgcgtggcggcgatgcgctgttcccggccatgatcgagtcgatcggccacgccacgcacgaggtctggctcgccacctacatctatggcgacgacgtcgcggcgcaggccgtgtcggcggcgctcgtcgcggcggcccggcgcggcgtgcgcgtccgcgtggtggtggacggcttcggttcgctgcatgcgctggcggcgctgcgcgagcggctcgagcccgcgggcgtggcgctggccgtgttccggccgacgcagcgctggtggaactggctgcagcccggccagctgcgccgcctgcaccagaagctctgcgtggtcgacgggcaggtcggcttcgtcggcggcatcaacgtgctcgacgaccgccacgacctcaaccacggctggggcgacaccccgcggctcgactacgcggtgcgtgtgcggggcgcggtggtcgggccggtcgagcagacggcccgcgcgatgtggacgcgtgccgccttcggtcgcgactggcgtgacgaggtgcgacagatcgcgcgcagcagccagccgatggcgcgcgcgcgccgcctgctgcgacgcctgcgcatcgcggtgcggcgcggctcgccaggaggcttcggcgccggtgcgctgcagccggtgcgagtcgccttcgtggtgcgcgacaacctcagccagcgccgcagcatcgagcgcagctacatcgacgcgctgcgccgtgcgcagcagcgcatcgacatcgtgtcagcctacttctaccccggcttcgagttccgccgcgcgctgctggccgcggcgcggcgcggcgtgcgtgtgcggctgctgctccagggaaaagccgactatcgcttcgccgcgctggcggcgcaggcgttgtatgacgaactgctggcgcacggcgtggcggtgttcgagtacaccccggccttcctgcacgcgaaggtggcgctggtcgatcagcgctgggccacggtgggcagttccaacatcgacccgctgtcgctgttggtcaacctggaggcgaacgtgatcgtcgatgaccgcggcttcgcggccaccctgtcgcgcgagctggaccgcgacttcgccgtctcgcgcgagatcaccgcaccggtgccggtggccggctggcggcgctggctgcgccggggcttcgtcgcctgggtggcccggctctacctgcgcgcagccggcgccggcgggcgctactga

SEQ ID NO: 14523 - protein, 437 aa, Rubrivivax gelatinosus PM1
MTAPAGAPPPDDPVLSEALAWYAHARAVFSGGNEVQLLRGGDALFPAMIESIGHATHEVWLATYIYGDDVAAQAVSAALVAAARRGVRVRVVVDGFGSLHALAALRERLEPAGVALAVFRPTQRWWNWLQPGQLRRLHQKLCVVDGQVGFVGGINVLDDRHDLNHGWGDTPRLDYAVRVRGAVVGPVEQTARAMWTRAAFGRDWRDEVRQIARSSQPMARARRLLRRLRIAVRRGSPGGFGAGALQPVRVAFVVRDNLSQRRSIERSYIDALRRAQQRIDIVSAYFYPGFEFRRALLAAARRGVRVRLLLQGKADYRFAALAAQALYDELLAHGVAVFEYTPAFLHAKVALVDQRWATVGSSNIDPLSLLVNLEANVIVDDRGFAATLSRELDRDFAVSREITAPVPVAGWRRWLRRGFVAWVARLYLRAAGAGGRY

SEQ ID NO: 14524 - DNA, 1647 bp, Rubrivivax gelatinosus PM1
  CDS (1)..(1647)
atgggtgcggcatggcaccatcggcgcgaagccgccgccatgccctcgttcgcgtccgacctgccgaccccgcgccctcgccaccgcgttgtcccgctgacgctgtggcgggtggcgatgctgctggcctggctcgggctggcgggctgctcctcgctgccctcgcggccaccgttgcccgacgaggccgcgctgcccgcggcgaccgccggcgcgctggccgcgcaggtcgcgccgctggtgcaggcgcaccccggccgctccggcttcgtgccgctcgacagcgggctcgacgccttcgccgcacgcgtctggctggtcgaccgcgccggcagcagcctggacatccagacctacatctggcgcagcgaccgcaccggccgttggctgctgacgcgcctgcaggccgcggccgagcgcggcgtgcgggtgcgcctgctgctcgacgacggcaacggcagccccacgctcgacgggctgctgtcgcagctcgatgcccacccgggcgccgaggtgcgcttcttcaacccctatccgcaccgcggcctgggccgcgcgtgggacctggccaccgacttctcgcgcctgcaccggcgcatgcacaacaagacgttcaatgccgacggcgtggtcaccatcctcggcggacgcaatgtcggcgacgagtacttcggcgcggcggccgacatggagttcgccgacctcgatgtgctcgcggtcgggccgatcgtcggtgaggtgtcggcgtccttcgacgcctactggaacagcgcctcggcctacccgcggcggtcgctgctgttgcccggcaacgaccggccgctcacgcccgagcagcaggcggcgctcgacgaggccagcgcctacgcgaaggacctgcgcgagcgtccgcgcgtcgagcgctggcgcgagcgcgggccgcaggcgtccgacttcgtctggggccgctccacgctgttcgtcgacccgcccgacaaggtgctcaagcaggccggcgagagcgagctgatgttgccgcggctggcccgcacgctgggcaatgccgaccgcagcatcgacatcgtgtcgccctacttcgtgcccaccgacgacggcgtggccgcgttcaccgcgctgcacgaccgcggcgtgcggctgcgcgtgctgaccaactcgctggccgcgacggatgtctcggcggtgcacgccggctatgcaccatatcgcccggcgctgctcgacggcggtgtggagctctacgaactgcggccggtcccggcacccgaaggtcgcgcgcgcgggcggctgctgggcctgggttcgtcgcgcgcgagcctgcacgccaagaccttcgccgtcgacggcgagcgcgtgttcatcggctcgttcaacttcgatccgcgctcggcctggctcaacaccgagatcggcgtattgctcgagcacccaggcctcgcgcagcgcatcggacaagcgttcgacaccgaggtgccgcgccaggcctggcaggtgacgcgcgaccctgaccgcggccccgacgcgctgcgctggcgcggccagacgcccgaaggccagccgatcgagctgaccgaggagcccgaggccggctggctcacgcggctgtgggtgtggctgctgtcgtggctgccgatcgacgggctgctgtag

SEQ ID NO: 14525 - protein, 548 aa, Rubrivivax gelatinosus PM1
MGAAWHHRREAAAMPSFASDLPTPRPRHRVVPLTLWRVAMLLAWLGLAGCSSLPSRPPLPDEAALPAATAGALAAQVAPLVQAHPGRSGFVPLDSGLDAFAARVWLVDRAGSSLDIQTYIWRSDRTGRWLLTRLQAAAERGVRVRLLLDDGNGSPTLDGLLSQLDAHPGAEVRFFNPYPHRGLGRAWDLATDFSRLHRRMHNKTFNADGVVTILGGRNVGDEYFGAAADMEFADLDVLAVGPIVGEVSASFDAYWNSASAYPRRSLLLPGNDRPLTPEQQAALDEASAYAKDLRERPRVERWRERGPQASDFVWGRSTLFVDPPDKVLKQAGESELMLPRLARTLGNADRSIDIVSPYFVPTDDGVAAFTALHDRGVRLRVLTNSLAATDVSAVHAGYAPYRPALLDGGVELYELRPVPAPEGRARGRLLGLGSSRASLHAKTFAVDGERVFIGSFNFDPRSAWLNTEIGVLLEHPGLAQRIGQAFDTEVPRQAWQVTRDPDRGPDALRWRGQTPEGQPIELTEEPEAGWLTRLWVWLLSWLPIDGLL

SEQ ID NO: 14526 - DNA, 1287 bp, Pseudomonas fluorescens PfO-1
  CDS (1)..(1287)
atgagcagtgcaccgttggagaaatccgccgtggagcccgtcagcatcaccccgcccgtgcgcgagcccggcaccgtcgatgtcgagtatcgctggcagggcaacaaccggatcgagctgctggaaaacggcgaggaatattttccccgggtgttcgaagcgatgcgcgcggcgaaaagcgaaatcctgctggagaccttcatcgtcttcgaagacaaggtcggcaaggaattgcaggagattctgatcgatgctgctcggcgtggcgtgcgcaccaccgtcagcctcgacggcttcggttgcggcgaactgagcaccggctatctcgccgcgctgagtgaagccggcgtgcatctgcaaatcttcgatccggcccccaaacgcctgggcattcgcaccaactggttccgtcgtttgcatcgcaagatcgtggtggtcgacgggttgatcgcgttcatcggcgggatcaatttctccggcgatcacctggccgatttcggccccgaagcgaagcaggattactcggtggagattcagggcccggcggtgaccgacatccatcatttcgctttgctgcaaagcggccgaccgggacgggcgagattctggtggcagcgtcgccggcaacggcgtgccgagatggcgttcgacgatcacgacggtcaggtgcgcctggtgttccgcgacaacgaccggcaccacaccgatatcgaagacgtttatttgcaggtactgcgccgcgcccaacggcgggtggtgatcgccaacgcctacttctttcccggctatcgcctgctgcgcgagattcgcaacgccgcccgacgcggggtcgaggtgcggctgattctgcaggggcagccggacatgctggtggccaaactcgccgcgcgcatgacctacgactacctgctcaaggccggggtgcagattcacgaatattgcgagcggccgctgcacggcaaggtggcgctggtggacgaggaatggagcaccgtcggctcgagcaatctcgatccgctgagcctgtcgctgaacctggaagccaacgtgttgattcgcgaccgcgccttcaatcgccacctgttcgaacgtctcgaagacctcagccacaaccactgcaaagcgatggacgccgcgaagtcgccacgcgggcgaatctggcacatgaccgtgggctttctggtgtttcacttcctgcggcattttccggccatggccggctggctgccggcgcacaagccacgactcaaacccttttcccatgccgccgggagcgatcattcatga

SEQ ID NO: 14527 - protein, 428 aa, Pseudomonas fluorescens PfO-1
MSSAPLEKSAVEPVSITPPVREPGTVDVEYRWQGNNRIELLENGEEYFPRVFEAMRAAKSEILLETFIVFEDKVGKELQEILIDAARRGVRTTVSLDGFGCGELSTGYLAALSEAGVHLQIFDPAPKRLGIRTNWFRRLHRKIVVVDGLIAFIGGINFSGDHLADFGPEAKQDYSVEIQGPAVTDIHHFALLQSGRPGRARFWWQRRRQRRAEMAFDDHDGQVRLVFRDNDRHHTDIEDVYLQVLRRAQRRVVIANAYFFPGYRLLREIRNAARRGVEVRLILQGQPDMLVAKLAARMTYDYLLKAGVQIHEYCERPLHGKVALVDEEWSTVGSSNLDPLSLSLNLEANVLIRDRAFNRHLFERLEDLSHNHCKAMDAAKSPRGRIWHMTVGFLVFHFLRHFPAMAGWLPAHKPRLKPFSHAAGSDHS

SEQ ID NO: 14528 - DNA, 1158 bp, Pseudomonas fluorescens PfO-1
  CDS (1)..(1158)
atgcgcggcgcggtgtttccgtggcgtgatggcaaccgcttcgagctgttgatcgacggcccgcaattcttcccgcgcatgctcgacgagattgcccgcgcccgtgagcagatcgaactggagttgtatctggtggaagccggtgcctgtgccgaaaccatcgtgcaggcactggtgctggcggcggagcggggcgtgcgggtgcgttgcctgttcgatgattacggcagcctcgcgttcaccctcacgctgcgccggcggctgactggtgccggggtcgagctgcgtttttacaaccggctgaactggcggcgctgggtcggcaatttctatcgcgatcatcgcaagctgttgctggtcgaccagcgtctggcggtggtcggcggcaccggggtcaccgatgagttctggacgccgggccacgacaccagcgaatggcacgaggtcatggtggaaatcaccggcccgctggtgctcgactggcagttgctgttcgaccgccaatggatcgccaaccgccatcgccgggcctggcggcccaacgcgcattttgggctgccacggttgccccgtgtgccggacacgggcgagggcatgggccgtgtggcctacgccgacgcccgccagcatcgggacattctgcaatcgctgttccgcgccttgaacagtggccaaaagcgtatctggctggccacgccgtacttcctgccgacctggaaaatccgccgctccctgcgcaaggctgccgcccgtggcctcgacgtgcgtctgctgctgaccgggccgcgcaccgatcacccgtcggtgcgttatgccgggcatcgctactacccgcgcctgctcaaggccggggtgaaaatctacgaataccagccgtgtttcctgcacctgaaaatggtgctggtggacgactgggtgagcatcggctcgtgcaatttcgatcactggaatctgcgcttcaatcttgaagcgaatctggaagcgctggatccgtcattgacggcagcggtggcggcgagtttcgagaaggacttcggcctgagtcagcaggtgagtctggaggaatggcgaaaacggccactgtggcggcgggtgaagcagcggatctggggctgggtggatcgggtggtggtcaacttgctcgacagacgcggctag

SEQ ID NO: 14529 - protein, 385 aa, Pseudomonas fluorescens PfO-1
MRGAVFPWRDGNRFELLIDGPQFFPRMLDEIARAREQIELELYLVEAGACAETIVQALVLAAERGVRVRCLFDDYGSLAFTLTLRRRLTGAGVELRFYNRLNWRRWVGNFYRDHRKLLLVDQRLAVVGGTGVTDEFWTPGHDTSEWHEVMVEITGPLVLDWQLLFDRQWIANRHRRAWRPNAHFGLPRLPRVPDTGEGMGRVAYADARQHRDILQSLFRALNSGQKRIWLATPYFLPTWKIRRSLRKAAARGLDVRLLLTGPRTDHPSVRYAGHRYYPRLLKAGVKIYEYQPCFLHLKMVLVDDWVSIGSCNFDHWNLRFNLEANLEALDPSLTAAVAASFEKDFGLSQQVSLEEWRKRPLWRRVKQRIWGWVDRVVVNLLDRRG

SEQ ID NO: 14530 - DNA, 1263 bp, Burkholderia fungorum LB400
  CDS (1)..(1263)
atgctggcaattcccattaccgccttcgccacgctcgtcatcatattggtgattgccaatttatcgagcggtgagaagaagatcgaacataagatcgaacgcctctatgcgagcgacgatccgcaattccttcgctcaatgggtttgttgctcgggccgccggtcatctcgggcaatcgcttcgagatgctgctcaatggcgaccgtatttttccttccatgctggagggcatccgcagcgcgcgtcaaaccatcacgtttgaaaccttcatttactggtccggcgaaattggcgaacagattgcacaggcgctcgcggataaagcgcgcgaaggtgtcgcggtgcatgtactgctcgactgggtcggttcgtcgaaaatggacaagcgctatctgagtctgcttcgcgacgcgggcgtggaggtgattcagtatcacaagcctcactggaccggccttggccgcatgaacgaccgcacgcaccgcaaactgctggtgatagacgggcgtattggcttcacgggtggtgtgggtattgcgccggagtggaccggtcacgcggaaaatgaaaagcattggcgcgacacgcatttccgtgtggcgggtccggtggtcggccatatgcaggccgtgttcatggacaactgggtcaaggctaccggcaatgtgctgcacggtcccgcctatttccccgatatcgagccaatgggcgacgggctcgcgcatatgttcagcagttcgccttcgggcggcagcgacgatatgcaattgatgtatctgatggcgattacggcggccacgcactccattcatctggcgagcgcctatttcgttcccgacaagctcactatcaacgccattgtcgaagcggcgaagcgcggcgtgaaagtgcggatcatcacgcccggaaaacgcatcgatacacacaccgtgcgcgaagcatcgcgcgcgtgctggggcgatctgctgaaagcgggcgtggaaatgttcgaatatcagccgaccatgtttcactgcaaattgctggtggtggacgaatacctggtgtcggtcggctccaccaatttcgacagccgttcattcaagctcaacgacgaagcgaatctgaacatttatgaccgcgacttcgcgaagcagcagaccgccattttcgccgacgatttaacgaagtcgcagcaggtgacgctcgaagcatggacacatcgcccgttcactgaaaagctgatcgaaaagttcgtgccgctgctggatacgcagttataa

SEQ ID NO: 14531 - protein, 420 aa, Burkholderia fungorum LB400
MLAIPITAFATLVIILVIANLSSGEKKIEHKIERLYASDDPQFLRSMGLLLGPPVISGNRFEMLLNGDRIFPSMLEGIRSARQTITFETFIYWSGEIGEQIAQALADKAREGVAVHVLLDWVGSSKMDKRYLSLLRDAGVEVIQYHKPHWTGLGRMNDRTHRKLLVIDGRIGFTGGVGIAPEWTGHAENEKHWRDTHFRVAGPVVGHMQAVFMDNWVKATGNVLHGPAYFPDIEPMGDGLAHMFSSSPSGGSDDMQLMYLMAITAATHSIHLASAYFVPDKLTINAIVEAAKRGVKVRIITPGKRIDTHTVREASRACWGDLLKAGVEMFEYQPTMFHCKLLVVDEYLVSVGSTNFDSRSFKLNDEANLNIYDRDFAKQQTAIFADDLTKSQQVTLEAWTHRPFTEKLIEKFVPLLDTQL

SEQ ID NO: 14532 - DNA, 1554 bp, Burkholderia fungorum LB400
  CDS (1)..(1554)
atggcgacgtttcgtggcattgcggcaatcctgctgatcgcgttgctgtccgcctgcgcgagcctgccgccacaggccgggcgcagcgcgacacacgcgctgacggacaccgacagcacccggctcggcgccgcgttcgtgccgcaggagcgcaagcatcccgacagcagcgcattccatctgttgcccaacggcgtcgatgcccttctcgcccgtatcgtgctggcggatgcggccgagcgtacgctcgatctgcagtactacatctggcacgacgatctgaccggccgccacctggccgacgccgtgctcaaggcggccgatcgcggcgtcagggtgcgcgtgttgctggacgacctgggcaccggcgccgacgaccaggttctgctcgccatcagttcacactccaacatcgaaatacggctgttcaatccgattgccagccgcagcttcaagaagctcggcagcgcgctggagttcagccggatcaaccgccgcatgcacaacaaggcgctgatcgcggacaatcaggccgccatcctgggcggccgcaatatcggcgatgagtatttcggcgcatccagcgaggtcgatttcggcgatctcgacgtgctgactttcgggccggtggtccacaaggtctccaatgccttcgacgaattctggaactcggaggccgcctatccgattgccagtctgaccggccacgccgccggcccggacgcgctgccgggctatcgcgcgaagctcacggcattcgttgcgtccgaacacgattcgccgtacgtcacgcaggcacgggaaaggcttcgcgacactctggatgcgcgcgagaccgacttcgcctggggaaaagccacgctcctctacgacgatcccgccaagatcacgcgctcgccggacgatccacagggacacttgctgtcgcagttcgacgcgctgagtatccagcccgccaaggaagtgctgattatctcgccgtacttcgtgcccggtaaaaagggcgtggcgtggatgcgtgcacagacgcagcgcggcgtgcgcgtgacggtgctgacgaactcgctcgccgctacggacgttgcggcggtccacgcggggtatcagcgctatcgcaaggatctgctcgacgcgggcgtgcatctctacgaactgaagccggctcccggcgaagacaacggcgagaaaaagaaatcgattctgggttcctcgaaagcctcgctgcatgcaaagacctatgtattcgacaggacgagtgtcttcatcggctcgatgaatctcgatccccgttcgatcacgctcaatacggagatcggcgtgtactgcgaaagcgccccgctcgccgctcaggtggcggatggactcgaaccgagactggatcagatcgcgtggcggctggaaacccgcacggatggcaatggcacgagtcgcattgtgtggatcgacaccgcgccggacggcaaagtgaccgagagcgacgaacccggcgtgtctggcatcaagcgtgtaggtatctggtttctcggcctgttgccgatcgaatcggagttgtga

SEQ ID NO: 14533 - protein, 517 aa, Burkholderia fungorum LB400
MATFRGIAAILLIALLSACASLPPQAGRSATHALTDTDSTRLGAAFVPQERKHPDSSAFHLLPNGVDALLARIVLADAAERTLDLQYYIWHDDLTGRHLADAVLKAADRGVRVRVLLDDLGTGADDQVLLAISSHSNIEIRLFNPIASRSFKKLGSALEFSRINRRMHNKALIADNQAAILGGRNIGDEYFGASSEVDFGDLDVLTFGPVVHKVSNAFDEFWNSEAAYPIASLTGHAAGPDALPGYRAKLTAFVASEHDSPYVTQARERLRDTLDARETDFAWGKATLLYDDPAKITRSPDDPQGHLLSQFDALSIQPAKEVLIISPYFVPGKKGVAWMRAQTQRGVRVTVLTNSLAATDVAAVHAGYQRYRKDLLDAGVHLYELKPAPGEDNGEKKKSILGSSKASLHAKTYVFDRTSVFIGSMNLDPRSITLNTEIGVYCESAPLAAQVADGLEPRLDQIAWRLETRTDGNGTSRIVWIDTAPDGKVTESDEPGVSGIKRVGIWFLGLLPIESEL

SEQ ID NO: 14534 - DNA, 1452 bp, Burkholderia fungorum LB400
  CDS (1)..(1452)
atgcaattcgacctgcttcacatcggcacgctggtcgccctctgccacattctcggcgtggtcgcggcgtgccatgcgattctcaacacccgcacgtcgcaaggcgcgattgcgtgggccgtgtcgctggtcgcaatgccttatctgacgctggtgccgtatctgttcctcggccgcagcaagtttgccggctacgcggacgcgcgccgggtcgagaacgaactgctgcgcacgcgcgcgcatccgccggaatgggacacgcaggcttcgtcggaaaggctgcccacgcaggagctcggcggcaggctcgtgcattcgctcacgcgtctcggcggcatgccgtttctgcccggcaactcggtgcgcacgctggtcaacggcgcggcaaccttcgaggccatcttccaggcgatcgagggcgcgcgccgctacgtcatcgtgcagttcttcatcgtgcgcgacgacgcgctcggcgagatgctcaaagacgcgctgatcgcgaaagcgcagcaaggggtgcgcgtctacttcctgtacgacagcatcggcagcttcgatctgccccaccgctatgtggcggcactgcgcgcggcgggcgtggaaacgcacccgttcgccacccatcgccgcttcgtcaaccgtctgcaggtgaatttccgcaatcaccgcaagatcgtttcggtggacggcgaacgcgcgtttgtcggcggacacaacgtgggcgtggaatatctcggcggcaaaccgccactttcgccgtggcgcgatacgcatatcgaagtgcgcggcccggcggtcgccagcatccagttcgtgttcaccgaagactggcactgggccacgcagcagttgcccgaattcgacatgccgcccgctgcggccgccgaccccgcggccggccagggcatgcactgcctcgtagtgccgagcggcccggccgacaagcaggagacctgttcgctctttttcgtcgaagcgatcaatgcggcgcgcgagcggatctggatcacctcgccctacctgattcccgatgaagcggtgttctcggcgttacggctcgcggcgctgcgcggcgtggacgtgcgcattctgattccgagccggcgcgatcacctcgtcgtattcgctgcttccaaactgtatgcatatgactcgctgcgcgccgggatccggatcttccgctaccagccgggcttcctgcatcagaaggtcgtgctgatcgacagcgtggccgcggccatcggcagcgccaatctcgacaaccgctcgttccggctgaacttcgagatcatggtgctgaccgtggatcgcggctttgccaaagaggtcgaaatgatgctgctggccgacttcgccgaatcgcgcgaaatcgaccgcaatgagtaccggcaggcaggcgccctgaagcgcgtgctgatgcacgtggcgcggctcttttcgccaatcctgtag

SEQ ID NO: 14535 - protein, 483 aa, Burkholderia fungorum LB400
MQFDLLHIGTLVALCHILGVVAACHAILNTRTSQGAIAWAVSLVAMPYLTLVPYLFLGRSKFAGYADARRVENELLRTRAHPPEWDTQASSERLPTQELGGRLVHSLTRLGGMPFLPGNSVRTLVNGAATFEAIFQAIEGARRYVIVQFFIVRDDALGEMLKDALIAKAQQGVRVYFLYDSIGSFDLPHRYVAALRAAGVETHPFATHRRFVNRLQVNFRNHRKIVSVDGERAFVGGHNVGVEYLGGKPPLSPWRDTHIEVRGPAVASIQFVFTEDWHWATQQLPEFDMPPAAAADPAAGQGMHCLVVPSGPADKQETCSLFFVEAINAARERIWITSPYLIPDEAVFSALRLAALRGVDVRILIPSRRDHLVVFAASKLYAYDSLRAGIRIFRYQPGFLHQKVVLIDSVAAAIGSANLDNRSFRLNFEIMVLTVDRGFAKEVEMMLLADFAESREIDRNEYRQAGALKRVLMHVARLFSPIL

SEQ ID NO: 14536 - DNA, 1503 bp, Cytophaga hutchinsonii
  CDS (1)..(1503)
atgttatttttatgctcctgttcggaatcttccaaagaaattccggtgcaggaaaaagatttttgcgcatctattcaccgcaatgattcgctaagtcttacacatgagctggaacctttcatagattccatgaaaaataaaacaggtgtttatgtacttgaagatggcggcggctcgctgatcacacgcgcctggctgagtgagtatgcagaagaaacaatcgacattcagtattttattttttcagcagataatgtggggcttattgcctgtgattatctggtacgtgcggcagaccgtggtgtaaaagtacgcatcctgatcgatgatatattggttgaagccggcgtacatgaaatactcacgcttgactcgcatgaaaatattgaaattaaaatttataatcccggtatcaatctgggtaaaaatatatttaataagatcgggaaattcacgaccgattttcgaggcgcaaatcagcgcatgcacaacaaaacgtttattgttgatcacaaagtcgtgattacaggtggcagaaatattgccgatgaatattttgattacgaccacgaatataatttcagggacagggatgtattactgataggtaaaacagcaacggatgtacaacaatcgtttgagtcattctgggttgacgcgctgagtattccgatcacaggactggtgaaggaggatgatgtaacctataccgatacaagtcgttttgaacgcctgcatcaatatgcctgtaacccggataatttctggccgcaggtacggaagcgcatttcaaatcttaccgaaacatttcaggtaatgagagattcgggcaggttaaaatgggtagagcatgtgcagtttgtttccgatgcaccgggcaaaaatgatggcaaacagggacttggcggcggcggtgtatgcaccgacagtctgattagtcttataaaacgtgcaacaacatccattgatattcaatcaccttatttaatcacaacggaagttggccgaacgttatttaaagctgcggttgaccggggcgtacgcattcgtattttaacaaacagtcttgcttctaccgataacctcgaagcgtttaacggttatcagcgcgacagaaaaaaattacttgcaacaggggttgagatctatgaattcagacctgatgctgcggtgcgttaccagatcatgaccggagcattgcaggaaaaaatgcagtatacacccattttcggtttgcatgcaaagtcgatggtgattgatggtaccattgctgttataggtacatttaacctggatccgcgcagtgccaatctgaatacagaatgtgtaaccattatctactcaaaagaggttgcagcaggagtgcttgcaggaatggaaactgaaatcaaaccggaaaatgcctggcatacgacaactgtattcaatccggatggtgaagccggagcaaagaagcaagctaaagcgtggacacgcagagtggtgccgaaaggaattttataa

SEQ ID NO: 14537 - protein, 500 aa, Cytophaga hutchinsonii
MLFLCSCSESSKEIPVQEKDFCASIHRNDSLSLTHELEPFIDSMKNKTGVYVLEDGGGSLITRAWLSEYAEETIDIQYFIFSADNVGLIACDYLVRAADRGVKVRILIDDILVEAGVHEILTLDSHENIEIKIYNPGINLGKNIFNKIGKFTTDFRGANQRMHNKTFIVDHKVVITGGRNIADEYFDYDHEYNFRDRDVLLIGKTATDVQQSFESFWVDALSIPITGLVKEDDVTYTDTSRFERLHQYACNPDNFWPQVRKRISNLTETFQVMRDSGRLKWVEHVQFVSDAPGKNDGKQGLGGGGVCTDSLISLIKRATTSIDIQSPYLITTEVGRTLFKAAVDRGVRIRILTNSLASTDNLEAFNGYQRDRKKLLATGVEIYEFRPDAAVRYQIMTGALQEKMQYTPIFGLHAKSMVIDGTIAVIGTFNLDPRSANLNTECVTIIYSKEVAAGVLAGMETEIKPENAWHTTTVFNPDGEAGAKKQAKAWTRRVVPKGIL

SEQ ID NO: 14538 - DNA, 1434 bp, Oenococcus oeni PSU-1
  CDS (1)..(1434)
atgaatttgttgattgctgtaattttaatagtcctggtactaaacgcgaccttatcttttattacggttttttggagtaaaagggatgttagcagaatttgggcctggttagtcgttttggtttttgttcccgtaatcggtttcgttatttattggtttgccggtcgccgaatttccgataaaaaaatctttgattttacaagtcaggaaatcgtcggtcgcgagcaaatcagagataaccaaaaatattatggtcatcatttacatttgaatcaaaaagcgagtatgcttgttgaactatttgaaaataattccggatcaatactgacttatggcaatgatctggaaactttttttgatggccgggctttttttgatgatttatttgctgaaatagacaaggccaaggaccatatccatttagcctattttgcaatcagcaatgatgttatcgggaataaattagttgatctgttggccaagaaagcccgtcagggagttggggttagagttatttatgatgcatacggatctcacggaactcatttaggaatgtatcatcgtttactgaaagccggcgggaccgtttatccttttttaaccaggcgctttcaattattagccctgcgaatcaattttcgttttcacagaaaagttgttgtgattgatggaaaagttggttatattggaggattcaatataggtgatcagtatcttggcaagtcgaaaaggtttggcaattggcgtgattcccaacttaaaattattggtgattcggtactttctttacaatcgcgtttttttatcgattggaatgcaaccgctaagaaacaagacaaattgtcttttttggaagattattttccggcgactcaagttaatggaattcatccaatccaaattgtctcttcggggccggattctttaacggcgcaaattaaacagggttatttgaaaatgataactttggcgacaaaatcaattaccatccagaccccttatttgattcccgaccaaccgatttacgaaagtcttacgatagctttagcggccggcgtcaaagttaacatttttattccggatcgtcccgatcatccttttgtttaccgggcaactcagtactatgcgcaggaatttattgatttcggagcaaacgtttatcgttatgatggtggttttttgcacagcaagcttttaattattgatgatgaaatcgtcagcattggctcagccaatatggatattcgatcttttgaattaagttttgaagcaaatgctttcatttacagcagctatttcgctaaaaaaatcgagaaacaaatttcgattgacatttccaagtcaaagcttttaagcaaaaaagatttcgaaacacagggattttggatgacagtattacagaaattttctcgtctgctatcaccgatactttaa

SEQ ID NO: 14539 - protein, 477 aa, Oenococcus oeni PSU-1
MNLLIAVILIVLVLNATLSFITVFWSKRDVSRIWAWLVVLVFVPVIGFVIYWFAGRRISDKKIFDFTSQEIVGREQIRDNQKYYGHHLHLNQKASMLVELFENNSGSILTYGNDLETFFDGRAFFDDLFAEIDKAKDHIHLAYFAISNDVIGNKLVDLLAKKARQGVGVRVIYDAYGSHGTHLGMYHRLLKAGGTVYPFLTRRFQLLALRINFRFHRKVVVIDGKVGYIGGFNIGDQYLGKSKRFGNWRDSQLKIIGDSVLSLQSRFFIDWNATAKKQDKLSFLEDYFPATQVNGIHPIQIVSSGPDSLTAQIKQGYLKMITLATKSITIQTPYLIPDQPIYESLTIALAAGVKVNIFIPDRPDHPFVYRATQYYAQEFIDFGANVYRYDGGFLHSKLLIIDDEIVSIGSANMDIRSFELSFEANAFIYSSYFAKKIEKQISIDISKSKLLSKKDFETQGFWMTVLQKFSRLLSPIL

SEQ ID NO: 14540 - DNA, 1464 bp, Pediococcus pentosaceus ATCC 25745
  CDS (1)..(1464)
atgtttcaaattataaaagatattatatatattattcttattctaaatattattggtgccgtttatacagtttttagacaacgtcgagatatagctgctacttgggcctggttattggtcttatttttcttgcctggtgtaggctttgtgatatacgcctttgtgggacgaaagctaccagaaaacaaattatttccgctgaaaagtaagactcgccttcaattggatcaagttatggagcatcagcgtcgagagctaaaaaagaatgagtttactgctgccgatcaagttgttaaagattcagaacgaatggtccaattctttactaaaacggattattcttttttaaatcgaagaaatgaagttcaaatcatcacagatggaaatgaactttttgatgatatttttgctgaaattaaaaaagcgaaaaagcatattcacgttgaattttatacaatttatgatgatcaaattggcaatcagttacgcgagctattggaagaaaaagcacgtgaaggtgttgaagttaaggtgctatgggattcatggggatcgctaggtaccaaaagaagtttcttcaagaaattgaatgaactaggcggagaagcgtatccatttctaggtacacgttcagctttaactgactttcgattgaacttcagggatcaccgtaaaattgtcgtgattgatggtaagattggttatgttggtggttttaatgtgggagatcaatatttaggccgtaagaagaaatttggttattggcgagatacccatttgaaaatcatcggttctggagtttacggacttcaatcaagatttatcctggattggaatgctacagaccgtaaaaaacaaattgtcgaagagtttaaagctggatcagtttatttcccagtcgctgaagttaaaggcaataccagtcttcaaatcgttagtaatgggccagattcagatattgaaaaaattaaaatgggttatttgaaaatgattcataaagccagagaatcggtttggattcaatcaccatatttaattccagatgatagtgtcttggacgcattgcgcttagcagcaacatcgggagtagatgttcgagtaatgattccatgtatgcctgatcacgcgtttgtctatcgtgcaacccaatattatgcttggcaatgtgctaagtggggaattaaagtttattactacaacaatggtttcatccatgctaaaacgatggtagtggatggaaaaatatctacagtgggttctgcgaatatggatttccgtagtttcaaacttaattttgaagttaacgcctttatgtatgatgaaaatattgcaaaacaactgcaggaaatttatgaagaagatatcaaacattctagtctccaaaccgtagccatgtttaataaacaatccacatggctgaagttcaaacaaaccttttcacgtttgctttcaccaattttgtaa

SEQ ID NO: 14541 - protein, 487 aa, Pediococcus pentosaceus ATCC 25745
MFQIIKDIIYIILILNIIGAVYTVFRQRRDIAATWAWLLVLFFLPGVGFVIYAFVGRKLPENKLFPLKSKTRLQLDQVMEHQRRELKKNEFTAADQVVKDSERMVQFFTKTDYSFLNRRNEVQIITDGNELFDDIFAEIKKAKKHIHVEFYTIYDDQIGNQLRELLEEKAREGVEVKVLWDSWGSLGTKRSFFKKLNELGGEAYPFLGTRSALTDFRLNFRDHRKIVVIDGKIGYVGGFNVGDQYLGRKKKFGYWRDTHLKIIGSGVYGLQSRFILDWNATDRKKQIVEEFKAGSVYFPVAEVKGNTSLQIVSNGPDSDIEKIKMGYLKMIHKARESVWIQSPYLIPDDSVLDALRLAATSGVDVRVMIPCMPDHAFVYRATQYYAWQCAKWGIKVYYYNNGFIHAKTMVVDGKISTVGSANMDFRSFKLNFEVNAFMYDENIAKQLQEIYEEDIKHSSLQTVAMFNKQSTWLKFKQTFSRLLSPIL

SEQ ID NO: 14542 - DNA, 1365 bp, Pediococcus pentosaceus ATCC 25745
  CDS (1)..(1365)
atggaaaagcgagatatttctgcagcatgggcttggttatttgtaatgctattgcttcctggaattgggtttataatttatctattttttggctggaagttaaatcaaaggcaaatatttgatttgaaagctcaaaaaagactcggaattagcgatatggctgaatatcaaaagcgtaatcctaaaaacaaaccgaccctggataccaatcttgaaaatgacttggttcagatgtttttaaacacggataatgcaattttaacgactaaaaatgatttaaagatttttacagatggtcatgaaaaatttaacagcttgtttgaagatttaaaaaaggctaaacatcatatcaatatcgaatattttacaatctatgatgatcagttaggcaaaaaattacgtaaaattttggttcaaaaagcgcgtgaaggtgtccaagtaagggtgttgtacgatttatttggatcaaaaggatccaagcaaaaattttttaaagaattaattcaggctggtggcgaagtcacgccatttatgaaatctaaactaggctattatagttttagaattaattttcgaaatcatcgaaaaattgtggtgattgatggatcggttggatacattggtggttttaacattggtgaccaatatttaggacgtaataagcgctttggaaactggcgtgatacgcacttaaggttagagggttccgtggtattgcaattgcaaagtcgttttttcatggattggaatgcatctgctaagcgtcaaaaagttcaatttagcttagattattttccacaaagtaacgttcaaaataatattccaatgcagattgttagtagtggacctgagaatgatgttcaaaaaatcaaacagggttatattaaaatgattatgggggctaaacattccatttggattgaaacgccatactttatccctgatgatgccttaatggaagctttgttaatcgctattcgttcaggcatcgaagtgcggattgtaattccacaaatgcctgatcatcccttcgtctaccgggctacagagtattatgtacaacaattgttaaaagctggcgcgcgtatctattcatatcaaaatgggttcatgcatgctaagacgattgtggtcgataatatgattacaagtgtaggttcagcaaattgggatattcgttcttttaaattaaattttgaagcaaatgcatttatgtatgatcctaaagtggctgaacaaataatcgctacaattaaaaatgatttaaaggatgcgcgtgaattggatgaagaatatttcaagcaacaatcttcgtggaaaaaattccgtcaattggctagtcgtttgatttcaccaattctttaa

SEQ ID NO: 14543 - protein, 454 aa, Pediococcus pentosaceus ATCC 25745
MEKRDISAAWAWLFVMLLLPGIGFIIYLFFGWKLNQRQIFDLKAQKRLGISDMAEYQKRNPKNKPTLDTNLENDLVQMFLNTDNAILTTKNDLKIFTDGHEKFNSLFEDLKKAKHHINIEYFTIYDDQLGKKLRKILVQKAREGVQVRVLYDLFGSKGSKQKFFKELIQAGGEVTPFMKSKLGYYSFRINFRNHRKIVVIDGSVGYIGGFNIGDQYLGRNKRFGNWRDTHLRLEGSVVLQLQSRFFMDWNASAKRQKVQFSLDYFPQSNVQNNIPMQIVSSGPENDVQKIKQGYIKMIMGAKHSIWIETPYFIPDDALMEALLIAIRSGIEVRIVIPQMPDHPFVYRATEYYVQQLLKAGARIYSYQNGFMHAKTIVVDNMITSVGSANWDIRSFKLNFEANAFMYDPKVAEQIIATIKNDLKDARELDEEYFKQQSSWKKFRQLASRLISPIL

SEQ ID NO: 14544 - DNA, 1191 bp, Thiobacillus denitrificans ATCC 25259
  CDS (1)..(1191)
atgaccccgcgcggtccctggtcgcggctgttttttcgccgcgtcgacatggtttcgggcaaccacctgcggctgttgcagagcggggccgactacttccctgcgctgatcgccgcgttcgacgccgcccgcgccgaaatctatcttgaaacctatatcttcaacgccgactcgacggccgaggccgtgcgcgacgcgctcgttcgcgccgcgcagcgcggcgtgcaggtgcgcgtcctgatcgacgcgatcggttcgcgtgaactgcctgccgcgtggctggaagcactgaagacggcgggcgtcgccgtcctcaagtaccggccgctggtcaccggctggcgctcgaatccgaaaagtctgcgccgattgcaccgcaaggtcgcggtcgtcgacgcgcgcatcgcttttgtcggcggcatgaatctgctcgacgatttcgagccgattcgctttcctgtcgcgcgtttcgacttcagcgtcgaagtgcaggggccgctgatcgtggcgatccatcaaagtgtgcaccacctgtggcgtctggtcgccttgagccaactgcagccaatcgaccgcaagcattcggttcacccttcctggccgaccgacggccgcgtccgcgcggctttcgtgacgcgcgacagctttgcccatcggcgtgacatcgagcgcagctacctgacggcgcttgcgctcgcgcgcagcgacatcctgattgcgaacgcctattttctgcccggcaaccgcttccgcaagctgctgaaaaaagccgcggcgcgtggggtgcgcgtgcagctgctcgtgcaggggcataccgaccatcctttttttcaggcggcgtcgcgcgcgctctaccaggatcttctagtcgccggcgtcagcatccgcgagtatcaggcgagcgagttgcacgccaaggtcgcggtcgtcgatgaccactgggcgacggtcgggtcgagcaacatcgacccgttcagtctgatgctcgcgcgcgaggcgaacatcgtcgtcgacgacgtggggttcgccgccgacctgcgcgagcgcctgcagcgcgcggtggacgaatcggccgcgctcagtgccgccgactggaagatccgtccctggcgccagcgcctggcctcgcggcttgcctacgggctcgtgcgctttctgcttggcgtcgcgcggctcgggcgctggctgtaa

SEQ ID NO: 14545 - protein, 396 aa, Thiobacillus denitrificans ATCC 25259
MTPRGPWSRLFFRRVDMVSGNHLRLLQSGADYFPALIAAFDAARAEIYLETYIFNADSTAEAVRDALVRAAQRGVQVRVLIDAIGSRELPAAWLEALKTAGVAVLKYRPLVTGWRSNPKSLRRLHRKVAVVDARIAFVGGMNLLDDFEPIRFPVARFDFSVEVQGPLIVAIHQSVHHLWRLVALSQLQPIDRKHSVHPSWPTDGRVRAAFVTRDSFAHRRDIERSYLTALALARSDILIANAYFLPGNRFRKLLKKAAARGVRVQLLVQGHTDHPFFQAASRALYQDLLVAGVSIREYQASELHAKVAVVDDHWATVGSSNIDPFSLMLAREANIVVDDVGFAADLRERLQRAVDESAALSAADWKIRPWRQRLASRLAYGLVRFLLGVARLGRWL

SEQ ID NO: 14546 - DNA, 1443 bp, Thiobacillus denitrificans ATCC 25259
  CDS (1)..(1443)
atgccgcatccgagcccctcacccatcccgcgacgcagtcgcggcgggatcgcgggcctgacaagaatcctgatcgcttgttgcgcggcgccgctctgcgcctgcgccaccctgcccgaggcgccgcgtctcgcggcgggtccagtcgccagtccgccggtcaatttcgagtccgctcgcggcccggtttcggcacgccgcaacgcggcgatcttcgccgagctcaagcgcgacggcggcgacagcgcgatcctgctgcgccacctcgcgctcgaggaagcggtcaatcgcgacagcccgctcgtcgtcggcaaccggctgacgttgctgcaggacgggccggcgacctaccgcgcgatgttcgccgcgatccgcagcgctcgcgatcacgtcaacctgcagacctatattttcgaggcggggcagaccggcgagaccttcgcgcgcctgctgctcgagaaacaggctgccggcgtgcaggtcaacatcatctacgacagtgtcggctcgatcgacacgccgcccgctttcttccagcggctgcgcgacgccggcatgcgcgtgctcgaattcaatccggtcaacccggccaagctcaagaagaagaaatggcggctcaacaaccgcgatcaccggaagctgctcgtcgtcgacggcaagacggcttttctcggcgggatcaacatcagcgagacctattcgagcggctcgctgtcgcgcccgagcaagaaaaaagccaaggaccgtgaatcggagggatggcgcgacacgcatctgcaggtcgacggtcctgccgtcgccgaattccagaagctgtttctcgacacctgggcgcggcagaaaggcccgccgctgcccgcgcgcgcgtatttccccaagctcgcgcgccaaggcaacgaaatcgtgcgcgcgatcgcgagcgaagccgacgagggcgacagcccgatctatctgacgctgctctcggcgatcgaacacgccgagcgcagcatccgcctgaccaacgcgtatttcgtccccgacccgcaattgcgccgggcgctcgccgccgcgtcccggcgcggcgtcgacgtgcagatcatcctgccgagccggaccgactcgtgggccgtgttccacgccggacgctcgcactacgacgaactgctcgacgccggcgtgaagatctacgaacgccacggtaccgtgctgcacgccaagaccgcgtcggtcgacggcgtctggtcgacgatcggttcgaccaacctcgactggcgcagctttcttcacaacgacgagctcaacgcggtcgtgctcggaaccgacttcgcccgccagctcgacgcgatgttcgtgcgcgaccgggcggcatcggaaaagatcgacctcgagaaatggcgtcgtcgcgcgctgcacatccgcatgcaggaatggatcgcccggcgcttcgagtactggctgtag

SEQ ID NO: 14547 - protein, 480 aa, Thiobacillus denitrificans ATCC 25259
MPHPSPSPIPRRSRGGIAGLTRILIACCAAPLCACATLPEAPRLAAGPVASPPVNFESARGPVSARRNAAIFAELKRDGGDSAILLRHLALEEAVNRDSPLVVGNRLTLLQDGPATYRAMFAAIRSARDHVNLQTYIFEAGQTGETFARLLLEKQAAGVQVNIIYDSVGSIDTPPAFFQRLRDAGMRVLEFNPVNPAKLKKKKWRLNNRDHRKLLVVDGKTAFLGGINISETYSSGSLSRPSKKKAKDRESEGWRDTHLQVDGPAVAEFQKLFLDTWARQKGPPLPARAYFPKLARQGNEIVRAIASEADEGDSPIYLTLLSAIEHAERSIRLTNAYFVPDPQLRRALAAASRRGVDVQIILPSRTDSWAVFHAGRSHYDELLDAGVKIYERHGTVLHAKTASVDGVWSTIGSTNLDWRSFLHNDELNAVVLGTDFARQLDAMFVRDRAASEKIDLEKWRRRALHIRMQEWIARRFEYWL

SEQ ID NO: 14548 - DNA, 1260 bp, Thiobacillus denitrificans ATCC 25259
  CDS (1)..(1260)
atgctcgttttctggatcgtcctcggcgcggtgctggccaccgtcatcgcgctgaactttctgccgggggaaaagaaggtccagacccggatcagcgagctctatttcatccacgacccgcagttcctgcgctcgatgagccatctgctcggcccgccactcgtcccgggcaaccgcgcccaggagctcatcaacggcgacgagatctttccaccgatgctggcggcgattcgcgcggcgcgcaaaacgatcaccttcgagacctacatctactggtctggcgaaatcggcaaggaatttgccgaggcgctcgccgaacgcgcacgcgccggggtcaaggtccatgtcctcgtcgactgggcgggcagcgtcaagatggaagacgacttgctcgagctgatgaaagacggcggagtcgagatcctcaaatatcacccgctgcactggtaccacctcgcgcgcatgaacaaccgcacgcaccgcaaactcctggtcgtcgacgggcacatcggcttcacgggcggcgtcggcatcgccgacacctggctcggccatgcgcaggatgacaatcactggcgggactcgcatttccgcgtcgaaggtcccgtggtcgcccacatgcaggcggccttcctcgacaactggatgaaaaccagcggggcggtgttgcacggtgaggactattttccggcgctcgagcccgtcggcgagcactacgctcaggtcttcaagagctcctcgtcggaaggcagcgaaagcgtgcgcctgatgtatctgctgtcgatcgcggcggcgcgcgaaacggtctatatcgccaatgcttatttcgtgcctgacgacctttcggtagagaccctcacccgcgcgctgcgccgggacgtgaaagtcaggatcctcgtgcccggcaggcacaccgactcggggctcgcgcgccgcgcgtcgcgcgcccgctggggcgcgttgctcgtggcgggggccgagatatacgaatatcagcctacgatgttccactgcaagctcatgatcgtcgacgacgtctgggtgtcggtcggctcgaccaacttcgattcgcgatcgttccgcctcaacgacgaagccaatctcaacatctacgaccacgccttcgcagcgcgccagatcgcgatcttcgaggacgacctcagaaaagcccggcgggtcgactacgatgcgtggaagcgccgcccctggcgcgagaagctgctcgaacacggctccgcattgttccgctcgcaagtctga

SEQ ID NO: 14549 - protein, 419 aa, Thiobacillus denitrificans ATCC 25259
MLVFWIVLGAVLATVIALNFLPGEKKVQTRISELYFIHDPQFLRSMSHLLGPPLVPGNRAQELINGDEIFPPMLAAIRAARKTITFETYIYWSGEIGKEFAEALAERARAGVKVHVLVDWAGSVKMEDDLLELMKDGGVEILKYHPLHWYHLARMNNRTHRKLLVVDGHIGFTGGVGIADTWLGHAQDDNHWRDSHFRVEGPVVAHMQAAFLDNWMKTSGAVLHGEDYFPALEPVGEHYAQVFKSSSSEGSESVRLMYLLSIAAARETVYIANAYFVPDDLSVETLTRALRRDVKVRILVPGRHTDSGLARRASRARWGALLVAGAEIYEYQPTMFHCKLMIVDDVWVSVGSTNFDSRSFRLNDEANLNIYDHAFAARQIAIFEDDLRKARRVDYDAWKRRPWREKLLEHGSALFRSQV

SEQ ID NO: 14550 - DNA, 1959 bp, Xylella fastidiosa Ann-1
  CDS (1)..(1959)
ttgaatatattcatacgtttgttgctgctagcagctgttttgttgggcagtggttgcgctagcctgtcgcatgcccagttggattatgctgcgtcggtcgccgtggctgcgcgcccggctacgctggattgtgacaggcccaatcgttgtgcgttggattcgccgttgtacgcgcttgggagccgagcgctgagtgaatctacgcctgtgacaccacttcactatgtcaccatcctcgataaaggcgagagcgcgttggtcgcacggatcaatttgatccgcagtgctacccgcagtatcgacatgcagacttacatttttgacaaggacgatagtgcccggttgattatggatgagctattgactgctgccagacgtggtgttcgagttcgtttactgattgaccagctttcggcgatttctgatctgaatattctgggtgccttggctggtgcacacgttaatttccaactacgtatctacaacccgatttttggcaaagccaagctgaactatggcgactatgttgccagcgtgctgtgttgttttcgtcgctttaatcagcgcatgcacaataaattgttggtcattgatgaaatgatcggcgtggtcggcgggcgtaattaccaagatgactattatgattgggatcttgaatataactttcgtgaccgtgatgtgcttgtcgccggaccggcggtgctgcaaatggcagttaactttgatgcgttttgggcggctgagcgcagcgtaccggtagagcgcctcagggatgttggacgtatggtgctgcaggatggggtgccgatgctgccatcagctgtgttcaatctgttggaacgggtccagcgtgttactgctgaggccaacgatccggactatgtcaagcgcacttttgtcgatgcggccttggctgtgaacaaagtgcaatatgttgctgacctgccgcaaaagcatcgctatgagcacaacgcaaatccggtttccatcgggccacggttggatagtttgatttctaatgcgcgtcatgaggtgatcttgcagaccccatatctggtgttgtccaaaccagcgctgaacatcttccgtcgcctcaatcggactcaggacaaaccgcgcgtggttgtggtgaccaacagtttggctgctaccgataatcccatcgtctatgccttattttacaaatacaagcggcgtaacatgcgtgacctggggttcgacatttacgagtacaagccgtttccggaaaatccgccaatcgacctgacgggcgttgttccgattgaaggatggaacaatgactatcttcagaggcgacaggaccttttggctgctgccaaagtctccgatgattcagacaatgctcgtcagttagctcagcttgaaaataaaggtcaagtggataggcgtgtgttacgtactgaaacgcgtccgcccttttggcgcattcacactgtcaataaaccattacctgtgacccgtccgggcgcacgcatgggcttgcatgcaaaatcattggtggttgatcgtaaggttggagtgattggtacccacaacttcgatccgcgcagtgagagttacaatactgaagctgttgtggtgattgaggatccagcgttcgccggtctgttggcttccagtattgagggtgacatcgctccaggtaatgcgtgggtcgtggcaccgcgcaagaagttacctgggctctataagctcaattattcggtaggtaaactgtctgaggcattgcctgtgctggacctgtggccttggcgctatgcaaccaactatgaattcaaacccgggttggattgtccaataccattgccacgtcgggatccgaatttcatgcaatgttatgaacctgtcggtgactttcctgaagtcaatgttggtccaaagtggttgttggtgcggatgctgattgcattcggtgctgggctggtgcctatcttgtaa

SEQ ID NO: 14551 - protein, 652 aa, Xylella fastidiosa Ann-1
MNIFIRLLLLAAVLLGSGCASLSHAQLDYAASVAVAARPATLDCDRPNRCALDSPLYALGSRALSESTPVTPLHYVTILDKGESALVARINLIRSATRSIDMQTYIFDKDDSARLIMDELLTAARRGVRVRLLIDQLSAISDLNILGALAGAHVNFQLRIYNPIFGKAKLNYGDYVASVLCCFRRFNQRMHNKLLVIDEMIGVVGGRNYQDDYYDWDLEYNFRDRDVLVAGPAVLQMAVNFDAFWAAERSVPVERLRDVGRMVLQDGVPMLPSAVFNLLERVQRVTAEANDPDYVKRTFVDAALAVNKVQYVADLPQKHRYEHNANPVSIGPRLDSLISNARHEVILQTPYLVLSKPALNIFRRLNRTQDKPRVVVVTNSLAATDNPIVYALFYKYKRRNMRDLGFDIYEYKPFPENPPIDLTGVVPIEGWNNDYLQRRQDLLAAAKVSDDSDNARQLAQLENKGQVDRRVLRTETRPPFWRIHTVNKPLPVTRPGARMGLHAKSLVVDRKVGVIGTHNFDPRSESYNTEAVVVIEDPAFAGLLASSIEGDIAPGNAWVVAPRKKLPGLYKLNYSVGKLSEALPVLDLWPWRYATNYEFKPGLDCPIPLPRRDPNFMQCYEPVGDFPEVNVGPKWLLVRMLIAFGAGLVPIL

SEQ ID NO: 14552 - DNA, 1206 bp, Pseudomonas aeruginosa UCBPP-PA14
  CDS (1)..(1206)
atgaacttcccctggcgcgacggcaaccgcgtagaactgctgatcaacggcgaagagtactttccgcgcctgttccagtgcatcgccgaggcgcgccgggagatcctcctggaaaccttcatcatcttcgaggacgaggtcggccggcagttgcaggaagccctcagcgccgccgccgagcgcggtgtcgaggtacaggtcacggtggacggctacggcaccgcctcgctcagcacggactacctggccaggctcaccgccgccggggttcgcgtgcacctgttcgacccgcgcccgcgcctgctcggcatgcgtaccaacctgtttcgccggttgcaccgcaagctggtggtgatcgatcgccagcaggccttcgtcggcggcatcaactacggcgaggaccacctggtgcgtcgcggcaacatggccaagcaggactacgcggtgcgcgtcgagggcccggtggtgcgcgatatccgccaggcctgcctggcgctgctcgaaccggacgccgactacccgccgttgcggccgtcgggcgccgggcagccggcgcgtgtgcgcctggtgatccgcgacaacgaccagtccagcgacgacatcgagcgcgagtacctgcaagcgatccgccaggcgcggcggcgcctgctgatcgccaacgcctatttcttccccggctaccgcctgcttcgcgagctgcgcgatgcggcgcgccgcggcgtgcgcgtcgacctggtactacagggcatgccggacatgccgctggtgcgcctgtgcagccggctgctctacgactacctgctgcgcgagggcgtgcgtatccacgaatactgccagcgtccgctgcacggcaaggtcgcggtgatcgacgacgactggtcgaccatcggttcgagcaatctcgatcccctcagcctgtcgctgaacctggaggccaacctggtgatccacgacgtcgccttcaacggccagctctaccagcacctgcgcgagctggcgcgccgccactgccggcgcatcagccgccgccacgccaggcgcggctactggtggcgggcgccgctgatcttcctcggcttccacttttcccggcatttcccggccatcgccggttgggtacccgcccatctgccgcgcctgaaatcgctggagccgcgtccgtcgcggcgctggcaggaacgccagggccagcggggcaacccatga

SEQ ID NO: 14553 - protein, 401 aa, Pseudomonas aeruginosa UCBPP-PA14
MNFPWRDGNRVELLINGEEYFPRLFQCIAEARREILLETFIIFEDEVGRQLQEALSAAAERGVEVQVTVDGYGTASLSTDYLARLTAAGVRVHLFDPRPRLLGMRTNLFRRLHRKLVVIDRQQAFVGGINYGEDHLVRRGNMAKQDYAVRVEGPVVRDIRQACLALLEPDADYPPLRPSGAGQPARVRLVIRDNDQSSDDIEREYLQAIRQARRRLLIANAYFFPGYRLLRELRDAARRGVRVDLVLQGMPDMPLVRLCSRLLYDYLLREGVRIHEYCQRPLHGKVAVIDDDWSTIGSSNLDPLSLSLNLEANLVIHDVAFNGQLYQHLRELARRHCRRISRRHARRGYWWRAPLIFLGFHFSRHFPAIAGWVPAHLPRLKSLEPRPSRRWQERQGQRGNP

SEQ ID NO: 14554 - DNA, 1203 bp, Erythrobacter litoralis HTCC2594
  CDS (1)..(1203): transl_table=11
atgggggagacgagacaggtgcataccgagcccgatccggtcgaatacagctatcccgaaccgttctgcgtggaagcgggcgaccatacgctgaccttcctgcccgacggggtgcatcgcttcgacgcattgctggagcttgtccaggaagcacaggaaagcctgcacctgttctactacatgttccaggatgacgaagcgggcaatcccgtgcgcgatgcgctggtggaagccgccgagcgcggcgtgaccgtgtgcctggtggtggatcgcttcgggaccgatgcggacaaggaatttttccagccgatcgtcgatgcaggcggcagcttcgccttcttcaaccccaagaagagtcggcgctacctgatccgcaaccaccagaagatggccatagccgatcgcgaaaaagcgctggttggcgggttcaacgtgtcggagcactacttcaagccgcccgaggaaaacggctggtgcgacatgggcgtgatagtgcgagggccgctggtcgagcaattgctcgattggtatggtcagatctacgattgggcgaccacgccgtcggcgcagtaccgcgcgatccgcacgatggtgcgcgactgggagccgggggatggcaaataccagctgctggtcggcggcccgacctcgatccccagcaactgggcgcgccgggtgaagaaggatctcgcccatgccagcaaactcgatctcgtcatggcctatttctccccgccgcgcagtttccggcgcctgatccgccgggtcggggagcggggcaaggtgcggctggtgatggccgccaagtcggacaatccggcgaccgtctcggcagcacgcgcgacctatggctcaatgctgcgggcgggctgcgaggtctatgaattccagccgtgcaagctgcacatgaagctgctggtgatcgacgatgcggtctatttcggcagcgccaatttcgaccatcgctcgatccgcctcaacctggaactgatgttccgtgtcgaggacccggacctggccaagatggtgcgcgaattcgtcgacggcatgaccgaggtctcggagcagatcacctacgaatcgcacaagaagaatcgcacctggctttcgaccctgaagagctatttcgggtggttcctggtgaccacggtcgattacaccgtcagcagcacgctcaatgtcggcagcgaaggtgcgccgtaa

SEQ ID NO: 14555 - protein, 400 aa, Erythrobacter litoralis HTCC2594
MGETRQVHTEPDPVEYSYPEPFCVEAGDHTLTFLPDGVHRFDALLELVQEAQESLHLFYYMFQDDEAGNPVRDALVEAAERGVTVCLVVDRFGTDADKEFFQPIVDAGGSFAFFNPKKSRRYLIRNHQKMAIADREKALVGGFNVSEHYFKPPEENGWCDMGVIVRGPLVEQLLDWYGQIYDWATTPSAQYRAIRTMVRDWEPGDGKYQLLVGGPTSIPSNWARRVKKDLAHASKLDLVMAYFSPPRSFRRLIRRVGERGKVRLVMAAKSDNPATVSAARATYGSMLRAGCEVYEFQPCKLHMKLLVIDDAVYFGSANFDHRSIRLNLELMFRVEDPDLAKMVREFVDGMTEVSEQITYESHKKNRTWLSTLKSYFGWFLVTTVDYTVSSTLNVGSEGAP

SEQ ID NO: 14556 - DNA, 1497 bp, Brevibacterium linens BL2
  CDS (1)..(1497)
atgaccagattggagaactatcttttcttctcaatcgatcaggcgtggccgaactggctgattgtcacacttctggcgatcgacatgatcatccgcatcgttgcgctgggctggattccgcacaaccgcagaccatctgtcgcgctcggctggctgctcgcaatcttcctcatcccctacgtcggaattctcgcgttcctgctgctcggctcggcgaagctgccgaagaggcggcgggacaaacaggtgctcgtcaacgacatcttccgggaccagaccgatgatcgggcgatcatcggcgactccgcccacatgcccgaaccgctgagcaccgcggcgcagctcaacttcgaactgggcgcgctgccgatgacgcacggcaacgccttcgatctgcagatcgacaaccacgcctgcatggaggcgatggccgacgagatcgatgcggccactcggttcgtccacttcgagttctacatcgtcgccatcgatgacacgacgaggcggctcttcgaatcgctgctggccgcgcacgagcgcggggttcgggtgagaatcctcatcgaccatctgggttcactgggatatcccggctactcggacctggtcaagcggctcaactcatcgggagtggcgtggcgccgagccctgccgatccgtccctggaagggcgaataccagcgacccgacctgcgcaaccaccggaagatcctcgtcgtcgacggcgaggtcgccttcaccgggtcgcagaacatcatcgaccggtcctacaacaagcgacgcaacttgcggaagggcttccaatggatggacctgtcgctgaagtgcagcggcccagtcgtcgatgaactcgatgcggtcttcatcacggactggtattcggagacgggggaactcttagacgaagcctcgcaaggggaactccgggcaccgcagaacggcggcatccaggcgcaggtggtgccgtctggaccagggttcgaagacgagaacaatctgcgtctgttcaatcacctcatctacaacgcgaaccgcagcgtcgtcgtctgctcaccgtacttcgtgcccgacgagtcgctcatgcacgcgctcacgacagaggcccggtccggagtcgacgtgcgcctgtatgtgggggagacgagcgaccattgggtgacgcaacgggcccagcagtcctattacgccgatctggtgcgggccggagtccggatcttcctgtaccacgccccgaccgtgctgcattcgaagtttctcatgatcgacgatgaagtctcgatcatcggatcctcgaacatggatgagcgatcgttcgcgatgaacatggaggtcaccatgttcatcgtcgacaaggagttcacccagcggatgtacgacctcgaagcgcagcggtacgcgccgaactccgtcgagctcgacgccgaacgctggaacgatcggccgctgctgcacaagtatgtggagaacgtcgccaggctcacgagctcgctgctctga

SEQ ID NO: 14557 - protein, 498 aa, Brevibacterium linens BL2
MTRLENYLFFSIDQAWPNWLIVTLLAIDMIIRIVALGWIPHNRRPSVALGWLLAIFLIPYVGILAFLLLGSAKLPKRRRDKQVLVNDIFRDQTDDRAIIGDSAHMPEPLSTAAQLNFELGALPMTHGNAFDLQIDNHACMEAMADEIDAATRFVHFEFYIVAIDDTTRRLFESLLAAHERGVRVRILIDHLGSLGYPGYSDLVKRLNSSGVAWRRALPIRPWKGEYQRPDLRNHRKILVVDGEVAFTGSQNIIDRSYNKRRNLRKGFQWMDLSLKCSGPVVDELDAVFITDWYSETGELLDEASQGELRAPQNGGIQAQVVPSGPGFEDENNLRLFNHLIYNANRSVVVCSPYFVPDESLMHALTTEARSGVDVRLYVGETSDHWVTQRAQQSYYADLVRAGVRIFLYHAPTVLHSKFLMIDDEVSIIGSSNMDERSFAMNMEVTMFIVDKEFTQRMYDLEAQRYAPNSVELDAERWNDRPLLHKYVENVARLTSSLL

SEQ ID NO: 14558 - DNA, 1446 bp, Lactococcus lactis subsp. cremoris SK11
  CDS (1)..(1446)
atgagttttattgcactttttgagctggcacttttttttcttaatgttattttatcctttgtcattatttttagggaaagaaaatcaacagcagcaacttggtcatggctctttgtagttaatttattgccgattataggctttattttatatttactcattggtcgtggaatttcacattatcgtatttttaaagaccgtaaaaggtttcaacttggctttgaaaaacaacttgaacatgcggagaaatcatatacagatagattgtttattgaaaaaatgagaaaaaatcatgtgattggtcaactaattcacatgctttatgttgaagaaaaatcgattatttcaacaaatactggtgtcaaaatttttaatgatggacgccagaaatttaacgctttgatagaagatataaatcaagccaagcatcatgtccatatggaatattatatttttagaatggatcgaacgggtcatgaaatctacgatgccttactggcagccgcaaaacgtggagtagaggtgaaacttttaattgacgcttggggttcaaataagactaaaatgtccagctttaaagagcttcaagaagctggtggacatgtggctcaatttttccccttgattatgcccttagttaatccccgaacaaattaccgtttgcaccgtaaaatcgttgtgattgatggtgtagttggctatacaggtggattcaatgtcggtgatgaatatgtttcaattacgaaaaaatttggatattggcgtgacaatcatttgagattgactggtgatattgtttatagcttacagcatcgttttatcttagactggaattcacaacatcattttgaagtgactgagggagaaccttattttccagattctattgttgaaggacatgtagcgactcaacttgtgacttctggtccagatgaggataaagagcaaatcaaattgacttacatgaagatgatttctggtgctgaacgagaaattatcattcaaacgccctattatattccttctgatgccttgcatgagtcaataaaattggcccttttatcaggtgtacaagttaaaatgttaattcctaacaagccagaccatccgctggtttactgggcgacatatttccatgccgctgatttagttaaatatggtgccaaggtttatacttatgaaaatggatttgttcattctaaaacgttaattattgatggagagtatgcctcagttggttcggcaaatttggattatcgaagcttacaattatgttttgaagcaaatgttgttatttatgattatgatatttcacaaaaattgcgaaatgattttatgaaagacttgaagttaagccgtccattgactttagagcgttatgaagaaagatcaaagatgattcgttttaaagaaggactggctcgcttaattgcaccaatgctttga

SEQ ID NO: 14559 - protein, 481 aa, Lactococcus lactis subsp. cremoris SK11
MSFIALFELALFFLNVILSFVIIFRERKSTAATWSWLFVVNLLPIIGFILYLLIGRGISHYRIFKDRKRFQLGFEKQLEHAEKSYTDRLFIEKMRKNHVIGQLIHMLYVEEKSIISTNTGVKIFNDGRQKFNALIEDINQAKHHVHMEYYIFRMDRTGHEIYDALLAAAKRGVEVKLLIDAWGSNKTKMSSFKELQEAGGHVAQFFPLIMPLVNPRTNYRLHRKIVVIDGVVGYTGGFNVGDEYVSITKKFGYWRDNHLRLTGDIVYSLQHRFILDWNSQHHFEVTEGEPYFPDSIVEGHVATQLVTSGPDEDKEQIKLTYMKMISGAEREIIIQTPYYIPSDALHESIKLALLSGVQVKMLIPNKPDHPLVYWATYFHAADLVKYGAKVYTYENGFVHSKTLIIDGEYASVGSANLDYRSLQLCFEANVVIYDYDISQKLRNDFMKDLKLSRPLTLERYEERSKMIRFKEGLARLIAPML

SEQ ID NO: 14560 - DNA, 1470 bp, Lactobacillus casei ATCC 334
  CDS (1)..(1470)
atgtcgctgattacctggcttattcttattattttggttttaaacaccttcggggcaatcttcacggttctacgcgaggtccgagatatctcaacgacttgggcgtggttgctagtgcttatttttttaccgatcgtcgggtttggtttttatttatttgctggccgcggcttatcaacgaaaaaattgcaacggattcaacacgaatatgagtctggcgtaaaagcatttgtctcactacaaaagcacgaaaacgcccggaataagttattgccaccgactgattacacgccagcggccaaggctttaaccgccttttttctgaataccgcgcaagcaccggtccttgcccataaccaagtgcaactttacacggatggcgagaaaaagtttgcggcgttattccgcgatattgaggccgctaaagattatatctatgttgagtactacaccatttacaatgatgaattaggcaatcaattccagcaactgctgatcaagaaagctaaggaaggcgttgttgtaaaggtcctatatgacgcttggggttccatgggcgctacagcaaagtggtggcgccggctgaccgacgttggcgggcaagccgaaagttactttagttccaagcatcccatcactgactttcgtttgaactatcgtgatcatcgcaagatcgttgtcattgacgaccacgtcgggtatatcggcgggtttaatgttggtgaccaatacgtctcccgcaaacctaagttcggttattggcgcgacacacatttgcgcattatcggcaatacgatttacgctttaaaaattcgcttcaccatggattggaatgcaacagtcagcaaaaaagacgaaattgcttatagtgttgaacaagatagtgccgatagtgtcactgccgacagtttgacagccggtgcaacgcctatccagatcgttgcttccggacctgaccgcccaacgcaacaaattaagttgggatacaccaagttaatcaccagtgccaccaaatctgtttggattcaaagtccttatttggtgccagatgatactgtgatcgacgctttagtatccgctgccatgtcagggattgatgttcgcatcatgattcctgacatgcctgatcacccgttcattttccgcgcgacacaatactatgcgaattatctgactcgcgctggcgtgaaaatctaccattacgaacacggctttatgcatgcgaaaacggtggttgtcgacaatgccatcgccagcgttggctcggcaaatttcgatatccgtagttttaagctgaattttgaaattaatgcgtttatttatgatcgtaaagtggccagtagcttgggccagattttcgaggctgatatggcgcgcagttacttactgacgcctgagctaatcgccaaacaaagcagttggcttcggtttaaacaagacttctcgcggttattatcacctattctttaa

SEQ ID NO: 14561 - protein, 489 aa, Lactobacillus casei ATCC 334
MSLITWLILIILVLNTFGAIFTVLREVRDISTTWAWLLVLIFLPIVGFGFYLFAGRGLSTKKLQRIQHEYESGVKAFVSLQKHENARNKLLPPTDYTPAAKALTAFFLNTAQAPVLAHNQVQLYTDGEKKFAALFRDIEAAKDYIYVEYYTIYNDELGNQFQQLLIKKAKEGVVVKVLYDAWGSMGATAKWWRRLTDVGGQAESYFSSKHPITDFRLNYRDHRKIVVIDDHVGYIGGFNVGDQYVSRKPKFGYWRDTHLRIIGNTIYALKIRFTMDWNATVSKKDEIAYSVEQDSADSVTADSLTAGATPIQIVASGPDRPTQQIKLGYTKLITSATKSVWIQSPYLVPDDTVIDALVSAAMSGIDVRIMIPDMPDHPFIFRATQYYANYLTRAGVKIYHYEHGFMHAKTVVVDNAIASVGSANFDIRSFKLNFEINAFIYDRKVASSLGQIFEADMARSYLLTPELIAKQSSWLRFKQDFSRLLSPIL

SEQ ID NO: 14562 - DNA, 1212 bp, Bacillus anthracis str. A2012
  CDS (1)..(1212)
atgattaaaaaaatattgcgagttacttctattattattgctattttcgcttttattttaatttgtatgcatattgatgttactttaggtaggaaaatggaagctgggaaaaacatgccgacagagtatgcacctcattatagtgattttcaattatatgtagaaggaaagtcattttataaacagttatttactgatataaaagaagcgaaacaatctatttacacttatttttttattttatcggatgataaaagtagccatacttttttaaatttattaaaagagaaggcaaaagaaggagtaaacgtatatttatctgtcgatttacttaacgatttatcatttgaaagaaagatgaaaaaagaattacaggaaaatggtgtgcattttacatatagtagaaaacaggaattaccattcgggttttattcccttcaccatcgtaatcatcgccgcattacaacgattgatggagagattggttatacgggtggttttaatataggggatgaatacttagggaaagataaacactttgggtactggagagactatcatgtacggataaaaggtgaaggtgcaaaagacttagaggaacaatttgctttagattggaaacgagatacgaaagaagatataaagagaagtacggataaagctagtaaagggaatacattacatactatggttagttataatgggcatcacgtcgctgaaaaatatatagatcttataaaacaagctcggcactcaattgtaattgcaacgccgtattttatagcgaaaaataaagaatccatgaatgctttaatcgcagcacaaaagcgtggtgttacagtaaaaatactttggtcatataaaccagatctacctcttataaaagaagcggcgtatccatacatacgtcaagctattaataatgggattactgtatatgggtataaaaaaggaatgttccatggcaaattaatgcttattgataatgaattaaccgttattggcacaacaaactttacttcgcgtagcttcaatataaatgatgaaatgaatttttatattcatggtggtcctattgtagggcaagttaataaggcgttaacagaggattttcgtgactcaaaagaaatgacgaaagaattttttgagaagttatctttttgggagcgttgtaaggagaaatttgcagggatggtggatttttatttataa

SEQ ID NO: 14563 - protein, 403 aa, Bacillus anthracis str. A2012
MIKKILRVTSIIIAIFAFILICMHIDVTLGRKMEAGKNMPTEYAPHYSDFQLYVEGKSFYKQLFTDIKEAKQSIYTYFFILSDDKSSHTFLNLLKEKAKEGVNVYLSVDLLNDLSFERKMKKELQENGVHFTYSRKQELPFGFYSLHHRNHRRITTIDGEIGYTGGFNIGDEYLGKDKHFGYWRDYHVRIKGEGAKDLEEQFALDWKRDTKEDIKRSTDKASKGNTLHTMVSYNGHHVAEKYIDLIKQARHSIVIATPYFIAKNKESMNALIAAQKRGVTVKILWSYKPDLPLIKEAAYPYIRQAINNGITVYGYKKGMFHGKLMLIDNELTVIGTTNFTSRSFNINDEMNFYIHGGPIVGQVNKALTEDFRDSKEMTKEFFEKLSFWERCKEKFAGMVDFYL

SEQ ID NO: 14564 - DNA, 2703 bp, Anaeromyxobacter dehalogenans 2CP-C
  CDS (1)..(2703): transl_table=11
atgaggtaccgccgcgtgctcgcgctggtggagcagggcgccgacgccggcccggcgctcggggccgtccgcgcgctcgcgccggaggcggagtcgctgggcgtggtggcgtgcccgccgctgcggccgcgcccgtggctgccgggggcggccgcgccggcgccggccggcgtcgcggaggccgggtggctcgagcgcttgcggcaggacgcggcgccgctcgcgccgcggctggcgatcggcgcggtgcccgatctcgatcccgccgcgctcgcggcgctcgcggacgaccgcgaggtggacctggtcgtcgcggggccgctcccggcggcgggcggcgccgccctgtccgcgctgcgccgcctccggccggtcgcggtcgcctggatcccgccggcggccgctgcggccgccgcgcgggccggcgggccggcgcgggagctgctctgcgtcgcgcccggcgagcgcgcccgcgcggcgctggcgggcttcctgcgcgaccacggggatccgggccagcgcgtcaccctcctgtcgctcgcggcgccgtcgcggggcgaggtcgccgtcgcgctggaggtcgccggcatccgcgcaccggtcgagctggccggcggcttcggcgcggggacgtggcgcacgctcgaggccgtcgcgcgggagcgccggctggacctggtggtcctctcgcgctgccccggggcgctgctgcgcggcgcgccctggccggcgccgctgctggtgctgccgccggccgtgccgacccggtcggtgctccgccggccgctggacgtgccggacctcctggacggcggcggccccgtccggctgcgcgtcggctacgcctacggcatcgggcgcaacccgcccgtcgaggaccaggagctggcgctcgtggcggacggccgcgtggtcgcgcgcgtgcgcacgcgcggcggcgaggcggagctgcccgcggggctggccgccggctcgctcggcgtgttccgcgcgcgcgacgccgggggcctcgaccccgtcgccgcggtggagcgccaggtcgcggtgatccgcccgggcgcgctgccgctgctgcccttcgacgccgagctcggcccggaggacctcgcggtcctcgccggcctggacggcgccgagccgctcgcggtgcggctgcgcccgacccggagctgccacctcgtgcgcgagcggctgtgcgccgccggcctcgcgccgcgcgtggtggacgcgagcgccgtcctcgacgagggcgaggcggccgacgtgggcgaggcgcacgacgcggtgcgcctggcgcgggtgggcggccgcctgcgggcggccggcttcccggtcgcggcgatcgtgcaccgcggcccgcacccccccgccgcgatcgggttcgacgcgctggaggcgcaccagctcgccgggcgcgcctggcgcgcgccgccgcccgcgccgcggcccgcctcgctcgacgcgcggctcgacgcggcgacggccgcgcccgcgatcgaggggaaccgcgtcgagctcgagctcgagaacgccaccgcccgccgctggctgctcgaggcgatccgcggcgcgcgccggacgctccacctccaggtgtacctcgccaccgacgacggcgtcggccggcgggtcgaggccgcgctcgccggcgccgggcgccgcggcgtgacggtgcgggtgctggtggactcgctgcacggcctgcacggctccttcggcctgcagaacccgctgctctcgcgcctcgcggcccgccccggcgtcgaggtgcgggtctcgcgcccggtggcggcggtgccgagcgtcgaggacctgaagcagcgcgaccaccgcaagctggtggtggccgacggcgaggtcgcgctggtgggcgggcggaacctcgcgcacgagtactacaccgggttcgacgaggtccgggtcgggccgcggacgccgtggcgcgaggtgccgtggctggacggcggggcgcgggtgcgcgggccggcggtcgccgcggtggagcgcgccttcctggaggcgtggaccggcgcgggcggcgcgcccttcgacgtgacggagcccggcgcggccggcgcgcagcgggtgcgggtggtggtgcaccgggggctgcgggacgcgagcacgctggaggcgtacctggcgctggtcgagagcgcgcggcaccgcctgctcgcggtgaacgggttcccgctgctcctcgagctggagcacgcgctcgcgcgcgcgctgcgccgcggcgtccgggtgcaggtgctgttcggagaggtcacgcccacgcacggcggcgagccgttcgaggggccctgggcgacggcgcgcaccgcggccacctggctggtccactcgcgcatcgacgcgctggtggcggcgggggccgaggcgtggctgctcgccgtccgcgacgtgccgggctggtcgccggagctcgggctggtgcgcccccacgtgcacgcgaaggcgatgatcgccgacgggcgcgcctgcgcggtggggagcgccaacctggacgtcaccgcgagctactgggaggacgagctgctgctcgtcgtcgaggacgaggccgccgccggcgcgttcgaggcgcgcgtccaggcgctcctcgccggctcgacgcgcgtggaccgcgccgaccccgcctggcagcggcgcgtgcgcgcgcgcgactgggcgcggcactggccggggatcctgtcgatctga

SEQ ID NO: 14565 - protein, 900 aa, Anaeromyxobacter dehalogenans 2CP-C
MRYRRVLALVEQGADAGPALGAVRALAPEAESLGVVACPPLRPRPWLPGAAAPAPAGVAEAGWLERLRQDAAPLAPRLAIGAVPDLDPAALAALADDREVDLVVAGPLPAAGGAALSALRRLRPVAVAWIPPAAAAAAARAGGPARELLCVAPGERARAALAGFLRDHGDPGQRVTLLSLAAPSRGEVAVALEVAGIRAPVELAGGFGAGTWRTLEAVARERRLDLVVLSRCPGALLRGAPWPAPLLVLPPAVPTRSVLRRPLDVPDLLDGGGPVRLRVGYAYGIGRNPPVEDQELALVADGRVVARVRTRGGEAELPAGLAAGSLGVFRARDAGGLDPVAAVERQVAVIRPGALPLLPFDAELGPEDLAVLAGLDGAEPLAVRLRPTRSCHLVRERLCAAGLAPRVVDASAVLDEGEAADVGEAHDAVRLARVGGRLRAAGFPVAAIVHRGPHPPAAIGFDALEAHQLAGRAWRAPPPAPRPASLDARLDAATAAPAIEGNRVELELENATARRWLLEAIRGARRTLHLQVYLATDDGVGRRVEAALAGAGRRGVTVRVLVDSLHGLHGSFGLQNPLLSRLAARPGVEVRVSRPVAAVPSVEDLKQRDHRKLVVADGEVALVGGRNLAHEYYTGFDEVRVGPRTPWREVPWLDGGARVRGPAVAAVERAFLEAWTGAGGAPFDVTEPGAAGAQRVRVVVHRGLRDASTLEAYLALVESARHRLLAVNGFPLLLELEHALARALRRGVRVQVLFGEVTPTHGGEPFEGPWATARTAATWLVHSRIDALVAAGAEAWLLAVRDVPGWSPELGLVRPHVHAKAMIADGRACAVGSANLDVTASYWEDELLLVVEDEAAAGAFEARVQALLAGSTRVDRADPAWQRRVRARDWARHWPGILSI

SEQ ID NO: 14566 - DNA, 1461 bp, Anaeromyxobacter dehalogenans 2CP-C
  CDS (1)..(1461): transl_table=11
atgtggacccccgacctcgcgctcctcgacgcgctgccctcgccgggcgtgctcggggtcctcgaggcggcctgggtgctcgcggcgagctgctggatcctgctggagcggcgctcccccaccgcgacgctggcctggatcctggcgctcgccgccatgccggtggtgggcgtggcggtgtacctcgtggtcgggccccggcggctcgaccgcaagaagctgcgcctgaacgtgctgaagcgcgcccgcggcgcgtacctggaggcgtgggaccgggccaccgcgcgcgacctctccagcatggggcagctcgcccggctcgcgatccggctccaggcgccgccgcccgagacggcgcgatcggtcgccctcttcgccgagggcgacgactacttcgcggcggtggagcgcgacctcgcggcggcccggcaccacgtccacgtggagatgtacatcttcgagcgcgaccggaccggcgcccgcgtgctggccgccctcgccgccgcggccgcgcgcggcgtgcaggtgcggctgctggtggacgacgcgggctcgccgcggctcggcgcggcgctgctcgcgccgctgcgccaggccggcggcgaggtggagcgcttcaaccccatgctcgcctcgcggctgcgcggcggctcggccaacttccgcacccaccgcaagatcgtggtgtgcgacgggcgggtcggcttcaccggcgggatgaacgtgtcggacgaccagagcgccgccgtggcgggcccggccgcctggcgggacaccaccgtccgcatcgagggggccgcggtccacggactgcagctcaccttcctcgagaactgggccttcgccaccggcaagaccggctcgccgctgccgcccggtgggctgcggccgtacttcccggacgaggcgcccgggtcgcacgaggtccaggtcgtgccgtccggaccggaccaggagacgtccgccgtcggccacctccacgtcgccgcgatcggcggcgcgcgcgagcgcgtctggatcaccaccccgtacttcgtgcccgacgaggcgatgctcgcggcgctgaccagcgccgcgctgcgcggcgtggacgtgcggctgctgctgccgcgccggaccgactcgcgggtggtggacgccgcgtcgcgcacgtaccacgacgcgctgctcgccgccggcgcgaggatctggctctacgggccgcgcatgctccacgccaagacctgcctggtggatcaggacgtcgggatggtcggcaccgccaacctcgacaaccggagcctgcggctcaacttcgaggtcaccgccgtgctctacggcgcccccgcggcgcaggcgctcgccacgatgttcgagcgcgacctcgaggtggcgcggcccaagaccacgcgggaggcggacgcgccgttcctgtcgcggctcggcgccagcgccgcgcgcctgctggcaccgcaactatga

SEQ ID NO: 14567 - protein, 486 aa, Anaeromyxobacter dehalogenans 2CP-C
MWTPDLALLDALPSPGVLGVLEAAWVLAASCWILLERRSPTATLAWILALAAMPVVGVAVYLVVGPRRLDRKKLRLNVLKRARGAYLEAWDRATARDLSSMGQLARLAIRLQAPPPETARSVALFAEGDDYFAAVERDLAAARHHVHVEMYIFERDRTGARVLAALAAAAARGVQVRLLVDDAGSPRLGAALLAPLRQAGGEVERFNPMLASRLRGGSANFRTHRKIVVCDGRVGFTGGMNVSDDQSAAVAGPAAWRDTTVRIEGAAVHGLQLTFLENWAFATGKTGSPLPPGGLRPYFPDEAPGSHEVQVVPSGPDQETSAVGHLHVAAIGGARERVWITTPYFVPDEAMLAALTSAALRGVDVRLLLPRRTDSRVVDAASRTYHDALLAAGARIWLYGPRMLHAKTCLVDQDVGMVGTANLDNRSLRLNFEVTAVLYGAPAAQALATMFERDLEVARPKTTREADAPFLSRLGASAARLLAPQL

SEQ ID NO: 14568 - DNA, 1509 bp, Anaeromyxobacter dehalogenans 2CP-C
  CDS (1)..(1509): transl_table=11
atgagcgacggagtcgaagggccggagtcgaaggcccgcgcgatccggcacctcgacggcccgtccgttcgatgcttcactgatccggtgttccgggacgcgtggagcgccgcggtgctggtggtcgcgacgggcctgtcgctcgtcgcgacgggccacgccgtgctgcacaagcgcgacgtccgcgcggcgctgggctgggtggggctcatctggctcgcgcccatcgccggcgcgctcgcgtacctcctgttcggcgtgaaccgcatccgccggcgggcccaggccatcggcctgccggaggtgcggagccgcgccgaggaccggccgccgccgccgcggctgccgtccgacgccgagcacctcgcgccgctggtggcgctcgccgacgcggtggtgcgccgcccgctcgtcgccgggaacgccatcacgctcctgcccggcggcggcctcgcctacccggccatgctcgaggccatcgacgcggcccaccactcggtcaccttctgcacgtacatcttcgacaccgggctggccggcgacgccttcgccgacgcgctggcccgggcgcacgagcgcggcgtgaaggtgcgggtgctggtggacgccatcggcgtccgctaccgctggccgcccatccaccgccgcctgcgccggctgggcgtgcggaccgagctgttcctgccgcgcctcaccccggcctggctgccgttcgtgaacctgcgcaaccaccgcaagatcctggtggtggacggccggatcggcttcaccggcgggatgaacgtgcgcgacgagttcctgccccgccccggcggcccgccgccgttcatggacctgcaggtgcgcatcgaggggccggtggtggcgcacctccagtcggcgttcgcggaggactggctgttcaccaccggcgagccgctcgacggcaacgcgttcttcccgccgctcgcggcggccgggtcggtgctggcgcgcggcgtggccgacgggccggacgaggacttcgaggccatccgctggctgctgctcggcgcgctctcggcggcgcgccgccgggtgcgcgtggtcacgccctacttcctccccgacccgccgctcatcaccgcgctcaacgtggccgccatgcgcggggtcgaggtggacgtggtgctgccggagcgcgggaacctgccgctcgtgcagtgggcgcagaccgcgcagctctggcaggtgctcgaccgcggctgccgggtgtggtgcacgccgccgccgttcgatcacaccaaggccatggtggtggacggcgcgtggtcgctcctcggctcggcgaactgggacccgcgcagcctgcggctcaacttcgagctggacgtggaggcgtacgacccggagctggcggcgcgggtggaccggctggtcgaggaccggctcgcggcggcgcgcccgctcacgctcgccgaggtggaccggcgtccgctcccggtgaagctgcgcgacggcgtggtgcggctgctctcgccgtacctgtga

SEQ ID NO: 14569 - protein, 502 aa, Anaeromyxobacter dehalogenans 2CP-C
MSDGVEGPESKARAIRHLDGPSVRCFTDPVFRDAWSAAVLVVATGLSLVATGHAVLHKRDVRAALGWVGLIWLAPIAGALAYLLFGVNRIRRRAQAIGLPEVRSRAEDRPPPPRLPSDAEHLAPLVALADAVVRRPLVAGNAITLLPGGGLAYPAMLEAIDAAHHSVTFCTYIFDTGLAGDAFADALARAHERGVKVRVLVDAIGVRYRWPPIHRRLRRLGVRTELFLPRLTPAWLPFVNLRNHRKILVVDGRIGFTGGMNVRDEFLPRPGGPPPFMDLQVRIEGPVVAHLQSAFAEDWLFTTGEPLDGNAFFPPLAAAGSVLARGVADGPDEDFEAIRWLLLGALSAARRRVRVVTPYFLPDPPLITALNVAAMRGVEVDVVLPERGNLPLVQWAQTAQLWQVLDRGCRVWCTPPPFDHTKAMVVDGAWSLLGSANWDPRSLRLNFELDVEAYDPELAARVDRLVEDRLAAARPLTLAEVDRRPLPVKLRDGVVRLLSPYL

SEQ ID NO: 14570 - DNA, 1533 bp, Arthrobacter sp. FB24
  CDS (1)..(1533): transl_table=11
gtgctggatgcctctccggaaccggtccggcgggcgagtaaccgtgggagtctgtctgtgttgtggccgtttccgctggtgggcaccgcgccttactggctcgtgctcgcgctgagcattgttgacctggtgatccgggtgctggcgttgggaatcattccggggaaccgccgtcccaccacggccatggcctggctgctgggaatcttctttgtgcccgccctcggcctgatcctgttcctgctttttggaaacttcaaactctcccggaagcgccgtgcacagcaggatgccgtgaacaagcgggtccgcgccggcacctcccagctggccgccgtcgaaagcgaatacgacggcccggaatgggtagcgtcggcggcagaactgaacaagacccttggttcgctgcccatggtggacggcaacagcgtggagctactgcccggttaccccgactcgatcaaagccatggccgccgccgtgcgcggggcgaagaacttcgtcaacgccgagttctacatcatgagcacggaccacatcaccgatgacctgttcaccgcactggaagaggccgcggagcgcggcgtccaggtccgagtgctgttcgaccacctcggcaccctgcgcatcaagggctaccgcaagctcatcgcgcgcctgaaggccagccagatccagtggcggcccatgttgccactgaaccccgtccacggccagtggcgccgtccggacctgcgcaaccaccgcaagatcatggtgatcgacggcgaaatcgccttcacgggctcgcagaacctgatcgaaccgtcctacaacaatccccggcaccgcaaggtggggcgcgagtgggtggagctcatggcatgcatgcgcgggccgatcgtcaccacgctcaacgtggtatttgccaccgactggctcagtgagacggacgagtccctggaggaccagctggcctaccagcccgagacggcagcgggcgccgtgaccgcccaggccgtgcccagcggccccggcttcatcaccgagaacaacctgcgcctcttcaacaccctcatctactccgcgcagcacaagatctccatctgcagcccatacttcgtccccgatgattcgctgctctacgcggtgacgacggcggcgcaacgcggcgtcgacgtcgaacttttcgtctcggaaaagggggaccagttcctggtccaccacgcgcagcagtcctactacgaggcgctgctggaagcgggcgtgcggatctacctgtacaaggcgccgttcgtgctgcatgcgaagcatttcaccatcgacgacgaagtagcggtgctggggtccagcaacatggacatgaggtccttctcgctgaacctggaggtttcggtgatgctccttggcgccgacatcgtggccaagatgcgcgccgtggaggacacctaccggggcatctcccgtgaactgacgctcgaggactggatggaacggcccatggcggtcaagtacgtggacaacgtcgcccggctcacggccacgctgcagtag

SEQ ID NO: 14571 - protein, 510 aa, Arthrobacter sp. FB24
MLDASPEPVRRASNRGSLSVLWPFPLVGTAPYWLVLALSIVDLVIRVLALGIIPGNRRPTTAMAWLLGIFFVPALGLILFLLFGNFKLSRKRRAQQDAVNKRVRAGTSQLAAVESEYDGPEWVASAAELNKTLGSLPMVDGNSVELLPGYPDSIKAMAAAVRGAKNFVNAEFYIMSTDHITDDLFTALEEAAERGVQVRVLFDHLGTLRIKGYRKLIARLKASQIQWRPMLPLNPVHGQWRRPDLRNHRKIMVIDGEIAFTGSQNLIEPSYNNPRHRKVGREWVELMACMRGPIVTTLNVVFATDWLSETDESLEDQLAYQPETAAGAVTAQAVPSGPGFITENNLRLFNTLIYSAQHKISICSPYFVPDDSLLYAVTTAAQRGVDVELFVSEKGDQFLVHHAQQSYYEALLEAGVRIYLYKAPFVLHAKHFTIDDEVAVLGSSNMDMRSFSLNLEVSVMLLGADIVAKMRAVEDTYRGISRELTLEDWMERPMAVKYVDNVARLTATLQ

SEQ ID NO: 14572 - DNA, 1161 bp, Azotobacter vinelandii AvOP
  CDS (1)..(1161): transl_table=11
atgcagagcggtgcggtctttccctggcggggcggcaatcgcttcagcctgctggtcgatggcgatgccttctttccgcgcatgctggaggccatcgccggggccagatggcgggtcgatctcgaactgtatctggtcgaggatggccgctgcgccggcctgctggtggatgcgctggtcgccgcggcccggcgcggcgtgcaggtgcgttgcctgttcgatggcttcggggcgctcggtttcggtgccgccctgcgcgtccgcctgaccggggcgggtgtcgccttggtgttgttcaatcctctgcgctggcatttcggcttgcacaatctgcatcgcgatcatcgcaagatgctactggtggacgatcgcctgggctatgtcggcggtacgggcgccaccgacgagttctgggacccgcaaaataccagcggcctgtggcatgaggtcatggtggaaatcgccgggccgctgctggccgactggcggacgctgttcgatcatcagtggatgctctgccacgagtggggccgctggcgctcgcagcggccgccgaagcccccgcgcatcccgccgagtcctttgcgtcgcgagggttcgggccggctcgcctatgccgaggcgcatcagcaccgcgatgtcctgcaatcgctgatccgcagtctgcaccgcgcgaaccggcgtatctggctggccactccctatttcctgccgacctggaaggtacgccgcgccctgctcaaggcggcccggcgcggcgtggaggtgcgcctgctgctggccggacgcaataccgaccatccgccggtgcgctatgccggccagcgctattatcgccgcctgctgcaggccggcgtacgcatcttcgaataccagccgcgcttcctgcacctgaagatggtgctggtcgacgactgggtcagcgtcggctcctgcaatttcgatcactggaacctgcgcctgaatctggaggccaatctcgaaacgcgcgatccgcgcttcatcgccgaggccgtcgaatgcttcctcgccgacttccaggtcagccatgaggtcgaccggcgacagtggcaggcccgtccctggtatcgccggctgcgtcagcggctgtggggctggctggaccggctggtggtcgatctgctggatcgcggcggttga

SEQ ID NO: 14573 - protein, 386 aa, Azotobacter vinelandii AvOP
MQSGAVFPWRGGNRFSLLVDGDAFFPRMLEAIAGARWRVDLELYLVEDGRCAGLLVDALVAAARRGVQVRCLFDGFGALGFGAALRVRLTGAGVALVLFNPLRWHFGLHNLHRDHRKMLLVDDRLGYVGGTGATDEFWDPQNTSGLWHEVMVEIAGPLLADWRTLFDHQWMLCHEWGRWRSQRPPKPPRIPPSPLRREGSGRLAYAEAHQHRDVLQSLIRSLHRANRRIWLATPYFLPTWKVRRALLKAARRGVEVRLLLAGRNTDHPPVRYAGQRYYRRLLQAGVRIFEYQPRFLHLKMVLVDDWVSVGSCNFDHWNLRLNLEANLETRDPRFIAEAVECFLADFQVSHEVDRRQWQARPWYRRLRQRLWGWLDRLVVDLLDRGG

SEQ ID NO: 14574 - DNA, 1446 bp, Azotobacter vinelandii AvOP
  CDS (1)..(1446): transl_table=11
atggaacagggcgctttgcagctcttgggctacctgctggtgctgatccaggcgctgggggtggctgcggccgtccacgcggtgttcaccgtgcggaccgcgcagggagccatcgcctgggccatctccctgctgttcatgccctatctcaccctgctgccctatctggtgttcggtcgcagccgtttcgacgcctatatccgggcgcggcgccaggccgaccggcagatgcgccgggcgatggccgagcaggactggcgtccctgggtcgaggaggccaaggcggcccatggcagcatggcttcgcaggatctcaaggtgctggcgcgcctcggccgccagccgccactgggcaacaaccgggtgcgcctgctgatcgacggcgaggccgccttcgcggcgattttcgaggccgtcgcccaggcgcgccaggtgatcctgctgcagttcttcatcgtccgcgacgaccgcctcggccggcgtctgcagagcctgctgctggagcgggccgccagcggcgtgcaggtgttcttcctctacgaccgcgtcggctgccacgccctgccgcgtcactatgtgcagcgtctgcgcgcgggaggggtggcgatgcgggccttttcggcctccgcgcgcagcgggctgctcaaccgcttccagttgaacttccgcaaccaccgcaagctggtgctggtcgacggccagcgcggctttctcggcgggatgaacgtcggcgacgactacctgggaaacaatccgcggctctcgccctggcgcgatacccaggtggagctgagcgggcccgtgctggcctgcctgcaggagtccttcgccgaggactggttctggaccacccggcaactgccgccgctgctgctgccggagcgctatcccgccggcggggtgctctgccaactggtcggcagcggccctgccgatccccaggaaaccggctcgctgcagttcgtcgcggcgatcaacgcggcgcgtcggcggatctggctggccagtccctacttcgtgcccgacgagtcggtgttcgccgccttgcgcctggcggcgctgcgcgggctggaggtgcgcctgctgctgccggcgcgggccgatcaccgggtggtctacgccgcttccagcctgtatgccttcgaggcgctcgaagcgggcatccgggtatttcgctatctgccgggcttcatgcaccagaaggtgctgctgatcgacgacgataccgcggcggtgggcagcgccaatctggacaaccgctcgttccggctgaatttcgaactgaccctgttcgtcctcgataccgccttcgccgctgaggtggaatgcatgctgcaaagggatttcagccgttcccgcgagctggacaggggggagagccgccgggcgcaccgcctgaaacgcctgggcatgcgggtggcgcggctgatttcgccgatcctctga

SEQ ID NO: 14575 - protein, 481 aa, Azotobacter vinelandii AvOP
MEQGALQLLGYLLVLIQALGVAAAVHAVFTVRTAQGAIAWAISLLFMPYLTLLPYLVFGRSRFDAYIRARRQADRQMRRAMAEQDWRPWVEEAKAAHGSMASQDLKVLARLGRQPPLGNNRVRLLIDGEAAFAAIFEAVAQARQVILLQFFIVRDDRLGRRLQSLLLERAASGVQVFFLYDRVGCHALPRHYVQRLRAGGVAMRAFSASARSGLLNRFQLNFRNHRKLVLVDGQRGFLGGMNVGDDYLGNNPRLSPWRDTQVELSGPVLACLQESFAEDWFWTTRQLPPLLLPERYPAGGVLCQLVGSGPADPQETGSLQFVAAINAARRRIWLASPYFVPDESVFAALRLAALRGLEVRLLLPARADHRVVYAASSLYAFEALEAGIRVFRYLPGFMHQKVLLIDDDTAAVGSANLDNRSFRLNFELTLFVLDTAFAAEVECMLQRDFSRSRELDRGESRRAHRLKRLGMRVARLISPIL

SEQ ID NO: 14576 - DNA, 1623 bp, Burkholderia vietnamiensis G4
  CDS (1)..(1623): transl_table=11
gtgctcacgtctttgatccggcacgcgccggccgcgccgtgttggcgcgccgtgtgccgcctggcccgcgcgctggtcgtctgcgcgctgctgccacttgtcgcgtgcgcgacgcacccgcctgcgacgtcgctcgagcgctccgtgtcccacgcgctgccggccgatgccgcgacgccgctgcgcacggcgctggccgcaccggaagccgcacatcccgggcagtcgggcttccgcctgctcgccgacggcgccaccgcgctgcagatgcgcatcgcgctcgcgcgggcggccacgaagacgctcgacatgcagtactacatcgcgaccgaggacacgaccggcaagctgctgctcgccgcggcgctgtacgcggccgatcgcggcgtgcgcgtgcggatgctggtcgacgacctgaacttccgcgacatcgaccgcgtgatggccgcgctcaatacgcacgggaacatcgagatccgcgtgttcaacccgttcggcgcgtcgcagtacgggatggtcgagcgcacggccaatttcttcacgcggctcgacagcttcacgcgccgcatgcacaacaaggcgatgatcgcggacaaccagctcgcgatcgtcggcggccgcaatctcggcgacgaatacttcagtgcgagcccgacgctgcagttccgcgatctcgacgtgctcgcggccggcccggtgacgaacgatatctcgaagagcttcgacgactactgggcgagcgcgagcagctatccgttgcgcgtgctgaaccaccagcgcttcgatccgaaggatctcgacgcggtgcgcgacgagctgcgcgagcactggcgcaacaacgccgacccgtacaacgcgaagccgttgaacgccacgccgctggcgcgccagatcgcgcgcgacgagctggaactcgtgtgggcgccggccgagttcaaggtcgatgcgccggacaagatcgcgcagccgaccgacacctacgtgagcccgccgatgcagcgcctggccgacctcacgcgcggcgcgcgcacggaatttctcgcgttttcgccgtacttcgtgccgcacgacgccggcgtgaagatcctcggcgatacggccgcgcgcggcgtgcgcgtcgcgatcgtcacgaattcgctcgcggccaccgacgcggtcgcggtgcaggccggctacgcgccgtaccgcgtgccgttgctacagcgcggcgtcgagttgtacgaattcaagtcgcagcccgaacagccgcctgcgcggctgttcggctcgcgttcgcgtgcgagcctgcatgcgaaggcgtacgtgatcgaccggcagatcgtcgtgatcggctcgctgaacctcgacccgcgttccgcacacctgaacaccgaactggcgctcgtgatccacagcccgcagctcgcgcagcaggcggtggcgatcttcgcgcacgtgacgcagcccgaccagagctaccgcgtgacgctcgcgccgcagccgggcggcggcccgcccgcgctcgaatggacgggcaccgatggcgggcaaaccaccacctatcacgtcgacccgcatgccgggctgctgcgcaacgtgatgaccggcgtcttcatgctgctgccggtcgacgatcagttgtaa

SEQ ID NO: 14577 - protein, 540 aa, Burkholderia vietnamiensis G4
MLTSLIRHAPAAPCWRAVCRLARALVVCALLPLVACATHPPATSLERSVSHALPADAATPLRTALAAPEAAHPGQSGFRLLADGATALQMRIALARAATKTLDMQYYIATEDTTGKLLLAAALYAADRGVRVRMLVDDLNFRDIDRVMAALNTHGNIEIRVFNPFGASQYGMVERTANFFTRLDSFTRRMHNKAMIADNQLAIVGGRNLGDEYFSASPTLQFRDLDVLAAGPVTNDISKSFDDYWASASSYPLRVLNHQRFDPKDLDAVRDELREHWRNNADPYNAKPLNATPLARQIARDELELVWAPAEFKVDAPDKIAQPTDTYVSPPMQRLADLTRGARTEFLAFSPYFVPHDAGVKILGDTAARGVRVAIVTNSLAATDAVAVQAGYAPYRVPLLQRGVELYEFKSQPEQPPARLFGSRSRASLHAKAYVIDRQIVVIGSLNLDPRSAHLNTELALVIHSPQLAQQAVAIFAHVTQPDQSYRVTLAPQPGGGPPALEWTGTDGGQTTTYHVDPHAGLLRNVMTGVFMLLPVDDQL

SEQ ID NO: 14578 - DNA, 1452 bp, Burkholderia vietnamiensis G4
  CDS (1)..(1452): transl_table=11
atgaccttcgactggcttcatgactggcttcacctcggcaccctgctcctggccatccatgtgctcggaatcgtcgcggcgtgccacgcgatcatgaacacgcgcacgtcgcaaggcgcggtcgcgtgggccgtgtcgctcgtcgcgatgccgtacctgacgctcgtcccgtacctgttcctcggccgcagcaagttctccggctacgtcgacgcgcgccgccaggagttgcgggcgctgcgcacgcatacgcagcgcgtaccgtggctcgatacgcacggcgccgacgggccggcagccgctgcgatcggccaggccgccgtgctcgcgctcacgcgcctcggcgggatgccgttcgtcggcggcaacacggtgcgcacgctggtcaacggcgacgcgaccttcgcggcgatcctcgcggcgatcgacgccgcgcgcgactacgtgatcgtccagttcttcatcgtgcgcgacgacgcgctcggccggatgctcagcgatgcactgctcgcgcgcgccgcagccggcgtgcgctgctatctgctgtacgacagcatcggcagcttcgatctgccgcgcagctacgtcgacacgctgcgccgcggtggcgtcgacgtgcatccgttcgcgacccgccgcaagttcgtcaaccgcttccagctgaacttccgcaaccatcgcaagatcgtcgtcgtcgacggcgaccgtgcgttcgtcggcggccacaacgtcggcgtcgaatatctcggcgcgaacccgcgcctgtcgccgtggcgcgatacccatatcgagatccgcggcccggtggtcgcgagcatccagtacgtgttcgccgaagactggcactgggccacccagacgctgccggcgctcgccgcgccgccggccgccctgcccggcgacacgatgcactgcctggccgtgccgatggggccggccgacaaacaggaaaccggctcgctgttcttcgtcgaggcgatcaacgccgcgcgcgaacgggtgtggatcacgacgccgtatctcgtgcccgacgaagcggtgctcgccgcgctgaagctcgcggtgatgcgcggcgtcgacgtgcgcatcctgataccgagccggcgcgaccactacgtcgtgttcgaggcgtcgaagctctatgcgcgcgacctcgtcgacgccggcgtcaaggtgttccgctaccgcagcggcttcctccaccagaaggtcgtgctgatcgatcgcgtcgcggccgcggtcggcagcgcgaacctcgacaaccgttcgttccggctcaacttcgagatcatggtgctgaccgtcgacgcggcgttcgcagcggacgtcgcgacgatgctcgatgccgacttcgcgctggcggacgaggtcgacgccaccgagtatcggcgctcgcctgcatggcggcgcatcgcgatgcacgtcgcccgcctgttcgcgccgattctgtag

SEQ ID NO: 14579 - protein, 483 aa, Burkholderia vietnamiensis G4
MTFDWLHDWLHLGTLLLAIHVLGIVAACHAIMNTRTSQGAVAWAVSLVAMPYLTLVPYLFLGRSKFSGYVDARRQELRALRTHTQRVPWLDTHGADGPAAAAIGQAAVLALTRLGGMPFVGGNTVRTLVNGDATFAAILAAIDAARDYVIVQFFIVRDDALGRMLSDALLARAAAGVRCYLLYDSIGSFDLPRSYVDTLRRGGVDVHPFATRRKFVNRFQLNFRNHRKIVVVDGDRAFVGGHNVGVEYLGANPRLSPWRDTHIEIRGPVVASIQYVFAEDWHWATQTLPALAAPPAALPGDTMHCLAVPMGPADKQETGSLFFVEAINAARERVWITTPYLVPDEAVLAALKLAVMRGVDVRILIPSRRDHYVVFEASKLYARDLVDAGVKVFRYRSGFLHQKVVLIDRVAAAVGSANLDNRSFRLNFEIMVLTVDAAFAADVATMLDADFALADEVDATEYRRSPAWRRIAMHVARLFAPIL

SEQ ID NO: 14580 - DNA, 1275 bp, Burkholderia mallei 10229
  CDS (1)..(1275)
atgagtggcgagacccggcaccgcctcgcgcaactgcgccagatgttcctgcaggagcgcggctccgcgtcgcggctcgcgttcacgtccggcaacgcggtgcgcctctgcgacggcggcgcggcgttctttccggcgctgatcgaacggatcgacgccgcgcgcgagcgcgtcgcgctcgaaacctacatcttctgcgacgacgccgtcggccgcgcggtgtccgacgcgctcgtccgcgcggccgcgcgcggcgttcacgtgcgcgtcatcaccgatggaatcggcaccgagcgcctgccgcttttcggcacctggccggacgcgggcgtcgagcaccggatctacaatccctatctgttcggccgcttcggtttttcgcgcacgcaccgcaagctcgcggtgatcgacgacgcctgcgcgttctgcggcggcatcaacatcgtcgacgatttcgagcagaacggcgagcgcctgccgcatccgcgttgggacttcgcggtcgaactggccgggcccgccgtcgccgacgtgcgcgccgcgttcgaggtgcagtggcaccggatcgccgccggccacaagcgctacgcgcaatatctgccgtatgacgtcgatggtcccgcgttcgccgcgcgctttcgccgctggatgcgcagccaccgctgggtgaaggcgggcgcgctgcgcgtcgtgaccgagccgagcgtggcgttcgtcgcgcgcgacaatatcgtgaaccgccgggcgatcgagaaggcgtatctcgcggcgatcggccgcgcgcgccagtcgatcctgctcgctaacccttacttcatgccggggcgcaagctgcggcgcgcgctcgccggcgcggcgcgccgcggcgtcgacgtgcggatcctgctcgggcgcaacgagttcgcgtcgctcgatatggcggtgccgttcctatatcatgcattgctgcgctcgggcgtgcgcgttgccgaatacgacaagacgatgctgcacggcaaggtcgcggtgatcgacgatcattgggcgaccgtcggctcgtcgaatctggatgcgctcagcctgatgctgaacaacgaggcgaacgtcgtgctcgtgcgccaccgcgaggagacggccgcgctgcgcgacgcgatcgcggcggcgttcgccgacggccgcgagatcgacccggcgctctacgcggcgcggcccgccgccgagcggtttctgaactggttcgcgtacaacgcgtaccggagtgcgatgaagctgctgacggtcggcggatacgactaa

SEQ ID NO: 14581 - protein, 424 aa, Burkholderia mallei 10229
MSGETRHRLAQLRQMFLQERGSASRLAFTSGNAVRLCDGGAAFFPALIERIDAARERVALETYIFCDDAVGRAVSDALVRAAARGVHVRVITDGIGTERLPLFGTWPDAGVEHRIYNPYLFGRFGFSRTHRKLAVIDDACAFCGGINIVDDFEQNGERLPHPRWDFAVELAGPAVADVRAAFEVQWHRIAAGHKRYAQYLPYDVDGPAFAARFRRWMRSHRWVKAGALRVVTEPSVAFVARDNIVNRRAIEKAYLAAIGRARQSILLANPYFMPGRKLRRALAGAARRGVDVRILLGRNEFASLDMAVPFLYHALLRSGVRVAEYDKTMLHGKVAVIDDHWATVGSSNLDALSLMLNNEANVVLVRHREETAALRDAIAAAFADGREIDPALYAARPAAERFLNWFAYNAYRSAMKLLTVGGYD

SEQ ID NO: 14582 - DNA, 1275 bp, Burkholderia mallei 10399
  CDS (1)..(1275)
atgagtggcgagacccggcaccgcctcgcgcaactgcgccagatgttcctgcaggagcgcggctccgcgtcgcggctcgcgttcacgtccggcaacgaggtgcgcctctgcgacggcggcgcggcgttctttccggcgctgatcgaacggatcgacgccgcgcgcgagcgcgtcgcgctcgaaacctacatcttctgcgacgacgccgtcggccgcgcggtgtccgacgcgctcgtccgcgcggccgcgcgcggcgttcacgtgcgcgtcatcaccgatggaatcggcaccgagcgcctgccgcttttcggcacctggccggacgcgggcgtcgagcaccggatctacaatccctatctgttcggccgcttcggtttttcgcgcacgcaccgcaagctcgcggtgatcgacgacgcctgcgcgttctgcggcggcatcaacatcgtcgacgatttcgagcagaacggcgagcgcctgccgcatccgcgttgggacttcgcggtcgaactggccgggcccgccgtcgccgacgtgcgcgccgcgttcgaggtgcagtggcaccggatcgccgccggccacaagcgctacgcgcaatatctgccgcatgacgtcgatggtcccgcgttcgccgcgcgctttcgccgctggatgcgcagccaccgctgggtgaaggcgggcgcgctgcgcgtcgtgaccgagccgagcgtggcgttcgtcgcgcgcgacaatatcgtgaaccgccgggcgatcgagaaggcgtatctcgcggcgatcggccgcgcgcgccagtcgatcctgctcgctaacccttacttcatgccggggcgcaagctgcggcgcgcgctcgccggcgcggcgcgccgcggcgtcgacgtgcggatcctgctcgggcgcaacgagttcgcgtcgctcgatatggcggtgccgttcctatatcatgcattgctgcgctcgggcgtgcgcgttgccgaatacgacaagacgatgctgcacggcaaggtcgcggtgatcgacgatcattgggcgaccgtcggctcgtcgaatctggatgcgctcagcctgatgctgaacaacgaggcgaacgtcgtgctcgtgcgccaccgcgaggagacggccgcgctgcgcgacgcgatcgcggcggcgttcgccgacggccgcgagatcgacccggcgctctacgcggcgcggcccgccgccgagcggtttctgaactggttcgcgtacaacgcgtaccggagtgcgatgaagctgctgacggtcggcggatacgactaa

SEQ ID NO: 14583 - protein, 424 aa, Burkholderia mallei 10399
MSGETRHRLAQLRQMFLQERGSASRLAFTSGNEVRLCDGGAAFFPALIERIDAARERVALETYIFCDDAVGRAVSDALVRAAARGVHVRVITDGIGTERLPLFGTWPDAGVEHRIYNPYLFGRFGFSRTHRKLAVIDDACAFCGGINIVDDFEQNGERLPHPRWDFAVELAGPAVADVRAAFEVQWHRIAAGHKRYAQYLPHDVDGPAFAARFRRWMRSHRWVKAGALRVVTEPSVAFVARDNIVNRRAIEKAYLAAIGRARQSILLANPYFMPGRKLRRALAGAARRGVDVRILLGRNEFASLDMAVPFLYHALLRSGVRVAEYDKTMLHGKVAVIDDHWATVGSSNLDALSLMLNNEANVVLVRHREETAALRDAIAAAFADGREIDPALYAARPAAERFLNWFAYNAYRSAMKLLTVGGYD

SEQ ID NO: 14584 - skipped

SEQ ID NO: 14585 - DNA, 9043 bp, Unknown
  Unknown
actttgatccaacccctccgctgctatagtgcagtcggcttctgacgttcagtgcagccgtcttctgaaaacgacatgtcgcacaagtcctaagttacgcgacaggctgccgccctgcccttttcctggcgttttcttgtcgcgtgttttagtcgcataaagtagaatacttgcgactagaaccggagacattacgccatgaacaagagcgccgccgctggcctgctgggctatgcccgcgtcagcaccgacgaccaggacttgaccaaccaacgggccgaactgcacgcggccggctgcaccaagctgttttccgagaagatcaccggcaccaggcgcgaccgcccggagctggccaggatgcttgaccacctacgccctggcgacgttgtgacagtgaccaggctagaccgcctggcccgcagcacccgcgacctactggacattgccgagcgcatccaggaggccggcgcgggcctgcgtagcctggcagagccgtgggccgacaccaccacgccggccggccgcatggtgttgaccgtgttcgccggcattgccgagttcgagcgttccctaatcatcgaccgcacccggagcgggcgcgaggccgccaaggcccgaggcgtgaagtttggcccccgccctaccctcaccccggcacagatcgcgcacgcccgcgagctgatcgaccaggaaggccgcaccgtgaaagaggcggctgcactgcttggcgtgcatcgctcgaccctgtaccgcgcacttgagcgcagcgaggaagtgacgcccaccgaggccaggcggcgcggtgccttccgtgaggacgcattgaccgaggccgacgccctggcggccgccgagaatgaacgccaagaggaacaagcatgaaaccgcaccaggacggccaggacgaaccgtttttcattaccgaagagatcgaggcggagatgatcgcggccgggtacgtgttcgagccgcccgcgcacgtctcaaccgtgcggctgcatgaaatcctggccggtttgtctgatgccaagctggcggcctggccggccagcttggccgctgaagaaaccgagcgccgccgtctaaaaaggtgatgtgtatttgagtaaaacagcttgcgtcatgcggtcgctgcgtatatgatgcgatgagtaaataaacaaatacgcaaggggaacgcatgaaggttatcgctgtacttaaccagaaaggcgggtcaggcaagacgaccatcgcaacccatctagcccgcgccctgcaactcgccggggccgatgttctgttagtcgattccgatccccagggcagtgcccgcgattgggcggccgtgcgggaagatcaaccgctaaccgttgtcggcatcgaccgcccgacgattgaccgcgacgtgaaggccatcggccggcgcgacttcgtagtgatcgacggagcgccccaggcggcggacttggctgtgtccgcgatcaaggcagccgacttcgtgctgattccggtgcagccaagcccttacgacatatgggccaccgccgacctggtggagctggttaagcagcgcattgaggtcacggatggaaggctacaagcggcctttgtcgtgtcgcgggcgatcaaaggcacgcgcatcggcggtgaggttgccgaggcgctggccgggtacgagctgcccattcttgagtcccgtatcacgcagcgcgtgagctacccaggcactgccgccgccggcacaaccgttcttgaatcagaacccgagggcgacgctgcccgcgaggtccaggcgctggccgctgaaattaaatcaaaactcatttgagttaatgaggtaaagagaaaatgagcaaaagcacaaacacgctaagtgccggccgtccgagcgcacgcagcagcaaggctgcaacgttggccagcctggcagacacgccagccatgaagcgggtcaactttcagttgccggcggaggatcacaccaagctgaagatgtacgcggtacgccaaggcaagaccattaccgagctgctatctgaatacatcgcgcagctaccagagtaaatgagcaaatgaataaatgagtagatgaattttagcggctaaaggaggcggcatggaaaatcaagaacaaccaggcaccgacgccgtggaatgccccatgtgtggaggaacgggcggttggccaggcgtaagcggctgggttgtctgccggccctgcaatggcactggaacccccaagcccgaggaatcggcgtgacggtcgcaaaccatccggcccggtacaaatcggcgcggcgctgggtgatgacctggtggagaagttgaaggccgcgcaggccgcccagcggcaacgcatcgaggcagaagcacgccccggtgaatcgtggcaagcggccgctgatcgaatccgcaaagaatcccggcaaccgccggcagccggtgcgccgtcgattaggaagccgcccaagggcgacgagcaaccagattttttcgttccgatgctctatgacgtgggcacccgcgatagtcgcagcatcatggacgtggccgttttccgtctgtcgaagcgtgaccgacgagctggcgaggtgatccgctacgagcttccagacgggcacgtagaggtttccgcagggccggccggcatggccagtgtgtgggattacgacctggtactgatggcggtttcccatctaaccgaatccatgaaccgataccgggaagggaagggagacaagcccggccgcgtgttccgtccacacgttgcggacgtactcaagttctgccggcgagccgatggcggaaagcagaaagacgacctggtagaaacctgcattcggttaaacaccacgcacgttgccatgcagcgtacgaagaaggccaagaacggccgcctggtgacggtatccgagggtgaagccttgattagccgctacaagatcgtaaagagcgaaaccgggcggccggagtacatcgagatcgagctagctgattggatgtaccgcgagatcacagaaggcaagaacccggacgtgctgacggttcaccccgattactttttgatcgatcccggcatcggccgttttctctaccgcctggcacgccgcgccgcaggcaaggcagaagccagatggttgttcaagacgatctacgaacgcagtggcagcgccggagagttcaagaagttctgtttcaccgtgcgcaagctgatcgggtcaaatgacctgccggagtacgatttgaaggaggaggcggggcaggctggcccgatcctagtcatgcgctaccgcaacctgatcgagggcgaagcatccgccggttcctaatgtacggagcagatgctagggcaaattgccctagcaggggaaaaaggtcgaaaaggtctctttcctgtggatagcacgtacattgggaacccaaagccgtacattgggaaccggaacccgtacattgggaacccaaagccgtacattgggaaccggtcacacatgtaagtgactgatataaaagagaaaaaaggcgatttttccgcctaaaactctttaaaacttattaaaactcttaaaacccgcctggcctgtgcataactgtctggccagcgcacagccgaagagctgcaaaaagcgcctacccttcggtcgctgcgctccctacgccccgccgcttcgcgtcggcctatcgcggccgctggccgctcaaaaatggctggcctacggccaggcaatctaccagggcgcggacaagccgcgccgtcgccactcgaccgccggcgcccacatcaaggcaccctgcctcgcgcgtttcggtgatgacggtgaaaacctctgacacatgcagctcccggagacggtcacagcttgtctgtaagcggatgccgggagcagacaagcccgtcagggcgcgtcagcgggtgttggcgggtgtcggggcgcagccatgacccagtcacgtagcgatagcggagtgtatactggcttaactatgcggcatcagagcagattgtactgagagtgcaccatatgcggtgtgaaataccgcacagatgcgtaaggagaaaataccgcatcaggcgctcttccgcttcctcgctcactgactcgctgcgctcggtcgttcggctgcggcgagcggtatcagctcactcaaaggcggtaatacggttatccacagaatcaggggataacgcaggaaagaacatgtgagcaaaaggccagcaaaaggccaggaaccgtaaaaaggccgcgttgctggcgtttttccataggctccgcccccctgacgagcatcacaaaaatcgacgctcaagtcagaggtggcgaaacccgacaggactataaagataccaggcgtttccccctggaagctccctcgtgcgctctcctgttccgaccctgccgcttaccggatacctgtccgcctttctcccttcgggaagcgtggcgctttctcatagctcacgctgtaggtatctcagttcggtgtaggtcgttcgctccaagctgggctgtgtgcacgaaccccccgttcagcccgaccgctgcgccttatccggtaactatcgtcttgagtccaacccggtaagacacgacttatcgccactggcagcagccactggtaacaggattagcagagcgaggtatgtaggcggtgctacagagttcttgaagtggtggcctaactacggctacactagaaggacagtatttggtatctgcgctctgctgaagccagttaccttcggaaaaagagttggtagctcttgatccggcaaacaaaccaccgctggtagcggtggtttttttgtttgcaagcagcagattacgcgcagaaaaaaaggatctcaagaagatcctttgatcttttctacggggtctgacgctcagtggaacgaaaactcacgttaagggattttggtcatgcattctaggtactaaaacaattcatccagtaaaatataatattttattttctcccaatcaggcttgatccccagtaagtcaaaaaatagctcgacatactgttcttccccgatatcctccctgatcgaccggacgcagaaggcaatgtcataccacttgtccgccctgccgcttctcccaagatcaataaagccacttactttgccatctttcacaaagatgttgctgtctcccaggtcgccgtgggaaaagacaagttcctcttcgggcttttccgtctttaaaaaatcatacagctcgcgcggatctttaaatggagtgtcttcttcccagttttcgcaatccacatcggccagatcgttattcagtaagtaatccaattcggctaagcggctgtctaagctattcgtatagggacaatccgatatgtcgatggagtgaaagagcctgatgcactccgcatacagctcgataatcttttcagggctttgttcatcttcatactcttccgagcaaaggacgccatcggcctcactcatgagcagattgctccagccatcatgccgttcaaagtgcaggacctttggaacaggcagctttccttccagccatagcatcatgtccttttcccgttccacatcataggtggtccctttataccggctgtccgtcatttttaaatataggttttcattttctcccaccagcttatataccttagcaggagacattccttccgtatcttttacgcagcggtatttttcgatcagttttttcaattccggtgatattctcattttagccatttattatttccttcctcttttctacagtatttaaagataccccaagaagctaattataacaagacgaactccaattcactgttccttgcattctaaaaccttaaataccagaaaacagctttttcaaagttgttttcaaagttggcgtataacatagtatcgacggagccgattttgaaaccgcggtgatcacaggcagcaacgctctgtcatcgttacaatcaacatgctaccctccgcgagatcatccgtgtttcaaacccggcagcttagttgccgttcttccgaatagcatcggtaacatgagcaaagtctgccgccttacaacggctctcccgctgacgccgtcccggactgatgggctgcctgtatcgagtggtgattttgtgccgagctgccggtcggggagctgttggctggctggtggcaggatatattgtggtgtaaacaaattgacgcttagacaacttaataacacattgcggacgtttttaatgtactgaattaacgccgaattaagcttggacaatcagtaaattgaacggagaatattattcataaaaatacgatagtaacgggtgatatattcattagaatgaaccgaaaccggcggtaaggatctgagctacacatgctcaggttttttacaacgtgcacaacagaattgaaagcaaatatcatgcgatcataggcgtctcgcatatctcattaaagcagggcatgccggtcgagtcaaatctcggtgacgggcaggaccggacggggcggtaccggcaggctgaagtccagctgccagaaacccacgtcatgccagttcccgtgcttgaagccggccgcccgcagcatgccgcggggggcatatccgagcgcctcgtgcatgcgcacgctcgggtcgttgggcagcccgatgacagcgaccacgctcttgaagccctgtgcctccagggacttcagcaggtgggtgtagagcgtggagcccagtcccgtccgctggtggcggggggagacgtacacggtcgactcggccgtccagtcgtaggcgttgcgtgccttccaggggcccgcgtaggcgatgccggcgacctcgccgtccacctcggcgacgagccagggatagcgctcccgcagacggacgaggtcgtccgtccactcctgcggttcctgcggctcggtacggaagttgaccgtgcttgtctcgatgtagtggttgacgatggtgcagaccgccggcatgtccgcctcggtggcacggcggatgtcggccgggcgtcgttctgggctcatggtagactcgacggatccacgtgtggaagatatgaatttttttgagaaactagataagattaatgaatatcggtgttttggttttttcttgtggccgtctttgtttatattgagatttttcaaatcagtgcgcaagacgtgacgtaagtatccgagtcagtttttatttttctactaatttggtcgaagctttgggcggatcctctagattcgacggtatcgataagctcgcggatccctgaaagcgacgttggatgttaacatctacaaattgccttttcttatcgaccatgtacgtaagcgcttacgtttttggtggacccttgaggaaactggtagctgttgtgggcctgtggtctcaagatggatcattaatttccaccttcacctacgatggggggcatcgcaccggtgagtaatattgtacggctaagagcgaatttggcctgtaggatccctgaaagcgacgttggatgttaacatctacaaattgccttttcttatcgaccatgtacgtaagcgcttacgtttttggtggacccttgaggaaactggtagctgttgtgggcctgtggtctcaagatggatcattaatttccaccttcacctacgatggggggcatcgcaccggtgagtaatattgtacggctaagagcgaatttggcctgtaggatccctgaaagcgacgttggatgttaacatctacaaattgccttttcttatcgaccatgtacgtaagcgcttacgtttttggtggacccttgaggaaactggtagctgttgtgggcctgtggtctcaagatggatcattaatttccaccttcacctacgatggggggcatcgcaccggtgagtaatattgtacggctaagagcgaatttggcctgtaggatccgcgagctggtcaatcccattgcttttgaagcagctcaacattgatctctttctcgatcgagggagatttttcaaatcagtgcgcaagacgtgacgtaagtatccgagtcagtttttatttttctactaatttggtcgtttatttcggcgtgtaggacatggcaaccgggcctgaatttcgcgggtattctgtttctattccaactttttcttgatccgcagccattaacgacttttgaatagatacgctgacacgccaagcctcgctagtcaaaagtgtaccaaacaacgctttacagcaagaacggaatgcgcgtgacgctcgcggtgacgccatttcgccttttcagaaatggataaatagccttgcttcctattatatcttcccaaattaccaatacattacactagcatctgaatttcataaccaatctcgatacaccaaatcgaagatctcccgggttgctcttccatggcaatgattaattaacgaagagcaagagctcgaatttccccgatcgttcaaacatttggcaataaagtttcttaagattgaatcctgttgccggtcttgcgatgattatcatataatttctgttgaattacgttaagcatgtaataattaacatgtaatgcatgacgttatttatgagatgggtttttatgattagagtcccgcaattatacatttaatacgcgatagaaaacaaaatatagcgcgcaaactaggataaattatcgcgcgcggtgtcatctatgttactagatcgggaattggcatgcaagcttggcactggccgtcgttttacaacgtcgtgactgggaaaaccctggcgttacccaacttaatcgccttgcagcacatccccctttcgccagctggcgtaatagcgaagaggcccgcaccgatcgcccttcccaacagttgcgcagcctgaatggcgaatgctagagcagcttgagcttggatcagattgtcgtttcccgccttcagtttaaactatcagtgtttgacaggatatattggcgggtaaacctaagagaaaagagcgtttattagaataacggatatttaaaagggcgtgaaaaggtttatccgttcgtccatttgtatgtgcatgccaaccacagggttcccctcgggatcaaagt

SEQ ID NO: 14586 - DNA, 9041 bp, Unknown
  Unknown
actttgatccaacccctccgctgctatagtgcagtcggcttctgacgttcagtgcagccgtcttctgaaaacgacatgtcgcacaagtcctaagttacgcgacaggctgccgccctgcccttttcctggcgttttcttgtcgcgtgttttagtcgcataaagtagaatacttgcgactagaaccggagacattacgccatgaacaagagcgccgccgctggcctgctgggctatgcccgcgtcagcaccgacgaccaggacttgaccaaccaacgggccgaactgcacgcggccggctgcaccaagctgttttccgagaagatcaccggcaccaggcgcgaccgcccggagctggccaggatgcttgaccacctacgccctggcgacgttgtgacagtgaccaggctagaccgcctggcccgcagcacccgcgacctactggacattgccgagcgcatccaggaggccggcgcgggcctgcgtagcctggcagagccgtgggccgacaccaccacgccggccggccgcatggtgttgaccgtgttcgccggcattgccgagttcgagcgttccctaatcatcgaccgcacccggagcgggcgcgaggccgccaaggcccgaggcgtgaagtttggcccccgccctaccctcaccccggcacagatcgcgcacgcccgcgagctgatcgaccaggaaggccgcaccgtgaaagaggcggctgcactgcttggcgtgcatcgctcgaccctgtaccgcgcacttgagcgcagcgaggaagtgacgcccaccgaggccaggcggcgcggtgccttccgtgaggacgcattgaccgaggccgacgccctggcggccgccgagaatgaacgccaagaggaacaagcatgaaaccgcaccaggacggccaggacgaaccgtttttcattaccgaagagatcgaggcggagatgatcgcggccgggtacgtgttcgagccgcccgcgcacgtctcaaccgtgcggctgcatgaaatcctggccggtttgtctgatgccaagctggcggcctggccggccagcttggccgctgaagaaaccgagcgccgccgtctaaaaaggtgatgtgtatttgagtaaaacagcttgcgtcatgcggtcgctgcgtatatgatgcgatgagtaaataaacaaatacgcaaggggaacgcatgaaggttatcgctgtacttaaccagaaaggcgggtcaggcaagacgaccatcgcaacccatctagcccgcgccctgcaactcgccggggccgatgttctgttagtcgattccgatccccagggcagtgcccgcgattgggcggccgtgcgggaagatcaaccgctaaccgttgtcggcatcgaccgcccgacgattgaccgcgacgtgaaggccatcggccggcgcgacttcgtagtgatcgacggagcgccccaggcggcggacttggctgtgtccgcgatcaaggcagccgacttcgtgctgattccggtgcagccaagcccttacgacatatgggccaccgccgacctggtggagctggttaagcagcgcattgaggtcacggatggaaggctacaagcggcctttgtcgtgtcgcgggcgatcaaaggcacgcgcatcggcggtgaggttgccgaggcgctggccgggtacgagctgcccattcttgagtcccgtatcacgcagcgcgtgagctacccaggcactgccgccgccggcacaaccgttcttgaatcagaacccgagggcgacgctgcccgcgaggtccaggcgctggccgctgaaattaaatcaaaactcatttgagttaatgaggtaaagagaaaatgagcaaaagcacaaacacgctaagtgccggccgtccgagcgcacgcagcagcaaggctgcaacgttggccagcctggcagacacgccagccatgaagcgggtcaactttcagttgccggcggaggatcacaccaagctgaagatgtacgcggtacgccaaggcaagaccattaccgagctgctatctgaatacatcgcgcagctaccagagtaaatgagcaaatgaataaatgagtagatgaattttagcggctaaaggaggcggcatggaaaatcaagaacaaccaggcaccgacgccgtggaatgccccatgtgtggaggaacgggcggttggccaggcgtaagcggctgggttgtctgccggccctgcaatggcactggaacccccaagcccgaggaatcggcgtgacggtcgcaaaccatccggcccggtacaaatcggcgcggcgctgggtgatgacctggtggagaagttgaaggccgcgcaggccgcccagcggcaacgcatcgaggcagaagcacgccccggtgaatcgtggcaagcggccgctgatcgaatccgcaaagaatcccggcaaccgccggcagccggtgcgccgtcgattaggaagccgcccaagggcgacgagcaaccagattttttcgttccgatgctctatgacgtgggcacccgcgatagtcgcagcatcatggacgtggccgttttccgtctgtcgaagcgtgaccgacgagctggcgaggtgatccgctacgagcttccagacgggcacgtagaggtttccgcagggccggccggcatggccagtgtgtgggattacgacctggtactgatggcggtttcccatctaaccgaatccatgaaccgataccgggaagggaagggagacaagcccggccgcgtgttccgtccacacgttgcggacgtactcaagttctgccggcgagccgatggcggaaagcagaaagacgacctggtagaaacctgcattcggttaaacaccacgcacgttgccatgcagcgtacgaagaaggccaagaacggccgcctggtgacggtatccgagggtgaagccttgattagccgctacaagatcgtaaagagcgaaaccgggcggccggagtacatcgagatcgagctagctgattggatgtaccgcgagatcacagaaggcaagaacccggacgtgctgacggttcaccccgattactttttgatcgatcccggcatcggccgttttctctaccgcctggcacgccgcgccgcaggcaaggcagaagccagatggttgttcaagacgatctacgaacgcagtggcagcgccggagagttcaagaagttctgtttcaccgtgcgcaagctgatcgggtcaaatgacctgccggagtacgatttgaaggaggaggcggggcaggctggcccgatcctagtcatgcgctaccgcaacctgatcgagggcgaagcatccgccggttcctaatgtacggagcagatgctagggcaaattgccctagcaggggaaaaaggtcgaaaaggtctctttcctgtggatagcacgtacattgggaacccaaagccgtacattgggaaccggaacccgtacattgggaacccaaagccgtacattgggaaccggtcacacatgtaagtgactgatataaaagagaaaaaaggcgatttttccgcctaaaactctttaaaacttattaaaactcttaaaacccgcctggcctgtgcataactgtctggccagcgcacagccgaagagctgcaaaaagcgcctacccttcggtcgctgcgctccctacgccccgccgcttcgcgtcggcctatcgcggccgctggccgctcaaaaatggctggcctacggccaggcaatctaccagggcgcggacaagccgcgccgtcgccactcgaccgccggcgcccacatcaaggcaccctgcctcgcgcgtttcggtgatgacggtgaaaacctctgacacatgcagctcccggagacggtcacagcttgtctgtaagcggatgccgggagcagacaagcccgtcagggcgcgtcagcgggtgttggcgggtgtcggggcgcagccatgacccagtcacgtagcgatagcggagtgtatactggcttaactatgcggcatcagagcagattgtactgagagtgcaccatatgcggtgtgaaataccgcacagatgcgtaaggagaaaataccgcatcaggcgctcttccgcttcctcgctcactgactcgctgcgctcggtcgttcggctgcggcgagcggtatcagctcactcaaaggcggtaatacggttatccacagaatcaggggataacgcaggaaagaacatgtgagcaaaaggccagcaaaaggccaggaaccgtaaaaaggccgcgttgctggcgtttttccataggctccgcccccctgacgagcatcacaaaaatcgacgctcaagtcagaggtggcgaaacccgacaggactataaagataccaggcgtttccccctggaagctccctcgtgcgctctcctgttccgaccctgccgcttaccggatacctgtccgcctttctcccttcgggaagcgtggcgctttctcatagctcacgctgtaggtatctcagttcggtgtaggtcgttcgctccaagctgggctgtgtgcacgaaccccccgttcagcccgaccgctgcgccttatccggtaactatcgtcttgagtccaacccggtaagacacgacttatcgccactggcagcagccactggtaacaggattagcagagcgaggtatgtaggcggtgctacagagttcttgaagtggtggcctaactacggctacactagaaggacagtatttggtatctgcgctctgctgaagccagttaccttcggaaaaagagttggtagctcttgatccggcaaacaaaccaccgctggtagcggtggtttttttgtttgcaagcagcagattacgcgcagaaaaaaaggatctcaagaagatcctttgatcttttctacggggtctgacgctcagtggaacgaaaactcacgttaagggattttggtcatgcattctaggtactaaaacaattcatccagtaaaatataatattttattttctcccaatcaggcttgatccccagtaagtcaaaaaatagctcgacatactgttcttccccgatatcctccctgatcgaccggacgcagaaggcaatgtcataccacttgtccgccctgccgcttctcccaagatcaataaagccacttactttgccatctttcacaaagatgttgctgtctcccaggtcgccgtgggaaaagacaagttcctcttcgggcttttccgtctttaaaaaatcatacagctcgcgcggatctttaaatggagtgtcttcttcccagttttcgcaatccacatcggccagatcgttattcagtaagtaatccaattcggctaagcggctgtctaagctattcgtatagggacaatccgatatgtcgatggagtgaaagagcctgatgcactccgcatacagctcgataatcttttcagggctttgttcatcttcatactcttccgagcaaaggacgccatcggcctcactcatgagcagattgctccagccatcatgccgttcaaagtgcaggacctttggaacaggcagctttccttccagccatagcatcatgtccttttcccgttccacatcataggtggtccctttataccggctgtccgtcatttttaaatataggttttcattttctcccaccagcttatataccttagcaggagacattccttccgtatcttttacgcagcggtatttttcgatcagttttttcaattccggtgatattctcattttagccatttattatttccttcctcttttctacagtatttaaagataccccaagaagctaattataacaagacgaactccaattcactgttccttgcattctaaaaccttaaataccagaaaacagctttttcaaagttgttttcaaagttggcgtataacatagtatcgacggagccgattttgaaaccgcggtgatcacaggcagcaacgctctgtcatcgttacaatcaacatgctaccctccgcgagatcatccgtgtttcaaacccggcagcttagttgccgttcttccgaatagcatcggtaacatgagcaaagtctgccgccttacaacggctctcccgctgacgccgtcccggactgatgggctgcctgtatcgagtggtgattttgtgccgagctgccggtcggggagctgttggctggctggtggcaggatatattgtggtgtaaacaaattgacgcttagacaacttaataacacattgcggacgtttttaatgtactgaattaacgccgaattaagcttggacaatcagtaaattgaacggagaatattattcataaaaatacgatagtaacgggtgatatattcattagaatgaaccgaaaccggcggtaaggatctgagctacacatgctcaggttttttacaacgtgcacaacagaattgaaagcaaatatcatgcgatcataggcgtctcgcatatctcattaaagcagggcatgccggtcgagtcaaatctcggtgacgggcaggaccggacggggcggtaccggcaggctgaagtccagctgccagaaacccacgtcatgccagttcccgtgcttgaagccggccgcccgcagcatgccgcggggggcatatccgagcgcctcgtgcatgcgcacgctcgggtcgttgggcagcccgatgacagcgaccacgctcttgaagccctgtgcctccagggacttcagcaggtgggtgtagagcgtggagcccagtcccgtccgctggtggcggggggagacgtacacggtcgactcggccgtccagtcgtaggcgttgcgtgccttccaggggcccgcgtaggcgatgccggcgacctcgccgtccacctcggcgacgagccagggatagcgctcccgcagacggacgaggtcgtccgtccactcctgcggttcctgcggctcggtacggaagttgaccgtgcttgtctcgatgtagtggttgacgatggtgcagaccgccggcatgtccgcctcggtggcacggcggatgtcggccgggcgtcgttctgggctcatggtagactcgacggatccacgtgtggaagatatgaatttttttgagaaactagataagattaatgaatatcggtgttttggttttttcttgtggccgtctttgtttatattgagatttttcaaatcagtgcgcaagacgtgacgtaagtatccgagtcagtttttatttttctactaatttggtcgaagctttgggcggatcctctagattcgacggtatcgataagctcgcggatccctgaaagcgacgttggatgttaacatctacaaattgccttttcttatcgaccatgtacgtaagcgcttacgtttttggtggacccttgaggaaactggtagctgttgtgggcctgtggtctcaagatggatcattaatttccaccttcacctacgatggggggcatcgcaccggtgagtaatattgtacggctaagagcgaatttggcctgtaggatccctgaaagcgacgttggatgttaacatctacaaattgccttttcttatcgaccatgtacgtaagcgcttacgtttttggtggacccttgaggaaactggtagctgttgtgggcctgtggtctcaagatggatcattaatttccaccttcacctacgatggggggcatcgcaccggtgagtaatattgtacggctaagagcgaatttggcctgtaggatccctgaaagcgacgttggatgttaacatctacaaattgccttttcttatcgaccatgtacgtaagcgcttacgtttttggtggacccttgaggaaactggtagctgttgtgggcctgtggtctcaagatggatcattaatttccaccttcacctacgatggggggcatcgcaccggtgagtaatattgtacggctaagagcgaatttggcctgtaggatccgcgagctggtcaatcccattgcttttgaagcagctcaacattgatctctttctcgatcgagggagatttttcaaatcagtgcgcaagacgtgacgtaagtatccgagtcagtttttatttttctactaatttggtcgtttatttcggcgtgtaggacatggcaaccgggcctgaatttcgcgggtattctgtttctattccaactttttcttgatccgcagccattaacgacttttgaatagatacgctgacacgccaagcctcgctagtcaaaagtgtaccaaacaacgctttacagcaagaacggaatgcgcgtgacgctcgcggtgacgccatttcgccttttcagaaatggataaatagccttgcttcctattatatcttcccaaattaccaatacattacactagcatctgaatttcataaccaatctcgatacaccaaatcgaagatctccctggaattccagctgaccacccatggcaattcccggggatcagctcgaatttccccgatcgttcaaacatttggcaataaagtttcttaagattgaatcctgttgccggtcttgcgatgattatcatataatttctgttgaattacgttaagcatgtaataattaacatgtaatgcatgacgttatttatgagatgggtttttatgattagagtcccgcaattatacatttaatacgcgatagaaaacaaaatatagcgcgcaaactaggataaattatcgcgcgcggtgtcatctatgttactagatcgggaattggcatgcaagcttggcactggccgtcgttttacaacgtcgtgactgggaaaaccctggcgttacccaacttaatcgccttgcagcacatccccctttcgccagctggcgtaatagcgaagaggcccgcaccgatcgcccttcccaacagttgcgcagcctgaatggcgaatgctagagcagcttgagcttggatcagattgtcgtttcccgccttcagtttaaactatcagtgtttgacaggatatattggcgggtaaacctaagagaaaagagcgtttattagaataacggatatttaaaagggcgtgaaaaggtttatccgttcgtccatttgtatgtgcatgccaaccacagggttcccctcgggatcaaagt

SEQ ID NO: 14587 - DNA, 4458 bp, Unknown
  Unknown
acaggaaacagctatgaccatgattacgccaagctatcgtttaaaccttaaggcgatcgcgctgaggcggaccgcacgtggaattagcttggcgcgccaattcccgatctagtaacatagatgacaccgcgcgcgataatttatcctagtttgcgcgctatattttgttttctatcgcgtattaaatgtataattgcgggactctaatcataaaaacccatctcataaataacgtcatgcattacatgttaattattacatgcttaacgtaattcaacagaaattatatgataatcatcgcaagaccggcaacaggattcaatcttaagaaactttattgccaaatgtttgaacgatcggggaaattcgagctcgggctcggcgtccgcggatcattgacgcgtaggagcgacccgggcgtaccttggtgaactaccgatgatcgtaagagcttacagacggtgccttatataggcagagcgtcggaaggggggtggtgtcacacacgcactgcgatccttgcttacaagctaagcaaaggcatcgtggcagacaaggaataaagtggcacaggtgccaaaagaaagtggacagcacacttgtccgaaaagcacacaataatacaactcagtggagcatccactgaatgggcccagtactctccgctgcggtcatccctgacgtcaatgcctcctcaatcgtcattgcttacgtcttggagatctagcacatcttctgcggctactggcgacatagcccttggtgtggcctggtattcctcgaactcctgctcttctatcttcagcttggtgacttccttcataagttcctcctccattgtttgcacgccaccggtcttcagaacttcaagattcttgagaaattcatcaattctgtcttgaatgtgttcttcaatgagatctgcccagtaccagcaatggcatttgttcattgcgcacttgaagaatttccttcctgggttggcagatgttctggacactaactgaattgcaggcttcctgcatgcacagagtagaactggttcctctgttagcataaaagcttgctctgttctttcgaacatgtccttcttgaatgtggggaatggatccagaattttgtttccccattctctgagttgctcagtgtatggatgatctggataaggaattacttcccttatggcttgtgtaagcaggatcatctcttccgttggttcattctgagctaatttggctttgagcctggacaagatgtcagctaaaccattgctcttcccttttatgtgttcaatgactatctctggtcctgcaccagtgatgtagtccatgaacctgatccatctgatctcagaaggcttgtgttcagcactcttgttgtagaacctttcgattgcactactgtcagttctgactgtgatctctcttttgtccaagtagaacaatctcatcttttctaagccattcataaccccatagatttctgcatcacaggttccttttggcttatcaaattttccactggcatacctacagatttgctctgtatttcttgggtctgccttgtttttcttccacttgcatactgctccccatccagttgcacatgcatctgtttcaatgataatgtatgcatcttctggtggaatagtgagatttggaagcgttctcaccattgtcttgatcctattgatcagcttccaatcttctgaattgagccttcgctcacctttctctgaggtctttggatataatgggccaagaagcttgcccatatctttgatgtggtttctggcatagttcagtgttgctagccaggattaattaaaggcctgttaacagcgctgggcccgataattcactggccgtcgttttacaacgtcgtgactgggaaaaccctggcgttacccaacttaatcgccttgcagcacatccccctttcgccagctggcgtaatagcgaagaggcccgcaccgatcgcccttcccaacagttgcgcagcctgaatggcgaatggcgcctgatgcggtattttctccttacgcatctgtgcggtatttcacaccgcatatggtgcactctcagtacaatctgctctgatgccgcatagttaagccagccccgacacccgccaacacccgctgacgcgccctgacgggcttgtctgctcccggcatccgcttacagacaagctgtgaccgtctccgggagctgcatgtgtcagaggttttcaccgtcatcaccgaaacgcgcgagacgaaagggcctcgtgatacgcctatttttataggttaatgtcatgataataatggtttcttagacgtcaggtggcacttttcggggaaatgtgcgcggaacccctatttgtttatttttctaaatacattcaaatatgtatccgctcatgagacaataaccctgataaatgcttcaataatattgaaaaaggaagagtatgagtattcaacatttccgtgtcgcccttattcccttttttgcggcattttgccttcctgtttttgctcacccagaaacgctggtgaaagtaaaagatgctgaagatcagttgggtgcacgagtgggttacatcgaactggatctcaacagcggtaagatccttgagagttttcgccccgaagaacgttttccaatgatgagcacttttaaagttctgctatgtggcgcggtattatcccgtattgacgccgggcaagagcaactcggtcgccgcatacactattctcagaatgacttggttgagtactcaccagtcacagaaaagcatcttacggatggcatgacagtaagagaattatgcagtgctgccataaccatgagtgataacactgcggccaacttacttctgacaacgatcggaggaccgaaggagctaaccgcttttttgcacaacatgggggatcatgtaactcgccttgatcgttgggaaccggagctgaatgaagccataccaaacgacgagcgtgacaccacgatgcctgtagcaatggcaacaacgttgcgcaaactattaactggcgaactacttactctagcttcccggcaacaattaatagactggatggaggcggataaagttgcaggaccacttctgcgctcggcccttccggctggctggtttattgctgataaatctggagccggtgagcgtgggtctcgcggtatcattgcagcactggggccagatggtaagccctcccgtatcgtagttatctacacgacggggagtcaggcaactatggatgaacgaaatagacagatcgctgagataggtgcctcactgattaagcattggtaactgtcagaccaagtttactcatatatactttagattgatttaaaacttcatttttaatttaaaaggatctaggtgaagatcctttttgataatctcatgaccaaaatcccttaacgtgagttttcgttccactgagcgtcagaccccgtagaaaagatcaaaggatcttcttgagatcctttttttctgcgcgtaatctgctgcttgcaaacaaaaaaaccaccgctaccagcggtggtttgtttgccggatcaagagctaccaactctttttccgaaggtaactggcttcagcagagcgcagataccaaatactgttcttctagtgtagccgtagttaggccaccacttcaagaactctgtagcaccgcctacatacctcgctctgctaatcctgttaccagtggctgctgccagtggcgataagtcgtgtcttaccgggttggactcaagacgatagttaccggataaggcgcagcggtcgggctgaacggggggttcgtgcacacagcccagcttggagcgaacgacctacaccgaactgagatacctacagcgtgagctatgagaaagcgccacgcttcccgaagggagaaaggcggacaggtatccggtaagcggcagggtcggaacaggagagcgcacgagggagcttccagggggaaacgcctggtatctttatagtcctgtcgggtttcgccacctctgacttgagcgtcgatttttgtgatgctcgtcaggggggcggagcctatggaaaaacgccagcaacgcggcctttttacggttcctggccttttgctggccttttgctcacatgttctttcctgcgttatcccctgattctgtggataaccgtattaccgcctttgagtgagctgataccgctcgccgcagccgaacgaccgagcgcagcgagtcagtgagcgaggaagcggaagagcgcccaatacgcaaaccgcctctccccgcgcgttggccgattcattaatgcagctggcacgacaggtttcccgactggaaagcgggcagtgagcgcaacgcaattaatgtgagttagctcactcattaggcaccccaggctttacactttatgcttccggctcgtatgttgtgtggaattgtgagcggataacaatttcac

SEQ ID NO: 14588 - DNA, 11449 bp, Unknown
  Unknown
gtttacccgccaatatatcctgtcaaacactgatagtttgtggaattcgagctcggtacccggggatcctctagagtcgacctgcaggcatgcaagctttgcagtgcagcgtgacccggtcgtgcccctctctagagataatgagcattgcatgtctaagttataaaaaattaccacatattttttttgtcacacttgtttgaagtgcagtttatctatctttatacatatatttaaactttactctacgaataatataatctatagtactacaataatatcagtgttttagagaatcatataaatgaacagttagacatggtctaaaggacaattgagtattttgacaacaggactctacagttttatctttttagtgtgcatgtgttctcctttttttttgcaaatagcttcacctatataatacttcatccattttattagtacatccatttagggtttagggttaatggtttttatagactaatttttttagtacatctattttattctattttagcctctaaattaagaaaactaaaactctattttagtttttttatttaatagtttagatataaaatagaataaaataaagtgactaaaaattaaacaaataccctttaagaaattaaaaaaactaaggaaacatttttcttgtttcgagtagataatgccagcctgttaaacgccgtcgacgagtctaacggacaccaaccagcgaaccagcagcgtcgcgtcgggccaagcgaagcagacggcacggcatctctgtcgctgcctctggacccctctcgagagttccgctccaccgttggacttgctccgctgtcggcatccagaaattgcgtggcggagcggcagacgtgagccggcacggcaggcggcctcctcctcctctcacggcaccggcagctacgggggattcctttcccaccgctccttcgctttcccttcctcgcccgccgtaataaatagacaccccctccacaccctctttccccaacctcgtgttgttcggagcgcacacacacacaaccagatctcccccaaatccacccgtcggcacctccgcttcaaggtacgccgctcgtcctccccccccccccccctctctaccttctctagatcggcgttccggtccatggttagggcccggtagttctacttctgttcatgtttgtgttagatccgtgtttgtgttagatccgtgctgctagcgttcgtacacggatgcgacctgtacgtcagacacgttctgattgctaacttgccagtgtttctctttggggaatcctgggatggctctagccgttccgcagacgggatcgatttcatgattttttttgtttcgttgcatagggtttggtttgcccttttcctttatttcaatatatgccgtgcacttgtttgtcgggtcatcttttcatgcttttttttgtcttggttgtgatgatgtggtctggttgggcggtcgttctagatcggagtagaattctgtttcaaactacctggtggatttattaattttggatctgtatgtgtgtgccatacatattcatagttacgaattgaagatgatggatggaaatatcgatctaggataggtatacatgttgatgcgggttttactgatgcatatacagagatgctttttgttcgcttggttgtgatgatgtggtgtggttgggcggtcgttcattcgttctagatcggagtagaatactgtttcaaactacctggtgtatttattaattttggaactgtatgtgtgtgtcatacatcttcatagttacgagtttaagatggatggaaatatcgatctaggataggtatacatgttgatgtgggttttactgatgcatatacatgatggcatatgcagcatctattcatatgctctaaccttgagtacctatctattataataaacaagtatgttttataattatttcgatcttgatatacttggatgatggcatatgcagcagctatatgtggatttttttagccctgccttcatacgctatttatttgcttggtactgtttcttttgtcgatgctcaccctgttgtttggtgttacttctgcagggtacccccggggatccactagttctagaaaccatggccaccgccgccgccgcgtctaccgcgctcactggcgccactaccgctgcgcccaaggcgaggcgccgggcgcacctcctggccacccgccgcgccctcgccgcgcccatcaggtgctcagcggcgtcacccgccatgccgatggctcccccggccaccccgctccggccgtggggccccaccgatccccgcaagggcgccgacatcctcgtcgagtccctcgagcgctgcggcgtccgcgacgtcttcgcctaccccggcggcgcgtccatggagatccaccaggcactcacccgctcccccgtcatcgccaaccacctcttccgccacgagcaaggggaggcctttgcggcctccggctacgcgcgctcctcgggccgcgtcggcgtctgcatcgccacctccggccccggcgccaccaaccttgtctccgcgctcgccgacgcgctgctcgattccgtccccatggtcgccatcacgggacaggtgccgcgacgcatgattggcaccgacgccttccaggagacgcccatcgtcgaggtcacccgctccatcaccaagcacaactacctggtcctcgacgtcgacgacatcccccgcgtcgtgcaggaggctttcttcctcgcctcctctggtcgaccggggccggtgcttgtcgacatccccaaggacatccagcagcagatggcggtgcctgtctgggacaagcccatgagtctgcctgggtacattgcgcgccttcccaagccccctgcgactgagttgcttgagcaggtgctgcgtcttgttggtgaatcccggcgccctgttctttatgttggcggtggctgcgcagcatctggtgaggagttgcgacgctttgtggagctgactggaatcccggtcacaactactcttatgggcctcggcaacttccccagcgacgacccactgtctctgcgcatgctaggtatgcatggcacggtgtatgcaaattatgcagtggataaggccgatctgttgcttgcacttggtgtgcggtttgatgatcgtgtgacagggaagattgaggcttttgcaagcagggctaagattgtgcacgttgatattgatccggctgagattggcaagaacaagcagccacatgtgtccatctgtgcagatgttaagcttgctttgcagggcatgaatgctcttcttgaaggaagcacatcaaagaagagctttgactttggctcatggaacgatgagttggatcagcagaagagggaattcccccttgggtataaaacatctaatgaggagatccagccacaatatgctattcaggttcttgatgagctgacgaaaggcgaggccatcatcggcacaggtgttgggcagcaccagatgtgggcggcacagtactacacttacaagcggccaaggcagtggttgtcttcagctggtcttggggctatgggatttggtttgccggctgctgctggtgcttctgtggccaacccaggtgttactgttgttgacatcgatggagatggtagctttctcatgaacgttcaggagctagctatgatccgaattgagaacctcccggtgaaggtctttgtgctaaacaaccagcacctggggatggtggtgcagtgggaggacaggttctataaggccaacagagcgcacacatacttgggaaacccagagaatgaaagtgagatatatccagatttcgtgacgatcgccaaagggttcaacattccagcggtccgtgtgacaaagaagaacgaagtccgcgcagcgataaagaagatgctcgagactccagggccgtacctcttggatataatcgtcccacaccaggagcatgtgttgcctatgatccctaatggtggggctttcaaggatatgatcctggatggtgatggcaggactgtgtactgatctaaaatccagcaagcaactgatctaaaatccagcaagcaccgcctccctgctagtacaagggtgatatgtttttatctgtgtgatgttctcctgtattctatctttttttgtaggccgtcagctatctgttatggtaatcctatgtagcttccgaccttgtaattgtgtagtctgttgttttccttctggcatgtgtcataagagatcatttaagtgccttttgctacatataaataagataataagcactgctatgcagtggttctgaattggcttctgttgccaaatttaagtgtccaactggtccttgcttttgttttcgctatttttttccttttttagttattattatattggtaatttcaactcaacatatgatgtatggaataatgctagggctgcaatttcaaactattttacaaaccagaatggcattttcgtggtttgaggggagtgaaaaaaaatgaggcatttgactgaattagttacctgatccattttcgtggtttggatcattggaattaaattccattctaataatagtaattttggcatatatcaattaagttaattcggttttatgcaaaatatatttgtatactattattatcaagatgtcggagatatttatatgctacatttttactatacaggagtgagatgaagagtgtcatgtaagttacacagtagaaacaaattctattaatgcataaaatcatttccatcatccaccctatgaatttgagatagacctatatctaaactttgaaaagtggttgaatatcaaattccaaattaaataagttattttattgagtgaattctaatttctctaaaacgaagggatctaaacgccctctaaagctaatttggaaactcaaactttcttagcattggaggggattgagaaaaaatattaattcattttcatctcaatcattcaatctccaaagagatttgagttccttattagtctgttccatgcatcaaatcggctcaatgtgtcattatttgccatgacgattgacgagttgttctggggcctagcgctttccacgccgatgtgctggggcctggtcctggagaagacagcttgatatttaaagctatcaattgtttcaattgattcccacttcatttttctaaatgtagaaaacggtgacgtataagaaaaagaatgaattaggacttttattccgtacactaatctagagcggccccttaaggcgctgcgatcgcgttaacagcttgctgaggaggcctcggaccgttaattaacacgtgggcgcgccactagtcaattcagtacattaaaaacgtccgcaatgtgttattaagttgtctaagcgtcaatttgtttacaccacaatatatcctgccaccagccagccaacagctccccgaccggcagctcggcacaaaatcaccactcgatacaggcagcccatcagtccgggacggcgtcagcgggagagccgttgtaaggcggcagactttgctcatgttaccgatgctattcggaagaacggcaactaagctgccgggtttgaaacacggatgatctcgcggagggtagcatgttgattgtaacgatgacagagcgttgctgcctgtgatcaaatatcatctccctcgcagagatccgaattatcagccttcttattcatttctcgcttaaccgtgacaggctgtcgatcttgagaactatgccgacataataggaaatcgctggataaagccgctgaggaagctgagtggcgctatttctttagaagtgaacgttgacgatcgtcgaccgtaccccgatgaattaattcggacgtacgttctgaacacagctggatacttacttgggcgattgtcatacatgacatcaacaatgtacccgtttgtgtaaccgtctcttggaggttcgtatgacactagtggttcccctcagcttgcgactagatgttgaggcctaacattttattagagagcaggctagttgcttagatacatgatcttcaggccgttatctgtcagggcaagcgaaaattggccatttatgacgaccaatgccccgcagaagctcccatctttgccgccatagacgccgcgccccccttttggggtgtagaacatccttttgccagatgtggaaaagaagttcgttgtcccattgttggcaatgacgtagtagccggcgaaagtgcgagacccatttgcgctatatataagcctacgatttccgttgcgactattgtcgtaattggatgaactattatcgtagttgctctcagagttgtcgtaatttgatggactattgtcgtaattgcttatggagttgtcgtagttgcttggagaaatgtcgtagttggatggggagtagtcatagggaagacgagcttcatccactaaaacaattggcaggtcagcaagtgcctgccccgatgccatcgcaagtacgaggcttagaaccaccttcaacagatcgcgcatagtcttccccagctctctaacgcttgagttaagccgcgccgcgaagcggcgtcggcttgaacgaattgttagacattatttgccgactaccttggtgatctcgcctttcacgtagtgaacaaattcttccaactgatctgcgcgcgaggccaagcgatcttcttgtccaagataagcctgcctagcttcaagtatgacgggctgatactgggccggcaggcgctccattgcccagtcggcagcgacatccttcggcgcgattttgccggttactgcgctgtaccaaatgcgggacaacgtaagcactacatttcgctcatcgccagcccagtcgggcggcgagttccatagcgttaaggtttcatttagcgcctcaaatagatcctgttcaggaaccggatcaaagagttcctccgccgctggacctaccaaggcaacgctatgttctcttgcttttgtcagcaagatagccagatcaatgtcgatcgtggctggctcgaagatacctgcaagaatgtcattgcgctgccattctccaaattgcagttcgcgcttagctggataacgccacggaatgatgtcgtcgtgcacaacaatggtgacttctacagcgcggagaatctcgctctctccaggggaagccgaagtttccaaaaggtcgttgatcaaagctcgccgcgttgtttcatcaagccttacggtcaccgtaaccagcaaatcaatatcactgtgtggcttcaggccgccatccactgcggagccgtacaaatgtacggccagcaacgtcggttcgagatggcgctcgatgacgccaactacctctgatagttgagtcgatacttcggcgatcaccgcttccctcatgatgtttaactcctgaattaagccgcgccgcgaagcggtgtcggcttgaatgaattgttaggcgtcatcctgtgctcccgagaaccagtaccagtacatcgctgtttcgttcgagacttgaggtctagttttatacgtgaacaggtcaatgccgccgagagtaaagccacattttgcgtacaaattgcaggcaggtacattgttcgtttgtgtctctaatcgtatgccaaggagctgtctgcttagtgcccactttttcgcaaattcgatgagactgtgcgcgactcctttgcctcggtgcgtgtgcgacacaacaatgtgttcgatagaggctagatcgttccatgttgagttgagttcaatcttcccgacaagctcttggtcgatgaatgcgccatagcaagcagagtcttcatcagagtcatcatccgagatgtaatccttccggtaggggctcacacttctggtagatagttcaaagccttggtcggataggtgcacatcgaacacttcacgaacaatgaaatggttctcagcatccaatgtttccgccacctgctcagggatcaccgaaatcttcatatgacgcctaacgcctggcacagcggatcgcaaacctggcgcggcttttggcacaaaaggcgtgacaggtttgcgaatccgttgctgccacttgttaacccttttgccagatttggtaactataatttatgttagaggcgaagtcttgggtaaaaactggcctaaaattgctggggatttcaggaaagtaaacatcaccttccggctcgatgtctattgtagatatatgtagtgtatctacttgatcgggggatctgctgcctcgcgcgtttcggtgatgacggtgaaaacctctgacacatgcagctcccggagacggtcacagcttgtctgtaagcggatgccgggagcagacaagcccgtcagggcgcgtcagcgggtgttggcgggtgtcggggcgcagccatgacccagtcacgtagcgatagcggagtgtatactggcttaactatgcggcatcagagcagattgtactgagagtgcaccatatgcggtgtgaaataccgcacagatgcgtaaggagaaaataccgcatcaggcgctcttccgcttcctcgctcactgactcgctgcgctcggtcgttcggctgcggcgagcggtatcagctcactcaaaggcggtaatacggttatccacagaatcaggggataacgcaggaaagaacatgtgagcaaaaggccagcaaaaggccaggaaccgtaaaaaggccgcgttgctggcgtttttccataggctccgcccccctgacgagcatcacaaaaatcgacgctcaagtcagaggtggcgaaacccgacaggactataaagataccaggcgtttccccctggaagctccctcgtgcgctctcctgttccgaccctgccgcttaccggatacctgtccgcctttctcccttcgggaagcgtggcgctttctcatagctcacgctgtaggtatctcagttcggtgtaggtcgttcgctccaagctgggctgtgtgcacgaaccccccgttcagcccgaccgctgcgccttatccggtaactatcgtcttgagtccaacccggtaagacacgacttatcgccactggcagcagccactggtaacaggattagcagagcgaggtatgtaggcggtgctacagagttcttgaagtggtggcctaactacggctacactagaaggacagtatttggtatctgcgctctgctgaagccagttaccttcggaaaaagagttggtagctcttgatccggcaaacaaaccaccgctggtagcggtggtttttttgtttgcaagcagcagattacgcgcagaaaaaaaggatctcaagaagatcctttgatcttttctacggggtctgacgctcagtggaacgaaaactcacgttaagggattttggtcatgagattatcaaaaaggatcttcacctagatccttttaaattaaaaatgaagttttaaatcaatctaaagtatatatgagtaaacttggtctgacagttaccaatgcttaatcagtgaggcacctatctcagcgatctgtctatttcgttcatccatagttgcctgactccccgtcgtgtagataactacgatacgggagggcttaccatctggccccagtgctgcaatgataccgcgagacccacgctcaccggctccagatttatcagcaataaaccagccagccggaagggccgagcgcagaagtggtcctgcaactttatccgcctccatccagtctattaattgttgccgggaagctagagtaagtagttcgccagttaatagtttgcgcaacgttgttgccattgctgcagggggggggggggggggggacttccattgttcattccacggacaaaaacagagaaaggaaacgacagaggccaaaaagcctcgctttcagcacctgtcgtttcctttcttttcagagggtattttaaataaaaacattaagttatgacgaagaagaacggaaacgccttaaaccggaaaattttcataaatagcgaaaacccgcgaggtcgccgccccgtaacctgtcggatcaccggaaaggacccgtaaagtgataatgattatcatctacatatcacaacgtgcgtggaggccatcaaaccacgtcaaataatcaattatgacgcaggtatcgtattaattgatctgcatcaacttaacgtaaaaacaacttcagacaatacaaatcagcgacactgaatacggggcaacctcatgtcccccccccccccccccctgcaggcatcgtggtgtcacgctcgtcgtttggtatggcttcattcagctccggttcccaacgatcaaggcgagttacatgatcccccatgttgtgcaaaaaagcggttagctccttcggtcctccgatcgttgtcagaagtaagttggccgcagtgttatcactcatggttatggcagcactgcataattctcttactgtcatgccatccgtaagatgcttttctgtgactggtgagtactcaaccaagtcattctgagaatagtgtatgcggcgaccgagttgctcttgcccggcgtcaacacgggataataccgcgccacatagcagaactttaaaagtgctcatcattggaaaacgttcttcggggcgaaaactctcaaggatcttaccgctgttgagatccagttcgatgtaacccactcgtgcacccaactgatcttcagcatcttttactttcaccagcgtttctgggtgagcaaaaacaggaaggcaaaatgccgcaaaaaagggaataagggcgacacggaaatgttgaatactcatactcttcctttttcaatattattgaagcatttatcagggttattgtctcatgagcggatacatatttgaatgtatttagaaaaataaacaaataggggttccgcgcacatttccccgaaaagtgccacctgacgtctaagaaaccattattatcatgacattaacctataaaaataggcgtatcacgaggccctttcgtcttcaagaattggtcgacgatcttgctgcgttcggatattttcgtggagttcccgccacagacccggattgaaggcgagatccagcaactcgcgccagatcatcctgtgacggaactttggcgcgtgatgactggccaggacgtcggccgaaagagcgacaagcagatcacgcttttcgacagcgtcggatttgcgatcgaggatttttcggcgctgcgctacgtccgcgaccgcgttgagggatcaagccacagcagcccactcgaccttctagccgacccagacgagccaagggatctttttggaatgctgctccgtcgtcaggctttccgacgtttgggtggttgaacagaagtcattatcgtacggaatgccaagcactcccgaggggaaccctgtggttggcatgcacatacaaatggacgaacggataaaccttttcacgcccttttaaatatccgttattctaataaacgctcttttctcttag

SEQ ID NO: 14589 - DNA, 419 bp, Unknown
  Unknown
  CDS (166)..(275)
  CDS (353)..(419)
gcataaacttatcttcatagttgccactccaatttgctccttgaatctcctccacccaatacataatccactcctccatcacccacttcactactaaatcaaacttaactctgtttttctctctcctcctttcatttcttattcttccaatcatcgtactccgccatgaccaccgctgtcaccgccgctgtttctttcccctctaccaaaaccacctctctctccgcccgaagctcctccgtcatttcccctgacaaaatcagctacaaaaaggtgattcccaatttcactgtgttttttattaataatttgttattttgatgatgagatgattaatttgggtgctgcaggttcctttgtactacaggaatgtatctgcaactgggaaaatgggacccatcagggcccagatcgcctct

SEQ ID NO: 14590 - protein, 62 aa, Acetabularia mediterranea
MASIMMNKSVVLSKECAKPLATPKVTLNKRGFATTIATKNREMMVWQPFNNKMFETFSFLPP

SEQ ID NO: 14591 - protein, 85 aa, Arabidopsis thaliana
MAAAVSTVGAINRAPLSLNGSGSGAVSAPASTFLGKKVVTVSRFAQSNKKSNGSFKVLAVKEDKQTDGDRWRGLAYDTSDDQIDI

SEQ ID NO: 14592 - protein, 54 aa, Arabidopsis thaliana
MKSSMLSSTAWTSPAQATMVAPFTGLKSSASFPVTRKANNDITSITSNGGRVSC

SEQ ID NO: 14593 - protein, 91 aa, Arabidopsis thaliana
MAASGTSATFRASVSSAPSSSSQLTHLKSPFKAVKYTPLPSSRSKSSSFSVSCTIAKDPPVLMAAGSDPALWQRPDSFGRFGKFGGKYVPE

SEQ ID NO: 14594 - protein, 80 aa, Brassica campestris
MSTTFCSSVCMQATSLAATTRISFQKPALVSTTNLSFNLRRSIPTRFSISCAAKPETVEKVSKIVKKQLSLKDDQKVVAE

SEQ ID NO: 14595 - protein, 51 aa, Brassica napus
MATTFSASVSMQATSLATTTRISFQKPVLVSNHGRTNLSFNLSRTRLSISC

SEQ ID NO: 14596 - protein, 44 aa, Chlamydomonas reinhardtii
MQALSSRVNIAAKPQRAQRLVVRAEEVKAAPKKEVGPKRGSLVK

SEQ ID NO: 14597 - protein, 51 aa, Cucurbita moschata
MAELIQDKESAQSAATAAAASSGYERRNEPAHSRKFLEVRSEEELLSCIKK

SEQ ID NO: 14598 - protein, 62 aa, Spinacea oleracea
MSTINGCLTSISPSRTQLKNTSTLRPTFIANSRVNPSSSVPPSLIRNQPVFAAPAPIITPTL

SEQ ID NO: 14599 - protein, 75 aa, Spinacea oleracea
MTTAVTAAVSFPSTKTTSLSARCSSVISPDKISYKKVPLYYRNVSATGKMGPIRAQIASDVEAPPPAPAKVEKMS

SEQ ID NO: 14600 - protein, 55 aa, Spinacea oleracea
MTTAVTAAVSFPSTKTTSLSARSSSVISPDKISYKKVPLYYRNVSATGKMGPIRA

SEQ ID NO: 14601 - protein, 90 aa, Arabidopsis thaliana
MAASLQSTATFLQSAKIATAPSRGSSHLRSTQAVGKSFGLETSSARLTCSFQSDFKDFTGKCSDAVKIAGFALATSALVVSGASAEGAPK

SEQ ID NO: 14602 - protein, 96 aa, Arabidopsis thaliana
MAQVSRICNGVQNPSLICNLSKSSQRKSPLSVSLKTQQHPRAYPISSSWGLKKSGMTLIGSELRPLKVMSSVSTAEKASEIVLQPIREISGLIKLP

SEQ ID NO: 14603 - protein, 100 aa, Arabidopsis thaliana
MAAATTTTTTSSSISFSTKPSPSSSKSPLPISRFSLPFSLNPNKSSSSSRRRGIKSSSPSSISAVLNTTTNVTTTPSPTKPTKPETFISRFAPDQPRKGA

SEQ ID NO: 14604 - protein, 46 aa, Arabidopsis thaliana
MITSSLTCSLQALKLSSPFAHGSTPLSSLSKPNSFPNHRMPALVPV

SEQ ID NO: 14605 - protein, 93 aa, Arabidopsis thaliana
MASLLGTSSSAIWASPSLSSPSSKPSSSPICFRPGKLFGSKLNAGIQIRPKKNRSRYHVSVMNVATEINSTEQVVGKFDSKKSARPVYPFAAI

SEQ ID NO: 14606 - protein, 52 aa, Arabidopsis thaliana
MASTALSSAIVGTSFIRRSPAPISLRSLPSANTQSLFGLKSGTARGGRVVAM

SEQ ID NO: 14607 - protein, 39 aa, Arabidopsis thaliana
MAASTMALSSPAFAGKAVNLSPAASEVLGSGRVTNRKTV

SEQ ID NO: 14608 - protein, 92 aa, Arabidopsis thaliana
MAAITSATVTIPSFTGLKLAVSSKPKTLSTISRSSSATRAPPKLALKSSLKDFGVIAVATAASIVLAGNAMAMEVLLGSDDGSLAFVPSEFT

SEQ ID NO: 14609 - DNA, 10 bp, Artificial sequence
  Primer sequence
ttgctcttcc

SEQ ID NO: 14610 - DNA, 10 bp, Artificial sequence
  Primer sequence
ttgctcttcg

SEQ ID NO: 14611 - DNA, 27 bp, Artificial sequence
  Primer sequence
atagaattcagaggcgatctgggccct

SEQ ID NO: 14612 - DNA, 34 bp, Artificial sequence
  Primer sequence
ataccatggaagagcaagaggcgatctgggccct

SEQ ID NO: 14613 - DNA, 34 bp, Artificial sequence
  Primer sequence
atagaattcgcataaacttatcttcatagttgcc

SEQ ID NO: 14614 - DNA, 36 bp, Artificial sequence
  Primer sequence
atagtttaaacgcataaacttatcttcatagttgcc

SEQ ID NO: 14615 - DNA, 19 bp, Artificial sequence
  Primer sequence
ggaattccagctgaccacc

SEQ ID NO: 14616 - DNA, 20 bp, Artificial sequence
  Primer sequence
gatccccgggaattgccatg

SEQ ID NO: 14617 - DNA, 30 bp, Artificial sequence
  Primer sequence
atacccgggcaccggatccttccgccgttg

SEQ ID NO: 14618 - DNA, 30 bp, Artificial sequence
  Primer sequence
atacccgggatggcgcccaccgtgatgatg

SEQ ID NO: 14619 - DNA, 16 bp, Artificial sequence
  Primer sequence
gggtcgctcctacgcg

SEQ ID NO: 14620 - DNA, 16 bp, Artificial sequence
  Primer sequence
ctcgggctcggcgtcc

SEQ ID NO: 14621 - DNA, 1275 bp, Burkholderia cenocepacia AU 1054
  CDS (1)..(1275): transl_table=11
atgaatgcggagacccgcaagcgcttcgcgcaattgcggcagatgttcctgcaggagcgcggctccgcgtcgcggctcgcgtttacggccggcaacacggtgcggctgtgcgaaaccggcggcgaattcttccacgcgctgatcgagcggatcgacgccgcccgcgagcaggtgatgctcgaaacctacatcttctgcgacgacgcggccggccgcccggtgtcggacgcgctgatccgcgcggcgcagcgcggcgtgcgcgtgcgggtgatcaccgacggcatcggcaccgcgcgcctgccgctgttcgacacatggggcgaagccggcgtcgagcactgcatctacaatcgcttcctgttcggccgcttcggcttctcgcgcacgcaccgcaagcttgcggtgatcgatcagacgaccgcgttctgcggcggcatcaacatcgtcgacgactacacgcagggcagcgcgacgctgccgtttccgcgctgggatttcgcggtcgagatggccgggcccgcggtgtccgacgtgcgcgccgcgttcgagctgcagtggcaccggatccagttcggccacaagccgtatgcgcagtacgcggccgggctgcacggcggcgaagcgttccccgacatgttccggcgctggatgcgcagccatcgatggatcaaggccggcgcgctgcgggtcgtgacggagccgagcgtcgcgttcgtcgcgcgcgacaacgtcgtgaaccgccgcgcgatcgagaaggcctatctcgcggcgatcggccaggcgcgccagcgcatcctgctcgcgaatccgtatttcatgccgggccgcaagctgcgccgcgcgctgacgggcgcggcacggcgcggcgtcgacgtgcaggtgctgatcggccgcaaggagttcacggcgctcgatacggccgtgccgttcctgtatcactcgctgttgcgcgcgggcgtgcgcgtggccgaatacgacaagacgatcctgcacggcaaggtcgccgtgatcgacgacaactgggcgacggtcggctcgtcgaatctggacgcgctgagcctgatgctgaacaatgaagcgaacgtcgtgctggtgcgctacgatgcagtgacgaatcagttgcgcgacgcgatcgccaccgcgttcgccgaagggcgggagatcgacgccgcgcactatgccgcccgcccgcgcatcgaacggctgctgaactggctggcgtacaccacgtaccgcctcgtgatgaaggcgctgacggtcggcggttacgactga

SEQ ID NO: 14622 - protein, 424 aa, Burkholderia cenocepacia AU 1054
MNAETRKRFAQLRQMFLQERGSASRLAFTAGNTVRLCETGGEFFHALIERIDAAREQVMLETYIFCDDAAGRPVSDALIRAAQRGVRVRVITDGIGTARLPLFDTWGEAGVEHCIYNRFLFGRFGFSRTHRKLAVIDQTTAFCGGINIVDDYTQGSATLPFPRWDFAVEMAGPAVSDVRAAFELQWHRIQFGHKPYAQYAAGLHGGEAFPDMFRRWMRSHRWIKAGALRVVTEPSVAFVARDNVVNRRAIEKAYLAAIGQARQRILLANPYFMPGRKLRRALTGAARRGVDVQVLIGRKEFTALDTAVPFLYHSLLRAGVRVAEYDKTILHGKVAVIDDNWATVGSSNLDALSLMLNNEANVVLVRYDAVTNQLRDAIATAFAEGREIDAAHYAARPRIERLLNWLAYTTYRLVMKALTVGGYD

SEQ ID NO: 14623 - DNA, 1623 bp, Burkholderia cenocepacia AU 1054
  CDS (1)..(1623): transl_table=11
gtgctcacatccttgatccggcgcgcgccggccgcgctgtcgtggcgcgccgcatgccgccaggcccgcgcgctggtcgtctgcgcgctgctgccgctcgccgcatgcgcgacgcatccgcccgccacctcgctcgatcgccccgtctcccatgcgttgtcggcggaaaccgccacgccgctgcgcgatgcgctggccgcgccggaagccgcgcatcccgggcagtcgggcttccggctgctggccgacggcgccaccgcattgcagatgcgcatcgcgcttgcgcgtgcggcgacgaagacgctcgacatgcagtactacatcgcgaccgaggacacgaccggcaagctgctgctgggcgcggcgctgtacgcggccgatcgcggcgtgcgcgtgcggatgctggtcgacgacctgaacttccacgatatcgaccgcgtgatggccgcgctgaatacgcaccagaacatcgagatccgcgtgttcaacccgttcggcgcgtcgcagcgcggcatgatggagcgcacggccaacttcttcacgcggatcgacagcttcacgcgccggatgcacaacaaggcgatgatcgcggataaccagctcgcgatcgtcggcggccgcaatctcggcgacgaatacttcagtgcgagcccgacgctgcagttccgcgatctcgacgtgctggcggccggccccgtgacgagcgacatctcgaagagcttcgacgactactgggcgagcgcgagcagctacccgttgcgcgtgctgaatcatcagacgttcgatccgaaggatctcgacgcgatgcgcgacgagctgcgcgatcactggcgcaagaacgccgatccgtacaacgcgaaaccgctgaacgcgacgccgctcgcccggcagatcgcgcgcgacgaactcgaactcgtgtgggcaccggccgaattcaaggtcgatgcgccggacaaggtcgcgcggccgaccggcacgtacgtgagcccgccgatgcagcgcctggccgagctgacgcgcggcgcgcagaaggaattcctggcgttttcgccgtacttcgtgccgcacgacgccggcgtgaagatcctcggcgacacggtcgcgcgcggcgtgcgcgtcgcgatcgtgacgaactcgctcgcggcgaccgacgcggtcgcggtgcagtcgggctatgcgccgtatcgcgtgccgctgctgcagcgcggcgtcgagctgtacgaattcaagtcgcagccggaccagcagcccgcgcggctgttcggttcgcgctcgcgtgcgagcctgcatgcgaaggcgtacgtgatcgaccggcaaatcctcgtgatcggctcgctgaacctcgacccgcgctccgcgcacctgaacaccgagctcgcgctcgtgatccacagcccggtgctcgcgcagcaggccgcggcgatcttcgcgcgcgtgacgcagccggacgaaagctaccgcgtcacgctcgcgaagcggaccgacggcggtccgcccgcgctcgaatggacgggcaccgaaggcggtcagaccgccacctatcacgtcgacccgcatgcggggctgctgcgcaacgtgatgacgggcatcttcacgctgctgccggtcgacgaccagctgtaa

SEQ ID NO: 14624 - protein, 540 aa, Burkholderia cenocepacia AU 1054
MLTSLIRRAPAALSWRAACRQARALVVCALLPLAACATHPPATSLDRPVSHALSAETATPLRDALAAPEAAHPGQSGFRLLADGATALQMRIALARAATKTLDMQYYIATEDTTGKLLLGAALYAADRGVRVRMLVDDLNFHDIDRVMAALNTHQNIEIRVFNPFGASQRGMMERTANFFTRIDSFTRRMHNKAMIADNQLAIVGGRNLGDEYFSASPTLQFRDLDVLAAGPVTSDISKSFDDYWASASSYPLRVLNHQTFDPKDLDAMRDELRDHWRKNADPYNAKPLNATPLARQIARDELELVWAPAEFKVDAPDKVARPTGTYVSPPMQRLAELTRGAQKEFLAFSPYFVPHDAGVKILGDTVARGVRVAIVTNSLAATDAVAVQSGYAPYRVPLLQRGVELYEFKSQPDQQPARLFGSRSRASLHAKAYVIDRQILVIGSLNLDPRSAHLNTELALVIHSPVLAQQAAAIFARVTQPDESYRVTLAKRTDGGPPALEWTGTEGGQTATYHVDPHAGLLRNVMTGIFTLLPVDDQL

SEQ ID NO: 14625 - DNA, 1440 bp, Burkholderia cenocepacia AU 1054
  CDS (1)..(1440): transl_table=11
atgaccctcgactggctacatctcggcaccctgatcctgaccatccatgtgctcgggatcgtcgcggcgtgccacgcaatcatgaacacgcgcacgtcgcaaggcgcgatcgcgtgggccgtctcgctcacggccatgccgtacctgacgctcgttccatacctgttcctcggccgtagcaaattctccggctacgtcgacgcccggcgccacgagctggaaatgttgcgcacacacacaccgcgtgcgccgtggcgcgcgaccgatgcgaccgacgggccggccgccgacgcgctggggcaggctgccgtgctcgcgctcacgcggctcggcggcatgccgttcctcggcggcaattcggtacgcacgctggtcaacggcgacgcgacattctccgccatcctgtcggcgatcgacgacgcgcgcgactacgtgctcgtccagttcttcatcgtgcgcgacgatgcgctcggccggatgctgcgcgacgcgctgctcgcgcgcgcggccgccggcgtacgctgctgcctactgtacgacagcatcggcagcttcgacctgccgcacagctacgtcgacgcattgcgccgcggtggcgtcgaggtccatccgttcgcgaccaaccggaaattcgtcaatcgcttccagttgaacttccgcaaccatcgcaagatcgtcgtcgtcgacggcaatcgcgcgttcgtcggcggccacaacgtcggtgtcgaatatctcggcgcgaagccgcgcctgtcgccatggcgcgacacccacatcgagatccgcggccccgtggtggcgagcatccagtacgtgttcgccgaagactggcactgggcgacgcagaaactgccgcccatcgcgctgccgccgcccgcgcagcccggcgacggcatgcattgcctcgcggtgccgatggggccggccgacaagcaggaaaccggctcgctgttcttcgtcgaatcgatcaatgccgcccgcgagcgggtctggatcaccacgccgtacctcgttcccgacgaagccgtggtctccgcgctaaaactcgccgtgatgcgcggcgtcgacgtacgcatcctgatcccgagccggcgcgatcactacgtcgtgttcgaggcgtccaagctttatgcgcgcgacctcgtcgatgcgggcgtgaaagtgttccgctaccggcccggcttcctgcaccagaaggtcgtgctgatcgaccgcatcgcggcggcggtcggcagcgcgaatctcgataaccgttcgttccgcctcaatttcgaggtcatggtcatgaccgtcgatcgcgcgttcgccggcgaagtcgagacgatgctcgatgccgacttcgcgcaggcgtacgaggtcgatgcggacgaataccggcagtcgcctgcctggcggcgcatcgcgatgcacgtcgcgcggttgttcgcgccgatcctgtaa

SEQ ID NO: 14626 - protein, 479 aa, Burkholderia cenocepacia AU 1054
MTLDWLHLGTLILTIHVLGIVAACHAIMNTRTSQGAIAWAVSLTAMPYLTLVPYLFLGRSKFSGYVDARRHELEMLRTHTPRAPWRATDATDGPAADALGQAAVLALTRLGGMPFLGGNSVRTLVNGDATFSAILSAIDDARDYVLVQFFIVRDDALGRMLRDALLARAAAGVRCCLLYDSIGSFDLPHSYVDALRRGGVEVHPFATNRKFVNRFQLNFRNHRKIVVVDGNRAFVGGHNVGVEYLGAKPRLSPWRDTHIEIRGPVVASIQYVFAEDWHWATQKLPPIALPPPAQPGDGMHCLAVPMGPADKQETGSLFFVESINAARERVWITTPYLVPDEAVVSALKLAVMRGVDVRILIPSRRDHYVVFEASKLYARDLVDAGVKVFRYRPGFLHQKVVLIDRIAAAVGSANLDNRSFRLNFEVMVMTVDRAFAGEVETMLDADFAQAYEVDADEYRQSPAWRRIAMHVARLFAPIL

SEQ ID NO: 14627 - DNA, 1077 bp, Burkholderia cenocepacia HI2424
  CDS (1)..(1077): transl_table=11
atgaatgcggagacccgcaagcgcttcgcgcaattgcggcagatgttcctgcaggagcgcggctccgcgtcgcggctcgcgtttacggccggcaacacggtgcggctgtgcgaaaccggcggcgaattcttccacgcgctgatcgagcggatcgacgccgcccgcgagcaggtgatgctcgaaacctacatcttctgcgacgacgcggccggccgcccggtgtcggacgcgctgatccgcgcggcgcagcgcggcgtgcgcgtgcgggtgatcaccgacggcatcggcaccgcgcgcctgccgctgttcgacacatggggcgaagccggcgtcgagcactgcatctacaatcgcttcctgttcggccgcttcggcttctcgcgcacgcaccgcaagcttgcggtgatcgatcagacgaccgcgttctgcggcggcatcaacatcgtcgacgactacacgcagggcagcgcgacgctgccgtttccgcgctgggatttcgcggtcgagatggccgggcccgcggtgtccgacgtgcgcgccgcgttcgagctgcagtggcaccggatccagttcggccacaagccgtatgcgcagtacgcggccgggctgcacggcggcgaagcgttccccgacatgttccggcgctggatgcgcagccatcgatggatcaaggccggcgcgctgcgggtcgtgacggagccgagcgtcgcgttcgtcgcgcgcgacaacgtcgtgaaccgccgcgcgatcgagaaggcctatctcgcggcgatcggccaggcgcgccagcgcatcctgctcgcgaatccgtatttcatgccgggccgcaagctgcgccgcgcgctgacgggcgcggcacggcgcggcgtcgacgtgcaggtgctgatcggccgcaaggagttcacggcgctcgatacggccgtgccgttcctgtatcactcgctgttgcgcgcgggcgtgcgcgtggccgaatacgacaagacgatcctgcacggcaaggtcgccgtgatcgacgacaactgggcgacggtcggctcgtcgaatctggacgcgctgagccctgatgctgaacaatga

SEQ ID NO: 14628 - protein, 358 aa, Burkholderia cenocepacia HI2424
MNAETRKRFAQLRQMFLQERGSASRLAFTAGNTVRLCETGGEFFHALIERIDAAREQVMLETYIFCDDAAGRPVSDALIRAAQRGVRVRVITDGIGTARLPLFDTWGEAGVEHCIYNRFLFGRFGFSRTHRKLAVIDQTTAFCGGINIVDDYTQGSATLPFPRWDFAVEMAGPAVSDVRAAFELQWHRIQFGHKPYAQYAAGLHGGEAFPDMFRRWMRSHRWIKAGALRVVTEPSVAFVARDNVVNRRAIEKAYLAAIGQARQRILLANPYFMPGRKLRRALTGAARRGVDVQVLIGRKEFTALDTAVPFLYHSLLRAGVRVAEYDKTILHGKVAVIDDNWATVGSSNLDALSPDAEQ

SEQ ID NO: 14629 - DNA, 1551 bp, Burkholderia cenocepacia HI2424
  CDS (1)..(1551): transl_table=11
atgatcaggctgcgttcgtggggtgcgattctgtcgttgctgatgcttgccgcgtgcgcgagcctgccgccgcaggccgaccgcgcgccgacgcatgcattcaccgataccgacgatacgcgcctcggcgtggcatttcgccagcaggctgccgcccatccggggcaggacgcatttcatttgctgaccgatccggtcgacgcactggacgcgcgcgtgctgctcgccgaccgcgccgagcgttcgctggaccttcagtactacatctggcacgacgacctgaccggccacgaactggccgacgccgtcatgcgtgcggccgaccgcggcgtgcgcgtgcgcgcgctgctcgacgatctcggcaccaacgccgacgaccgcaagctgctcgagatcagcgcgcatccgaacatcgagatccggctgttcaatccggtggcgtcgcgccggttcaagaagctcggcaccctgttcgagttctcgcgcgtcaaccggcgcatgcacaacaaggcgatgatcgcggacaaccaggcggcgatcgtcggcgggcgcaatatcggcgacgaatacttcggcgcatcgtcgatgctggagtttggcgatctcgatgtcgtcgttcacgggccggtcgtgaaagacatctcgacggaattcgatacgttctggaattcgccgtacgcgtatccggtcgatacgctggtcgggcacgatgcggcgccgggcggcctcgagcgcgagcgagaacggttgcgcgactacctgagggccatggaggacaatccgtacgtgctcgaggcccgccagcggctcgaccggatcgtccacgggcagggcacggagctgtcgtgggggcatgcgacggtgctgtacgacgatccgtcgaagatcgcgcatccgccgaaggaccgcgacggccacctgatgccgcagttgcgtgcgcttgcgttgcagccccggcacgacctgctgatcgtgtcgccgtatttcgtgcccggcaaggaagtggtcgagcggctgcgcgcgctcacggcgcgcggcgtgcgcgtgacggtgctgaccaattcgctcgcatcgaccgatgtggcggccgtgcatgccggctaccgccgctatcgaagcgatctggtgaatgccggcgtgcggctttacgagcgccggccctcgggcgacaagagcatttcgaagcaggtgatcatcggctcgtcgcgcgcatcgctgcatgcgaagacctacgtattcgatcacacgagcatcttcatcgggtcgatgaatctcgatccgcgctcgctgaacctcaatacggagatcggcgtttactgcgagagcccggcgattgcatcgcaggtggccgacgatctggaggcgcggctcgaccagatcgcgtggcgtgtcgaggcgagaaccgatccggccggcagcgggcgcctcaagtgggttcagacggatgcagacgggaaggtcaccgagatcgatcacgaaccggaagtgtcggcgccgcggcggatggaagtgtggtttctcgggctgtttccgatcgaatcgcaactgtga

SEQ ID NO: 14630 - protein, 516 aa, Burkholderia cenocepacia HI2424
MIRLRSWGAILSLLMLAACASLPPQADRAPTHAFTDTDDTRLGVAFRQQAAAHPGQDAFHLLTDPVDALDARVLLADRAERSLDLQYYIWHDDLTGHELADAVMRAADRGVRVRALLDDLGTNADDRKLLEISAHPNIEIRLFNPVASRRFKKLGTLFEFSRVNRRMHNKAMIADNQAAIVGGRNIGDEYFGASSMLEFGDLDVVVHGPVVKDISTEFDTFWNSPYAYPVDTLVGHDAAPGGLERERERLRDYLRAMEDNPYVLEARQRLDRIVHGQGTELSWGHATVLYDDPSKIAHPPKDRDGHLMPQLRALALQPRHDLLIVSPYFVPGKEVVERLRALTARGVRVTVLTNSLASTDVAAVHAGYRRYRSDLVNAGVRLYERRPSGDKSISKQVIIGSSRASLHAKTYVFDHTSIFIGSMNLDPRSLNLNTEIGVYCESPAIASQVADDLEARLDQIAWRVEARTDPAGSGRLKWVQTDADGKVTEIDHEPEVSAPRRMEVWFLGLFPIESQL

SEQ ID NO: 14631 - DNA, 1425 bp, Chromohalobacter salexigens DSM 3043
  CDS (1)..(1425): transl_table=11
atgacatccggggtaattggcatcctgatcgttgtcatccatgtgctgggtgtgctgtccgcgctcatggcgctgatgtcgagccgtacctcgcagggcgccgtggcctggatcgtcacgttgctgacgttcccttatctggcggtgcccatctactggattttcggccgcccccgtttctacggttacacctctgcgcgcggtgagcgtgacagcgtattgcgtcaggtgctgttacgcttccggccgcgtctggagccttatttctcgcgtccctcgcatgatgtcgcccgcatccaggcagtggagcgtctggcgatgatgcccatgagtaccggcaatcgggcggaattgctcatcgacggtgaagcgaccttcaagagcctgttggcagggatcgattcggcgcgagagtacatcctcgtccagttcttcatcttccgcgccgatgaaatcggcacgctgttcaagcagcatttgatccagcaagccgagcgcggcgttcgcgtctgcctgctttacgatgaaatcggcagccgcagcctgtccggaggctacctgcgcgaactgtcggaagcgggcgtcgaggtcacggccttcaactcctcgcgtggatggcgtcatcgcttccagatcaatttccgcaaccaccgcaagatcctggtcgtcgatggacgggaaggatggacgggcggcttcaacgtggccgacgagtacctggggcgcgtcccgcgatacggaccctggcgcgatacgcatctcaagctgaccggcccgagcgtgatggggttgcaggaagccttctgggaggactggtactgggcgaccggcgacattctgtcgctggagtgggagccctcggtcacctgtaacgaatgccagcatgtggtcatcgtcccctcgggccccgcggaccgctgcgagacagccagcctgttgatccagcacgtgatccacggggcgcacgagcgcctttgggtgaccagcccctatttcgtccccgaccagggggtgcaggacgcactgaagctggcggcgttgcgcggcgtcgacgtgagagtgatgatcccggagcgtcccgatcatctgctggtctttctctcggccttttctttcttgccggagatgatccgtcatggcgtacggatctttcgctaccagccgggcttcttgcatcagaaagcggtgctggtcgacgaccataccgcgctgctgggatcggtcaatctcgacaatcgctcgtttcggctcaatttcgagatcactgcctatattcccgacgcggccttcgcacacgatgtcgagaccatgctgctgcacgatttcgaatcatgtcgcgaggtcacgctgcaggaactcgacgacaggcctgcatggcgcaagctggtctcgcgcgccgcctatttgctggctccgatacaatga

SEQ ID NO: 14632 - protein, 474 aa, Chromohalobacter salexigens DSM 3043
MTSGVIGILIVVIHVLGVLSALMALMSSRTSQGAVAWIVTLLTFPYLAVPIYWIFGRPRFYGYTSARGERDSVLRQVLLRFRPRLEPYFSRPSHDVARIQAVERLAMMPMSTGNRAELLIDGEATFKSLLAGIDSAREYILVQFFIFRADEIGTLFKQHLIQQAERGVRVCLLYDEIGSRSLSGGYLRELSEAGVEVTAFNSSRGWRHRFQINFRNHRKILVVDGREGWTGGFNVADEYLGRVPRYGPWRDTHLKLTGPSVMGLQEAFWEDWYWATGDILSLEWEPSVTCNECQHVVIVPSGPADRCETASLLIQHVIHGAHERLWVTSPYFVPDQGVQDALKLAALRGVDVRVMIPERPDHLLVFLSAFSFLPEMIRHGVRIFRYQPGFLHQKAVLVDDHTALLGSVNLDNRSFRLNFEITAYIPDAAFAHDVETMLLHDFESCREVTLQELDDRPAWRKLVSRAAYLLAPIQ

SEQ ID NO: 14633 - DNA, 1440 bp, Burkholderia pseudomallei 668
  CDS (1)..(1440)
atgaccctcgactggccccatctcggcaccctcatcggcctcgcgcacgtgctcggcgtgatcgcggcctgccatgcgatcctgaacacgcgcacgtcgcaaggcgcgatcgcgtgggcggtgtcgttgacggcgatgccgtacctgacgctgatcccgtatctgttcctcggccgcagcaagttctccggctatgtcgacgcgcgccgccacgagaccgcggcgctgcgcacccgcacgcatcccgcgccgtgggacgccgaaggctcgacgctcggcgcgccgaaggaagcgctcggcgccgcgcgcgtacgcgcgctcacgcgcctggtcggcatgccgttcgtcgccggcaacgcggtgcgcacgctcgtcaacggcgacgcgacgttctccgcgatcctcgccgcgatcgacgccgcgcgcagctacgtgatcgtccagttcttcatcgtccgcgacgacgcgctcggcgcgatgctgcgcgacacgctgatcgcgcgcgcgaaggcgggcgtgcgctgctatctgctgtacgacagcatcggcagcttcgatctgccgtcgagctacgtgcacgcgctgcgcgaaggcggcgtcgaagtgcatccgttcgcgaccaacaagcagttcgtcaaccgcttccagctcaatttccgcaatcaccggaagatcgtcgtcgtcgacggcgagcgcgcgttcgtcggcgggcacaacgtcggcgtcgaatatctcggcggcaacccgcgcctgtcgccgtggcgcgacacgcacatcgaagtgcgcggcccggcggccgcgaacatccagtacgtgttcgccgaggactggcactgggcaacccagtcgctgcccccgcaggcaccgccgcccgcgccggttcccgacgccgacatgcactgcctcgtcgtgccgatgggccccgccgacaagcaggagacgggctcgctcttcttcgcggaggcgatcaacgccgcgcgcgagcgcgtgtggatcacgacgccctacctcgtgcccgacgaagcggtgatttccgcgctgaagctcgcggtgatgcgcggcgtggacgtgcgggtgatgattccgagccggcgcgatcactatgtcgttttcgaagcgtcgaagctctatgcgcgcgatctcgtcgacgcgggcgtgcggatcttccgctaccgccccggcttcctgcaccagaaggtcgtgctgatcgaccgggcggccgccgccgtcggcagcgcgaacctcgacaaccgttcgttccggctgaatttcgagatcatggtgctgaccgtcgacgcgggcttcgccgccgaagtcgaggcgatgctcgcgcgcgacttcgatcaagcgttcgaggtcgacctgagcgagtaccggcgctcgcccgcgtggcggcgcgtggcgatgcacgtcgcacggctgttcgcgccgatcctctga

SEQ ID NO: 14634 - protein, 479 aa, Burkholderia pseudomallei 668
MTLDWPHLGTLIGLAHVLGVIAACHAILNTRTSQGAIAWAVSLTAMPYLTLIPYLFLGRSKFSGYVDARRHETAALRTRTHPAPWDAEGSTLGAPKEALGAARVRALTRLVGMPFVAGNAVRTLVNGDATFSAILAAIDAARSYVIVQFFIVRDDALGAMLRDTLIARAKAGVRCYLLYDSIGSFDLPSSYVHALREGGVEVHPFATNKQFVNRFQLNFRNHRKIVVVDGERAFVGGHNVGVEYLGGNPRLSPWRDTHIEVRGPAAANIQYVFAEDWHWATQSLPPQAPPPAPVPDADMHCLVVPMGPADKQETGSLFFAEAINAARERVWITTPYLVPDEAVISALKLAVMRGVDVRVMIPSRRDHYVVFEASKLYARDLVDAGVRIFRYRPGFLHQKVVLIDRAAAAVGSANLDNRSFRLNFEIMVLTVDAGFAAEVEAMLARDFDQAFEVDLSEYRRSPAWRRVAMHVARLFAPIL

SEQ ID NO: 14635 - DNA, 1719 bp, Polaromonas sp. JS666
  CDS (1)..(1719): transl_table=11
atgaggtgtttgttcaggccaacggccaggccgcaagaaccttccccgcgcgcttgcccctgctgcggctggaccgcatctatgtgcgcaatgccatcggccacgcgccggtcgtcctgcccagccggccctggtcgcacctgtcggaccacgcgcccctggcggcggagattgaattgtagatatggcccccacgcttgtcacttcgtgtactgcgctgccccccaagggggcgctgcgcctgcggcccggcaaagccggttccgcggcccctgctggaatagtcttggcccccacgcttgtcgcttcgtgtgccttcggcgttgcgctgcccctttcacgaggaaacggggcggaacttgctcggggcggcccttcgctgcgttcgatggcacctgtgggaggcttatgagcccctggatcagcggcaaccagttccgcctgcttgaaaacggcgaggagtatttcccgcgcgtctttgcctgcattgccgccgctgaacgcgaggtcgtgctggaaaccttcatcctgtttgacgacaaggtcggccaggcgctgcatgccgccctgctgcaggcggccacccgcggcgtgcagattgacatcaccgttgacggctatggctcacccgacctgtcgcacgaattcatttctgcactgacccaggccggggtgcgggttcatgtgtttgaccccggccccaggctctggggctggcgtaccaacctgtttcgccgcatgcaccgcaagatcgtcgtgattgatggccagcgcgcctttgtcggtggcctcaattactcggccgatcacctggccgatttcggccccgccgccaaacaggactatgcggtcgaaattgagggccccatcgtcaccttcatccacgcctttgtgcaccgggcactggcggcgggccagcgcaatgcgcaggacagtctggccggccggctgcgtgagcgcctgtccagccgcgcccattcgctggcccgaagctgggggctcgccccgccaagccaggccgcggccgctcccgccggtgaagcggcggccatcttcgtgacgcgcgacaaccgcgaacacaccaacgacatcgaacgccactaccgcatcgccatccgcgtggcccgccagcgcatcgtgatcgccaatgcctacttcttccccggctaccgcctgctcaaggagatgcgcaaggcggcgcggcgcggtgtcgacgtgcggctcatcctgcagggcgcgcccgacatgcccttcgtcaaaaccgccgccagcatgctctaccaccacctgctggaggccggcgtgcagatttacgagtattgcgagcggccgctgcacggcaaggtcgccgtggccgacgacgaatgggccaccgtgggctccagcaaccttgacccgctgagcctgtcgctgaacctggaggccaacgtggtcatccgcgaccgcgccttcaaccaggtgctcagcgcacggctggaccacctgatgcaacacggctgcaagcagatcggccccggcgacctgcaggagtcgagcggctggcgcatcgtgcgcagctttttcctgtttcacctgctgcgccgttacccggcctgggcgggctggctgcccgcgcatgcgccgcgcctcacgcctgcgctggcacccgccgacccgacggcgcacatcagcaccgcgcaggcagacgccgtccaccgcgcggacccgaccaccccgtga

SEQ ID NO: 14636 - protein, 572 aa, Polaromonas sp. JS666
MRCLFRPTARPQEPSPRACPCCGWTASMCAMPSATRRSSCPAGPGRTCRTTRPWRRRLNCRYGPHACHFVYCAAPQGGAAPAARQSRFRGPCWNSLGPHACRFVCLRRCAAPFTRKRGGTCSGRPFAAFDGTCGRLMSPWISGNQFRLLENGEEYFPRVFACIAAAEREVVLETFILFDDKVGQALHAALLQAATRGVQIDITVDGYGSPDLSHEFISALTQAGVRVHVFDPGPRLWGWRTNLFRRMHRKIVVIDGQRAFVGGLNYSADHLADFGPAAKQDYAVEIEGPIVTFIHAFVHRALAAGQRNAQDSLAGRLRERLSSRAHSLARSWGLAPPSQAAAAPAGEAAAIFVTRDNREHTNDIERHYRIAIRVARQRIVIANAYFFPGYRLLKEMRKAARRGVDVRLILQGAPDMPFVKTAASMLYHHLLEAGVQIYEYCERPLHGKVAVADDEWATVGSSNLDPLSLSLNLEANVVIRDRAFNQVLSARLDHLMQHGCKQIGPGDLQESSGWRIVRSFFLFHLLRRYPAWAGWLPAHAPRLTPALAPADPTAHISTAQADAVHRADPTTP

SEQ ID NO: 14637 - DNA, 1284 bp, Solibacter usitatus Ellin6076
  CDS (1)..(1284): transl_table=11
gtggtgcctctgtacctcctcataccggcctgcctcggaattgtggttcttcttattgttgttttcgatgcattttttgaaccctccctggactaccgtctcgccgactctgaccctctgccgctggactcgaaggaattcattcgcatcctcggcgttctggctgacaccgagtcgcatacggatacacgcgtcgaggtcctcaccaatggcccgtgcttctacccggcacaattggccgccattcgtgctgcccgccactccgtttgtctcgaggcttacatctttcagaagggcgtgatcgggaatgattatatccaggccctcacggaacgcgcgcgcgccggcgtcgaagtgcgcgttgtgctcgatgccatcggcagcatgagcacctggcgaagtaccttccgcgacctgattgcggccggcggccgcgtgcactggtacattccctttcgctggtataacctcccgcgattgaacaatcgaacccaccgcgaactgctcatcgtggacggtgaaatcggtttccttggcggcgccggcgtgtccgaccagtggtttcactcccaaggacggaagcacccgtgctggcgcgacacaatgttccgcgtggaaggccgcgccgtcgccgggatggtggctaccttcgccgagaactggctggaatcctccggcgagttgctctgcgggcctaagtatttccccgagtgcccggaccagggcggcatcgccgccatgatcatcaacagtacgccttccaacggacgcggcacccgcgcgcgcatgctgtatcagatcctcatggccgccgcctgccgcagcattcacatcaccacaccctacttcctgccggatcaaggcgtgcgccgcgaactggttcgcgctatgcgggagcgcggcgtcgaagtgaaaatcgtggtgccgggcaagcatagcgatcacctcctcacccgccgctccagccgccggctttacggcgacctgctgcgcaacggagcacagatcttcgaataccagcccaccatgatccacgctaaaatcatggtcgtcgacggcatgtggagcgttgttggttccaccaacttcgatcaccgctccttcggcatcaacgatgaagtgaatctcgcagccttagacgaatcgctcgccgcgcgcatcgaacaggatttccagcgcgatgtcgcggcatcgcaccgggtaacctttgacgaatggagcagtcgctcgcccttggagcgcttcaacgaatgggtgggatggattctcgaacgtcaggaatag

SEQ ID NO: 14638 - protein, 427 aa, Solibacter usitatus Ellin6076
MVPLYLLIPACLGIVVLLIVVFDAFFEPSLDYRLADSDPLPLDSKEFIRILGVLADTESHTDTRVEVLTNGPCFYPAQLAAIRAARHSVCLEAYIFQKGVIGNDYIQALTERARAGVEVRVVLDAIGSMSTWRSTFRDLIAAGGRVHWYIPFRWYNLPRLNNRTHRELLIVDGEIGFLGGAGVSDQWFHSQGRKHPCWRDTMFRVEGRAVAGMVATFAENWLESSGELLCGPKYFPECPDQGGIAAMIINSTPSNGRGTRARMLYQILMAAACRSIHITTPYFLPDQGVRRELVRAMRERGVEVKIVVPGKHSDHLLTRRSSRRLYGDLLRNGAQIFEYQPTMIHAKIMVVDGMWSVVGSTNFDHRSFGINDEVNLAALDESLAARIEQDFQRDVAASHRVTFDEWSSRSPLERFNEWVGWILERQE

SEQ ID NO: 14639 - DNA, 1191 bp, Geobacter metallireducens GS-15
  CDS (1)..(1191): transl_table=11
atgtccatcgtgagacgaaaaaagataatcggtacccaccgtgccccccgtttcctccgcatcttccggagaaatgccgaggcgtcccattcccgggggaacagggtgaagctctacgattccggtgcggagttcttcccggccatgctgtcggctctggccgaggcccgtcaccacatccacgccgagttctacatcgtgcgcgacgacgccaccggatccgcctttgcggaggcgcttctggccgccgcttcccgcagggtcgacgtttccctcatctacgattacatcggctgtttcgatactccctcctcctatttccggcgcctggagcaggggggagtccggtgcctcgccttcaatcctcccccattccggcggggactcgcctggttcgacaagcgggaccaccggaagatggcggtcatcgacggagaaaccgccttcaccggcggaatcaacatcggcgacgagtactcggggttcgggaggggaaccgaccgctggcgggacgtgggggtgagaatcgacgggcccgccgtcacggacctcgtgcggctcttccgcgagttctggctggaggaaaaggggagcccttctccggcctggtttgcggagcatattcccgtggcaggcatgggagatgccgacgtgatgatcgtgagcgacggcccccaccacgcccgttccttcattcgcaacgccttccgcatcgccatggccggagcgggagaatcgatccggatcatgaacccctacttcgtgccgggtccgcgggtggtccgctctctgctgcgggccgtgcggcgtggggtaaacgttcaattgatcctccccgccaagagtgacgtccccatcgtccggctcgtggggcgcggttactacgcccccctccttcgggccggcgtcgagatctacgagcgccagggggagtttctccatgccaaggtcatgctcatcgacgacacctggggggtggtcggctcggcaaatctcgaccagcgcagcttccatcgcaactacgaagtcaacaccattgttgccagccgcgagttcggccggcagatggcggagatgttcgccgacgacctcagggggtcccgccgtatcgttctagaggagcatgagcgccggggctcgctggtgcggcttctggagcggatttgcaattcggtgagctggtttctgtga

SEQ ID NO: 14640 - protein, 396 aa, Geobacter metallireducens GS-15
MSIVRRKKIIGTHRAPRFLRIFRRNAEASHSRGNRVKLYDSGAEFFPAMLSALAEARHHIHAEFYIVRDDATGSAFAEALLAAASRRVDVSLIYDYIGCFDTPSSYFRRLEQGGVRCLAFNPPPFRRGLAWFDKRDHRKMAVIDGETAFTGGINIGDEYSGFGRGTDRWRDVGVRIDGPAVTDLVRLFREFWLEEKGSPSPAWFAEHIPVAGMGDADVMIVSDGPHHARSFIRNAFRIAMAGAGESIRIMNPYFVPGPRVVRSLLRAVRRGVNVQLILPAKSDVPIVRLVGRGYYAPLLRAGVEIYERQGEFLHAKVMLIDDTWGVVGSANLDQRSFHRNYEVNTIVASREFGRQMAEMFADDLRGSRRIVLEEHERRGSLVRLLERICNSVSWFL

SEQ ID NO: 14641 - DNA, 1509 bp, Geobacter metallireducens GS-15
  CDS (1)..(1509): transl_table=11
atgatccgacctctgctccttatcaccctgtcactccttctcatactcaccgccgttcccggcgcacgcctgtcagccgccgaaaccaccccggtaacgcttcccctggcccggagcatccagcccctgctgtctgcccaccccggcaagaccggcctctatgtcttggaaaagggggaagagtcgctcctggcccgggcgtggctcgcggaccacgccacgaagagcatcgacgtccagtatttcatctggagcagcgacaacatcggcatcctggcctcggaggcgttgctgcgggcggcggagcgggggatacgggtgcgggtgctggtggatgacctcctcatcgacgcgccgccggaatcgctcctggccctggcccgtcaccccaacatcgacatccggatctacaacccgaagatgacggtgggaacctcgaaggtgaagcggttcgccaacgttgtgaccggcttccgttccgtgaaccagcggatgcacgacaagaccgccctcttcgacggcatggtggggatcaccggcggccgcaacatggccgacgagtactacgatttcgaccaggagtacaccttccgggaccgggacatgctgatgctcggcccgactgtggccgaggcggaggcgagcttcgcccgtttctgggagagccccctggctgtgccggtggagaagctgctgaaaaagcccatgaagaagatgacgccggagcggaccggccaggtctatgccggcctccacgcctatgccgggaagccggaaaacttcgccccggaggtccgccaggcgctccagaacctcccccgcaggttcgacgggctgctgcgggagatggtctgggacgaggcccgcttcatctcggacctgccgggaaagaacagcggccgggagggactggggggcggcggccggagcacggcggccctggtggacgcggtgagccgggccaagcggcgggtcaccatccagtccccctacctggtcatgcccgaggggggcgtggagctgttccggaagctgatccggcgcggggtggaggtgcggatcgtcaccaactccctggccgccaccgacaacctccaggccttcagcggctaccggaagcagcgcaaccggctcctgaaggcggggatcaccatccgggaattccgcccggacccggccgtgcggcaggagctgatcgaccgctacccgaagctgaaggagaagccccccaccttcgccctccatgcaaagaccatggtgatcgacggcgtgactctgttcgtcggcaccttcaacctggacccccgttccgccaacctgaacaccgaggtgggggtgatggtccgcaaccccgccctggcccgccaggtggaggagcggatcgagcgggacatgcgcccggagaacagctggaatccggccacggacaacccggaccgccgcgcctcggcggccaagcggaacaggctgcgcctctggaagtcgctgccgctgacccccatcctctga

SEQ ID NO: 14642 - protein, 502 aa, Geobacter metallireducens GS-15
MIRPLLLITLSLLLILTAVPGARLSAAETTPVTLPLARSIQPLLSAHPGKTGLYVLEKGEESLLARAWLADHATKSIDVQYFIWSSDNIGILASEALLRAAERGIRVRVLVDDLLIDAPPESLLALARHPNIDIRIYNPKMTVGTSKVKRFANVVTGFRSVNQRMHDKTALFDGMVGITGGRNMADEYYDFDQEYTFRDRDMLMLGPTVAEAEASFARFWESPLAVPVEKLLKKPMKKMTPERTGQVYAGLHAYAGKPENFAPEVRQALQNLPRRFDGLLREMVWDEARFISDLPGKNSGREGLGGGGRSTAALVDAVSRAKRRVTIQSPYLVMPEGGVELFRKLIRRGVEVRIVTNSLAATDNLQAFSGYRKQRNRLLKAGITIREFRPDPAVRQELIDRYPKLKEKPPTFALHAKTMVIDGVTLFVGTFNLDPRSANLNTEVGVMVRNPALARQVEERIERDMRPENSWNPATDNPDRRASAAKRNRLRLWKSLPLTPIL

SEQ ID NO: 14643 - DNA, 1524 bp, Exiguobacterium sp. 255-15
  CDS (1)..(1524): transl_table=11
gtgcgcaatcggattttacagttcgcgctcgtgtttttagtcgcaggcggaatcatttggggactataccaattgggctacctgttttatgttttgacgatttccgcgaccgtcgtacccttggccgtcatcatgatcatcttcatcgaaaaccggacggcggaatcgacgattgcctggtttttagttttgatcttcttaccgattctcggtgtcatcatctggatgatgttcgggcgcaatccgcgccgccgtcgccggaaccggcggtcgcacgatgaacggatgttgctgaaacaggcaatccgtcccgtccggtcgctcgcggtcagtgagttgccgccgaaccacctgaagcttgccaatacgatccgcaactttggtggcggtggggtcgacgtccatacagccagtcaaatcctgacgaacggcaacgagacgttcccggaaattctccggatgatccgctccgccaagcatcatgttcacatccagtattacatttaccggaacgacgagaccgggcaggcaatccgcgaagcattgattgaccggttgaatgacggggtcgaagtccggttcatgtttgacggtcttggcagttacatgctcggcgaaggatttttgaaaccgctccgggaagccggggcaaagattgccgcctatgatcccatctccagtccgttgttcatctttacggcgaacttccgcaatcaccggaaaatcgttgtcgtcgatggcaaaatcggttttaccggtggactgaacgtcggcgacgagtatgacggtaaaagtaagaagttcggcttttggcgcgatacccaccttcggctcgaaggacgggccgtcaaggaactgcaggcaacgttcctcgacgattggctctatgcccatttagaaggcagtgatacgtgggagacgtttgccggcgaaggggcaatcgatcaatacttcccgaaacacgatgtcgagaccgacggcgcggtccagctcgtgacgagtggaccgacgtcaaaagatccggcgatccggaacgcgttgattgccgccatcatctcggcccagcgctcgatctggatttcgacgccgtatctgattccggataacgagacgatgacactgctccgtcttgcggcccgtgccggactggacgtccggattctgacaccgggtaagggagacagttttacctcctactatggaacccggtcctatttcggacctttgttaaaagatggagtcaaaatttatacgtataaccggcacttcatccatgccaaactgttcctcgtcgatggaaagattgccgtcgtcggaacggcgaacatggatatccggagcttcgttttgaactacgaactgatggcctttatgtatgattccgagagtgcggcccggctcgaacgcgatttcatcgatgatttcgacgtctcgattcagttgtcctcggcggattatgtcaaacggccgatgcggttccggatttttgaatcgttctcccgtttgatttcaccattgttatga

SEQ ID NO: 14644 - protein, 507 aa, Exiguobacterium sp. 255-15
MRNRILQFALVFLVAGGIIWGLYQLGYLFYVLTISATVVPLAVIMIIFIENRTAESTIAWFLVLIFLPILGVIIWMMFGRNPRRRRRNRRSHDERMLLKQAIRPVRSLAVSELPPNHLKLANTIRNFGGGGVDVHTASQILTNGNETFPEILRMIRSAKHHVHIQYYIYRNDETGQAIREALIDRLNDGVEVRFMFDGLGSYMLGEGFLKPLREAGAKIAAYDPISSPLFIFTANFRNHRKIVVVDGKIGFTGGLNVGDEYDGKSKKFGFWRDTHLRLEGRAVKELQATFLDDWLYAHLEGSDTWETFAGEGAIDQYFPKHDVETDGAVQLVTSGPTSKDPAIRNALIAAIISAQRSIWISTPYLIPDNETMTLLRLAARAGLDVRILTPGKGDSFTSYYGTRSYFGPLLKDGVKIYTYNRHFIHAKLFLVDGKIAVVGTANMDIRSFVLNYELMAFMYDSESAARLERDFIDDFDVSIQLSSADYVKRPMRFRIFESFSRLISPLL

SEQ ID NO: 14645 - DNA, 1440 bp, Exiguobacterium sp. 255-15
  CDS (1)..(1440): transl_table=11
atggactataccctaatcctgaagattttgctctatgtcgtgttgattgccaactttgcagcagcaatcgccatcctgttttttgagcggcgcgatgtcagtgcaacctgggcctggctgatgatcctcttgttcctgccggtcatcggctttttgatttacttgttgttcggccgctccttgaaacaggattcgttttatcatgtgccggaagatcgccggttggcgcgcgaacaagaccttaccgaacaggcagctgaagcgattccccccaatacaccactttatccgtaccggaagctgattcaggcgaatcgttcatcaggtgccctgttgacggaggcgacggtcgtccggagcctgttcgacggtcatcagaaattcgatacgttacttgctgacattaaaagcgcgcaagtcgaaatcaatatccagtattttatcttaaaacgtgatccgctcggcgaccgtctgctgaacgctttgttcgaacaggccaagcgcggcgtcaaagtccggattctgtatgacgccgtcggttcgtggaaactgaaagccaaggatttcgcgtcgttcaaacaggacggcggcgaggtccgctcgttcttctcgtcgccgctcggtatcttcaacctgcgcatcaacaaccggaatcaccggaaactctgtacgatcgaccggcaaatcggctatatcggcggctttaacgtcggatcggaatacctcggggaagacgaacagttcggctactggcgggatacccatctgcgggttcttggtccggtcgtcgaagaactcgaatttcatttcgaacaggactgggacgctgcgagcaacgagcggaccgactggtcgaccgcaccgattccgccgcatgctgcagcgacggatcatgtaccggttcaaatcgtgacgtccggtccgacatccgagacggagtatttgaaaaatatgctgattcagatgattcattctgccgaaaaatcggtttacatccagtcgccctacttcattccggatgccagtttcatggacgcctgccagattgccctggcttccggcgtttcgctcaaaatcatgattccgaatcaaccggaccatccctttgtctactgggcgacgtacgcggcagtcggcgaattgattcaacacggggccgaagtctacacgtacgaaatcggcttcatgcatgcgaagacgattgtcgtcgacgggaaaatcgcttcggtcgggacgacgaatatcgatgcccggagcttccggctgaactttgaaatgaatgcgattttgtacgatgcggcgattgcagaagaactggagctgctcttcttatcggacgtcgccgacagtgccttgctgacacgagaaaaatacgccgcccgtccgcggatgatccgctttaaagaaagtatctcgcgtctgttgtcaccgattttgtga

SEQ ID NO: 14646 - protein, 479 aa, Exiguobacterium sp. 255-15
MDYTLILKILLYVVLIANFAAAIAILFFERRDVSATWAWLMILLFLPVIGFLIYLLFGRSLKQDSFYHVPEDRRLAREQDLTEQAAEAIPPNTPLYPYRKLIQANRSSGALLTEATVVRSLFDGHQKFDTLLADIKSAQVEINIQYFILKRDPLGDRLLNALFEQAKRGVKVRILYDAVGSWKLKAKDFASFKQDGGEVRSFFSSPLGIFNLRINNRNHRKLCTIDRQIGYIGGFNVGSEYLGEDEQFGYWRDTHLRVLGPVVEELEFHFEQDWDAASNERTDWSTAPIPPHAAATDHVPVQIVTSGPTSETEYLKNMLIQMIHSAEKSVYIQSPYFIPDASFMDACQIALASGVSLKIMIPNQPDHPFVYWATYAAVGELIQHGAEVYTYEIGFMHAKTIVVDGKIASVGTTNIDARSFRLNFEMNAILYDAAIAEELELLFLSDVADSALLTREKYAARPRMIRFKESISRLLSPIL

SEQ ID NO: 14647 - DNA, 1512 bp, Exiguobacterium sp. 255-15
  CDS (1)..(1512): transl_table=11
atgttaaggcgtgtccaattacttatgacgctactgttaaccgtcagtctgatcggctttctttcctattactggagtgtgtacatggtaggatggctctcaatcgtcatcattcttgtcgtactgagtgtttttgtcatcatcctacttgagaatcggaacccggaacgaacgcttgtctgggcgcttgtcatgatggcgcttcccgttgtcggtgttttcgtatatttcacctttggtcaaaattatagacgaaaaaaaatgtttcgtctgaaagcgatgctcgatgaagagtcttacattaaatatcgtacccagtttgatcatggaatacacaatcaagtgttccaacatggacattatacgaaagttgttaaactcatcgactccatcagtcgcctgccgatttcgtataatagtcacacgaaagtattaacgaatggacaagaaaaatttccgctgttattagccgagattcgtcaagcggaacaccacatccatttggaatactatatcgtccgcgatgacgaactggcgctagagttgcaggaagcattaattgaacgggcgaaagccggagtggagatccgtttcttgtatgatgctgtcggttgtttctcgacggataagtcttactttaaaaagatggagctggcgggaatcgaagtccgtccatttttcccggtcgttctgcctttcatctcgagtaaatccaattatcggaatcaccggaaaatcgttgttattgacggtactgtggctttcacgggtggaattaacgttggggacgagtacatgggaaaagataagatgtttggattttggcgggacacgcatttgctcgtcaggggagaggccgtctcggagcttcagttgatttttcttcaggattggtactatatgacgggggaacggttgtttacaccgtattatatgaaaccgctcgaagtcatggaggaatcgacaggaggcgtccaaatcattgcgagcgggccggatgaaccccatgaaacgatgaagtctctctacttcggtttaattacggaagcccggagttctgtttacattgcttctccctatttgattccggacgaggatctgatgactgctttaaagacggcagcgatgtcgggaatcgatgtccggatcttactgccgagttttccggatcataaagtcgttttttatgccagtcgctcttattttgatgacttgttattagcgggtgtaaagatttacgaatacaacaaaggattcatgcactcaaaagtcatcgtggtcgatgatgcgattgcgacgattggcacggcgaatatggacttaagaagttttcacttgaactttgaagtaaatgcctttttgtacgggacaaattccgtccacgaattaacacgtgacttttatgaagacttttccaattcttcacaagttgagcgtcaagtctttattcaaaggagtttcggtcaacgtttgatcgagtccatttcgcggttattttcaccgttactctaa

SEQ ID NO: 14648 - protein, 503 aa, Exiguobacterium sp. 255-15
MLRRVQLLMTLLLTVSLIGFLSYYWSVYMVGWLSIVIILVVLSVFVIILLENRNPERTLVWALVMMALPVVGVFVYFTFGQNYRRKKMFRLKAMLDEESYIKYRTQFDHGIHNQVFQHGHYTKVVKLIDSISRLPISYNSHTKVLTNGQEKFPLLLAEIRQAEHHIHLEYYIVRDDELALELQEALIERAKAGVEIRFLYDAVGCFSTDKSYFKKMELAGIEVRPFFPVVLPFISSKSNYRNHRKIVVIDGTVAFTGGINVGDEYMGKDKMFGFWRDTHLLVRGEAVSELQLIFLQDWYYMTGERLFTPYYMKPLEVMEESTGGVQIIASGPDEPHETMKSLYFGLITEARSSVYIASPYLIPDEDLMTALKTAAMSGIDVRILLPSFPDHKVVFYASRSYFDDLLLAGVKIYEYNKGFMHSKVIVVDDAIATIGTANMDLRSFHLNFEVNAFLYGTNSVHELTRDFYEDFSNSSQVERQVFIQRSFGQRLIESISRLFSPLL

SEQ ID NO: 14649 - DNA, 1467 bp, Desulfuromonas acetoxidans DSM 684
  CDS (1)..(1467): transl_table=11
atgcagagatttcttttttttctttttttcctttttgttgctgcttccactgtatccgccaatgaccttcaagacctgctgccaccattactgtccgcccatcccaaccagagcggtgcttatgtcctcgacaaaggggaagagtccctgctggcgcgcgcctggctggtggatcatgcggcggaaaccatcgacgtgcagtatttcatctggagcgatgacaatatcggcaccctggccaccgagagcctgttgcgtgcggcgcagcgtggtgtgaaggtgcgggtgattgttgatgatcttttgatccaagccccagaggattttctgctggcgctggccgcgcatcccaatatttccatccgggtgtataatccgcagcacaaaaccggcgtttccactcagcagcggctgtggaatattttcagcaatttccgtgcggccaatcagcgcatgcatgataagacatttattgtcgatcagcaggtagccatcaccggcgggcgcaacatggctgatgaatattatgattttgaccagagctacaattttcgtgatcgcgacattctgctgcttggcccggtggcacagaccatgaccggcagttttgacgcgttctggaacagtgatctggccaagccgattgaaagcttgcttaatgccaagcttgccccggatgcacaacggcgagaagccatctatgccgatctgcatgcttacgcgcaaaacccggaaaattttgccccggaagtgaaacaggcgttggacgatctgccactcaagtttcgcgggttgatggataatctggcgtggggcccggtgtgctttgtcagtgatgaaccgggcaaaaatcccggagacaacgggctgggcggtggtggccgtaccaccagtcagctggccgcagctctggcgcgggcacagaaaagcgtgactatccagtcgccctatctggtgatgccggacggcggtctggaattgtttgccgggctgatcaaaaaaggggtcaaggtgcgcatcagtaccaattcgctgttgtccacggataacctgcaggcgttcagcggttacagcaatcaacgtgaagatcttcttgatgcgggtattgaggtgtttgagtttcagccctatccacgcattcaacagcagttgatggagcgctatccgaagctaaaagagaagtcgccggtgtttgccctgcacgccaaaaccctggtgatcgacggcaaacagttgtttgtcggcacctttaatctcgatccgcgttccgccaatctcaacaccgaagtgggcgtgattattgataatccgcatttggctcagcaggtggagctggagatcgagcgtgacatggcccccggcaacagctggaacagcgccgaggataacccggaccgcttcgcgccctggggtaaacggctgaaaatgacgttctggaagtggatgccgatggaagatattctgtga

SEQ ID NO: 14650 - protein, 488 aa, Desulfuromonas acetoxidans DSM 684
MQRFLFFLFFLFVAASTVSANDLQDLLPPLLSAHPNQSGAYVLDKGEESLLARAWLVDHAAETIDVQYFIWSDDNIGTLATESLLRAAQRGVKVRVIVDDLLIQAPEDFLLALAAHPNISIRVYNPQHKTGVSTQQRLWNIFSNFRAANQRMHDKTFIVDQQVAITGGRNMADEYYDFDQSYNFRDRDILLLGPVAQTMTGSFDAFWNSDLAKPIESLLNAKLAPDAQRREAIYADLHAYAQNPENFAPEVKQALDDLPLKFRGLMDNLAWGPVCFVSDEPGKNPGDNGLGGGGRTTSQLAAALARAQKSVTIQSPYLVMPDGGLELFAGLIKKGVKVRISTNSLLSTDNLQAFSGYSNQREDLLDAGIEVFEFQPYPRIQQQLMERYPKLKEKSPVFALHAKTLVIDGKQLFVGTFNLDPRSANLNTEVGVIIDNPHLAQQVELEIERDMAPGNSWNSAEDNPDRFAPWGKRLKMTFWKWMPMEDIL

SEQ ID NO: 14651 - DNA, 1443 bp, Desulfuromonas acetoxidans DSM 684
  CDS (1)..(1443): transl_table=11
atgaacggattttctgtgggcatcgtgatcgtgaacctgctgtcattcgtggttgcggttcacgccttgctcaacaagcgcgatccgcgtgcggcgctggcctggatcattgtctgtctggcgctgcccggagtcggtgtggtgctctactggctgatgggggtcaatcgcatccgcacgcgggcattgcgctggcagcggcgtggcgaagggatctatgttgccgaagaggaagcgccgtgcgagaagagtgttgtgctgcgcaccccgtttcatacccagaactatcagttgcaacgccacctggccgatgctgtaacgcggcgcccgcttgttggcggcaaccgggtggtgccgctatacaacggcgagcaggcctacccggttatgctcaaatcgattcgtgccgccgagcgcagtatcgatctgtccagctatatttttgacacccaattttgtgggcgtgagtttgtccaggcgctgattgaacgagcggaagcgggcgttgccgtgcgggtcctggtggatggcctcggcgagtgttattcctggccacgggtgcatactctgtttgacaagaccccggtgcaggtggtgcgctttctgccgttgtcactgtttcgacgcggaatgcaccttaatttgcgcaatcaccgtaaattgctgattgttgatggcagggtcggctttgccggcggcatgaacatcagccaacggcatctggtacagaaaaaacgccatgatgtacgaccacgtgagcgggttgtcgatattcactttaaagtggaaggcccggtggttcggcagatgctggaagtgtttcaggaggactggcagtttgccggtggcaggccgtttgagctcgaccccactccaccctgtcttggcggcccggacagcttgtgtcgagggatcagcgccggaccgaacgaagactatgaaaagctggtgtggattgttgttggtgcgctaaattgtgcgcgcaagcgggtttcgatcatgacgccctactttattcccgatcgttccatggtcaccgccatgaacagcgccgccttgcgtggcgtcaatgtcgagattgtcctgccggtaagaaataacctgccttatgtccactgggcgagtcgcggtgccttctgggaactgctcgaatacggcgttaagatttattaccagccacctccatttgcccacagtaaattgctgttgatggacgatcactatgccctgatcggctcagccaatatggatccgcgcagtcagcgcctcaattttgaattcaaccttgaagtgtacgataaaagtttcaatgccgagatgcgtcaccatttcgacaccactgtggccaaatcccaagccatcagcctcgacgagatggatgggcgtccggtctggcaaaaaatgcgcgacaactttttccgcctgtttactccgttcctttag

SEQ ID NO: 14652 - protein, 480 aa, Desulfuromonas acetoxidans DSM 684
MNGFSVGIVIVNLLSFVVAVHALLNKRDPRAALAWIIVCLALPGVGVVLYWLMGVNRIRTRALRWQRRGEGIYVAEEEAPCEKSVVLRTPFHTQNYQLQRHLADAVTRRPLVGGNRVVPLYNGEQAYPVMLKSIRAAERSIDLSSYIFDTQFCGREFVQALIERAEAGVAVRVLVDGLGECYSWPRVHTLFDKTPVQVVRFLPLSLFRRGMHLNLRNHRKLLIVDGRVGFAGGMNISQRHLVQKKRHDVRPRERVVDIHFKVEGPVVRQMLEVFQEDWQFAGGRPFELDPTPPCLGGPDSLCRGISAGPNEDYEKLVWIVVGALNCARKRVSIMTPYFIPDRSMVTAMNSAALRGVNVEIVLPVRNNLPYVHWASRGAFWELLEYGVKIYYQPPPFAHSKLLLMDDHYALIGSANMDPRSQRLNFEFNLEVYDKSFNAEMRHHFDTTVAKSQAISLDEMDGRPVWQKMRDNFFRLFTPFL

SEQ ID NO: 14653 - DNA, 1437 bp, Desulfitobacterium hafniense DCB-2
  CDS (1)..(1437): transl_table=11
gtgattaaattgataaaacttatgatcggttcagccctgttagccctttcactggcgctgcttataatttgcttagaaaagaagaatccggaaaagaccgccgcctggctgtcttttctggccctcaatcctctgctggggatgatgatctacctggttttcggctgcaccccgcttaaaaaaagcttattccgatccaaacatatgcccggggagcaattgcccgctttagcgcatcagcaaaagcaggccttctctgaaaatgagatctatatccaggagtccatagacgctaaaggtctgtcaaggcttttattaggaaaggcttttgcgcctttatcccggaataattcccttacccttctccacaacggagacgcaaaatttgcggctctgcttgaggatttagaaaaagctcaggatcatattcatatggaatattatatttttcatgacgatgccattggcaggagggttcagcagatcctgatccgcaaagccggtgagggtataaagatacgtttgatgtttgacgggctgggcagccgcagcctcgctaagaattttctcagggagctgagagctgccggaatagagctgcagtggtttttgcccctgcgttttccccgggccttcttgaccctgaactatcgcaatcatcgcaaactggtggttattgacggcaggattggctatctgggcggcatcaatattggggatgaatacttgtcccgaagcgctaagtacggattttggcgggacacccatctgcgcctggaagggaccagtgtgcacaccattcaggagacttttttcaatgattggtattatctcacaggggaaatccatagggaccctcgttattttcccaaggagcgggaggatggggaaatgctggtccaaattattggcgggggaccggattcccactatgaatccatcaaggaactcttcttcacgatgttaagcacagcgcaaaaggagatcgtggtgacgaccccttactttataccggatgaaagtatgatcatggccctgaaaaccgcggcctccagaggggtagccgtcaaaatcatccttcagggaaaacctgatcataagcttccttatctggcctcatcctcctatttccgcgatttgatcccgtcgggtgtggagatctatcgctaccaaaaggggatcctgcacagcaaggtattaacagttgatcaagagataggtgtggtgggctccgccaattttgacatacggagttttcaaatagacttcgaactaagtgcggtgatcttcggctctgattttgcagagaagctggttcgcgaccaagagcaggatcttcaggacagcctgcagataacccagcaggatctgcaaagcagaactccgctgttgtctttgcaaatcgctttagcccgtcttctttcacctttgctctag

SEQ ID NO: 14654 - protein, 478 aa, Desulfitobacterium hafniense DCB-2
MIKLIKLMIGSALLALSLALLIICLEKKNPEKTAAWLSFLALNPLLGMMIYLVFGCTPLKKSLFRSKHMPGEQLPALAHQQKQAFSENEIYIQESIDAKGLSRLLLGKAFAPLSRNNSLTLLHNGDAKFAALLEDLEKAQDHIHMEYYIFHDDAIGRRVQQILIRKAGEGIKIRLMFDGLGSRSLAKNFLRELRAAGIELQWFLPLRFPRAFLTLNYRNHRKLVVIDGRIGYLGGINIGDEYLSRSAKYGFWRDTHLRLEGTSVHTIQETFFNDWYYLTGEIHRDPRYFPKEREDGEMLVQIIGGGPDSHYESIKELFFTMLSTAQKEIVVTTPYFIPDESMIMALKTAASRGVAVKIILQGKPDHKLPYLASSSYFRDLIPSGVEIYRYQKGILHSKVLTVDQEIGVVGSANFDIRSFQIDFELSAVIFGSDFAEKLVRDQEQDLQDSLQITQQDLQSRTPLLSLQIALARLLSPLL

SEQ ID NO: 14655 - DNA, 1608 bp, Methylobacillus flagellatus KT
  CDS (1)..(1608): transl_table=11
atgatggctttatttatcaggtgggtgcacaggaggggctctctacctattggagtccgctggttacatcgcacgctgatgttgatgctggttgcgcctctgtttgcatgtgggctgccgcatgttcgggacagcgacaagccttcttctgcagcatttccgatcgatgaggttgcggagactaagttgggccagaccatgcagccgctcaaggctgcccatcctggcgagtctggcattatgccgttactggatgcgtatagcgcttttgcagctcggatgttgttgacgcattccgcagaaaaaagcctggatgtccaatattacatctggcgcaatgacaataccggcatcctgttcctcgaagcattacgcaaagcggcggagcgtggtgtcagggtacgcctgctgctggacgataatggcatcagggggcgcgaaatggacgccagattggccgcgctcaacaagcatcccaatatcgaaatccgcctgttcaacccttttcctttacgtacattcaagtcattgggttttctgacagacttttcacgtctcaaccggcgcatgcacaacaaatcattcacggccgataacatggtgaccatcattggcgggcgcaatgtcggggatgagtatttcggagcggcggatggtgtgctgttcgcagacctggatgtcatggcaattggtacggtggtggatgatacgtcacgagattttgaccgctattgggccagtccggctgcctatccattgcgtctgctgatccctgaccctagcgaccgggaattgcaggcgctgagcatggcggcggagaaagcggaaaaaaccgtcactggccaaggttatctcaaagcgctgaaggaaagccaattcatccacgatttcatcaaggggttgcgcgcattcgactgggccaaggtggagttgatcagtgatagcccgggcaagattactggtcatgcggaaaaagatgagctgatggtcttcagtttggctaagatcctgcgcaaccccagggagagcgtggatttggtgtctccttatttcgtgcctacccagacaggcgtggatggtttttccgcgctggctagacgcggtatccatatccgcatcctgaccaatgcactcgagtccaccgacgtggccgctgtgcatgcgggctatgcaaagtggcgaaaacccctgttgcaggccggtatccaattatatgaaatgcgccgccaggtagctgaaaacggcatggcaaagtacctgggtcctctgggcagctcggggtccagtttgcatgccaagacatttaccattgatcgttcacgcgtatttatcgggtcattcaattttgacccgcgctcagcccagctgaatacggaactgggatttatcatcgaaagtcaaaaattagcccaacaggtagaggaggcattcaaggcggatgtgccccaaagtgcttatgaagtcaggctggatgaacatgaccgtttgtattggcttttctaccaagacggtgtcgagcagcgattcgatgtggatccgggtaccaacatgctgcaacgattttttgtgaaaatattgtcggtgttaccgatcgactggttgttatag

SEQ ID NO: 14656 - protein, 535 aa, Methylobacillus flagellatus KT
MMALFIRWVHRRGSLPIGVRWLHRTLMLMLVAPLFACGLPHVRDSDKPSSAAFPIDEVAETKLGQTMQPLKAAHPGESGIMPLLDAYSAFAARMLLTHSAEKSLDVQYYIWRNDNTGILFLEALRKAAERGVRVRLLLDDNGIRGREMDARLAALNKHPNIEIRLFNPFPLRTFKSLGFLTDFSRLNRRMHNKSFTADNMVTIIGGRNVGDEYFGAADGVLFADLDVMAIGTVVDDTSRDFDRYWASPAAYPLRLLIPDPSDRELQALSMAAEKAEKTVTGQGYLKALKESQFIHDFIKGLRAFDWAKVELISDSPGKITGHAEKDELMVFSLAKILRNPRESVDLVSPYFVPTQTGVDGFSALARRGIHIRILTNALESTDVAAVHAGYAKWRKPLLQAGIQLYEMRRQVAENGMAKYLGPLGSSGSSLHAKTFTIDRSRVFIGSFNFDPRSAQLNTELGFIIESQKLAQQVEEAFKADVPQSAYEVRLDEHDRLYWLFYQDGVEQRFDVDPGTNMLQRFFVKILSVLPIDWLL

SEQ ID NO: 14657 - DNA, 1152 bp, Methylobacillus flagellatus KT
  CDS (1)..(1152): transl_table=11
atgcgctgggaatccggcaaccgcatcaccctgctccgcaacggtaccgagttcttcccggcactggcggcttccatcgaggctgcgcagcatgaaatccatctccagacctatatttacgaactggatgccaccggtgccatgataggcgagaaactcaaggcggccgctgcgcgtggcgtggccgtccatctcctgctggacggcttcggcagccgcaagctgccgccggaatacgtgctcgagatggaagccttcggcgtcaaggtcatgttctaccgcccgaagatttcaccgtggtcattcaagcgtaatcgcttgcgtcgcctgcatcgcaaggtctcggtgttcgacgggcagcatgcctatgtcggcggcatcaacatcatcgacgacatgaacgtgccgagcaaccttgatgcaccccgcgtcgattatgccgttcgcgtcgacgggccattggtgctgagcatccatgccagcgtgcgcaacctgtggcggcgactggcctggatgcacttgcgcgaagtttcggcctatcccaacctgcctgcgccgccattcatcacgaacgggatgcgtgcggccttcgtcgtgcgcgataacgtgctgcatcgccgggatatcgagcgcgcctacctcaaggccattggcaaggcgcgggtcgatatcatcattgccagcgcctatttcgtgccgggcaagaagtttcgccaggcgctgatcgaagctgccaagcgcggcgtgcgcgtacgcctgctgttgcagggacgcatggaatactggctcatgttcgcgacacacgaagtttatggcctgttcctgcgccatggcattgagatttacgagtatcgcgccagcttcatgcacagtaaggtggcggtagtggatagtcgttgggccaccgtgggttcctccaaccttgacccatttagcctgatgctggcccgcgaggccaacatcatggtgcaggacaaacgcttcaatgccgagctgaaggcggacttggaaaaggcgattgcggaaaagtccgtgcaggtgcgtccggaagactggtctcggcgacatgtcttcaagtgtgcattctcatggatcgtgtatgtcgtcgtgaggctcatgattggcttggtcggctccaaggagaaacattga

SEQ ID NO: 14658 - protein, 383 aa, Methylobacillus flagellatus KT
MRWESGNRITLLRNGTEFFPALAASIEAAQHEIHLQTYIYELDATGAMIGEKLKAAAARGVAVHLLLDGFGSRKLPPEYVLEMEAFGVKVMFYRPKISPWSFKRNRLRRLHRKVSVFDGQHAYVGGINIIDDMNVPSNLDAPRVDYAVRVDGPLVLSIHASVRNLWRRLAWMHLREVSAYPNLPAPPFITNGMRAAFVVRDNVLHRRDIERAYLKAIGKARVDIIIASAYFVPGKKFRQALIEAAKRGVRVRLLLQGRMEYWLMFATHEVYGLFLRHGIEIYEYRASFMHSKVAVVDSRWATVGSSNLDPFSLMLAREANIMVQDKRFNAELKADLEKAIAEKSVQVRPEDWSRRHVFKCAFSWIVYVVVRLMIGLVGSKEKH

SEQ ID NO: 14659 - DNA, 1173 bp, Sphingopyxis alaskensis RB2256
  CDS (1)..(1173): transl_table=11
atggatttgccgcctcatctggccagtcttgcgcgtctcgggcgagacgtgtcaggcaaagaactgttgcccggaaatcgctgcacccccctttttgggggcacagaggcctacccgcaaatgcttcaggcgatttgcgaagcgaagcattctatcgcccttgcctcgtacattttcgagggcaaggggatcggggcgcttttcgtcgataccctcgcgcaagcgcggtcgcgcggagtgagcgtcaaggtcctgatcgatgatgcctatgccaggttatccaactcggacgcctacggagcattgcggcttcacggtattgatgtcgccctgttcaatccccctgtgataccggcacgcctgcacgggttgcatctgcgcaaccatcgcaaactgctcatcgttgacgggtaccggggctttaccggcggcatgaacatccataggccctattggtgtcccaaggccccggaaagcgctttccgcgatctgcaccttgaggtttcgggtccggtcgtcgggcaaatgcgggaaaccttcgagcgggactggtacgatagcaaggaagaagagctggacgaaagcttctggactggcaaatcgggcggtccgatcaccgacggatttagccttgcgcgcgggatcgaatccggacctgacgaaacgctggaccggatgcggtggattttcataggcgcaatcaatgccgctcagaaaaagatttccatccgcacaccttatttcctgcctgaccagcctactattgccgcgctgggcgcagccgctttgcgaggggttcgggtcgagatcgtggtcccgcgaaacagcgaccatctgttcgtgcaatgggcatctaaggcgcattactggcagataatcgaacacggtgtctgcatttatgagcgccccggcccgttcgatcatggcaagctgatgataattgacgatgcctgggtgtgtgtcggctccgccaactgggatgcgcgtagcctgcgcctgaacttcgaattcaacctggaaatttacgatcgcaggctggcgctggagcttggtgacgatttcgcccgaatcaggtctgcgtcgaagaaagtgaggccgaccgacctgtctgacatgccgtatttcgtgaaactgcgaaatggctttgcgcggctgttttcgccgatcctttga

SEQ ID NO: 14660 - protein, 390 aa, Sphingopyxis alaskensis RB2256
MDLPPHLASLARLGRDVSGKELLPGNRCTPLFGGTEAYPQMLQAICEAKHSIALASYIFEGKGIGALFVDTLAQARSRGVSVKVLIDDAYARLSNSDAYGALRLHGIDVALFNPPVIPARLHGLHLRNHRKLLIVDGYRGFTGGMNIHRPYWCPKAPESAFRDLHLEVSGPVVGQMRETFERDWYDSKEEELDESFWTGKSGGPITDGFSLARGIESGPDETLDRMRWIFIGAINAAQKKISIRTPYFLPDQPTIAALGAAALRGVRVEIVVPRNSDHLFVQWASKAHYWQIIEHGVCIYERPGPFDHGKLMIIDDAWVCVGSANWDARSLRLNFEFNLEIYDRRLALELGDDFARIRSASKKVRPTDLSDMPYFVKLRNGFARLFSPIL

SEQ ID NO: 14661 - DNA, 1140 bp, Sphingopyxis alaskensis RB2256
  CDS (1)..(1140): transl_table=11
gtggcggatcatcggatcgagttgatcttcgacggcggcgagcggatgacgcgcctgctccgactgatcgatcgggcggcgcacagcatcgacctcatcatctatatatttgaaggcgacgccgcaggactcagcgtcctgcgcgcgctgaccgccgcggcgcggcgcggcgtgcgcgtgcgcgtgttgatcgacagcttcgggtcgggcgacacgcccgacgcgctgttcgcgccgctgcgcgaagcgggcggcggcgccacctttttctcgcgccgctggcgttcgtcctatctcatccgcaatcaccagaagctgatcctgatcgacaatgcggttgccatgacggggggcttcaacatcgccgacgattatctgagcgcgccgcgcagcgatggctggctcgacatcggcatgatcgtcgaggggccgagcgtcgcgcgcgcggccgactggtttgccgaaatccatgattatacggtcagcaacgacggtaagctcctgatattgcggcggctgatccgcgaatggccggtcgatggcggcgcagtgtcatggcttgtcggcgggccgacgcagcggctttcgccctgggcacgcgccgtgcgcgccgacctgaacgatgcgcgtcaactcgacatggcaatggcctatttttcacccggccagggcctgctccgccgcctcggccgcgtcgcgcagcgcggtcgcgcgcgcttcatcatggcgggcaagtccgacaatggcgccacgatcggggcctcgcgccttctctatggctatctgcttcgcaagggcgccgacgtgtgggaatatcggcggtgcaagctgcacatgaagctgatcgtcgtcgacgatgtggtctatatcggctcggccaatttcgacgtgcgcagcctgttcgtcaatgtcgagctgatggtgcggatcgccgatgccggctttgcggcgcagatgcggcgctttgtggcgggcctccagcccgattgcgacatcatcaccgccgaggcgcacaaggcacgcgcaagctggtggacgcggctgcgctggacactcgcctggttcgtcgtcggcgtcgccgattatacggtgtcgcgcaaactcaacttcggcctcggtgaccccgatcccgatgtctag

SEQ ID NO: 14662 - protein, 379 aa, Sphingopyxis alaskensis RB2256
MADHRIELIFDGGERMTRLLRLIDRAAHSIDLIIYIFEGDAAGLSVLRALTAAARRGVRVRVLIDSFGSGDTPDALFAPLREAGGGATFFSRRWRSSYLIRNHQKLILIDNAVAMTGGFNIADDYLSAPRSDGWLDIGMIVEGPSVARAADWFAEIHDYTVSNDGKLLILRRLIREWPVDGGAVSWLVGGPTQRLSPWARAVRADLNDARQLDMAMAYFSPGQGLLRRLGRVAQRGRARFIMAGKSDNGATIGASRLLYGYLLRKGADVWEYRRCKLHMKLIVVDDVVYIGSANFDVRSLFVNVELMVRIADAGFAAQMRRFVAGLQPDCDIITAEAHKARASWWTRLRWTLAWFVVGVADYTVSRKLNFGLGDPDPDV

SEQ ID NO: 14663 - DNA, 1527 bp, Shewanella amazonensis SB2B
  CDS (1)..(1527): transl_table=11
atgcccccacgtgtttcctggcgttcattttggctgatgatcctcggatgtatctcactcgggggttgcagtagtctgcctgaacttaaagatgcaccgcggagttacaagctgacatcggcgccggatagcctgatagccggatacctggcagagccactggccggtcacccggggcaaagtggcgtgttgcccctgtttgaggggctggatgccatggtggccaggttggcgctgataaagtccgccgaaaccagcatcgatttgcaatattacatctttcgcaacgatgacactgggcgacttctggcctggcagctgctggatgcagcagaccgaggcgtacgggtacgtttgctgctggacgatactgccagcgtcaatattgaccggcagttggcggtcatggcgagccacccgaatgtctccgtcaggctctacaatccatcgtctcatcgcaccctcagggccttgtcgtttgtcaccgatttcggtcgcatgaatcatcgcatgcacaacaaatcactgacggtggataatcgcctcagcgtggtgggcgggcgcaatatcggcaacgaatatttctccaatgacgaagatgtagagtttggcgatctcgacgtgttgttgaccggaccggtggtagagcaggtctctgaccaatttgatgcctattggaatggcagcaacacctatccggtcgagcttctgaccgagcatcccgtacagtccgatgagctcgcagccatgtatgaccagattgccaaccagaagcgccagcttgaggagcatccctatatacagcgcctcaccaagtcgccgctgctcagacacatggcggacaatcgtctggaatggttttggggggaggcgaaagttcttgccgatcctcatgataagcgagaagggcaagcggaagcctggatgatcacgcccttgctagatgagtttcagcaaacccgggagcgcctggttatcatttcgccttactttgttcccacaacagagggcgtcagattgcttaccgggcttgccaagcgcggtgtcgcggtaaccgtgatcaccaatagcctggctgccaccgacgtgctggcggttcattccggttacaagggatatcgtgaggcactccttcgcgcgggagtttccctgtatgaagtgaaagcgaccggcaagcgcccgagtcattcctggaaaggcagctcccgctccagtttgcatgccaagagctttttgtttgacgatgacaggctctttgtcggctcctttaattttgatccgcgttcggcctggcttaatactgaaatgggggtcatggttaatcagggggagctgaatcagaaaattcatgcctggctgccccagtttttaaccaacaaaacttaccaggtgaagcttggcagcgatggcctctactggcatgaactcagttcgggaaaagatatttatgccgagccccaggccggattttggcgccgctttatggccgatgtgctggcgctgtttccactggaatcccagctttaa

SEQ ID NO: 14664 - protein, 508 aa, Shewanella amazonensis SB2B
MPPRVSWRSFWLMILGCISLGGCSSLPELKDAPRSYKLTSAPDSLIAGYLAEPLAGHPGQSGVLPLFEGLDAMVARLALIKSAETSIDLQYYIFRNDDTGRLLAWQLLDAADRGVRVRLLLDDTASVNIDRQLAVMASHPNVSVRLYNPSSHRTLRALSFVTDFGRMNHRMHNKSLTVDNRLSVVGGRNIGNEYFSNDEDVEFGDLDVLLTGPVVEQVSDQFDAYWNGSNTYPVELLTEHPVQSDELAAMYDQIANQKRQLEEHPYIQRLTKSPLLRHMADNRLEWFWGEAKVLADPHDKREGQAEAWMITPLLDEFQQTRERLVIISPYFVPTTEGVRLLTGLAKRGVAVTVITNSLAATDVLAVHSGYKGYREALLRAGVSLYEVKATGKRPSHSWKGSSRSSLHAKSFLFDDDRLFVGSFNFDPRSAWLNTEMGVMVNQGELNQKIHAWLPQFLTNKTYQVKLGSDGLYWHELSSGKDIYAEPQAGFWRRFMADVLALFPLESQL

SEQ ID NO: 14665 - DNA, 1518 bp, Ralstonia metallidurans CH34
  CDS (1)..(1518): transl_table=11
atggattcgggtgcgaggcttggggatgttggaagtgatgtgctgtgccagaatagcgtccatcccgtccggccccggctgcctatgttgacccctagtgtgattgcagcgatcgtcgtgtctcttcacgtgctgggcgtgattgcggcgctgcacgccgtcatgaccgtacgcactgcgcccggggccatagcctgggctggatcgctggtcatgatgccgtacttctcgctgatcccctatctgatctttggacgaagccgcttcgcgggatacgtcaatgcgcggcgcttcaacaatcaccgtctgcgcgagatccgccagaacatgagtacccaggagctggattcgctcagcgcctgcctggtgatgaaccccgaccaggaatgcatgcgcgcattgccgcgtctgactggcatgccatgcctgggtaataacgacgtgcggctgctggtcaacggcgaggcgaccttccaggcgatcttcgccgcgatcgatgccgccacgcaggtcgtggtggtccagttcttcatcgttcatgatgatgagcttggactcgaactgcaacgccgcctgtgcgcgcgtgccaaggcgggggtcagggtctatttcctatacgacagcatcggctgtcacgcgctaggccgggcctacctgcgtgcgctggaggaagccggcgtccacgtgcgctcattcgccacgcatcccggctttgtcaatcgcttccagctcaacttccgcaatcaccgcaagctggtcatcgtcgatggcgagcgcgcctttgtcgggggtcataacgtcggcaacgagtacctcggtcgccggccaccactcgcgccctggcgggatacccatatcgagattcgcggcgcggtggtgctcgagctgcagatgacgttcgccgaggactggtactgggccgcgcacgaggtgccctacctgttgctgccaccgccgaggcgtttcggcgacatggtgtgccagatcgtgccatccgggccggcggacgcgcaggagacatgctcgctgttcttcgtcgaggcgatccaggccgcgcgcaagcggatctggattacgtcgccatacttcgtgcccgacgaagccgtttccgcgatgctacggctggcagtgctgcgtggtgtggacgtgcgcatcctgataccggcccggccggaccattacgtggtctatggggcgtcgacgatctatgcccaccaggccgtctgcgccggcgtgaaggtgttccgctaccagccgggcttcctgcaccagaaggtcatcctggtcgacgacgacgcggcggctgtcggcaccgcgaatctggacaatcgctcgttccggctcaacttcgagatgatggtcatgacggctcacccggcattcgcggccagcgtggccgagatgctggaagccgatttcgcgcaggcccgtcagatcgaccgcgaggacttccttggcgcgcccgcgatcctgcgcgtggcgatgcacgtggccaagctcttcgctcccatcctttag

SEQ ID NO: 14666 - protein, 505 aa, Ralstonia metallidurans CH34
MDSGARLGDVGSDVLCQNSVHPVRPRLPMLTPSVIAAIVVSLHVLGVIAALHAVMTVRTAPGAIAWAGSLVMMPYFSLIPYLIFGRSRFAGYVNARRFNNHRLREIRQNMSTQELDSLSACLVMNPDQECMRALPRLTGMPCLGNNDVRLLVNGEATFQAIFAAIDAATQVVVVQFFIVHDDELGLELQRRLCARAKAGVRVYFLYDSIGCHALGRAYLRALEEAGVHVRSFATHPGFVNRFQLNFRNHRKLVIVDGERAFVGGHNVGNEYLGRRPPLAPWRDTHIEIRGAVVLELQMTFAEDWYWAAHEVPYLLLPPPRRFGDMVCQIVPSGPADAQETCSLFFVEAIQAARKRIWITSPYFVPDEAVSAMLRLAVLRGVDVRILIPARPDHYVVYGASTIYAHQAVCAGVKVFRYQPGFLHQKVILVDDDAAAVGTANLDNRSFRLNFEMMVMTAHPAFAASVAEMLEADFAQARQIDREDFLGAPAILRVAMHVAKLFAPIL

SEQ ID NO: 14667 - DNA, 1605 bp, Ralstonia metallidurans CH34
  CDS (1)..(1605): transl_table=11
atggcgcaggcgttgcaacaacggagtgcgagcgttggcccccgatttctgctggcctgtctgtcggcctgcatcctggtactggcagggtgcgccagtttgccagcgcatcctgaccgcacgccgagctacgcgtcgaccgataccagcgatacgttgctggccagttccctggcaccacggctggcgcggaatccgggtcaatcgatcttctatccgctgggttctgggcccgatgcgctggcggtccgcatggcgttggcgcgcgcggcgcgcaagacgctcgatctccagtactacttatttgatgcagataccacgggcagcgccctgcttggcgagttgatcgatgccgccgaccgtggcgtgcgggtgcgtctgctgatcgacgacctgcattccaccaatcaggacaagctctgggcggcgctcgacgcccatccgaacatcgagacccggttgttcaacccgtttgccaaccgctccgcgcgctgggccgagatgatggtcgatttcggccgcctggaccggcgcatgcacaacaagctgatggtggcggacaacctcgtgggcgtggtcggtggccgcaatatcggagacgcgtatttctcggcccgacccgacgtcgatttcagcgacctggatgtgatggtcgccgggcccgtcgtgcaggccgccagcaaggtgttcgaccagtactggaacagcgagagcgcgtatccggtggccgcgctggtgcccgagggcaaggaggcacctgaggaactgcgacgctttcgcaaggaagtcgaggcaaagggggacgtggctcgtgccagtcccttcgtgcaggaactgctggactcggggctggcgcgcggcatcgaagtgggtcatctgccgggtcacgtcggcagcgcgcgcgtgattgccgactcgcctgacaagatcgagaacgatcccgacgatgcgtcgacacacgcaattccccgcctgcgggcgctgatggaggcggcgcagaccgaactggtgctgatctcgccgtactttgtgccagacgatgacaccgagaaatggttggccgccatcgccaaacgtggcgtcaaggtgcgggtgctgaccaactcgtttgcggccacggatgtttccgcagtccatgcgggctacgcgccacgccgtctggcgctgctccacgccggcatcgaactgtacgaactcaagcccaccgccagtaccggattgacgcaagatcgtggcagacacgctcgcaccttcgcatcgagccgcgcaaccctccatgccaaggcctatgtcgtcgaccggcggttcctgttcgtgggctccccgaacctggacccgcgatcgagccggctcaataccgagatgggggtcgtgctcgacagccccacgctggctgcctggttcgtgtccgacgtggacaagcggctgcccgagatcgcgtggcgcattggggtgcgtaccgatgcggcgggtcaggaaggcctgacgtggacaacgatggagcagggcaaggaagtcaccaccgacaaggagcccggcatgagcgtgtggcagcacatcggcatcgactttctgggactcctgccgctggaggatgagctgtag

SEQ ID NO: 14668 - protein, 534 aa, Ralstonia metallidurans CH34
MAQALQQRSASVGPRFLLACLSACILVLAGCASLPAHPDRTPSYASTDTSDTLLASSLAPRLARNPGQSIFYPLGSGPDALAVRMALARAARKTLDLQYYLFDADTTGSALLGELIDAADRGVRVRLLIDDLHSTNQDKLWAALDAHPNIETRLFNPFANRSARWAEMMVDFGRLDRRMHNKLMVADNLVGVVGGRNIGDAYFSARPDVDFSDLDVMVAGPVVQAASKVFDQYWNSESAYPVAALVPEGKEAPEELRRFRKEVEAKGDVARASPFVQELLDSGLARGIEVGHLPGHVGSARVIADSPDKIENDPDDASTHAIPRLRALMEAAQTELVLISPYFVPDDDTEKWLAAIAKRGVKVRVLTNSFAATDVSAVHAGYAPRRLALLHAGIELYELKPTASTGLTQDRGRHARTFASSRATLHAKAYVVDRRFLFVGSPNLDPRSSRLNTEMGVVLDSPTLAAWFVSDVDKRLPEIAWRIGVRTDAAGQEGLTWTTMEQGKEVTTDKEPGMSVWQHIGIDFLGLLPLEDEL

SEQ ID NO: 14669 - DNA, 1599 bp, Ralstonia metallidurans CH34
  CDS (1)..(1599): transl_table=11
atgggagacacgcgtcgattggcgggtctgtttggtcgtttcctggttgtcatgatcgcggcgttcctgacggcctgcgcgggcttgccgcagcggccggaactgcagcccgaagtggcgctgcgcgataccagcgatacggcgatagccagagaactggcgccacaactggccgcccatccgggcgagtccgtgttctatccgctggccgcaggtacggatgcgtttgccatgcgtatcgcactggctcgcgtggcgcagcgctcgctcgatatccagtactacatttacgaaacggacgataccggcctgacgctgctggccgccatcatggccgcggcagatcgtggcgtgcgggtgcggctgctgcttgatgacattcatctggccgggcaggacaagatgctgcaggtgatcgacgcgcatccgaacatcgaggtgcgggtgttcaatccgttcgccagccgaaatgtgcgcctgctcgagtacgtcaccgctttcagccggatcaaccggcggatgcacaacaagtcgatgactgccgacaaccagctcaccatcgtcggcggacgcaacgtcggcgacgagtactacggcgcggcgcaaaccgatttcagcgacctggatcttctggcggccggtccggtggtgccagaggtgtcggccgtgttcgacgattactggaacaacgaagccgcttatccgatctcgaccctggacaagccgctcacgggcaaggaggccgccgagcagcaggagaaactgcgcaacgccgtcgacgatcgcgctatcgccgtgagtgcgacgccgtatggcaaatccgtgctggagtccggggtcgtgcatgcgcttcaccagggcacgctgccgtccttctggggccgagcgacggttatcgccgacaaggcggccaagatccagttgccgcccgacgacgattccacgcacgccatcccgcagctaggcaagattctcgacagcgccaagcatgacctgacgctgatatccccgtacttcgtgccgcccgacgacgccatggactggctgaccgggatgcagaagcggggtgtccaggttcgtatcctgaccaattcgtatggcgcgacggacgtgacggcggtgcacgcgggctatgcgccgaggcgcgaggccctgctgagggcaggggtgatcctgtacgaactgaagccatcggcctacgccgaactggccaaggaaagaaagtcccaccgcagcggcccgggcggcagcagccgcgccagcctgcacgccaagacctacatggtggatcgacaccagttgtttatcggatccctgaacctggatccgcgttcggcacggctcaataccgaaatgggtatcgtggtcgacagcgcgccgctatgcgagatgttcggcaaagtgatcgacgccgcgttgctcgacgtcgcctaccaggtcgtgctcgagaccgatcccgcgaccggcaaggagcagatggtgtgggtgacccaggaggacggcgtcctgcgcacgtatcgcagcgagcccgacatgaacgcctgggaccatatcaaacagggcgtgttgcggatgttgccggtggaatcgcagttgtag

SEQ ID NO: 14670 - protein, 532 aa, Ralstonia metallidurans CH34
MGDTRRLAGLFGRFLVVMIAAFLTACAGLPQRPELQPEVALRDTSDTAIARELAPQLAAHPGESVFYPLAAGTDAFAMRIALARVAQRSLDIQYYIYETDDTGLTLLAAIMAAADRGVRVRLLLDDIHLAGQDKMLQVIDAHPNIEVRVFNPFASRNVRLLEYVTAFSRINRRMHNKSMTADNQLTIVGGRNVGDEYYGAAQTDFSDLDLLAAGPVVPEVSAVFDDYWNNEAAYPISTLDKPLTGKEAAEQQEKLRNAVDDRAIAVSATPYGKSVLESGVVHALHQGTLPSFWGRATVIADKAAKIQLPPDDDSTHAIPQLGKILDSAKHDLTLISPYFVPPDDAMDWLTGMQKRGVQVRILTNSYGATDVTAVHAGYAPRREALLRAGVILYELKPSAYAELAKERKSHRSGPGGSSRASLHAKTYMVDRHQLFIGSLNLDPRSARLNTEMGIVVDSAPLCEMFGKVIDAALLDVAYQVVLETDPATGKEQMVWVTQEDGVLRTYRSEPDMNAWDHIKQGVLRMLPVESQL

SEQ ID NO: 14671 - DNA, 1281 bp, Rubrobacter xylanophilus DSM 9941
  CDS (1)..(1281): transl_table=11
atgttctctttcgcgcggcgcgccatctcgaagacgcgggcggtcgtctcccgtctacggaggctagggatccggctcttcctcgccctgaccgcgctgcaggcggcgctggtcggggtgcttgtggcgatggccgagctcaggaagcgccgccgggggccgggagagggcttcccgtgggaggacatgcccgaggtggagctcgaggacggcaacggcgcgctcaggctctacgcctacggcgtcccgctctacagggacatgctgcgcgagatagagggggccagggagcgcatcctgctggagaccttcatctggaagggggacgaggtcgggcggcgcttcgtggaggccctggcgcgcaaggcccggcggggggtggaggtgtacgcgatcttcgacggcttcgccaacctggtcgtcccggccgacttcaagcgcttccccaaggagataaacaccctccactttcgcccgttcgaccacccggcgcgggccctcgacccgcggggcatcttccgggaccaccgcaagatactcgccgtcgacgggcgggtggcctttctcggaggttacaacataggctcgctctacgagcggagctggcgggacacccacctcaggatccggggcagcgaggtgcgcgaggtcgagaacgcctttatagacttctggaacgcccaccggacgccggacctgccgcccatagagcccaagggggagcgggcctggaacgccaacctcgtgctgcaccgcaacgacccctacctgaggatcttccccatccgggggatgtacctggaggccatagaccgcgccacgaagcgcatctacctcacccatgcctacttcgtccccgaccgggcgctgcgcgccgggctcgccgaggccgcccgccgcggggtcgacgtgcaggtgctgctgcccgagggctccaaccacgtcaccgccgactggctctcgcgccggcacttccacgagctgctctcggcgggggtcaggatcttccgctacaaacacatcatgatccactccaagaccgccaccatcgacggggtctggtccaccgtggggacggcgaacatagaccgcctgagcctgctgggcaactacgaggtcaacctggaggtctacagcaggcgcttcgccgcccagatggagcgcatgttcgagctggacaagaccaacgccgaggagctgacgctcgaggagtgggagcggcggccgctgcccgccaagctcgcggagcgcgccctctccaccctgagcccgctggtgtag

SEQ ID NO: 14672 - protein, 426 aa, Rubrobacter xylanophilus DSM 9941
MFSFARRAISKTRAVVSRLRRLGIRLFLALTALQAALVGVLVAMAELRKRRRGPGEGFPWEDMPEVELEDGNGALRLYAYGVPLYRDMLREIEGARERILLETFIWKGDEVGRRFVEALARKARRGVEVYAIFDGFANLVVPADFKRFPKEINTLHFRPFDHPARALDPRGIFRDHRKILAVDGRVAFLGGYNIGSLYERSWRDTHLRIRGSEVREVENAFIDFWNAHRTPDLPPIEPKGERAWNANLVLHRNDPYLRIFPIRGMYLEAIDRATKRIYLTHAYFVPDRALRAGLAEAARRGVDVQVLLPEGSNHVTADWLSRRHFHELLSAGVRIFRYKHIMIHSKTATIDGVWSTVGTANIDRLSLLGNYEVNLEVYSRRFAAQMERMFELDKTNAEELTLEEWERRPLPAKLAERALSTLSPLV

SEQ ID NO: 14673 - DNA, 1437 bp, Mesorhizobium sp. BNC1
  CDS (1)..(1437): transl_table=11
atggcgtttactgggaacgaaacctgggcgattgcctacctcgcgatggaatggacaatccgcattgtgatggttgttgtcgtgcccttgcggcgtacgcccgacgctgcacgcagctggctcctactggtattcttcctgcccattcccgcacttgcggtctatcttgctatcggcagaccgacctacccacgctggcgccgggaacgcttcgccagattgccggaggtcctcgccgcggcgtcgaaagagattgcccattcccacttctgccgccagccagaattgccgggcccgctggcggggccagcactgctgatcgaaacgctcgggcgattccctgcgctgtccggcaacgatgtcgaacttctttccagttacgacggcgttatcgaccgtatggtcgccgacattgatcatgcagaacgaactgtccatctcctgttctacatattcgcggacgacgatacgggccggcgcgtaatagaagccctggaacgggcggcccggcgaggtgtcgcatgcagggtgctgattgatgccatcggttcgcggcaatggcggcgacaggtggcgaggctgctcgcccaggcgggtgtggatgttcgattcgctctgaaggtagggatctttcggcggagatcggcgcgtgccgacctacgcaatcaccggaagatcgccgttgtcgacagtcgcgtcggctatgtcggctctcaaaacataacgaatgccctgtccgcctccgatatagcaaatgaagagttggtcgcacgggttgtcggcccaatcacgacagagctccaagccgtctttgtcggcgactggttcatggaaacggaggaggagctggcagtatccgccctgttcccgcaccatcatcccgaggccggggtcgttgcacaggtcctaccaagtggtcccgattatcccgacgccggcatcgggtatctagtagcggctctggttcacggcgcaagcaagcgtgtcgtgatcacgacaccttatttcgtcccggacgagccgctccttcaggcactcaaaaccgcagtactgcgcggggtggaagtgcgtttgctggtcccgcgtctcacggaccacatcctggtgaagttggcgcagcaatcctactactccgagctactccaagccggtgttcaagtgcacctctatgagggggggttcctgcacgccaagcatgtcacgtttgatgacgagatctcgctgctgggttccagcaatgtcgacatccgctcttttgtcctgaacgccgaagtaagtctcatcgcttttgataagggtgtcacggtgcagttgcgaagcgagcagatgcgctgcctcgacaagagcgagatgctcacctccgaaggttgggaagagcgcccgatgatccacaagattggcgagaatctggcgcggctagcgagtcctctcctgtga

SEQ ID NO: 14674 - protein, 478 aa, Mesorhizobium sp. BNC1
MAFTGNETWAIAYLAMEWTIRIVMVVVVPLRRTPDAARSWLLLVFFLPIPALAVYLAIGRPTYPRWRRERFARLPEVLAAASKEIAHSHFCRQPELPGPLAGPALLIETLGRFPALSGNDVELLSSYDGVIDRMVADIDHAERTVHLLFYIFADDDTGRRVIEALERAARRGVACRVLIDAIGSRQWRRQVARLLAQAGVDVRFALKVGIFRRRSARADLRNHRKIAVVDSRVGYVGSQNITNALSASDIANEELVARVVGPITTELQAVFVGDWFMETEEELAVSALFPHHHPEAGVVAQVLPSGPDYPDAGIGYLVAALVHGASKRVVITTPYFVPDEPLLQALKTAVLRGVEVRLLVPRLTDHILVKLAQQSYYSELLQAGVQVHLYEGGFLHAKHVTFDDEISLLGSSNVDIRSFVLNAEVSLIAFDKGVTVQLRSEQMRCLDKSEMLTSEGWEERPMIHKIGENLARLASPLL

SEQ ID NO: 14675 - DNA, 1404 bp, Kineococcus radiotolerans SRS30216
  CDS (1)..(1404): transl_table=11
gtgaaggcctgggccgtcggcagcgtgccggagaaccggcgccccgggtcgtcgtcggcgtggctgctgctcatcctcttcctgcccgtcgtgggcctgccgctgttcttcctgctgggcagcccctacgtgaccggccgccgccaccgggtgcaggaggcggcgaaccgggccatcgccgagcgggtcgaggaactgccggacctgccgccggggttcgtggccgacgagcacctggcctcggtgctggagctgaaccggcggctcaccgccctgccgtgcgtctcgggtgaccaccggcggctgctgcccgacggggagttcgtcgccgccctctgcgccgccgtggcagcggcggagcgcaccgtggacgtcgagttctacatcgccgccctcgacgcgacgacggaaccgttcttcgacgccctgcgcgacgccgtcgcccgcggggtgcgggtccgcttcctctacgaccacctcggcgcgcgccggtaccccggccacgcggccatgaaccggcgcctcaccgccgacggcgtcgagtggcaccggatgatgccgatcgacccgctgcgccggcggtggcgccgcccggacctgcgcaaccaccgcaagctcgtcgtcgtggacggccggacgggtttcgtcgggtcgcagaacctcatcgaccccgggtacctcgtccgcaagaacgtccgcgcgggccggcgctgggtcgacctcaacgtggaactcaccggttccgtcgtgcagtcgctggaggccgtgttcgccaccgactggtacgccgagacgggggaggtcctcgacgaggtcgccaccccgaccgcgcacacggtgccgggcggctcgaccggcgccttccaggtcgtcccctccgggccggggttccccaccgaaccgaacctgcggatgttcaccgccctgatccacgccgcgacccgccgggtctcgatcgtcagcccctacttcgtccccgacgagagcctggagcaggccatcaccaccgcggcctaccgcggggtcgaggtcgagctgttcgtctccgagcgcgccgaccagttcatggtccaccacgcccagtgctcctactacgcgaccctgctgcgggccggggtccgcatccaccggctcccgtacccggcggtgctgcacagcaaggtcctcgtcgtggacggcgcccgggcggtcatcggttccagcaacatggacatgcgctccttcaacctcgactacgaggtgtcgctgctggggctggaaccggacttcgtgcgccagctgagcgaggtcgtcgacggctaccgcgcccgctcgcgggaactcacgccggaggcgtggtcgcagcggccgtaccggcggcgctacctggacaacgtcatgcggctcaccgccgccctccagtag

SEQ ID NO: 14676 - protein, 467 aa, Kineococcus radiotolerans SRS30216
MKAWAVGSVPENRRPGSSSAWLLLILFLPVVGLPLFFLLGSPYVTGRRHRVQEAANRAIAERVEELPDLPPGFVADEHLASVLELNRRLTALPCVSGDHRRLLPDGEFVAALCAAVAAAERTVDVEFYIAALDATTEPFFDALRDAVARGVRVRFLYDHLGARRYPGHAAMNRRLTADGVEWHRMMPIDPLRRRWRRPDLRNHRKLVVVDGRTGFVGSQNLIDPGYLVRKNVRAGRRWVDLNVELTGSVVQSLEAVFATDWYAETGEVLDEVATPTAHTVPGGSTGAFQVVPSGPGFPTEPNLRMFTALIHAATRRVSIVSPYFVPDESLEQAITTAAYRGVEVELFVSERADQFMVHHAQCSYYATLLRAGVRIHRLPYPAVLHSKVLVVDGARAVIGSSNMDMRSFNLDYEVSLLGLEPDFVRQLSEVVDGYRARSRELTPEAWSQRPYRRRYLDNVMRLTAALQ

SEQ ID NO: 14677 - DNA, 1476 bp, Kineococcus radiotolerans SRS30216
  CDS (1)..(1476): transl_table=11
atggactggctgccggactgggctccctcgatcacggcgccggccctcgccctcctcgtcgtggacctcgtggtgcgcctcaccgcgatcgcggtggtcccggtgaaccgccgccccagctccgccctcgcctggctgctggccatcttcttcatcccctacctgggggtgctggcgttcctgctcatcggcaaccccaagctgccccgcgcccggcggcgcaagcagcgggagatcaacgagctcatcctgtcctccaccaagggcatggacctcgtctcctccgaccacccgtggccgccgtggctcagcggggtcgtggagctcaaccgcaccctcgggtcgatgccgctggtcggggggaaccaggcccgcctcgagggcgagtacgacgaggcgatccgcgcgatggcccgcaccgtcgacggcgcccgcgagtacgtccacgtcgagttctacatcatgacccgggaccccacgagcgaaccgttcttcgccgccctcgaacgggccgtcgagcgcggggtgaaggtccggctgctgctggaccacctggggtccctgcgctaccccggctaccggcgcacgatccgctccctcgacgacatgggcgtggagtggcacccgatgctgcccgtgcagctgcaccggctgaagtaccagcggccggacctgcgcaaccaccgcaagctcctcgtcgtcgacggggaggtcgcctggctggggtcgcagaacgtgctggaccgcagctacaacaagcgctccaacgtgcggcgcgggctgcagtggcaggacctcatggtgcgcctggaggggccggtcgtcgccggcgtcgaggccatgttcatcaccgactggtactccgagaccgacgagctgctgcagaccgaacgccccgaggtctccccggtcggctccccgggacggctggagtgccaggtcgtgcccagcggccccgggttcgacggggagaacaacctcaagctgttcaactccctgctgtacgccgcccagcggcgcatctccatcaccagcccctacttcgtgcccgacgagtcgatgctgtcggccatcacgacggccgccgagcgcggggtcgacgtcgagctcttcgtctccgagtacggcgaccagttcttcgtgcactacgccgagtgctcctactacgaggacctgctgcgggccggcgtgcggatccaccgctaccccgcgccgtacgtcctgcacgccaagcacatgacgatcgacgacgaggtcgccgtcatcgggtcctccaacatggacatgcgctcgttcctgctggacctggagctgacgctcatggtgtgcgggcgcgagttcgccgacgacctgcgccgggtcgaggacgagtaccgcgcgaagtgcaccgagctcaccctggagcagtggctggcccgcccccggtggcaggtcatcaaggagaacctctcccgcctcacctccgcgctgcagtag

SEQ ID NO: 14678 - protein, 491 aa, Kineococcus radiotolerans SRS30216
MDWLPDWAPSITAPALALLVVDLVVRLTAIAVVPVNRRPSSALAWLLAIFFIPYLGVLAFLLIGNPKLPRARRRKQREINELILSSTKGMDLVSSDHPWPPWLSGVVELNRTLGSMPLVGGNQARLEGEYDEAIRAMARTVDGAREYVHVEFYIMTRDPTSEPFFAALERAVERGVKVRLLLDHLGSLRYPGYRRTIRSLDDMGVEWHPMLPVQLHRLKYQRPDLRNHRKLLVVDGEVAWLGSQNVLDRSYNKRSNVRRGLQWQDLMVRLEGPVVAGVEAMFITDWYSETDELLQTERPEVSPVGSPGRLECQVVPSGPGFDGENNLKLFNSLLYAAQRRISITSPYFVPDESMLSAITTAAERGVDVELFVSEYGDQFFVHYAECSYYEDLLRAGVRIHRYPAPYVLHAKHMTIDDEVAVIGSSNMDMRSFLLDLELTLMVCGREFADDLRRVEDEYRAKCTELTLEQWLARPRWQVIKENLSRLTSALQ

SEQ ID NO: 14679 - DNA, 1551 bp, Silicibacter sp. TM1040
  CDS (1)..(1551): transl_table=11
atgatgcggttcttaaaaacactggctttgattggccttacgcttgcggcatttgtgatgctcgcacggcttctttttcctttgcccgacatttccaatcgcgagatcagctcggcccttccggcgagcgatcagacttcgatcggggcgacagttgcagatctgaacgcggcgcatgtcggccagtcagggatcatcccgctgcgcagcgggacggatgcgcttgcaagccgggtcgaactgatccgtcgcgccgaagcctcgatcgacgcgcaatactacatttggcacgacgacacctccggggttctcctgctagaggaattgcgcaacgcggcgctgcggggcgtgcgggtccgacttctgctggacgataacggcgtgcctgggcttgacgcaacaatggctacgctcaacgcgcaacccaatttcgaaatccgactgttcaacccctcaacgatccggcgcccaaagctcttgggctacagctttgatttctttcggatgaaccggagaatgcacaacaagtcccttatcgtggacggggcggtcgcgatcattggcgggcgcaacattggtgacgagtatttcgacgtgcagcgggatgcattttatatcgacatggatgcgctggctgcgggcaaagtggtgccggaaacggccaccgtctttgatgactactggaacagcgcctccgtttttgcgctcgagacgattgtatcatccgatgggaacctgattacctttgatcaacgcgtatcagaggtgatggccacaccagaggctcaacgcctgatgggcgatctgcaaagcagtgcagataaattcgcgcgtggtgagatgccgatggagtggacaaatgttcgcgtggtggccgatgaccctgtgaaaggtcagggcagcgcgacatcagaccagttgatgatctctcgtctgggcgagatcctcggccaggtcgagacccgcttggatctagtttcggcctattttgtacccgggcagcgaggaacggagtacctcacggatttggcggctgctggcgtggatgtgcgtgtgttgaccaatgcgatgaacaccacggatgtcttgatggtgcattctggctacacgcggtaccgtcgcgcgctgctggaagcagatgtttcgctctacgagttgaaactgcgcgctcagatgtcggctgacgccaaccggcaactcaaaccctttggtctttcgggggcgagcctgcacgccaagacctttgccgtcgacggtgatcgcgtttttatcggctctttcaactttgatccgcgctcggccaccctaaattgcgagatggggtttctcatcgaaagtccgacgctcgccgggcaggtcagcgcaggctttgacggcccactcctgacggtgtcctatcaaccggcgctgacacccaaaggcaagatgatatggcgcgagccaatcgaagatggcgagacattgatctaccaagaagagcccggcgccacctggttccagcagattgcaatcgcggtgattggcgtgctgccggttgaatggcttttgtga

SEQ ID NO: 14680 - protein, 516 aa, Silicibacter sp. TM1040
MMRFLKTLALIGLTLAAFVMLARLLFPLPDISNREISSALPASDQTSIGATVADLNAAHVGQSGIIPLRSGTDALASRVELIRRAEASIDAQYYIWHDDTSGVLLLEELRNAALRGVRVRLLLDDNGVPGLDATMATLNAQPNFEIRLFNPSTIRRPKLLGYSFDFFRMNRRMHNKSLIVDGAVAIIGGRNIGDEYFDVQRDAFYIDMDALAAGKVVPETATVFDDYWNSASVFALETIVSSDGNLITFDQRVSEVMATPEAQRLMGDLQSSADKFARGEMPMEWTNVRVVADDPVKGQGSATSDQLMISRLGEILGQVETRLDLVSAYFVPGQRGTEYLTDLAAAGVDVRVLTNAMNTTDVLMVHSGYTRYRRALLEADVSLYELKLRAQMSADANRQLKPFGLSGASLHAKTFAVDGDRVFIGSFNFDPRSATLNCEMGFLIESPTLAGQVSAGFDGPLLTVSYQPALTPKGKMIWREPIEDGETLIYQEEPGATWFQQIAIAVIGVLPVEWLL

SEQ ID NO: 14681 - DNA, 1554 bp, Nitrobacter hamburgensis X14
  CDS (1)..(1554): transl_table=11
atgcagcttttgtcgatcatcgctgttgttgtggccttgtttgcgctggcatcgctcgccgcggtttattcctatggccgcttcgccaggcaggcgcgcggcgagccctcctcggcactgccgattgccgagcgcgacacgttgctcgacaggatcgtctcgccgaagctgaaggagtatccggacaagagcggtctgttgcttgtgacgagcaatcttcaggctttcgccatcagggcgctcgccgcgcgcagcgccgagcggagcctggaccttcaatattactactggaaggacgacctgacgggcggtctgctggcacgcgagttgatcgccgccgccgatcgtggcgttcgggtgcgggtgcttctcgacgacatcaatacgaagggcgacgattccacctatctggccctcgacaaccatcccaacgtcgaaatccggctgttcaatccttcccgcagccgcaccagtgcgctgcggcgcggcatcgagatggcgcttcgcgccttcagcgtgacgcggcgtatgcataacaaggcgtggattgccgatggccgcatggcgatcgtcggcggccgcaacatcggggacgcctatttcgacgcggccgaaatgtcgaattttcacgacatggacctcgtgctgatcggacctgccgtgcagcaggccgagaccgtattcgatgactactggaacagcagcgttgtgcttccgatcagctcgctttggcgttttcgaaagggcgacctgagaaagaaaagggcgtatctcgaagccttggtgtcgagtgatggcgcccggccttatctgcgacggctgcaagcggagaacagcaccggatcgctgctgagcgggaagcaaaccattcactggaccgccggcgcgaggatcgtttccgaccctgctgaaaaggccgttagtgcagcaagcgagaactggcttttgaacaccatcttcccggtgatcaatgcggcgacgagcgaactgcacatcatctccccttatttcatcccgggagctcagggggtcgttgctctgcaaaagctggcggctgccggcacggaggtatccgtgctaacgaattcgctcgcggcgacggatgtcgtggccgtgcacggcgcttatgcgaattatcggctggcgctgctggccgccggtgttagtctctacgaactgcgtccggaaatcatccgtcaaggtgtctccctgttcggatcgagcggcgccagcctgcataccaaagccttcaccgtcgacggcaagtcgggcttcatcggctcgttcaatttcgattcgcgttcgatatcgctcaacaccgagatgggcgtgctgttcgatgatccgggcctgacaaccgaggtgaacggggtgttcgctgatcagatctcgcccgaaagcagctacagggtcatgccgagaacgggaaacgttgtctggcaggatggaaccggagcgagcgcgaggatccttgattccgagcctgcggcaagcatctggcgacgcatcaccgctgtcgttatcggcctgttgccgatcgagtctcagttgtaa

SEQ ID NO: 14682 - protein, 517 aa, Nitrobacter hamburgensis X14
MQLLSIIAVVVALFALASLAAVYSYGRFARQARGEPSSALPIAERDTLLDRIVSPKLKEYPDKSGLLLVTSNLQAFAIRALAARSAERSLDLQYYYWKDDLTGGLLARELIAAADRGVRVRVLLDDINTKGDDSTYLALDNHPNVEIRLFNPSRSRTSALRRGIEMALRAFSVTRRMHNKAWIADGRMAIVGGRNIGDAYFDAAEMSNFHDMDLVLIGPAVQQAETVFDDYWNSSVVLPISSLWRFRKGDLRKKRAYLEALVSSDGARPYLRRLQAENSTGSLLSGKQTIHWTAGARIVSDPAEKAVSAASENWLLNTIFPVINAATSELHIISPYFIPGAQGVVALQKLAAAGTEVSVLTNSLAATDVVAVHGAYANYRLALLAAGVSLYELRPEIIRQGVSLFGSSGASLHTKAFTVDGKSGFIGSFNFDSRSISLNTEMGVLFDDPGLTTEVNGVFADQISPESSYRVMPRTGNVVWQDGTGASARILDSEPAASIWRRITAVVIGLLPIESQL

SEQ ID NO: 14683 - DNA, 1428 bp, Paracoccus denitrificans PD1222
  CDS (1)..(1428): transl_table=11
atgtggaccgaagcgcttgtgttcatgcattacgcagccgcgctggccgtttcggcccgcgtgctgctgcgtccgcggcttgagccgacggttcgcctgtcctggatcctggtgatcgagctggtgccgctggtcggcatcctggcctatgtgctgttcggcgagatccgcatgcgcggcgccgaggtcgagaccatggccaatgtccgctcgcgcctgtccggcctgtggcagcccagccccgaagagctgaagatgctgccggatttcgccgcgcccgtcatcaaggcgaatcacgccacgaccggctttgccgccgttgccggcaaccgcgccgcgctgctgcccgaggacgacagcgccatcactgccctggccgaggccatcgacggcgcgaccgagcacgtccacatgctgttctatatctggctggacgatgcctcgggccgcgccgtggccgatgccgcgatccgtgccgccgggcgcggcgtcaaggtgcgggcgatcatcgacgccttcggctcgcgcgccttcggccgctcggaaccctgggcgcggatgaaggcggcaggcgtggaatgcgtcgaggcgctgccgctgagcatcccggtgatcggcgggcttttccagcgcatggacctgcgcaatcaccgcaagatcgtcgtgatcgaccatgtgctgggctttaccggcagccgcaactgctcggaccgcgcctttgcgatcaagccgcgctatgcgccctggatcgacgtcttcctggccatcgaggggccggtggtgcgccagatgcaggcggtcttcctgcaggactggatgagctatacgggtgaggatctgggcgagatgctgcgcatgacccgtcccgtcaccgccccgggcgaggtggcgcaggtcgtcgccaccggcccggacgaacgcctgggctcgctgtcggattgcatggcgacgatgatccatgcggcgcgcgagcggctggtcatcaccacgccctattacgtccccgacgcctcgcttgattcggcgatccgcacggcggcgcggcggggcgtggacgtgaccgtgatcctgccccagcgcaacgattcgctggtggtgcaggccacctccgaggggttctattacgggttggtctcggccggggtgaagctgatgctgttcaaggacggcctgctgcattccaagatcatcaccgtggacgggcgcatggcgatgctgggcagcgccaacatggaccgccgcagcttcgagctgaactacgagatgaacatgctgtttctgggcggcgacgtcaccgagcggctggacgaacgccagcagggctatatcggccgcgcccgcccgatccatctggacgagatccggggctggtcggtcctgcggcggctgcgcaacaaccttctggcgctggcggcgccgatcctgtga

SEQ ID NO: 14684 - protein, 475 aa, Paracoccus denitrificans PD1222
MWTEALVFMHYAAALAVSARVLLRPRLEPTVRLSWILVIELVPLVGILAYVLFGEIRMRGAEVETMANVRSRLSGLWQPSPEELKMLPDFAAPVIKANHATTGFAAVAGNRAALLPEDDSAITALAEAIDGATEHVHMLFYIWLDDASGRAVADAAIRAAGRGVKVRAIIDAFGSRAFGRSEPWARMKAAGVECVEALPLSIPVIGGLFQRMDLRNHRKIVVIDHVLGFTGSRNCSDRAFAIKPRYAPWIDVFLAIEGPVVRQMQAVFLQDWMSYTGEDLGEMLRMTRPVTAPGEVAQVVATGPDERLGSLSDCMATMIHAARERLVITTPYYVPDASLDSAIRTAARRGVDVTVILPQRNDSLVVQATSEGFYYGLVSAGVKLMLFKDGLLHSKIITVDGRMAMLGSANMDRRSFELNYEMNMLFLGGDVTERLDERQQGYIGRARPIHLDEIRGWSVLRRLRNNLLALAAPIL

SEQ ID NO: 14685 - DNA, 1569 bp, Pseudomonas fluorescens
  CDS (1)..(1569): transl_table=11
ttgaaccctatacaggccttcacctggcttctgctgctgagcctcgggctgggcggctgcgctacccgcgaggtcccgtaccaacccagccaggccctgcccgcccgtgattcgggctttgcccagtcgatccgggcccaggccgcgccctaccaggggcgttccggctttcgccttctacccaacagcaccgaagcgttcatggcccgtgccgagctgatccgcaacgcgcaaagcagcctcgacctgcagtactacatcgtccacgacggcatcagcacccgcatgctggtggacgagctgctcaaggccgccgatcgtggcgtgcgggtacgcatcctgctggacgacaccaccagcgacggcctggaccagatcatcgccaccctggccgcccatccgcagatccagatccgcctgttcaaccctctgcacctgggccgcagcactggcctgacccgggccatgggccgcctgttcaacctgtcgcagcagcataggcggatgcacaacaagctctggctggcagacaacagcgtggccatcgtcggcgggcgcaacctgggggatgaatacttcgacgcccagcccaacctgaacttcaccgacatcgacatgttcagcgtggggccggtggccgagcaactgggccacagcttcgaccagtactggaacagcgccctgagccgccccatcggcgagttcctgtccagcacaccttccgccaaggcgctggacaacacccggctgcgcctcgaggaatccttgcaggacagccgccggcagaaccaggcgctgtaccggcaactgatgacctaccagacccagccgcgcatggacatctggcgcaaggaactgatctgggcctggaaccaggccctgtgggacgctccggccaaggtcctggccaagggtgaccccgacccgcacctgctgctcaccacccagctggcaccggaactgagcggggtcggcaaggagctgatcatgatctcggcctacttcgttccggggcagcccgggctggtgtacctgaccgggcgcgcggacgccggggtctcggtgagcctgttgaccaactccctggaagccaccgacgtgccagtggtgcatggcggctatgcgccctatcgcaaggcattgctggaacatggagtgaagctctacgaactgcgccgacaacccggcgagcgcggtggcagcgggccgcacctgttccacagcggctcctacaagggctccgactccagcctgcacagcaaggcgatgatcttcgaccgacgaaagagcttcatcggctcgttcaacttcgacccccgttcggtgctgtggaacaccgaggtcggggtgctggtggacagccccgagctggctgaacatgtccgcgccctggccctgcaggggatggcgccggccctgagctaccaggtcaagctgctggacggcaagctggtctgggtgaccgaggaccagggccagttgcacagcctgggccatgaacccggcaactggtggcgccgcttcaatgcctggctgagcacccgcatcggcctggaacgcatgctctga

SEQ ID NO: 14686 - protein, 522 aa, Pseudomonas fluorescens
MNPIQAFTWLLLLSLGLGGCATREVPYQPSQALPARDSGFAQSIRAQAAPYQGRSGFRLLPNSTEAFMARAELIRNAQSSLDLQYYIVHDGISTRMLVDELLKAADRGVRVRILLDDTTSDGLDQIIATLAAHPQIQIRLFNPLHLGRSTGLTRAMGRLFNLSQQHRRMHNKLWLADNSVAIVGGRNLGDEYFDAQPNLNFTDIDMFSVGPVAEQLGHSFDQYWNSALSRPIGEFLSSTPSAKALDNTRLRLEESLQDSRRQNQALYRQLMTYQTQPRMDIWRKELIWAWNQALWDAPAKVLAKGDPDPHLLLTTQLAPELSGVGKELIMISAYFVPGQPGLVYLTGRADAGVSVSLLTNSLEATDVPVVHGGYAPYRKALLEHGVKLYELRRQPGERGGSGPHLFHSGSYKGSDSSLHSKAMIFDRRKSFIGSFNFDPRSVLWNTEVGVLVDSPELAEHVRALALQGMAPALSYQVKLLDGKLVWVTEDQGQLHSLGHEPGNWWRRFNAWLSTRIGLERML

SEQ ID NO: 14687 - DNA, 1158 bp, Pseudomonas fluorescens
  CDS (1)..(1158): transl_table=11
atgcgcgcagcggtgttcccctggcgcgaaggcaaccgcttcgagttgctgatcgacggcccgcagttcttcccgcggatgctggtggccattgcccgcgcccagcaccaggtggaactggagctgtacctggtggaagccgggacctgcgccgaggccatggtccaggccctggtgcaggcagcgcagcgcggggtacgggtgcgctgcctgttcgacgactacggcagcctggcctttacccaggccctgcgccgcagcctgaccgaggccggtgtcgaactgcgcttctacaaccggctgaaatggcgccagggctttctcaacctgtaccgcgatcatcgcaagctgctgctggtggacaaggccctggcggtggtgggcggcaccggagtcaccgatgagttctggaagcccgaggacaatagctgcgactggcatgaggtgatggtggagattgccggccccatggtcagcgactggcagcagctgttcgaccggcaatggagcgccaacctgtatagcggggcctggaagcccggtgccgatttcggcctgccacgcctgccgcgcctgcccgataccggcgagggcatgggccgggtggcctacgccgacgcccgtcagcaccgcgacatcctgcattcgctgatccgggccctgagcagcgggcagcggcgcatctggctggcgactccgtattttctgcccacctggtcggtgcgccgttcgttgcgcaaggcggcggcccgaggcctcgacgtacgcctgctgctgaccgggccgcgcaccgaccacccggcggtgcgctatgccgggcaccgctactacccgcgcctgctcaaggccggtgtgcggattttcgagtaccagccgcgtttcctgcacctgaagatggcactggtggacgactgggtgagcgtgggctcgtgcaacttcgaccactggaacctgcgcttcaacctggaagccaatctggaagccctggaccctgcgttgacccaggcagtggtggcgagttttgacgccgactttgcccagagcgaggaagtcagcctggcggtgtggcgcaagcgaccgctgtggcggcggatcaagcagcggatctggggttgggtcgaccgtctggtggtcaacctgctggatcggcgcggctga

SEQ ID NO: 14688 - protein, 385 aa, Pseudomonas fluorescens
MRAAVFPWREGNRFELLIDGPQFFPRMLVAIARAQHQVELELYLVEAGTCAEAMVQALVQAAQRGVRVRCLFDDYGSLAFTQALRRSLTEAGVELRFYNRLKWRQGFLNLYRDHRKLLLVDKALAVVGGTGVTDEFWKPEDNSCDWHEVMVEIAGPMVSDWQQLFDRQWSANLYSGAWKPGADFGLPRLPRLPDTGEGMGRVAYADARQHRDILHSLIRALSSGQRRIWLATPYFLPTWSVRRSLRKAAARGLDVRLLLTGPRTDHPAVRYAGHRYYPRLLKAGVRIFEYQPRFLHLKMALVDDWVSVGSCNFDHWNLRFNLEANLEALDPALTQAVVASFDADFAQSEEVSLAVWRKRPLWRRIKQRIWGWVDRLVVNLLDRRG

SEQ ID NO: 14689 - DNA, 1485 bp, Staphylococcus haemolyticus
  CDS (1)..(1485): transl_table=11
atggtagaaatatactcaatgtctttcacgcattcctcattgattattaatatcattttaattgctgcctttatattaaacttaatttttgcgtttgttattatctttatggagcgccgtagtgctggttcaatatgggcttggctacttgttttagtatttttaccaattatagggtttattttatatttactattaggacgccaaattcaacgcaatcgtatttttaaattgaaaaaagaagaccgtaaaggccttgctatgattgtcgatgaacaaattgaagcattagaaagcgacgatttctcaaaaggtaatcatcaaattgttaagtttaaagaaatggtacgcatgttactttttaacaatgctgcattccttactactgataatcaaaccaagatttatactgatggccatgcaaaatttgatgcattattaagtgatattaaaaatgcaaaagattatatacatattcaatactatattttcaaaagtgatgaattaggtcatcgaattctctcagcacttgaggataaacttgatgagggcttagaagttaaaatgttatacgatgatatgggatcaagaactctaagaaaaaaagatttaaaacactttcgtcaaaaaggtggacatgttgaatctttctttccttctaaactcccacttataaacctacgtatgaataaccgaaaccatagaaaaatagttattattgacggtaaaattggttatgttggtggttttaatgtaggcgacgaatatttaggtaaagataaaaaatttggatattggcgagacactcatttgcgattagaaggagattctgtaaacgcacttgaactgagatttatattagattggaactcacaatcaaaccgtgattcaatcgaatatgaagatcgctattttcctgatgtagactctggtggaacaataggtgtacaaattgcctcaagtggtcctgatgaagattgggagcaaatcaaatatggttatttgaaaatgatttcttcagctaaacaatctatttatattcaatcaccctattttattcctgatcaagccttcattgatgcaattaaaatagcagctttaggtggtgtagaggtaaatatcatgattcctaataaacctgatcatccttttgtttattgggctaccttaaaaaacgcagcttctctattatcagctggcgtgaaaatctatcattatgataatggtttcttacactccaaaacattaattattgatgatgaaattgcttcagtaggtactgccaacatggataatcgtagttttacattgaactttgaagtaaacgcattcatctatgatgaagcaattgcagcgcaactaaaagaagcatttattcaagatatgaaagtatcttaccgactcactgaagacttatataataaacgaagcctgtggattaaatttaaagaaggtatatctcaattactttcacctattctatag

SEQ ID NO: 14690 - protein, 494 aa, Staphylococcus haemolyticus
MVEIYSMSFTHSSLIINIILIAAFILNLIFAFVIIFMERRSAGSIWAWLLVLVFLPIIGFILYLLLGRQIQRNRIFKLKKEDRKGLAMIVDEQIEALESDDFSKGNHQIVKFKEMVRMLLFNNAAFLTTDNQTKIYTDGHAKFDALLSDIKNAKDYIHIQYYIFKSDELGHRILSALEDKLDEGLEVKMLYDDMGSRTLRKKDLKHFRQKGGHVESFFPSKLPLINLRMNNRNHRKIVIIDGKIGYVGGFNVGDEYLGKDKKFGYWRDTHLRLEGDSVNALELRFILDWNSQSNRDSIEYEDRYFPDVDSGGTIGVQIASSGPDEDWEQIKYGYLKMISSAKQSIYIQSPYFIPDQAFIDAIKIAALGGVEVNIMIPNKPDHPFVYWATLKNAASLLSAGVKIYHYDNGFLHSKTLIIDDEIASVGTANMDNRSFTLNFEVNAFIYDEAIAAQLKEAFIQDMKVSYRLTEDLYNKRSLWIKFKEGISQLLSPIL

SEQ ID NO: 14691 - DNA, 1515 bp, Listeria monocytogenes
  CDS (1)..(1515): transl_table=11
atgcgcaaactgattcaatttctgtttatagcagtagttttatttttagtggaatatgttttaatcaatcaagcagctatattattcttagtaacaagtgggattatccaactatgcggggttattatcgccattcgactactcctatttgaccaacggaatactagctcaaaagtcgcctgggttgcggttatttttattttgcctgtactcggaacgattagttaccttgtgttcggtagaaatccagcaactagaaaattcagcacagctcaagtaaaggaaaaaacaaaattaattaatgcgattcatgcaattccaaacaacactaatgaaaaattgccacgactatcaaaaagaatagcgcatttaacgtccatagagccaatcaaggggaataaaatcgaaatattaacaaatggtgaggaaacttttccagtgctcctagacgcgcttagaaaggctgaaaaccacattcacattcaatattacattttcaaaacggatgcgatttctactgaaattcgtgatattttggtggaaaaggcgaaatctggtgttgaggttagatttatgtttgatggtctcggatcaagcaaactgggtaaagcctttttagctcctttgaaagaggctggagttagtattcacgcatttgatccaattgcctccccctggattgtaagaacagccaatttaagaaatcaccgtaaaatcgtggtgattgatggccaaattggctttacaggtgggcttaatattggggaagaatatcgttccaatacacctgattttcgtgtttggcgcgatacacacataaaaataacaggccaagctgtaatcgaactccaagaatccttcctaaacgattgggtatacatggaaaatcaagctggcgccgctgacgggtttattagcgaatctggttcaaaacaatatttttctccagtcgatatgggtgatgaatgggctcaagttatttacggcggaccatatgataaagaaaaatgggttcgggattcgatgcttgatttgattgattccgctaaagaatcagtttggattgtatcaccctatttcgttccagatgaggagtcgcttgcggttattcgccgggttgcgatgagtggtgttgacgtgcgggttattattcctggtaaaggcgatcgcgggacttcattccacggaagtaatgcttatgtaaaaacaatgattgaagcaggcgcgaaaatgtatgcttatgccgatgactcttttgttcatgccaaagcaatgcttgtggacggaacacgtgcggctattggaactgccaattttgacgtgcgtagttttagattgaatcatgaattaatggtattcttatatgatgaaagcgaggctatgcatcatttaaaacgtgacttcaaaaaagattttgaagatagccgactatttacgatgaaagatatggaaaacaaaccattattgactcgtataaaagaagttctatccagtttactatcaccaattttataa

SEQ ID NO: 14692 - protein, 504 aa, Listeria monocytogenes
MRKLIQFLFIAVVLFLVEYVLINQAAILFLVTSGIIQLCGVIIAIRLLLFDQRNTSSKVAWVAVIFILPVLGTISYLVFGRNPATRKFSTAQVKEKTKLINAIHAIPNNTNEKLPRLSKRIAHLTSIEPIKGNKIEILTNGEETFPVLLDALRKAENHIHIQYYIFKTDAISTEIRDILVEKAKSGVEVRFMFDGLGSSKLGKAFLAPLKEAGVSIHAFDPIASPWIVRTANLRNHRKIVVIDGQIGFTGGLNIGEEYRSNTPDFRVWRDTHIKITGQAVIELQESFLNDWVYMENQAGAADGFISESGSKQYFSPVDMGDEWAQVIYGGPYDKEKWVRDSMLDLIDSAKESVWIVSPYFVPDEESLAVIRRVAMSGVDVRVIIPGKGDRGTSFHGSNAYVKTMIEAGAKMYAYADDSFVHAKAMLVDGTRAAIGTANFDVRSFRLNHELMVFLYDESEAMHHLKRDFKKDFEDSRLFTMKDMENKPLLTRIKEVLSSLLSPIL

SEQ ID NO: 14693 - DNA, 1485 bp, Salmonella typhimurium
  CDS (1)..(1485): transl_table=11
atgaagaaactgcccggctttacgcaagattacttactcagcaaggcgacgaccctgcctgataaaacacgcctggagcgtgccgttgaaccgctatgcgcgcgccatcccggagagtgcggcattctcgcgctggataacagtctggacgcttttgccgcccgctaccgcctgaccgaaatggcggcgcggacgctggatgtgcagtattatatttgggaagacgatatgtccgggcggctgctcttttcggtactgctgtcggcggcgaagcgcggcgttcatgttcgtctgctgctggatgataacaatacgcctggtctggatgatacgttgcgcttgctggatagccatcctaatatcgaagttcgtctgtttaatcctttctcttttcgtacgctacgcgcgctgggatatttgacggattttgcgcggctgaatcggcggatgcacaataaaagttacactgccgacggcgtagtgacgctggtcggtgggcgcaacatcggcgatgcctatttcggcgctggcgaggagccgctattttccgatctggacgtgatggccattggcccggtggtcaatgatgtcgccaatgattttgaacgttactggcgctgtagttcagtgtcgacattgcagcaagtattatccctttctgagcaggaactgacgcagcgtatcgaacttcccgaatcctggtataacgatgagatcacccgccgttatctgcataagctggaaaccagccagtttatggcggatctcgatcgcggaacgttgccgctgatttgggcaaaaacacgcttgcttagcgatgacccttctaaaggcgaggggaaggcgcagcgccattcgcttcttccgcagcgattatttgacgtgatggggtcgccgacggagcgtatcgacattatttccgcttactttgtccctacgcgcgcaggcgtggcgcagttgcttaatctggtcaggaaaggcgtgaagatcgccatcttaactaactctctggcggccaacgatgtggcggtcgttcacgcagggtacgcgcgctggcgcaagaaattactgcgctatggcgtggagctctacgaactgaaaccgacccgcgaacatgaaaccgccgtacatgatcgcggactcaccgggaactcaggttccagcttacatgctaaaacgttcagtattgatggtagtaaggtgtttatcgggtcgcttaattttgatccccgttcaacgcttttaaataccgaaatgggctttgtcattgaaagtgaaacgctggcgacgcttatccataagcgttttacacagagccaacgcgatgcggcctggcaactgcggctggatcgctggggacgaattaactggatcgatcgtcagcaagaagaggaaaaggtgttaaagaaagaacccgctacgcgtttctggcaacgagttctggtacggttggcggcaattttacctgtggaatggttgctgtga

SEQ ID NO: 14694 - protein, 494 aa, Salmonella typhimurium
MKKLPGFTQDYLLSKATTLPDKTRLERAVEPLCARHPGECGILALDNSLDAFAARYRLTEMAARTLDVQYYIWEDDMSGRLLFSVLLSAAKRGVHVRLLLDDNNTPGLDDTLRLLDSHPNIEVRLFNPFSFRTLRALGYLTDFARLNRRMHNKSYTADGVVTLVGGRNIGDAYFGAGEEPLFSDLDVMAIGPVVNDVANDFERYWRCSSVSTLQQVLSLSEQELTQRIELPESWYNDEITRRYLHKLETSQFMADLDRGTLPLIWAKTRLLSDDPSKGEGKAQRHSLLPQRLFDVMGSPTERIDIISAYFVPTRAGVAQLLNLVRKGVKIAILTNSLAANDVAVVHAGYARWRKKLLRYGVELYELKPTREHETAVHDRGLTGNSGSSLHAKTFSIDGSKVFIGSLNFDPRSTLLNTEMGFVIESETLATLIHKRFTQSQRDAAWQLRLDRWGRINWIDRQQEEEKVLKKEPATRFWQRVLVRLAAILPVEWLL

SEQ ID NO: 14695 - DNA, 1530 bp, Bacillus anthracis
  CDS (1)..(1530): transl_table=11
atgaagaaacctatcatccaattactattaatatttacaattgtatctatcgttcctttcctattaaatacatcttatatttcgttatatacatttgtcggcgttctctggtccatcacaattgtaggaatttcattcgttatttttatcgaaaatagatctcctcaaagtaccttagcctggtttttagtattagcacttcttcccgttgtaggtgtgcttttatactctattttcgggcgtagccgttggagaagaaaaaaacatctccatcgttcagaagagcaaagaaagttattccgtgaaatattagaaggaagacgactagagttatcactcaaagtcccattaagtgaacgctctgtccatttaacagaagtcgtacaaaaatttggaggcgggcctgcagcagatagaacgactaccaaacttttaacaaacggagatcaaacattctcagaaattttgcaagcgatcgagcaagcaaaacatcacatacatattcaatactatatttataaatctgatgagattggtacaaaagttcgggatgcgttaatcaaaaaggcaaaagatggtgttattgtacgcttcctttatgatggactcggaagtaatacgttgagaagacggtttttacaacctatgaaagaagctggaattgaaattgttgaatttgatcctattttttcagcttggttacttgaaaccgtcaattatcgtaaccaccgtaaaatcgtcattgtagatggagaaatcggttttactggtggactcaacgtcggtgatgaatatcttggtcgttcaaaaaaatttcccgtttggcgtgacagtcatttaaaagtagaaggaaaagcgctatataaattacaagcaatctttctagaggattggctctatgcatctagtggattgaatacttattcttgggatccatttatgaatagacaatacttccctggtaaagaaatttcaaacgcagaaggtgctgtgcaaattgtagcgagcggaccaagctcagatgataaaagcattcgcaatacattattagctgttatgggctcggcaaaaaaatctatttggattgctacaccctactttattccagatcaagaaactttaacattattacgtttaagtgcaatatctggcatagatgtacgcattttatatcctggtaaaagcgatagtattattagtgaccaagcatctcagtcctacttcactccacttttaaaagctggtgcctccatttatagttataaagatggctttatgcatgcaaaaattttacttgttgatgataaaatcgcaacaatcggaacagcaaatatggacgtacgcagctttgaattgaattacgaaattattagcgtactgtatgaatcagaaactgttcatgatattaaacgtgattttgaagatgactttaagcattctactgaaattaaatggaacgctttccaaaagagaagtatcaaaaaacgaatattagaatcttttatgaggctcatttctcctttactataa

SEQ ID NO: 14696 - protein, 509 aa, Bacillus anthracis
MKKPIIQLLLIFTIVSIVPFLLNTSYISLYTFVGVLWSITIVGISFVIFIENRSPQSTLAWFLVLALLPVVGVLLYSIFGRSRWRRKKHLHRSEEQRKLFREILEGRRLELSLKVPLSERSVHLTEVVQKFGGGPAADRTTTKLLTNGDQTFSEILQAIEQAKHHIHIQYYIYKSDEIGTKVRDALIKKAKDGVIVRFLYDGLGSNTLRRRFLQPMKEAGIEIVEFDPIFSAWLLETVNYRNHRKIVIVDGEIGFTGGLNVGDEYLGRSKKFPVWRDSHLKVEGKALYKLQAIFLEDWLYASSGLNTYSWDPFMNRQYFPGKEISNAEGAVQIVASGPSSDDKSIRNTLLAVMGSAKKSIWIATPYFIPDQETLTLLRLSAISGIDVRILYPGKSDSIISDQASQSYFTPLLKAGASIYSYKDGFMHAKILLVDDKIATIGTANMDVRSFELNYEIISVLYESETVHDIKRDFEDDFKHSTEIKWNAFQKRSIKKRILESFMRLISPLL

SEQ ID NO: 14697 - DNA, 1530 bp, Bacillus cereus
  CDS (1)..(1530): transl_table=11
atgaagaagcctatcgttcaattactattaatatttacaattgtatctatcgttctgttcctattaaatacatcgtatatctcgttatatacatttgtcggtgctctatggtccatcacaatcgtaggaatttcattcgttatttttatagaaaatagatctccacaaagtacattagcatggtttttagtattagcacttcttcctattataggtgtgcttttatacgctattttcggacgcagccgctggagaagaaaaaaacatctccatcgttcagaagaacaaagaaaattattccgtgaaatattagaaggaagaagactagagttattactcacagtcccactaaatgaacgttccatacatttaacagaagtcatacaaaaatttggaggcggtcctgccgcagatagaacaactacaaaacttttaacaaacggagatcaaacattttcagaaattttgcgagctatagagcaagcaaaacatcatatacatattcaatactacatttataaatctgatgaaattggtacaaaagttcgagatgctttaatacaaaaagcaaaagatggtgttattgtacgcttcctttatgatggccttggaagtaatacgttaagaagacgatttttacaacctatgaaagaagctgggattgaaattgtagaatttgaccctattttttcagcttggttacttgaaactgtcaattatcgtaaccatcgaaaaattgttattgtagatggcgaaattggttttaccggaggactcaatgtcggtgatgaatatcttggccgttccaagaaatttcctgtttggcgtgatagtcatttaaaaatagaaggaaaagcattatataaattacaagcaatctttctagaagactggctctatgcctctagtggtttaaatacttattcctgggatcaattcatgaatagacaatacttcccaggtaaagagatttcaaatgcagaaggtgctgttcaaatcgtagcaagcggaccaagctccgatgataaaagtattcgtaatacattattagctgttatgggctctgcaaaaaaatccatttggatcgctacaccctactttattccagatcaagaaactttaacattattacgcttaagtgcaattgccggaatagatgtacggattttatatccaggtaaaagtgatagcatcattagtgatcaagcatctcaatcctatttcactccgcttttaaaagctggtgcttctatttacagttataaagatggttttatgcatgcaaaaattgtactcgttgatgatacaattgcaactattggaacagcgaacatggatgtacgtagctttgaattgaattacgaaattattagtgtactttatgaatcaaaaacagttcacgatattaaacgtgattttgaagaagattttaaacattcaactgaaattaaatggaactctttccaaaaaagaagtataaaaaaacgcatattggagtctttcatgaggcttatttctcctttactgtag

SEQ ID NO: 14698 - protein, 509 aa, Bacillus cereus
MKKPIVQLLLIFTIVSIVLFLLNTSYISLYTFVGALWSITIVGISFVIFIENRSPQSTLAWFLVLALLPIIGVLLYAIFGRSRWRRKKHLHRSEEQRKLFREILEGRRLELLLTVPLNERSIHLTEVIQKFGGGPAADRTTTKLLTNGDQTFSEILRAIEQAKHHIHIQYYIYKSDEIGTKVRDALIQKAKDGVIVRFLYDGLGSNTLRRRFLQPMKEAGIEIVEFDPIFSAWLLETVNYRNHRKIVIVDGEIGFTGGLNVGDEYLGRSKKFPVWRDSHLKIEGKALYKLQAIFLEDWLYASSGLNTYSWDQFMNRQYFPGKEISNAEGAVQIVASGPSSDDKSIRNTLLAVMGSAKKSIWIATPYFIPDQETLTLLRLSAIAGIDVRILYPGKSDSIISDQASQSYFTPLLKAGASIYSYKDGFMHAKIVLVDDTIATIGTANMDVRSFELNYEIISVLYESKTVHDIKRDFEEDFKHSTEIKWNSFQKRSIKKRILESFMRLISPLL

SEQ ID NO: 14699 - DNA, 1503 bp, Bacillus subtilis
  CDS (1)..(1503): transl_table=11
atgctgaaaaggagactggaatttttctttttatatatgatgctcatcggggcatatgtcatttggttttttccggtttccagacttgagttttacggaggattgctttgctatataagcattattttgttcagcatctattcattaattcttgaaaaccgcacctcgcagcacacgctgctatggatccatattcttgtcttttttccaatcgtcggctacgtgttttatctgttttcgggacagctttatgtaaagggaaagctgtttaagacaaaacgaatgtacaacagggaaaagctcaggaagctgtttgacaaggaggaaacgcccgaagtgacagggctgaaggacaatcaagagaggttctttacatattccatcagggctgcccatatgaatatcaatacgaaaagcaacatcaaagtgctgaaaaacggcgaagaaaccttcccggacattttcaaagcaatgagaaaagcggaatcttacatacatattgaatactacatgtttaaatcagacatgctcggacgcggcatgatggatattatgatggagaaagcgcgccagggtgtcgaggtgaggtttttatacgatgcggcaggaagcatgaagctggcaagaagagatattatgagaatgaaacaagcgggggtggacatcgtcccgttttctccgctgaaatacgggtttttcaaccagaagctgaatttcagaaatcaccggaaaatcgtgatcatcgatgggaaaaccggttttgtgggtggattaaatgtcgggaaggaatatatcagcagagatccgtacatcggattttggagagatacacacctgcggcttgagggggaaattgtgcaaacgctccacgctatctttatgctggattgggaatatgtctccaatgaagtgctaattgatcaagaggagtacaataccccggttcccgtggaaggaggaggcatttatcaaattgtcgcgacaggccctgacatgaaggaaagcatgagcgacctttattatgaaatgatttcttcagcgcagaaatcaatatggatcgccacgccctattttgtccccaatgaatccattcgcacggcgctaaaagcagcggcgacaaagggggtagaggtaagggttatggtgccggagaagaacgacagctttttgacccaatacgcgtcgaggtcctatttcccggagctgctccttgagggcattgaagtgtactcctaccaaaaaggcttcatgcatcaaaaagtcatgatcattgatggcgatctcgcctccgtcggtaccgcgaatatggacatgcgcagctttcagctcaactttgaagtgaatgtgttcttcacggatgccgaagcgatccgaacccttgaggcccattttgaagaggatatgcaggaaagtgaaaagctcagccctgtcggcttttataaaagaggtgtggctgaccggacaaaagagtcgtttgcccgcctgttttcaggtgttctgtaa

SEQ ID NO: 14700 - protein, 500 aa, Bacillus subtilis
MLKRRLEFFFLYMMLIGAYVIWFFPVSRLEFYGGLLCYISIILFSIYSLILENRTSQHTLLWIHILVFFPIVGYVFYLFSGQLYVKGKLFKTKRMYNREKLRKLFDKEETPEVTGLKDNQERFFTYSIRAAHMNINTKSNIKVLKNGEETFPDIFKAMRKAESYIHIEYYMFKSDMLGRGMMDIMMEKARQGVEVRFLYDAAGSMKLARRDIMRMKQAGVDIVPFSPLKYGFFNQKLNFRNHRKIVIIDGKTGFVGGLNVGKEYISRDPYIGFWRDTHLRLEGEIVQTLHAIFMLDWEYVSNEVLIDQEEYNTPVPVEGGGIYQIVATGPDMKESMSDLYYEMISSAQKSIWIATPYFVPNESIRTALKAAATKGVEVRVMVPEKNDSFLTQYASRSYFPELLLEGIEVYSYQKGFMHQKVMIIDGDLASVGTANMDMRSFQLNFEVNVFFTDAEAIRTLEAHFEEDMQESEKLSPVGFYKRGVADRTKESFARLFSGVL

SEQ ID NO: 14701 - DNA, 1482 bp, Staphylococcus aureus
  CDS (1)..(1482): transl_table=11
atgcaattttcattttcaaacgatttaggaacgttatttactattattttagccattggattcatcattaatttagtattagcttttattattatctttttagaaagaaataggcgtacagcgagttcaacttgggcatggctatttgtactttttgtcttacccttgattggttttattctttacttgttttttggtagaaccgtttcggcacgcaaattgaataaaaacaatggtaacgtgttaacggatttcgatggacttttgaaacaacaaatagaaagctttgataaaggtaattatggtactgataacaaacaagttcaaaaacatcatgatttagtacgtatgcttttgatggatcaagatggttttttaactgaaaataataaagttgatcatttcattgacggtaatgatttatacgatcaagttttaaaagatattaaaaatgcaaaagaatatatccatttagaatactatactttcgctttagatggtttaggtaaaagaattttacatgctttagaagaaaaattgaaacaaggtttagaagtaaaaatattatatgatgatgttggttctaaaaatgttaagatggcaaattttgatcactttaaatcattaggtggcgaagttgaagcattttttgcgtctaaactaccattattaaatttccgtatgaataacagaaatcatagaaaaatcattattattgatggtcaattaggttatgtcggaggatttaacattggagatgaataccttggtttaggtaaactaggatattggagagatacacatttacgaattcaaggagatgcagttgatgcattacaattgcgctttattttagactggaattcgcaagcacatcgacctcaatttgaatatgatgttaagtatttccctaaaaagaacggaccattgggtaattcaccaattcaaatagctgcaagtggcccagctagtgactggcatcaaattgaatatggttatacaaaaatgattatgagcgctaagaagtcggtatatttgcaatcgccttatttcattccggataattcatatataaatgccattaaaattgcagctaaatcaggtgtagatgtacatttaatgattccatgtaagccagatcatcctttagtttattgggcgacattttcaaatgcctctgacttattatcaagtggtgttaaaatttatacgtatgaaaatggatttatacattctaaaatgtgcttaattgatgatgaaatcgtatcagtgggcacagcaaatatggactttagaagttttgaattaaattttgaagtaaatgcctttgtatatgatgaaaatcttgctaaagatttaagggtggcttatgaacatgatattacaaaatcaaaacaacttactgaagaatcatatgccaatagaccgctgtctgttaaattcaaagaatcgttagctaaattagtttcgccaattttataa

SEQ ID NO: 14702 - protein, 493 aa, Staphylococcus aureus
MQFSFSNDLGTLFTIILAIGFIINLVLAFIIIFLERNRRTASSTWAWLFVLFVLPLIGFILYLFFGRTVSARKLNKNNGNVLTDFDGLLKQQIESFDKGNYGTDNKQVQKHHDLVRMLLMDQDGFLTENNKVDHFIDGNDLYDQVLKDIKNAKEYIHLEYYTFALDGLGKRILHALEEKLKQGLEVKILYDDVGSKNVKMANFDHFKSLGGEVEAFFASKLPLLNFRMNNRNHRKIIIIDGQLGYVGGFNIGDEYLGLGKLGYWRDTHLRIQGDAVDALQLRFILDWNSQAHRPQFEYDVKYFPKKNGPLGNSPIQIAASGPASDWHQIEYGYTKMIMSAKKSVYLQSPYFIPDNSYINAIKIAAKSGVDVHLMIPCKPDHPLVYWATFSNASDLLSSGVKIYTYENGFIHSKMCLIDDEIVSVGTANMDFRSFELNFEVNAFVYDENLAKDLRVAYEHDITKSKQLTEESYANRPLSVKFKESLAKLVSPIL

SEQ ID NO: 14703 - DNA, 1473 bp, Staphylococcus epidermidis
  CDS (1)..(1473): transl_table=11
atgaattttggatttttgggtactattttaactatattgttagtagttgggtttataactaacgtagtattggcatttgtcatcatcttccttgaacgtgatcgacgtactgccagttcaacttgggcgtggttattcgtattattcgttcttcctgtcattggatttattttgtatctatttttaggacgaacggtttccaagaaaaagatggaaaaaaataacggtgatgaattaaatgcatttgaagatttagttcaagaccaaatcgacagttttgataaacataattatggttatatcaatgatcaagtcattaaacaccgtgatttaatacgtatgttgttaatgaaacaagatgcctttttaacagaaaataataaaatcgatttatttacagatggtcataagctttatgaaaaagtacttgaggatatttacaatgctcaagactatatacatctagagtactatacctttgaacttgatggattaggtaaaagaatcttagatgcacttgaaactaaacttaaagaaggtttagaagttaaacttttgtatgacgatgttggttctaaaaaggttagattatcaaaatttaaacatttcagagcattaggtggagaagttgaagcatttttcccttcgaaagtacctttaatcaatttcagaatgaataatcgaaatcatagaaagattatcattatagatggacaaattggttacgttggcggttttaatgtcggcgatgattatttaggattaggtaagttaggttactggagagatacacatacacgtgttcaaggtgaaggcatcgatgcactacaattaagatttattttagactggaattcacagtcgcatcgtccacaatttaaatttgatcaaaaatacttccctaaaaaaattggggacaaaggaaacgcggctattcaaatcgcttctagtggacctgcatttgatttacatcaaatagaatatggttatacaaaaatgataatgagcgctaaaaagtctatctatctacaaagcccttactttattccagaccaatcatacattaatgcattaaaaatggctgctaatagcggcgttgaagtcaaccttatgataccgtgtaaacctgatcatccattcgtttattgggctacattttcaaatgcagctgatttattagatagcggagttaatatttacacttatcaaaatggatttattcattctaaaatattaatgattgatgatgaaatttcttcaattggtagtgcaaacatggactttagaagctttgagctgaatttcgaagtgaacgcatttatatatgatgaagatatagctaaacagttacgtcaagcatttgaaaaagatattgagcaatctaaattacttacaaaagaagtatacgacaagcgtccattatcaattaaatttaaagaaggactagcaaaattaatatctccaattttataa

SEQ ID NO: 14704 - protein, 490 aa, Staphylococcus epidermidis
MNFGFLGTILTILLVVGFITNVVLAFVIIFLERDRRTASSTWAWLFVLFVLPVIGFILYLFLGRTVSKKKMEKNNGDELNAFEDLVQDQIDSFDKHNYGYINDQVIKHRDLIRMLLMKQDAFLTENNKIDLFTDGHKLYEKVLEDIYNAQDYIHLEYYTFELDGLGKRILDALETKLKEGLEVKLLYDDVGSKKVRLSKFKHFRALGGEVEAFFPSKVPLINFRMNNRNHRKIIIIDGQIGYVGGFNVGDDYLGLGKLGYWRDTHTRVQGEGIDALQLRFILDWNSQSHRPQFKFDQKYFPKKIGDKGNAAIQIASSGPAFDLHQIEYGYTKMIMSAKKSIYLQSPYFIPDQSYINALKMAANSGVEVNLMIPCKPDHPFVYWATFSNAADLLDSGVNIYTYQNGFIHSKILMIDDEISSIGSANMDFRSFELNFEVNAFIYDEDIAKQLRQAFEKDIEQSKLLTKEVYDKRPLSIKFKEGLAKLISPIL

SEQ ID NO: 14705 - DNA, 1473 bp, Staphylococcus epidermidis
  CDS (1)..(1473): transl_table=11
atgaattttggatttttgggtaccattttaactatattgttagtagttgggtttataactaacgtagtattggcatttgttatcatcttccttgaacgtgatcgacgtactgccagttcaacttgggcgtggttattcgtattattcgttcttcctgtcattggatttattttgtatctatttttaggacgaacggtttccaagaaaaagatggaaaaaaataacggtgatgaattacatgcatttgaagatttagttcaagatcaaatcgacagttttgataaacataattatggttatatcaatgatcaagtcattaaacaccgtgatttaatacgtatgttgttaatgaaacaagatgcctttttaacagaaaataataaaatcgatttatttacagatggtcataagctttatgaaaaagtacttgaggatatttacaatgctcaagactatatacatttagagtactatacctttgaacttgatggattaggtaaaagaatcttagatgcacttgaaactaaacttaaagaaggtttagaagttaaacttttgtatgacgatgttggttctaagaaggttagattatcaaaatttaaacatttcagagcattaggtggagaagttgaagcattttttccttcgaaagtacctttaatcaatttcagaatgaataatcgaaatcatagaaagattatcattatagatggacaaattggttacattggcggttttaatgtcggcgatgattatttaggattaggtaagttaggttactggagagatacacatacacgtgttcaaggtgaagttatcgatgcactacaattaagatttattttagactggaattcacagtcgcatcgtccacaatttaaatttgatcaaaaatacttccctaaaaaaattggggacaaagggaacgcggctattcaaatcgcttctagtggacctgcatttgatttacatcaaatagaatatggttatacaaaaatgataatgagcgctaaaaagtctatctatctacaaagcccttattttattccagaccaatcatacattaatgcattaaaaatggctgctaatagtggcgttgaagtaaaccttatgataccgtgtaaacctgatcatccattcgtttattgggctacattttcaaatgcagctgatttattagatagcggagttaatatttacacttatcaaaatggatttattcattctaaaatattaatgattgatgatgaaatttcttcaattggtagtgcaaacatggactttagaagctttgagctgaatttcgaagtgaacgcatttatatatgatgaagatattgctaaacagttacgtcaagcatttgaaaaagatattgagcaatctaaattacttacaaaaaaagtatacgacaagcgtccattatcaattaaatttaaagaaggactagcaaaattaatatctccaattttataa

SEQ ID NO: 14706 - protein, 490 aa, Staphylococcus epidermidis
MNFGFLGTILTILLVVGFITNVVLAFVIIFLERDRRTASSTWAWLFVLFVLPVIGFILYLFLGRTVSKKKMEKNNGDELHAFEDLVQDQIDSFDKHNYGYINDQVIKHRDLIRMLLMKQDAFLTENNKIDLFTDGHKLYEKVLEDIYNAQDYIHLEYYTFELDGLGKRILDALETKLKEGLEVKLLYDDVGSKKVRLSKFKHFRALGGEVEAFFPSKVPLINFRMNNRNHRKIIIIDGQIGYIGGFNVGDDYLGLGKLGYWRDTHTRVQGEVIDALQLRFILDWNSQSHRPQFKFDQKYFPKKIGDKGNAAIQIASSGPAFDLHQIEYGYTKMIMSAKKSIYLQSPYFIPDQSYINALKMAANSGVEVNLMIPCKPDHPFVYWATFSNAADLLDSGVNIYTYQNGFIHSKILMIDDEISSIGSANMDFRSFELNFEVNAFIYDEDIAKQLRQAFEKDIEQSKLLTKKVYDKRPLSIKFKEGLAKLISPIL

SEQ ID NO: 14707 - DNA, 1545 bp, Bacillus cereus
  CDS (1)..(1545): transl_table=11
atgaaaaatacgttaaagctgattttctttatactgctattgttcgcattatttgtttcgttacgtatgtttattgatgtagcattttattcagatgtgattgggataaaagatgtttcgattttaggtattattagtattttatttacagtatctgcgtttttaattggttgcgttattttcttagaaaatcgacatccatctaaaacacttacatggttaattgttttaggaatttttccggtatttggtttctttgcttatttattattcggacaaaattttcgaagaaaaagaatgttccaaaagaaggcgttacttgatgaacaggcgtttttacaatataaagggcatgaagattacgaagaacgaattttacgcaatcataagcatcaagaactgttatttcgtttagcggatcgattaggagctttaaatatttcatttcaaactgaaacgaggacattaacaaatggagatgaaacgtttcgggctattttaaatgggttaaaacgagcgaaacatcacattcatatggaatattacattgtgcgtgatgataaattaggaacagaaattaaagatattttaatacaaaaatcgaaagaaggcgttgttgttcgctttttatatgatgcggttggaagttttaagttatcgaaatcgtatattgaagaattaaacgatgcaggtgtagaaatgattccattctttcctgtgcgctttccgattttaaacgataagattaattatcgaaatcataggaaaattgttgtgattgatgggaacgaaggatttgtaggcggattaaatatcggtgatgagtatttagggaaaaataaatattttggcttttggcgagatacgcatttgtatttacgtggtgaagcggttcaaagtttacaacttattttccttcaagactggttttatatgactggagaggctgtgctagcccctgaatatttacaagcaaaagcagttgagggtgatcattggggaggagtgcagctagttgcaggtggccccgataataagtgggaaacgattaagcatttatatttcgcaatgatcgcttctgctcggaaatcaatttggattgcaacgccgtattttattccggatgatgatattttatccgcattaaaggttgctgcacttgctggtattgatgttcgtttattaatgccgagtaaaccggataagcgtactgtcttttacgcatcgagatcgtacttcccagagcttttagatgcaggagtaaagatatatgaatacgaaaaaggttttcttcatagtaaaattgtcatcgttgattctgatttagcttcaattgggacagctaatatggatatgagaagttttcatttgaattttgaagtaaatgcctttttatatgatacagatagcattcgaaaacttgttcaagactttaaagatgatttagaagaatcaagtgaaattcatggtgatcattttcataaaagacgtcttcatagacgaattgttgaatcaacgtaccgattattatcacctttattataa

SEQ ID NO: 14708 - protein, 514 aa, Bacillus cereus
MKNTLKLIFFILLLFALFVSLRMFIDVAFYSDVIGIKDVSILGIISILFTVSAFLIGCVIFLENRHPSKTLTWLIVLGIFPVFGFFAYLLFGQNFRRKRMFQKKALLDEQAFLQYKGHEDYEERILRNHKHQELLFRLADRLGALNISFQTETRTLTNGDETFRAILNGLKRAKHHIHMEYYIVRDDKLGTEIKDILIQKSKEGVVVRFLYDAVGSFKLSKSYIEELNDAGVEMIPFFPVRFPILNDKINYRNHRKIVVIDGNEGFVGGLNIGDEYLGKNKYFGFWRDTHLYLRGEAVQSLQLIFLQDWFYMTGEAVLAPEYLQAKAVEGDHWGGVQLVAGGPDNKWETIKHLYFAMIASARKSIWIATPYFIPDDDILSALKVAALAGIDVRLLMPSKPDKRTVFYASRSYFPELLDAGVKIYEYEKGFLHSKIVIVDSDLASIGTANMDMRSFHLNFEVNAFLYDTDSIRKLVQDFKDDLEESSEIHGDHFHKRRLHRRIVESTYRLLSPLL

SEQ ID NO: 14709 - DNA, 1449 bp, Bacillus subtilis
  CDS (1)..(1449): transl_table=11
gtgagtatttcttccatccttttatcactttttttcattttaaatattcttttggccatcattgtcatcttcaaagaacggcgcgatgccagtgcatcttgggcgtggctgcttgttcttttctttattcccgttttaggctttattttatacttattattcggccataatctcagacgcaagcatttgtttcaatgggaagaccggaaaaagattggaattgaaaggctgctgaagcatcagcttgaagatttagaaaccaagcaatttcagtttaacaaccgggcaacctttgataacaaagatttaatttatatgctgattatgaataaccatgctgtgtttacagaggataattcagttgacgtcattacagatggacgggataaatttcagcggctgctgagtgacatttcaaaggctaaggatcatatccatttacagtattatatttataaaggcgatgaattaggcaaaaaattgcgggacgctctcatccaaaaggcgaaagaaggtgttcaggtcagagtgctttatgatgaactcgggtccagaacgctgagaaaaaagttttttaaagagcttcgcgaggctggcgggcatgtggaggtctttttcccgtcaaagctcaggccgattaacctgcggctgaattaccggaaccatcgaaagcttgtgatcatagacggtatgaccggttatgtcggaggctttaacgtcggagatgagtatctagggcttaatccgaaattcggttattggcgggatacgcatatccggctgcaaggaacggccgtgcacgccatccaaacacgattcatccttgactggaaccaagcttctcatcaccatacgctgacatatattccaaatcactttcctgattacggcccaaaaggcaacgtcgggatgcagattgtcacaagcggccctgattcggaatgggaacaaattaaaaatggctacatcaaaatgatttcgaacgccaagcgttccattttgatacaaacaccttattttatcccagatgcaagcctgctggatgctttaaggatcgcttgcctttcgggcattgacgttaacattatgattccgaacaagcccgatcacgcctttgtatactgggcgacactttcgtatatcggcgatctgctgaaagccggagccactgtctatatttacgataacggctttattcacgcgaaaaccatcgtggtggatgacgaaatcgcttcagtcggcacagcgaacattgatgtccgaagcttcaggctgaattttgaggttaatgcatttatttacgatatcaccattgctaaaaaactggtttcaacttttaaagaagatttgctagtatccagaaaattcacctatgaggagtatctgcagcgcccgttgtggattcgaataaaagaatccgtctcgcggctgttgtcgccgatcttataa

SEQ ID NO: 14710 - protein, 482 aa, Bacillus subtilis
MSISSILLSLFFILNILLAIIVIFKERRDASASWAWLLVLFFIPVLGFILYLLFGHNLRRKHLFQWEDRKKIGIERLLKHQLEDLETKQFQFNNRATFDNKDLIYMLIMNNHAVFTEDNSVDVITDGRDKFQRLLSDISKAKDHIHLQYYIYKGDELGKKLRDALIQKAKEGVQVRVLYDELGSRTLRKKFFKELREAGGHVEVFFPSKLRPINLRLNYRNHRKLVIIDGMTGYVGGFNVGDEYLGLNPKFGYWRDTHIRLQGTAVHAIQTRFILDWNQASHHHTLTYIPNHFPDYGPKGNVGMQIVTSGPDSEWEQIKNGYIKMISNAKRSILIQTPYFIPDASLLDALRIACLSGIDVNIMIPNKPDHAFVYWATLSYIGDLLKAGATVYIYDNGFIHAKTIVVDDEIASVGTANIDVRSFRLNFEVNAFIYDITIAKKLVSTFKEDLLVSRKFTYEEYLQRPLWIRIKESVSRLLSPIL

SEQ ID NO: 14711 - DNA, 1485 bp, Staphylococcus aureus
  CDS (1)..(1485): transl_table=11
atgatagagttattatccattgcactcaagcattctaatattattttaaattccatatttattggtgcatttattttaaacttattattcgcctttaccattattttcatggaaagacgttctgccaattctatctgggcttggttactagtcttagttttcttgcctttattcggcttcattttatacttactattaggacgacaaattcaacgcgaccaaattttcaaaattgataaggaagataaaaaaggattagagttaatcgttgatgagcaattagccgctttaaaaaatgaaaacttttcaaattccaattatcaaattgtaaaatttaaagaaatgattcaaatgttgttatataataacgcagcatttttaacaacagacaacgatttaaaagtatacacagacggccaagaaaaatttgatgacttaatacaagacatccgtaatgctactgattatattcattttcagtactatattattcaaaatgatgaattaggtcgtaccattttaaatgaacttggaaaaaaagcggaacaaggtgtagaagttaaaattctttatgatgacatgggttctcgtggactgcgtaaaaaaggcttacacccgtttcgcaataaaggtggacatgctgaagcatttttcccatcaaaattacctttaattaacttgcgtatgaacaatcgaaaccatcgaaaaattgttgtaatagatggacaaattggatatgttggtggttttaatgttggtgatgagtacttaggtaaatcaaaaaaattcggctattggcgagatacgcatttacgaattgtcggggatgcagtgaatgcattgcaattacgatttattctagattggaattcacaagccacacgtgaccacatctcctatgatgatcgttatttcccagatgtaaattctggcggaacgattggcgtacaaatagcttctagtggtcctgacgaagaatgggaacagattaaatatggttacttgaaaatgatttcatctgctaaaaaatcgatttatattcaatctccctatttcatacctgatcaagcctttttagattctattaaaattgcggcattaggtggtgttgatgtcaatatcatgattcctaataaacctgaccatccgtttgttttttgggctactttaaaaaatgcagcatccttattagatgccggtgttaaagtatttcactacgacaatggctttttacactcaaaaacacttgttatagatgatgaaattgcaagtgttggaacagctaatatggaccatcgcagtttcacgttgaatttcgaagtcaacgcctttatttatgaccaacaaattgccaaaaaattaaaacaagcttttatagatgatttagcagtatcttctgaattaacaaaagcacgttatgctaagcgaagtctttggattaaatttaaagaaggtatttcacaattattgtcacctatcttataa

SEQ ID NO: 14712 - protein, 494 aa, Staphylococcus aureus
MIELLSIALKHSNIILNSIFIGAFILNLLFAFTIIFMERRSANSIWAWLLVLVFLPLFGFILYLLLGRQIQRDQIFKIDKEDKKGLELIVDEQLAALKNENFSNSNYQIVKFKEMIQMLLYNNAAFLTTDNDLKVYTDGQEKFDDLIQDIRNATDYIHFQYYIIQNDELGRTILNELGKKAEQGVEVKILYDDMGSRGLRKKGLHPFRNKGGHAEAFFPSKLPLINLRMNNRNHRKIVVIDGQIGYVGGFNVGDEYLGKSKKFGYWRDTHLRIVGDAVNALQLRFILDWNSQATRDHISYDDRYFPDVNSGGTIGVQIASSGPDEEWEQIKYGYLKMISSAKKSIYIQSPYFIPDQAFLDSIKIAALGGVDVNIMIPNKPDHPFVFWATLKNAASLLDAGVKVFHYDNGFLHSKTLVIDDEIASVGTANMDHRSFTLNFEVNAFIYDQQIAKKLKQAFIDDLAVSSELTKARYAKRSLWIKFKEGISQLLSPIL

SEQ ID NO: 14713 - DNA, 1467 bp, Staphylococcus epidermidis
  CDS (1)..(1467)
atggcacttcatcaatctaatattataattaatattttattagttagtgcctttttattaaatttagtttttgcattcattattattttcatggagaggcgtacagcaaattctatatgggcgtggttattggttttagtttttctacctttagtaggattcatattgtatttattattaggtcgccaaatacagagagaacatatatttaaactcgccaaagaggataaagttggtcttgaaatgattgttgacgagcaattagaggcattgaaaaagcaagacttttctaagggtaatcatcaaattgttaaatttaaagaaatggtacaaatgttactttataataatgctgcttttttaacaactgataatgatctaacaatttatacagatggtcatcagaagttcgatgatttaattaatgatattagacacgcacaatcatatattcacatccaatactacattattcatagtgataatctcggaaagcaattgttacatgaattagaaaaaaaagctgaagaaggtatagaagttaaaatgctatacgacgatatgggctcaagagatttacgaaagaaagatctaaaaaagtttcgtcaaaaaggcggtcacgctgaatctttctttccatcaaaattaccacttattaatttaagaatgaataatagaaaccacagaaaaatagtagtcattgacggtacgattggatatgttggtggttttaatgtaggagatgaatatataggtaaatctaagaaatttggttattggagggacacacacttacgtattaaaggtgacgcggtaaatgcccttcaacttagattcatcttagattggaactcacaatcaactcgtgacaatttaacttatgaatctcgatattttcctgatgttgactctggtggtacgataggcatacaaattgcttcaagtgggcctgatgaagattgggaacaaattaaatatggttatttaaaaatgatttcatcagccaaagaatctatatacattcaatcaccatacttcattcccgatcaagcttttttagattcgattaaaattgcagcgcttggtggtgtggatgttaacatcatggttcctaacaaacgtgatcatccctttgtttattgggctacgcttaaaaacgtagcgtctttacttgaagctggcgttaatgtctatcattatgataatggttttctacattcaaaaacacttgtcattgatgatgaggtagcaagtgtaggaactgccaatatggataatcgaagctttacattaaactttgaggtcaatgcttttatttatgatgaaggcgtagcacgatcattaaaacaagctttcattaatgatatgaaattatctaacaagctcacttctgaagaatatgctaaacgaaatctgctagttaaattcaaagaagggatttcacaactactttctccaattttataa

SEQ ID NO: 14714 - protein, 488 aa, Staphylococcus epidermidis
MALHQSNIIINILLVSAFLLNLVFAFIIIFMERRTANSIWAWLLVLVFLPLVGFILYLLLGRQIQREHIFKLAKEDKVGLEMIVDEQLEALKKQDFSKGNHQIVKFKEMVQMLLYNNAAFLTTDNDLTIYTDGHQKFDDLINDIRHAQSYIHIQYYIIHSDNLGKQLLHELEKKAEEGIEVKMLYDDMGSRDLRKKDLKKFRQKGGHAESFFPSKLPLINLRMNNRNHRKIVVIDGTIGYVGGFNVGDEYIGKSKKFGYWRDTHLRIKGDAVNALQLRFILDWNSQSTRDNLTYESRYFPDVDSGGTIGIQIASSGPDEDWEQIKYGYLKMISSAKESIYIQSPYFIPDQAFLDSIKIAALGGVDVNIMVPNKRDHPFVYWATLKNVASLLEAGVNVYHYDNGFLHSKTLVIDDEVASVGTANMDNRSFTLNFEVNAFIYDEGVARSLKQAFINDMKLSNKLTSEEYAKRNLLVKFKEGISQLLSPIL

SEQ ID NO: 14715 - DNA, 1512 bp, Bacillus halodurans
  CDS (1)..(1512): transl_table=11
atgaaaaatcggttaaacgtcttactctttttattgatcctttcgacaggtttgtaccttacccgttcgttttggcaaggctggattgtcggagcttttagtgtactcattaccatcacggttgtctttataggtatcgttatatttttagaaaaccgtcacccgacaaaaacgttaacatggttaatggtgcttgccgtgtttccagtcgttggcttcatcttttatttgatgttcggacaaaatcatcgaaaaagtaaaacctttatgaaaaaggcattatcagatgaagaggcatttgaaaaaatagagggaaatcgtcagctaaatgaagaacagttacagaaaatgggtggtcatcaacaactgttgtttcgactggctcatcgactagcgaacaatccgatttcattttcaaccaatacgaaagtgctgacagacgggaaagaaacgtttgcccatattaaacaagcgttacgaatggcaacgcatcatattcatctcgaatattatattgttcgtgatgatgaaattggtcaggaaattaaagagatcctaatgcagaaagcgaaggaaggaattcatgtacgttttctttatgacggtgtaggtagctggaagctctctaaatcttatattcaggatctgaagcaggccggagtagagattgttccgtttgcccctgtaaagctaccgtttattaatcatacgatcaattaccgcaatcaccgaaagattatcgtcatcgacggaaccgtgggcttcgtaggtggtttaaatattggcgatgaatatttaggaaaagacccatatttcggattttggcgagatacccatctgtatgttcgcggagaagctgtacgtacattacagctcattttcctccgggattgggcccacgaaacaggagaaacgattttgaagccatcttacctatccccagcattgacaaatatgaaggatgatggcggtgtccagatgattgcgagtggtcctgatactcgttgggaaattaataaaaagctattcttttccatgatcacatcagcgaagaaatcgatttggatcaccagtccatatttcatcccggatgaagatattttaagtgctttaaaaattgctgccctaagtggtattgatgttaggattctcgttcctaatcgtccagataaacggattgtttttcacgcctcccgctcttattttccagagcttcttgaagcgggagtgaaagtatacgaatatacacgaggctttcttcatagcaaaattattatcgtcgataatgagattgcttcgattggaacatcgaacatggatatgcgaagcttccatttgaattttgaagtgaacgcttttctttaccgcacgaaaagtgtaaccacactcgtaagtgattttgtctacgatttggaacatacaaatcaaattcgctttgagcaatttagaaacagagcttggtattatcgcgtacttgaatccacttgtcggctattatcacctttgctatag

SEQ ID NO: 14716 - protein, 503 aa, Bacillus halodurans
MKNRLNVLLFLLILSTGLYLTRSFWQGWIVGAFSVLITITVVFIGIVIFLENRHPTKTLTWLMVLAVFPVVGFIFYLMFGQNHRKSKTFMKKALSDEEAFEKIEGNRQLNEEQLQKMGGHQQLLFRLAHRLANNPISFSTNTKVLTDGKETFAHIKQALRMATHHIHLEYYIVRDDEIGQEIKEILMQKAKEGIHVRFLYDGVGSWKLSKSYIQDLKQAGVEIVPFAPVKLPFINHTINYRNHRKIIVIDGTVGFVGGLNIGDEYLGKDPYFGFWRDTHLYVRGEAVRTLQLIFLRDWAHETGETILKPSYLSPALTNMKDDGGVQMIASGPDTRWEINKKLFFSMITSAKKSIWITSPYFIPDEDILSALKIAALSGIDVRILVPNRPDKRIVFHASRSYFPELLEAGVKVYEYTRGFLHSKIIIVDNEIASIGTSNMDMRSFHLNFEVNAFLYRTKSVTTLVSDFVYDLEHTNQIRFEQFRNRAWYYRVLESTCRLLSPLL

SEQ ID NO: 14717 - DNA, 1512 bp, Bacillus pseudofirmus
  CDS (1)..(1512): transl_table=11
atgaaaaacagattaaatgttttagctttttttgcgctattatttgcggccctgtacatttcaagaggttttctgcaaagctggatggtaggaacactgagcgttgtgtttactctatccgttatatttattggcattattattttctttgagaacagacatcctacaaaaacccttacttggcttctagtgttagcggcatttccagtcgtcggctttttcttttatttaatgtttggacaaaatcatagaaaaagtaagcggttttctaaaaaagcaatagaagatgaacgagcctttcaaaaaattgaggggcagcggcagttaaatgaagagcagctgaagaaaatgggagggcatcaacaattattgttccgcttagctcataagttaggcaaaaacccgatctccttttcaagtgaaacgaaagtattaacagatggaaaggaaacctatgctcatatcctgcaagcactaaaaatggcagaacaccatattcatcttgagtattatatcgttcggcatgatgaccttggtaaccaaattaaagatattttaatttctaaagccaaggaaggagttcacgtacgttttttatatgatggggtagggagctggaagctttcgaagtcatatgtcgaagaactgcgggatgcaggagtggaaatggtttcgttctcacctgtaaaattaccttttttaactcatacgattaattatcgtaaccatcgcaagattattgtcatcgatggggtagtaggatttgtcggtggtttaaatatcggtgatgaatatctaggtaaagatgcatactttggttattggagagatacacacttgtatgtaagaggagaagctgttagaacacttcagcttattttcttgcaggactggcattatcagacaggtgaaacgattttaaaccaaacgtatttatctccttcactatcaatgacaaagggcgatggcggcgttcaaatgattgcaagcgggccggatacgaggtgggaagtgaataagaagctattcttttcaatgatcacttctgcaaaaaaatcgatttggattgcaagtccgtatttcattccagatgatgatattttaagtgctttaaaaattgccgctttaagcgggattgatgtccgaatccttgtcccaaaccgtccagacaagcgaattgtttttcatgcctcaaggtcttatttccctgagctgcttgaagcaggagtaaaggtttacgagtataaccgtggttttatgcacagtaaaataattattgtcgatcatgagatagcatcaataggcacatctaatatggatatgagaagttttcatttaaactttgaggtgaatgcctatttatatcgtacgagcagtgtgacaaagcttgtaagtgattatgtttacgatctcgagcattctaaccaaattaacttttcattgtttaaaaaccgaccatttttccatcggcttattgaatcaacctcaaggcttttatcaccattattgtaa

SEQ ID NO: 14718 - protein, 503 aa, Bacillus pseudofirmus
MKNRLNVLAFFALLFAALYISRGFLQSWMVGTLSVVFTLSVIFIGIIIFFENRHPTKTLTWLLVLAAFPVVGFFFYLMFGQNHRKSKRFSKKAIEDERAFQKIEGQRQLNEEQLKKMGGHQQLLFRLAHKLGKNPISFSSETKVLTDGKETYAHILQALKMAEHHIHLEYYIVRHDDLGNQIKDILISKAKEGVHVRFLYDGVGSWKLSKSYVEELRDAGVEMVSFSPVKLPFLTHTINYRNHRKIIVIDGVVGFVGGLNIGDEYLGKDAYFGYWRDTHLYVRGEAVRTLQLIFLQDWHYQTGETILNQTYLSPSLSMTKGDGGVQMIASGPDTRWEVNKKLFFSMITSAKKSIWIASPYFIPDDDILSALKIAALSGIDVRILVPNRPDKRIVFHASRSYFPELLEAGVKVYEYNRGFMHSKIIIVDHEIASIGTSNMDMRSFHLNFEVNAYLYRTSSVTKLVSDYVYDLEHSNQINFSLFKNRPFFHRLIESTSRLLSPLL

SEQ ID NO: 14719 - DNA, 1473 bp, Buchnera aphidicola
  CDS (1)..(1473): transl_table=11
atgataaattatctatttactataacaacttggttaattattattagttattggtttataattattattgttacttgtcgaatactttctaagcgtcgagcaatttcatcttctgcagcatggttattagtaatttatattattccatttattggtatatgtacttggttcttacttgaagaaccttatttaggtactcgaaaactaaaattaataaaatccgtatggtctaaaaaaaataaacattttaataatttaaaatcacataactatatttttgaaaacaataatagtgaagtggcgagatcattatttaagttatgtaagtatcgacaaggcatatcgggaataaagtttaataaattaaaactattaaaaaatactaaagatgtaataaaaaatttggtacgagatatctatttagccaaaaacactattgaaatagttttttatatttggaaacctggaggattagcagacaatgtagctattgctttaatacaatcagcaaaacgaggaataaaatgtagacttatgttagattctgcaggaagtttagaattttttagaagcaaatgggttgatatgatgcaacaatctggtattcaaatagtggaagcactcaagatcaatttattgcattttttttttaggagaatggatcttagacaacatagaaaatttatacttattgacaattatataacatatattggaagtatgaatttagtagatccatatttatttaaaaaatctttaggaatcgggcaatggatagacttaatgactcgaatagaagggcccatatctaccactatgggagcaatatattcttgtgattgggaagtagaaactggacaacaaatttcacccaaaagagttaaaaataatcttattattcctacgtatccaattaaagaatgtacttctatagtacaagttattgcttcaggacctggatttactgaagatatgatccatcaagcactacttacagcaatttattcagcacaacaaaaattaactatgactacaccttatctggttcctagcgatgatctattacgcgcaatatgtacagcagcacaacggggagtagaagttattttaatcatacctaaaagtcatgattcattattagtaaaatgggctagtagagttttttttagcgaattattagaatctggcgtgaaaatttaccaatttaaaaaaggattattgcatagtaaaagtgttttagtagataaacaacttagtttaatcggaaccgtaaatttagatatgagaagtttatggttaaattttgaaattacattagttatagacgacaaaaattttgggaaatcactcgcaataatacataatgaatatatatctcattcaagtttacttgaccctaagttatggaaaatacgttcttattggaaaaaaattatagaaaaacttttttattttttaagtccattattataa

SEQ ID NO: 14720 - protein, 490 aa, Buchnera aphidicola
MINYLFTITTWLIIISYWFIIIIVTCRILSKRRAISSSAAWLLVIYIIPFIGICTWFLLEEPYLGTRKLKLIKSVWSKKNKHFNNLKSHNYIFENNNSEVARSLFKLCKYRQGISGIKFNKLKLLKNTKDVIKNLVRDIYLAKNTIEIVFYIWKPGGLADNVAIALIQSAKRGIKCRLMLDSAGSLEFFRSKWVDMMQQSGIQIVEALKINLLHFFFRRMDLRQHRKFILIDNYITYIGSMNLVDPYLFKKSLGIGQWIDLMTRIEGPISTTMGAIYSCDWEVETGQQISPKRVKNNLIIPTYPIKECTSIVQVIASGPGFTEDMIHQALLTAIYSAQQKLTMTTPYLVPSDDLLRAICTAAQRGVEVILIIPKSHDSLLVKWASRVFFSELLESGVKIYQFKKGLLHSKSVLVDKQLSLIGTVNLDMRSLWLNFEITLVIDDKNFGKSLAIIHNEYISHSSLLDPKLWKIRSYWKKIIEKLFYFLSPLL

SEQ ID NO: 14721 - DNA, 1431 bp, Clostridium perfringens
  CDS (1)..(1431): transl_table=11
atgcatttatttataaatatgatatttttaataaatattgtatttatcatttccataatcttcattgaaagaagaaatccccaaactacttgggcttggattttaatattaacctttctacccatattaggatttataatctacattttatttggtcaaaatattacccgtgaaaaaaactttaaaagaaaaattctagatgacaagacaaaacaaaaatatttaaattcatttaagtctcactacaaattagataatatttctttaaaatataaagacttaataatgatgaactttaataatgacaattcaacctacactcaacgtaatgatatagatttatattttgatgctaatagtctttttgaagaaatgattgatgaaataaataaagccgaaaaatttattcatatggaattttatatttttaaaagcgatgaaataggcaaaaaaatcttacaagccttaactaagaaagctaaagaaggtgttgaagtaaaattactagtagattctattggtaactctatacacaaaaaagatatagataaattaaaggcagctggtggagattttaaaatattttttcctggcttttgcaaatatataaacttaagaattaactatagaaatcatagaaagatacttattatagatagcaaagttgcttttttaggtggatttaatataggtgatgaatatcttggaaaagataaaaatattggtcattggcgtgatactcatactaaaataaagggacttgctattaatgatctagaaggaagattccttttagattggagttatgctaatgaatcagatttagacatagatttaaaaaaatattttataaatcctcattcaactgatttgccaaagaagattattggagctcaaatagtttcctctggtcctgaccatactgaacaacaaataaaaaatggatattttaaaattataaattcagctaagaaaaatctttttatacaaacgccttattttgtccctgatgaacctatgcttgaagctttaagacttgctgccttatctggagttgatgtaaaaataatgctacctggtaatcctgatcataaatttatgggatggatagcaaactcttattttgaatccttattaaatgctggtgcaaagatctacttatatgaaaagggctttcttcacgctaaaaccatagtggcagactcttctatatgtagtgtaggaacagctaacatggatataagaagcttttctttaaactttgaaagcaatatatttatatataatgaagctatttcaaaatctatggaagaacaattctttaaagacctaaaggtgtgtactaaagtaacccttgaaagttttgaaaaacgatctattatatcaagaattggagaatccataacaagattagtatctcctttaatgtag

SEQ ID NO: 14722 - protein, 476 aa, Clostridium perfringens
MHLFINMIFLINIVFIISIIFIERRNPQTTWAWILILTFLPILGFIIYILFGQNITREKNFKRKILDDKTKQKYLNSFKSHYKLDNISLKYKDLIMMNFNNDNSTYTQRNDIDLYFDANSLFEEMIDEINKAEKFIHMEFYIFKSDEIGKKILQALTKKAKEGVEVKLLVDSIGNSIHKKDIDKLKAAGGDFKIFFPGFCKYINLRINYRNHRKILIIDSKVAFLGGFNIGDEYLGKDKNIGHWRDTHTKIKGLAINDLEGRFLLDWSYANESDLDIDLKKYFINPHSTDLPKKIIGAQIVSSGPDHTEQQIKNGYFKIINSAKKNLFIQTPYFVPDEPMLEALRLAALSGVDVKIMLPGNPDHKFMGWIANSYFESLLNAGAKIYLYEKGFLHAKTIVADSSICSVGTANMDIRSFSLNFESNIFIYNEAISKSMEEQFFKDLKVCTKVTLESFEKRSIISRIGESITRLVSPLM

SEQ ID NO: 14723 - DNA, 1461 bp, Escherichia coli O157
  CDS (1)..(1461): transl_table=11
atgacaaccgtttatacgttggtgagttggttggccattctgggatactggttgctcattgcaggcgtaactttacgcattctaatgaaacgacgcgcagttccctccgcgatggcctggctgttgattatttacattctgccgttagtcggaattattgcctatcttgccgttggcgagctccatttaggcaaacgccgcgctgagcgcgccagagcgatgtggccttccaccgcaaaatggcttaacgaccttaaagcctgtaagcatatctttgccgaagaaaatagcagtgtcgctgcgccattattcaagctttgcgagcgtcgtcaggggatcgctggggtcaaagggaatcagctacaactgatgaccgagtcagatgatgtgatgcaggcgttaatccgcgacatccagctcgcgcgccataatattgagatggtgttttatatctggcagcccggcggcatggcggaccaggtggctgaatcattaatggcggctgcgcgacgcggcattcattgccgattgatgctcgactccgccgggagtgtagcttttttccacagcccgtggcccgagctaatgcgtaatgccggtattgaagtggtcgaagccttaaaggtcaatctgatgcgtgtgtttttacgccgtatggacctgcgccaacatcgcaagatgatcatgatcgataattacatcgcgtacaccggcagcatgaatatggtcgaccctcgctacttcaaacaagatgcgggcgtagggcaatggattgatctgatggcgcgtatggaaggccccatcgccaccgcgatggggattatttattcctgcgactgggagattgaaacagggaaacgtattctaccgccaccacctgatgtcaatattatgccgtttgagcaggccagcggtcataccattcacacaattgcttctggccccggctttccggaagatctcattcaccaggcattattgactgcggcttattcggcgcgtgaatatttgatcatgaccacgccctactttgtgccaagcgatgatttacttcatgcgatttgcacggcggcgcagcgcggggtggatgtcagtattatccttccgcgaaaaaatgactcgatgctggtcggctgggccagtcgcgcattctttacggaactgcttgctgctggggttaaagtttatcagtttgaaggcgggttactgcataccaagagcgtgctggtcgatggcgaactaagtctggttggcaccgttaaccttgatatgcgtagtctgtggctgaatttcgagattaccctggcaatcgacgataaaggttttggtgcagaccttgccgccgttcaggacgattatatttcgcgttcacgtctgctcgatgcccgtttatggctaaaacgtccattatggcaacgtgtcgccgagcgactgttttacttcttcagcccgttgctgtaa

SEQ ID NO: 14724 - protein, 486 aa, Escherichia coli O157
MTTVYTLVSWLAILGYWLLIAGVTLRILMKRRAVPSAMAWLLIIYILPLVGIIAYLAVGELHLGKRRAERARAMWPSTAKWLNDLKACKHIFAEENSSVAAPLFKLCERRQGIAGVKGNQLQLMTESDDVMQALIRDIQLARHNIEMVFYIWQPGGMADQVAESLMAAARRGIHCRLMLDSAGSVAFFHSPWPELMRNAGIEVVEALKVNLMRVFLRRMDLRQHRKMIMIDNYIAYTGSMNMVDPRYFKQDAGVGQWIDLMARMEGPIATAMGIIYSCDWEIETGKRILPPPPDVNIMPFEQASGHTIHTIASGPGFPEDLIHQALLTAAYSAREYLIMTTPYFVPSDDLLHAICTAAQRGVDVSIILPRKNDSMLVGWASRAFFTELLAAGVKVYQFEGGLLHTKSVLVDGELSLVGTVNLDMRSLWLNFEITLAIDDKGFGADLAAVQDDYISRSRLLDARLWLKRPLWQRVAERLFYFFSPLL

SEQ ID NO: 14725 - DNA, 1449 bp, Listeria monocytogenes
  CDS (1)..(1449): transl_table=11
atgggactgttggcttatctgttagtgattttgctaattttaaatgtattctttgcggcagtgacggtcttcttagaaagacgcgatacatccgccacttgggcttggttgctagtcttaacttttgttccgatatttggtttcattatctatttgatttttgggagaaaattatcaggcaaaaagattttcgattggaagggacaagaaaaaattgggatacaggaatctactgccaatcaaatagaaatgatacggcaaaaagaatttccatttagcgatccgaatgtgaaaaagcatcgtgatttaatctatttattactcgtaaacgatggtgctattttaacgcaagacaatgaagtggaactttttgtagatggacatgagaaattcgatgcgctaattgctgatattgaaaaagcgaaagatcatatacatctcatctattatatttttcattctgatgaactaggcaatcgcttaatgcgcgtgctggaaagaaaagcagcagaaggtttaaatgtgaaaattatttatgatgcaatgggttcaaggacaacgaaaaaatcatttttccgtacgtttcaaaaaaatggtggtctagttagacctttttttccgtctaaattaccattgattaactttcgtctcaactaccgaaatcaccggaaattggctataatcgatggagatgttggttatattggtggttttaatattggtgatgaatatcttggggcatcgaagaaatttggttactggcgtgatacacatttacgtgtacacggaaaagctgtttatgcgatgcaaactcgctttattatggactggaattctgcatcatccacacataaaattgattacaaagcgcgatacttcccgacttttcatgggaaaggtcatacaagtatgcaaattgtttcgagtggtcctgattccgaatggcaacaaatcaaaaatggttacatcaaaatgatcaatgctgctaaaaaaacaatttatttacaatcaccttattttattccagatgcaagtttgcttgaagcaatcaaaatcgcagcactttctggggtagatgtcagggttatgattcctaataagcctgaccatgcttttgtttaccgcgcaactactaactacgccggtgaattaatggaaacgggagcgaaaatctttatttatgataatggttttatccacgcgaaaacactcgttgtagatggcgaaattgcttcagttggaaccgcgaatatggatttccggagtttccgacttaattttgaagtaaatgcttttatttatgaaaaacaaatggtgcaaaaactagaagatgcctttttggaagatattctaaaatcgtatcaactaacacctgaattatatgcaaaacgatctttatggattaaatttaaagaagcggtaagccgacttttatcgcctatattatag

SEQ ID NO: 14726 - protein, 482 aa, Listeria monocytogenes
MGLLAYLLVILLILNVFFAAVTVFLERRDTSATWAWLLVLTFVPIFGFIIYLIFGRKLSGKKIFDWKGQEKIGIQESTANQIEMIRQKEFPFSDPNVKKHRDLIYLLLVNDGAILTQDNEVELFVDGHEKFDALIADIEKAKDHIHLIYYIFHSDELGNRLMRVLERKAAEGLNVKIIYDAMGSRTTKKSFFRTFQKNGGLVRPFFPSKLPLINFRLNYRNHRKLAIIDGDVGYIGGFNIGDEYLGASKKFGYWRDTHLRVHGKAVYAMQTRFIMDWNSASSTHKIDYKARYFPTFHGKGHTSMQIVSSGPDSEWQQIKNGYIKMINAAKKTIYLQSPYFIPDASLLEAIKIAALSGVDVRVMIPNKPDHAFVYRATTNYAGELMETGAKIFIYDNGFIHAKTLVVDGEIASVGTANMDFRSFRLNFEVNAFIYEKQMVQKLEDAFLEDILKSYQLTPELYAKRSLWIKFKEAVSRLLSPIL

SEQ ID NO: 14727 - DNA, 1473 bp, Pseudomonas aeruginosa
  CDS (1)..(1473): transl_table=11
atggccgccaccggagtggacaaggatcgacctcgcgcaatgacctccaccacctacctcggcctgctgctggtcggtatccaggtactcggcttcgtcgccgccatccatgccgtgctcaccgtgcgcaccgcccagggcgcgatcgcctgggccacctcgttggtattcatgccgtacctgaccctgctgccgtacctggtgttcggtcgcagccgtttcgacgcctacatcgaggcgcggcgccaggccaaccgcgagatgcacctggcggccgccgagctggactggcgtccctgggtcgaggaggccctggcggcccgccaggtcagcggctacaaggggctcaaggcgctggtgcggatgacccgcacgccgaccctggcgaacaaccgggtgcgcctgctggtcaacggcgaggccagcttcgaggcgatgttcaaggcgatttccgccgcccgccaggtgatcctggtgcagttcttcatcgtccgcgacgacgccctcggccagcgcctccagcaactgctgctggaacgtgcggccaacggcgtcgaggtgttcttcctctatgacgccatcggcagccacgcgctgccgcaccgctatgtcgagcggctgcgccagggcggcgtgcagatgcatggcttcagcaccggcagcggcatgctcaaccgcttccaggtgaatttccgcaaccaccgcaaggtcgtggtggtggatggcgagtgcggtttcgtcggcgggcacaacgtcggcgtcgagtacctcggcgagaagccgccgctggcgccctggcgcgacactcacatggaactgcgcgggccggcggtggcgtgcctgcaggaaagcttcgccgaggactggtactgggcgacccacagcctgccgccgctgatcctgccgccgcagtacgacagcgagggcgcgctctgccaggtagtcgccagcggtccggcggatgcccaggaaacctgctcgctgttcttcgtcgagatgatcaacgccgcccacgagcgggtctggatcacctcgccgtatttcgttcccgacgaagcggtgatggccgccctgcgcctggcggtgctgcgcggcgtcgacgtgcgcctgctgataccctcgcgcccggaccaccgcacggtgtatgccgcgtccagcctctacgcgctggaggcgatccgtgccggggtcaaggtgttccgctaccagcccggcttcctccaccagaaggtggtgctggtggaccgcgacaccgccgccgtcggcagcgccaacctggacaaccgttcgttccggctgaatttcgaggtgatggtggtgaccgtcgacgagggcttcgccggcgaggtggaggcgatgctcgaggcggacttcgccgagtcgctcgaattcactccggaagaccgccgcagcgtgcgccgcctgcagcaactggggatgcgcgtggcgcggctggtctcgccgatcctctga

SEQ ID NO: 14728 - protein, 490 aa, Pseudomonas aeruginosa
MAATGVDKDRPRAMTSTTYLGLLLVGIQVLGFVAAIHAVLTVRTAQGAIAWATSLVFMPYLTLLPYLVFGRSRFDAYIEARRQANREMHLAAAELDWRPWVEEALAARQVSGYKGLKALVRMTRTPTLANNRVRLLVNGEASFEAMFKAISAARQVILVQFFIVRDDALGQRLQQLLLERAANGVEVFFLYDAIGSHALPHRYVERLRQGGVQMHGFSTGSGMLNRFQVNFRNHRKVVVVDGECGFVGGHNVGVEYLGEKPPLAPWRDTHMELRGPAVACLQESFAEDWYWATHSLPPLILPPQYDSEGALCQVVASGPADAQETCSLFFVEMINAAHERVWITSPYFVPDEAVMAALRLAVLRGVDVRLLIPSRPDHRTVYAASSLYALEAIRAGVKVFRYQPGFLHQKVVLVDRDTAAVGSANLDNRSFRLNFEVMVVTVDEGFAGEVEAMLEADFAESLEFTPEDRRSVRRLQQLGMRVARLVSPIL

SEQ ID NO: 14729 - DNA, 1446 bp, Pseudomonas putida
  CDS (1)..(1446): transl_table=11
atgcatatggattaccacagcccctacttctttggttacctactcggcctgatccatctgctgggtattgtcgccgcactgcatgcgctgttcaccgtgcggacagcccagggcgccattgcttgggcgatgcccttgctcttcatcccctacctcaccttgatcccctacctgatcttcggcgcccgctcgttctatgcctacatcaaggctcggcgccaggccaaccaggaaatgcacgtggccatggccaacctcaactggcggccctgggttgaagaagcccttaccgcccgcgagtcggaaagctacacagccttgcgcgccatgcccaagctgggtcgaatgccatgcctggcaaataaccaggtgaaactgctgatcaatggcaaagccaccttcgatgccatcttcgcagccatcgaaaaagcacgcgatgtggtactggtgcagttcttcatcattcatgacgacaccctcggcaaggcactgcagcaactcttgctacgcaaagccgccgaaggcgtgcaggtgttcgtgctgtacgaccgtgtcggtagccatgccttgccgtccagctacagccaggtgctgcgtgacggcggtgtgcagatccatgcattcgccacacgtcgcggctggttcaaccgcttccaggtgaacttccgcaaccatcgcaagattgtggtggtggatggcttgctcggcttcatcggcggccacaatgtgggagacgagtacctgggtgaacatccacagctttccccttggcgtgacacccacgtacagatcagcgggccagtactggcctgcctgcaagagtcgttcgccgaggactggtactgggccacgcgccagctaccgccgctgatcctgcccgatacatacccggataacggcgtcctgtgtcaggccttggccagcggcccggcagacccacaagaaacctgctcgctgttcttccttgaagcgattcattcggccacccgcagggtgtggatcaccagcccgtacttcatccctgacgaggccgtgttcgccgccttgcggctggcggtgctacgaggagtcgatgtgcgggtgctgatcccgtcacggcctgaccaccgcatcgtctacgccgcctccagcctgtttgccttcgaagcagtgcgcgcgggggtacgtatgttccgttaccaacccgggtttctgcatcagaaggtggtgctggtggatgatgacgtcagcgcaattgggagtgccaacctggacaaccgctcgttccgcctgaacttcgagattaccctgctgacagtcgatcgcggcttcgccgaccaggtcgagcacatgctccaggaagacttcgaacaagcgcgggaaattactgctgaagacacccaagatacccatcgactgcagcaattggggatgcggattgcgcggctgatatcgccgattctttag

SEQ ID NO: 14730 - protein, 481 aa, Pseudomonas putida
MHMDYHSPYFFGYLLGLIHLLGIVAALHALFTVRTAQGAIAWAMPLLFIPYLTLIPYLIFGARSFYAYIKARRQANQEMHVAMANLNWRPWVEEALTARESESYTALRAMPKLGRMPCLANNQVKLLINGKATFDAIFAAIEKARDVVLVQFFIIHDDTLGKALQQLLLRKAAEGVQVFVLYDRVGSHALPSSYSQVLRDGGVQIHAFATRRGWFNRFQVNFRNHRKIVVVDGLLGFIGGHNVGDEYLGEHPQLSPWRDTHVQISGPVLACLQESFAEDWYWATRQLPPLILPDTYPDNGVLCQALASGPADPQETCSLFFLEAIHSATRRVWITSPYFIPDEAVFAALRLAVLRGVDVRVLIPSRPDHRIVYAASSLFAFEAVRAGVRMFRYQPGFLHQKVVLVDDDVSAIGSANLDNRSFRLNFEITLLTVDRGFADQVEHMLQEDFEQAREITAEDTQDTHRLQQLGMRIARLISPIL

SEQ ID NO: 14731 - DNA, 1446 bp, Pseudomonas putida
  CDS (1)..(1446): transl_table=11
atgcatatggattaccacagcccctacttttttggttacctactcggccttatccacctgttgggtgtcgtcgccgcgctccacgcactgttcactgtacgcaccgcccaaggcgcgattgcctgggccatgcccctgttcttcatcccttacctcaccttgatcccctacctgatcttcggcgcccgctcgttctatgcctacatcaaggcccggcgccaggcgaaccaggaaatgcacgtggccatggccaacctaaactggcggccttgggtggaagaagctctcaccgcccgcgagtcggaaagctacgcagccttgcgcgccatgcccaagctggggcgcatgccttgccttgcgaacaaccaagtaaagctattggtcaatggcaaagccacattcgatgccatcttcgcggctatcgaaaaggcacgcgatgtggtgctggtgcagttcttcatcattcatgacgacaccctcggcaaggcactgcagcaactgctgttgcgcaaggccgccgagggggtacaggtgttcgtactgtatgaccgcgtcggcagccatgccttgccggccagctacagccagcaactgcgcaacggtggtgtgcagatccatgccttcgccacccgccgcggctggttcaaccgcttccaggtgaacttccgtaaccatcgcaagattgtggtggtggatggcctgctcggctttatcggcggccacaacgtgggggacgaatacctcggagggcatcctcagctgtcgccttggcgcgacacccatgtgcagatcagcgggccggtgctggcctgcctgcaggagtcgttcgccgaggattggtattgggccacgcgccagctaccgccgctgattctgccggatgcctacccggataacggcgtgctgtgccaggcgttggccagcggccccgccgacccgcaggaaacctgctcgttgttcttcctcgaggcgatccattccgctacccggcgggtatggatcaccagcccttacttcatcccggacgaagcggtctttgctgcactgcgcctggcggtactacggggtgtcgatgtgcgggtactgatcccgtcacggccagaccaccgcatcgtctatgccgcctccagcctgttcgccttcgaagccgtgcgcgcgggtgtgcgcatgttccgctaccagcccggcttcctgcatcagaaggtggtgctggtagatgatgaagtaagcgcaatcggcagtgccaacctggacaaccgttcgttccggctgaacttcgagatcaccctgctaacggtcgaccgcaacttcgccgaccaggtcgaacacatgctgatcaaagactttgaacaggcgcgggagattactgcggaggacagccgcgatacacatcggctacagcaattggggatgcggattgcgcggctgatttcacccattctgtga

SEQ ID NO: 14732 - protein, 481 aa, Pseudomonas putida
MHMDYHSPYFFGYLLGLIHLLGVVAALHALFTVRTAQGAIAWAMPLFFIPYLTLIPYLIFGARSFYAYIKARRQANQEMHVAMANLNWRPWVEEALTARESESYAALRAMPKLGRMPCLANNQVKLLVNGKATFDAIFAAIEKARDVVLVQFFIIHDDTLGKALQQLLLRKAAEGVQVFVLYDRVGSHALPASYSQQLRNGGVQIHAFATRRGWFNRFQVNFRNHRKIVVVDGLLGFIGGHNVGDEYLGGHPQLSPWRDTHVQISGPVLACLQESFAEDWYWATRQLPPLILPDAYPDNGVLCQALASGPADPQETCSLFFLEAIHSATRRVWITSPYFIPDEAVFAALRLAVLRGVDVRVLIPSRPDHRIVYAASSLFAFEAVRAGVRMFRYQPGFLHQKVVLVDDEVSAIGSANLDNRSFRLNFEITLLTVDRNFADQVEHMLIKDFEQAREITAEDSRDTHRLQQLGMRIARLISPIL

SEQ ID NO: 14733 - DNA, 1440 bp, Pseudomonas syringae
  CDS (1)..(1440): transl_table=11
atggattatcacgacccgtactttttcggttatgtcctcggtttcattcacctgctgggcacaggtgccgccatccatgcgctgctgacggtgcgcacctcccaaggcgcgatcgcctgggcgatgccgttgctgttcatcccctacttcaccttgctgccttatctgatattcggacgcagctcgttcgacgcgtatatcaaggcccgccgtgaggccaacaaggagatgcgcgcagcgatcggcagcctcaactggcggccctggatagaagaagccgtagccgcacgccgatcagacgcctacgcggcgttgcgtgcaatgcccaggctggggaacatgccggcgctggccaacaacaaggtcaggctgctgatcaatggcgaagagacgttcggcgcgattttccaggcaatccgcgaagcgaaacagacgatcctgattcagttcttcatcattcatgacgacaacctcggccgccagttgcaaacgctgctgctggaaaaagccgcccagggcgtggcgatttttgtgctgtacgaccgcatcggcagccatgcattgccgggcgcctacatcgacacgttgcgcgacggtggtgtgcagataaaagcctttgccacgcgcggcgggtggctcaaccgcttccagatcaactttcgcaaccatcgcaagatcgtggtggtcgacggcctgaaaggttacatcggcgggcataacgtgggcgatgaatacatgggcctgaaaccgccgctggcgccttggcgcgatacacacgtggaagtcatcggcccggtggtcgcctgcttgcaggaatcgttcgccgaagactggttctgggccacccgcgaactaccgccgcttagcctgcccgacgagtttcccgaggacggcgtgctgtgccagttgctgaccagcgggccggccgatgcccaggaaacctgttcactgtttttcgtcgaagccattcatgctgccgaagaacgcgtatggatcaccagcccctatttcatccctgacgaggccgtgagcgccgcgctgaccctggcggtcctgcgcggtgtggacgtgcgcctgctactgccctcgcgcccagaccattacgtggtctacgccgcctccagcctttatgcctttgatgccgtccgtgcgggtgtgcgagtgtttcgctacgagccgggctttctgcatcagaaggtggtgctggtcgacaacgacatcaccgccatcggcagcgccaacctcgacaaccgctcgttccgactcaacttcgaactgatgctgctcaccgtcgacagcgacttctccagccaggtcgaggccatgctcaccgccgacttcgctgcggcgcgcgaaatatccctgcaggaaagccatgaaacccgacgcctgcatcagctcggcatgcgcgtagccaggctgatctcgccgattttgtga

SEQ ID NO: 14734 - protein, 479 aa, Pseudomonas syringae
MDYHDPYFFGYVLGFIHLLGTGAAIHALLTVRTSQGAIAWAMPLLFIPYFTLLPYLIFGRSSFDAYIKARREANKEMRAAIGSLNWRPWIEEAVAARRSDAYAALRAMPRLGNMPALANNKVRLLINGEETFGAIFQAIREAKQTILIQFFIIHDDNLGRQLQTLLLEKAAQGVAIFVLYDRIGSHALPGAYIDTLRDGGVQIKAFATRGGWLNRFQINFRNHRKIVVVDGLKGYIGGHNVGDEYMGLKPPLAPWRDTHVEVIGPVVACLQESFAEDWFWATRELPPLSLPDEFPEDGVLCQLLTSGPADAQETCSLFFVEAIHAAEERVWITSPYFIPDEAVSAALTLAVLRGVDVRLLLPSRPDHYVVYAASSLYAFDAVRAGVRVFRYEPGFLHQKVVLVDNDITAIGSANLDNRSFRLNFELMLLTVDSDFSSQVEAMLTADFAAAREISLQESHETRRLHQLGMRVARLISPIL

SEQ ID NO: 14735 - DNA, 1461 bp, Salmonella typhi
  CDS (1)..(1461): transl_table=11
atgacaaccttctacaccgtggtgagttggctggtcattttgggatactgggttctcattgccggcgtcacattacgtattctaatgaaacggcgcgcagttccctccgcaatggcctggttgttaatcatctatatccttccgctggtcgggatcatcgcctatttgtccgtgggcgaattgcatttaggcaaacgtcgcgccgagcgtgcccgcgccatgtggccgtctaccgccaaatggttgaatgacctcaaagcctgcaaacacattttcgcgcaagaaaacagtagcgtcgcatcgtccttgtttaagctgtgcgaacgacgtcaggggattgcgggcgtcaaaggcaaccagttgcaattacttaccgactccgatgatgtcatgcaggcgcttattcgcgatatccaactggcgcggcataatatcgaaatggtgttttacatctggcagccaggcggcatggcggatcaggtcgctgaatcgctaatggccgccgcccgccgcggcatccattgccggcttatgctggattccgcgggtagcgtcgctttcttccgcagcccctgggcggccatgatgcgtaacgctggcattgaagtcgtagaggcgctgaaggtgaatctgatgcgcgtctttttacgccgtatggatcttcgccagcaccgtaaaatggtgatgattgacaattacatcgcctataccggcagtatgaatatggtggacccgcgttttttcaaacaggatgccggcgttggacaatgggtcgatttgatggcgcggatggagggtcccgtggcgacagcaatggggattgtttactcctgcgattgggaaatcgagacgggtaaacgcattctgcctcccccgccggacgtgaatattatgccgtttgagcaggccagcgggcataccattcataccattgcttccggtcctggttttccggaagatctcattcaccaggcactattaaccgccacctatgctgcgcgcgaatatttaattatgaccacgccatatttcgtccccagcgacgatctgctgcacgccatttgtaccgctgcgcagcgcggcgtggatgtcagtattatcctgccccgtaaaaatgattcactgctcgtcggctgggccagtcgcgcctttttcagcgagttactggcggcgggcgtgaaaatctatcagttcgaaggcgggctgttgcataccaaaagcgtgctggtcgatggcgaactgagcctggtcggtaccgtgaatctcgacatgcgtagcctgtggcttaatttcgagattacgctggtcattgatgatacgggtttcggcgccgatctggctgcggtacaggacgattatatttcgcgctcccgcctgttagatgcgcgtttgtgggtaaaacgtccgttatggcagcgtattaccgagcgattgttttacttctttagtccattgctgtaa

SEQ ID NO: 14736 - protein, 486 aa, Salmonella typhi
MTTFYTVVSWLVILGYWVLIAGVTLRILMKRRAVPSAMAWLLIIYILPLVGIIAYLSVGELHLGKRRAERARAMWPSTAKWLNDLKACKHIFAQENSSVASSLFKLCERRQGIAGVKGNQLQLLTDSDDVMQALIRDIQLARHNIEMVFYIWQPGGMADQVAESLMAAARRGIHCRLMLDSAGSVAFFRSPWAAMMRNAGIEVVEALKVNLMRVFLRRMDLRQHRKMVMIDNYIAYTGSMNMVDPRFFKQDAGVGQWVDLMARMEGPVATAMGIVYSCDWEIETGKRILPPPPDVNIMPFEQASGHTIHTIASGPGFPEDLIHQALLTATYAAREYLIMTTPYFVPSDDLLHAICTAAQRGVDVSIILPRKNDSLLVGWASRAFFSELLAAGVKIYQFEGGLLHTKSVLVDGELSLVGTVNLDMRSLWLNFEITLVIDDTGFGADLAAVQDDYISRSRLLDARLWVKRPLWQRITERLFYFFSPLL

SEQ ID NO: 14737 - DNA, 1461 bp, Shigella flexneri
  CDS (1)..(1461): transl_table=11
atgacaaccgtttatacgttggtgagttggttggccattctgggatactggttgctcattgcaggcgtaactttacgcattctaatgaaacgacgcgcagttccctccgcgatggcctggctgttgattatttacattctgccgttagtcggaattattgcctatcttgccgttggcgagctccatttaggcaaacgccgcgctgagcgcgccagagcgatgtggccttccaccgcaaaatggcttaacgaccttaaagcctgtaagcatatcttcgccgaagaaaatagcagtgtcgctgcgccattattcaagctttgcgagcgtcgtcaggggatcgctggggtcaaagggaatcagctacagctgatgaccgagtcagatgatgtgatgcaggcgttaatccgcgacatccagctcgcgcgccataatattgagatggtgttttatatctggcagcccggcggcatggcggaccaggtggctgaatcattaatggcggctgcacggcgtggtattcattgccgattgatgctcgactccgccgggagtgtggcttttttccgcagcccgtggcccgagctaatgcgtaatgccggtattgaagtggtcgaagccttaaaggtcaatctgatgcgtgtgtttttacgccgtatggacctgcgccaacatcgcaagatgatcatgatcgataattacatcgcgtacaccggcagcatgaatatggtcgatcctcgctacttcaaacaagatgcgggcgtagggcaatggattgatctgatggcgcgtatggaaggccccatcgccaccgcgatggggattatttattcctgcgactgggagattgaaaccggaaaacgtattctgccgccaccaccagatgtcaatattatgccgtttgaacaggccagcggtcacaccattcacacaattgcttctggccccggctttccggaagatctcattcaccaggcattattgactgcggcttattcggcgcatgaatatttgatcatgaccacgccctactttgtgccaagcgatgatttacttcatgcgatttgcacggcggcgcagcgcggggtggatgtcagtattatccttccgcgaaaaaatgactcgatgctggtcggctgggccagtcgcgcattctttacggaactgcttgctgctggggttaaaatttatcagtttgaaggcgggttactgcataccaagagcgtgctggtcgatggcgaactaagtctggttggcaccgttaaccttgatatgcgtagtctgtggctgaatttcgagattaccttggcaatcgacgataaaggttttggtgcagaccttgccgccgttcaggacgattatatttcgcgttcacgtctgctcgatgcccgtttatggctaaaacgtccattatggcaacgtgtcgccgagcgactgttttacttcttcagcccgttgctgtaa

SEQ ID NO: 14738 - protein, 486 aa, Shigella flexneri
MTTVYTLVSWLAILGYWLLIAGVTLRILMKRRAVPSAMAWLLIIYILPLVGIIAYLAVGELHLGKRRAERARAMWPSTAKWLNDLKACKHIFAEENSSVAAPLFKLCERRQGIAGVKGNQLQLMTESDDVMQALIRDIQLARHNIEMVFYIWQPGGMADQVAESLMAAARRGIHCRLMLDSAGSVAFFRSPWPELMRNAGIEVVEALKVNLMRVFLRRMDLRQHRKMIMIDNYIAYTGSMNMVDPRYFKQDAGVGQWIDLMARMEGPIATAMGIIYSCDWEIETGKRILPPPPDVNIMPFEQASGHTIHTIASGPGFPEDLIHQALLTAAYSAHEYLIMTTPYFVPSDDLLHAICTAAQRGVDVSIILPRKNDSMLVGWASRAFFTELLAAGVKIYQFEGGLLHTKSVLVDGELSLVGTVNLDMRSLWLNFEITLAIDDKGFGADLAAVQDDYISRSRLLDARLWLKRPLWQRVAERLFYFFSPLL

SEQ ID NO: 14739 - DNA, 1485 bp, Staphylococcus aureus
  CDS (1)..(1485): transl_table=11
atgatagagttattatccattgcactcaagcattctaatattattttaaattcaatatttattggtgcatttattttaaacttattattcgcctttaccattattttcatggaaagacgttctgccaattctatctgggcttggttactagtcttagttttcttgcctttattcggcttcattttatacttactattaggacgacaaattcaacgtgaccaaattttcaaaattgataaggaagataaaaaaggattagagttaatcgttgatgagcaattagctgctttaaaaaatgaaaacttttcaaattccaattatcaaattgtaaaatttaaagaaatgattcaaatgttgttatataataacgcagcatttttaacaacagacaacgatttaaaaatatacacagacggccaagaaaaatttgatgacctaatacaagacatccgtaatgctactgattatattcattttcagtactatattattcaaaatgatgaattaggtcgtaccattttaaatgaacttggtaaaaaagcggaacaaggtgtagaagttaaaattctttatgatgacatgggttctcgtggactgcgtaaaaaaggcttacgcccgtttcgcaataaaggtggacatgctgaagcatttttcccatcaaaattacctttaattaacttgcgtatgaacaatcgaaaccatcgaaaaattgttgtaatagatgggcaaattggatatgttggtggttttaatgttggtgatgagtacttaggtaaatcaaaaaaattcggctattggcgagatacgcatttacgaattgtcggggatgcagtgaatgcattgcaattacgatttattctagattggaattcacaagccacacgtgaccacatctcctatgatgatcgttatttcccagatgtaaattctggtggaacaattggcgttcaaatagcttctagtggtcctgacgaagaatgggaacagattaaatacggctatttgaaaatgatttcatctgctaaaaaatcgatttatattcaatctccctatttcatacctgatcaagcctttttagattctattaaaattgcggcattaggtggtgttgatgtcaatatcatgattcctaataaacctgaccatccgtttgttttttgggctactttaaaaaatgcagcatccttattagatgccggtgttaaagtatttcactacgacaatggctttttacactcaaaaacacttgttatagatgatgaaattgcaagtgtgggaacagctaatatggaccatcgcagtttcacattgaatttcgaagtcaacgcttttatttatgaccaacaaattgccaaaaaattaaaacaagcttttatagatgatttagcagtatcttctgaattaacaaaagcacgttatgctaagcgaagtctttggattaaatttaaagaaggtatttcacaattattgtcacctatcttataa

SEQ ID NO: 14740 - protein, 494 aa, Staphylococcus aureus
MIELLSIALKHSNIILNSIFIGAFILNLLFAFTIIFMERRSANSIWAWLLVLVFLPLFGFILYLLLGRQIQRDQIFKIDKEDKKGLELIVDEQLAALKNENFSNSNYQIVKFKEMIQMLLYNNAAFLTTDNDLKIYTDGQEKFDDLIQDIRNATDYIHFQYYIIQNDELGRTILNELGKKAEQGVEVKILYDDMGSRGLRKKGLRPFRNKGGHAEAFFPSKLPLINLRMNNRNHRKIVVIDGQIGYVGGFNVGDEYLGKSKKFGYWRDTHLRIVGDAVNALQLRFILDWNSQATRDHISYDDRYFPDVNSGGTIGVQIASSGPDEEWEQIKYGYLKMISSAKKSIYIQSPYFIPDQAFLDSIKIAALGGVDVNIMIPNKPDHPFVFWATLKNAASLLDAGVKVFHYDNGFLHSKTLVIDDEIASVGTANMDHRSFTLNFEVNAFIYDQQIAKKLKQAFIDDLAVSSELTKARYAKRSLWIKFKEGISQLLSPIL

SEQ ID NO: 14741 - DNA, 1461 bp, Yersinia pestis
  CDS (1)..(1461): transl_table=11
atgacgacattttataccgtaatcagttggctttccgtttttggctactggttactcattgccggggtaacattgcgtattctgatgaaacgcagggccgttccttctgctatggcttggttactgattatctacattctgccattggtggggataattgcttacctttcattcggtgaattgcatttgggtaagcggcgtgctgaacgagctaaagccatgtggccatcgaccgctcgctggctgagtgaactcaaggaatgccaacatatctttgctaactctaatagcgaagttgccagcccactgtttcaattatgtgaacggcgtcaaggaataaacggtgttaaaggaaatcaactacaactattaacaacaaccgatgacacactaaaagcgctagtacgagatattgaactcgcccgccacaatatagaaatggtgttttatatttggcaacctggtggtctggtcgatcaggtggctgaatcgttgatggctgcggctcgacgcggcgttcattgccggctgttactcgattcagcgggtagcaagcaatttttccgcagcccttatcccgcaatgatgcgtaatgcaggtattgaggtggttgaggcacttaaagttaatgtatttcgtatgttcttgcgccgaatggatctgcgccaacatcggaaaattgtgttaatcgacaactatgttgcttataccggcagtatgaacatggtagatccccggttcttcaaacaagatgccggggttggtcagtggattgatatgatggcgcgcatggaaggcccggtagccacaaccctaggtattgtttatgcctgtgactgggaaattgaaacaggcaaacgtattttacccccgccccccgacgcgaatattatgccattcgaagaagagactggtcatacgattcaagtcatcgcttctggccctggtttcccagaagaaatgatccaccaggcattattaacagctgtgtatgccgcacgtgaacagttaattatgactacgccatattttgtccccagtgatgacttattacatgccatctgtaccgcggcacaacgcggggttgatgtcagtattattgtcccgcgtgagaatgattcgatgatggttcgctgggccagccgagcattcttcaccgaattgctgaatgcaggcgttaaaatttatcagtttgaaggcggcctattacacagtaaaagtgttctggtcgatggacagctaagtttagtcggcactgttaatctggatatgcgcagtttgtggctgaattttgaaatcacactggtgattgatgatgatggctttggggctgatttagcacaagttcaggatgattatatcgcccgctctgccttattggatggtgaacggtggaacaagcgccctctttggcaccgagtaactgagcgtttattctattttttcagcccattattgtaa

SEQ ID NO: 14742 - protein, 486 aa, Yersinia pestis
MTTFYTVISWLSVFGYWLLIAGVTLRILMKRRAVPSAMAWLLIIYILPLVGIIAYLSFGELHLGKRRAERAKAMWPSTARWLSELKECQHIFANSNSEVASPLFQLCERRQGINGVKGNQLQLLTTTDDTLKALVRDIELARHNIEMVFYIWQPGGLVDQVAESLMAAARRGVHCRLLLDSAGSKQFFRSPYPAMMRNAGIEVVEALKVNVFRMFLRRMDLRQHRKIVLIDNYVAYTGSMNMVDPRFFKQDAGVGQWIDMMARMEGPVATTLGIVYACDWEIETGKRILPPPPDANIMPFEEETGHTIQVIASGPGFPEEMIHQALLTAVYAAREQLIMTTPYFVPSDDLLHAICTAAQRGVDVSIIVPRENDSMMVRWASRAFFTELLNAGVKIYQFEGGLLHSKSVLVDGQLSLVGTVNLDMRSLWLNFEITLVIDDDGFGADLAQVQDDYIARSALLDGERWNKRPLWHRVTERLFYFFSPLL

SEQ ID NO: 14743 - DNA, 1509 bp, Helicobacter pylori J99
  CDS (1)..(1509): transl_table=11
ttgaaaatctttttagttattctaagcgtctttttttttaatgggtgttttgggctagcctataagactcccatttcaaacccccctatctcttatgacccctacactaccaccattgggagcttgtatgctaaaaatttaaaagaaaaccctaaacatagtgcggccattcttttagaagacggctttgatgccttgttgcacagagtgggtcttattagaatgagccaaaaaagcattgacatgcaaacttatatctataaaaacgacctttcttctcaagtgatcgctaaagaacttttaaacgcggccaatcgtggggtaaaagtgcgcatccttttagatgacaacgggttagattcagatttttcagacatcatgcttttaaatttccacaaaaacattgaagtgaaaatctttaacccctactatatccgcaataaaggcttgcgttattttgaaatgcttgcggattatgaacgcattaaaaaacgcatgcacaacaagcttttcatcgtggataatttcgctgtcattataggggggcgcaacattggggacaattattttgataacgatttagacacgaattttttagatttagacgctttgttttttgggggggttgcttcaaaggccaaagaaagctttgaaaattattggcgattccaccgctctatccctgtttcattattaagaacccataaaagactcaaaaacaacgttaaagaaatcgctaagctccatgaaaaaatccctatcagcgctgaagacgcaaacgaatttgaaaaaaaagtcaatgattttatagaacgcttccaaaaataccaataccccatttattatgggaatgccatttttctagccgatttgcccgccaaaattgacacgcccttgtattcgcccatcaaaatcgcttttgaaaaagcccttaaaaacgctaaagactccgtttttatcgcttcatcgtattttattccaggtaaaaagataatgaaaatctttaaaaatcaaatttctaaggggattgaattgaatattcttaccaattccctttcatctacggacgctatcgtggtctatggggcgtgggaaaggtatcgcaataaattagtgcgaatgggcgcgaatgtctatgaaatacgaaacgattttttcaaccgccagattaaagggcgctttagcaccaaacattccttacacggcaagacaattgtttttgacgatgccctaacgcttctagggagttttaatattgatccgcgctctgcatatattaacactgaaagtgcggtcttgtttgacaacccgtcttttgccaaaagggtgcgtttgtcgcttaaagatcatgcccaacaatcatggcatttagtcttgtatcggcatagagtgatttgggaagctacagaagaaggcatcttaatccatgaaaaaaactcgcctgatacctctttctttttgcgtttgattaaagaatggtctaaagtccttcctgaaagagaactttaa

SEQ ID NO: 14744 - protein, 502 aa, Helicobacter pylori J99
MKIFLVILSVFFFNGCFGLAYKTPISNPPISYDPYTTTIGSLYAKNLKENPKHSAAILLEDGFDALLHRVGLIRMSQKSIDMQTYIYKNDLSSQVIAKELLNAANRGVKVRILLDDNGLDSDFSDIMLLNFHKNIEVKIFNPYYIRNKGLRYFEMLADYERIKKRMHNKLFIVDNFAVIIGGRNIGDNYFDNDLDTNFLDLDALFFGGVASKAKESFENYWRFHRSIPVSLLRTHKRLKNNVKEIAKLHEKIPISAEDANEFEKKVNDFIERFQKYQYPIYYGNAIFLADLPAKIDTPLYSPIKIAFEKALKNAKDSVFIASSYFIPGKKIMKIFKNQISKGIELNILTNSLSSTDAIVVYGAWERYRNKLVRMGANVYEIRNDFFNRQIKGRFSTKHSLHGKTIVFDDALTLLGSFNIDPRSAYINTESAVLFDNPSFAKRVRLSLKDHAQQSWHLVLYRHRVIWEATEEGILIHEKNSPDTSFFLRLIKEWSKVLPEREL

SEQ ID NO: 14745 - DNA, 1509 bp, Helicobacter pylori
  CDS (1)..(1509): transl_table=11
ttgaaaatctttttagtctttttaagcgtctttttttttaatgggtgttttgggttagtctataagactcccatttcaagctctcctatctcttatgatccctacactacccccattgggagcttgtatgctgaaaaattaaaagaaaaccctaaccatagcgcggccattcttttagaagatggctttgacgctctgttgcatagagtgggacttattagaatgagccaaaaaagcattgacatgcaaacttatatctataaaaacgacctttcttctcaagtgattgctaaagaacttttaaatgcggccaatcgtggggtaaaagtgcgcatccttttagacgataacggattggattcggatttttcagatattatgctcttaaatttccataaaaacattgaggtgaaaatttttaacccctactatatccgcaataaaggcttgcgttattttgaaatgcttgcggattatgagcgcattaaaaaacgcatgcacaacaagcttttcatcgtggataatttcgctgtcattataggggggcgcaatattggggacaattattttgataacgatttagacacgaattttttagatttagacgctttgttttttgggggggttgcttcaaaagccaaagaaagctttgaacgctattggagattccaccgctctatccctgtttcattactaagaacccataaaagactcaaaaacaacgctaaagaaatcgctaaactccatgaaaaaatccctatcagcgctgaagacaaaaaccagtttgaaaaaaaagtcaatgattttatagatcgtttccaaaaataccaataccccatttattatgggaatgccatttttttagccgattcacccaaaaaaattgacacgcccttgtattcgcctatcaaaatcgcttttgagaaagcccttaaaaacgctaaggactccgtttttatcgcttcatcgtattttattccaggcaaaaagatgatgaaaatctttaaaaatcaaatttctaaggggattgaattgaacatccttaccaattccctttcatctactgatgcgatagtggtctatggggcatgggaaaggtatcgcaaccaattagtgcgaatgggcgcgaatgtctatgaaatacgaaacgattttttcaaccgccagattaaagggcgctttagcaccaaacattccttgcatggcaagacgattgtttttgatgacaatttaacgcttctagggagtttcaatattgatccgcgctctgcatacatcaacactgaaagcgcggttttgtttgacaacccgtcttttgctaaaagggtgcgtttgtcgcttaaagatcatgcccaacaatcatggcatttggtggtgtatcggcatagagtgatttgggaagcggtggaagaaggcattttaatccatgaaaaaacttcgcctgacacttccttctttttgcgcttgattaaagaatggtctaaagtccttcctgaaagagagctttaa

SEQ ID NO: 14746 - protein, 502 aa, Helicobacter pylori
MKIFLVFLSVFFFNGCFGLVYKTPISSSPISYDPYTTPIGSLYAEKLKENPNHSAAILLEDGFDALLHRVGLIRMSQKSIDMQTYIYKNDLSSQVIAKELLNAANRGVKVRILLDDNGLDSDFSDIMLLNFHKNIEVKIFNPYYIRNKGLRYFEMLADYERIKKRMHNKLFIVDNFAVIIGGRNIGDNYFDNDLDTNFLDLDALFFGGVASKAKESFERYWRFHRSIPVSLLRTHKRLKNNAKEIAKLHEKIPISAEDKNQFEKKVNDFIDRFQKYQYPIYYGNAIFLADSPKKIDTPLYSPIKIAFEKALKNAKDSVFIASSYFIPGKKMMKIFKNQISKGIELNILTNSLSSTDAIVVYGAWERYRNQLVRMGANVYEIRNDFFNRQIKGRFSTKHSLHGKTIVFDDNLTLLGSFNIDPRSAYINTESAVLFDNPSFAKRVRLSLKDHAQQSWHLVVYRHRVIWEAVEEGILIHEKTSPDTSFFLRLIKEWSKVLPEREL

SEQ ID NO: 14747 - DNA, 1242 bp, Escherichia coli
  CDS (1)..(1242): transl_table=11
atgaaatgtagctggcgcgaaggcaataagatccagttgctggaaaacggcgagcaatattatcccgcggtgtttaaggcgattggcgaggcacaagaacgcatcattcttgaaacgtttatctggtttgaggatgacgtcggcaaacaactgcatgcggcactactggcagcagcgcaacgcggggttaaagcggaagtcttgctggatggctacggttcgccggatctcagcgatgagtttgtcaatgaactgacggcagctggcgtagtgttccgctactacgatccccgccctcgcctttttggtatgcgcaccaatgtgtttcgccggatgcatcgcaaaattgtggtaatcgacgcgcgtatcgcctttattggcgggctgaattactccgccgagcatatgtccagctacggtccagaggctaaacaggattacgcggtacgccttgaagggccgattgtcgaagatattctccagtttgagctggaaaacctgcctggacagagcgcggcacgacgctggtggcgacgtcatcacaaagcggaagagaaccgccagccgggagaagcgcaggtattgctggtctggcgcgataacgaagaacatcgcgatgatattgaacgtcactatctgaaaatgctcactcaggcgcggcgagaagtcattatcgccaacgcctacttcttccccggctatcgatttttacacgccttgcgtaaagcggcacggcgcggggtgcggatcaaactgatcattcagggcgaaccggatatgccgattgtcagagtcggtgcgcgcttgctgtataactatctggttaaaggcggcgttcaggtgtttgagtaccgccgccgcccgctccacggcaaagtggcattgatggacgatcactgggcgacagtagggtccagtaatctcgatccgctcagtttgtcactgaatctcgaagcaaatgtcatcatccacgatcgtcattttaaccagacgctgcgcgataatctgaacggcattattgccgcagattgtcagcaggtcgatgagaccatgctgccgaaacgcacctggtggaacctaaccaaaagcgtgctggcgttccactttttacgccacttcccggcgctggttggctggcttccggcacacacgccacgtctggcgcaggttgatcctcccgcacaaccgacaatggaaacgcaggatcgggtagaaactgaaaacacgggggtaaaaccctga

SEQ ID NO: 14748 - protein, 413 aa, Escherichia coli
MKCSWREGNKIQLLENGEQYYPAVFKAIGEAQERIILETFIWFEDDVGKQLHAALLAAAQRGVKAEVLLDGYGSPDLSDEFVNELTAAGVVFRYYDPRPRLFGMRTNVFRRMHRKIVVIDARIAFIGGLNYSAEHMSSYGPEAKQDYAVRLEGPIVEDILQFELENLPGQSAARRWWRRHHKAEENRQPGEAQVLLVWRDNEEHRDDIERHYLKMLTQARREVIIANAYFFPGYRFLHALRKAARRGVRIKLIIQGEPDMPIVRVGARLLYNYLVKGGVQVFEYRRRPLHGKVALMDDHWATVGSSNLDPLSLSLNLEANVIIHDRHFNQTLRDNLNGIIAADCQQVDETMLPKRTWWNLTKSVLAFHFLRHFPALVGWLPAHTPRLAQVDPPAQPTMETQDRVETENTGVKP

SEQ ID NO: 14749 - DNA, 1242 bp, Salmonella typhimurium
  CDS (1)..(1242): transl_table=11
atgaaatgcggctggcgtgaaggtaatcaaattcagctactggaaaacggcgaccagttctatcctgccgtgtttgaggctatcgctcaggcacagcaaaaaatcattctggaaacctttatcttgtttgaagatgaggtgggtaaaaaactccataccgctctgctaaaagccgcacagcgcggcgtaaaagccgaagtattactcgacggctacggctctcccgatctcagcgacgcgtttgtcggcgaattgacctcagcgggcgtgatttttcgctattacgacccccgcccgcgtctactggggttgcgaaccaatatcttccgccgaatgcaccgcaaaattgtggtgattgatgatcgtattgcctttgtcggcggcattaactactccgccgaacatatgtcggattacggcccgcaggcgaaacaagactacgcggtacgggtcgaagggcctgtagtggccgatatcctgcaattcgaagtcgagaatctgccggggcaaagccccgcgcgccgctggtggaagcgccatcatcaggctgaagaaaatcgccaccccggcgaagcgcaggcgctgtttgtctggcgggataatgaagaacaccgcgacgatatcgaacgtcattatctgaaaatgctgacccaggcaaagcgtgaagtgattatcgctaacgcctattttttccccggctatcgcttgctccacgcaatgcgtaaagccgcccgccgtggcgtgagcgtaaaactgattgtccagggggaaccagacatgccgatagtcaaagtcggcgcgcggttgctctataactatctggtgaagggcggtgtgcaggtttatgaataccgacgacgtccgctgcatggcaaagtggcgctgatggacgatcactgggccacggtagggtcgagtaatctcgatccgctcagcctgtcgcttaaccttgaagctaacctgatcattcacgatcgtacttttaaccagaccctgcgcgataacttacaaggcatcatcgtgaacgattgtaagcaggtcgatgagtctatgctgccgaaacgcacctggtggaacctgaccaaaagcgtgctggcgttccactttttacgtcatttcccggcgctggtcggctggctaccggcgcataccccgcatctggcgcaggttcccccgcctgcccagccagaaatggaaacccaggatcgcgttgatccagaaaatacaggagtgaagccctaa

SEQ ID NO: 14750 - protein, 413 aa, Salmonella typhimurium
MKCGWREGNQIQLLENGDQFYPAVFEAIAQAQQKIILETFILFEDEVGKKLHTALLKAAQRGVKAEVLLDGYGSPDLSDAFVGELTSAGVIFRYYDPRPRLLGLRTNIFRRMHRKIVVIDDRIAFVGGINYSAEHMSDYGPQAKQDYAVRVEGPVVADILQFEVENLPGQSPARRWWKRHHQAEENRHPGEAQALFVWRDNEEHRDDIERHYLKMLTQAKREVIIANAYFFPGYRLLHAMRKAARRGVSVKLIVQGEPDMPIVKVGARLLYNYLVKGGVQVYEYRRRPLHGKVALMDDHWATVGSSNLDPLSLSLNLEANLIIHDRTFNQTLRDNLQGIIVNDCKQVDESMLPKRTWWNLTKSVLAFHFLRHFPALVGWLPAHTPHLAQVPPPAQPEMETQDRVDPENTGVKP

SEQ ID NO: 14751 - DNA, 1242 bp, Shigella flexneri
  CDS (1)..(1242): transl_table=11
atgaaatgtagctggcgcgaaggcaataagatccagttgctggaaaacggcgagcaatattatcccgcggtgtttaaggcgattggcgaggcacaagaacgcatcattcttgaaacgtttatctggtttgaggataacgtcggcaaacagctgcatgcggcactactggcagcagcgcaacgcggggttaaagcggaagtcttgctggatggctacggttcgccggatctcagcgatgagtttgtcaatgaactgacggcagctggcgtagtgttccgctactacgatccccgccctcgcctttttggtatgcgcaccaatgtgtttcgccggatgcatcgcaaaattgtggtgatcgacgcgcgtatcgcctttattggcgggctgaattactcctccgagcatatgtccagctacggtccagaggctaaacaggattacgcggtacgccttgaagggccgattgtcgaagatattctccagtttgagctggaaaacctgcctggacagagcgcggcacgacgctggtggcgacgtcatcacaaagcggaagagaaccgccagccgggagaagcgcaggtattgctggtctggcgcgataacgaagaacatcgcgatgatattgaacgccattatctgaaaatgctcactcaggcgcagcgggaagtgattatcgccaacgcctacttcttccccggctatcgatttttacacgccttgcgtaaagcggcacggcgcggggtgcggatcaaactgatcattcagggcgaaccggatatgccgattgtcagagtcggtgcgcgcttgctgtataactatctggttaaaggcggcgttcaggtttttgagtaccgccgccgcccgctccacggcaaagtggcattgatggacgatcactgggcgacagtagggtccagtaatctcgatccgctcagtttgtcactgaatctcgaagcaaatgtcatcatccacgatcgtcattttaaccagacgctgcgcgataatctgaacggcattattgccgcagattgtcagcaggtggatgaaaccatgctgcccaaacgcacctggtggaacctgaccaaaagcgtgctggcgttccactttttacgccacttcccggcgctggttggctggcttccggcacacacaccacgtctgacgcaggttgatccccccgcacaaccgacaatggaaacgcaggatcgggtagaaactgaaaacacgggggtaaacccctga

SEQ ID NO: 14752 - protein, 413 aa, Shigella flexneri
MKCSWREGNKIQLLENGEQYYPAVFKAIGEAQERIILETFIWFEDNVGKQLHAALLAAAQRGVKAEVLLDGYGSPDLSDEFVNELTAAGVVFRYYDPRPRLFGMRTNVFRRMHRKIVVIDARIAFIGGLNYSSEHMSSYGPEAKQDYAVRLEGPIVEDILQFELENLPGQSAARRWWRRHHKAEENRQPGEAQVLLVWRDNEEHRDDIERHYLKMLTQAQREVIIANAYFFPGYRFLHALRKAARRGVRIKLIIQGEPDMPIVRVGARLLYNYLVKGGVQVFEYRRRPLHGKVALMDDHWATVGSSNLDPLSLSLNLEANVIIHDRHFNQTLRDNLNGIIAADCQQVDETMLPKRTWWNLTKSVLAFHFLRHFPALVGWLPAHTPRLTQVDPPAQPTMETQDRVETENTGVNP

SEQ ID NO: 14753 - DNA, 23 bp, Artificial sequence
  Primer sequence
atgatgaagaaaacgcccacctc

SEQ ID NO: 14754 - DNA, 24 bp, Artificial sequence
  Primer sequence
ttacaataaccattccacgggcaa

SEQ ID NO: 14755 - protein, 736 aa, Artificial sequence
  Consensus
  Variant (3)..(4): Xaa in position 3 to 4 is any amino acid
  Variant (6)..(7): Xaa in position 6 to 7 is any amino acid
  Variant (9)..(10): Xaa in position 9 to 10 is any amino acid
  Variant (12)..(16): Xaa in position 12 to 16 is any amino acid
  Variant (18)..(19): Xaa in position 18 to 19 is any or no amino acid
  Variant (21)..(21): Xaa in position 21 is any amino acid
  Variant (22)..(93): Xaa in position 22 to 93 is any or no amino acid
  Variant (95)..(105): Xaa in position 95 to 105 is any amino acid
  Variant (106)..(109): Xaa in position 106 to 109 is any or no amino acid
  Variant (111)..(111): Xaa in position 111 is any amino acid
  Variant (113)..(113): Xaa in position 113 is any amino acid
  Variant (116)..(117): Xaa in position 116 to 117 is any amino acid
  Variant (119)..(119): Xaa in position 119 is any or no amino acid
  Variant (121)..(121): Xaa in position 121 is any amino acid
  Variant (123)..(123): Xaa in position 123 is any amino acid
  Variant (127)..(128): Xaa in position 127 to 128 is any amino acid
  Variant (130)..(131): Xaa in position 130 to 131 is any amino acid
  Variant (133)..(135): Xaa in position 133 to 135 is any amino acid
  Variant (137)..(137): Xaa in position 137 is any amino acid
  Variant (139)..(139): Xaa in position 139 is any amino acid
  Variant (144)..(145): Xaa in position 144 to 145 is any amino acid
  Variant (147)..(147): Xaa in position 147 is any amino acid
  Variant (150)..(151): Xaa in position 150 to 151 is any amino acid
  Variant (153)..(154): Xaa in position 153 to 154 is any amino acid
  Variant (158)..(158): Xaa in position 158 is any amino acid
  Variant (161)..(161): Xaa in position 161 is any amino acid
  Variant (165)..(165): Xaa in position 165 is any amino acid
  Variant (172)..(172): Xaa in position 172 is any amino acid
  Variant (176)..(183): Xaa in position 176 to 183 is any amino acid
  Variant (184)..(190): Xaa in position 184 to 190 is any or no amino acid
  Variant (192)..(194): Xaa in position 192 to 194 is any amino acid
  Variant (197)..(197): Xaa in position 197 is any amino acid
  Variant (199)..(200): Xaa in position 199 to 200 is any amino acid
  Variant (202)..(202): Xaa in position 202 is any amino acid
  Variant (204)..(209): Xaa in position 204 to 209 is any amino acid
  Variant (210)..(229): Xaa in position 210 to 229 is any or no amino acid
  Variant (233)..(233): Xaa in position 233 is any amino acid
  Variant (235)..(235): Xaa in position 235 is any amino acid
  Variant (245)..(245): Xaa in position 245 is any amino acid
  Variant (252)..(252): Xaa in position 252 is any amino acid
  Variant (259)..(261): Xaa in position 259 to 261 is any amino acid
  Variant (262)..(286): Xaa in position 262 to 286 is any or no amino acid
  Variant (288)..(288): Xaa in position 288 is any or no amino acid
  Variant (290)..(291): Xaa in position 290 to 291 is any amino acid
  Variant (295)..(295): Xaa in position 295 is any amino acid
  Variant (298)..(298): Xaa in position 298 is any amino acid
  Variant (300)..(301): Xaa in position 300 to 301 is any amino acid
  Variant (303)..(305): Xaa in position 303 to 305 is any amino acid
  Variant (307)..(308): Xaa in position 307 to 308 is any amino acid
  Variant (311)..(313): Xaa in position 311 to 313 is any amino acid
  Variant (315)..(327): Xaa in position 315 to 327 is any amino acid
  Variant (328)..(382): Xaa in position 328 to 382 is any or no amino acid
  Variant (384)..(384): Xaa in position 384 is any or no amino acid
  Variant (388)..(388): Xaa in position 388 is any amino acid
  Variant (391)..(396): Xaa in position 391 to 396 is any amino acid
  Variant (398)..(400): Xaa in position 398 to 400 is any amino acid
  Variant (401)..(413): Xaa in position 401 to 413 is any or no amino acid
  Variant (415)..(415): Xaa in position 415 is any or no amino acid
  Variant (418)..(419): Xaa in position 418 to 419 is any amino acid
  Variant (423)..(423): Xaa in position 423 is any or no amino acid
  Variant (425)..(425): Xaa in position 425 is any or no amino acid
  Variant (427)..(427): Xaa in position 427 is any or no amino acid
  Variant (434)..(436): Xaa in position 434 to 436 is any amino acid
  Variant (439)..(439): Xaa in position 439 is any amino acid
  Variant (442)..(443): Xaa in position 442 to 443 is any amino acid
  Variant (446)..(446): Xaa in position 446 is any amino acid
  Variant (450)..(454): Xaa in position 450 to 454 is any or no amino acid
  Variant (456)..(456): Xaa in position 456 is any amino acid
  Variant (461)..(463): Xaa in position 461 to 463 is any amino acid
  Variant (465)..(466): Xaa in position 465 to 466 is any amino acid
  Variant (469)..(470): Xaa in position 469 to 470 is any amino acid
  Variant (472)..(474): Xaa in position 472 to 474 is any amino acid
  Variant (476)..(477): Xaa in position 476 to 477 is any amino acid
  Variant (478)..(488): Xaa in position 478 to 488 is any or no amino acid
  Variant (491)..(491): Xaa in position 491 is any amino acid
  Variant (498)..(498): Xaa in position 498 is any amino acid
  Variant (500)..(503): Xaa in position 500 to 503 is any amino acid
  Variant (504)..(608): Xaa in position 504 to 608 is any or no amino acid
  Variant (613)..(613): Xaa in position 613 is any amino acid
  Variant (618)..(618): Xaa in position 618 is any amino acid
  Variant (619)..(626): Xaa in position 619 to 626 is any or no amino acid
  Variant (629)..(629): Xaa in position 629 is any amino acid
  Variant (637)..(637): Xaa in position 637 is any amino acid
  Variant (640)..(641): Xaa in position 640 to 641 is any amino acid
  Variant (644)..(644): Xaa in position 644 is any amino acid
  Variant (647)..(647): Xaa in position 647 is any amino acid
  Variant (651)..(651): Xaa in position 651 is any amino acid
  Variant (653)..(653): Xaa in position 653 is any amino acid
  Variant (654)..(655): Xaa in position 654 to 655 is any or no amino acid
  Variant (658)..(659): Xaa in position 658 to 659 is any amino acid
  Variant (661)..(666): Xaa in position 661 to 666 is any amino acid
  Variant (669)..(669): Xaa in position 669 is any amino acid
  Variant (670)..(670): Xaa in position 670 is any or no amino acid
  Variant (672)..(672): Xaa in position 672 is any amino acid
  Variant (673)..(673): Xaa in position 673 is any or no amino acid
  Variant (675)..(678): Xaa in position 675 to 678 is any amino acid
  Variant (680)..(681): Xaa in position 680 to 681 is any amino acid
  Variant (683)..(684): Xaa in position 683 to 684 is any amino acid
  Variant (685)..(722): Xaa in position 685 to 722 is any or no amino acid
  Variant (725)..(727): Xaa in position 725 to 727 is any amino acid
  Variant (729)..(729): Xaa in position 729 is any amino acid
  Variant (734)..(734): Xaa in position 734 is any amino acid
WLXXLXXLXXLXXXXXLXXGXXXXXXXXXXXXXXXXXXXXXXXXXXXXXXXXXXXXXXXXXXXXXXXXXXXXXXXXXXXXXXXXXXXXXXXXXLXXXXXXXXXXXXXXXNXVXLLXXGXEXFXALLXXIXXAXXXIXLXYYIFXXDXIGXXLXXALIXAAXRGVXVRLLLDXIGSXXXXXXXXXXXXXXXLXXXGVXVXXFXPXXXXXXXXXXXXXXXXXXXXXXXXXXRLNXRXHRKIVVIDGXIGFVGGXNIGDEYXXXXXXXXXXXXXXXXXXXXXXXXXXXXWXDXXVRVXGPXVXXLXXXFXXDWXXXTXXXXXXXXXXXXXXXXXXXXXXXXXXXXXXXXXXXXXXXXXXXXXXXXXXXXXXXXXXXXXXXXXXXXVXVVAXGPXXXXXXIXXXXXXXXXXXXXXXXLXLIXXARKXIXIXTPYFVPXXXLLXALXXAAXRGVXXXXXVXILLPXXXDXXLVXXAXXXYXXXXXXXXXXXXXLLXAGVKIYXYXXXXXXXXXXXXXXXXXXXXXXXXXXXXXXXXXXXXXXXXXXXXXXXXXXXXXXXXXXXXXXXXXXXXXXXXXXXXXXXXXXXXXXXXXXXXXXXXXXXXXXXXXXXXXLHAKXVVVDXXXXXXXXXIAXVGSANLDXRSXXLNXEVXVVIXDXXXLAXXLXXXXXXDLXXSXXLXXXXWXXRXXXXXXXXXXXXXXXXXXXXXXXXXXXXXXXXXXXXXXXXRLXXXLXRLLSXLL

SEQ ID NO: 14756 - protein, 17 aa, Artificial sequence
  Consensus
  Variant (2)..(3): Xaa in position 2 to 3 is any amino acid
  Variant (4)..(4): Xaa in position 4 is any or no amino acid
  Variant (6)..(7): Xaa in position 6 to 7 is any amino acid
  Variant (8)..(8): Xaa in position 8 is any or no amino acid
  Variant (10)..(10): Xaa in position 10 is Ile or Val
  Variant (11)..(11): Xaa in position 11 is any amino acid
  Variant (12)..(12): Xaa in position 12 is Ala, Cys, Thr or Val
  Variant (13)..(16): Xaa in position 13 to 16 is any amino acid
LXXXAXXXGXXXXXXXD

SEQ ID NO: 14757 - protein, 20 aa, Artificial sequence
  Consensus
  Variant (2)..(2): Xaa in position 2 is any amino acid
  Variant (4)..(4): Xaa in position 4 is Asn or Arg
  Variant (6)..(8): Xaa in position 6 to 8 is any amino acid
  Variant (9)..(9): Xaa in position 9 is Ala, Ile or Val
  Variant (11)..(13): Xaa in position 11 to 13 is any amino acid
  Variant (14)..(14): Xaa in position 14 is Ala, Gly, Ser, Thr or Val
  Variant (15)..(16): Xaa in position 15 to 16 is any amino acid
  Variant (18)..(18): Xaa in position 18 is Gly or Ser
  Variant (19)..(19): Xaa in position 19 is any amino acid
RXHXKXXXXDXXXXXXGXXN

SEQ ID NO: 14758 - protein, 22 aa, Artificial sequence
  Consensus
  Variant (2)..(2): Xaa in position 2 is Phe or Leu
  Variant (3)..(3): Xaa in position 3 is Phe, Ile, Leu or Val
  Variant (5)..(11): Xaa in position 5 to 11 is any amino acid
  Variant (12)..(12): Xaa in position 12 is Phe, Ile, Leu, Met or Val
  Variant (13)..(18): Xaa in position 13 to 18 is any amino acid
  Variant (20)..(21): Xaa in position 20 to 21 is any or no amino acid
YXXPXXXXXXXXXXXXXXGXXV

SEQ ID NO: 14759 - protein, 29 aa, Artificial sequence
  Consensus
  Variant (2)..(2): Xaa in position 2 is Ala, Gly, Gln, Ser or Thr
  Variant (4)..(7): Xaa in position 4 to 7 is any amino acid
  Variant (9)..(13): Xaa in position 9 to 13 is any amino acid
  Variant (14)..(14): Xaa in position 14 is any or no amino acid
  Variant (16)..(16): Xaa in position 16 is Ser or Thr
  Variant (17)..(17): Xaa in position 17 is any amino acid
  Variant (19)..(19): Xaa in position 19 is any amino acid
  Variant (20)..(20): Xaa in position 20 is Asp, Asn or Thr
  Variant (21)..(21): Xaa in position 21 is any amino acid
  Variant (24)..(28): Xaa in position 24 to 28 is any amino acid
HXKXXXXDXXXXXXGXXNXXXRSXXXXXE

SEQ ID NO: 14760 - DNA, 192 bp, Escherichia coli
  CDS (1)..(192)
atgcctgagactactaagctgtttaattgtggcgataataagataaaagaaattcaatacttcccaaatcatctggagaaagcacgtatggagtgtgatattgaggttgtctctgcgatatatagcaataaagaattactttttaaagaatgtaattcttttgaagagacatttttatatcatggactttga

SEQ ID NO: 14761 - protein, 63 aa, Escherichia coli
MPETTKLFNCGDNKIKEIQYFPNHLEKARMECDIEVVSAIYSNKELLFKECNSFEETFLYHGL

SEQ ID NO: 14762 - DNA, 1140 bp, Escherichia coli O157:H7 EDL933
  CDS (1)..(1140): transl_table=11
atgtttccattaaatgatctgtcgttaaaaactcagtcggttcaattaaataaaatcacatcgaatactgagtctacgataaaacaacacgagttagtatctgatgatgcaatcataaatgaattatcaagtgagttagtcagttgtcttggaaatgataagtttacaccagttagtgaagactgcaacttactgaatatgctgtctgaatttaagttattgagagagcaatgtttcaggtggggtaattatactctattgtttgaaaattatgagtcttatgataagacggggtctatcacgatagaaaaaaatcagggggaggggactttacccattcggcataaattagagtttatatcgactaatattgcagagttgctggacaagttaacgaaaattacagatgccagactttgcaaaggcttcagtgactgggctagttcagtcaaagaaggcggatcgaatgacctcaaagaaaatgtagatagagcgttggtgagaatgtttaaatgtgttaagcttcacagtaatgaacttgacttatcatacctatttttgggttctgtgccgcctcttccagattggattgaaatgcttagccttgtttataatgaacttgattcaatacaggttcccgaatcatgcaaagaattagaactcgatttcaataaccttacagaatttccacaagtacctgatggaattaccctgatctccgtaaataataacctgatatcgcatattgactcatttccgccaaaggctaagaaaatttttattagtcacaataagctatcggaaacaccagcaataccagacaccgctaaggtttttgattgtggctataataagatacaagaaattcgatacttccccaaaaatctgaaagaagcgcgtattggatataataatattgaggttgttcctgcgatacctggcaatttaaaaatactttttatggaatgtaatcctattaaagaggcatttttaatgccatggactctgacagggatctgctatgaaatatcgcagcgaaaatatattgttacgaatccagccgattatgataaatattccgatatggttaaaaagcatgtaatagatggtgaggaactcataattaaatattttatgtaa

SEQ ID NO: 14763 - protein, 379 aa, Escherichia coli O157:H7 EDL933
MFPLNDLSLKTQSVQLNKITSNTESTIKQHELVSDDAIINELSSELVSCLGNDKFTPVSEDCNLLNMLSEFKLLREQCFRWGNYTLLFENYESYDKTGSITIEKNQGEGTLPIRHKLEFISTNIAELLDKLTKITDARLCKGFSDWASSVKEGGSNDLKENVDRALVRMFKCVKLHSNELDLSYLFLGSVPPLPDWIEMLSLVYNELDSIQVPESCKELELDFNNLTEFPQVPDGITLISVNNNLISHIDSFPPKAKKIFISHNKLSETPAIPDTAKVFDCGYNKIQEIRYFPKNLKEARIGYNNIEVVPAIPGNLKILFMECNPIKEAFLMPWTLTGICYEISQRKYIVTNPADYDKYSDMVKKHVIDGEELIIKYFM

SEQ ID NO: 14764 - DNA, 1140 bp, Escherichia coli O157
  CDS (1)..(1140): transl_table=11
atgtttccattaaatgatctgtcgttaaaaactcagtcggttcaattaaataaaatcacatcgaatactgagtctacgataaaacaacacgagttagtatctgatgatgcaatcataaatgaattatcaagtgagttagtcagttgtcttggaaatgataagtttacaccagttagtgaagacagcaacttactgaatatgctgtctgaatttaagttattgagagagcaatgtttcaggtggggtaattatactctattgtttgaaaattatggggcttatgataagacgggatctatcacgatagaaaaaagtcagggggaggggactttacccattcggcataaattagagtttatatcgaccaatattgcagagttgctggacaagttaaccaaaattacagatgccaggctttgcaaaggtttcagtgactgggctagttcagtcaaagaaggcgcatcgaatgacttgaaagaaaatgtggatagagcattggtgagaatgtttaaatgtgttaagcttcacagtaatgaacttaacttatcaagcctttctttgggttctgtgccgcctcttcctgagtggattgaaatgcttagccttgtttataatgaacttgattcaatacaggtgcccgaatcgtgcaaagaattagaactcgatttcaataaccttacagaatttccacaagtacctgatggaattaccctgatctccgtaaataataacctgatatcgtatattgactcatttccgccaaaggctaagaaaatttttatttgtcacaataagctatcggaaataccagcactaccagacaccgctaaggtttttgattgtagtgagaataatattaaagaaattagatggttccccaaaaatttgaaagaagcgtatattgaatataataagattgaggttattcctgcgatacctggcaatttaaaattactttgtatgaaatgtaatcctattaaagaggcatttttaatgccatggacccttacagggattcgctatgaaatatcgcagcgaaaatatattgttatgaatcccgccgattatgataaatattccgatatggttaaaaagcatgtaatagatggtgaggaattcataattaaatattatatgtaa

SEQ ID NO: 14765 - protein, 379 aa, Escherichia coli O157
MFPLNDLSLKTQSVQLNKITSNTESTIKQHELVSDDAIINELSSELVSCLGNDKFTPVSEDSNLLNMLSEFKLLREQCFRWGNYTLLFENYGAYDKTGSITIEKSQGEGTLPIRHKLEFISTNIAELLDKLTKITDARLCKGFSDWASSVKEGASNDLKENVDRALVRMFKCVKLHSNELNLSSLSLGSVPPLPEWIEMLSLVYNELDSIQVPESCKELELDFNNLTEFPQVPDGITLISVNNNLISYIDSFPPKAKKIFICHNKLSEIPALPDTAKVFDCSENNIKEIRWFPKNLKEAYIEYNKIEVIPAIPGNLKLLCMKCNPIKEAFLMPWTLTGIRYEISQRKYIVMNPADYDKYSDMVKKHVIDGEEFIIKYYM

SEQ ID NO: 14766 - DNA, 24 bp, Artificial sequence
  Primer sequence
atgcctgagactactaagctgttt

SEQ ID NO: 14767 - DNA, 28 bp, Artificial sequence
  Primer sequence
ttaaagtccatgatataaaaatgtctct

SEQ ID NO: 14768 - protein, 59 aa, Artificial sequence
  Consensus
  Variant (10)..(10): Xaa in position 10 is Gly or Ser
  Variant (11)..(11): Xaa in position 11 is any amino acid
  Variant (13)..(13): Xaa in position 13 is any amino acid
  Variant (15)..(15): Xaa in position 15 is any amino acid
  Variant (19)..(19): Xaa in position 19 is Trp or Tyr
  Variant (28)..(28): Xaa in position 28 is any amino acid
  Variant (30)..(30): Xaa in position 30 is Glu or Gly
  Variant (33)..(33): Xaa in position 33 is any amino acid
  Variant (37)..(37): Xaa in position 37 is Ile or Val
  Variant (46)..(46): Xaa in position 46 is Ile or Leu
  Variant (48)..(48): Xaa in position 48 is any amino acid
  Variant (50)..(50): Xaa in position 50 is Glu or Lys
PDTAKVFDCXXNXIXEIRXFPKNLKEAXIXYNXIEVXPAIPGNLKXLXMXCNPIKEAFL

SEQ ID NO: 14769 - DNA, 1686 bp, Escherichia coli
  CDS (1)..(1686)
atgtacgattttaatctggtgttgctgctgcttcagcagatgtgcgtttttttagtcattgcgtggttaatgagtaaaacgccattattcataccgttaatgcaggtcacggttcgtctgccgcataaatttctctgctacatcgtcttttccatcttctgcatcatgggcacctggtttgggttgcacattgacgattctattgccaatacccgtgcgataggcgcggtaatgggcggcttactcggcggtccggtcgtcggtgggctggttggtctgaccggcggcttacatcgatattcgatggggggcatgaccgcgctaagttgcatgatctcaaccatcgttgaaggattgctcggcggcctggtacacagcatcctgatccgtcgcgggcgcactgataaagtctttaaccccattaccgccggtgccgtcacgttcgtcgctgaaatggtgcaaatgctgatcatccttgcgatcgcccgaccttatgaagatgcggtgcgtctggtgagtaatattgctgcgccaatgatggtcaccaataccgtcggcgcggcgctgtttatgcgtatattgctcgataaacgcgcgatgtttgaaaaatacacttcggctttttctgccactgcgctgaaagtggcagcctcgacggaaggcattttgcgacaggggtttaacgaagtgaacagcatgaaagtggctcaggtactgtatcaggagctggatattggtgcagtcgcgattaccgatcgagagaaattgctggcctttaccggaattggtgacgaccaccatttacccggcaaaccgatttcttcgacttacaccttaaaagcgattgaaaccggtgaagtggtctacgctgatggcaacgaagtaccttatcgttgctctttgcatccgcaatgcaaactggggtcgacgctggtaattccgttgcgtggcgaaaatcagcgcgtgatgggcaccatcaaattgtatgaagccaaaaaccggttattcagttcaataaaccgcacgctgggcgaggggattgcgcaactgctttcggcgcagattcttgcagggcaatatgagcggcaaaaagcgatgctcacccagtcagaaatcaaactgcttcacgcccaggtgaatcctcattttttgtttaatgcgcttaacaccattaaagcggtgatccgccgcgacagcgaacaggccagccagctggtgcagtatctttccacttttttccgcaaaaacttaaagcggccttcggagtttgttactctcgccgacgaaattgaacatgtgaacgcttatctgcaaattgaaaaggcgcgcttccagtcgcggttgcaggtcaacattgctattccgcaagaattatcccagcagcaattgcccgcgtttaccctgcaaccgatagtggaaaacgccattaaacatgggacatcacaactgctggatacagggcgagtggcaatcagcgcccgacgtgaggggcaacatttgatgctggagatcgaagacaatgccggtttgtatcaaccggtaaccaatgccagtgggctggggatgaatctggtggataagcgtttacgtgaacggtttggcgatgactatggaataagcgtcgcctgtgagcctgatagttacacccgaataacgttacgactaccatggagggacgaggcatga

SEQ ID NO: 14770 - protein, 561 aa, Escherichia coli
MYDFNLVLLLLQQMCVFLVIAWLMSKTPLFIPLMQVTVRLPHKFLCYIVFSIFCIMGTWFGLHIDDSIANTRAIGAVMGGLLGGPVVGGLVGLTGGLHRYSMGGMTALSCMISTIVEGLLGGLVHSILIRRGRTDKVFNPITAGAVTFVAEMVQMLIILAIARPYEDAVRLVSNIAAPMMVTNTVGAALFMRILLDKRAMFEKYTSAFSATALKVAASTEGILRQGFNEVNSMKVAQVLYQELDIGAVAITDREKLLAFTGIGDDHHLPGKPISSTYTLKAIETGEVVYADGNEVPYRCSLHPQCKLGSTLVIPLRGENQRVMGTIKLYEAKNRLFSSINRTLGEGIAQLLSAQILAGQYERQKAMLTQSEIKLLHAQVNPHFLFNALNTIKAVIRRDSEQASQLVQYLSTFFRKNLKRPSEFVTLADEIEHVNAYLQIEKARFQSRLQVNIAIPQELSQQQLPAFTLQPIVENAIKHGTSQLLDTGRVAISARREGQHLMLEIEDNAGLYQPVTNASGLGMNLVDKRLRERFGDDYGISVACEPDSYTRITLRLPWRDEA

SEQ ID NO: 14771 - DNA, 1677 bp, Vibrio cholerae O1 biovar eltor str. N16961
  CDS (1)..(1677): transl_table=11
atggatctcatcctctcattactgcaacagatgtgtgtttaccttgttctcgcctatatgttgagtaaaacgccgatcttcattcctttgctgaacatttctggtcggtttgaccacaaaatcagtgtttatgttctgttttcgctgttttgcattatgggcacctactttggcctgcagatcaatgatgcgattgccaatacgcgtgccatcggcgctgtgatggggggtctgtttggtggacctgtgattggttttgcggtgggcctcaccggaggcttacaccgctataccttagggggatttaccgatctcgcctgcgcgatttccaccaccgctgaaggtttaattggcggcttgctacacacctatttgctgcgcaaaggcaaagggaagttactgtttagcccaagtattgtctttgcggtcaccttatttgccgaaattgtgcagatgctgatcatcttggtcgtggcgaaaccgtttgaacagtcttacgcgctggtttccaccatcgccgcgccgatgatcattgctaactcagtcggtgccgcactgtttatgagcatcttgctcgatcgcaaaaccatttttgaagagtattccgcgacgttttcacgccgcgctctgaatattgccgagcgttctgttggtatccttgctgccggttttaacccagaaaacgccaacaaaattgcccgaatcgtgtatgaacagaccaatgtcggcgcggtctcgatcaccgatcgcgaaaaaatcctcgcctttgtcgggattggcgatgatcaccataaaccgaatacaccgatcagctcgcaaagcacgctcgatgcgattaatcgcaacgccatcatctatctcgatggcaaagaacatccttatcaatgttctttgtctccgacctgcaaactggggtctgcgttaatcattccgttgcgagctggcgatcgagtgatcggcaccatcaagctctacgagccaaaacgtaagctgttttccaccatcaatatgtcaatggcacagggcatcgcccaactgctatccagccaaattttgtatggcgaatatcagcaaaaacaaatcctgctctcgcgagcggaaatcaaactcctgcaagcgcaggtcaatccgcattttttgtttaacgcactcaataccatcagtgcggtgatccgccgtgagccagataaagctcgcgagctgattttgcatctgtcgcaatttttccgcagcaacctcaaacagaacgtcgaaaccgtcactttgcgtgaagagcttgcccacgtgaacgcttacctcactattgaaaaagcgcgctttagtgacaggctcgatgtggaaattgcgattgatgatgccctgctagaacgcaatgtcccgagcttcactttgcagcctttggtggaaaatgccatcaaacacggcacctctaacctactcgaagctggcaaagtgcgcatttacagtgaagtggttgaagggggaatgcgcgtcgtggtggaagacaacgccgggctctatcagcctccgagtgaagattatgatggtttagggatgcaaattgttgaaaagcgcctcaccaacaaatttggtcttaagtcagggctacagattgaggtcgcgccacaagagtacacgcgaatgagctttgtcattccacagcaaggcacttactaa

SEQ ID NO: 14772 - protein, 558 aa, Vibrio cholerae O1 biovar eltor str. N16961
MDLILSLLQQMCVYLVLAYMLSKTPIFIPLLNISGRFDHKISVYVLFSLFCIMGTYFGLQINDAIANTRAIGAVMGGLFGGPVIGFAVGLTGGLHRYTLGGFTDLACAISTTAEGLIGGLLHTYLLRKGKGKLLFSPSIVFAVTLFAEIVQMLIILVVAKPFEQSYALVSTIAAPMIIANSVGAALFMSILLDRKTIFEEYSATFSRRALNIAERSVGILAAGFNPENANKIARIVYEQTNVGAVSITDREKILAFVGIGDDHHKPNTPISSQSTLDAINRNAIIYLDGKEHPYQCSLSPTCKLGSALIIPLRAGDRVIGTIKLYEPKRKLFSTINMSMAQGIAQLLSSQILYGEYQQKQILLSRAEIKLLQAQVNPHFLFNALNTISAVIRREPDKARELILHLSQFFRSNLKQNVETVTLREELAHVNAYLTIEKARFSDRLDVEIAIDDALLERNVPSFTLQPLVENAIKHGTSNLLEAGKVRIYSEVVEGGMRVVVEDNAGLYQPPSEDYDGLGMQIVEKRLTNKFGLKSGLQIEVAPQEYTRMSFVIPQQGTY

SEQ ID NO: 14773 - DNA, 1686 bp, Salmonella typhimurium LT2
  CDS (1)..(1686): transl_table=11
atgtacgagtttaatctggtgttgctgctgcttcagcagatgtgcgtgtttctggtcattgcgtggctaatgagtaaaacgcgcctgttcatcccgcttatgcaggtcacggttcgtctgccgcacaagcttctgtgttacgtcacgttttctatcttctgcatcatgggcacttattttgggctgcatatcgaagattcgattgccaatacccgcgcaattggcgcggtgatgggcggcctactcggcgggccggtcgtcggcgggctggtcggtctgaccggtgggttacatcggtattctatgggcggcatgacggcgctgagctgtatgatttccaccatcgtcgaagggctgttgggcgggttggtacacagcgttctcatacgtcgcggacgcccggacaaagtgtttagcccgctgacggcgggagcaattacgtgtattgccgaactggtgcagatgctgatcattttactgatagccaggccgtttgacgatgccttgcatctggtcagtaatattgccgcgccgatgatggtgacgaataccgttggcgccgcgctgttcatgcgtattttgctcgataagcgcgccatgttcgaaaaatatacttcggcattttctgctaccgcgctgaaggtcgccgcgtcaacggaggggattctgcgtcagggatttaacgaagtgaacagtatgaaggtggcgcaggtgttatatcaggagctggatattggcgccgtcgccatcaccgatcgcgaaaaactgctggcttttactggtattggcgacgatcaccatctaccgggcaaacccatttcatcaggttatacgctgaaagcaattgaaaccggagaggtggtttatgccgatggcaacgaagtgccgtatcgctgttcgctacacccgcagtgtaaactcggttcgacgctggtgatcccgctgcgtggcgaaaatcagcgagtcatgggcaccattaaattgtacgaagcgaaaaaccgactgttcagctcaattaaccgcaccctgggagagggtattgcgcagcttttatccgcgcagatcctggccgggcagtatgaacggcagaaggcgttgctgacgcagtcagagatcaagctgttgcacgcgcaggtgaacccgcattttctgtttaacgcgctcaataccattaaagcggtgattcgccgcgacagcgaacaggccagccaactggtgcagtacttgtcgaccttttttcgcaaaaatttaaaacgcccgtcggaaatcgtcacgctggcggatgaaattgaacacgtaaacgcttatctgcaaattgaaaaagcgcgttttcagtcgcgtctgcaggtacagcttgatgttccatcgacgctttcacgtcagaaattgcctgcgtttacattacagccgattgttgagaacgccattaaacatggcacgtcgcaactgcttgataccggcaacgtcgctattcgcgcccggcgcgaagggcagcatttgatgttagatattgaggataatgcgggactgtatcagccttccgccggcagtagcgggctggggatgagtctggttgataaacgtctgcgcgaacactttggcgatgattatggtattagcgtggcctgcgagccggactgttttacccgaattacattacgacttccactggaggaggacgcatga

SEQ ID NO: 14774 - protein, 561 aa, Salmonella typhimurium LT2
MYEFNLVLLLLQQMCVFLVIAWLMSKTRLFIPLMQVTVRLPHKLLCYVTFSIFCIMGTYFGLHIEDSIANTRAIGAVMGGLLGGPVVGGLVGLTGGLHRYSMGGMTALSCMISTIVEGLLGGLVHSVLIRRGRPDKVFSPLTAGAITCIAELVQMLIILLIARPFDDALHLVSNIAAPMMVTNTVGAALFMRILLDKRAMFEKYTSAFSATALKVAASTEGILRQGFNEVNSMKVAQVLYQELDIGAVAITDREKLLAFTGIGDDHHLPGKPISSGYTLKAIETGEVVYADGNEVPYRCSLHPQCKLGSTLVIPLRGENQRVMGTIKLYEAKNRLFSSINRTLGEGIAQLLSAQILAGQYERQKALLTQSEIKLLHAQVNPHFLFNALNTIKAVIRRDSEQASQLVQYLSTFFRKNLKRPSEIVTLADEIEHVNAYLQIEKARFQSRLQVQLDVPSTLSRQKLPAFTLQPIVENAIKHGTSQLLDTGNVAIRARREGQHLMLDIEDNAGLYQPSAGSSGLGMSLVDKRLREHFGDDYGISVACEPDCFTRITLRLPLEEDA

SEQ ID NO: 14775 - DNA, 1626 bp, Fusobacterium nucleatum subsp. nucleatum ATCC 25586
  CDS (1)..(1626): transl_table=11
atgatagcatttttctttataaaaattgatagagcaaatattattataaaaagtaaagctaagactaaaaaagatattgttgctctatcttttttcttttcactgctttctattagtggaacttatataggattaaattttaatggtgctattttaaatacaagaaatgttggagttattgcaggtggtattttgggtggtccttatgtttcaataattacaggacttgtagctggaatacatagagcctttgtaaatcttggaagagaaactgctattccctgtgctatttcaacaataataggtggatttttaactgcctatgtacatcgttttataaaaaataaagataggatattttttggatttttcctagcctgtactattgaaaatcttagtatgggattaattttaattttacttatagataaaattttagctcaaaatatagttacaagtttctatattccaatggttcttatgaattccattggggcaagtgttctaattttaatagttgaagacattattcaaaaaagtgaaattgtagcaggaaaccaagctaaacttgctttagagatagcaaataaaactttaccttattttagagaaactgaaaatcttagtgaagtatgtaaaataattgctgaaaatttaggggcaaaagcaacagtaataactgacaaaaaagatattatagcaggattttcctttgacaaagcagagataacaagaactgctataaaaagtaataatacaagaaaagttttaaaaactggggaagtaatgctagttataaaagaagatgatgaaattatagaggattttttagatatttcacctcatataaaatcttgtattattttacctttaaaggagaaaaatgatgtaaatggtacattaaaaattttctttgatacagcagaaaaaataacagaaaagaacagatatctgatgataggtttatcacatcttatatcaacccaaatggaaatcagtaaggtagaaaatttaatatctttacttaaatattctgagttgaaagccttacaatctcaaataaatccacactttttatttaatgtattaaacactatgacctctcttatcagaacaaatcctgaaaaagcaagagaagtaacaatagatttatccaattatttaagatataatttagataacaatgtaaaaagtgtagagcttataaaagaattaaatcaaattgataactatataaaaattgaaaaagcaaggtttggagataaacttaatatagtttatgatgttgatgaaagcttatataattttcaaattccaagtttaattattcagcctctcgttgaaaatagcataaaacatggtattttaaagaaaagagaaaatggctgtgttaaagtaattgtaaagaaaattgataaggatatagaagtcataattgaggatgatggagtaggtatagaacaaactgtaattgacaatttagataaacagatacaagaaaatattggtcttaaaaatgttcatcaaagattaaaacttctctatggagaaggacttaatataaagaaattagagcagggaactagaataaattttaggatacttggaggtgtaaaatatgattaa

SEQ ID NO: 14776 - protein, 541 aa, Fusobacterium nucleatum subsp. nucleatum ATCC 25586
MIAFFFIKIDRANIIIKSKAKTKKDIVALSFFFSLLSISGTYIGLNFNGAILNTRNVGVIAGGILGGPYVSIITGLVAGIHRAFVNLGRETAIPCAISTIIGGFLTAYVHRFIKNKDRIFFGFFLACTIENLSMGLILILLIDKILAQNIVTSFYIPMVLMNSIGASVLILIVEDIIQKSEIVAGNQAKLALEIANKTLPYFRETENLSEVCKIIAENLGAKATVITDKKDIIAGFSFDKAEITRTAIKSNNTRKVLKTGEVMLVIKEDDEIIEDFLDISPHIKSCIILPLKEKNDVNGTLKIFFDTAEKITEKNRYLMIGLSHLISTQMEISKVENLISLLKYSELKALQSQINPHFLFNVLNTMTSLIRTNPEKAREVTIDLSNYLRYNLDNNVKSVELIKELNQIDNYIKIEKARFGDKLNIVYDVDESLYNFQIPSLIIQPLVENSIKHGILKKRENGCVKVIVKKIDKDIEVIIEDDGVGIEQTVIDNLDKQIQENIGLKNVHQRLKLLYGEGLNIKKLEQGTRINFRILGGVKYD

SEQ ID NO: 14777 - DNA, 1740 bp, Thermoanaerobacter tengcongensis MB4
  CDS (1)..(1740): transl_table=11
atgtatgaccttttaatcattctggcggaaagatttagcataattgcacttttagcctttctcctctcaaaagccgaatttttcaaaaaaatggtatacaatactgctctcaccaaaaaagacctgctcatcaccatgcttatatttggcctgattggaatagcaggaacttacctaggagtccccataaatgacgcaatagcaaattcaagagtagtgggccctatggtggcagggcttataggcggacctcttgtaggcctgggcgcaggccttatagcaggtgtacatcgcttcttcctaggaggcttcacagccatctcctgtggaatatccaccattattgaaggttttgcaggtggcctcatacgaaaatactacaaaggtgaatatataccctgggaatacgcatttatggcaggatttataggcgaaggagtgcagatgctgataattttggcgacagctaaaccttttcatcaggccgttgaacttgtaaaaatcataggaatccctatgatggtagtaaatgctacaggaataggcatttttatgataatgataaaatccatattcgacgaaaaagaacagattgctgcaatgcaggcaaaaatagctttagatatcgcctccaaaactcttccttatttgagaaaaggcttaaatgaagaatccgctcaaaagacagcagaaataatcttagagtgcacaaatgtctccgcagtagcaatcactgacaaaaagagaatactggcccatgtcggaatagcttctgaccaccacaaaccagggatgtccatactaacaaatgccacaaaagaagcaatacaaaaaggagaaataaggattgcaaagtctaaagaagaaataggctgtccttatgaaaactgtgaacttcactctgctgtaattgtaccactttttaaatatgacaaactagtaggtactctaaaactttacaaaggaggaaaaaaatcgcgcggcaatgtaataaccaatacagagatagaactggcgaaggggctgggacatttgatatcatatcagctagaaattgcagatgcagagtaccagaaaaaattggcaaccgaggcaaaattaaatgcccttcagtcccaaataaaccctcattttctgtttaactctttaaatactgttatttccttcatacgcacaaatccagaaagggcaagagaacttttaataaatttgagtgaatatttcaggcacaatctgagaaatgtaggaaaatatataaccattgaagaagaattaaacaatataaacgcgtatctgtatattgaaaaagctcgttttggcgacaaactgaatgtagagcaagatgtagatataagtgtgctttcctgttacatgccctcatttatactgcagcctattgtagaaaatgctgtaaagcatggaattttaccaaaaggcgaaagagggacggtaaaaataaaaataaaagatgaaggagattatataagcttctatgtggaagatgatggggtaggaatgactgaagaagaactgcaaaatctctttaagaagggagtaggaaaaggagcaggaataggtctttacaatgtcaacgaaaggctcactgtggctttttgcaaggaatgtgccttgtcaattgaaagtaaattaggtgaaggcacaaaagtatccttcaaaattcctaaaatttacctgcagaggaatgatatttatgaagaagctgagagcgttaattattga

SEQ ID NO: 14778 - protein, 579 aa, Thermoanaerobacter tengcongensis MB4
MYDLLIILAERFSIIALLAFLLSKAEFFKKMVYNTALTKKDLLITMLIFGLIGIAGTYLGVPINDAIANSRVVGPMVAGLIGGPLVGLGAGLIAGVHRFFLGGFTAISCGISTIIEGFAGGLIRKYYKGEYIPWEYAFMAGFIGEGVQMLIILATAKPFHQAVELVKIIGIPMMVVNATGIGIFMIMIKSIFDEKEQIAAMQAKIALDIASKTLPYLRKGLNEESAQKTAEIILECTNVSAVAITDKKRILAHVGIASDHHKPGMSILTNATKEAIQKGEIRIAKSKEEIGCPYENCELHSAVIVPLFKYDKLVGTLKLYKGGKKSRGNVITNTEIELAKGLGHLISYQLEIADAEYQKKLATEAKLNALQSQINPHFLFNSLNTVISFIRTNPERARELLINLSEYFRHNLRNVGKYITIEEELNNINAYLYIEKARFGDKLNVEQDVDISVLSCYMPSFILQPIVENAVKHGILPKGERGTVKIKIKDEGDYISFYVEDDGVGMTEEELQNLFKKGVGKGAGIGLYNVNERLTVAFCKECALSIESKLGEGTKVSFKIPKIYLQRNDIYEEAESVNY

SEQ ID NO: 14779 - DNA, 1698 bp, Yersinia pestis KIM
  CDS (1)..(1698): transl_table=11
atgggcattagccaaacagaactgatcttttcccttttacaacagatgtgtgtgtatttggttattgcctatctgctgagtaaaacaccgctttttatccccttgatgcaagttactatcaggttgccccataaactggtgtgctatctcaccttttccatgttttgcattatgggcacctactttggtcttaacattgatgattctatcgcgaatactcgtgctatcggcgcagtcttgggtggaatgctaggggggccatcggtcgggtttctggtagggctaaccggaggcctgcatcgttattcaatgggggggatgaccgcaaccgcctgtatgttatcaaccattgctgaagggttattgggcggccttctccacctttatctgacacgtaaaaaccgcctcgatttattgtttcagccactggtggtcgcgggcattacactggtagccgaagtgctacaaatgatgattattctggccgtcgcccgccccttcaatgaagcggtcgaattggttgaaaatattgccttgccgatgatgatcaccaataccattggtgccgccatgtttatgcgtatcttattagaccgccgggccattttcgaaaaatacaccacggcattttctgccaaggcgctacaaattgctgcacgggcggaggggctactgcgccatggctttgaccagcagaacagtatgcgggtggctcgtatcttgtatgaggagttgggtgtgggcgcagtagccattactgatcgcgaaaaattactggcctttatcggtagcggtgccgaccaccatcaggtgggcagtgctattacctccagccatacccaccgcgcgattgaactcaatcaggtggtgtatgccgacggcaatgccgtgccttatacctgctcaatttcacccacctgtaagctgggttcaacactggttatccctttgcgaggtgaagagcaccgggtgatcggcagtatcaaattgtatgagccaaaaagtaaattattctccagcattaaccgcaccttaggagagggtattgcgcacttattgtcagcacagattttggcgggagaattcgaacaacaaaaacaattactggcgcaatctgaaatcaaactgctccatgcacaggtcaacccacatttcttgtttaatgcgctcaataccctatcagtggtgatccgccgtaatccagatcatgcccgcaatttggtgctttctttatcaacctttttccgtaaaaacctaaaacgcagccatgacgtggtcacgttaagtgatgagattgaacatgtgaatgcgtatcttgaaatagaaaaggcacgctttgctgatcgtctgaccgtcacggtttcactaccgaatgaactgatggaggcgcacttacccgcgttctccctgcaacccgtggtagaaaatgcaatcaaacatggtatctcacagatgttcagtaacggacgggtcacgttgcgcggtaaattggatgacaacacgttggtattggaagtcgaagataacgccggtttatatcagccgcagccggatggcgatggtctgggaatgagtttggttgatcggcggattaaagcgcgctatggcaaggaatatggcatcaccgtcgtcagtaacgcggaagtatttacccgtattattattaagttaccgtttattaccgtgagcgagcagtaa

SEQ ID NO: 14780 - protein, 565 aa, Yersinia pestis KIM
MGISQTELIFSLLQQMCVYLVIAYLLSKTPLFIPLMQVTIRLPHKLVCYLTFSMFCIMGTYFGLNIDDSIANTRAIGAVLGGMLGGPSVGFLVGLTGGLHRYSMGGMTATACMLSTIAEGLLGGLLHLYLTRKNRLDLLFQPLVVAGITLVAEVLQMMIILAVARPFNEAVELVENIALPMMITNTIGAAMFMRILLDRRAIFEKYTTAFSAKALQIAARAEGLLRHGFDQQNSMRVARILYEELGVGAVAITDREKLLAFIGSGADHHQVGSAITSSHTHRAIELNQVVYADGNAVPYTCSISPTCKLGSTLVIPLRGEEHRVIGSIKLYEPKSKLFSSINRTLGEGIAHLLSAQILAGEFEQQKQLLAQSEIKLLHAQVNPHFLFNALNTLSVVIRRNPDHARNLVLSLSTFFRKNLKRSHDVVTLSDEIEHVNAYLEIEKARFADRLTVTVSLPNELMEAHLPAFSLQPVVENAIKHGISQMFSNGRVTLRGKLDDNTLVLEVEDNAGLYQPQPDGDGLGMSLVDRRIKARYGKEYGITVVSNAEVFTRIIIKLPFITVSEQ

SEQ ID NO: 14781 - DNA, 1740 bp, Streptococcus agalactiae 2603V/R
  CDS (1)..(1740): transl_table=11
atgacactctttttaattatgatggagcgagcggggttaatcatattattagcctatgcctttgtgcatatcccctttataaaacaaactttgaagcaacccgaattaaaaaaacaccagtatattctgcttatcttatttagcttatttgctattatttctaattttacaggggtagaaattcagtcagatttatctatcattccacaaactcttaatcatatagcagatcaatcatcggttgccaatacacgtgttttaaccattggtgtatcaggtctaatcggtggccccatagtcggtattatagttggtctcttatctgtattcgttaggtatttgcaaggaggattagcccctcatatttatgtcatttcttccttactaattggtttatgctctggattatcaggcaattatcttcgtaaaaattataataaaattcgtgttttagatgcaatggttgttggtttcggtatggaaattctacaaatgatctgtatcctcatttttagtgttgactttaatcaggcgcttcgcttagtatcttttatcagcatgccaatgattttaagtaatactttaggtttaggtatatttatatccattatttcatctactcaaaaattagaagaacatgctaaagcatttcaaacccatcaagtacttgaattagcaaatttaacccttccttaccttagaaagggactgacaacagaatcttgtcaaccagtagctgaaattattcataaacatatggatgtgagtgctgttagcctgactagtcaatcagccattttagcctatgtaggagatggagctgaccatcatcttcctaatactcaaatattaacaaagcttgctaaaagagcaatagatactggtaaagttagtgtcgcaactgataaaagtgaaatcgaatgcgaccataagaattgcccacttagttcagcaattgttattccattacacatccacgatgttatagtgggtactttgaaattatatttttcagacgcacaacatatgacttacgttgaccgtcaattagctgaaggattaggcaatatcttttccactcagttagctttgggacaagctgaggaagcaacaaggttactacaggatgcggaaatgaagtctctccaagcgcaggttaatccgcattttctttttaatgcacttaatactatttatggtttaattcgcatggatagcgaaaaagcaagaaagctcgtccaagattttagcaaggttattcgtgctaatcttcaacgggcaaagcaaaatttaattcctcttcatgatgaattggaacaggttaacgcctatttagcccttgaagaagcaagatttcccaacatggtggcctttaatttagacaaccaaacaaattcagatgacaacttaatgattcctccctttacattgcaggtcttgattgaaaactcttataaacacgcttttaagcatgttaataaaaataaccagctaaaggttactattgcaagaaataatgataggcttcatatcattgtccaagacaatggtattgggattccaaaagaaaaattaataacgcttggaaaaaaaactcaaatttcaaaacaaggttctggtacagctattgagaatctcgttcgtcgcttgaatattatttatgatggacaagcaagtttaaaatttgaatcaaatgattcaggaacttgtgctattgttaatatccccattaaaaattag

SEQ ID NO: 14782 - protein, 579 aa, Streptococcus agalactiae 2603V/R
MTLFLIMMERAGLIILLAYAFVHIPFIKQTLKQPELKKHQYILLILFSLFAIISNFTGVEIQSDLSIIPQTLNHIADQSSVANTRVLTIGVSGLIGGPIVGIIVGLLSVFVRYLQGGLAPHIYVISSLLIGLCSGLSGNYLRKNYNKIRVLDAMVVGFGMEILQMICILIFSVDFNQALRLVSFISMPMILSNTLGLGIFISIISSTQKLEEHAKAFQTHQVLELANLTLPYLRKGLTTESCQPVAEIIHKHMDVSAVSLTSQSAILAYVGDGADHHLPNTQILTKLAKRAIDTGKVSVATDKSEIECDHKNCPLSSAIVIPLHIHDVIVGTLKLYFSDAQHMTYVDRQLAEGLGNIFSTQLALGQAEEATRLLQDAEMKSLQAQVNPHFLFNALNTIYGLIRMDSEKARKLVQDFSKVIRANLQRAKQNLIPLHDELEQVNAYLALEEARFPNMVAFNLDNQTNSDDNLMIPPFTLQVLIENSYKHAFKHVNKNNQLKVTIARNNDRLHIIVQDNGIGIPKEKLITLGKKTQISKQGSGTAIENLVRRLNIIYDGQASLKFESNDSGTCAIVNIPIKN

SEQ ID NO: 14783 - DNA, 1683 bp, Shewanella oneidensis MR-1
  CDS (1)..(1683): transl_table=11
atgtccttgatcttgcttctgacccaacagatgtcactctatttagtgatcgtttatttagtcagtaaaacaccgctttttaaactgtttgcagaaacgtcaccgcgcctgcctcacaagatatttatttatctggttttttctagcttttgtatcatggcgacctactttggtgagcaaacctcgggggctattgccaatactcgtgccatgggcgccgtattaggcggattgctcggcggccctgttacaggttttttggtggggctcactggtggattacaccgctatagtatgggcggctttaccgatttagcctgtgctatctcgacaacactcgaagggctctcggcgggaatgatcagtttttacctgcgccgcgcaggtaagagtgagcttatctacaatccactcttggtttgtctagtgaccttttacgccgaaataatgcagatgagccttattttgctcatcgcttgcccctttgatgccgcttgggagttagttcgtcagattgctccaccgatgttgttggtcaactccatcggcgcggcactatttatgagtatgatccgcgaccaaaaaaccatgttcgataagctctcatctagcttttcaaccaaagcacttaaaatcgctgaacgcagtgtaggtttactttccaagggatttaatgaagaaagtagcggtaaggtcgcgcaaattgtgattgaagaaaccaatgttggtgcggtggccattacggatagagaaaagctcttggcctttatcgggattggcgccgaccaccatatccctggcacgccgatttcctcccaaatcacccttgaggccatcaatcaaaacaaagtaatgtttgccgatggggtcgaaatcccctattcctgctcgatttcgagccagtgtaaactcggctctagtctggttatcccgctgcgcagcgacactgaagtcattggcaccataaagttatacgaacctaaaaataaactgttcttgaacattaaccgtaccttgggtgaagggatcgctcggctattatcgaaccaaattctttatggccgttttgaacaacagcaaaacctactcacccaagccgaattaaaattgctgcaagcacaagtcaatccacactttttattcaacgctctcaatactattagtgcaattattaagcgcgatccggatatgtcgaaacaactgttacaacagttatcacagtttttacggatcaatttaaaacgcacgacgggtttagtcacacttggggatgagctcgatcacatcgcctcctatctcaccatcgagaaagcaagatttattaataaattacaagtcaatattgccattccagagtcactttatcactgtaaagtccctgcatttaccctacagcctattattgagaatgcggtaaaacatggcacctcccatatgattgaccaagggcagatcaaggtcactgggcgtttggatgaacatgtattggcgttagaggtcattgataatgctggcctatatcaaccttctactgactctgaagggttgggaatgaatctagtccataaacggatccaaaacctgtttggcgaacagtacgggctccaagttgaatgcgagccggatgaatacaccaaagtcatcattcgcttacccatagaaaagacggaaactagcacgtga

SEQ ID NO: 14784 - protein, 560 aa, Shewanella oneidensis MR-1
MSLILLLTQQMSLYLVIVYLVSKTPLFKLFAETSPRLPHKIFIYLVFSSFCIMATYFGEQTSGAIANTRAMGAVLGGLLGGPVTGFLVGLTGGLHRYSMGGFTDLACAISTTLEGLSAGMISFYLRRAGKSELIYNPLLVCLVTFYAEIMQMSLILLIACPFDAAWELVRQIAPPMLLVNSIGAALFMSMIRDQKTMFDKLSSSFSTKALKIAERSVGLLSKGFNEESSGKVAQIVIEETNVGAVAITDREKLLAFIGIGADHHIPGTPISSQITLEAINQNKVMFADGVEIPYSCSISSQCKLGSSLVIPLRSDTEVIGTIKLYEPKNKLFLNINRTLGEGIARLLSNQILYGRFEQQQNLLTQAELKLLQAQVNPHFLFNALNTISAIIKRDPDMSKQLLQQLSQFLRINLKRTTGLVTLGDELDHIASYLTIEKARFINKLQVNIAIPESLYHCKVPAFTLQPIIENAVKHGTSHMIDQGQIKVTGRLDEHVLALEVIDNAGLYQPSTDSEGLGMNLVHKRIQNLFGEQYGLQVECEPDEYTKVIIRLPIEKTETST

SEQ ID NO: 14785 - DNA, 1683 bp, Vibrio vulnificus CMCP6
  CDS (1)..(1683): transl_table=11
atggaactggtgatttcactgctacaacagatgtgtgtctatcttgttttagcctatatgctcagcaagacccccatcatcttaccactgctgaacatctcatcgcgtttgagccaccgcgttctgtgctacttattgttttccgccttctgtatcttgggcacctactttggtttacacatcaatgacgccatagccaatactcgtgcaattggggcagtcatgggcggcttgtttggcgggccgattgtgggctttgccgtgggattaaccggtggtttacatcgctacaccttaggaggattcaccgatttagcctgcgcgatttcgaccacagcggaaggcttgattggtggcttgctgcatatctatctaatcaagaaaaacaaaggtgcccaactgttcaacccctccgtggtgtttagcatcaccttcgtcgccgaaataatacaaatgatcattttgctggtggtcgctaagccctttgatcaagcgtacagcctcgtttcgaccattgccgcccccatgatcattgccaactcggtgggtgccgcgttgtttatgagcattttacaagacagaaaaaccatctttgaaaagtactccgccaccttttcgcgtcgggcattgaccattgcggatcgctctgtgggtatcttgcacacgggctttaacagtgccaacgcagaaaaaatcgcccgcattatttatgaagaaaccaatgtgggcgcggttgcgatcaccgaccaagagaagattctcgcgtttgtcggcattggggatgatcaccacaagcctaatacgcccatttcgtcgcaaagcacccttgattcgatgagtcaaaacgccatcatttatctcgatggtagcgagcgtccatatcaatgctctctcgcttccgactgtaaattaggctcggcactgatcattccactacgagcaggcaaagaggtggtgggaaccattaagctgtacgagccaaagcgcaagttgttttcaaccattaatatgtcgatggccgaaggcattgcccaactgctttccagccaaattctctatggcgattatcagcaacaacaaacgctgctgacgcaatcggagattaagctgctgcatgctcaagtgaatccgcatttcttattcaacgcgctaaacacgattagcgcggtgattcgtcgcgatcctgacaaagcacgtgaactgattcaaaatttgtcacacttctttcgcagcaacttaaaacagaacatcaacaccgtcacactgaaagaagagctggcgcatgtgaatgcctacctcagcattgaaaaagcacgttttgctgaccgcctagagatagagattgatatcacgccagagctgttcgacacaaaactgcccagctttaccttgcagcctttggtggaaaacgccattaagcatggtatttcaaatatgcttgagggaggacgggtgcgcatttacagccaatcttgtgagcaaggtgatgtcatcgtggtcgaagataatgcaggtagctatcagcccccagcagaaaatcattcaggactgggaatggaaatagtcgataaacggctgacgcaccattttgggcgtgactcagcactaaaaatcgaggcgaaagagcatcaatttactaaaatgagctttatcattccccgcagccatcacactgcaatttag

SEQ ID NO: 14786 - protein, 560 aa, Vibrio vulnificus CMCP6
MELVISLLQQMCVYLVLAYMLSKTPIILPLLNISSRLSHRVLCYLLFSAFCILGTYFGLHINDAIANTRAIGAVMGGLFGGPIVGFAVGLTGGLHRYTLGGFTDLACAISTTAEGLIGGLLHIYLIKKNKGAQLFNPSVVFSITFVAEIIQMIILLVVAKPFDQAYSLVSTIAAPMIIANSVGAALFMSILQDRKTIFEKYSATFSRRALTIADRSVGILHTGFNSANAEKIARIIYEETNVGAVAITDQEKILAFVGIGDDHHKPNTPISSQSTLDSMSQNAIIYLDGSERPYQCSLASDCKLGSALIIPLRAGKEVVGTIKLYEPKRKLFSTINMSMAEGIAQLLSSQILYGDYQQQQTLLTQSEIKLLHAQVNPHFLFNALNTISAVIRRDPDKARELIQNLSHFFRSNLKQNINTVTLKEELAHVNAYLSIEKARFADRLEIEIDITPELFDTKLPSFTLQPLVENAIKHGISNMLEGGRVRIYSQSCEQGDVIVVEDNAGSYQPPAENHSGLGMEIVDKRLTHHFGRDSALKIEAKEHQFTKMSFIIPRSHHTAI

SEQ ID NO: 14787 - DNA, 1698 bp, Clostridium tetani E88
  CDS (1)..(1698): transl_table=11
atgatattaatgatatatatacaacttttaggtagtatgtctacaatagctttatccgcctatattttcaatcagtactacatatctaaaaaacttttttgcttagataaagaatttaataaacttgctttaatagtttttttcagtcttctatccatattgggtacctacactggagttaatatagattctatggccccagctagttttaataaatctacattaattaatttaaatccccatgccatagctaatactcgccccataggagctataactgctggatatttaggtggccctctggttggtatatgtgtaggacttattgcaggtttacaaaggtattatgtagggggctttacagcattagcctgtgcagtagccacaataatgggaggaatttgtggtggtttagccagaaaacactctaaatctaaaacccttaatccaaaacttgcttttataaccacaataattgcagaaatattggaaatgattataatacttattttatccaaaccctttaatcatgccctacaattagaaaaaatttttgctctacctatgataattataaattctgtaggagttttcgtttttgtatatattacaaaagatgccttagagcaatataacagaataggtgccacagaggcacaaaaagctttaaatatagctgaaaaaactctaaattactttaaaaagggttttcacaaagataattctgaaaaaatagcaaaaatcatttggcaaaatacttcctttgaaagtgtttttattgcagatactaaaaaaatgatctcatattatggagaagatataaattctaatcttttaaatgaatccttaaaaaattactataaatctgctgactataaaataattaaatatagagactcttcatctgaaacagttgaaaatatatttttttgtattccaatatatgatgaaaataatttagaattagtaattggcttaaatatagtatccgaaagttttgtagataaatattttacattgtttgttaagcaattaagcacattgctctctaatcaattaaagctttacaaattaaataaaatagccaatgaagtttatgtagctgaatttaaagcattaaaagctcaaatacaccctcattttttatttaatgcactaaacactatttcctctttttgcagaacaaaccctaataaagcaagagaacttatactaaatttatctagctactttagacagactttgaaaagagaagaagattttattacaattaaagaagagtatgattttttaaattcttatctttctatagaaaacgcacgttttggagaaagattaaaagtgaatataaatttccctaaaaatttattaaactataaaattcctgtttttttattacaacctctagtagagaactctataaatcatggaattttacctaaaccctctggtggaacagttattatagaggcttactcctctaatgaaaatttaaattttattgtaaaagataatggagttggtatgaaagaaactgatcttaaaaagatacattctttttctactggtataggactaaacaatgtaaatgaaaggctaaaacttctcttcggagaagactataaaataaatataaaaagcaaccctaataaaggtacttctatatctttttcaatacctaaggagatgaatttatga

SEQ ID NO: 14788 - protein, 565 aa, Clostridium tetani E88
MILMIYIQLLGSMSTIALSAYIFNQYYISKKLFCLDKEFNKLALIVFFSLLSILGTYTGVNIDSMAPASFNKSTLINLNPHAIANTRPIGAITAGYLGGPLVGICVGLIAGLQRYYVGGFTALACAVATIMGGICGGLARKHSKSKTLNPKLAFITTIIAEILEMIIILILSKPFNHALQLEKIFALPMIIINSVGVFVFVYITKDALEQYNRIGATEAQKALNIAEKTLNYFKKGFHKDNSEKIAKIIWQNTSFESVFIADTKKMISYYGEDINSNLLNESLKNYYKSADYKIIKYRDSSSETVENIFFCIPIYDENNLELVIGLNIVSESFVDKYFTLFVKQLSTLLSNQLKLYKLNKIANEVYVAEFKALKAQIHPHFLFNALNTISSFCRTNPNKARELILNLSSYFRQTLKREEDFITIKEEYDFLNSYLSIENARFGERLKVNINFPKNLLNYKIPVFLLQPLVENSINHGILPKPSGGTVIIEAYSSNENLNFIVKDNGVGMKETDLKKIHSFSTGIGLNNVNERLKLLFGEDYKINIKSNPNKGTSISFSIPKEMNL

SEQ ID NO: 14789 - DNA, 1671 bp, Vibrio parahaemolyticus RIMD 2210633
  CDS (1)..(1671): transl_table=11
atggaactggttatctctctcttgcagcaaatgtgtgtttacttagtcttggcttacatgctgagtaaaacacccatcatcttaccgttactgagtatttcgtctcgccttagccatcgtttaatttgctacgtgctcttttctggcttttgtatcctcgggacgtactttggcctgcacatcaatgatgcgatcgccaacacgcgtgccattggcgctgtcatgggcgggttgttcggcgggccagtagtcggttttgctgtcggcttaaccggcgggattcatcgttattcccttggtggctttaccgacctagcctgtgctatttcaaccactgctgaaggcgtgattggtggcttgttacatgtctaccttatcaaacgcaacaagggcgcattgctgttcaacccaagtgtggtgttcagcgtgacatttgttgccgaagttgtgcagatgattttgttgttggcggtagccaaacccttcgaccaagcctacgaactggtgtcagcgattgccgctccgatgatcattgccaactcgttcggtgccgcacttttcatgagcatcctacaagatagaaaaaccatttttgaaaagtactccgctaccttttcacgccgcgcgcttaccatcgccgatcgctccgtaggcattttgagcaacggttttaacaccgagaatgcagaaaaaatcgctcgtatcatttacgaagaaaccaaggttggcgcagttgcaattactgatcaagagaagattttggcgtttgtcggcattggcgatgaccaccatagaccgaatacgcctatttcatcgcaaagcacattagattcgatggagaaaaacgacatcatctaccttgatggtacagagcgtccgtatcagtgttctttggcgaaagattgcaaactcggttcggcgttgatcattccattgcgtgcgggtaaagcggtcatcggaacaatcaaactctatgaacctaagcgtaagctgttctcaaccgccaacatgtcaatggcagaagggatagctcagttgctctccagccaaattttgtatggcgattatcaacaacaacaagcgctgttagcgcaggcagaaatcaaactgttgcacgcgcaggtaaaccctcactttttgtttaacgcgctcaataccatcagtgcgattacgcgccgcgatccagataaagcccgcgaattaattcaaaatttatcgcactttttccgcagtaacttaaaacagaacatcaatacggtgacgctgaaagaagagcttgcacacgtcaattcttacctcagtatcgaaaaagcacgcttcacggatcgcttggaagtagaaatagatatcgacccagagttgctcgatatcaagctgccaagtttcacacttcaacccttggtggaaaatgccatcaaacacggcatctccaatatgcttgaaggtggaaaagttaaaatttacagcgaaatgcaccctcaaggacacctgattacagtcgaggacaacgcaggcagtttccagccaccaaaagacaaccactcaggtttaggcttggaaattgtagacaaacgtctcactaatcaatttgggcgtgattcagcgctaaaaattgcgtgtgtgacgcatcaatttactaaaatgagctttatcattcccccgaaatcataa

SEQ ID NO: 14790 - protein, 556 aa, Vibrio parahaemolyticus RIMD 2210633
MELVISLLQQMCVYLVLAYMLSKTPIILPLLSISSRLSHRLICYVLFSGFCILGTYFGLHINDAIANTRAIGAVMGGLFGGPVVGFAVGLTGGIHRYSLGGFTDLACAISTTAEGVIGGLLHVYLIKRNKGALLFNPSVVFSVTFVAEVVQMILLLAVAKPFDQAYELVSAIAAPMIIANSFGAALFMSILQDRKTIFEKYSATFSRRALTIADRSVGILSNGFNTENAEKIARIIYEETKVGAVAITDQEKILAFVGIGDDHHRPNTPISSQSTLDSMEKNDIIYLDGTERPYQCSLAKDCKLGSALIIPLRAGKAVIGTIKLYEPKRKLFSTANMSMAEGIAQLLSSQILYGDYQQQQALLAQAEIKLLHAQVNPHFLFNALNTISAITRRDPDKARELIQNLSHFFRSNLKQNINTVTLKEELAHVNSYLSIEKARFTDRLEVEIDIDPELLDIKLPSFTLQPLVENAIKHGISNMLEGGKVKIYSEMHPQGHLITVEDNAGSFQPPKDNHSGLGLEIVDKRLTNQFGRDSALKIACVTHQFTKMSFIIPPKS

SEQ ID NO: 14791 - DNA, 1773 bp, Chromobacterium violaceum ATCC 12472
  CDS (1)..(1773): transl_table=11
ttgagccagaacaaggccgcggggacggcacggtcgttaaactgttctcgcgcaaacaatccatgccatcgaatgatcgtagaactgaccctggtgctgtcgctgctgcagcagatgtgcgtttatctggtgatcgcctacctgctgtccaagacgccgctgttcatcccgctgacccagatcacgctgcaattgccccacaagctggtctgttatctggtgttttcgatgttttgcatcatgggcacctatttcggcctgcacatccaggactccatcgccaatacccgcgccatcggcgcggtgctgggcggcatgctgggcggcccctgggtggggctggcggtgggcttcaccggcggcctgcaccgctattcgctgggcgggctcaccgccggcgcctgcatggtgtcgacgatgatggagggcctgctgggcggcctggtgcatctctacctggtgcgccgcggcctgcgcgcgcggctgttcgacccgctggtggtggcggcggtggcctgcgtcgccgagatcggccagatgctgatcctgctggcgctggtgcgcccgtccgaggcggccgaacgcctggtggccagcatcgcgctgccgatgatggcggccaacacgctgggggcggcgatgttcatgcgcattctgctggaccgccgggtgctggcggaaaaatactccaccgccttctccggcaaggcgctgcagatcgctgcccgcgccgaaggggtgctgcgccagggcttcgacccggaaaacagcatgaccgtggcgcgcatcctgtacgaggagctgggcgtcggcgcggtggccatcaccgaccgcgagcggctgctggccttcatcggcataggcgcggatcatcacctgcccggcacggccatcacctcgccgcacacccaccgcgcgatcgagcgcaacgaggtggtgtacgccgacggcaacgaaacgccctaccgctgctcgatcagcccccagtgccggctggcgtcctcgctggtgatcccgctgcgcggcgaggacgaacgggtgatcggcaccatcaagctgtacgagccgcgcaacaagctgttctcccgcatcaacctgacgctgggcgaaggcatcgcccgcctgctgtccgcccagatcctgcagggccagtacgataaacaaaagcagctgctggcgcagaccgagatcaaactgctgcacgcccaagtgaacccgcacttcctgttcaacgctctgaacacgctgtcggcggtgatacggcgcaacccggaacatgcccgccggctggtgcagtacctgtccaccttcttccgcaagaacctgaaacgctccggcgaagcggcgacgctggaggacgagatcgaacacgtcagcgcctacctgcgcatcgaggaagcgcgcttcgccgggaggctggacgtggagatctcgctggacgaggcggcccgccgggcgcggctgccggcgttctcgctgcagcccatcgtcgagaatgccatcaagcacggcacctcccaactactggaagccggccgcatccgcatcgccgcgcgctgcgccgacggcaggctttgcgtgacggtggaagacaacgccggcctgtacgcgccggccggccccggcgacggcttaggcatgtcgctggtggaccggcgcatccgcgcccggcacggaccggcttacggcgtgtcggtggagtgcgagccggaggcctatacccgcgtcacgctcagcgtgccctgccccgagcctggagaaatcccatgctga

SEQ ID NO: 14792 - protein, 590 aa, Chromobacterium violaceum ATCC 12472
MSQNKAAGTARSLNCSRANNPCHRMIVELTLVLSLLQQMCVYLVIAYLLSKTPLFIPLTQITLQLPHKLVCYLVFSMFCIMGTYFGLHIQDSIANTRAIGAVLGGMLGGPWVGLAVGFTGGLHRYSLGGLTAGACMVSTMMEGLLGGLVHLYLVRRGLRARLFDPLVVAAVACVAEIGQMLILLALVRPSEAAERLVASIALPMMAANTLGAAMFMRILLDRRVLAEKYSTAFSGKALQIAARAEGVLRQGFDPENSMTVARILYEELGVGAVAITDRERLLAFIGIGADHHLPGTAITSPHTHRAIERNEVVYADGNETPYRCSISPQCRLASSLVIPLRGEDERVIGTIKLYEPRNKLFSRINLTLGEGIARLLSAQILQGQYDKQKQLLAQTEIKLLHAQVNPHFLFNALNTLSAVIRRNPEHARRLVQYLSTFFRKNLKRSGEAATLEDEIEHVSAYLRIEEARFAGRLDVEISLDEAARRARLPAFSLQPIVENAIKHGTSQLLEAGRIRIAARCADGRLCVTVEDNAGLYAPAGPGDGLGMSLVDRRIRARHGPAYGVSVECEPEAYTRVTLSVPCPEPGEIPC

SEQ ID NO: 14793 - DNA, 1431 bp, Chromobacterium violaceum ATCC 12472
  CDS (1)..(1431): transl_table=11
ctggccggcggcatattgttcggcccctgggtgggcattccggccggcgtcgtctccggcctgcaccgctacctgatcgacatccacggctacacctcgctggcctgcctgatctccagcatctgcgccggcttgctcgccaccgccatccactaccgcgccggccgccagcgcttgtggctgtacggcatcgccgccggcgtcgcctgcgagagcctgaccatggcgctgatcctgtggttcacccagccggcggtcggccaggccatcgtcggccacatcgcctatccgatgatcaccggcacggtctgcatcggcctcatcatcaagctggtgcaggatctggacgacgagaaggaactgttggcggcccgccaggccaagctggcgctgaccatcgccaaccgcaccctgccctatttccagaacgtggaccgcgacgcgctggtggaagtgtgcaccgtgatccgcaaccacatcggcgccgacgcggtggccatcaccgatacccgcgacgtgctggcctacgtggggctgggcaaggactactacgaaccggccgcccactccgccatcggcgagatcacccgccgcgcggtggagcaggaccagatcatcatcgagaacgacctgcgccagtaccgggtggcggacttccactcggtgatcatcattccgctgcgcgaaaacggccgcgtcaccggcacgctgaagatcttcttccgccagagcggcggcatcaccggctcgctgcgcgagctggggctgggcctgtcgcagctgatctccacccagatggaggcgtcgcgcatcaagcagctgcaggagatggcgcgcaaggccgagttcgccgcgctgcagagcaagatcaacccgcacttcctgttcaacgcgttgaacgccatctcgtccttgatccgcatccagccgtcggaggcgcggcagctgatcgccaagctggccgactacctgcgctacaacctgtcgctgggcgacaccctgatcgacatccaggaagaactgaagcaggtgcgcgactacgtggccatagagcaggcacgcttcggcagcaagctgtccgtcgcattcgatatcgacgaagtccacgcccgcgtgcccagcctgctgctgcagcccttggtggaaaacgcgatactgcacggcatccagccgcgcaaggaggcgggcgaggtgcgcatcgcggtgaagaagctggacgaccgcatccgggtatccgtgcgcgacaccggctacggcatcagccaggaagtgatggacggcatcgccgagggcaaggtggagagccgcagcatcggcctgtccaacgtcaacgagcgcatcaagctcttgtacggcgagggcctgcggcttacccggctggagccgggcaccgaagtcagtttcgaattgccgctggaggaaaaagcatga

SEQ ID NO: 14794 - protein, 476 aa, Chromobacterium violaceum ATCC 12472
MAGGILFGPWVGIPAGVVSGLHRYLIDIHGYTSLACLISSICAGLLATAIHYRAGRQRLWLYGIAAGVACESLTMALILWFTQPAVGQAIVGHIAYPMITGTVCIGLIIKLVQDLDDEKELLAARQAKLALTIANRTLPYFQNVDRDALVEVCTVIRNHIGADAVAITDTRDVLAYVGLGKDYYEPAAHSAIGEITRRAVEQDQIIIENDLRQYRVADFHSVIIIPLRENGRVTGTLKIFFRQSGGITGSLRELGLGLSQLISTQMEASRIKQLQEMARKAEFAALQSKINPHFLFNALNAISSLIRIQPSEARQLIAKLADYLRYNLSLGDTLIDIQEELKQVRDYVAIEQARFGSKLSVAFDIDEVHARVPSLLLQPLVENAILHGIQPRKEAGEVRIAVKKLDDRIRVSVRDTGYGISQEVMDGIAEGKVESRSIGLSNVNERIKLLYGEGLRLTRLEPGTEVSFELPLEEKA

SEQ ID NO: 14795 - DNA, 1683 bp, Vibrio vulnificus YJ016
  CDS (1)..(1683): transl_table=11
atggaactggtgatttcactgctacaacagatgtgtgtctatcttgttttagcctatatgctcagcaagacccccatcatcttaccactgctgaacatctcatcgcgtttgagccaccgcgttctgtgctacttattgttttccgccttctgtatcttgggcacctactttggtttacacatcaatgacgccatagccaatactcgtgcaattggggcagtcatgggcggcttgtttggcgggccgattgtgggctttgccgtgggattaaccggtggtttacatcgctacaccttaggaggattcaccgatttggcctgcgcaatttcgaccacggctgaaggcttgattggtggcttgctgcatatctatctaatcaagaaaaacaaaggtgcccaactgttcaacccctccgtggtgtttagcatcaccttcgtcgccgaaattatacaaatgatcattttgctggtggtcgctaagccctttgatcaagcgtacagcctcgtttcgaccatcgccgcccccatgatcattgccaattcggtcggtgccgcgttgtttatgagcattttgcaagacagaaaaaccatctttgaaaagtactccgccaccttttcgcgtcgggcgttgaccattgcagatcgttctgtgggtatcttgcacacgggctttaacagtgccaacgcagaaaaaatcgcccgcattatttatgaagaaaccaatgtgggcgcggttgcgatcaccgaccaagagaagatcctcgcgtttgtcggcattggggatgatcaccacaagcctaatacgcccatttcgtcgcaaagcacccttgattcgatgagtcaaaacgccatcatttatctcgatggtagcgagcgtccatatcaatgctctctcgctgccgactgtaaattaggttcggcactgatcattccactgcgggcaggtaaagaggtggtgggaaccattaagctgtacgagccgaagcgcaagttgttttcaaccattaatatgtcgatggccgaaggcattgcccaactgctttccagccaaattctctatggcgattatcagcaacaacaaacgctgctgacgcaatcggagattaagctgctgcatgctcaagtgaatccacatttcttattcaacgcgctaaacacgattagcgcggtgattcgtcgtgatcctgataaagcacgcgaactgattcaaaatttgtcgcatttctttcgcagcaacttaaaacagaacatcaataccgtcactctgaaagaagagctggcgcatgtgaatgcctacctcagcattgaaaaagcgcgttttgctgaccgcctagagatagagattgatatcacgccagagctgttcgacatcaaactgcccagttttaccttgcagcctttggtggaaaacgccattaagcatggtatttcaaatatgcttgagggaggacgggtgcgcatttacagccaatcttgtgagcaaggtgatgtcatcgtggtcgaagataatgcaggcagctatcagcccccagcagaaaatcattcgggactgggaatggaaattgtcgataaacgactgacgcaccattttgggcgtgactcagcactaaaaatcgaggcgaaagagcatcaatttactaaaatgagctttatcattccccgcagccatcacactgcaatttag

SEQ ID NO: 14796 - protein, 560 aa, Vibrio vulnificus YJ016
MELVISLLQQMCVYLVLAYMLSKTPIILPLLNISSRLSHRVLCYLLFSAFCILGTYFGLHINDAIANTRAIGAVMGGLFGGPIVGFAVGLTGGLHRYTLGGFTDLACAISTTAEGLIGGLLHIYLIKKNKGAQLFNPSVVFSITFVAEIIQMIILLVVAKPFDQAYSLVSTIAAPMIIANSVGAALFMSILQDRKTIFEKYSATFSRRALTIADRSVGILHTGFNSANAEKIARIIYEETNVGAVAITDQEKILAFVGIGDDHHKPNTPISSQSTLDSMSQNAIIYLDGSERPYQCSLAADCKLGSALIIPLRAGKEVVGTIKLYEPKRKLFSTINMSMAEGIAQLLSSQILYGDYQQQQTLLTQSEIKLLHAQVNPHFLFNALNTISAVIRRDPDKARELIQNLSHFFRSNLKQNINTVTLKEELAHVNAYLSIEKARFADRLEIEIDITPELFDIKLPSFTLQPLVENAIKHGISNMLEGGRVRIYSQSCEQGDVIVVEDNAGSYQPPAENHSGLGMEIVDKRLTHHFGRDSALKIEAKEHQFTKMSFIIPRSHHTAI

SEQ ID NO: 14797 - DNA, 1359 bp, Anopheles gambiae str. PEST
  CDS (1)..(1359)
atggatggccacacctcgatcccgtgcctcatcgccagcatcatcgccggcctgctcgccacctggctgcacctgcgctgtcgcaagtcgcggctctggctgtacggcattctggcggggatgttgtgcgaggggctcaccatgctgctcatctggctgctgaccgagccccatgcggtgggcgtcgagatcgtcagccacatcgcctacccgatgatcgccggggcgctctgcatcggcctgatcatcaagctggtgcaggatctggatgacgagaaagagctgatcgccgccaagcaggccaagctggcgctggatatcgccaacaagacgctgcccttcttccagaacatcgatcgccactccctgagccaggtctgcgccatcattcgcagcgagatcagcgccgatgcggtggccatcaccgatacccgcgacgtgctggcctatgtcggggtgggcaaggattactacgagctggacgagcaccatgccatcagcgacatgacccagcgggcggtgctgctggaccagatcatcatcaacaacgatctgcgccagtatcacctctccgatttccactcggtcatcattattccgctgcgggaaaacggctcggtgagtggcaccctcaagatctactaccgtcgcacccacagcatcaccagctccctcaaggagatggcggtgggcctctcccagctcatctccacccagatggaggtgtcgcgcatcgagcagctcaaggagatgacccgcaaggcggagttcaccgcgctgcagagcaagatcaacccgcacttcctgttcaacgccctcaatgccatctcgtcgctgatccgcattcggccccagcaggcacgtcagctgatcgccaatctggcggactacctgcgctacaacctcaacaaaggggataccctcatcgacatccaggaagagctgcagcaggtgcgcgactacgtggccatcgagcaggcccgcttcggcgacaagttggaggtggtattcgaggtggacgacgtgcacatccaggtgccgagcctgctgttgcagccgctggtggaaaacgccatcctgcacggcatccagccccgcagcgcaccgggtcgggtcaccatcgaggtgaagcagctggcgggcggcatccgggtggcggtgcgggacaccggttacggcatcagccaggaggtgatcgacggggtggctgccggtcgggtggagagccgcagcatcggcctgatgaacgtacatcagcgggtcaagctgctctatggcgatggcctgcacctcaagcggctggagccgggtaccgaagtgagtttctatctgccggatcaggagtcgatgccatgctga

SEQ ID NO: 14798 - protein, 452 aa, Anopheles gambiae str. PEST
MDGHTSIPCLIASIIAGLLATWLHLRCRKSRLWLYGILAGMLCEGLTMLLIWLLTEPHAVGVEIVSHIAYPMIAGALCIGLIIKLVQDLDDEKELIAAKQAKLALDIANKTLPFFQNIDRHSLSQVCAIIRSEISADAVAITDTRDVLAYVGVGKDYYELDEHHAISDMTQRAVLLDQIIINNDLRQYHLSDFHSVIIIPLRENGSVSGTLKIYYRRTHSITSSLKEMAVGLSQLISTQMEVSRIEQLKEMTRKAEFTALQSKINPHFLFNALNAISSLIRIRPQQARQLIANLADYLRYNLNKGDTLIDIQEELQQVRDYVAIEQARFGDKLEVVFEVDDVHIQVPSLLLQPLVENAILHGIQPRSAPGRVTIEVKQLAGGIRVAVRDTGYGISQEVIDGVAAGRVESRSIGLMNVHQRVKLLYGDGLHLKRLEPGTEVSFYLPDQESMPC

SEQ ID NO: 14799 - DNA, 1716 bp, Desulfovibrio vulgaris subsp. vulgaris str. Hildenborough
  CDS (1)..(1716): transl_table=11
atgttcataacgctctccgagcgtttcggcctgcttctggcgggtggtttcgccatcatgaccctcgccccgctggacaaactcgggccggggcgcacacgttcgtggcgggccacggcgttgctggtggtgctgttctcgctgttcaccatccttggcacctacaacggcaacatcgtgttccagtcgttcgccaacctgcgcgccatgggggcggtgacggcggggcttttcggcggtccgatggtgggcgcgctgaccgggctcatcgccggagggcatcgctacttcatcgacgtgggcgggttcagtgccgtgccgtgcgggctcgcaacctttctggagggacttgccgcagggctcttcgcgtggcgttttccctcccgcagcctcgactggggcactgccatgaccttcgccgccgtgggtgaggctgtgcacatgtgccttgttctcgggctggcacgcccctatgctcaagcggtcgacctcgtggaggtcatcgggctgcccatgatattgctcaatggcgtgggggcggccatcttcgtgcaggcgttgcgcatgcagatgcacttccgggacctgcgcgactcgtcgcaggcgcggcagatactctccatcgccaaccgcacgctcccgcacctgcgcgcgggcttgagcgccgcctccgcacgggccacagccgagatcatcctcgacgagacacgggtggctgccgtggctctcaccagcaacgacatggtgatggcgcacgtgggtgcggcctccgaccaccacagggccgggcattccgtgtgcacgcaggcgacacgccgggtggccacggatggcattccgctcttcgtgacggggcatgacgaaataggctgccagcttgaggcatgcccgctgtgcagtgccatcatcgtgcccctgcgcaagggcgataccatcctcggctgtctcaaactctacggaaccaaggacagaccgctcgaccagacgctgttcgaactggccaagggacttgccgacctgttcgccacgcagatcgaactcgaagacatcggtatcaagaaccagttgctcgcccgggcggagatccgccggttacaggcgcagatcaacccgcactttctcttcaattcgctgaacacggtggcctcgttctgccggacggcaccgggacaggctcgcgagctcattctcgaccttgcccgctacatgcgacgcaacctcgataccagccgtgaagccatccatcttgccgaagaggtggagcagattcgcgcctacctcgtcatcgagaaggcccgtttcggagagcgcatccgcgccgtcatcgacatcgaccccgagacggaacactgcctcgttccgcccctgctcattcagccgctggtggagaacagtgtgcgtcacggcatcctcggcaacgaggaggggggcgttgtgcgccttgccacgagcatggaagacggccacgtggtcgtggttgtcgaggatgacggcgcaggtatgcccgagtccacgcggcagggtatcctcaacggtacgcctgtcacggcccatggcgaaggcatcggtgcgagcaactgcaaccagcgtctcgtgcagttgtacgggcccgcctacgccctctccatcgacagcgcccccggcatgggaacgcgcatcaccttccgcgttcccgcctcgaccgacgccgaggtgttcgcctcggcagctgcctga

SEQ ID NO: 14800 - protein, 571 aa, Desulfovibrio vulgaris subsp. vulgaris str. Hildenborough
MFITLSERFGLLLAGGFAIMTLAPLDKLGPGRTRSWRATALLVVLFSLFTILGTYNGNIVFQSFANLRAMGAVTAGLFGGPMVGALTGLIAGGHRYFIDVGGFSAVPCGLATFLEGLAAGLFAWRFPSRSLDWGTAMTFAAVGEAVHMCLVLGLARPYAQAVDLVEVIGLPMILLNGVGAAIFVQALRMQMHFRDLRDSSQARQILSIANRTLPHLRAGLSAASARATAEIILDETRVAAVALTSNDMVMAHVGAASDHHRAGHSVCTQATRRVATDGIPLFVTGHDEIGCQLEACPLCSAIIVPLRKGDTILGCLKLYGTKDRPLDQTLFELAKGLADLFATQIELEDIGIKNQLLARAEIRRLQAQINPHFLFNSLNTVASFCRTAPGQARELILDLARYMRRNLDTSREAIHLAEEVEQIRAYLVIEKARFGERIRAVIDIDPETEHCLVPPLLIQPLVENSVRHGILGNEEGGVVRLATSMEDGHVVVVVEDDGAGMPESTRQGILNGTPVTAHGEGIGASNCNQRLVQLYGPAYALSIDSAPGMGTRITFRVPASTDAEVFASAAA

SEQ ID NO: 14801 - DNA, 1770 bp, Bacillus thuringiensis serovar konkukian str. 97-27
  CDS (1)..(1770): transl_table=11
atgctaaatttagtacttatgatgattgaacgcgtcggacttattgttattctaggatttttactttcgcatattaaaacattcaggcgccttcttcataagcaagatggttatgtagataagcttaagcttatttgtattttttcggtgtttacaattgtaagcaattacaccgggattgaaatagcagggaatacgattatgaatgaaaattggctacagggtgtttcatcatcgagtaccattgcaaatacacgtattatgggtgttggaattagtggattgcttggtggtcctattgttggagttggagtaggatcgattgctggtattcaccgttatatgcttggcgggacgacagcgctaagttgcgcaatctcttcaattttagcaggcgttataactgggtatattggatacatttttaaaaagtataatcgtacaattacgcctaaattttcagcagttttaagtgtgtttatcgtttctttagaaatgattatgattctattaattgtagaggatggcattagcattgtgaaaacaattgcgataccaatgatccttgtaaatagctttggaagttttattttactttctatgatacaagctattttgcgccaggaagagaacgcaaaggcacttcagactcataaggtattacgtattgcagataaaacgttaccgtattttcgccaaggcttaacagaagaatcttgtaagcatgtggcacaaattattcaccgctttacaggaacagatgcggtatccttaacagatacagagaaaatattagctcatgttggattagcgtcagatcaccatattccttcacatagtttaataaccggtttgtcgaaagaagtgttacatacagggaaaataatgaaagcgaaatcacgtgaggtcattaattgtcaacatgaaggctgtcctttgcaagcggcgattgttattccgctaacttcacatggaaatacgatagggacattaaaactatatttcaaaaatcctaaccagttaagtcgtgtggaagaggaattagcagaagggttagcaaaaatattctctacacaacttgaattaggtgaagctgagttgcaaagtaaattattgcaagatgcggagataaaggcattacaagcacaaattaacccacactttttatttaatgcgattaatacagtatcagctttatgccgaacagatgtagaaaaagcaaggaagttattattgcagcttagcgtgtatttccgttgtaatttgcaaggggcacgtcagttattgattccactagaacaagaattaaaccatgtacaggcatacttatcactagaacaagcaaggttcccaaataagtatgaagtaaagatgtatattgaggatgagctcaagacaactttagtaccaccgtttgttcttcaactattggttgaaaatgcgttgcgacacgcctttccaaagaagcaacccgtatgtgaagtggaagtgcatgtttttgaaaaagagggtatggttcattttgaggtaaaggataatgggcaaggtattgaggaagaacgtttagaacaattaggaaagatggtagtttcgtcaaagaaagggactggaacagctttatataatattaatgaacgtcttattgggttatttgggaaggaaacgatgcttcatatcgaaagtgaagtaaatgaggggacagagattacttttgttattccaaaaaaagtaggggaggaagagcagattgttaaaagtactagtagttga

SEQ ID NO: 14802 - protein, 589 aa, Bacillus thuringiensis serovar konkukian str. 97-27
MLNLVLMMIERVGLIVILGFLLSHIKTFRRLLHKQDGYVDKLKLICIFSVFTIVSNYTGIEIAGNTIMNENWLQGVSSSSTIANTRIMGVGISGLLGGPIVGVGVGSIAGIHRYMLGGTTALSCAISSILAGVITGYIGYIFKKYNRTITPKFSAVLSVFIVSLEMIMILLIVEDGISIVKTIAIPMILVNSFGSFILLSMIQAILRQEENAKALQTHKVLRIADKTLPYFRQGLTEESCKHVAQIIHRFTGTDAVSLTDTEKILAHVGLASDHHIPSHSLITGLSKEVLHTGKIMKAKSREVINCQHEGCPLQAAIVIPLTSHGNTIGTLKLYFKNPNQLSRVEEELAEGLAKIFSTQLELGEAELQSKLLQDAEIKALQAQINPHFLFNAINTVSALCRTDVEKARKLLLQLSVYFRCNLQGARQLLIPLEQELNHVQAYLSLEQARFPNKYEVKMYIEDELKTTLVPPFVLQLLVENALRHAFPKKQPVCEVEVHVFEKEGMVHFEVKDNGQGIEEERLEQLGKMVVSSKKGTGTALYNINERLIGLFGKETMLHIESEVNEGTEITFVIPKKVGEEEQIVKSTSS

SEQ ID NO: 14803 - DNA, 1743 bp, Erwinia carotovora subsp. atroseptica SCRI1043
  CDS (1)..(1743)
atgcacgaaatatttgaaatgctccttgcggtctttgaccgcgccgccctgatgctgatttgtttatttttcctgacaagaacgcgccagttccggcaattactgcaaaaagagcaacattctccgagagaacgggtgatggtgacagccatcttttcactgtttgcgctgtttggtacgtattccggtattaatgttgaagggtcgcttgtcaacgtgcgcgtgattgccgtgatgtctggcggtattctctttggcccttgggtggggatcgcgacaggtatcattgcgggggcacaccgttatttaattgatattgatggcatcacctctgtaccttgcttgattaccagcatcatcgccggtatcacttctggctacatcaataagaaagtcaaaaaagagcagcagtggagcatagggattctgggcgggatgctgtgtgagtcattaactatgttgctggttgtagcatgggcgacgccgatcgagttagggctggatattgtttcaaaaattgccgtgccgatgattcttggctccatctgtattggcctgattgtactgctggtgcagagtgtagcgaatgaaaaagaggtgattgccgctaggcaggccaaactcgcactcgatatcgcacacaaaacactgccgtatttccgcaatatcaacagtgattcactgacggccatttgtagaatcatccgtactgaaattaatgcggacgcagtagcgataacgaacacgcagcacattcaggcttatgtggggattggggaagacaaatataatatcggccacgacattatcagcccgatgacgcagcaggcgattcatgacggaaaaatcatcattaaaaataatgatgaacagcatcttacgccggaaattcattcgatgattgtcatcccgctgtgggaacatgggcaggtgacaggcacgctgaaaatctattatcgccatgcacataaaattacctattcattacgcgtgatggctgtcggcctatcgcaaatcatgtcaacgcaaattgaggtttcccgtacagaacaactgcgcgatatggcaaataaggcggaattgagagcgctgcaaagtaaaatcaatccgcactttctttttaatgctctgaatgcgatctcctcgtccattcgaattaatcccgatacggcgcgccagttggtcatcaatctgtctcgctatttgcgctataaccttgagctcaatgacgatgcgctgatcgatataaaaaaagagctgtaccaaatacaggattatatcgcgattgagcaggcgcgctttggcgctaagttgacggtgatttacgatattgacgacgatgtggcgtacaaaattcctagcttattaattcagccgctggtggaaaatgcgattgtgcatggtattcagcctttcaaaggaaagggaaccgtagtgctgtccgtgaaagagcagggcgataagctgctggtggcggtaaaagatacaggccacggcatcagtcaggagacgatagatcgcgtcgcgcgcaatgaattgccggggaataagattggcctgcttaatgttcatcaccgagtccgcttgctctatggtgatggcttacatattcgccgtttggaacctgggactgagatttatttctatattccacgagaagataaaaccccgtcggcattgccggataccgtgcaggtgccgtcatcaagatattctgctgagaaaacaggaggcaacccatga

SEQ ID NO: 14804 - protein, 580 aa, Erwinia carotovora subsp. atroseptica SCRI1043
MHEIFEMLLAVFDRAALMLICLFFLTRTRQFRQLLQKEQHSPRERVMVTAIFSLFALFGTYSGINVEGSLVNVRVIAVMSGGILFGPWVGIATGIIAGAHRYLIDIDGITSVPCLITSIIAGITSGYINKKVKKEQQWSIGILGGMLCESLTMLLVVAWATPIELGLDIVSKIAVPMILGSICIGLIVLLVQSVANEKEVIAARQAKLALDIAHKTLPYFRNINSDSLTAICRIIRTEINADAVAITNTQHIQAYVGIGEDKYNIGHDIISPMTQQAIHDGKIIIKNNDEQHLTPEIHSMIVIPLWEHGQVTGTLKIYYRHAHKITYSLRVMAVGLSQIMSTQIEVSRTEQLRDMANKAELRALQSKINPHFLFNALNAISSSIRINPDTARQLVINLSRYLRYNLELNDDALIDIKKELYQIQDYIAIEQARFGAKLTVIYDIDDDVAYKIPSLLIQPLVENAIVHGIQPFKGKGTVVLSVKEQGDKLLVAVKDTGHGISQETIDRVARNELPGNKIGLLNVHHRVRLLYGDGLHIRRLEPGTEIYFYIPREDKTPSALPDTVQVPSSRYSAEKTGGNP

SEQ ID NO: 14805 - DNA, 1719 bp, Erwinia carotovora subsp. atroseptica SCRI1043
  CDS (1)..(1719)
atggttagccaggttgatctaattctttccctgttacagcagatgtgtgtttatctggtcatcgcttatctgctcagtaaaacaccgctgtttatcccgctgatgcaggtcaccattcgcctgccgcacaagctggtctgctatctggttttttccgtgttttgcattatgggaacctacttcggcctgcatatagacgattcgattgccaatacccgcgcgacaggcgcggtgctcgggggcatgctgggcggcccttctgtgggctttctcgtcgggttgactggcggactacaccgctattcgatgggcggtatgactgcgctggcctgtatgttgtcgaccattgccgaaggcctgctcggcgggttgctgcatcgctatctggcacgtcgtaaccgtatcgatctgctctttaaaccactcgtcgtcggcctgaccgcactggttgcggagatactacaaatggcgattattctgctggtcgcccgaccgtttgataacgccgctgagttggtgagggatattgcgctaccgatgatgatcaccaataccatcggttccgctatgttcatgcgcatcctgctcgacaggcgcgccatttttgaaaaatacacttctgcattctccgccaaggcgctgcaaatcgcggcacgcgccgaaggggcgctgcgtcaggggttcaatccgcaaaacagtatgcgcgttgcccgtattttgtatgaagaactgggtgtcggtgccgtggcgattaccgatcgcgacaaactgctggccttcatcgggttaggcgacgatcaccacaacgtcggtgcgcccatcacgtcatcacacacgcgccgggcgatagacaacaatcaggtggtgtacgccgacggcaacgaggtgtcttatacctgttcggtttcatcgcactgcaagctcggctccacgctggtgatcccactgcggggcgaagatcagcgtgttgtcggcacgatcaagctttatgaacccaagaataagctattttccagcattaaccgtacgctaggagaagggatcgcccacctgctttccgcacagattctgacaggccgttttgaacaacagaaacagctgctggcgcagtcggaaatcaagctgctgcacgcgcaggtcaacccgcattttctgttcaatgcactgaatacgctgtccgccgtgatacgacgcaaccccgaccacgcccgccagttggtgctgtctctgtcgacgtttttccgtaaaaatctcaagcgcagtaacgatgaagtgtcgctcaatgatgagctggagcacgttaacgcctatctggaaatcgaaaaggcgcgctttgccgatcacctgacggtagaaatctcgctaccggagtcgctgcgcgaagcgcgactaccggcgttttctctgcaaccgattgtcgaaaatgcgattaagcacggtacttcgcagatgattgaacacggacacatccacattagcggacgtctgcacgccaacacgctggaactgtcagtggaagataatgctggcacctatcagccccgcagcggtggcgatggtctaggcatgaatctggtcgaccgccgtattaaagcgcgctacggcaaccgctatggcatcacggtagtcagcgaaacagataaattcactcgggtcgaagtacgcgtcccgctgatttcagcgcgcaaggcattggaaaaactggatagcgtggcgtga

SEQ ID NO: 14806 - protein, 572 aa, Erwinia carotovora subsp. atroseptica SCRI1043
MVSQVDLILSLLQQMCVYLVIAYLLSKTPLFIPLMQVTIRLPHKLVCYLVFSVFCIMGTYFGLHIDDSIANTRATGAVLGGMLGGPSVGFLVGLTGGLHRYSMGGMTALACMLSTIAEGLLGGLLHRYLARRNRIDLLFKPLVVGLTALVAEILQMAIILLVARPFDNAAELVRDIALPMMITNTIGSAMFMRILLDRRAIFEKYTSAFSAKALQIAARAEGALRQGFNPQNSMRVARILYEELGVGAVAITDRDKLLAFIGLGDDHHNVGAPITSSHTRRAIDNNQVVYADGNEVSYTCSVSSHCKLGSTLVIPLRGEDQRVVGTIKLYEPKNKLFSSINRTLGEGIAHLLSAQILTGRFEQQKQLLAQSEIKLLHAQVNPHFLFNALNTLSAVIRRNPDHARQLVLSLSTFFRKNLKRSNDEVSLNDELEHVNAYLEIEKARFADHLTVEISLPESLREARLPAFSLQPIVENAIKHGTSQMIEHGHIHISGRLHANTLELSVEDNAGTYQPRSGGDGLGMNLVDRRIKARYGNRYGITVVSETDKFTRVEVRVPLISARKALEKLDSVA

SEQ ID NO: 14807 - DNA, 1698 bp, Yersinia pseudotuberculosis IP 32953
  CDS (1)..(1698): transl_table=11
atgggcattagccaaacagaactgatcttttcccttttacaacagatgtgtgtgtatttggttattgcctatctgctgagtaaaacaccgctttttatccccttgatgcaagtcactatcaggttgccccataaactggtgtgctacctcaccttctccatgttttgcattatgggtacctattttggtctgaacattgatgactctatcgcgaatactcgcgctatcggtgcagtcttggggggaatgttaggggggccatcggttggttttttggtagggctaaccggaggcctgcatcgttattcaatgggggggatgactgcaaccgcctgtatgttatcaaccattgctgaagggctattgggtggccttctccacctttatctgacacgtaaaaaccgcctcgatttactgtttcagccgctggtggtcgcgggtattacactggtagccgaagtgctacaaatgatgattattctggccgtcgcccgccccttcaatgaagctgtcgaattggttgaaaatattgccttgccgatgatgatcaccaataccattggtgccgccatgtttatgcgtatcttattagaccgccgggccattttcgaaaaatacaccacggcattttccgcgaaggcgctacaaattgctgcacgggcggagggtctactgcgccatggctttgaccagcaaaacagtatgcgagtggcgcgtatcttgtatgaagagttgggcgtgggcgcggtagccattactgatcgcgaaaaattgctggcctttatcggtagcggtgccgaccaccatcaggtgggcagtgctatcacctccgaccatactcaccgcgcgattgaactcaatcaggtggtgtatgccgacggcaatgccgtgccttatacctgctcaatttcacccacctgtaagttgggttcaacactggttatccctttgcgaggtgaagagcaccgggtgatcggcagtatcaaattgtatgagccaaaaagtaaattattctccagcattaaccgcaccttaggagagggtattgcgcacttattatcagcacagattttggcgggagaattcgaacaacaaaaacaattactggcgcaatctgaaatcaaactgctccatgcacaggtcaacccacatttcttgtttaatgcgctcaataccctatcagtggtgatccgccgtaatccagatcatgcccgcaatttggtgctttctttatcaacctttttccgtaaaaacctaaaacgcagccacgatgtggtcacgttaagtgatgagattgaacatgtgaatgcgtatcttgaaatagaaaaggcacgctttgctgatcgtctgactgtcacggtctcactgccgaatgaactgatggaggcacgcttacccgcgttctccctgcaacccgtggtagaaaatgcaatcaagcatggtatctcacagatgttcagtaacgggcgggtcacgttgcgcggcaaattggatgacaacacgttggtattggaagtcgaagataacgccggtttatatcagccgcagccggatggcgatggtctgggaatgagtttggttgatcggcgaattaaagcgcgctctggcaatgaatatggcatcaccgtcgtcagtgaagcggaagtctttacccgcattattattaagctaccgtttattaccgtgagtgagtattaa

SEQ ID NO: 14808 - protein, 565 aa, Yersinia pseudotuberculosis IP 32953
MGISQTELIFSLLQQMCVYLVIAYLLSKTPLFIPLMQVTIRLPHKLVCYLTFSMFCIMGTYFGLNIDDSIANTRAIGAVLGGMLGGPSVGFLVGLTGGLHRYSMGGMTATACMLSTIAEGLLGGLLHLYLTRKNRLDLLFQPLVVAGITLVAEVLQMMIILAVARPFNEAVELVENIALPMMITNTIGAAMFMRILLDRRAIFEKYTTAFSAKALQIAARAEGLLRHGFDQQNSMRVARILYEELGVGAVAITDREKLLAFIGSGADHHQVGSAITSDHTHRAIELNQVVYADGNAVPYTCSISPTCKLGSTLVIPLRGEEHRVIGSIKLYEPKSKLFSSINRTLGEGIAHLLSAQILAGEFEQQKQLLAQSEIKLLHAQVNPHFLFNALNTLSVVIRRNPDHARNLVLSLSTFFRKNLKRSHDVVTLSDEIEHVNAYLEIEKARFADRLTVTVSLPNELMEARLPAFSLQPVVENAIKHGISQMFSNGRVTLRGKLDDNTLVLEVEDNAGLYQPQPDGDGLGMSLVDRRIKARSGNEYGITVVSEAEVFTRIIIKLPFITVSEY

SEQ ID NO: 14809 - DNA, 1785 bp, Bacillus licheniformis ATCC 14580
  CDS (1)..(1785): transl_table=11
atggtccaactcatgattatgatgctggagagagtggggatcatcgtcattctgggctttatgttggcccatatgaaggtgttccgtcagcacctacagcatccggaagggtataagggcaagggagttctcatctttattttttccttgttcagcatcatcagcaactatacaggcattgaaatccgggagcgcgagattttgaacaatgactggattttcgcaatcgacccgtcaagctcgattgccaatacgagaattctcggcgtcgaaatcggcggcttgatcggagggccgtttgtcggagcgggtgtcggactgctctcaggcattcaccgtttttcactgggagggacgacggctttgagctgcgcggtttcttcactgctggcaggtgtcattgcgggttatatcggcagctttttcaggaatcggcaccagatggtgacaccgcgggtagccgctcttgcgggcatttgtatggagggcctgcagatgcttatgattctcgtgcttgcaaaaccgcaggctgaggcacttgcgcttgttcagatgatcggcattccaatgatgattgtcaacgggacgggcagctttatttttctatcgatcattcagtctattatccgcaaagaggaacaggcgcgggccgttcagacccataaggtattttcgatagcggatcagacgcttccttttttccgccggggactgaatgaggattcctgcaaaagcgccgctctcattatacaccgcatgacagggacggatgccgtatcgattacggatagagagaacattctcgctcatgtcggagatggagcagatcatcatattccttcgaaaaatctgatcaccggtttatcgaaaaaagtcattcaaaccggaaaggtcatgaaagtgaagtcgcgcgatgaaatcgagtgtgcgcaccgttcctgtccgctgcaggcggcgatcgtactgccgctcttctccaaccgcgaaacaatcggcacgctgaagctgtacttcaagcacccgtccggtcttaaccgtgtgacggaagagctggccgaagggcttgccatgcttttttccactcagctagaactcggtgaggctgagctgcaaagcaagcttttgaaagatgccgaaatcaaggcgcttcaagcgcaggtcaatccgcactttttatttaatgccatccatacgatttctgctctgtgcaggacagatccggaaaaaacgcgaaaacttctcttgcagctgagcgtttattttcgttccaatctgcagggagccaggcagctgatgattccgctttcaaaagagctgaaccatctggaagcctatttatcattggagcaggcccgatttccgggcaagtatcatattgattttcatatcgaggacggccttgaaaatatggaaatccctccttttatcttgcagctgctcgttgaaaatgcgcttcgccatgcatttccgagaaaacaaaaggtatgcacggtaaaagtatccgctgtgagagagcgggacggcgttttgatgaaggtgtcagacaacggcaggggaattaatccggagatgcttggacagctggggcaggcgcccgccccttcaaaggaaggaaatgggacggcgctttacaatgtgaaccagcggctcaccggtttgttcgggcaccaggctgctctgcagattgccagcgaacttgataaaggaacagagatatccttcaagattccttttcaaaccgaaagagaggggaacagagatgctcaaggtattaatcgtggatga

SEQ ID NO: 14810 - protein, 594 aa, Bacillus licheniformis ATCC 14580
MVQLMIMMLERVGIIVILGFMLAHMKVFRQHLQHPEGYKGKGVLIFIFSLFSIISNYTGIEIREREILNNDWIFAIDPSSSIANTRILGVEIGGLIGGPFVGAGVGLLSGIHRFSLGGTTALSCAVSSLLAGVIAGYIGSFFRNRHQMVTPRVAALAGICMEGLQMLMILVLAKPQAEALALVQMIGIPMMIVNGTGSFIFLSIIQSIIRKEEQARAVQTHKVFSIADQTLPFFRRGLNEDSCKSAALIIHRMTGTDAVSITDRENILAHVGDGADHHIPSKNLITGLSKKVIQTGKVMKVKSRDEIECAHRSCPLQAAIVLPLFSNRETIGTLKLYFKHPSGLNRVTEELAEGLAMLFSTQLELGEAELQSKLLKDAEIKALQAQVNPHFLFNAIHTISALCRTDPEKTRKLLLQLSVYFRSNLQGARQLMIPLSKELNHLEAYLSLEQARFPGKYHIDFHIEDGLENMEIPPFILQLLVENALRHAFPRKQKVCTVKVSAVRERDGVLMKVSDNGRGINPEMLGQLGQAPAPSKEGNGTALYNVNQRLTGLFGHQAALQIASELDKGTEISFKIPFQTEREGNRDAQGINRG

SEQ ID NO: 14811 - DNA, 1770 bp, Bacillus cereus E33L
  CDS (1)..(1770): transl_table=11
atgctaaatttagtacttatgatgattgaacgcgtcggacttattgttattttaggatttttactttcgcatattaaaacattcaggcgccttcttcataagcaagatggttatgtagataagcttaagcttatttgtattttttcggtgtttacaattgtaagcaattacaccgggattgaaatagcagggaatacgattatgaatgaaaattggctacagggtgtttcttcatcgagcacaatcgcgaatacacgtattatgggtgttggaattagtggattgcttggtggtcctatcgtcggaattggagtaggatcgattgctggtattcaccgttatatgcttggcgggacgacagcgctaagttgcgcgatttcttcaattttagcaggcgttataactgggtatattggatacatttttaaaaagtataatcgtacaattacgcctaaattttcagcagttttaagtgtgtttatcgtttctttagaaatgattatgattctattaattgtagaggatggcattagcattgtgaaaacaattgcgataccaatgatccttgtaaatagctttggaagttttattttactttctatgatacaagctattttgcgccaggaagagaacgcaaaggcacttcagactcataaggtattacgtattgcagataaaacgttaccgtattttcgccaaggcttaacagaagaatcttgtaagcatgtggcacaaattattcaccgctttacaggaacagatgcggtatccttaacagatacagagaaaatattagctcatgttggattagcgtcagatcaccatattccttcacatagtttaataaccggtttgtcgaaagaagtgttacatacagggaaaataatgaaagcgaaatcacgtgaggtcattaattgtcaacatgaaggctgtcctttgcaagcggcgattgttattccgctaacttcacatggaaatacgatagggacattaaaactatatttcaaaaatcctaaccagttaagtcgtgtggaagaggaattagcagaagggttagcaaaaatattctctacacaacttgaattaggtgaagctgagttgcaaagtaaattattgcaagatgcggaaataaaggcattacaagcacaaattaacccacactttttatttaatgcgattaatacagtatcagctttatgccgaacagatgtagaaaaagcaaggaagttattattgcagcttagcgtgtatttccgttgtaatttgcaaggggcacgtcagttattgattccactagaacaagaattaaaccatgtacaggcatacttatcactagaacaagcaaggttcccaaataagtatgaagtaaagatgtatattgaggatgagctcaagacaactttagtaccaccgtttgttcttcaactattggttgaaaatgcgttgcgacacgcctttccaaagaagcaacccgtatgtgaagtggaagtgcatgtttttgaaaaagaaggtatggttcattttgaggtaaaggataatggacaagggattgaggaagaacgtttagaacaattaggaaagatggtagtttcgtcaaagaaagggactggaacagctttatataatattaatgaacgtcttattgggttatttgggaaagaaacgatgcttcatatcgaaagtgaagtgaatgaggggacagagattacttttgttattccaaaaaaagtaggggaggaagagcagattgttaaaagtactagtagttga

SEQ ID NO: 14812 - protein, 589 aa, Bacillus cereus E33L
MLNLVLMMIERVGLIVILGFLLSHIKTFRRLLHKQDGYVDKLKLICIFSVFTIVSNYTGIEIAGNTIMNENWLQGVSSSSTIANTRIMGVGISGLLGGPIVGIGVGSIAGIHRYMLGGTTALSCAISSILAGVITGYIGYIFKKYNRTITPKFSAVLSVFIVSLEMIMILLIVEDGISIVKTIAIPMILVNSFGSFILLSMIQAILRQEENAKALQTHKVLRIADKTLPYFRQGLTEESCKHVAQIIHRFTGTDAVSLTDTEKILAHVGLASDHHIPSHSLITGLSKEVLHTGKIMKAKSREVINCQHEGCPLQAAIVIPLTSHGNTIGTLKLYFKNPNQLSRVEEELAEGLAKIFSTQLELGEAELQSKLLQDAEIKALQAQINPHFLFNAINTVSALCRTDVEKARKLLLQLSVYFRCNLQGARQLLIPLEQELNHVQAYLSLEQARFPNKYEVKMYIEDELKTTLVPPFVLQLLVENALRHAFPKKQPVCEVEVHVFEKEGMVHFEVKDNGQGIEEERLEQLGKMVVSSKKGTGTALYNINERLIGLFGKETMLHIESEVNEGTEITFVIPKKVGEEEQIVKSTSS

SEQ ID NO: 14813 - DNA, 1719 bp, Photobacterium profundum SS9
  CDS (1)..(1719): transl_table=11
atggaactgattttttcattactccaacagctcagtgtttatttagttattgcttatctactaagtaaaaccccgttgtttatgccactcactacggtatctggccgattatcccaacgtttttcatgttatgtcttattctctcttttttgtattttaggcacctactttggcctcaacattgaagatgctatcgcgaatacacgcgcgataggtgctgtaatgggagggttactcggtgggcccattgtggggtttgctgtgggcttaactggcggcatgcaccgttacagcatgggaggctttactgatgtcgcttgcgctatctctaccacaactgaagggttgcttggtgggctcttacacagctactacgtacgccgcgggcaagtcgaccagctttacaggcctttcatcgttttcacgattacattagtcgctgaaatcattcaaatgtttatcattttaatcgtggctgaaccctacgataaagccttacaccttgtcagcgccatagccttaccaatggtcattgctaactcgttaggcgcagctttattcatgagtatcattcaagatagaaaaacgatttatgaaaaatattcagctgcattttccagtcgagcattaaaaatagcccaacgctctgtcggcattttaagccaaggatttaatgaagaaagtacaaaaaaaatagccaaaatcgtttatgaggaaacgggcgttggcgcagttgccattacagatcgagataaaatattagcgtttattggtatcggtgatgatcaccatttacccggtacaccaatatcgtctggctatactcgtcgatcgatagataactgcgaattggtttacgcagatggccatgatatgccttactgttgttcgctaagcaaccgctgtaaattaggctctgcacttgttattcctttagtgggaggaaataacgatgtgctaggaacaataaaactgtacgaaccaaagcgtaaactattctctacagtgaacctaacattaggtgaaggcattgctaaattgctttcaaatcaaattttaactggacgctatgaacaacaacaaatcttactgactcaagcagagctgcgtttactacaagcccaagttaatcctcacttcctattcaatgccctcaatacgattagtgcaataattcgtcgagaccccgataaagcacgccagttgatccaacatctatcacaattcttccgtcgtaatttaaagcaaaacatcgaaaccgttactattagcgaagaactacagcatgttcgatcttacttagaaattgagctcgcacgtttttctgatcgcctgaatgttgaaatcattgtgcccgatgagctaatgagcattaatttaccgacgtttaccttacaacccttagttgaaaatgccattaagcacggtacttcatcattgctcgagaatggtcaaatcattattcgggggtacgtttttgacaatcatttggttttggaagtagaagataatgcaggcacctaccaaccagtcagcgaagaaagtgggctaggcatgaaaattgtcgataagcggttaaaaaacatgtttgggcaacaatacggtttaaagatgagtagtcagcctaatatatggacacgggctacaattacactaccagaagataaaaccttgcagcacaatgatataaacaaaacatacaccgcagaaaacaagtaa

SEQ ID NO: 14814 - protein, 572 aa, Photobacterium profundum SS9
MELIFSLLQQLSVYLVIAYLLSKTPLFMPLTTVSGRLSQRFSCYVLFSLFCILGTYFGLNIEDAIANTRAIGAVMGGLLGGPIVGFAVGLTGGMHRYSMGGFTDVACAISTTTEGLLGGLLHSYYVRRGQVDQLYRPFIVFTITLVAEIIQMFIILIVAEPYDKALHLVSAIALPMVIANSLGAALFMSIIQDRKTIYEKYSAAFSSRALKIAQRSVGILSQGFNEESTKKIAKIVYEETGVGAVAITDRDKILAFIGIGDDHHLPGTPISSGYTRRSIDNCELVYADGHDMPYCCSLSNRCKLGSALVIPLVGGNNDVLGTIKLYEPKRKLFSTVNLTLGEGIAKLLSNQILTGRYEQQQILLTQAELRLLQAQVNPHFLFNALNTISAIIRRDPDKARQLIQHLSQFFRRNLKQNIETVTISEELQHVRSYLEIELARFSDRLNVEIIVPDELMSINLPTFTLQPLVENAIKHGTSSLLENGQIIIRGYVFDNHLVLEVEDNAGTYQPVSEESGLGMKIVDKRLKNMFGQQYGLKMSSQPNIWTRATITLPEDKTLQHNDINKTYTAENK

SEQ ID NO: 14815 - DNA, 1356 bp, Photobacterium profundum SS9
  CDS (1)..(1356): transl_table=11
gtgtacaccgagcaatttatgatgctgctagcggtatttgaacgtgcagcactgatgctaatggcattatttttcttaactcgcaccaacctattccaacatattgttatcaaaacccaacgacacccaattgaaacagcgcttatctctgcactcttcattttatttgctgtctttagtacctacacaggtgtcaatgttgatggctcactcatcaatgttcgtattattgcggtcttgtctggtggaatcatttttggtccttgggtgggtattcctgctggcattatttcaggcttacaccgttaccttatcgacatggacggccccacctcggtagcttgtttaatttccagtacgattgcgggcctattggcaacatggattcattttcgatgccacaaaaaatcgtacgcaaaatgggggattcttgcaggtatgttctgtgaaatcttaaccatgattttaattgtgagcttgtctgaagataagcagttggcttataccattgtggaacatattagcgtacccatgatcgcaggggcggtgtgcattgggcttattatcaaattggttcaagatttagatgaagagaaagatttaatcgcagccaaacaagcaaagcttgccctcgatatcgccaacaaaaccctgccttattttcgaaataatcatcgagattcgctgacgaaagtatgcggtattattcgtgaggaaacccaggcagatgccgtcgctattaccgatgttaaagacgtattagcttacgtcggtatagggcaagaaaactacttggatgcctaccataaaatcagtttgatgacccaacaagcagtcaatactggcgagcaaatcattagtaataatcttaatgtgcaaggctttcattcactgttaattattccactgtgggaaaacggtgccgttagcggtacgttaaaaatattctaccaccagccacaccgcattcggccgtcattacgtgaaatgaccataggcttatcgcaattgatttccactcagatggaagtctcgcgtcttgaacagttgaaagccatgaccagcaaagcagagctttctgcactacaaagcaaaattaatccgcactttttattcaatgcattgaatgcgatttcaacgttagtgcgtattcatcccgataaagctcgtcaattgattgctaatttagcagattttttacggtataacctcgaacgtaataatgatttgatcgatatccaagaagagttacaacaagtaagggattatgtcgctattgaacaagcccgctttggtgacaagttagaagtaacgttcgatgtcgatgatgtgcatctcgcgattccctgtttatga

SEQ ID NO: 14816 - protein, 451 aa, Photobacterium profundum SS9
MYTEQFMMLLAVFERAALMLMALFFLTRTNLFQHIVIKTQRHPIETALISALFILFAVFSTYTGVNVDGSLINVRIIAVLSGGIIFGPWVGIPAGIISGLHRYLIDMDGPTSVACLISSTIAGLLATWIHFRCHKKSYAKWGILAGMFCEILTMILIVSLSEDKQLAYTIVEHISVPMIAGAVCIGLIIKLVQDLDEEKDLIAAKQAKLALDIANKTLPYFRNNHRDSLTKVCGIIREETQADAVAITDVKDVLAYVGIGQENYLDAYHKISLMTQQAVNTGEQIISNNLNVQGFHSLLIIPLWENGAVSGTLKIFYHQPHRIRPSLREMTIGLSQLISTQMEVSRLEQLKAMTSKAELSALQSKINPHFLFNALNAISTLVRIHPDKARQLIANLADFLRYNLERNNDLIDIQEELQQVRDYVAIEQARFGDKLEVTFDVDDVHLAIPCL

SEQ ID NO: 14817 - DNA, 1686 bp, Salmonella enterica subsp. enterica serovar Paratyphi A str. ATCC
  CDS (1)..(1686): transl_table=11
atgtacgagtttaatctggtgttgctgctgcttcagcagatgtgcgtgtttctggtcattgcgtggctaatgagtaaaacgcgcctgttcatcccgcttatgcaggtcacggttcgtctgccgcacaagcttctgtgttacgtcacgttttctatcttctgcattatgggcacttattttgggctacatatcgaagattcgattgccaatacccgcgcgattggcgcggtgatgagtggcctactcggcgggccggtcgtcggcgggctggtcggcctgaccggtgggttacatcggtattctatgggcggcatgacggcgctgagctgtatgatttccaccatcgtcgaagggctgctgggcgggttggtacacagcgttctcatacgtcgcggacgcccggacaaagtgtttagcccgctgacggcgggagcaattacgtgtgttgccgaactggtgcagatgctgattattttattgatagccaggccgtttgacgatgccctgcatctggtcagtaatattgccgcgccgatgatggtgacgaataccgttggcgccgcgctgttcatgcgtattttgctcgataagcgcgccatgttcgaaaaatatacttcggcattttctgctaccgcgctgaaggtcgccgcgtcaacggaggggattctgcgtcagggatttaacgaagtgaacagtatgaaggtggcgcaggtgttatatcaggagttggatatcggcgccgttgccatcaccgatcgcgaaaaactgctggcttttaccggtattggcgacgatcaccatctaccgggcaaacccatttcatcaggttatacgctgaaagcaattgaaaccggagaggtggtttatgccgatggcaacgaagtgccgtaccgctgttcgctacacccgcagtgtaaactcggctcgacgctggtgatcccgctgcgtggcgaaaatcagcgagtcatgggcaccattaaattgtacgaagcgaaaaaccggctgttcagctcaattaaccgtaccctgggagagggtattgcgcagcttttatccgcgcagatcctggccgggcagtatgaacggcagaaggcgttgctgacgcagtcagagatcaagctgttgcacgcgcaggtgaatccgcattttctgtttaatgcactcaataccattaaagcggtgattcgccgcgacagcgaacaggccagccaactggtgcagtacttgtcgaccttttttcgcaaaaatttaaaacgcccgtcggaaatcgtcacgctggcggatgaaattgaacacgtgaacgcttatctgcaaattgaaaaagcgcgttttcagtcgcgtctgcaggtacagcttgatgttccatcgacgctttcacgtcagaaattgcctgcgtttacattacagccgattgttgagaacgccattaaacatggcacgtcgcaactgcttgataccggcaacgtcgctattcgcgcccgacgcgaagggcagcatttgatgttagatattgaagataatgcgggactgtatcagccttccgccggcagtagcgggctggggatgagtctggtggataaacgtctgcgcgaacactttggcgatgattatggtattagcgtggcctgcgagccggactgttttacccgaattacattacgacttccactggaggaggacgcatga

SEQ ID NO: 14818 - protein, 561 aa, Salmonella enterica subsp. enterica serovar Paratyphi A str. ATCC
MYEFNLVLLLLQQMCVFLVIAWLMSKTRLFIPLMQVTVRLPHKLLCYVTFSIFCIMGTYFGLHIEDSIANTRAIGAVMSGLLGGPVVGGLVGLTGGLHRYSMGGMTALSCMISTIVEGLLGGLVHSVLIRRGRPDKVFSPLTAGAITCVAELVQMLIILLIARPFDDALHLVSNIAAPMMVTNTVGAALFMRILLDKRAMFEKYTSAFSATALKVAASTEGILRQGFNEVNSMKVAQVLYQELDIGAVAITDREKLLAFTGIGDDHHLPGKPISSGYTLKAIETGEVVYADGNEVPYRCSLHPQCKLGSTLVIPLRGENQRVMGTIKLYEAKNRLFSSINRTLGEGIAQLLSAQILAGQYERQKALLTQSEIKLLHAQVNPHFLFNALNTIKAVIRRDSEQASQLVQYLSTFFRKNLKRPSEIVTLADEIEHVNAYLQIEKARFQSRLQVQLDVPSTLSRQKLPAFTLQPIVENAIKHGTSQLLDTGNVAIRARREGQHLMLDIEDNAGLYQPSAGSSGLGMSLVDKRLREHFGDDYGISVACEPDCFTRITLRLPLEEDA

SEQ ID NO: 14819 - DNA, 1794 bp, Bacillus clausii KSM-K16
  CDS (1)..(1794): transl_table=11
atgtttgaactattgcttttaatgctagagcgccttggcctcattgtcatgcttgcatttattgcgacgaggatgcgctttttccgtgtcatggttaaatcgactcggttaacgcgtaagcagacatggacggcgattttgttttttggcgcattcggcattattggcacttactctggcgtcacttttcaagcagaatcccttgtgctgcagcggatcacatttggcattcaagaagatgccgcgattgcgaacttcagggtgattggcgttgtgttagccggactgtttggcggctataaagtcggtcttagcgccgggttaatagcaggcgtccatcggatgttgcttggcggcttcacggccttctcatgtgggatcgctacgattgtcgccggcttatttgctgctttttaccgatcgaaaaatccgaatgcggttaaccggccgctgtctatctttcttctcggtgcattggcggaaaccgtgcaaatgggtttaattgctttgcttgcaaatccgacggctgctgcgatttcccttgtgcaaacgatcgggttgccaatgattgtggccaatgggattggctgtacgctctttttgctcattatccaaagcgtgacaaaagaagaacagaaagcaggcgctttgcaagcgcaaaagagcttgcgcattgccgaacaaacactggcccattttaagcatgggctatcaagccattctgctaaggaagtatgcgacattttatataaagaactgaatgcctgtgcgattgcaatgacaaatcaggatatgattcttgcccatattggcgttgcggctgaccaccataaaaccaacatgagcattcaaacgaaattaacggctgaagtgatcgcaaaaaagcaaatgattattgctggcgatgatgaaatccactgcaaagagccgaattgcccacttggcgcagccgtcatcgcccctttaattatccgggctgaagtggtaggcacacttaaattttattttcattcaaaaaaagaaattacggaattagagacggaaatgctttctggtttaaccaatttgcttagcagccagctagagttggctgaagccgaccgggcgtatcaacttgccaaagaagcagaaatcaatgcgctacaagcgcaaatcagcccccattttttatttaatacgttaaatacagtcatttccttgattcggatcgagccaatgaaagcaaggacgatgctccattcgttagcgcaatttttacggcaaaatgtctcggcgacgacgacaaagcttcattctcttgcagaagagctccaccatataaaggcttatttatcgattgaagaagtccgctttgaaggccggctaactgtccagtataagattgatgagcggtttttgcatgtatcgattccgccgctaacgttgcagccactcgttgagaacgcgatgaagcatggttttaaaaataaacgctctgattgtgtgctaatcatttctgtgcaagaacaaggggaagatgtcgttctttctgttcaagataacggggcagggtttgatcctgacaaactgaaaaaactaggaaatgaacttcctgccacagacagcggtacaggcattggcctctacaacagcaataaacgattgcaaatgatgtatggccctgaagcgtcattggcattttcagcccagcctggtcggggaacactcgtccgtttccgaattccaaaattggctagaaaggacagggagcaccatgaacatgaagaacaaaccgattcgcacgctggtcgctga

SEQ ID NO: 14820 - protein, 597 aa, Bacillus clausii KSM-K16
MFELLLLMLERLGLIVMLAFIATRMRFFRVMVKSTRLTRKQTWTAILFFGAFGIIGTYSGVTFQAESLVLQRITFGIQEDAAIANFRVIGVVLAGLFGGYKVGLSAGLIAGVHRMLLGGFTAFSCGIATIVAGLFAAFYRSKNPNAVNRPLSIFLLGALAETVQMGLIALLANPTAAAISLVQTIGLPMIVANGIGCTLFLLIIQSVTKEEQKAGALQAQKSLRIAEQTLAHFKHGLSSHSAKEVCDILYKELNACAIAMTNQDMILAHIGVAADHHKTNMSIQTKLTAEVIAKKQMIIAGDDEIHCKEPNCPLGAAVIAPLIIRAEVVGTLKFYFHSKKEITELETEMLSGLTNLLSSQLELAEADRAYQLAKEAEINALQAQISPHFLFNTLNTVISLIRIEPMKARTMLHSLAQFLRQNVSATTTKLHSLAEELHHIKAYLSIEEVRFEGRLTVQYKIDERFLHVSIPPLTLQPLVENAMKHGFKNKRSDCVLIISVQEQGEDVVLSVQDNGAGFDPDKLKKLGNELPATDSGTGIGLYNSNKRLQMMYGPEASLAFSAQPGRGTLVRFRIPKLARKDREHHEHEEQTDSHAGR

SEQ ID NO: 14821 - DNA, 1776 bp, Staphylococcus epidermidis RP62A
  CDS (1)..(1776): transl_table=11
atgcttaatttatttattttattacttgaacgcgtgggattaattattttactcgcatatatactcatgaatattaatcattttaaaacaatgatgagcgaacgtgacaaatggcgttcaaaattccaactaatcattatttttggtatattctctatgatttcaaattttacaggaattgaaatagaaaatggccatatcgtatctggtgatatttattaccacttaagcaaagacgcctcaatggccaatacccgtgtattaacaatcggtgtttctggtctaataggtggaccgtgggtagctataattgtaggcattatttcaggattatgtcgtttatatattggcggggctgacgcatatacctatcttatttcatccatagttatcgctatcatatctggttactttggtcatcaaacaataaaacaaaatacatatccgtccattaaaaaaggtgctattatcggtgcaataactgaaattattcaaatgggctgtatattattatttacaaataacctacatcacgcaattacattagtcagttttatagcactaccgatgattatcattaatagtttaggtacagccatatttttaaccatcattttgtcgaccatcaagcaagaagaacaaatgcgtgcagtccagacgcatgatgtattacaactcgctaacgaaacactaccttactttcgatctggacttaatgaaaaatcagcccaacaagctgctgaaattattttaaaattaatgcaagtgtcggcggtcgctattacaaataaaaaagatattttaacacatattggtgcaggcagtgaccatcacgtagcacgtaaagagataattactgatttatctaaagaagtgattcaatctggaaaattaaaagtcgctcatacgagagaaggaattggatgtcaccatcctaattgccctcttgaaggagccattgtcgtccctctttatatacataatgaagtcgcagggactttaaaattttatttcacagataacaatattatttcaacttcagaccaacagctcgcaaaaggtctcgccaatatattttcttcacaactagaactaggtcaagctgaaatgcagggacaattgttgaaagacgctgaaattaaatcattacaagcacaagtcaatccacatttcttttttaatgctattaacactatatcagcactagtaagaattgatagcgaaaaagcacgacgtttactgattcaactcagtcagttcttccgctctaatcttaatggtgcacgtaataatacgattactttacaaaaggaattacaacaagtagcagcatatttatccttagagcaagcgcgctatccaaatagatttaacatacactatcgaattgatgatcagtgtcaagatgcgctcatcccaccttttataattcaaatattagtggaaaattctattaaacatgcatttaaaaatcgtaaaaagaataatcatattgatgtggatgttagcatgaagcaagactacttaagtatatctgttcaagataatggtcaaggcataccagctgatcaattagatactattggatatacgacagtaacgtctaccactggtactggtaatgccttagtcaatcttaataaaagacttactggactatttggaacaacatcggcactgaacattcaatcttctcaatcaggcacgactgtaagttgtttaattccatataaatcttctaaggaggaacactttaatgaaagcgttaatcgttga

SEQ ID NO: 14822 - protein, 591 aa, Staphylococcus epidermidis RP62A
MLNLFILLLERVGLIILLAYILMNINHFKTMMSERDKWRSKFQLIIIFGIFSMISNFTGIEIENGHIVSGDIYYHLSKDASMANTRVLTIGVSGLIGGPWVAIIVGIISGLCRLYIGGADAYTYLISSIVIAIISGYFGHQTIKQNTYPSIKKGAIIGAITEIIQMGCILLFTNNLHHAITLVSFIALPMIIINSLGTAIFLTIILSTIKQEEQMRAVQTHDVLQLANETLPYFRSGLNEKSAQQAAEIILKLMQVSAVAITNKKDILTHIGAGSDHHVARKEIITDLSKEVIQSGKLKVAHTREGIGCHHPNCPLEGAIVVPLYIHNEVAGTLKFYFTDNNIISTSDQQLAKGLANIFSSQLELGQAEMQGQLLKDAEIKSLQAQVNPHFFFNAINTISALVRIDSEKARRLLIQLSQFFRSNLNGARNNTITLQKELQQVAAYLSLEQARYPNRFNIHYRIDDQCQDALIPPFIIQILVENSIKHAFKNRKKNNHIDVDVSMKQDYLSISVQDNGQGIPADQLDTIGYTTVTSTTGTGNALVNLNKRLTGLFGTTSALNIQSSQSGTTVSCLIPYKSSKEEHFNESVNR

SEQ ID NO: 14823 - DNA, 1683 bp, Vibrio fischeri ES114
  CDS (1)..(1683): transl_table=11
atggaattggtgttttcgttattacaacaattaagtgtctatctggttcttgcttacctattgagtaaaacccctctcttcttaccaattacaacgatttctgctcgttggagtcaccgttttctttgttacatcattttttctggcttctgtattttaggaacctatttcgggctctctattcaagatgccattgcaaatacacgagctattggtgcagtaatgggtggcgttttagggggaccatttgttggattctttgttggtttaaccggagggctacaccgttattccatgggtggctttaccgatcttgcctgtgcaatatcaactacagctgaaggcttacttggtggtttatttcatctttattttgttagaaaaaaccagattgaacaattatttagacctcgaactgtattaatgattgccttcattgctgaattacttcaaatgacaattattttggcagtagcaaaaccttttgaccaagcttatgcacttgtctcatcgattgtattaccaatggtagtcgctaactctattggcgcagctatgtttatgagtatcattcaagatagaaaagccatttacgaaaaatactccgcagccttctcaaataaagcactcaatattgcccaacgttcggttgggattttaagccaaggcttcaaccaagaaaacagcaaacaaatagcgaaaatcatctatgaagaaactggtgttggtgcggtttcaattactgatagagagaaaattttagcctttatcggtattggtgatgaccaccacttacccgatacaccaatcgcttctgactacacaaaaaaagcgattaaacgtagcaaagttatgtacattgacggtgatgaacacccttaccaatgttctatttgtgaaaaatgtaaactaggatcggcacttgttattccacttatcggcgcaaataatgaggtaattggcaccattaagctgtacgaaccaaaacggaaactattttcttatatcaatctaacattaggcgaaggtatcgctaaattactctcaaaccagatcttaacgggacgttatttacaacaacaatctttacttactcaagcggaacttcgtgtacttcaagcccaagtaaacccacattttttatttaatgcactaaatactattagtgcagtgatccgccgtgatccaactcgcgcaagagaactgattcagcatttatcgcaatttttccgcatgaacttgaaacagaacattgaacaagtcaccttaagagaagaactgcatcatgtacaatcttatttagaaattgagttagctcgtttcgccgatcgtttaaccgtacatatggatattgatgaaagtctatacggtttgaaattgcctacatttaccttgcaacctcttgtcgaaaacgccattaaacatggaacatctaacttatttgaagcgggtgaaataacaataaaagcctacccttcacatcatcaaattattttagaagtcattgacaatgcagggttatatactgaacaaaactcaaataatggtttaggtaccaccattgtcgacaaacgtttaaagaaccagtttggtgataattttggcttaaccatgagctgtattagtaatcaacaaacaaaagcaacgattcacctaccaatagagaataaaaaccatgcttaa

SEQ ID NO: 14824 - protein, 560 aa, Vibrio fischeri ES114
MELVFSLLQQLSVYLVLAYLLSKTPLFLPITTISARWSHRFLCYIIFSGFCILGTYFGLSIQDAIANTRAIGAVMGGVLGGPFVGFFVGLTGGLHRYSMGGFTDLACAISTTAEGLLGGLFHLYFVRKNQIEQLFRPRTVLMIAFIAELLQMTIILAVAKPFDQAYALVSSIVLPMVVANSIGAAMFMSIIQDRKAIYEKYSAAFSNKALNIAQRSVGILSQGFNQENSKQIAKIIYEETGVGAVSITDREKILAFIGIGDDHHLPDTPIASDYTKKAIKRSKVMYIDGDEHPYQCSICEKCKLGSALVIPLIGANNEVIGTIKLYEPKRKLFSYINLTLGEGIAKLLSNQILTGRYLQQQSLLTQAELRVLQAQVNPHFLFNALNTISAVIRRDPTRARELIQHLSQFFRMNLKQNIEQVTLREELHHVQSYLEIELARFADRLTVHMDIDESLYGLKLPTFTLQPLVENAIKHGTSNLFEAGEITIKAYPSHHQIILEVIDNAGLYTEQNSNNGLGTTIVDKRLKNQFGDNFGLTMSCISNQQTKATIHLPIENKNHA

SEQ ID NO: 14825 - DNA, 1677 bp, Fusobacterium nucleatum subsp. vincentii ATCC 49256
  CDS (1)..(1677): transl_table=11
atgaatatacaatttatttcacatttaatcagcaatattggttgttctgccataattgcatttttctttatcagaattgataaagcaaatatcattattaaaagcaatgctaaaactaaaaaagatataatagctctatcttttttcttctcattactttctataagtggaacttatataggattaaattttaatggtgctatactaaatactagaaatgttggtgttatagcaggaggtattttaggtggtccttatgttgcaataattacaggacttgtagcaggaatacatagagcctttgttaatcttggaagagaaactgctataccttgtgccattgcaacaataacaggtggatttttaactgcttatgtacatcgttttattaaaagtaaggataaaatattttttggcttttttttagcttgtgtagttgaaaatcttagtatgggcttaattttgattatacttaaagataaaattttagctcaaaatatagttgcaaatttttatgttcccatggtctttatgaattctattggatctagtgtgcttattttactcgttgaagatattatccaaaaaagtgaacttatagcaggtagacaagccaaacttgctttggaaatagcaaataaaactttacctcattttagagaaactgaaaatcttagtgaagtatgcaaaataattgctgaagatttaggagcaaaagcaactgtgattactaataaaaaggaaattattgcaggtttttcttttgataaagataaaataaaaaaagcagatataaaaagtaataatactagaaaagttttaaaaactggtgaaacgatgttagttataaaagaagatgatgaaattatagaagattttttagatatttcaccacatataaaatcttgtattattttgcctttaaaggaaaaaaatgatatcagtggaactttaaaaattttctttgatacagcagagaaaattacagataaaaatagatatttaatgataggtttatcgcatcttatatcaactcaaatggaaattagtaaggttgaaaatttaatatctttacttaaatattctgagttaaaagccttacaatctcaaataaatccacactttttattcaatgtattaaatactatgacctctcttatcagaacaaaccctgaaaaagctagggaggtaacaatagatttatccaattatttaagatataatttagataacaatgtaaaaagtgtagagcttataaaagaactaaatcaagttaatacttatattaaaattgagaaggtaagatttggagataaattaaatataatttatgatgttgatgaaagtctatataattttcaaattcctagtttaattattcaaccacttgttgaaaatagtataaaacatggaattttaaagaaaagggataatggttgtgtcaaaataattataaagaagattggtaaagatatagaagttatcattgaagatgatggaataggtatagaacaaactataatcgataatttagataaacaaataaaagaaaatatagggcttaaaaatgtacatcaaagattgaaacttctctatggagaaggacttaatataaaaaaattggagcagggaacgagaataaaatttaaaatacttggaggtgttaaatatgattaa

SEQ ID NO: 14826 - protein, 558 aa, Fusobacterium nucleatum subsp. vincentii ATCC 49256
MNIQFISHLISNIGCSAIIAFFFIRIDKANIIIKSNAKTKKDIIALSFFFSLLSISGTYIGLNFNGAILNTRNVGVIAGGILGGPYVAIITGLVAGIHRAFVNLGRETAIPCAIATITGGFLTAYVHRFIKSKDKIFFGFFLACVVENLSMGLILIILKDKILAQNIVANFYVPMVFMNSIGSSVLILLVEDIIQKSELIAGRQAKLALEIANKTLPHFRETENLSEVCKIIAEDLGAKATVITNKKEIIAGFSFDKDKIKKADIKSNNTRKVLKTGETMLVIKEDDEIIEDFLDISPHIKSCIILPLKEKNDISGTLKIFFDTAEKITDKNRYLMIGLSHLISTQMEISKVENLISLLKYSELKALQSQINPHFLFNVLNTMTSLIRTNPEKAREVTIDLSNYLRYNLDNNVKSVELIKELNQVNTYIKIEKVRFGDKLNIIYDVDESLYNFQIPSLIIQPLVENSIKHGILKKRDNGCVKIIIKKIGKDIEVIIEDDGIGIEQTIIDNLDKQIKENIGLKNVHQRLKLLYGEGLNIKKLEQGTRIKFKILGGVKYD

SEQ ID NO: 14827 - DNA, 1734 bp, Dechloromonas aromatica RCB
  CDS (1)..(1734)
atgttcttcgaatcaattacgctcagtctgaccctgctgcagcagacttgcgtttatctggtgattgcgtatctgctcagccggacccgcatcttcatcccgctgatgcacgtcaccattcgcctgccacaccgggcgacctgctacgtggtgttctcgctgttctgcatcatgggcacctacctcggcctgaagatcgacgattcgattgccaacacgcgtgccatcggcgccgtgctcggcggtatcctgggcggcccgtcggttggcctggcggtcggtttcaccggcgggctgcatcgctattcgctgggcggtatttcggcccaggcctgcatgatctcgaccatcatcgaaggcctgatcggcggcatgttccaccgtcacatgatgcagcagggcaaggttggtgccatttttcagccgctaccggtggcgctggtcaccttcgtggcagaaatcgcccagatgctgacgctgttgttgctggtcaaacctttctcggtggctttccacctggtcgaacagatcgccgtcccgatgtgcctcgccaacgccctgggggccggactgttcatgcgcattctgctcgatcgccggcagttgtacgaacggcaatcgacggtgttctcgaccaaggccctggccatcgccgcccgggtcgagggggtcttgcgcgatggcttcaacatcgataccagtgcccaggtggcgcaggtgctgtatgaggaaaccggtgtcggcgccgtggccattaccgataccgaacacctgctggccttcatcggcatcggcgccgaccaccatatcccgggaacgccgatcagttctgtgctgacccgccaggcaatcgagcgtaacgaggtggtttacgccgacggcaatgaaatcgcctatcgctgctcgatcaacccgaaatgcccgctcgccgcctcgctgatcatcccgctggtcggcgaagatgggcgggtgatcggtaccatcaagctctacgaaccgcgcagccgtctgttctcgaccatcaaccggacgctgggcgaaggcatcgcccggttgctctccaatcagatcctggccggccgctacatgcgccagcgcgaaatgctggcgcaatcggaaatcaagctgttgcatgcccaggtcaatccgcactttctgttcaatgcgctgaacacgctatcggccgtcatccggcgcgatccggaaaaggcctgtcatctggtgctcaatctgtcgaccttcttccgcaagaacctcaagcggccgagcgaggaggccgcccttagcgaagaagtcgcccacgtcgcggcgtatctggaaatcgaacaggcccgcttcctcgacaagctggaggtcgagttcgacattccggaccatctcaagcatgtccgcatgccggcattttcattgcaaccggtggtcgaaaatgcgatcaaacacggcacctcgcaactgctgggcgttggccgggtgcgtatttcggcacgggaagagggcgatgatctgctgctctgcgtcgaagacaatgccggcctctatgtgccatcgaccgacagcggcggactcggcgtcaatctggttcgtcgtcgtatcgtcaatcgctatggctcgcgttacggtatggaaatcgaatgtgaacccgaagtttgcacgcgagtgaccctccgcttgccgatcccgcccagcgactgtcggcccatccaaggagcaagccttgaacgtattgatcattga

SEQ ID NO: 14828 - protein, 577 aa, Dechloromonas aromatica RCB
MFFESITLSLTLLQQTCVYLVIAYLLSRTRIFIPLMHVTIRLPHRATCYVVFSLFCIMGTYLGLKIDDSIANTRAIGAVLGGILGGPSVGLAVGFTGGLHRYSLGGISAQACMISTIIEGLIGGMFHRHMMQQGKVGAIFQPLPVALVTFVAEIAQMLTLLLLVKPFSVAFHLVEQIAVPMCLANALGAGLFMRILLDRRQLYERQSTVFSTKALAIAARVEGVLRDGFNIDTSAQVAQVLYEETGVGAVAITDTEHLLAFIGIGADHHIPGTPISSVLTRQAIERNEVVYADGNEIAYRCSINPKCPLAASLIIPLVGEDGRVIGTIKLYEPRSRLFSTINRTLGEGIARLLSNQILAGRYMRQREMLAQSEIKLLHAQVNPHFLFNALNTLSAVIRRDPEKACHLVLNLSTFFRKNLKRPSEEAALSEEVAHVAAYLEIEQARFLDKLEVEFDIPDHLKHVRMPAFSLQPVVENAIKHGTSQLLGVGRVRISAREEGDDLLLCVEDNAGLYVPSTDSGGLGVNLVRRRIVNRYGSRYGMEIECEPEVCTRVTLRLPIPPSDCRPIQGASLERIDH

SEQ ID NO: 14829 - DNA, 1731 bp, Rhodospirillum rubrum
  CDS (1)..(1731)
atgaccatcggaccgctcgccctcgtcatctcgctgtcccagcagatgtgcgtttatctggtcgtggcctatctgctcagcaagacgccgctgttcatccccttggtccatgtgaccatccgcctgccgcataaggcggcctgctacgccattttctcgttgttttgcatcatgggcacctatttcggcctgcgcatcgatgattcgatcgccaatacccgggcgatcggcgcggtgctcggcggaatgctgggcgggccctcggtcgggctggcggtcgggctgaccggcggcctgcaccgttattcgatgggcggcttcacggccttggcctgcgccatttcgacaacggccgaagggctgatcggcggcctcgtccaccgctatctggtcagtcgcggccagaccggcaagctgttccagccgctggtggtcgggctggtgacgctgttcgccgaggtctgccagatgctgatcatcattctggtcgcccggccggcggtcaacgccgtgcatctggtggaaaccatcgccctgccgatgctggtggccaattcggtgggggcggcgatgttcatgaccatcctgcttgaccgccggacgatgtttgaaacccaatcgagcgtgttctcggccaaggcgctgaagatcgccgcccgcgccgaaggagcgctgcgtagcggcttcaaccgcgaaaactccatgcgcgtcgcccgcatcatctatgaggagaccggcgtcggcgccgtggcgatcaccgatcgcgacaagatcctggccttcatcggcatcggcgacgaccaccataagcccggcatggcggttacctcgctgcagaccctggaatcaatccgcgagaaccgggtgatgtatgccgatggcaatgaggtggcctatcaatgctcgatcagcccgacctgccccttgggcgccgccctggtcatcccgctggttgacgagggcgagcaggtgatcggcaccatcaagctttacgagcccaaaacccggctgttttcgacgatcaatcgcaccttgggcgagggcgtggcccggttgctgtcgacgcagatcctggccgggcgctatgagcagcagcgccagttgcttgcccaatccgaaatcaagctgctccacgcccaggtcaatccgcatttcctgttcaacgccctcaacacgctttcggcggtgatccgccttgatcccgaccatgcccgccatctggtgcaaagcctgtcgaccttctttcgcaagaacctcaagcggaccagcgaacaggtgacgctcaacgacgaggtcgagcaggtcagcgcctatctggaaatcgaactggcgcgctttggcgatcggctgtcggtggatttcaatgtgcccgccgatttgggaaccgccaccttgcccaccttttcgcttcagccgctggtcgaaaacgccatcaagcatggcaccgcccaattgctgggcgatggacggatcggcgtttcggccgagcgccagggcggcgatctggtggtgcgggtggaagacaacgccgggctttatgaacggcggcccggcggcgacggcctggggatgaatttggtcgaccggcggatccgggcgcgctatggccagggctatggtctgagcgttgagtgcgagcgcgatgtggtcacccgcgtcatcttgcgtgtgccgtttgacccaagccccgccggggtcgctagccccgctttcgaaaaggtcggcccgtga

SEQ ID NO: 14830 - protein, 576 aa, Rhodospirillum rubrum
MTIGPLALVISLSQQMCVYLVVAYLLSKTPLFIPLVHVTIRLPHKAACYAIFSLFCIMGTYFGLRIDDSIANTRAIGAVLGGMLGGPSVGLAVGLTGGLHRYSMGGFTALACAISTTAEGLIGGLVHRYLVSRGQTGKLFQPLVVGLVTLFAEVCQMLIIILVARPAVNAVHLVETIALPMLVANSVGAAMFMTILLDRRTMFETQSSVFSAKALKIAARAEGALRSGFNRENSMRVARIIYEETGVGAVAITDRDKILAFIGIGDDHHKPGMAVTSLQTLESIRENRVMYADGNEVAYQCSISPTCPLGAALVIPLVDEGEQVIGTIKLYEPKTRLFSTINRTLGEGVARLLSTQILAGRYEQQRQLLAQSEIKLLHAQVNPHFLFNALNTLSAVIRLDPDHARHLVQSLSTFFRKNLKRTSEQVTLNDEVEQVSAYLEIELARFGDRLSVDFNVPADLGTATLPTFSLQPLVENAIKHGTAQLLGDGRIGVSAERQGGDLVVRVEDNAGLYERRPGGDGLGMNLVDRRIRARYGQGYGLSVECERDVVTRVILRVPFDPSPAGVASPAFEKVGP

SEQ ID NO: 14831 - DNA, 1716 bp, Oenococcus oeni PSU-1
  CDS (1)..(1716)
atgcagcgggtcggaactattttgattttggcttttttattggttaatgttcctttctttcgtcgtcttttaccaaaactcgatcaaatcagtacgaaattttatttaattcttatttttgcgggttttgccctgttctccaacttgaccggcgttgaaattacaaaaaacaataaccttgtttcaacaacttttcttaccggtttgccgtcgagcgattcaatagcgaatacgcgaactctggtaattacagttgccggtttagttggtggaccggttgttgggacaataactggtttaattgctggtgttcatcgtgtttttcaagggaatggagctgatagtttttatattttcagttcaattattatcggttggatctctggcatgatcggccacagctattcaaagagacgaacctatccgacagctggggtcgcagcgataaccggacttggcatggaatttatccaaatgctgtttattcttgttttcagtgtttccggtctacaacttgtgaaattaatttttctgccgatgatgattttgaacagttttggaacctgggtttttatgtcgattattagtgcttacctccatcaagaagaacaattaaggtcagttcagacacatgatattctcgaattggcgaacaaaaccctgccttatttcagttccggtttgactgaaagttcggcaatgcaggcagcaacgattattcagcattatacgaattttgatgcaatcggaatcactgattcgcaaaatgttttggcacatgtcggtccaggttctgatcatcacgtccctgagcgtcatgtggttacagatctttcaaaaagagtcttggcttccggaaagatggaagttgccaattccaaagaaatgattggctgtccgatccctggttgtccactggcagctgcgattgtaattcctttaatcgtagataaacaagtggttgggaccttaaaaatgtattttaccgatgcaagaaaattgacaccggtcgaagaacaattggcaaccggtcttgcatcaattttttctagtcaattggctcttggattggctgaagagcaatcgaaactcgttcgcgatgccgaaattaaatctttacaggcacaggttaatccccacttctttttcaatgcgatcaacactatttcggctttaatgaggactgatgccactcaagctcatgatttattattagagcttagtacttattttcggacgaacctgcaaggagcccgtgaaacgggaattacccttaaacaagaagaggcacacgttcaagcatacttgtctctggaacaaagtcgttttccgaataagtacagtgttaacttttcggtaaaaagcaatgaattaaatttattaccgcctttcacaattcaaattttggtcgaaaacgccattcgtcatgctttcagcggccgcaagaagaataattgtgtcaatgttgtcgtcactgaaaagagaaattgtttacatattctggttagtgataacggaaacggaattcctcagaaactattaccacatctgggccaacgggtagtggattctattcagggtagcggaacggcgcttgaaaatttgaatcgccgcttaaccggtctttatggaccgaaatctgctttgaaaattaatagtagctctaagggaaccgacgtaaaaattgtcattccaagaaaggtgaaaacgatatga

SEQ ID NO: 14832 - protein, 571 aa, Oenococcus oeni PSU-1
MQRVGTILILAFLLVNVPFFRRLLPKLDQISTKFYLILIFAGFALFSNLTGVEITKNNNLVSTTFLTGLPSSDSIANTRTLVITVAGLVGGPVVGTITGLIAGVHRVFQGNGADSFYIFSSIIIGWISGMIGHSYSKRRTYPTAGVAAITGLGMEFIQMLFILVFSVSGLQLVKLIFLPMMILNSFGTWVFMSIISAYLHQEEQLRSVQTHDILELANKTLPYFSSGLTESSAMQAATIIQHYTNFDAIGITDSQNVLAHVGPGSDHHVPERHVVTDLSKRVLASGKMEVANSKEMIGCPIPGCPLAAAIVIPLIVDKQVVGTLKMYFTDARKLTPVEEQLATGLASIFSSQLALGLAEEQSKLVRDAEIKSLQAQVNPHFFFNAINTISALMRTDATQAHDLLLELSTYFRTNLQGARETGITLKQEEAHVQAYLSLEQSRFPNKYSVNFSVKSNELNLLPPFTIQILVENAIRHAFSGRKKNNCVNVVVTEKRNCLHILVSDNGNGIPQKLLPHLGQRVVDSIQGSGTALENLNRRLTGLYGPKSALKINSSSKGTDVKIVIPRKVKTI

SEQ ID NO: 14833 - DNA, 1740 bp, Pediococcus pentosaceus ATCC 25745
  CDS (1)..(1740)
atgttaaatttaaccgtacttttgtttgaaagagctggattaattattattttggctttttttctagtaaatattcctcaatttaggaaattactttttcgaaaagattggtcaacaactttccaattatttgcgattttttctatttttacgattgtagcaaatttaattggtgttgaacttcgacctgataatagcattcaattcaaatcccttctgcagaatgttacccctggagattctgtagctaatattcgaattttaacggttacagtttcaggaattattggcgggccgctggttgggggtggagtaggcttagtcgctggacttcaccgaatgttgcaagagtcgctaacaaccgacgcccttttttatattcccagttcgatgataattggaattttagccggtttttttgctaagaaaaaacaacatcgctttgcaacaatgaaagtgtttgatggttttttagtaggacttttaatggaagcaatccaaatgctgtttattttactatttagtccgacaggttggactttggtaaaatatattgcaataccaatgatgctagtaggtgctttagggacttcggttttcttatcaattatcacgctttactttcggcaggaagttgatactcaagctacccaaactaaatcaatttttcagttagctttaaaaactttgccagtttttcgtcaagggttaaatcaagaagccgctaaaaaggctgctagtttaatattggaatatacaaattttgatgcggttggtattacagatgaatctaagattctggcttttgcggggatgggaagtgatcaccatatcacaggtgcttctatcttgacggaattatctgaagaggcggttaaattgggtgaagttcaaattggaaataatgctcatgagattaattgccctgtaaaaagttgtccattacactcggccgtcgtagtacctttaatcattaaaggtaaagcagtaggtagtttgaaactctactatgtagaagaatggcgattaagtccagtggaaattcaattaggaacagggctgggagaaatattagcaatgcagataatgttaggagaaatcgagcatcaatcagaattagtgcgggatgccgaaataaaatctctccaatcgcaagtcaatccgcactttttctttaatgcgataaatacaattgtggcagttatgcggtacgacagtgaccaagcacgtgaattactgatccaactcagtacttattttagggcaaatttaacggggattagagaaacaaccattccgttgtatcaagaattcaaacatgttaaagcctatttaatgcttgaacaaacacgttttccaaatcgatttgaaattttgtttcaccagaaggtttcggaaaatgtaatgatacctccatttagcatccaaattattgttgaaaatgcccttaagcatgcctttaatagtcgaaaaaagggcaatatagtttcaattaatgttgaacagattaaacaaagacttaaaattgaaattactgacaatgggcaagggattgataaaagtattattgataaattaggaaaacagacggtaagttctgtaagtgggagtggaacggcattacaaaatcttaatgtgcgcttgatgggtctttatggtaaagatgccgaactaaaaataagcagtgatcaaaatggaacccaggtggtaatccaaattccatataaggaacaggtgtaa

SEQ ID NO: 14834 - protein, 579 aa, Pediococcus pentosaceus ATCC 25745
MLNLTVLLFERAGLIIILAFFLVNIPQFRKLLFRKDWSTTFQLFAIFSIFTIVANLIGVELRPDNSIQFKSLLQNVTPGDSVANIRILTVTVSGIIGGPLVGGGVGLVAGLHRMLQESLTTDALFYIPSSMIIGILAGFFAKKKQHRFATMKVFDGFLVGLLMEAIQMLFILLFSPTGWTLVKYIAIPMMLVGALGTSVFLSIITLYFRQEVDTQATQTKSIFQLALKTLPVFRQGLNQEAAKKAASLILEYTNFDAVGITDESKILAFAGMGSDHHITGASILTELSEEAVKLGEVQIGNNAHEINCPVKSCPLHSAVVVPLIIKGKAVGSLKLYYVEEWRLSPVEIQLGTGLGEILAMQIMLGEIEHQSELVRDAEIKSLQSQVNPHFFFNAINTIVAVMRYDSDQARELLIQLSTYFRANLTGIRETTIPLYQEFKHVKAYLMLEQTRFPNRFEILFHQKVSENVMIPPFSIQIIVENALKHAFNSRKKGNIVSINVEQIKQRLKIEITDNGQGIDKSIIDKLGKQTVSSVSGSGTALQNLNVRLMGLYGKDAELKISSDQNGTQVVIQIPYKEQV

SEQ ID NO: 14835 - DNA, 1731 bp, Geobacter metallireducens GS-15
  CDS (1)..(1731): transl_table=11
atgctgcaccttctcgtgaatcttctggagcgcctcgggctgttcgccatcgcgttcatcctggtcatgcgcttcgccatcgtcaagcggttcctgatcggcaaggcgagccgctacgaaaagctcaccctgtcggttctcttcggcttcatcggcattgctgggacctacatgggggtgccgatccagaacgccatcgccaattcgcgggtggtgggggtggccctcggggggatcctcggcggccccctggtcggtttcggggccgggctcatcgccggtgggcaccgttttctcatcgatgtggggggcttcacggcgacggcctgcggggtggcgaccatcgcggagggggttgccggcggcctcatctaccaccgcctcaagagggggcagttcgatcccgccgtggcctttatcacgggggtcgcggtggaaaccctccagatggtgatcctccttgtcatggcgaagcccttcaccgcggcggtgagcctggtgagtgtcatcggcttccccatgatcctggtgaactccatcggcttggccctgttcgtggaactggtgtcatcggtgttccgggagaaggagcgcttcgccgcggtccaggcccagacggccctcaatatcgccctgcgcacgctccccttcctccggggggggctcaccgaggggtctgccgcggcaacggcccggatcatccgggagatgactgatctcgatgcggtggccatcaccgacgaggccgccatcctggcccacaccggggccgaggaggatcaccaccgccccggcttgccgcttctgaccgcttccaccaggtctgccctcgcctcgggggagatcaccacccccctgacccgtgacgacatcggctgtacccacgaagggtgccggctcggctcggcgatcatcgttcccctcaagaagcgggagcgcaccgtgggggccctgaagctctaccggctcaaggaagggggaattacccccctcgacatggagctggccaacggtcttgcccacctcttttccaaccagctggagatctcggagctggaggcccagcgaaaactcgtccgggaggcggaaatccgggcgttgcaggcgcagatcaacccccactttctcttcaacaccatcaacaccatcatcagctacacccggaccagtcccgagaccgcttccgacctcctggtgaagctcgccgatttcttccgcaggaacatcaaccccgggggggacagcgttcccctggcgaccgagcttgaacactgccgcgcctacattgccatcgaaaaggcgcgcttcgaggatcggctcagggtggtgttcgatgtcgacgaggaggccctgggctgcaaacttcccaccctgaccctccagcccctcgtggagaatgccctgaagcacggcatcctcccccgcgaggaggggggagagatccgggtcggtgcccaccgggaagggggcgtggtcaggatcgtggtgggggataatggggtggggatgcccccggagcaggttgcccgcctcttttccggggaatcgagtcagctcccgacggagggggcggggattgccctgaacaatgtcaatgcccggctctcggcgctgtacgggccggagcatgccctgcgggtggaaagcaccccgggagcggggaccaccgtgtcattcacggtgccccaaggggggaggggggagtatgctcatgagagtcttcatcgttga

SEQ ID NO: 14836 - protein, 576 aa, Geobacter metallireducens GS-15
MLHLLVNLLERLGLFAIAFILVMRFAIVKRFLIGKASRYEKLTLSVLFGFIGIAGTYMGVPIQNAIANSRVVGVALGGILGGPLVGFGAGLIAGGHRFLIDVGGFTATACGVATIAEGVAGGLIYHRLKRGQFDPAVAFITGVAVETLQMVILLVMAKPFTAAVSLVSVIGFPMILVNSIGLALFVELVSSVFREKERFAAVQAQTALNIALRTLPFLRGGLTEGSAAATARIIREMTDLDAVAITDEAAILAHTGAEEDHHRPGLPLLTASTRSALASGEITTPLTRDDIGCTHEGCRLGSAIIVPLKKRERTVGALKLYRLKEGGITPLDMELANGLAHLFSNQLEISELEAQRKLVREAEIRALQAQINPHFLFNTINTIISYTRTSPETASDLLVKLADFFRRNINPGGDSVPLATELEHCRAYIAIEKARFEDRLRVVFDVDEEALGCKLPTLTLQPLVENALKHGILPREEGGEIRVGAHREGGVVRIVVGDNGVGMPPEQVARLFSGESSQLPTEGAGIALNNVNARLSALYGPEHALRVESTPGAGTTVSFTVPQGGRGEYAHESLHR

SEQ ID NO: 14837 - DNA, 1683 bp, Exiguobacterium sp. 255-15
  CDS (1)..(1683): transl_table=11
gtgcttgagcaaatcccgtttttactcagccgtttaggcatgttagccttattggcttttttattgtcgcaatggcggatatcacgccatttgtttcaaacgtcatcgcgccgcagtcatcgttttattttgctgggtgtgtttgtcgtatcgggtattctgatgaactatgccggaatcggtctttcgacggacgaaacgattgatccgttgatcggattagccgtttcaccggaacagtgggttatcgatacgcggttgacgatcatcgtcacgagcggtctgctcggtggtccgctcatcggcggtctgaccggagtactcgtcggatttcaccgctactatctcggtgcattcggtgcggaatcggcctggatcattgcggtcggaaccggattgttgagtggactgtacagccgccagtggcgcaggaaagacggttattccttgctccaaccgattggtatcgtcttaactgctgtcatcctcgacattggtgtagcattgatgttggcgccggaccaagcccttgtactggaattgacacgtcaagccgtctttccgatgttgtttacgaatgcagtcggaatcagtgtcttcattgcgatcttacggacgcagttgaaaattgagaatgaattgttcgttcgcgaatccgcacgttcctatcgtttattggatgcgattcgtccgttgcgtaaaagtggcatgacggttgatgtcgcccggaaaatcggatcgacaatcttggaagaaacgaaaatcaaccgtgtcgttttacttggaccggatgggattttggccgatgtccggacgggacacgatacagcggatttattccagcatcagacgattttggaatgggtggagacggctgccgtttaccggtcggaagatgagctgacgcgtcaaatcatctcgtttcatcctttacaggtcgaggggaagaaagctggcattgtctgttggtttccggtccatctgttcgatgatacgatggagcgaacgatggaacagttggtggatcttttggcacgcgaacttgtcgttcaccaagaggaacaactgaatcaatttccgaacaccagtattaaaccgatcctgagtccgaactacctcctcgggatcgtcgatgaaatccatcagacggctgatccggataccccggtcaaacaacagctcggagctttgcgacaactgcttacgacagcacgacgactcgacatgtatcccttacgtgaagaattactgaccttaaaatcttacttgtcgctggaaggaatccgccggcatcatccattgacaccggctgcggtcacgattgatttagatatcgaaacggccgttgaagaacattttgtctttccgttgctcgtgacacagcttgtcgataatgcgttacgccatgcctttccccaaagcggtccgtatcaccggattgatgtccgggcatttcaggaagagacacactgggtgcttgaagtgtcggacaacggagtcggcataccggccgaattcttaaaacgctgggagcaggataaaaagacgcaaacgagtaatttgtttttattacgacgtgctcttcaccggcgatacggtgagcaggcggggtgtacgatttattcccgaccgggtggaacacgcctgaaactgacgttgccccttacgaccgatcagatgtaa

SEQ ID NO: 14838 - protein, 560 aa, Exiguobacterium sp. 255-15
MLEQIPFLLSRLGMLALLAFLLSQWRISRHLFQTSSRRSHRFILLGVFVVSGILMNYAGIGLSTDETIDPLIGLAVSPEQWVIDTRLTIIVTSGLLGGPLIGGLTGVLVGFHRYYLGAFGAESAWIIAVGTGLLSGLYSRQWRRKDGYSLLQPIGIVLTAVILDIGVALMLAPDQALVLELTRQAVFPMLFTNAVGISVFIAILRTQLKIENELFVRESARSYRLLDAIRPLRKSGMTVDVARKIGSTILEETKINRVVLLGPDGILADVRTGHDTADLFQHQTILEWVETAAVYRSEDELTRQIISFHPLQVEGKKAGIVCWFPVHLFDDTMERTMEQLVDLLARELVVHQEEQLNQFPNTSIKPILSPNYLLGIVDEIHQTADPDTPVKQQLGALRQLLTTARRLDMYPLREELLTLKSYLSLEGIRRHHPLTPAAVTIDLDIETAVEEHFVFPLLVTQLVDNALRHAFPQSGPYHRIDVRAFQEETHWVLEVSDNGVGIPAEFLKRWEQDKKTQTSNLFLLRRALHRRYGEQAGCTIYSRPGGTRLKLTLPLTTDQM

SEQ ID NO: 14839 - DNA, 1767 bp, Exiguobacterium sp. 255-15
  CDS (1)..(1767): transl_table=11
atgtttgaactcataccctttttactggaacggctcggcatcatgatcattttagcgttcatcctcgcccagtggggaccgacgcggcgtttactgaaacagccggaagccggctggcagtttgggttgctgattctaattttcgccacctatgggattttgagtaattacacgggagtcaaggtcgatttagccaagttcttaccgcacacttggctcgaacaggttgacggtacatcagcaatcgccaacacacggacgatgattgtcgtcatcagcggattgctcgccggtccgatcggtggaacgatcaccggtctcctcgttgggattcaccgctatacacttggcgggtttaccgctttcgcctgcgccctctcgaccgtcgtcgcaggcggtgtcagtggattactccgtccctactggcgcgaccgtctcggcagtcgggcattactgccgatttgcctgacgggttttttaatggttttcgaaatgtcattgattcttctgttttccgacccgttcccggccgccctcgaactcatccagttcatctttcttccgatgaccgtcgtcaacgtcctcggcgtctggctgttcttatcgatcatccgtctcgccgcgcgggaagaggaacacgttcgggcccgtgaagcggaacggtccctgcatatcgcggatttgaccttacctcatttgacacgcggcttaactatccaaaccgcggaagccgtggcagatattttattacaacagacacgcgccgatgcggtctccttgacggatcaatcagtcattttggcacatataggtgtcggcagtgaccatcaccaatccggcgggcactggacgacccgtccgacggagcatgttttgacagacggacaactgaggcttgtcaccgatcgggatgagatcggttgtccaaaagcagattgcccgttacaggcgggcatcattgctccgttaacaatcggcgaaacgacaatcgggacactcaaagtgtattatcctcatcctgaattgctcgacgccgtcgaagtcgaattgatcgaaggactggccaagctcttctcgacccaactcgccctcgggaaagccgagcggcaagccggtctgttaaaggatgctgaaatccgggccctcgaagcacagatccatccgcattttttatttaatgccatcaatacgatttacgcgttatgtcggacagatgtcgaacaggcacggaccttattgctcgaactgtcgacgtttttccgcagcaacctgcagggtgcccgctcgacgaaaattccgctccaaaaagaactggaacatatcgaagcctatatctcactggaagcggcccgttttccgagccgcccgtttgttgatattgatttagaggacgggacggaacaattacttgttccgcctttcgtactccaaccgttgatcgaaaatgccttccagcatgcgtttagtcctggtcaaaccggatatgtcggcgtcacggcctggttaaccgcggatcaactcgttttggaagtcgtcgataacggacgcgggatcgacgcggaacgcctgacacgcctcggtcgggaagtcgttgaatccaacggtaccggcactgcccttttcaatacagccgaacggattaaaagtctgtatgctgaaaacggttcgttccggctgaccagtcaaccgggagaaggtacgaccatcaccatccatctgcccattgaaacaggaaaggaggtttcccatgcgcacgatcctaattga

SEQ ID NO: 14840 - protein, 588 aa, Exiguobacterium sp. 255-15
MFELIPFLLERLGIMIILAFILAQWGPTRRLLKQPEAGWQFGLLILIFATYGILSNYTGVKVDLAKFLPHTWLEQVDGTSAIANTRTMIVVISGLLAGPIGGTITGLLVGIHRYTLGGFTAFACALSTVVAGGVSGLLRPYWRDRLGSRALLPICLTGFLMVFEMSLILLFSDPFPAALELIQFIFLPMTVVNVLGVWLFLSIIRLAAREEEHVRAREAERSLHIADLTLPHLTRGLTIQTAEAVADILLQQTRADAVSLTDQSVILAHIGVGSDHHQSGGHWTTRPTEHVLTDGQLRLVTDRDEIGCPKADCPLQAGIIAPLTIGETTIGTLKVYYPHPELLDAVEVELIEGLAKLFSTQLALGKAERQAGLLKDAEIRALEAQIHPHFLFNAINTIYALCRTDVEQARTLLLELSTFFRSNLQGARSTKIPLQKELEHIEAYISLEAARFPSRPFVDIDLEDGTEQLLVPPFVLQPLIENAFQHAFSPGQTGYVGVTAWLTADQLVLEVVDNGRGIDAERLTRLGREVVESNGTGTALFNTAERIKSLYAENGSFRLTSQPGEGTTITIHLPIETGKEVSHAHDPN

SEQ ID NO: 14841 - DNA, 1686 bp, Desulfuromonas acetoxidans DSM 684
  CDS (1)..(1686): transl_table=11
atggggctgattattgatctgttgcagcagatgtccgtgtttctggtcatcgcctatatttttacgaagtcaccggcgttccgcccgctgaccggtgaaagcctcagccatcgtcataagctgcttctctatgtcattttttccaccttttccattatgggcacctattttggtctgccggtgcaggatgccattgccaacacccgtgccattggcccggtgctggcgggtcttattggcgggcctgtgctcggattggccacaggcctgaccggtggacttcatcgctattttctcggcggatttaccgccttctcctgtggtgtgtcgacgaccgttgaagggctgatcggcggtctggtgtgtctggtgctgctgcgccgtgggcaggcggaacaacgctttaatccgcgtattgccttgttgaccaccctggtcgccgaagggatgcagatggtgatcattctgctgctggcaacgcccaccgaagacgccgtgcaactggtgcaagcgattgccgcgccgatgatcttggctaattccgccggagcggcgttgtttatgagtattatccgcgatcaacggcgcatgtatgatcatttcggcgcactgttctcggccaaggcatttgagttggccgagcgggtgttggagattctcggcgatggcctcaaccataaaagtgcgctggagatggcccaattgattcatcgctggaccggggtcggtgcggtggccatcaccgaccgtgaacaggtgctggcgtttgtcggtcttggtgaagatcaccatctggctgggaatccgatcatgtcgccgttgaccaggcgtgccattgaccagaatcagaccgtgtttgccgatggcgggcgcgagcactatcattgctccatcagtgatcagtgcccgctgagctcggcgttggtggtgccgttgcgtgtggatcgggatgtgatcggcaccattaaactgtatgagccgcggcgcaaattgtttctcaatatcaaccgttctctgggcgagggcttggctgccctgttgtcggagcaactggtccacagccgctatcaggagcagaagacgttgttggcccagtcggaactgaagctggcccaggcccaggtcaatccccattttctgtttaatgcgctgaatactattgtcgccgtgttgcgcaaggatgcggaccgtgcccgtgatctgctgttgcatctgtcgcgcttttttcgcaagaaccttaagcgcaccagtgatatcgcctctctcgaagaggagctggaccatgtgcgttcgtatctgtatatcgaggaggcgcgttttggcgaccgtttgaccgtgaccatggatgttgatccaacgttgatggttctcaagttgccagcgttcaccctgcagccgctgatcgaaaatgcgattaaacatgggatttcgaacattatcggaccgggggagattgcggtgaccggcaggcgaataaagcaggatgtcgagattgtcatttgcgataatgccggcacctgtgccgaccatgaacacagtgatggcctcgggttgcagattgttgataaacggatcaagaacctttatggcccgggatacggcgtcagattgagttgtcttcccggcgaagaaactcaagtgacggtgaccttgccagcgccggaggggaaggaggcagagcaatga

SEQ ID NO: 14842 - protein, 561 aa, Desulfuromonas acetoxidans DSM 684
MGLIIDLLQQMSVFLVIAYIFTKSPAFRPLTGESLSHRHKLLLYVIFSTFSIMGTYFGLPVQDAIANTRAIGPVLAGLIGGPVLGLATGLTGGLHRYFLGGFTAFSCGVSTTVEGLIGGLVCLVLLRRGQAEQRFNPRIALLTTLVAEGMQMVIILLLATPTEDAVQLVQAIAAPMILANSAGAALFMSIIRDQRRMYDHFGALFSAKAFELAERVLEILGDGLNHKSALEMAQLIHRWTGVGAVAITDREQVLAFVGLGEDHHLAGNPIMSPLTRRAIDQNQTVFADGGREHYHCSISDQCPLSSALVVPLRVDRDVIGTIKLYEPRRKLFLNINRSLGEGLAALLSEQLVHSRYQEQKTLLAQSELKLAQAQVNPHFLFNALNTIVAVLRKDADRARDLLLHLSRFFRKNLKRTSDIASLEEELDHVRSYLYIEEARFGDRLTVTMDVDPTLMVLKLPAFTLQPLIENAIKHGISNIIGPGEIAVTGRRIKQDVEIVICDNAGTCADHEHSDGLGLQIVDKRIKNLYGPGYGVRLSCLPGEETQVTVTLPAPEGKEAEQ

SEQ ID NO: 14843 - DNA, 1731 bp, Moorella thermoacetica ATCC 39073
  CDS (1)..(1731): transl_table=11
atggactggtcaatgggcctgcatcttgcggaaagattgagtatggttgccacagcggcttttatcctatctcgtaccccggccctgggacgcatcttatcccggcagcttaccaatcgggacaggctattgctggtccttgtccttggcgggatggggatagttggaacctatgccggtatccccattcacgatgccctggccaactcccgggtggtgggagtgatggtagctggcctgctgggcggtcccttcgtaggggcgggagccggcctgatcgccggcatccatcgctatttaatggggggctttaccgccttcgcctgcggcctggcggcagtagcggaggggaccctcgggggactggtacagcagtgttaccgtcgttcaccggtgccctggcctatggccttcgccgcgggcctggtaggggaaaccatgcagatggtcatcatcctcctgacagcccgcccctttactgaggcctgggctctggttcagattatcggccccccgatgattattgtcaattctattggcgtggccattttcatgtttattgttaaaactgccgccgaacagcaggaccacatcgccgcctgtcaggcccagcgggctctggatattgccaaccagacattacctttcctgcgccatggcttgaaccgggagtcggccgaagaggcggcaaggattatctttaattccattaaagtggccgccgtagctattaccgacaggcaggaaattctggcccatgtgggaatgggcagtgaccaccatcacccgggtatgcctatcatgaccagcgccaccctccaggccatagccaccggagagttgcagctggcccggagccggggtgaaatcggctgccgggagaaggactgtcgtttggcttcggcggtggtggtgcctctcaagaggcgggaagcaaccattggcacgttaaagctttatcacgagcgggagaatagcattaccacggtggacctggaactggcccgggggctggcccacctgttttctacccagctggaactggcagaggtgaaataccaggctcagctacgttcccaggcagaactaaaggtcctgcaggctcagatacacccccacttcctctttaatgccttgaataccattagttccctgatccgtaccagacccgaaaaagcaagggaattgctggcgaaactggccagtttcttccgctatagtttaagaagggacgataaccccattcccctggccgaagagctggcccacgtagattcttacctggctatagaggaagcgcgttttggtaataagctggaggttatccgccaggtggaccccgccaccctggctttccctgtccctgccttcaccctgcaaccggtagtggaaaacgccatcaaacatggattacaacccagaactcaagggggcagggtgatattgaacgccagcgatcggggagcggatgtagaggtcagggtaacggacgacggggtgggtattgccccggaagaaatgaataaaatttttctccctggctacggtcgcggccacggcctgggcctgtctattgttaacgagcgtttaaaggccctttacgggccggaatacgccgtccgggtgaagagtgtccccggccagggtaccgaggtggtcctgcgttttcctaaaaaagttgagcaccgggaggtgaaggaggaagatgacctttaccgccgttgtggttga

SEQ ID NO: 14844 - protein, 576 aa, Moorella thermoacetica ATCC 39073
MDWSMGLHLAERLSMVATAAFILSRTPALGRILSRQLTNRDRLLLVLVLGGMGIVGTYAGIPIHDALANSRVVGVMVAGLLGGPFVGAGAGLIAGIHRYLMGGFTAFACGLAAVAEGTLGGLVQQCYRRSPVPWPMAFAAGLVGETMQMVIILLTARPFTEAWALVQIIGPPMIIVNSIGVAIFMFIVKTAAEQQDHIAACQAQRALDIANQTLPFLRHGLNRESAEEAARIIFNSIKVAAVAITDRQEILAHVGMGSDHHHPGMPIMTSATLQAIATGELQLARSRGEIGCREKDCRLASAVVVPLKRREATIGTLKLYHERENSITTVDLELARGLAHLFSTQLELAEVKYQAQLRSQAELKVLQAQIHPHFLFNALNTISSLIRTRPEKARELLAKLASFFRYSLRRDDNPIPLAEELAHVDSYLAIEEARFGNKLEVIRQVDPATLAFPVPAFTLQPVVENAIKHGLQPRTQGGRVILNASDRGADVEVRVTDDGVGIAPEEMNKIFLPGYGRGHGLGLSIVNERLKALYGPEYAVRVKSVPGQGTEVVLRFPKKVEHREVKEEDDLYRRCG

SEQ ID NO: 14845 - DNA, 1698 bp, Shewanella baltica OS155
  CDS (1)..(1698): transl_table=11
atgtctttgatcctattattgacccaacagatgtcgctgtacttagtgatcgtttacttagtcagtaaaacgccgctgtttaaactgtttgccgaaacctcccctcgtctgccacataagatttttatgtatctgattttttcaagtttctgcatcatggccacctattttggtgaacaaacatcaggtgcgattgcaaatacccgtgctatgggcgctgtgttaggtggattattaggcgggcccgttactggttttctggtaggactaacaggtggccttcaccgctacagtatgggcggctttactgaaatagcctgcgccatttccaccaccttagaaggattatccgctgggatgataagcttctacttaagacgtgcgggtaaaagtgagcttatctacaatccattactcgtttgcctagtgactttttatgccgaaatgatgcaaatgagcatcatcttactggtcgcccgccccttcgatgatgcgtgggagttagtgcgtcaaatcgcgccgcccatgttgttagtcaattccgtgggagcggcactctttatgagcatgatccgcgaccaaaaaactatgttcgataaactttcctccagtttttcaactaaagcattaaagatagccgaacgcagtgtcggactcctatccaaaggatttaacgaagaaagcagcagccgtgtcgccaaaatcgtcatagaagaaaccaatgtaggcgcagtagccatcactgacagggaaaaactgttggcttttattggcataggtgccgatcatcatctgcctggcacgctgatttcatctaagatcaccttagaggcgattaatcaaaataaagtcatgttcgccgatggcgttgaaatgccttactcatgttctatttcaagtaattgtcgtttaggttcgagtctggtgatcccactgcgcagtgataccgaagtcattggcaccattaaactctacgagccgaaaaataaactttttttgaatattaaccgcaccttaggtgaaggtattgcccgtctgttatcaaaccaaattctttatggccgatttgagcaacaacaaaatctgctaactcaagccgaattgaaattactgcaagcgcaggttaatccacactttctattcaatgcacttaacaccattagcgcgattatcaagcgcgatcccgatatgtctaagcaattgctgcagcagttatctcaatttttacggattaatttaaagcgaacgacaggcttagtgacacttggggatgagctagatcacatcgcgtcctatctcaccattgaaaaagcgcgttttattgataaattacaagtcagtatcgcgatacctgaatcactctaccactgcaaagtaccggcctttaccctgcagccgattattgagaatgccgtaaagcacggcacttcgcacatgatagagcaagggcagatcaaagtgacgggcaagcttgaaaatcatgtgttggaattagaagtcacagacaatgccggattatatcagcccgttgagggctctgaaggcctagggatgaacttagtgcataaacgcattcaaaatatttttggcgaacaatatggtgttactgtggaatgcgaagccgatgaattgactcgtgtcaccataagattacctatagaaaaccctgagatatccaatatggacacccgcacgtga

SEQ ID NO: 14846 - protein, 565 aa, Shewanella baltica OS155
MSLILLLTQQMSLYLVIVYLVSKTPLFKLFAETSPRLPHKIFMYLIFSSFCIMATYFGEQTSGAIANTRAMGAVLGGLLGGPVTGFLVGLTGGLHRYSMGGFTEIACAISTTLEGLSAGMISFYLRRAGKSELIYNPLLVCLVTFYAEMMQMSIILLVARPFDDAWELVRQIAPPMLLVNSVGAALFMSMIRDQKTMFDKLSSSFSTKALKIAERSVGLLSKGFNEESSSRVAKIVIEETNVGAVAITDREKLLAFIGIGADHHLPGTLISSKITLEAINQNKVMFADGVEMPYSCSISSNCRLGSSLVIPLRSDTEVIGTIKLYEPKNKLFLNINRTLGEGIARLLSNQILYGRFEQQQNLLTQAELKLLQAQVNPHFLFNALNTISAIIKRDPDMSKQLLQQLSQFLRINLKRTTGLVTLGDELDHIASYLTIEKARFIDKLQVSIAIPESLYHCKVPAFTLQPIIENAVKHGTSHMIEQGQIKVTGKLENHVLELEVTDNAGLYQPVEGSEGLGMNLVHKRIQNIFGEQYGVTVECEADELTRVTIRLPIENPEISNMDTRT

SEQ ID NO: 14847 - DNA, 1674 bp, Shewanella baltica OS155
  CDS (1)..(1674): transl_table=11
gtgctcgaaaatcaaatgatgttactggcggtatttgaacgggcggccttgatgctgatgaccttgttctttttaacccgcactcgaccgtttcagcgtttattccaaaagcgtaatcacacccccgcagagctggtctctgtggcggcgatattttgcttatttgcggtgtttagtacttataccggtattgaggttgaaggcgcgctggttaacgtgcgcattatcgcgattgtttccggtggaattttatttggcccttgggtcggcattcccgcgggcgtgttgtcggggctgcatagatatctgattgatatggatggcgatacttctatcccgtgtttaatcgccagcataattgccggtctaatggcgacctggatttactacaaatgccccaaatctaagttatggatttatggcatagtggcgggcatgttgtgcgaaacactgaccatgttgttgatttggctgctgacagagccgcaccaagtgggcgtagatattgtgagtcacattgcctatcccatgattgcgggcactgtgtgcatcggactgattatcaagctagtgcaagacctcgacgatgagaaagagctcattgccgccaagcaggccaagctcgcgctggatattgccaacaaaaccttacctttcttccgcaaaattgaccgccatgccttagagcaagtgtgcggcgtgatccgcaatgaaatccatgcagatgccgtggcgattaccgatactcgcgatgtattggcctatatgggcgtaggcaaagattactacgaggtcgatggtcatcaagcgattagcgagatgactcaaagggcgatagagctagatcaaaacattattaacaacgacttacgccaatatcatttatcggattttcattcggtcatcataatcccgctgcgtgaaaacggcactgtgagcggcacgttgaagatttattatcgtaatacctatcggattaccagctcgctgcgggaaatggcggtgggcttgtcgcagttgatttcgacccagatggaagtgtcgcgtatcgagcaactgcaggagatgacccgcaaggcggagtttactgcgctgcagagcaagattaacccgcactttttgtttaatgccctcaatgcgatttcttctttgatccgtattcggccgcagcaggcgcgggagttgattgctaatctggccgattatctgcgctataacctagccaagggcgatgagctgattgatatccaagaggaagtcaaacaagtacgcgattatgtggcgatcgagcaggcgcgctttggcgataagcttgaagtggtgttcgatgtcgacgatgtgcatttttgtgtaccttgcctcttgttgcagccgctggtggaaaacgccattttgcacggcattcagccacgtagtgcaccgggcagagtgaccatagaagtgaaaaaactcgatgctggcattcgcgtggccgtgcgtgacactggttatggcatcagccaagaggtgatagatggcgtcgccgcgggtcgcatagaaagcagcagtattgggctgatgaatgtgcaccagagggtgaagttattgtacggcgaagggctgcagcttaaacggctggagccggggactgaagtcagcttttatttaccggaaaatgaggcgcaagtatgttaa

SEQ ID NO: 14848 - protein, 557 aa, Shewanella baltica OS155
MLENQMMLLAVFERAALMLMTLFFLTRTRPFQRLFQKRNHTPAELVSVAAIFCLFAVFSTYTGIEVEGALVNVRIIAIVSGGILFGPWVGIPAGVLSGLHRYLIDMDGDTSIPCLIASIIAGLMATWIYYKCPKSKLWIYGIVAGMLCETLTMLLIWLLTEPHQVGVDIVSHIAYPMIAGTVCIGLIIKLVQDLDDEKELIAAKQAKLALDIANKTLPFFRKIDRHALEQVCGVIRNEIHADAVAITDTRDVLAYMGVGKDYYEVDGHQAISEMTQRAIELDQNIINNDLRQYHLSDFHSVIIIPLRENGTVSGTLKIYYRNTYRITSSLREMAVGLSQLISTQMEVSRIEQLQEMTRKAEFTALQSKINPHFLFNALNAISSLIRIRPQQARELIANLADYLRYNLAKGDELIDIQEEVKQVRDYVAIEQARFGDKLEVVFDVDDVHFCVPCLLLQPLVENAILHGIQPRSAPGRVTIEVKKLDAGIRVAVRDTGYGISQEVIDGVAAGRIESSSIGLMNVHQRVKLLYGEGLQLKRLEPGTEVSFYLPENEAQVC

SEQ ID NO: 14849 - DNA, 1710 bp, Shewanella amazonensis SB2B
  CDS (1)..(1710): transl_table=11
atgtcgcttatcctgctgctgacccagcaaatgtgtctctacttggtgtttgtttacctcgccagtaaaacacctctgtttaaggttctcaccgaaaacgcccccagattgccccacaaggtcatcatctatgttattttttcggccttctgcattatggccacctactttggcgagcaaacccacggcgcaatagccaataccagggccatgggagccgtactcggtggcctgctcggtggacctgtgaccggcttttttgttggccttaccggcggcctgcacaggtatagcatggggggctttaccgatgtcgcctgcgcactctcgacaacgctcgaggggctttctgccgggcttatcagcctgacacttcgccgagccggaaaaaccgaactgattttccaccctctggtggctggctttgttaccttctatgccgaagtcatgcaaatgctcatcatactgctggtcgccaaaccctatgacgaagcctgggcactggtgaggcaaattgcccctcccatgctgctggtgaactccatgggctcggccctctttatgagcatgctcaaagatcaaaaagcgatgtttgataagctctcctccaccttttccaccaaggcgctgaagattgcggaacgcagtgttgggctcttgtctcagggatttaacgaaaaaaccagcgcccaggtcgcccgaattgttatcgaagaaaccaatgttggcgccgtggccatcactgacagggaaaaactgctcgcctttattggtattggcgccgaccaccatataccgggaacacccattgcctcggccatcacactcgaagctatccgagacaacaaggtaatgtttgccgatgggatggaagtgccctacgcctgttctatttcctcccaatgccgtttgggttcaagtttggtgatcccccttcgcagcgatactgaagtcataggcaccattaagctctacgagcccaagaacaaattatttttaaacatcaaccgcacccttggcgaaggtattgccaaactcctgtccaaccaaatcctctatggtcgggtagagcaacaaaagaacctgctcacccaaaccgagcttaagctgttgcaggcgcaggtaaacccccatttcctgttcaatgcgcttaataccattggcgccatcattcgccgcgaccctgatatggctcgcggactgctgcaaaagctatcgcagtttttacgcattaatctgaaacgcagcccggaaatggttaccctggccgatgaacttgagcatatcgacgcctaccttggcatcgaaaaagcccgttttatcgatcgcctcagcgtgaatatcgccatcccccccgaactgatgcaccagaagctacccgcctttactctgcaacccattatcgaaaatgctgtaaaacacggcacctcacaattgctgtcaccgggcgtgattgacgtgagtggcaggcagcaggagcagatgctggtgttggaagtcgccgacaacgcggggttgtatcgccccactcccaacaatgaaggtctggggatgaatctggtgcataaacgcattcaaaatcaatttggagaacagtacggcgtgacggttgaatgcgaacccgatacgctcacccgggtcagaatttgcctgccaatcaacgtcgacacacccatcgacaccgacaattcgggagacaagccgagatga

SEQ ID NO: 14850 - protein, 569 aa, Shewanella amazonensis SB2B
MSLILLLTQQMCLYLVFVYLASKTPLFKVLTENAPRLPHKVIIYVIFSAFCIMATYFGEQTHGAIANTRAMGAVLGGLLGGPVTGFFVGLTGGLHRYSMGGFTDVACALSTTLEGLSAGLISLTLRRAGKTELIFHPLVAGFVTFYAEVMQMLIILLVAKPYDEAWALVRQIAPPMLLVNSMGSALFMSMLKDQKAMFDKLSSTFSTKALKIAERSVGLLSQGFNEKTSAQVARIVIEETNVGAVAITDREKLLAFIGIGADHHIPGTPIASAITLEAIRDNKVMFADGMEVPYACSISSQCRLGSSLVIPLRSDTEVIGTIKLYEPKNKLFLNINRTLGEGIAKLLSNQILYGRVEQQKNLLTQTELKLLQAQVNPHFLFNALNTIGAIIRRDPDMARGLLQKLSQFLRINLKRSPEMVTLADELEHIDAYLGIEKARFIDRLSVNIAIPPELMHQKLPAFTLQPIIENAVKHGTSQLLSPGVIDVSGRQQEQMLVLEVADNAGLYRPTPNNEGLGMNLVHKRIQNQFGEQYGVTVECEPDTLTRVRICLPINVDTPIDTDNSGDKPR

SEQ ID NO: 14851 - DNA, 1677 bp, Shewanella frigidimarina NCIMB 400
  CDS (1)..(1677): transl_table=11
atgtcgttaatattactgctaacacaacaaatgtgtgtttacttagttatcgtttacttagtcagtaaaacgccattatttaaactatttgcagagacttcaaaacgattacctcataagatttttatttacttagtgttctccagcttttgcataatggcaacttactttggtgaacaaacctcaggagccattgctaatactcgtgctatgggcgctgtattaggcggattactaggtggacctgtaactggtttactggttgggttaacgggtggattacaccgttattctatgggtggattcaccgatattgcttgcgccatatccaccagcttagaaggcttatccgcaggtatgatcagttattacttcaaaaaagccggtaaatcagaaatggtttatcagccaattgtggtattgggggtcacgtttatggctgaaataatgcagatgtcgataattgtattagtcgcaaaaccctttgatcaggcttgggaattggtcaaactgatcgccccgcccatgttactgattaattcactcggcgctgcgatgtttatgagtattgttcgcgaccaaaaagccatgtttgataaactttcttccagtttttcgactaaagcacttaaaatagctgagcgcagtgtcggcttactgtctaaaggatttgatttggagtcgagtaaaaaagtcgcccaaatcataatagaagaaactcaagttggcgcagtcgccattaccgacaccactaaattactggcatttattggccttggggcagatcaccatattcctaatacgcctatttcctcaaaaatcaccctcgatgccatcgcacaaaatagtgtgatgtttgctgatggggtcgataccacttattcctgctctatatcgcccaattgcagtttaggctcaagcctagtcattccgctgcgcagcaacgacgaagtcattggcacaattaaattatacgaacctaaaaacaaattgtttttaaacataaatcgcacattaggcgaaggtattgcgaggttaatgtctaaccaaattctttatggccgctttgagcaacagcaaagcttattgatgcaagcagagataaagttgttacaggctcaggttaatccgcactttttatttaatgcactcaataccatcagtgcaattattaagcgtgacccacaaatgtctaagcaattattacagcagttatcgcaatttttgcgcatcaacttgaccagaactacagggctggtgacaatggctgatgaacttgagcacatcgacgcttatctcgctatcgaacgcgctcggtttatcgacaaactgcaagtcaacatagatattgctatgatttatcatcaccaaaaaatgcccgcatttaccttacagccgttaattgaaaatgcagtaaaacacggtacatcgcggatgcttgatgccggtgtgattgatgttaaagccacattggatggcgatgatttattactcaacgtgaccgataatgcaggtttatatcaaccctctaacaacactgatggtttaggaatgaacttagtccataaacgaattcagaatttatttggcagccaatacggcattgaagttgagtgtgaaccagatgtattcactcgtgttagtgtgcgtttaccgttaaaggaaatggaccaatga

SEQ ID NO: 14852 - protein, 558 aa, Shewanella frigidimarina NCIMB 400
MSLILLLTQQMCVYLVIVYLVSKTPLFKLFAETSKRLPHKIFIYLVFSSFCIMATYFGEQTSGAIANTRAMGAVLGGLLGGPVTGLLVGLTGGLHRYSMGGFTDIACAISTSLEGLSAGMISYYFKKAGKSEMVYQPIVVLGVTFMAEIMQMSIIVLVAKPFDQAWELVKLIAPPMLLINSLGAAMFMSIVRDQKAMFDKLSSSFSTKALKIAERSVGLLSKGFDLESSKKVAQIIIEETQVGAVAITDTTKLLAFIGLGADHHIPNTPISSKITLDAIAQNSVMFADGVDTTYSCSISPNCSLGSSLVIPLRSNDEVIGTIKLYEPKNKLFLNINRTLGEGIARLMSNQILYGRFEQQQSLLMQAEIKLLQAQVNPHFLFNALNTISAIIKRDPQMSKQLLQQLSQFLRINLTRTTGLVTMADELEHIDAYLAIERARFIDKLQVNIDIAMIYHHQKMPAFTLQPLIENAVKHGTSRMLDAGVIDVKATLDGDDLLLNVTDNAGLYQPSNNTDGLGMNLVHKRIQNLFGSQYGIEVECEPDVFTRVSVRLPLKEMDQ

SEQ ID NO: 14853 - DNA, 1695 bp, Erwinia amylovora
  CDS (1)..(1695): transl_table=11
atgtacgaattgaactcaattttactgctgttacagcagatgtgtgtgtttctggttatcgcctggctgatgagcaaaacaggcctgtttatcccattgatgcaggtgacggtgcggctgccgcataagctgatgtgctatatcactttctcaattttttgcgttatgggcacctgttttggcctgcatattgaggatcccgtcgcaaacacgcgggcgatgggtgcggtaatgggggggctgctcggtgggccgctggttggtgggctggttggcctgaccggcgggctgcatcgttactcgcttggcggtatgaccgcgttcagctgtacgatctcaaccatcgtcgaaggactgctggctgggcttgtacatgccatactgattaaacgcgggcgcagcgataaggtcttcagtccgctgacggccggcgcgatcacctttattgccgaactgctgcaaatggtgatgattatgctcatttcccgcccgttcaatgatgccgtgcacctggtgcaaaacacggctgcgccaatgttgatcgctaacacctttggcgcggcgatgtttatgcgtattctgctggataaacgcgcaatgttcgagaaacataccacggcgttttccgccaccgctctgaaattagcgggctgtaccgaaggcattttgcgccaggggtttaactcgcagaacagcatgaaggtggcacaggtgctttaccaggagctggatatcggcgcggtggcgatcaccgattgcgacaaactgctggcatttaccggcatcggcgatgaccatcatttgccgggaaagccgatctcttcatccctgacacggaaagcaatcgatactggagaagtggtttacgccgacgggaacgcagtcccctgtcgctgttcactactggctggctgcaagctgggttccactttagttatcccactgcgtggagaaaatcaacgcgtgataggcaccattaaactgtatgagccgcgcaatcggctgttcagctcgattaaccgtacgttgggggaggggattgcacagctgctgtcagcacagatccttaccgggcagtatgagcggcagaaagcactgctggcgcagtcagagatcaagctgctgcatgcacaggtcaacccgcactttttgtttaatgcgcttaatactctgttggcggtgatccgtcaggatagcgataaggcaggtcagctggtgcaatacctgtccacctttttacgtaataatctcaagcgtccgtcggaaatcgtcacgctggctaatgagattgaacatgtgaatgcctatctgcaaatcgaacaggcgcgctttcagtcacgcctgcgggttcagctgcgggtgccgtcggagctgggccactatcagatgcccgcttttatcctgcaacctattatagaaaatgccattaagcacggcacctcacagctgatcggctgcggtgaaatcacgctgcaggccagccgtgaaggtcagtatctgctgctggacatcgaggataatgccggcctttatctgccggaacagcatggcggtgggctgggtataagcctggtcgataaacgactgcgcgtgcgttttggcgatgattatggcattcacgttgcctgtgaacccaatcattttacccgcattactctgcgtctgccgctggagccagtatgttcagcgtattga

SEQ ID NO: 14854 - protein, 564 aa, Erwinia amylovora
MYELNSILLLLQQMCVFLVIAWLMSKTGLFIPLMQVTVRLPHKLMCYITFSIFCVMGTCFGLHIEDPVANTRAMGAVMGGLLGGPLVGGLVGLTGGLHRYSLGGMTAFSCTISTIVEGLLAGLVHAILIKRGRSDKVFSPLTAGAITFIAELLQMVMIMLISRPFNDAVHLVQNTAAPMLIANTFGAAMFMRILLDKRAMFEKHTTAFSATALKLAGCTEGILRQGFNSQNSMKVAQVLYQELDIGAVAITDCDKLLAFTGIGDDHHLPGKPISSSLTRKAIDTGEVVYADGNAVPCRCSLLAGCKLGSTLVIPLRGENQRVIGTIKLYEPRNRLFSSINRTLGEGIAQLLSAQILTGQYERQKALLAQSEIKLLHAQVNPHFLFNALNTLLAVIRQDSDKAGQLVQYLSTFLRNNLKRPSEIVTLANEIEHVNAYLQIEQARFQSRLRVQLRVPSELGHYQMPAFILQPIIENAIKHGTSQLIGCGEITLQASREGQYLLLDIEDNAGLYLPEQHGGGLGISLVDKRLRVRFGDDYGIHVACEPNHFTRITLRLPLEPVCSAY

SEQ ID NO: 14855 - DNA, 1770 bp, Bacillus anthracis
  CDS (1)..(1770): transl_table=11
atgctaaatttagtacttatgatgattgaacgcgtcggacttattgttattctaggatttttactttcgcatattaaaacattcaggcgccttcttcataagcaagatggttatgtagataagcttaagcttatttgtattttttcggtgtttacaattgtaagcaattacaccgggattgaaatagcagggaatacgattatgaatgaaaattggctacagggtgtttcatcatcgagtaccattgcaaatacacgtattatgggtgttggaattagtggattgcttggcggtcctatcgtcggaattggagtaggatcgattgctggtattcaccgttatatgcttggcgggacgacagcgctaagttgcgcgatctcttcaattttagcaggcgttataactgggtatattggatacatttttaaaaagtataatcgtacaattacgcctaaattttcagcagttttaagtgtgtttatcgtttctttagaaatgattatgattctattaattgtagaggatggcattagcattgtgaaaacaattgcgataccaatgatccttgtaaatagctttggaagttttattttactttctatgatacaagctattttgcgccaggaagagaacgcaaaggcacttcagactcataaggtattacgtattgcagataaaacgttaccgtattttcgccaaggcttaacagaagaatcttgtaagcatgtggcacaaattattcaccgctttacaggaacagatgcggtatccttaacagatacagagaaaatattagctcatgttggattagcgtcagatcaccatattccttcacatagtttaataaccggtttgtcgaaagaagtgttacatacagggaaaataatgaaagcgaaatcacgtgaggtcattaattgtcaacatgaaggctgtcctttgcaagcggcgattgttattccgctaacttcacatggaaatacgatagggacattaaaactatatttcaaaaatcctaaccagttaagtcgtgtggaagaggaattagcagaagggttagcaaaaatattctctacacaacttgaattaggtgaagctgagttgcaaagtaaactattgcaagatgcggagataaaggcattacaagcacaaattaacccacactttttatttaatgcaattaatacagtatcagctttatgccgaacagatgtagaaaaggcaagaaagttattattacagcttagcgtgtatttccgttgtaatttgcaaggggcacgtcagttattgattccactagaacaagaattaaaccatgtacaggcatacttatcactagaacaagcaaggttcccaaataagtatgaagtaaagatgtatattgaggatgagctcaagacaactttagtaccaccgtttgttcttcaactattggttgaaaatgcattgcgacacgcttttccaaagaagcaacccgtatgtgaagtggaagtgcatgtttttgaaaaagagggtatggttcattttgaagtaaaggataatggacaagggattgaggaagaacgtttagaacaattaggaaagatggtagtttcgtcaaaaaaagggactggaacagctttatataatattaatgaacgtcttattgggttatttgggaaggaaacgatgcttcatatcgaaagtgaagtaaatgaggggacagagattacttttgttattccaaaaaaagtaggggaggaagagcagattgttaaaagtattagtagttga

SEQ ID NO: 14856 - protein, 589 aa, Bacillus anthracis
MLNLVLMMIERVGLIVILGFLLSHIKTFRRLLHKQDGYVDKLKLICIFSVFTIVSNYTGIEIAGNTIMNENWLQGVSSSSTIANTRIMGVGISGLLGGPIVGIGVGSIAGIHRYMLGGTTALSCAISSILAGVITGYIGYIFKKYNRTITPKFSAVLSVFIVSLEMIMILLIVEDGISIVKTIAIPMILVNSFGSFILLSMIQAILRQEENAKALQTHKVLRIADKTLPYFRQGLTEESCKHVAQIIHRFTGTDAVSLTDTEKILAHVGLASDHHIPSHSLITGLSKEVLHTGKIMKAKSREVINCQHEGCPLQAAIVIPLTSHGNTIGTLKLYFKNPNQLSRVEEELAEGLAKIFSTQLELGEAELQSKLLQDAEIKALQAQINPHFLFNAINTVSALCRTDVEKARKLLLQLSVYFRCNLQGARQLLIPLEQELNHVQAYLSLEQARFPNKYEVKMYIEDELKTTLVPPFVLQLLVENALRHAFPKKQPVCEVEVHVFEKEGMVHFEVKDNGQGIEEERLEQLGKMVVSSKKGTGTALYNINERLIGLFGKETMLHIESEVNEGTEITFVIPKKVGEEEQIVKSISS

SEQ ID NO: 14857 - DNA, 1782 bp, Bacillus subtilis
  CDS (1)..(1782): transl_table=11
atgattcatttaatgattatgatgctggagagagtggggattattgttatattagggttcattctcgcccatacgaaacttttcagacaagctcttcagaatcaggacggctataaaggaaaagcgattttaatttctattttttctcttttcagcatcatcagcaattatacaggcatcgaaattcaaagaaatatgattgtaaacaatgactgggtgtttacgatagatccatcgggctctatcgcgaatacccgtattttgggcgtggaaatcgggggccttctcggaggtccttttgtaggggctgggatcggcatacttgcgggcctgcatcgtttttcactcggtggcagcacggccttaagctgtgccgtctcatctattttagcgggtgttcttgcaggcttgatcggcaggtattttacgaagcgatatcgaatgccgacaccgcgcatcgccgctcttgtgggaatcggcatggagtcactgcaaatgatcattattttgctgatggcaaagccgttcagtgacgcttgggagcttgtcagcatgatcggaattccgatgatactcatcaatggaacaggcagttttatttttctgtctattattcaagcgatcattcgcaaggaagaacaggcaagggctctcgaaacgcatcgagtgcttacgattgctgatcagacacttccatttttccgccaaggattaaatgaaaactcctgtaaaagtgtagcggctattatccataagctgacaggaacagatgcggtgtctctcactgacaaagaaaagatccttgcgcatgtcggtgcgggaatggatcaccacatcccatcgaaaagcttgatcaccggcctgtccaaaaaggtgattaaaacagggcatattatgaaggcgatttcgcaggaagagattgaatgcacgcatgctgaatgccctttgcacgctgcaattgtcctaccgctgacatcgaacggcaatacaatcggcaccttaaaaatgtactttaaaagcccggcaggcctgagtcaggtagaggaggaacttgccgaggggctggccatgctgttttcgacacagcttgagcttggggaagcagagctgcaaagcaaacttctcaaggatgctgaaattaaagcgcttcaagcacaggtgaatccgcattttttatttaatgcgatcaacacgatttctgcgttatgccgtacagatgttgaaaaaacccgtaagctcctattgcagctcagtgtttattttcgttcaaaccttcaaggagcgagacagctgctgattccgctctcaaaggagctgaaccatcttaacgcctatttgtcattagaacaggcgcgttttcccgggaaatataaaattgagcttaatatcgacagcagactggagcagattgaaatccctccgtttgttttgcaggtgcttgtcgagaacgcgcttcggcacgcgtttccgaaaaaacaagacatatgcaaggttacagtctgtgtcttatctgatgatgcatccgtctatatgaaggtggcggataacggacgcggaattccgccggacgtcttgccggaactggggaagaaaccgtttccgtctaaggagggaaccggtacagcgctttataacctaaatcagcggctgatcggtttattcggacagcaggctgcactgcatatcagcagtgaggttcataaagggacagaggtttcctttcaagtgccaatgcaacagatgaaagagggagaagaacatgctcagggtgttaatagttga

SEQ ID NO: 14858 - protein, 593 aa, Bacillus subtilis
MIHLMIMMLERVGIIVILGFILAHTKLFRQALQNQDGYKGKAILISIFSLFSIISNYTGIEIQRNMIVNNDWVFTIDPSGSIANTRILGVEIGGLLGGPFVGAGIGILAGLHRFSLGGSTALSCAVSSILAGVLAGLIGRYFTKRYRMPTPRIAALVGIGMESLQMIIILLMAKPFSDAWELVSMIGIPMILINGTGSFIFLSIIQAIIRKEEQARALETHRVLTIADQTLPFFRQGLNENSCKSVAAIIHKLTGTDAVSLTDKEKILAHVGAGMDHHIPSKSLITGLSKKVIKTGHIMKAISQEEIECTHAECPLHAAIVLPLTSNGNTIGTLKMYFKSPAGLSQVEEELAEGLAMLFSTQLELGEAELQSKLLKDAEIKALQAQVNPHFLFNAINTISALCRTDVEKTRKLLLQLSVYFRSNLQGARQLLIPLSKELNHLNAYLSLEQARFPGKYKIELNIDSRLEQIEIPPFVLQVLVENALRHAFPKKQDICKVTVCVLSDDASVYMKVADNGRGIPPDVLPELGKKPFPSKEGTGTALYNLNQRLIGLFGQQAALHISSEVHKGTEVSFQVPMQQMKEGEEHAQGVNS

SEQ ID NO: 14859 - DNA, 1755 bp, Staphylococcus aureus
  CDS (1)..(1755): transl_table=11
gtgctatcgctaacaatgttattacttgagcgtgtaggtttaattattattttggcctatgtgttgatgaatattccatattttaaaaacttaatgaatcgtcgacgtacatggaaagcacgttggcaattatgtattattttcagtttgtttgccttaatgtctaatttaactggtatcgtcatcgatcatcaacatagtttgtcaggaagtgtgtacttccgtttagatgatgatgtatctttagctaacacacgtgtattaacgataggtgtcgcaggattagttggtggcccttttgtaggtctatttgttggcgttatttcaggtattttcagagtgtatatgggtggggcggatgcacaagtttatcttatctcatctatatttatcggtataattgctggttattttggcttacaagctcaaagacgcaagcgttacccgagtattgcgaaaagtgccatgattggaattgttatggaaatgattcaaatgttgagcattttaacattttcccacgacaaagcatatgcggttgacctcatatcattaattgcactaccaatgattattgttaatagcgttggtacggcgatttttatgtctattatcatttcaacattaaagcaagaagagcaaatgaaggctgttcaaacacatgacgtactgcaattgatgaaccagacattgccgtattttaaagaaggattgaatagagaatcggcacagcaaattgcgatgattattaaaaatttaatgaaagtatctgccgtagcaattacaagcaaaaatgaaatcttatcgcatgtaggtgcaggtagtgatcatcacataccaacaaatgaaatattaacaagtctgtctaaagatgtattgaaatcaggaaagttgaaagaagtgcatactaaagaagagattggttgtagtcatccgaattgcccgcttagagcagctatcgtgataccacttgagatgcatggttctatcgtcggtacattgaagatgtattttacaaaccctaatgatttaacttttgtggaacgtcaacttgcagaaggattggcaaatatttttagtagccaaattgaacttggtgaagccgaaacgcaaagtaagttattgaaagatgctgagattaagtcattacaggcacaagtgagtccacattttttcttcaattcaattaacacgatttcagctttagttagaataaatagcgaaaaggcacgagagttactattagaattgagttattttttcagagcgaatttacaaggctcaaagcaacatacgattactttagataaagagttaagtcaagtgcgtgcatacttatcactcgaacaagcacgttatccaggaagatttaatatcaatattaatgttgaagacaaatatcgcgatgtgcttgtaccaccatttttaattcaaattttagttgaaaatgccatcaaacatgcgtttacgaatcgaaagcaaggtaacgatattgacgtgtcagtgattaaagaaactgcaacacatgtacgtattattgtacaagataatggtcagggtatttctaaagataaaatgcatttgttgggagaaacatctgtagaatcagaatctggaactggtagtgctttagaaaatttaaacttacgcctaaaaggattatttggaaaatccgcagcattacaatttgaatcgacatcgagcggtaccactttttggtgtgtacttccttatgaaagacaagaggaggaataa

SEQ ID NO: 14860 - protein, 584 aa, Staphylococcus aureus
MLSLTMLLLERVGLIIILAYVLMNIPYFKNLMNRRRTWKARWQLCIIFSLFALMSNLTGIVIDHQHSLSGSVYFRLDDDVSLANTRVLTIGVAGLVGGPFVGLFVGVISGIFRVYMGGADAQVYLISSIFIGIIAGYFGLQAQRRKRYPSIAKSAMIGIVMEMIQMLSILTFSHDKAYAVDLISLIALPMIIVNSVGTAIFMSIIISTLKQEEQMKAVQTHDVLQLMNQTLPYFKEGLNRESAQQIAMIIKNLMKVSAVAITSKNEILSHVGAGSDHHIPTNEILTSLSKDVLKSGKLKEVHTKEEIGCSHPNCPLRAAIVIPLEMHGSIVGTLKMYFTNPNDLTFVERQLAEGLANIFSSQIELGEAETQSKLLKDAEIKSLQAQVSPHFFFNSINTISALVRINSEKARELLLELSYFFRANLQGSKQHTITLDKELSQVRAYLSLEQARYPGRFNININVEDKYRDVLVPPFLIQILVENAIKHAFTNRKQGNDIDVSVIKETATHVRIIVQDNGQGISKDKMHLLGETSVESESGTGSALENLNLRLKGLFGKSAALQFESTSSGTTFWCVLPYERQEEE

SEQ ID NO: 14861 - DNA, 1776 bp, Staphylococcus epidermidis
  CDS (1)..(1776): transl_table=11
atgcttaatttatttattttattacttgaacgcgtgggattaattattttactcgcatatatactcatgaatattaatcattttaaaacaatgatgagcgaacgtgacaaatggcgttcaaaattccaactaatcattatttttggtatattctctatgatttcaaattttacaggaattgaaatagaaaatggccatatcgtatctagtgatatttattaccacttaagcaaagacgcctcaatggccaatacccgtgtattaacaatcggtgtttctggtctaataggtggaccgtgggtagctataattgtaggcattatttcaggattatgtcgtttatatattggcggggctgacgcatatacctatcttatttcatccatagttatcgctatcatatctggttactttggtcatcaaacaataaaacaaaatacatatccgtccattaaaaaaggtgctattatcggtgcaataactgaaattattcaaatgggctgtatattattatttacaaataacctacatcacgcaattacattagtcagttttatagcactaccgatgattatcattaatagtttaggtacagccatatttttaaccatcattttgtcgaccatcaagcaagaagaacaaatgcgtgcagtccagacgcatgatgtattacaactcgctaacgaaacactaccttactttcgatctggacttaatgaaaaatcagcccaacaagctgctgaaattattttaaaattaatgcaagtgtcggcggtcgctattacaaataaaaaagatattttaacacatattggtgcaggcagtgaccatcacgtagcacgtaaagagataattactgatttatctaaagaagtgattcaatctggaaaattaaaagtcgctcatacgagagaaggaattggatgtcaccatcctaattgccctcttgaaggagccattgtcgtccctctttatatacataatgaagtcgcagggactttaaaattttatttcacagataacaatattatttcaacttcagaccaacagctcgcaaaaggtctcgccaatatattttcctcacagctagaactaggtcaagctgaaatgcaaggacaattattgaaagacgctgaaattaaatcattacaagcacaagtcaatccacatttcttttttaatgctattaacactatatcagcactagtaagaattgatagcgaaaaagcacgacgtttactgattcaactcagtcagttcttccgctctaatcttaatggtgcacgtaataatacgattactttacaaaaggaattacaacaagtagcagcatatttatccttagagcaagctcgctatccaaatagatttaacatacactatcgaattgatgatcagtgtcaagatgcgctcatccccccttttataattcaaatattagtggaaaattctattaaacatgcatttaaaaatcgtaaaaagaataatcatattgatgtggatgttagcatgaagcaagactgcttaagtatatctgttcaagataatggtcaaggcataccagctgatcaattagatactattggatatacgacagtaacgtctaccactggtactggtaatgccttagtcaatcttaataaaagacttactggactatttggaacaacatcggcactgaacattcaatcttctcaatcaggcacgactgtaagttgtttaattccatataaatcttctaaggaggaacactttaatgaaagcgttaatcgttga

SEQ ID NO: 14862 - protein, 591 aa, Staphylococcus epidermidis
MLNLFILLLERVGLIILLAYILMNINHFKTMMSERDKWRSKFQLIIIFGIFSMISNFTGIEIENGHIVSSDIYYHLSKDASMANTRVLTIGVSGLIGGPWVAIIVGIISGLCRLYIGGADAYTYLISSIVIAIISGYFGHQTIKQNTYPSIKKGAIIGAITEIIQMGCILLFTNNLHHAITLVSFIALPMIIINSLGTAIFLTIILSTIKQEEQMRAVQTHDVLQLANETLPYFRSGLNEKSAQQAAEIILKLMQVSAVAITNKKDILTHIGAGSDHHVARKEIITDLSKEVIQSGKLKVAHTREGIGCHHPNCPLEGAIVVPLYIHNEVAGTLKFYFTDNNIISTSDQQLAKGLANIFSSQLELGQAEMQGQLLKDAEIKSLQAQVNPHFFFNAINTISALVRIDSEKARRLLIQLSQFFRSNLNGARNNTITLQKELQQVAAYLSLEQARYPNRFNIHYRIDDQCQDALIPPFIIQILVENSIKHAFKNRKKNNHIDVDVSMKQDCLSISVQDNGQGIPADQLDTIGYTTVTSTTGTGNALVNLNKRLTGLFGTTSALNIQSSQSGTTVSCLIPYKSSKEEHFNESVNR

SEQ ID NO: 14863 - DNA, 1746 bp, Streptococcus agalactiae
  CDS (1)..(1746): transl_table=11
atgttgatggtgttgttattccaaaggctaggaattattatgattttagcctttttattggtaaataatagttatttcagacagttaattgaagagcggtctaaacgtgaaacggtagtacttgtcatcattttcggcttgtttgttattatatctaatataacaggaattgaaataaaaggggatcgaagtttggtcgagcgcccttttctaacaacgatttcccattctgactcacttgctaatacaaggactttagttattacaacggcaagtttggttggtggacctctggttggatcaattgttggttttattggaggagttcatcgcttttttcaaggaagcttttcaggttctttctatattgtcagttcagttctagtcggcattgttagcggaaagattggtgataagcttaaggaaaaccatctctacccttcaacaagccaagttattttaattagtattattgccgaaagtatccagatgctatttgttggtatttttacaggatgggaacttgtcaaaatgattgtcattccaatgatgattttaaatagtttaggttccacacttttccttgcgattttgaaaacttatttgtcaaatgaaagtcagttacgcgcagttcaaacgagagatgttcttgaattgactcgacagactctgccctacctcagacaaggtttgacaccgcaatctgctaggagtgtttgcgaaattataaagaggcatactaactttgatgctgtaggattaacagatcggtcaaacgtattagctcatattggtgttggccatgatcaccatattgcaggacaaccagtcaaaacagacctatctaaaagtgttatttttgatggcgaaccaagaattgcgcaagataaagcggcgatttcttgtccagatcacaactgtcagttaaattctgctattgtagttcctctaaaaataaatgataaaactgtgggtgccttaaaaatgtactttgcaggagataagacaatgtctgaggtggaggaaaacctagtccttggtttagcgcaaatattttcaggacaactggcaatggggataacagaggaacaaaataagttagccagtatggcagagataaaggctttacaagcacaaatcaaccctcatttcttctttaatgccattaacacaattagtgcattaatccgtattgattctgataaagcacgttatgcactgatgcagttaagtactttttttagaacaagtttgcaaggtggtcaggatcgtgaggtaacgcttgagcaagaaaaatcacatgtggatgcttatatgaatgttgaaaaattacgtttccctgataaatatcagttatcttatgatattagtgcaccagaaaaaatgaagttaccgccttttggtttacaggtactggtagagaatgcagttagacatgctttcaaagaacgtaagacggacaaccatatattggttcaaataaagccagatggtcattattattgtgtttctgttagtgacaatggacaaggaatctcagatactatcattgataaattaggtcaagaaacagttgcagagagtaagggtacaggtactgctctagttaatctaaataacaggctgaatttattatatggtagtgtaagttgccttcatttttcgagcgacaagaatggtacaaaagtttggtatcgaatacctaatagaataagggaggatgaacatgaaaattttaattcttga

SEQ ID NO: 14864 - protein, 581 aa, Streptococcus agalactiae
MLMVLLFQRLGIIMILAFLLVNNSYFRQLIEERSKRETVVLVIIFGLFVIISNITGIEIKGDRSLVERPFLTTISHSDSLANTRTLVITTASLVGGPLVGSIVGFIGGVHRFFQGSFSGSFYIVSSVLVGIVSGKIGDKLKENHLYPSTSQVILISIIAESIQMLFVGIFTGWELVKMIVIPMMILNSLGSTLFLAILKTYLSNESQLRAVQTRDVLELTRQTLPYLRQGLTPQSARSVCEIIKRHTNFDAVGLTDRSNVLAHIGVGHDHHIAGQPVKTDLSKSVIFDGEPRIAQDKAAISCPDHNCQLNSAIVVPLKINDKTVGALKMYFAGDKTMSEVEENLVLGLAQIFSGQLAMGITEEQNKLASMAEIKALQAQINPHFFFNAINTISALIRIDSDKARYALMQLSTFFRTSLQGGQDREVTLEQEKSHVDAYMNVEKLRFPDKYQLSYDISAPEKMKLPPFGLQVLVENAVRHAFKERKTDNHILVQIKPDGHYYCVSVSDNGQGISDTIIDKLGQETVAESKGTGTALVNLNNRLNLLYGSVSCLHFSSDKNGTKVWYRIPNRIREDEHENFNS

SEQ ID NO: 14865 - DNA, 1743 bp, Streptococcus mutans
  CDS (1)..(1743): transl_table=11
atgttaatgatattattatttcagagacttggtattatcatgattctggcatttttactagtcaataacagctattttcgacagttgattgaagaacgttctaagcgtgaaaagctggttcttattatcatttttggtattttcgtcatcatttccaatatgacaggaattgaaatcactagcgataaaagtttggtggaacgtcctattctaacgactatttctcattcagattctctagctaatacgagaactttggttatcacaacggctagcttagtcggcggtcctttagttggaactgttgtgggtttcattggtggtgtccatcgtttctttcaagggaatttttctggtgctttttacattgtcagttctgctttggtaggatatattagtggtcgactgggtgatcaattaaaaactaataacctttatccatctacttcgcaggtcattgttatcagcattattgctgaaagtattcaaatgctctttgtcggtttctttactggctgggatttggttaaactgattttcattcctatgatgttgcttaacagtctaggttcgaccttatttctagctattctcaagacctacttatccaatgaaagacagctgagagctgttcagactcgggatgttttagatttgacgcagcaaacccttccttatttaagacagggactgagtcagcaatcagctactaaagtgtgtaatatcattaagcagcatactaattttgatgccgttggtctgactgatcgaaccaatgtcctagctcatatcggcgttggtcaagatcatcatattgccggacaagcggtcaaaacagatctctcaaaaagtgttattttaaacggtcagccacaaattgccttagataaaacagccattgcctgtccagaccaaagctgtctcctcaattcagccatcgtcgttccgctcaagatcaataatgagacagttggggccttaaaaatgtacttttctggtgataagaagatgaccgaagtcgaagaaaatcttgccctaggtctcgcacaaattttttctggacaattggccatcggtattgccgaggaacaaaataagttggctaatattgcagaaatcaaggccttgcagtcccagattaatccccatttcttcttcaatgctataaacaccatcagtgctttgattcgtcttgatgccaacaaagctcgatatgctctcatgcaattaagtacttttttccgaaccagtttacaaggcggacaagatagagaaatctctttagaacaggaaaaagcgcacgttgatgcttatatgaatcttgaaaagctgcgctttcctgataaatatcaactggattatcatattactgtttcaactaaaatgaccctgcctccttttggtttgcaggttttggttgaaaatgcagtgcgtcatgcttttaaagaacgcaagaaagacaatcatatttgtatttccataacagatcagggagagttttacaaggtggccgttagcgataatggtcagggtatttctcctaatatgattgacaaattaggacaggaaactgtatctgaaagcaagggaacaggaacagcccttgttaatttaaacaatcgcctaaatttactttatggcagtgctagtcagttacactttgacagtacagatcaaggaacaaccgtctggtatgagattccttatcaaaaaggagataaagatgaacattttaattcttga

SEQ ID NO: 14866 - protein, 580 aa, Streptococcus mutans
MLMILLFQRLGIIMILAFLLVNNSYFRQLIEERSKREKLVLIIIFGIFVIISNMTGIEITSDKSLVERPILTTISHSDSLANTRTLVITTASLVGGPLVGTVVGFIGGVHRFFQGNFSGAFYIVSSALVGYISGRLGDQLKTNNLYPSTSQVIVISIIAESIQMLFVGFFTGWDLVKLIFIPMMLLNSLGSTLFLAILKTYLSNERQLRAVQTRDVLDLTQQTLPYLRQGLSQQSATKVCNIIKQHTNFDAVGLTDRTNVLAHIGVGQDHHIAGQAVKTDLSKSVILNGQPQIALDKTAIACPDQSCLLNSAIVVPLKINNETVGALKMYFSGDKKMTEVEENLALGLAQIFSGQLAIGIAEEQNKLANIAEIKALQSQINPHFFFNAINTISALIRLDANKARYALMQLSTFFRTSLQGGQDREISLEQEKAHVDAYMNLEKLRFPDKYQLDYHITVSTKMTLPPFGLQVLVENAVRHAFKERKKDNHICISITDQGEFYKVAVSDNGQGISPNMIDKLGQETVSESKGTGTALVNLNNRLNLLYGSASQLHFDSTDQGTTVWYEIPYQKGDKDEHFNS

SEQ ID NO: 14867 - DNA, 1698 bp, Escherichia coli
  CDS (1)..(1698): transl_table=11
gtgcacgaaatattcaacatgctgctggcggtcttcgatcgggcagcgttaatgcttatctgcctgttctttctcatccgtatccgcctgtttcgcgaactgttgcacaagtcggcgcactccccaaaagaattgctcgccgttaccgccattttctcgctgttcgccctgttcagcacctggtccggcgttcccgtagaaggctcgctggtgaacgtacgtattatcgcggtgatgtccggcgggattctgtttggcccgtgggtaggcatcattaccggcgtgattgcgggtattcaccggtatttaattgatatcggcggcgtgacggcgatcccctgctttatcaccagcattctggcgggttgtatatcgggctggatcaacctgaaaatccccaaagcacagcgctggcgcgtcggtattctcggcggcatgttgtgtgagacgttgaccatgattctggtaattgtctgggcaccaactaccgcgttggggatcgatatcgtctctaaaatcggcattccaatgatcctcggtagcgtctgtatcggctttattgtgcttctggtgcaaagcgttgagggcgaaaaagaggccagcgccgcgcggcaggccaagctggcgctggatatcgccaacaaaacgctaccgctgtttcgccatgtcaatagcgagtcattacgcaaggtctgcgaaattatccgcgatgacattcacgccgatgcggtggcgattactaataccgatcatgtgctggcctatgttggcgtgggtgaacataactatcagaatggcgatgacttcattagcccgactacccgtcaggcgatgaattacggaaaaatcatcattaaaaacaatgatgaagcccaccgcacaccagagattcattccatgctggtgatcccattgtgggagaaaggggtcgtgaccggaacgctgaaaatttactactgccacgcgcatcagatcacctcgtcattacaggaaatggcggtcggtctgtcgcaaatcatctccacgcaactggaggtttcacgcgccgagcagctacgtgaaatggcaaataaggcagagcttcgcgccctgcaaagcaaaattaatccccattttctgtttaacgctctgaacgctatttcatcgtcaatccgtctgaatccggataccgctcgccagttgatctttaatctgtcgcgttatctgcgctataacattgaattaaaagacgatgagcaaatcgatatcaaaaaagagctgtatcaaattaaagactatattgccattgagcaggcccgctttggtgacaagctgacggttatctatgatattgatgaagaggtgaattgctgcattcccagcctgctgatccagccgttggtggagaacgccattgtccacggtattcagccttgcaaaggtaaaggcgttgtcaccatcagcgttgcagagtgcggaaatcgggtacgcattgcggtgcgagataccgggcacggcatcgatccaaaggtgattgagcgggtcgaagcgaatgaaatgccgggcaataaaattggcctgctgaatgtccatcatcgcgtgaagttattgtatggcgaggggctgcatatccgccgcctggagccggggacggaaattgcgttttacattcctaaccaacgcaccccagtcgcctcacaggctacgttattgctttga

SEQ ID NO: 14868 - protein, 565 aa, Escherichia coli
MHEIFNMLLAVFDRAALMLICLFFLIRIRLFRELLHKSAHSPKELLAVTAIFSLFALFSTWSGVPVEGSLVNVRIIAVMSGGILFGPWVGIITGVIAGIHRYLIDIGGVTAIPCFITSILAGCISGWINLKIPKAQRWRVGILGGMLCETLTMILVIVWAPTTALGIDIVSKIGIPMILGSVCIGFIVLLVQSVEGEKEASAARQAKLALDIANKTLPLFRHVNSESLRKVCEIIRDDIHADAVAITNTDHVLAYVGVGEHNYQNGDDFISPTTRQAMNYGKIIIKNNDEAHRTPEIHSMLVIPLWEKGVVTGTLKIYYCHAHQITSSLQEMAVGLSQIISTQLEVSRAEQLREMANKAELRALQSKINPHFLFNALNAISSSIRLNPDTARQLIFNLSRYLRYNIELKDDEQIDIKKELYQIKDYIAIEQARFGDKLTVIYDIDEEVNCCIPSLLIQPLVENAIVHGIQPCKGKGVVTISVAECGNRVRIAVRDTGHGIDPKVIERVEANEMPGNKIGLLNVHHRVKLLYGEGLHIRRLEPGTEIAFYIPNQRTPVASQATLLL

SEQ ID NO: 14869 - DNA, 25 bp, Artificial sequence
  Primer sequence
atgtacgattttaatctggtgttgc

SEQ ID NO: 14870 - DNA, 24 bp, Artificial sequence
  Primer sequence
ttatgcctcgtccctccatggtag

SEQ ID NO: 14871 - protein, 601 aa, Artificial sequence
  Consensus
  Variant (2)..(2): Xaa in position 2 is any amino acid
  Variant (6)..(6): Xaa in position 6 is any amino acid
  Variant (9)..(10): Xaa in position 9 to 10 is any amino acid
  Variant (12)..(12): Xaa in position 12 is any amino acid
  Variant (14)..(14): Xaa in position 14 is any amino acid
  Variant (25)..(25): Xaa in position 25 is any amino acid
  Variant (29)..(29): Xaa in position 29 is any amino acid
  Variant (32)..(38): Xaa in position 32 to 38 is any amino acid
  Variant (39)..(40): Xaa in position 39 to 40 is any or no amino acid
  Variant (45)..(45): Xaa in position 45 is any amino acid
  Variant (52)..(52): Xaa in position 52 is any amino acid
  Variant (58)..(58): Xaa in position 58 is any amino acid
  Variant (61)..(61): Xaa in position 61 is any amino acid
  Variant (63)..(64): Xaa in position 63 to 64 is any amino acid
  Variant (65)..(81): Xaa in position 65 to 81 is any or no amino acid
  Variant (88)..(88): Xaa in position 88 is any amino acid
  Variant (91)..(91): Xaa in position 91 is any amino acid
  Variant (104)..(105): Xaa in position 104 to 105 is any amino acid
  Variant (116)..(116): Xaa in position 116 is any amino acid
  Variant (118)..(119): Xaa in position 118 to 119 is any or no amino acid
  Variant (122)..(122): Xaa in position 122 is any amino acid
  Variant (142)..(144): Xaa in position 142 to 144 is any amino acid
  Variant (146)..(146): Xaa in position 146 is any amino acid
  Variant (148)..(150): Xaa in position 148 to 150 is any amino acid
  Variant (151)..(156): Xaa in position 151 to 156 is any or no amino acid
  Variant (158)..(159): Xaa in position 158 to 159 is any amino acid
  Variant (161)..(161): Xaa in position 161 is any amino acid
  Variant (183)..(184): Xaa in position 183 to 184 is any or no amino acid
  Variant (187)..(187): Xaa in position 187 is any amino acid
  Variant (190)..(191): Xaa in position 190 to 191 is any amino acid
  Variant (199)..(199): Xaa in position 199 is any amino acid
  Variant (209)..(209): Xaa in position 209 is any amino acid
  Variant (212)..(212): Xaa in position 212 is any amino acid
  Variant (214)..(218): Xaa in position 214 to 218 is any amino acid
  Variant (220)..(222): Xaa in position 220 to 222 is any amino acid
  Variant (224)..(224): Xaa in position 224 is any amino acid
  Variant (227)..(227): Xaa in position 227 is any amino acid
  Variant (231)..(231): Xaa in position 231 is any amino acid
  Variant (234)..(234): Xaa in position 234 is any amino acid
  Variant (239)..(239): Xaa in position 239 is any amino acid
  Variant (242)..(242): Xaa in position 242 is any amino acid
  Variant (246)..(246): Xaa in position 246 is any or no amino acid
  Variant (250)..(251): Xaa in position 250 to 251 is any amino acid
  Variant (254)..(254): Xaa in position 254 is any amino acid
  Variant (257)..(257): Xaa in position 257 is any amino acid
  Variant (261)..(261): Xaa in position 261 is any amino acid
  Variant (263)..(263): Xaa in position 263 is any amino acid
  Variant (281)..(281): Xaa in position 281 is any amino acid
  Variant (288)..(288): Xaa in position 288 is any amino acid
  Variant (289)..(290): Xaa in position 289 to 290 is any or no amino acid
  Variant (292)..(292): Xaa in position 292 is any amino acid
  Variant (294)..(294): Xaa in position 294 is any amino acid
  Variant (298)..(298): Xaa in position 298 is any amino acid
  Variant (301)..(302): Xaa in position 301 to 302 is any amino acid
  Variant (304)..(304): Xaa in position 304 is any amino acid
  Variant (307)..(307): Xaa in position 307 is any amino acid
  Variant (309)..(311): Xaa in position 309 to 311 is any amino acid
  Variant (313)..(314): Xaa in position 313 to 314 is any amino acid
  Variant (315)..(323): Xaa in position 315 to 323 is any or no amino acid
  Variant (325)..(325): Xaa in position 325 is any or no amino acid
  Variant (327)..(327): Xaa in position 327 is any or no amino acid
  Variant (336)..(340): Xaa in position 336 to 340 is any or no amino acid
  Variant (349)..(354): Xaa in position 349 to 354 is any or no amino acid
  Variant (356)..(356): Xaa in position 356 is any amino acid
  Variant (361)..(361): Xaa in position 361 is any amino acid
  Variant (363)..(365): Xaa in position 363 to 365 is any amino acid
  Variant (372)..(372): Xaa in position 372 is any amino acid
  Variant (379)..(379): Xaa in position 379 is any amino acid
  Variant (382)..(383): Xaa in position 382 to 383 is any amino acid
  Variant (385)..(385): Xaa in position 385 is any amino acid
  Variant (387)..(388): Xaa in position 387 to 388 is any amino acid
  Variant (391)..(391): Xaa in position 391 is any amino acid
  Variant (392)..(392): Xaa in position 392 is any or no amino acid
  Variant (420)..(420): Xaa in position 420 is any amino acid
  Variant (427)..(427): Xaa in position 427 is any amino acid
  Variant (434)..(434): Xaa in position 434 is any amino acid
  Variant (438)..(438): Xaa in position 438 is any amino acid
  Variant (441)..(446): Xaa in position 441 to 446 is any amino acid
  Variant (447)..(447): Xaa in position 447 is any or no amino acid
  Variant (451)..(451): Xaa in position 451 is any amino acid
  Variant (455)..(455): Xaa in position 455 is any amino acid
  Variant (458)..(458): Xaa in position 458 is any amino acid
  Variant (465)..(465): Xaa in position 465 is any amino acid
  Variant (468)..(472): Xaa in position 468 to 472 is any or no amino acid
  Variant (474)..(474): Xaa in position 474 is any amino acid
  Variant (478)..(478): Xaa in position 478 is any amino acid
  Variant (480)..(480): Xaa in position 480 is any amino acid
  Variant (482)..(482): Xaa in position 482 is any amino acid
  Variant (486)..(486): Xaa in position 486 is any amino acid
  Variant (488)..(489): Xaa in position 488 to 489 is any amino acid
  Variant (490)..(492): Xaa in position 490 to 492 is any or no amino acid
  Variant (510)..(515): Xaa in position 510 to 515 is any amino acid
  Variant (516)..(516): Xaa in position 516 is any or no amino acid
  Variant (518)..(518): Xaa in position 518 is any amino acid
  Variant (520)..(520): Xaa in position 520 is any amino acid
  Variant (522)..(529): Xaa in position 522 to 529 is any amino acid
  Variant (530)..(530): Xaa in position 530 is any or no amino acid
  Variant (532)..(532): Xaa in position 532 is any amino acid
  Variant (534)..(534): Xaa in position 534 is any amino acid
  Variant (536)..(536): Xaa in position 536 is any amino acid
  Variant (540)..(540): Xaa in position 540 is any or no amino acid
  Variant (543)..(546): Xaa in position 543 to 546 is any or no amino acid
  Variant (548)..(548): Xaa in position 548 is any amino acid
  Variant (551)..(554): Xaa in position 551 to 554 is any amino acid
  Variant (555)..(561): Xaa in position 555 to 561 is any or no amino acid
  Variant (563)..(563): Xaa in position 563 is any amino acid
  Variant (568)..(568): Xaa in position 568 is any amino acid
  Variant (571)..(571): Xaa in position 571 is any amino acid
  Variant (575)..(576): Xaa in position 575 to 576 is any amino acid
  Variant (580)..(582): Xaa in position 580 to 582 is any amino acid
  Variant (585)..(585): Xaa in position 585 is any amino acid
  Variant (587)..(587): Xaa in position 587 is any amino acid
  Variant (589)..(589): Xaa in position 589 is any amino acid
  Variant (590)..(592): Xaa in position 590 to 592 is any or no amino acid
  Variant (598)..(599): Xaa in position 598 to 599 is any amino acid
LXLILXLLXXMXLXLVLAYLLSKTXLFRXLLXXXXXXXXXKLLLXLIFSLFXIMGTYXGLXIXXXXXXXXXXXXXXXXXXXSIANTRXIGXVLGGLLGGPVVGXXVGLIGGLHRYXLXXGGXTALACAISTILEGLLGGLIXXXLXRXXXXXXXXXPXXAXLITLVAEILQMLIILLVAKPFXXAVXLVXXIALPMILXNSVGAALFMXIIXDXXXXXEXXXAXQSXKALXIAXRTLPXLRXGLNXESAXXVAXIIXEETXVXAVAITDREKILAFVGIGXDHHIPGXXXIXSXLTKXAIXXGXVMXAXXXEXXXXXXXXXXXCXLXSALVIPLRXXXXXVIGTLKLYXXXXXXKXKLISXIXXXLAEGLAXLLSTQIXLGXXEXQXXLLXXAEIKALQAQVNPHFLFNALNTISALIRXDPDKARXLLLQLSXFFRXNLXXXXXXXITLXEELXHVXAYLSIEXARXXXXXFXDRLXVXIXIDDXLXXXXXLPAFTLQPLVENAIKHGXXXXXXXGXVXIXXXXXXXXXLXLXVXDNGXGIXXXXLXGLXXXXXXXXXXXGXGLGLXNVXKRLXXLFGXXXGLXIXSXXXXGTRVSXXIP

SEQ ID NO: 14872 - protein, 62 aa, Artificial sequence
  Consensus
  Variant (2)..(15): Xaa in position 2 to 15 is any amino acid
  Variant (16)..(22): Xaa in position 16 to 22 is any or no amino acid
  Variant (24)..(24): Xaa in position 24 is any amino acid
  Variant (26)..(27): Xaa in position 26 to 27 is any amino acid
  Variant (28)..(28): Xaa in position 28 is Ala, Gly or Thr
  Variant (29)..(29): Xaa in position 29 is Ala, Ile, Pro or Val
  Variant (30)..(31): Xaa in position 30 to 31 is any amino acid
  Variant (32)..(32): Xaa in position 32 is Ala, Gly or Ser
  Variant (34)..(34): Xaa in position 34 is Ile, Leu, Met or Val
  Variant (35)..(35): Xaa in position 35 is Phe, Ile, Leu or Val
  Variant (36)..(36): Xaa in position 36 is any amino acid
  Variant (39)..(40): Xaa in position 39 to 40 is any amino acid
  Variant (41)..(41): Xaa in position 41 is Ala, Gly or Ser
  Variant (42)..(44): Xaa in position 42 to 44 is any amino acid
  Variant (46)..(47): Xaa in position 46 to 47 is any amino acid
  Variant (48)..(48): Xaa in position 48 is Ala, Gly or Ser
  Variant (50)..(51): Xaa in position 50 to 51 is any amino acid
  Variant (53)..(55): Xaa in position 53 to 55 is any amino acid
  Variant (56)..(56): Xaa in position 56 is Asp, Glu, Gly or Asn
  Variant (57)..(61): Xaa in position 57 to 61 is any amino acid
  Variant (62)..(62): Xaa in position 62 is Ala, Ser, Thr or Val
IXXXXXXXXXXXXXXXXXXXXXNXRXXXXXXXGXXXGPXXXXXXGXXXGXXRXXXXXXXXXX

SEQ ID NO: 14873 - protein, 91 aa, Artificial sequence
  Consensus
  Variant (2)..(10): Xaa in position 2 to 10 is any amino acid
  Variant (11)..(13): Xaa in position 11 to 13 is any or no amino acid
  Variant (15)..(19): Xaa in position 15 to 19 is any amino acid
  Variant (22)..(24): Xaa in position 22 to 24 is any amino acid
  Variant (25)..(25): Xaa in position 25 is Gly or Asn
  Variant (26)..(26): Xaa in position 26 is Ala, Gly, Ser or Thr
  Variant (27)..(27): Xaa in position 27 is any amino acid
  Variant (29)..(30): Xaa in position 29 to 30 is any amino acid
  Variant (31)..(31): Xaa in position 31 is Ile, Leu, Met or Val
  Variant (32)..(32): Xaa in position 32 is Phe or Leu
  Variant (33)..(33): Xaa in position 33 is Ile, Leu, Met or Val
  Variant (34)..(35): Xaa in position 34 to 35 is any amino acid
  Variant (36)..(36): Xaa in position 36 is Ile, Leu or Val
  Variant (37)..(47): Xaa in position 37 to 47 is any amino acid
  Variant (48)..(48): Xaa in position 48 is Ala, Gly, Ser or Thr
  Variant (49)..(50): Xaa in position 49 to 50 is any amino acid
  Variant (51)..(51): Xaa in position 51 is Ala, Ser or Thr
  Variant (52)..(54): Xaa in position 52 to 54 is any amino acid
  Variant (55)..(55): Xaa in position 55 is Phe or Leu
  Variant (56)..(56): Xaa in position 56 is any amino acid
  Variant (57)..(57): Xaa in position 57 is Ile, Leu or Val
  Variant (58)..(58): Xaa in position 58 is Ala or Thr
  Variant (59)..(60): Xaa in position 59 to 60 is any amino acid
  Variant (61)..(61): Xaa in position 61 is Ala, Ser, Thr or Val
  Variant (62)..(64): Xaa in position 62 to 64 is any amino acid
  Variant (65)..(65): Xaa in position 65 is Phe or Leu
  Variant (66)..(67): Xaa in position 66 to 67 is any amino acid
  Variant (68)..(68): Xaa in position 68 is Gly or Thr
  Variant (69)..(69): Xaa in position 69 is any amino acid
  Variant (70)..(70): Xaa in position 70 is Asp, Asn, Ser or Thr
  Variant (71)..(72): Xaa in position 71 to 72 is any amino acid
  Variant (73)..(73): Xaa in position 73 is Ala, Glu, Asn, Ser or Thr
  Variant (74)..(74): Xaa in position 74 is Ala, Cys, Ser, Thr or Val
  Variant (75)..(87): Xaa in position 75 to 87 is any amino acid
  Variant (88)..(88): Xaa in position 88 is Ala, Cys, Asp, Gly, Ser or Val
  Variant (89)..(89): Xaa in position 89 is Ala or Ile
  Variant (90)..(90): Xaa in position 90 is any amino acid
  Variant (91)..(91): Xaa in position 91 is Ala, Asp, Gly, Asn or Ser
LXXXXXXXXXXXXVXXXXXPMXXXXXXGXXXXXXXXXXXXXXXXXXXXXXXXXXXXXXXXXXXXXXXXXXXXXXXXXXXXXXXXXXXXXXX

SEQ ID NO: 14874 - protein, 72 aa, Artificial sequence
  Consensus
  Variant (3)..(3): Xaa in position 3 is Phe or Leu
  Variant (6)..(6): Xaa in position 6 is Ala or Ser
  Variant (7)..(7): Xaa in position 7 is Ile or Leu
  Variant (8)..(8): Xaa in position 8 is any amino acid
  Variant (9)..(9): Xaa in position 9 is Ala or Thr
  Variant (10)..(10): Xaa in position 10 is Ile, Leu or Val
  Variant (11)..(11): Xaa in position 11 is any amino acid
  Variant (12)..(12): Xaa in position 12 is Ala, Ser, Thr or Val
  Variant (13)..(14): Xaa in position 13 to 14 is any amino acid
  Variant (15)..(15): Xaa in position 15 is Lys or Arg
  Variant (16)..(18): Xaa in position 16 to 18 is any amino acid
  Variant (19)..(19): Xaa in position 19 is Asp, Glu, Gly, Gln, Ser or Thr
  Variant (20)..(20): Xaa in position 20 is any amino acid
  Variant (21)..(21): Xaa in position 21 is Ala, Ser or Thr
  Variant (22)..(23): Xaa in position 22 to 23 is any amino acid
  Variant (25)..(25): Xaa in position 25 is Ile, Leu or Val
  Variant (26)..(27): Xaa in position 26 to 27 is any amino acid
  Variant (29)..(29): Xaa in position 29 is Ala or Ser
  Variant (30)..(30): Xaa in position 30 is any amino acid
  Variant (31)..(31): Xaa in position 31 is Phe or Tyr
  Variant (32)..(32): Xaa in position 32 is Phe, Leu or Met
  Variant (34)..(34): Xaa in position 34 is any amino acid
  Variant (36)..(37): Xaa in position 36 to 37 is any or no amino acid
  Variant (39)..(48): Xaa in position 39 to 48 is any amino acid
  Variant (49)..(50): Xaa in position 49 to 50 is any or no amino acid
  Variant (52)..(54): Xaa in position 52 to 54 is any amino acid
  Variant (55)..(55): Xaa in position 55 is Ile, Leu or Val
  Variant (56)..(56): Xaa in position 56 is any amino acid
  Variant (57)..(57): Xaa in position 57 is Ala, Asp or Ser
  Variant (59)..(59): Xaa in position 59 is Ile, Leu or Val
  Variant (60)..(60): Xaa in position 60 is any amino acid
  Variant (61)..(61): Xaa in position 61 is Ile or Leu
  Variant (63)..(63): Xaa in position 63 is any amino acid
  Variant (64)..(64): Xaa in position 64 is Ala, Ser or Thr
  Variant (66)..(66): Xaa in position 66 is Phe or Tyr
  Variant (67)..(67): Xaa in position 67 is any amino acid
  Variant (68)..(68): Xaa in position 68 is Ala, Asp, Glu, Gly, Asn or Ser
  Variant (69)..(69): Xaa in position 69 is His, Lys or Arg
  Variant (70)..(71): Xaa in position 70 to 71 is any amino acid
  Variant (72)..(72): Xaa in position 72 is Ala, Ile or Val
HFXFNXXXXXXXXXXXXXXXXXXLXXXLXXXXRXNXXLXXXXXXXXXXXXEXXXXXXYXXXEXXRXXXXXXX

SEQ ID NO: 14875 - DNA, 1431 bp, Escherichia coli
  CDS (1)..(1431)
atgaaggattatgtaatggaaaactttaaacatctccctgaaccgttccgcattcgtgttattgagccagtaaaacgtaccactcgcgcttatcgtgaagaggcaattattaaatccggtatgaacccgttcctgctggatagcgaagatgtttttatcgatttactgaccgacagcggcaccggggcggtgacgcagagcatgcaggctgcgatgatgcgcggcgacgaagcctacagcggcagtcgtagctactatgcgttagccgagtcagtgaaaaatatctttggttatcaatacaccattccgactcaccagggccgtggcgcagagcaaatctatattccggtactgattaaaaaacgcgagcaggaaaaaggcctggatcgcagcaaaatggtggcgttctctaactatttctttgataccacgcagggccatagccagatcaacggctgtaccgtgcgtaacgtctatatcaaagaagccttcgatacgggcgtgcgttacgactttaaaggcaactttgaccttgagggattagaacgcggtattgaagaagttggtccgaataacgtgccgtatatcgttgcaaccatcaccagtaactctgcaggtggtcagccggtttcactggcaaacttaaaagcgatgtacagcatcgcgaagaaatacgatattccggtggtaatggactccgcgcgctttgctgaaaacgcctatttcatcaagcagcgtgaagcagaatacaaagactggaccatcgagcagatcacccgcgaaacctacaaatatgccgatatgctggcgatgtccgccaagaaagatgcgatggtgccgatgggcggcctgctgtgcatgaaagacgacagcttctttgatgtgtacaccgagtgcagaaccctttgcgtggtgcaggaaggcttcccgacatatggcggcctggaaggcggcgcgatggagcgtctggcggtaggtctgtatgacggcatgaatctcgactggctggcttatcgtatcgcgcaggtacagtatctggtcgatggtctggaagagattggcgttgtctgccagcaggcgggcggtcacgcggcattcgttgatgccggtaaactgttgccgcatatcccggcagaccagttcccggcacaggcgctggcctgcgagctgtataaagtcgccggtatccgtgcggtagaaattggctctttcctgttaggccgcgatccgaaaaccggtaaacaactgccatgcccggctgaactgctgcgtttaaccattccgcgcgcaacatatactcaaacacatatggacttcattattgaagcctttaaacatgtgaaagagaacgcggcgaatattaaaggattaacctttacgtacgaaccgaaagtattgcgtcacttcaccgcaaaacttaaagaagtttaa

SEQ ID NO: 14876 - protein, 476 aa, Escherichia coli
MKDYVMENFKHLPEPFRIRVIEPVKRTTRAYREEAIIKSGMNPFLLDSEDVFIDLLTDSGTGAVTQSMQAAMMRGDEAYSGSRSYYALAESVKNIFGYQYTIPTHQGRGAEQIYIPVLIKKREQEKGLDRSKMVAFSNYFFDTTQGHSQINGCTVRNVYIKEAFDTGVRYDFKGNFDLEGLERGIEEVGPNNVPYIVATITSNSAGGQPVSLANLKAMYSIAKKYDIPVVMDSARFAENAYFIKQREAEYKDWTIEQITRETYKYADMLAMSAKKDAMVPMGGLLCMKDDSFFDVYTECRTLCVVQEGFPTYGGLEGGAMERLAVGLYDGMNLDWLAYRIAQVQYLVDGLEEIGVVCQQAGGHAAFVDAGKLLPHIPADQFPAQALACELYKVAGIRAVEIGSFLLGRDPKTGKQLPCPAELLRLTIPRATYTQTHMDFIIEAFKHVKENAANIKGLTFTYEPKVLRHFTAKLKEV

SEQ ID NO: 14877 - DNA, 1638 bp, Fusobacterium nucleatum subsp. nucleatum ATCC 25586
  CDS (1)..(1638): transl_table=11
atgaaaaaatatttacttgatgtcccagtaccacgctctttttcttatgttaaacgtaacattcctgaagtgacagttgaacaaagggaacgtgcattaaaagcaactcactataatgaatttgctttccctgctggaatgctaacagtggatatgttatcagactcgggaactactgctatgacagaccaacaatggtcagctatgttcctaggtgatgaatcttacggaagaaacaaaggttactatgtattacttgatgcaatgagagattgttttgaaagaggggataatcaaaaaaaaattattaacctagttcgtactgattgtcaagacatagaaaaaatgatgaatgaaatgtatctatgtgaatatgaaggtggactattcaatggtggagctgctcaacttgaaagacctaacgctttcttaatgccacaaggtcgtgcagcagaatctattctatttgaaatagttcgtaagatacttgctgttcgtgaaccaggaaaagtatttactattccatctaatggacactttgatacaacagaaggaaatattaaacaaatgggatctgtccctcgtaacttatataataaagaactattatatgaagttccagaaggtggtcgttatgaaaaaaatcctttcaaaggagatatggatataaataaacttcaacaacttattgatgctgttggaatagaaaatataccaatgatttatacaacagtaactaacaacactatttgtggacaagcagtatcaatgaaaagtattcgtgaaactgcaaaaattgctcataaatatgaaataccatttatgctagatgctgcaagatgggctgaaaactgttactttataaaaatgaatgaagaaggatacagagataaatctattgctgaaattgcaaaagaaatgttctcttactgtgatggatttactgcttctcttaaaaaagatggacatgctaatatgggaggaattttagctttccgtgataaaggatatttctggaagaaattctctgattttaatgaagatggaacagttaaaacagatgtaggaatattattaaaagttaaacaaatatcttcttatggtaatgactcttatggaagtatgtcaggtcgtgacattatggcacttgctgctggactttatgaatgttgtaatttcaactacctacaagaaagagttgaacaatgtaactatctagcagaaggtttctataaagcaggtgttaaaggagttgttcttccagcaggaggacacggagtctatataaatatggatgaattctttgatggaaaaagaggacatgaaacttttgcaggagaaggattcagtcttgaacttatcagaagatatggaattcgtgtttctgaattaggagattattctatggaatatgatttaaaaactcctgaacaacaagcagaagttgcaaatgttgtaagatttgcaataaatagaagtgtttattcacaagaacatcttgactatgttattgcagctgtaaaagctctttatgaagatagagaaagtattcctaatatgagaattgtttctggtcataatttacctatgagacacttccatgctttcttggaaccttatccaaatgaagaaaaatag

SEQ ID NO: 14878 - protein, 545 aa, Fusobacterium nucleatum subsp. nucleatum ATCC 25586
MKKYLLDVPVPRSFSYVKRNIPEVTVEQRERALKATHYNEFAFPAGMLTVDMLSDSGTTAMTDQQWSAMFLGDESYGRNKGYYVLLDAMRDCFERGDNQKKIINLVRTDCQDIEKMMNEMYLCEYEGGLFNGGAAQLERPNAFLMPQGRAAESILFEIVRKILAVREPGKVFTIPSNGHFDTTEGNIKQMGSVPRNLYNKELLYEVPEGGRYEKNPFKGDMDINKLQQLIDAVGIENIPMIYTTVTNNTICGQAVSMKSIRETAKIAHKYEIPFMLDAARWAENCYFIKMNEEGYRDKSIAEIAKEMFSYCDGFTASLKKDGHANMGGILAFRDKGYFWKKFSDFNEDGTVKTDVGILLKVKQISSYGNDSYGSMSGRDIMALAAGLYECCNFNYLQERVEQCNYLAEGFYKAGVKGVVLPAGGHGVYINMDEFFDGKRGHETFAGEGFSLELIRRYGIRVSELGDYSMEYDLKTPEQQAEVANVVRFAINRSVYSQEHLDYVIAAVKALYEDRESIPNMRIVSGHNLPMRHFHAFLEPYPNEEK

SEQ ID NO: 14879 - DNA, 1392 bp, Clostridium tetani E88
  CDS (1)..(1392): transl_table=11
atggattatatggatttaagtaagtaccctgcagaaccttttaaaattaagagtgttgagcctgttaaaatgatttcaagagaagaacgtgaaatagctatgaaagaggctggatacaacacatttaatttaagatcagaggatgtatatattgatttacttactgactcaggaaccaatgctatgagtgatgctcaatgggcaggtatgatgattggagacgaagcttatgctggaagtaaaaactggttatttttagaatcaactataaaagaattatttggatttaaacatgttgttcctactcaccaaggacgtggtgcagaaaatctcctttcaagtatagctattaaaccagggcaatatgtagcaggaaatatgtattttacaactactagatatcatcaagaaaaaaatggtggtatttttgtagatataataagagatgaagctcacgatgcaagtatagatattccttttaaaggtaatattgatgttaataaattagaaaaacttattgaagaaaaaggtgcagaaaacatagcttatgtatgccttgctgttactgtaaatctagcaggtggacaaccagtttctatggctaatatgagagcagttagagaacttacagcaaaacatggaattaaggtattctatgatgctactagatgtgttgaaaatgcatattttataaaagaacaagaggaaggatatgcagatgtttcaattaaagatatagtacacgaaatgtttagctattccgatggtgctactatgtctggtaaaaaagatggtattgtaaatatcggtggattcttagcaattaatgatgaagagttatttggaaaagctaaagaaatagtagtagtttacgaaggtatgccatcctatggtggtatgactggccgtgatatgcaggctatagcaattggatttagagaagcaatgcaatatgaatatatagaacacagaataagacaggttagatatcttggagatagattaaaagaagcgggagttcctatagttgaaccagttggaggacatgctgtattcttagatgcaagaagattttgcccacatctagatcaagagcaattcccagctcaatcactagctgcttcactttacattgactctggtgttagatcaatggaacgtggtatagtttcagcaggcagagatgttaatacaggcgaaaatcataaaccaaaattagagacagttagacttactattccaagaagagtttacacttacaaacatatggatgttgttgctgaatcagttatacatctatataagcataaagaagatataagaccacttaaattcacttatgaacctgcacaattaagattctttactgcaaaatttgattatgcagactaa

SEQ ID NO: 14880 - protein, 463 aa, Clostridium tetani E88
MDYMDLSKYPAEPFKIKSVEPVKMISREEREIAMKEAGYNTFNLRSEDVYIDLLTDSGTNAMSDAQWAGMMIGDEAYAGSKNWLFLESTIKELFGFKHVVPTHQGRGAENLLSSIAIKPGQYVAGNMYFTTTRYHQEKNGGIFVDIIRDEAHDASIDIPFKGNIDVNKLEKLIEEKGAENIAYVCLAVTVNLAGGQPVSMANMRAVRELTAKHGIKVFYDATRCVENAYFIKEQEEGYADVSIKDIVHEMFSYSDGATMSGKKDGIVNIGGFLAINDEELFGKAKEIVVVYEGMPSYGGMTGRDMQAIAIGFREAMQYEYIEHRIRQVRYLGDRLKEAGVPIVEPVGGHAVFLDARRFCPHLDQEQFPAQSLAASLYIDSGVRSMERGIVSAGRDVNTGENHKPKLETVRLTIPRRVYTYKHMDVVAESVIHLYKHKEDIRPLKFTYEPAQLRFFTAKFDYAD

SEQ ID NO: 14881 - DNA, 1380 bp, Bacteroides thetaiotaomicron VPI-5482
  CDS (1)..(1380): transl_table=11
atggaattaccttttgctgaatcatggaaaatcaagatggtagaacccatcagaaaaagtacccgcgaagaacgcgagcaatggattaaagaagcacattataacgtctttcaactcaaatcagagcaagtttatattgatcttatcaccgactccggaacgggagccatgagcgaccgccaatgggcaggcatgatgctgggtgatgaaagttatgccggtgccacctccttcttcaaactaaaagataccattacaagaataacaggattcgaatacatcattcctacccatcaaggacgggcagcagaaaatgttcttttctcttatctggtacatgaaggcaatatagtacccggcaactcacatttcgataccaccaaaggacatatcgaaggacggcacgccatcgcactggactgtacgattgacgaagcaaagaatactcaactggaaattcccttcaaaggaaatgtagaccctgccaaattagagaaagcactaagcgaatatgccgaccgcattccttttatcattgttaccattaccaacaataccgcaggaggtcaacctgtatccatgcaaaacctgcgtgaagtacgtgctatcgccaataaatacaacaaacctgtacttttcgactccgcccgctttgctgagaatgcctacttcatcaagatgcgtgaaaaaggttatcaagacaaatcaatcaaagaaatcacccgtgaaatgttcgatcttgccgacggtatgacaatgagtgccaagaaagacggcatagtcaacatgggcggtttcattgccacccgacgcaaagaatggtatgaaggtgccaaaggtttctgcgtgcaatacgaagggtacttaacctacggcggcatgaacggacgggacatgaacgccctcgctatcggtcttgacgaaaatacagaatttgataacctggaaacacgtatcaaacaggtagaatacctcgcccagaaactggacgaatacgaaatcccctatcaacgacctgccggcggccatgctattttcgtcgatgcttccaaagtgctgacacatgtcccgaaagaagaatttcccgcacagacattaaccgtcgaactttatctggaggcaggcatacgcggctgcgagattggttacatccttgccgaccgtgaccctattactcacgaaaatcgctttaacggccttgatttacttcgccttgccatccctcgcagggtatatacggacaatcacatgaacgtaatagctgccgccctcagaaacgtattcgaacggagagaaacgatcacccgtggtgtgcgcatcgcttgggaagcccccttgatgcggcattttaccgttcagttagaacgattgtctgtatag

SEQ ID NO: 14882 - protein, 459 aa, Bacteroides thetaiotaomicron VPI-5482
MELPFAESWKIKMVEPIRKSTREEREQWIKEAHYNVFQLKSEQVYIDLITDSGTGAMSDRQWAGMMLGDESYAGATSFFKLKDTITRITGFEYIIPTHQGRAAENVLFSYLVHEGNIVPGNSHFDTTKGHIEGRHAIALDCTIDEAKNTQLEIPFKGNVDPAKLEKALSEYADRIPFIIVTITNNTAGGQPVSMQNLREVRAIANKYNKPVLFDSARFAENAYFIKMREKGYQDKSIKEITREMFDLADGMTMSAKKDGIVNMGGFIATRRKEWYEGAKGFCVQYEGYLTYGGMNGRDMNALAIGLDENTEFDNLETRIKQVEYLAQKLDEYEIPYQRPAGGHAIFVDASKVLTHVPKEEFPAQTLTVELYLEAGIRGCEIGYILADRDPITHENRFNGLDLLRLAIPRRVYTDNHMNVIAAALRNVFERRETITRGVRIAWEAPLMRHFTVQLERLSV

SEQ ID NO: 14883 - DNA, 1380 bp, Porphyromonas gingivalis W83
  CDS (1)..(1380): transl_table=11
atggaattacctttttcagaatcctaccgcattaaaatggtagagtctatccgcaagagtacgcgtgaagaacgcgagcagtggatcaaggaagcccattacaatctcttcctcctcaagagcgactatgtatttatcgatttgctcactgattccggcacaggtgctatgagcgaccgccaatggtctgccatgatgctcggcgatgagagctatgcaggtgcacgctcatactataatatgaagaatgccattcacgacattctgggcttcgactacttcctccccactcatcagggtcgtgctgccgaaaatgtacttttctccactatcgtgaaagaaggcgatgtactgcccggcaactctcacttcgacacgactaaagggcatattgaataccgtcgcgcatttgcccctgactgcaccatcgacgaagctgccgatacgcagatcgagcttccgttcaagggcaatatggatctgaacaagttagagaaaatactgaaagagactcctaaggaaaagatcccttgcgtagtgctcacgatcacgaacaacacagccggagggcagcccgtttctatgaagaatatacgtgaagtgagcgagctgacacatcgttatggtattcgcctgctgatcgactctgcacgctttgctgaaaatgcctacttcatcaagacccgcgaagccggctatgaaaataagagcatcaaggaaatcgtgaaggaaatctattcgtatgccgatatgatgaccatgtccagcaagaaagacgctatcgtgaatatgggtggtttcgtggcattcaaggatgaagagctcttcaagcgttgccagatgttctgtatcatgaacgaaggctttattacttacggtggtatgagcggtcgtgatatgaatgctctggcacaaggcctggacgaaggtaccgacttcgatacgcttgagacccgtatcaaacaggtggaatatctgggcaaaaagttggacgaatatggtattccctaccagcgtcctgccggcggacacgccattttccttgatgctaagaagatccttacaaatgtgccgaaagaagagttcatcgctcagactttgggcgttgagctgtatttggaagccggcatccgtggtgttgagatcggttctatccttgcagaccgtgaccccgtgacgaaggagaaccgctatccgcgtctcgagctcctgcgtctggctattccgcgtcgtacatatacgaacaaccacatggatgttatcgctgctgcggtaaagaatgtatacgaccgtcgcgaaagcattacacgtggctatgtgattacatatgagaatccaatcatgcgtcacttcactgttgagctggaaaaagccaagtaa

SEQ ID NO: 14884 - protein, 459 aa, Porphyromonas gingivalis W83
MELPFSESYRIKMVESIRKSTREEREQWIKEAHYNLFLLKSDYVFIDLLTDSGTGAMSDRQWSAMMLGDESYAGARSYYNMKNAIHDILGFDYFLPTHQGRAAENVLFSTIVKEGDVLPGNSHFDTTKGHIEYRRAFAPDCTIDEAADTQIELPFKGNMDLNKLEKILKETPKEKIPCVVLTITNNTAGGQPVSMKNIREVSELTHRYGIRLLIDSARFAENAYFIKTREAGYENKSIKEIVKEIYSYADMMTMSSKKDAIVNMGGFVAFKDEELFKRCQMFCIMNEGFITYGGMSGRDMNALAQGLDEGTDFDTLETRIKQVEYLGKKLDEYGIPYQRPAGGHAIFLDAKKILTNVPKEEFIAQTLGVELYLEAGIRGVEIGSILADRDPVTKENRYPRLELLRLAIPRRTYTNNHMDVIAAAVKNVYDRRESITRGYVITYENPIMRHFTVELEKAK

SEQ ID NO: 14885 - DNA, 1449 bp, Rhodopseudomonas palustris CGA009
  CDS (1)..(1449): transl_table=11
atggcgacagtgaagtttttcggcaacgaggcggtgccgctcgagatgcacaaggtgcggatcgtacagaaactcaacctgccgccggtcgagcgccgcctggagaagatcaccgaggcgggcaacaacaccttcctgctgaagaacgacgacgtcttcctcgacatgctgaccgacagtggcgtcaacgcgatgagcgaccgccagcaggccgcgatgctgaccgccgacgactcctacgccggcagcgccacctacacccggctcgaagacaagctgcgcgacatcttcggcatgcactacttcctgccgacccatcagggccgtgcctgtgagcacatcctcgccaaggtgttcgtcacgcccggcaaggtggtgccgatgaactatcacttcaccaccaccaaggcgcacatcgtgctgcagggcggcacggtggaggaactggtgaccgatgccggcctcgaagtgaccagcgcgaacccgttcaagggcaacatggacatcgccaagctgcgcgcggtgatcgagaaggtcggcgccgccaatgtcggcttcgtgcggatggagagcggcaccaacctgatcggcggccagccggtgtcgctgcagaacctcgccgacgtcagcaacgtctgcaaggagcacggcgttccgctggtgctcgacgccagcctgctggccgacaatttgtacttcaacaagacccgcgaggatcactgcaagacgctgtcgatccgcgagatcacccgccgcaccgccgacctctgcgacgtcatctacttctcggcgcgcaagctcggctgtgcccgcggcggcggcatctgcatccgcgaccgggcgctgtatgagaagatgcggccgctggtgccgctgtatgaaggcttcctcacctatggcggcatgtcggtgcgcgaaatggaagcgctcaccgtcggcctcgaagaaaccatggacgaggagatgatcaaccaggggccgcagttcatcgcctatatggtcgagcaactggtcgagcgcggcgttccggtgatcaccccggccggcggcctcggctgccacatcgatgccaagcgcttcgtcgatcacatcccgcagtcgcaatatccggccggcgcgctggcggcggcgctgtacgtcgcctccggcatccgcggcatggagcgcggcacgctgtccgaacagcgcgagcccgacggcagcgagatctacgccaatatggaactggtgcgcctcgccatgccgcgccgggtgttcacgctgtcgcaggtcaaatacgcggtcgaccgcattgcctggttgtacaccaaccgcaagctgatcgagggcctgaccttcgtcgaggagccggaagtgctgcggttcttctacggcctgctcaagccggtgaccgactggcagaacaagctggtggcgaaattccgcgaggattttggcgacagcctgtga

SEQ ID NO: 14886 - protein, 482 aa, Rhodopseudomonas palustris CGA009
MATVKFFGNEAVPLEMHKVRIVQKLNLPPVERRLEKITEAGNNTFLLKNDDVFLDMLTDSGVNAMSDRQQAAMLTADDSYAGSATYTRLEDKLRDIFGMHYFLPTHQGRACEHILAKVFVTPGKVVPMNYHFTTTKAHIVLQGGTVEELVTDAGLEVTSANPFKGNMDIAKLRAVIEKVGAANVGFVRMESGTNLIGGQPVSLQNLADVSNVCKEHGVPLVLDASLLADNLYFNKTREDHCKTLSIREITRRTADLCDVIYFSARKLGCARGGGICIRDRALYEKMRPLVPLYEGFLTYGGMSVREMEALTVGLEETMDEEMINQGPQFIAYMVEQLVERGVPVITPAGGLGCHIDAKRFVDHIPQSQYPAGALAAALYVASGIRGMERGTLSEQREPDGSEIYANMELVRLAMPRRVFTLSQVKYAVDRIAWLYTNRKLIEGLTFVEEPEVLRFFYGLLKPVTDWQNKLVAKFREDFGDSL

SEQ ID NO: 14887 - DNA, 1380 bp, Treponema denticola ATCC 35405
  CDS (1)..(1380): transl_table=11
atgaaaaagtatgtaccggaaccttttagaattaagatggttgaacctatcaaaatgacaacacgtgaggaccgcattaagtatcttgaaaaagcaaaatacaatatgtttaacttacgtggagaagatgtctacattgacttattgacagacagcggcacaaacgcaatgagcgataagcaatggggaggcgttatggtcggagatgaagcctatgccggaggaaaaagctatttcaaattggttgatgccggaaaggatatcttcggatatgaatttatccagcccgtccatcagggccgagcagcagaaaaggttttattccccttgttgctcaaaaaaggccaagttgctatttcaaatatgttctttgacacaaccagagctcatgtaactctggccggaggaagacctctcgactgcgtatgtaaggaggcaaaaaaaccttccgaatatgcaccttttaagggaaatatggatgttgaaaagctcgaacagcttattaacgagcatggaaaagaaaaggtcggaatgattgtaatgactattacaaacaactctgccggaggacaacctgtttcaattcagaacatccgtgatgttgccaaaattgcaaaaaaatacggcattttgttcaatattgatgcagcacgatttgcagaaaatgcctactttgtaaaacaaagagaagaagaattcaagaacaagcccattaaagaaattattcgtgaaatgttcagctatgccgatacctttacgatgagtgcaaaaaaagatgctatcgttaatatgggcggtttgataggtattaaaaacaatcaagaaatctatcagatgattaagggcaactgtatttcttttgaaggatttattacctacggaggtctttcaggacgcgatcttgaagcattagccataggtttatacgaaggtattgatgaagaatatttaaaataccgaaacgcttctatggaatacctagcctctcagctccttgatgcaggcgttgccattcaaaaccctgcaggaggacacggtgtttatgttgatgccaacgccatgttcccgcacattccctattatcaattccccggccatactctttgcgtagagttatacaaagaagccggaatccgaacatgcgacatcggttcctttatgctcggaaacgatcccgaaacaggagaacagatcaaatcggaattcgaatttgcccgtcttgcaattccaagaagagtatacacccaatctcacttagacgttattgcaggagctttaattaacattaaagaaagagcctctcaggttaagggctacaaaattatctgggaaccaccgattcttagacacttccaagctcatttggaacccataaaataa

SEQ ID NO: 14888 - protein, 459 aa, Treponema denticola ATCC 35405
MKKYVPEPFRIKMVEPIKMTTREDRIKYLEKAKYNMFNLRGEDVYIDLLTDSGTNAMSDKQWGGVMVGDEAYAGGKSYFKLVDAGKDIFGYEFIQPVHQGRAAEKVLFPLLLKKGQVAISNMFFDTTRAHVTLAGGRPLDCVCKEAKKPSEYAPFKGNMDVEKLEQLINEHGKEKVGMIVMTITNNSAGGQPVSIQNIRDVAKIAKKYGILFNIDAARFAENAYFVKQREEEFKNKPIKEIIREMFSYADTFTMSAKKDAIVNMGGLIGIKNNQEIYQMIKGNCISFEGFITYGGLSGRDLEALAIGLYEGIDEEYLKYRNASMEYLASQLLDAGVAIQNPAGGHGVYVDANAMFPHIPYYQFPGHTLCVELYKEAGIRTCDIGSFMLGNDPETGEQIKSEFEFARLAIPRRVYTQSHLDVIAGALINIKERASQVKGYKIIWEPPILRHFQAHLEPIK

SEQ ID NO: 14889 - DNA, 1380 bp, Treponema denticola ATCC 35405
  CDS (1)..(1380): transl_table=11
atggatattaaaaattatcctgcggaaccttttagaattaaggttgtagaaactgttaagatgatcgataaggatcaaagagcaaaggttgccaaagaagccggttataataccttccttattaattcggaagatgtttatatcgaccttcttaccgactccggaacaaacgccatgagcgataaacaatgggccggaatgatgataggagatgaagcctatgccggaagccgcaactttcatcacttggaagaaacggttcaagagattttcggctttaagcatcttgtgccgacccatcaaggccgcggtgccgaaaaccttctttcaaggatagccattaaacccggtcaatatgtacccggcaacatgtattttaccactaccagataccatcaggaagcaaacggcggtatcttcgtggatatcataaacgatgatgctcatgatgcaggcaaaaatgttccttttaaaggcgacatcgacttgaacaagcttgaaaagcttataaaagaaaagggagccgaaaatatagcctatgtatgtttggctgttacggtaaaccttgcaggcggtcagcccgtttctatgaagaacatgaaggccgtccgtgagcttacaaaaaagcacggcatcaaggtattctacgatgcaacccgctgtgtagaaaacgcctactttatcaaagaacaagaagccggttatgccgacaagtctatcaaagaaatcgtaagagaaatgttcagctatgcagacggatgtaccatgagcggtaaaaaagactgtatcgtaaacatcggaggcttcctctgtatgaacgatgaagatcttttccaagctgcaaaagaattcgttgttgtatttgaaggtatgccttcatacggcggtatggcaggacgcgatatggaagctatggctatcggtctaaaagaagctctccagtttgaatacatcgaacaccgaatcaagcaggtccgctatttaggcgacaagctcttggaagccggagttcctattattgagcccgtaggaggacatgcagtatttcttgatgcaagacgcttctgtcctcatcttaagcaaaccgaatttcccgcacaggccctagccgcagagctttatatcgaatcgggagttagaagtatggaacgcggtatcgtttctgcaggacgcgatcccaaaacaagggaaaaccacgtaccaaagcttgaaacagtccgcttaacaattccgcgccgtgtttatacatataaacacatggacattgtagcagatgccgttattaaattgtacaaacacaaggaagttataaaaggattaaagttcgtttacgaacctaaacaactccgcttctttacggcacgctttgagcatatctaa

SEQ ID NO: 14890 - protein, 459 aa, Treponema denticola ATCC 35405
MDIKNYPAEPFRIKVVETVKMIDKDQRAKVAKEAGYNTFLINSEDVYIDLLTDSGTNAMSDKQWAGMMIGDEAYAGSRNFHHLEETVQEIFGFKHLVPTHQGRGAENLLSRIAIKPGQYVPGNMYFTTTRYHQEANGGIFVDIINDDAHDAGKNVPFKGDIDLNKLEKLIKEKGAENIAYVCLAVTVNLAGGQPVSMKNMKAVRELTKKHGIKVFYDATRCVENAYFIKEQEAGYADKSIKEIVREMFSYADGCTMSGKKDCIVNIGGFLCMNDEDLFQAAKEFVVVFEGMPSYGGMAGRDMEAMAIGLKEALQFEYIEHRIKQVRYLGDKLLEAGVPIIEPVGGHAVFLDARRFCPHLKQTEFPAQALAAELYIESGVRSMERGIVSAGRDPKTRENHVPKLETVRLTIPRRVYTYKHMDIVADAVIKLYKHKEVIKGLKFVYEPKQLRFFTARFEHI

SEQ ID NO: 14891 - DNA, 1617 bp, Entamoeba histolytica HM-1:IMSS
  CDS (1)..(1617)
atgaagcaatctactgaacttggtgttccagttcctacacacgtttcatatgttgtaagacaaacaactgatcttaaaccagaagaaagagaaaaaattcagaaacaaactgaatataattgtttctttttcccatcacaaatgcttcttgtagattatctttccgactctggatcatctgctatgactgatattcaatggagttcattgtttagaggagatgaagcatatggaagaaatcaaggatattatgctttccaagaatctgttagagacgcctttgaacgaggggataaagccaggtgggtggttaaagatattgttagtggtattccaaatttcacaaataatccagaagatccatattggactgaaccagaagttccaggcacttttgttaataaaggaagacttcaaatagaaagaccaaatttctttatcttacctcaaggaagatgtgcagaatgtttattatatgaagttatgtctcaatgtcttggaaaaggagaatggcatttaatttcaaatggatggtttgatactactgaggctaatgctagaaacaatggattccatactgttaatttgtttgctaagaactatcatgatccagtagacccagagactctttggactaagaatgagtttaaaggaaatttgaatattgaacgtgctgaagaatttattaatgaaaagggaaaagaacatattcctttaattttaatgactattaccaacaacactggtgctggtcaaccagtttcaatgaagaatataagagaaacttctgaattagcaaagaagtatgacattccattcttctttgacgcagcaagatttgctgaaaatgcatatttcattcatgaatttgaagaaggatataataaagtttctattccagaaattgttaaagaaatgtttagttatgttgatggattttgtatttctctaaagaaagatggagtttgtaatatgggaggtgcattggctttcagagatcaaggagttttttggagaaagtttagtactaaaggtgatgttggagtagtcttaaaacaacttcaaattttgagatatggtaatgattcttatggaggattaagtggaagagatattatggcatgtgctatgggtttatctgttgttgaaggagagtcatatctcaaaggaagaatagaacaagtacgatatttcgggtatgagttagcaaagagaaatattccagttttcttaccaccaggagggcatgcaatttatattgaaactgataaattctttaataatagaaagaattattctcctggagatttccttggagttggattagttattgaaatgatcagaatgtatggaattagagcttgtgaattgggaccatttgggtttgaatgggataataaagatgaagaagatagaaaaggaattaatgaccaagttagatttgctgttccaagaaacgtatattctaaagagcatattgattatacagttagagcgttagaacagatgtatatgaatagggatttaattcccaaagttagaatttctagaggaagacatttaaagttaagacacttccagtctggattagagcctatttataatgagtccaaataa

SEQ ID NO: 14892 - protein, 538 aa, Entamoeba histolytica HM-1:IMSS
MKQSTELGVPVPTHVSYVVRQTTDLKPEEREKIQKQTEYNCFFFPSQMLLVDYLSDSGSSAMTDIQWSSLFRGDEAYGRNQGYYAFQESVRDAFERGDKARWVVKDIVSGIPNFTNNPEDPYWTEPEVPGTFVNKGRLQIERPNFFILPQGRCAECLLYEVMSQCLGKGEWHLISNGWFDTTEANARNNGFHTVNLFAKNYHDPVDPETLWTKNEFKGNLNIERAEEFINEKGKEHIPLILMTITNNTGAGQPVSMKNIRETSELAKKYDIPFFFDAARFAENAYFIHEFEEGYNKVSIPEIVKEMFSYVDGFCISLKKDGVCNMGGALAFRDQGVFWRKFSTKGDVGVVLKQLQILRYGNDSYGGLSGRDIMACAMGLSVVEGESYLKGRIEQVRYFGYELAKRNIPVFLPPGGHAIYIETDKFFNNRKNYSPGDFLGVGLVIEMIRMYGIRACELGPFGFEWDNKDEEDRKGINDQVRFAVPRNVYSKEHIDYTVRALEQMYMNRDLIPKVRISRGRHLKLRHFQSGLEPIYNESK

SEQ ID NO: 14893 - DNA, 1389 bp, Desulfovibrio vulgaris subsp. vulgaris str. Hildenborough
  CDS (1)..(1389): transl_table=11
atgaagcgcattcccgaaccgttccgcatcaagatgatcgaacccattcgcatgaccaccctcgaagaccgcaccagggcactcgaagaggcggggtacaaccccttccttctcaagagcgaggatgtgtacatcgacctgctgaccgactccggcaccggtgccatgagcgaccgtcagtgggcgggcctcatgatgggcgacgaggcttacgctggtagccgcaacttcctgaatctcgaaaaggccgtgaaggacgtgttcggctacgagcacaccgtccccacccaccaggggcgcggcgccgaacagattctcttcccctgccttgtggcccgcatgaagggcgacaagcccgtcttcatctccaactaccatttcgacaccaccgccgcccacgtcgagatgacgggcgccaaggccatcaacgtggtcaccgagaaggcgttcgacaccggcacctactacgactggaagggcgacttcgaccttgagaagctcgaagccaccatcaggcagcatggcgcgcagaacgtggctggcatcatcgtcaccatcacctgcaacagcgcaggcggccagcccgtctccatggcgaacatccgcgaggcagcagccatcgccaagcgccatggcatcaccgtcatcatcgactccgcccgtttctgcgagaacgcatggttcatcaagcagcgtgaggccggatacgccgacaagtccatccgtgagatcatccgcgagatgtactcctacggcgacgtgctcacctgctctgccaagaaggaccccatcgtcaacatcggcggcctctgctgcatcaaggaggacgtcgacctcttccgtgccgtgcaggtccgctgcgtgcccatggaaggcttcgtcacctacggcggccttgccggacgcgacatggaagcgctggccatcggtctctatgaaggtactgacgaacacttcctcacctaccgcatcaagcaggtcgaatacctcggcgaacgtctgcgtcagggcggggttcccatccagtaccccaccggcggtcacgccgtgttcatcgacgccaagctgatgctgccccacattccgggcaaccagttcccggcacacgccctcgccaatgaggtctacatcgaaggcggcgtgcgcggcgtcgagataggttcgctgctgctcgggcgcgaccccgccaccggcctgcagaaggaatcgccgctggaactgctgcgcctcgccatcccgcgccgcgtctacaccaacgaccacatggactacatcgccgacacggtcatcgccgtgctcgaccgcgcgtcgtccatcaagggccttgagttcacctacgaaccgccggtgctgcgtcacttcaccgcgcgtctgcgccccatcgcctga

SEQ ID NO: 14894 - protein, 462 aa, Desulfovibrio vulgaris subsp. vulgaris str. Hildenborough
MKRIPEPFRIKMIEPIRMTTLEDRTRALEEAGYNPFLLKSEDVYIDLLTDSGTGAMSDRQWAGLMMGDEAYAGSRNFLNLEKAVKDVFGYEHTVPTHQGRGAEQILFPCLVARMKGDKPVFISNYHFDTTAAHVEMTGAKAINVVTEKAFDTGTYYDWKGDFDLEKLEATIRQHGAQNVAGIIVTITCNSAGGQPVSMANIREAAAIAKRHGITVIIDSARFCENAWFIKQREAGYADKSIREIIREMYSYGDVLTCSAKKDPIVNIGGLCCIKEDVDLFRAVQVRCVPMEGFVTYGGLAGRDMEALAIGLYEGTDEHFLTYRIKQVEYLGERLRQGGVPIQYPTGGHAVFIDAKLMLPHIPGNQFPAHALANEVYIEGGVRGVEIGSLLLGRDPATGLQKESPLELLRLAIPRRVYTNDHMDYIADTVIAVLDRASSIKGLEFTYEPPVLRHFTARLRPIA

SEQ ID NO: 14895 - DNA, 1377 bp, Propionibacterium acnes KPA171202
  CDS (1)..(1377): transl_table=11
atgaagtacatccccgaaccgtttaagatcaagatggtcgaaccgattgcgatgacctcccgggaggagcgcgccaacatcctcgcacgggcacattacaacatgttcggcctacccgccgagtccgtctacatcgacctgctcaccgattccggtaccggcgcgatgagtgatgcccagtgggcggccgtgatgcgcggtgacgaggcgtactccggtgggcgcagttatatgcacctcatggacgttgccggcagtatctttggttacagctacattcagccggtgcatcaaggccgtgctgcggaaaaagtgctcatgccgctattggtctctcgtcccggccagctcgtggtggcgaacaccttctttgacaccacacgtgcccacgtcggccttgccggtgggcgtccggtcgacaatgtctgctcggagggtttggattcggccaaagtagccccgttcaagggcaacatggatgtcgcgggcctggagaaactcattgctgagcacggggacgacattgctgcgatcgtcatgaccgtgaccaacaactcggtcggcggtcagccggtttctctgcagaacatgcgagagacctacgaggtggctcacaagtacgcaattccagtctgtcttgacgctgctcgctatgccgagaacgcctatttcatccatgagcgcgaggagggatgtcaggaccgttcgttacgcgatatcgtcgcggagatgttccgctacggcgacatgttcgtcatgagcgcgaagaaggacgccatcgtcaacatgggtggtttgctcggcgtccgcgaagatggcgaactagctgagaaggtcaagagcaacgtcatctcctttgagggctaccttacctacgggggattggcaggtcgcgacttggaagcgttggccgttggcctcgaggagggactcgacatggactggcagcggtaccgtgtcggccaaatccaataccttggcgaccagctcgaggaggctggcgtgcctttccagagccctgttggcggtcatgcagtattcatcgacgccggtcgcatgctgccgcatttggagtggaaacagtacccagggcacgcgctcgctacccaactgtacttggatgcaggaattcgatcctgcgacatcggttcttaccttatggaccgggaccccgttacccaggaggagcaacaggcgcccttcgagttcactcggctagcagtgccgcgacgggtctacacccagtctcacatggacgtcgtcgccgaggccgttaccaagattgcccgggagcctgaaaaagtacccggataccgcattacatgggagcctccggtcttgcgccatttcacaagtcgactcgaaccaattcggtga

SEQ ID NO: 14896 - protein, 458 aa, Propionibacterium acnes KPA171202
MKYIPEPFKIKMVEPIAMTSREERANILARAHYNMFGLPAESVYIDLLTDSGTGAMSDAQWAAVMRGDEAYSGGRSYMHLMDVAGSIFGYSYIQPVHQGRAAEKVLMPLLVSRPGQLVVANTFFDTTRAHVGLAGGRPVDNVCSEGLDSAKVAPFKGNMDVAGLEKLIAEHGDDIAAIVMTVTNNSVGGQPVSLQNMRETYEVAHKYAIPVCLDAARYAENAYFIHEREEGCQDRSLRDIVAEMFRYGDMFVMSAKKDAIVNMGGLLGVREDGELAEKVKSNVISFEGYLTYGGLAGRDLEALAVGLEEGLDMDWQRYRVGQIQYLGDQLEEAGVPFQSPVGGHAVFIDAGRMLPHLEWKQYPGHALATQLYLDAGIRSCDIGSYLMDRDPVTQEEQQAPFEFTRLAVPRRVYTQSHMDVVAEAVTKIAREPEKVPGYRITWEPPVLRHFTSRLEPIR

SEQ ID NO: 14897 - DNA, 1365 bp, Symbiobacterium thermophilum IAM 14863
  CDS (1)..(1365): transl_table=11
atgccaaagggcgagccctttaagatcaagatggtggaaccgatccggctgatcccccgggaggaccgggaggcggccatcaaggcagcgcactacaatcccttcctgctccggtcctccgacgtctacatcgacctgctcaccgactccggcacgggcgcgatgagccagttccagtggtccgccatgatgctgggcgacgagtcgtacgccggcgccagcagctactaccggctgaaggaggcggtcactgacatcaccgggtacgagtacgtcctcccgacccaccagggccgcggcgccgagaagagcgccttcgcgcagctgatcacccggccgggcatgtacgtgctctccaacatgttcttcgacacgactcgcggccacgtgcagctggccggcggccggccgatcgacctgctgctggacgtgcccaccgaggagtaccaccccttcaagggcaacatggacacggccaggctcgaggccttcattcaggagcacggcgcggagaacatcgcctgcatcgtgatgaccgtgaccaacaactccgcgggcgggcagcccgtatccatggccaacatccgcgagacgtcccgcatcgcgcggaagtacggcatcctgctgctgttcgacgtggcccggtacgccgagaactgccacttcatccggatgcgggaggaaggctacgctgacaaggcgcccatcgacatcgcccgggagatgttctcctacggcgacgggttgatgatgagcgccaagaaggacgcgctggtgaacatcggcggcctgctggccttcaaggacgaggagctgtacacccgcgtgggcggcacggtcgtgcccttcgagggcttcctgacctacggcggcctggccggccgggatctggaggccatggcggtgggcctccgggaggcgctggatcccgactacctggcgtaccgggtgggccaggtggagtacctgggcaacctgctgcgcagcgccggcatcccgatccagtggccggtgggcggccatgcggtgttcatcgacgccgcgaagttcctgccgcacatcccgtgggaccagttccccggccacgcgctcacggtggcgctctaccaggagggcggcgtgcgcaccgtggaggtcggctcgctcgtgatgggccgcgaccccgagaccggcgagaacgtccgcagcccgttcgagttcacccggctggcgattccgcggcgggtctacaccaacctgcacctggaagacgtcgccgagaccgtgatcaacgccttccagaagcgggagcagatccgcggcgtcaagttcacccgggagccgaaggtgctgcgccacttcacggcgcacttcgatctggtctag

SEQ ID NO: 14898 - protein, 454 aa, Symbiobacterium thermophilum IAM 14863
MPKGEPFKIKMVEPIRLIPREDREAAIKAAHYNPFLLRSSDVYIDLLTDSGTGAMSQFQWSAMMLGDESYAGASSYYRLKEAVTDITGYEYVLPTHQGRGAEKSAFAQLITRPGMYVLSNMFFDTTRGHVQLAGGRPIDLLLDVPTEEYHPFKGNMDTARLEAFIQEHGAENIACIVMTVTNNSAGGQPVSMANIRETSRIARKYGILLLFDVARYAENCHFIRMREEGYADKAPIDIAREMFSYGDGLMMSAKKDALVNIGGLLAFKDEELYTRVGGTVVPFEGFLTYGGLAGRDLEAMAVGLREALDPDYLAYRVGQVEYLGNLLRSAGIPIQWPVGGHAVFIDAAKFLPHIPWDQFPGHALTVALYQEGGVRTVEVGSLVMGRDPETGENVRSPFEFTRLAIPRRVYTNLHLEDVAETVINAFQKREQIRGVKFTREPKVLRHFTAHFDLV

SEQ ID NO: 14899 - DNA, 1416 bp, Symbiobacterium thermophilum IAM 14863
  CDS (1)..(1416): transl_table=11
ttgctccatgctatgaccgaatcggtccactctggcaaaggaggagttcacgtgcccaagggcgagcccttcaagatcaagatggtggagcccatccggctgatcccccgggaggaccgtgagcgggcgctgaaggaagcgcattacaacccgttcttcctccgatcttctgacgtctacatcgacctgctcaccgactccggtacgggcgcgatgagccagttccagtggtccgccatgatgctgggcgacgagtcgtacgccggcgcaagcagctactacaggctgaaagagacggtcaccgacatcacggggtacgagtacgtcatcccgacccaccagggccgcggcgcagagaaggtcgccttctcgcagctcatcacccggccgggcatgtacgtgctttccaacatgttcttcgacacgacccgcggccacgtgcagctggccggcggccggcccgtcgatctgctcatcgacgtacccaccgaggagtaccaccccttcaagggcaacatggacacggagaggctggagcagttcatccgggagcacggtgcggagaacatcgcctgcatcgtgatgaccgtgaccaacaactccgcgggcgggcagcccgtctccatggccaacatccgggagacttaccagatcgcccggaagtacggcgtgctggtcctgttcgacgtggcccggtacgccgagaactgccacttcatccggatgcgggaggaaggctacgccgacaagcaccccatcgacatcgcccgggagatgttctcctacggcgacgggctgatgatgagtgccaagaaggacgcgctggtcaacatcggcgggctcctcgcctttcgggatgaggaactgttcaccaaggtcggcgcggccgtggtgccgttcgagggcttcctgacctacggcggcctggccgggcgcgatctggaggccatggcggtgggcctccgggaggcgctggaccccgactacctggcgtaccgggtggggcaggtgcagtacctgggcgagatgttgcggaacgcgggcatcccgatccagtggccggtgggcggccatgcggtgttcatcgatgccgcgaagttcctgccgcacgtcccgtgggaccagttccccggccatgccctgaccctcgcgctctacctggagggcggcgtgcgcaccgtagaggtcggctcgctgatgatcggccgcgaccccgagaccggcgagaacgtgcgaggcccgttcgagttcacccggctggcgattccgcggcgggtctacaccaacctgcacctggaggacgtcgccgagaccgtgatcaacgcctttcagaagcgcgaggagatccgcggcgtgaagttcgcccgggagcccaaggtgctccgccacttcacggcctggttcgacccggcttag

SEQ ID NO: 14900 - protein, 471 aa, Symbiobacterium thermophilum IAM 14863
MLHAMTESVHSGKGGVHVPKGEPFKIKMVEPIRLIPREDRERALKEAHYNPFFLRSSDVYIDLLTDSGTGAMSQFQWSAMMLGDESYAGASSYYRLKETVTDITGYEYVIPTHQGRGAEKVAFSQLITRPGMYVLSNMFFDTTRGHVQLAGGRPVDLLIDVPTEEYHPFKGNMDTERLEQFIREHGAENIACIVMTVTNNSAGGQPVSMANIRETYQIARKYGVLVLFDVARYAENCHFIRMREEGYADKHPIDIAREMFSYGDGLMMSAKKDALVNIGGLLAFRDEELFTKVGAAVVPFEGFLTYGGLAGRDLEAMAVGLREALDPDYLAYRVGQVQYLGEMLRNAGIPIQWPVGGHAVFIDAAKFLPHVPWDQFPGHALTLALYLEGGVRTVEVGSLMIGRDPETGENVRGPFEFTRLAIPRRVYTNLHLEDVAETVINAFQKREEIRGVKFAREPKVLRHFTAWFDPA

SEQ ID NO: 14901 - DNA, 1443 bp, Photobacterium profundum SS9
  CDS (1)..(1443): transl_table=11
atgatgaacttaccccaatcctttaagagaaaatctgtagcgttaatgaacttaccccaaccctataagataaaatctgtagagccaattaatttgctctcaaaagaagagcgttttaaagcacttgagagagttggatttaatccatttctgttaaaaagtaatgaagtttttattgatttattaacagactccggcaccggagcgatgagccaagatcagtggtcggccctgatgaaaggagatgaatcctatgccggtagtagcagcttttataagttagaagaagcagttaccgatatttttgattaccaatatacgatcccaacccatcaaggccggggagccgaacaaatattattccctattttaattcagaaaatggaaaaagaacgtggagggaaggcgcctgtttttctctctaattatcatttcgataccaccgccgcacatattgaacttaatggtgcaaaagccgtgaatgtcgtggtcgaagaagcttataaaataaaagattattataattggaaaggtaactttgatttacctttattagtcgggaatattgaaaagtatggttctgaaaatatagcggctattattattaccatcacgtgtaatagtatgggggggcagcctgtttcacttgataatatgaaggccgtttatgatattgcgaaagaatttaatattccagtcgtgatggacgctgcgcgtttctccgaaaatgcgtactttattcttcaacgagatccaatatatttcaatgccagtatcggtgatattgtcaaaaaaatgtttgaatatgcagatatatttacgatgtctgcaaaaaaagacgcgatggttaatatcggtgggttatgttgttttaaaaatgatgaatccctctaccgagaagtgcaaaccttatgtattcctatggaaggattcgccacgtacggtggattagcagggcgtgatatggaagccttagctgtgggtctctatgaggctatcgattaccggtatctatcaacgcggatcaatcaagtttacatgcttaatcaaacacttgctgaggcaggggtgcctgttcagaatccaagcgggggtcatgctgtttttattgatgcaaaggcattcttaccgcatatcccctcggagcaatttcccggtcatgctttggccattgagttatatcttgaagcgggtattcgttccgcagaaattggctccctcctcttaggtcgagagcctaagactagaaaacaaaaagactcaccgacagaacttctgcgtttggctatccctcgacgtacctacaccaatgaacatatggagtatgtggctcactatgtcattaagataatgaaaaacagagataaaatacctggttatcgttttacttatgagcccttagtacttcgccatttcttggcgacgtttgagccggtcagttaa

SEQ ID NO: 14902 - protein, 480 aa, Photobacterium profundum SS9
MMNLPQSFKRKSVALMNLPQPYKIKSVEPINLLSKEERFKALERVGFNPFLLKSNEVFIDLLTDSGTGAMSQDQWSALMKGDESYAGSSSFYKLEEAVTDIFDYQYTIPTHQGRGAEQILFPILIQKMEKERGGKAPVFLSNYHFDTTAAHIELNGAKAVNVVVEEAYKIKDYYNWKGNFDLPLLVGNIEKYGSENIAAIIITITCNSMGGQPVSLDNMKAVYDIAKEFNIPVVMDAARFSENAYFILQRDPIYFNASIGDIVKKMFEYADIFTMSAKKDAMVNIGGLCCFKNDESLYREVQTLCIPMEGFATYGGLAGRDMEALAVGLYEAIDYRYLSTRINQVYMLNQTLAEAGVPVQNPSGGHAVFIDAKAFLPHIPSEQFPGHALAIELYLEAGIRSAEIGSLLLGREPKTRKQKDSPTELLRLAIPRRTYTNEHMEYVAHYVIKIMKNRDKIPGYRFTYEPLVLRHFLATFEPVS

SEQ ID NO: 14903 - DNA, 1467 bp, Photobacterium profundum SS9
  CDS (1)..(1467): transl_table=11
atggaaaactttaaacacttacctgaaccattccgtatccgtgttattgagccagtaaaacgcactactcgtgaatatcgcgatgaagctattttaaaagcgggaatgaacccattcctactagatagtgaagacgtatttattgacctgcttactgatagtggaacgggggcaattactcaagaaatgcaagccgcgatgttccgtggggatgaagcatacagcggtagccgcagttactacgcacttgcgaacgcggtaaaagatatctttggttatgaattaacaattccgactcaccaaggtcgtggtgccgagcaaatctacattcctgtccttatcaagaaacgtgaaatagagaagggactagaccgtaccaaaatggtagcactgtctaactacttctttgatacaacacaaggtcacactcaagtgaactgctgtgtggcaaagaatgtgtatacagaagatgcgtttgatacctcggtcaatgccgatttcaaaggtaactttgacctagttaagctagaagaagcaatccttgcagccgaccctgtaaacgtaccgtacattgtgagtactattacctgtaactctgcaggtggtcagcctgtttctatcgctaacctaaaagcggtgtatgagatcgcacagaaatatgacattccagtaattatggactccgctcgttatgccgagaacgcctactttattcaacaacgtgaagatacttacaaagattggactatcgaagaaatcacgcgtgaatcttataagtatgctgacggcctagcgatgtctgcaaagaaagatgccatggtacagatgggcggtctactttgcttcaaagatgaatccatgatggatgcatacacagagtgtcgtactttgtgtgtgattcaggaaggcttcccaacctacggtggtcttgaaggtggtgcgatggaacgtcttgccgttggtctctatgacggcatgcgtcaggagtggctagcataccgtattggtcaagttcaataccttgtagacggtctagagtctattggtgtcgtatgtcagcaagcggggggccacgcggcattcgttgacgcaggtaagctgcttccacacatttctaccgagcagttccctgcgcatgctcttgcttgcgaactctataaagtggcaggtatccgcgccgttgaaatcggctctctattactaggtcgcgatccagcgacaggtaaacaacatccttgtcctgcggagctacttcgtctgacgatcccacgagcaacttacactcaaacgcatatggatttcgttatagaagcgttccaaaaagtgaaggcaaacgcagcaaatgtgaaaggtcttgattttacttatgagccagcagtgcttcgtcactttacagctcgacttaaagaagttgagcctgtgcaagcagcggtgaaaacggaaaccaagattctagaagaagcttaa

SEQ ID NO: 14904 - protein, 488 aa, Photobacterium profundum SS9
MENFKHLPEPFRIRVIEPVKRTTREYRDEAILKAGMNPFLLDSEDVFIDLLTDSGTGAITQEMQAAMFRGDEAYSGSRSYYALANAVKDIFGYELTIPTHQGRGAEQIYIPVLIKKREIEKGLDRTKMVALSNYFFDTTQGHTQVNCCVAKNVYTEDAFDTSVNADFKGNFDLVKLEEAILAADPVNVPYIVSTITCNSAGGQPVSIANLKAVYEIAQKYDIPVIMDSARYAENAYFIQQREDTYKDWTIEEITRESYKYADGLAMSAKKDAMVQMGGLLCFKDESMMDAYTECRTLCVIQEGFPTYGGLEGGAMERLAVGLYDGMRQEWLAYRIGQVQYLVDGLESIGVVCQQAGGHAAFVDAGKLLPHISTEQFPAHALACELYKVAGIRAVEIGSLLLGRDPATGKQHPCPAELLRLTIPRATYTQTHMDFVIEAFQKVKANAANVKGLDFTYEPAVLRHFTARLKEVEPVQAAVKTETKILEEA

SEQ ID NO: 14905 - DNA, 1401 bp, Photobacterium profundum SS9
  CDS (1)..(1401): transl_table=11
atgaaacgtataccagaaccgttccgcattaaaatggttgaatctattcgcatgacaaacgaagaggatcgacgtgaagccttaattgaagcgggttataaccccttcatgttaagaagcgaagatgtttatatcgatctactgactgattcaggcacaggcgcaatgagtgacgtgcagtgggcaggcttaatgatgggagacgaatcttatgcaggaagccgcaactactttaatttatgcgatgctgtaaaacacttctttgattacaagctcacggttcctgcccatcaagggcgtggcgcagaacagatattatttccttgcttaatagagcgaatgaaaacggtacgtggcggtgatcaacccgtatttatatcgaattaccactttgatacgacagcgggtcatatcgaacttaatggcggtaaagccattaacgtactgactgagaaggcgtttgacacagaaacgtatgacgactggaaagggaattttgatctcgataaactacaatcaaccattgaaatgtatggctcacacaatattgccgccattatcaccacgatcacatgtaacagctcgggcgggcaacccgtttcaatggctaacatgcgtgcggtatacgagattgcgaaagaaaatgatattccagtagtgatcgattcggctcgttattgcgaaaacgcctactttataaagcaacgtgaacctgaatatgccgatacatccattctcgagattattcgcgaaatgtaccgttatggcgacatgttaacgatgtctgctaaaaaagaccctatggtcaatattgggggcttatgctgtattcgtgatcatgaagatcttttccaagcagtacgaacacgttgcgttcctatggaagggtttgttacttatggcggaatggctggacgtgatatggaagccctcgcccgtggtttatatgaaggtgctgatgaagacttccttcactaccgtattggccaagtggaatatttgggtgaacgtttacgagaagcaggtatacccattcaatacccaactggcggtcatgctgtctttgtcgacgcgaccaaaattttgcctcatatccccagtgaacaattcccagcccacgcattatgtaatgagctctatttagagtctggggtgcgggccgtagaaattggttcgttattactgggcagagatcctgaaacaggcaagcagaaagagtcacaattagaattaatgcgcctaactattccacgtcgtgtatataccaatgatcatatggattacgttgccgatgcattaatcgcagttacaaaacgcgcaagtgaaattcgaggactaacctttgagtatgagccaccagtattgcgccatttcaccgctaaattaaaacctgttgaataa

SEQ ID NO: 14906 - protein, 466 aa, Photobacterium profundum SS9
MKRIPEPFRIKMVESIRMTNEEDRREALIEAGYNPFMLRSEDVYIDLLTDSGTGAMSDVQWAGLMMGDESYAGSRNYFNLCDAVKHFFDYKLTVPAHQGRGAEQILFPCLIERMKTVRGGDQPVFISNYHFDTTAGHIELNGGKAINVLTEKAFDTETYDDWKGNFDLDKLQSTIEMYGSHNIAAIITTITCNSSGGQPVSMANMRAVYEIAKENDIPVVIDSARYCENAYFIKQREPEYADTSILEIIREMYRYGDMLTMSAKKDPMVNIGGLCCIRDHEDLFQAVRTRCVPMEGFVTYGGMAGRDMEALARGLYEGADEDFLHYRIGQVEYLGERLREAGIPIQYPTGGHAVFVDATKILPHIPSEQFPAHALCNELYLESGVRAVEIGSLLLGRDPETGKQKESQLELMRLTIPRRVYTNDHMDYVADALIAVTKRASEIRGLTFEYEPPVLRHFTAKLKPVE

SEQ ID NO: 14907 - DNA, 1344 bp, Haloarcula marismortui ATCC 43049
  CDS (1)..(1344): transl_table=11
atgcgctcgtacaaggccaaatcggtaacctcgatacagcttccgccccgtgagcgacgtgagaccgtgctcaccgaggccgggcacaacgtcttcaacctcgctgcggatgacgtctttatcgacttgctaaccgattcggggactggcgcgatgagtgacgaccagtgggcggccgtggttcgaggggacgaggcgtacgccggttcgcgctcgttcaaacgcttccgtgagacggtcgccgacgtgatggggttcgaccgcgtggtcccgacacaccagggccgcggcgcggagaacgtcctgttcggggcactgctggacgacggtgacgtcgttctcaacaacacgcattttgacaccacccgcgcacacgtgacgaatcagggtgcaatcgcggctgactgcccggcagagacggacctgaccactgatactgtcgggacgtttgccggaaacttctccacagaccgggggtgggacgccgtcgaggagcacgggcaggacgctgtttcggccgtcgttctgacgatcacgaacaactccgccgccggccagccggtgtcgatggcgaacatccgcgagacagccgccttcgccacggaaatcgatgcaacgttcgtcatcgacgcctgtcggttcgccgaaaacgcacagttcatcaagcaacgggaccccgaatacgccgatacgcccctcagcgagattgctcgcgagcagttacgtcccgcggacgcaatcacgatgagtggcaaaaaggacgcactggcaaacatcggcgggttcacggctgtccgagacgctgccctgtttgaacagtgcaaacagcgcgcgatcctgtatgaaggattcccgacctacggtggcctcgcaggtcgtgatcttgaagcgatggcgaccggcctgcgggaagcggttcaaccgccgtacgtcgccgagcgaatcgaacaggtcgcgaccctcggggacctcctgcgtgatcgagacatcccgatagtcacgccaaccggcggtcacgccgtctacattgatgcggccgccctgttcccggatattcccgccgaccagtaccccgggcagcgactcgtctgcgaactctaccgcgagggcggcgtccggacagtcgaactcggctcgtttgccttccccgggactaaccgtccggaactcgtccgtctcgcccttcctcgccggacgtactggcacgaacacctcgaacacatcgcggagactgctgcacgagttcgtgaccgccgcgacgagtactccggtctggaaatcgtctgggagcccccaatggaagaactcagacacttctcagcggaacttgagcctgttgcgtag

SEQ ID NO: 14908 - protein, 447 aa, Haloarcula marismortui ATCC 43049
MRSYKAKSVTSIQLPPRERRETVLTEAGHNVFNLAADDVFIDLLTDSGTGAMSDDQWAAVVRGDEAYAGSRSFKRFRETVADVMGFDRVVPTHQGRGAENVLFGALLDDGDVVLNNTHFDTTRAHVTNQGAIAADCPAETDLTTDTVGTFAGNFSTDRGWDAVEEHGQDAVSAVVLTITNNSAAGQPVSMANIRETAAFATEIDATFVIDACRFAENAQFIKQRDPEYADTPLSEIAREQLRPADAITMSGKKDALANIGGFTAVRDAALFEQCKQRAILYEGFPTYGGLAGRDLEAMATGLREAVQPPYVAERIEQVATLGDLLRDRDIPIVTPTGGHAVYIDAAALFPDIPADQYPGQRLVCELYREGGVRTVELGSFAFPGTNRPELVRLALPRRTYWHEHLEHIAETAARVRDRRDEYSGLEIVWEPPMEELRHFSAELEPVA

SEQ ID NO: 14909 - DNA, 1449 bp, Azoarcus sp. EbN1
  CDS (1)..(1449): transl_table=11
atggcacaggtgaagtttttcagcggagagcaggttccgctggaaatgcacaaggtacgcatcgtacagaagctgaaccttccgccggtggaacaccggctcaaggcgatcaccgaagcaggcaacaacactttcctgctgcagaacaaggacgtcttcatggacatgctcaccgacagcggtgtcaatgccatgagcgatcaacagcaggccgcgatgctgatcgccgacgacagctacgccggcagcgcgacctacacccggctcgaaagcaagctccgggaaatcttcggcatggcctatttcctgcccgcccatcaggggcgcgcctgcgaaaacatcctgtcgcaagtgctggtatcgccgggctcgatcgtgccgatgaactatcacttcacgaccaccaaagcgcacatcaccctgaacggcggggtcatcgaagagctggtctcggatgccggcctcgaagtcgtcagcgtccatcccttcaaagggaacatggatatcgccaggctgtcggcggtcatcgaagagcacggcagcaacaagattgcgttcgtccgcatggaagcgggcacgaacctcatcggcggacaaccgttctcgctcgagaacctcaccaacgtgcgtcgcgtgtgcgacaagcacgacgtcctgctcgtgctcgacgcgagcctgctcgccgataacctccacttcatcaagaaccgcgaggaaagctgcaaggatctgagcattcgcgagatcacgcgcaagatggcggacctgtgcgacatcatctatttctcggcacgcaagctcggctgcgcacgcggcggcggcatctgcatcaggaccgaggagctgtaccgcaggatgcgcgggctggtcccgctgtacgaaggcttcctcacgtacggcgggatgtccgtgcgcgaaatggaagcgctgacggtcggcctcgacgaaacgatggacgaggacgtgatcaaccaggggccgcagttcatcggcttcatggtcgacgagctgcaaaaacgcggcgttcccgtcatcacgccggccggcggcctcggttgccacctcaacgtcatgcagttcctcgagcacgtcccgcaggcgcaataccctgccggcgcgctcgcctcggcgctgtatatcgccagcggcatacgcggcatggagcgcggcacgctctccgagcagcgcgaccccgacggcaacgaagtcttggccaacatggaactggtccggctggcgttgccgcgccgggtattcacgctgtcgcaggtcaaatacgcgatcgaccggatctcgtggctgcacgagaaccgccacctcatcggcggcctcgtgttcaccgaagagcctgaaatcctgcgtttcttctatggccggctgaagcccgtttcggattggcagcaaaagctgttcgagaaattccgcgaggacttcggcgacagcctgtag

SEQ ID NO: 14910 - protein, 482 aa, Azoarcus sp. EbN1
MAQVKFFSGEQVPLEMHKVRIVQKLNLPPVEHRLKAITEAGNNTFLLQNKDVFMDMLTDSGVNAMSDQQQAAMLIADDSYAGSATYTRLESKLREIFGMAYFLPAHQGRACENILSQVLVSPGSIVPMNYHFTTTKAHITLNGGVIEELVSDAGLEVVSVHPFKGNMDIARLSAVIEEHGSNKIAFVRMEAGTNLIGGQPFSLENLTNVRRVCDKHDVLLVLDASLLADNLHFIKNREESCKDLSIREITRKMADLCDIIYFSARKLGCARGGGICIRTEELYRRMRGLVPLYEGFLTYGGMSVREMEALTVGLDETMDEDVINQGPQFIGFMVDELQKRGVPVITPAGGLGCHLNVMQFLEHVPQAQYPAGALASALYIASGIRGMERGTLSEQRDPDGNEVLANMELVRLALPRRVFTLSQVKYAIDRISWLHENRHLIGGLVFTEEPEILRFFYGRLKPVSDWQQKLFEKFREDFGDSL

SEQ ID NO: 14911 - DNA, 1404 bp, Nostoc punctiforme PCC 73102
  CDS (1)..(1404)
atgaccgatgccaagcaaacttctccgcgccgccgtcgctcttgggcagagccatataaaattaaggtggttgagccattaaaaattactactcgcgctgaacgcgaacaggcgatcgcacaagcgggttacaatacttttctactacgttctgaagatgtctatattgatttgctcactgatagcggcacttcagccatgagcgattatcagtgggcagggatgatgctgggtgatgaagcttatgccggcagcaaaaatttttacaatttagaagcaagtatccaaaagtattacggctatcgccatattgtacctactcaccaagggcgtggtgcagaaaatattctttctcaaatactgatcaaaccaggagactacatacctggcaatatgtatttcaccacaaccaggttgcatcaggagttagctggcggcacttttgtcgatgtgattattgatgaagcccacgatgcccaatcactgcatccatttaagggtaatgtagacttacaaaagcttacagacctaattgagcgagttggggcagaacgtattccctatattagcgttgccggaaccgtgaatatggctggcggacagccgatttctatggctaacctgcgggcggtacatcagttagcccaaacctacggtatccgcattattcttgatgccacccgcgctgtggaaaacgctcactttatccaacagcgagaggaggattattccagccaagcgatcgctaccatcttacgcgaattttgctcctataccgacggttgcaccatgagcggtaagaaggatgcactggttaacatcggcggttggctggctcttaatgactataatctttacgaagaagcacgtaacttaatagtaatttatgaaggtctacatacttacggtggtatggctggccgggacatggaagctatggcacgaggtatagaagaatcagttcaagacgatcatattcgtgcccgtgtcggtcaggttgagtatcttggacaaaagcttttagattggggtattccaattgttgtgccgattggcggtcatgccatttatttagatgccaaacgctttttaccacaaattccccaagaccaatttccggcacaacgtctagcagcagaactgtatctagaggcaggcattcgggcaatggaacggggcatcgtttccgcagggcgcaataaagaaacaggcgataattattatccagagttagaattagtccgtttaactattccacgccgtgtttacactcaggctcacatggatctgactgctgaagcagttgaagaagtttatcataatcgcgatcgcctacgcggactcaaaatgatttatgagccgaagtatctccgtttctttcaagcaagatttgaattgcagtaa

SEQ ID NO: 14912 - protein, 467 aa, Nostoc punctiforme PCC 73102
MTDAKQTSPRRRRSWAEPYKIKVVEPLKITTRAEREQAIAQAGYNTFLLRSEDVYIDLLTDSGTSAMSDYQWAGMMLGDEAYAGSKNFYNLEASIQKYYGYRHIVPTHQGRGAENILSQILIKPGDYIPGNMYFTTTRLHQELAGGTFVDVIIDEAHDAQSLHPFKGNVDLQKLTDLIERVGAERIPYISVAGTVNMAGGQPISMANLRAVHQLAQTYGIRIILDATRAVENAHFIQQREEDYSSQAIATILREFCSYTDGCTMSGKKDALVNIGGWLALNDYNLYEEARNLIVIYEGLHTYGGMAGRDMEAMARGIEESVQDDHIRARVGQVEYLGQKLLDWGIPIVVPIGGHAIYLDAKRFLPQIPQDQFPAQRLAAELYLEAGIRAMERGIVSAGRNKETGDNYYPELELVRLTIPRRVYTQAHMDLTAEAVEEVYHNRDRLRGLKMIYEPKYLRFFQARFELQ

SEQ ID NO: 14913 - DNA, 1416 bp, Haemophilus somnus 129PT
  CDS (1)..(1416)
atggaaaatttcaaacatttaccagaaccgttccgtattcgtgttattgaacctgtcaaacgtacaactcgtgcctatcgtgatgaagctatcttgaaagcaggtatgaatctatttttattagacagtgaagatatttttattgatctattaactgatagtggtacaggtgccgttactcaagatatgcaggctgccatgctaagaggtgatgaagcttatagcggaagtcgcagttactatgctcttgccaatgctgtgaaagaaatctttggttatgaatacacaattccaacccatcaaggtcgtggtgcagaacaaatttatattcctgtcttgatcaaaaaacgtgagcaagaaaaagggttggatcgaaataaaatggttgttttctctaactatttttttgacactactcaaggtcatagccaattaaatggtgcaactgtacgtaatgtctatataaaagaagcttttgacacagatgtagatcatgatttcaaaggtaattttgatttagaaaaactggaacaaggtattttagaagttggagcaaataatgttccttacattgtatgtactattacctgtaattctgccggtggacaaccggtatctcttgccaatatgaaagccatgtaccaaattgcacgtaaatatgatattcctgtgattatggattcggctcgcttcgctgaaaatgcctactttattcaacaacgtgaagcagaatacaaagattggactattgaacaaattacttacgaaagctataaatatgcagatgccttggctatgtctgcaaaaaaagatgcaatggtacctatggggggactactctgcttcaaagataattcaatggaagatgtttacaacgagtgtcgtacactttgtgttgtacaagaaggtttccctacctatggtggtctagaaggtggtgcaatggaacgcctagctgtaggtttacgtgatggtatgcgtcaagattggttagcttatcgtattagccaaattgaataccttgtacaaggtttagaaaagatcggtgttgtttgtcaacaacctgggggacatgccgcctttgtggatgcaggcaaattattaccacatatcccagcagaacaattccctgctcaggctcttgcttgtgaattatataaagtagcaggtattcgatccgtagaaatcggttctctcctattaggacgagatccgaaaacaggtcaacaattaccttgcccggctgaattgttacgtttaactattcctcgtgcgacctacactcaaacacatatggacttcattattgaagcattcaaacgagtgaaagagaatgcaaaaaatatcaaaggtttagatttcacttatgaacctaaagtactgcgtcatttcaccgctcgattaaaagagatttag

SEQ ID NO: 14914 - protein, 471 aa, Haemophilus somnus 129PT
MENFKHLPEPFRIRVIEPVKRTTRAYRDEAILKAGMNLFLLDSEDIFIDLLTDSGTGAVTQDMQAAMLRGDEAYSGSRSYYALANAVKEIFGYEYTIPTHQGRGAEQIYIPVLIKKREQEKGLDRNKMVVFSNYFFDTTQGHSQLNGATVRNVYIKEAFDTDVDHDFKGNFDLEKLEQGILEVGANNVPYIVCTITCNSAGGQPVSLANMKAMYQIARKYDIPVIMDSARFAENAYFIQQREAEYKDWTIEQITYESYKYADALAMSAKKDAMVPMGGLLCFKDNSMEDVYNECRTLCVVQEGFPTYGGLEGGAMERLAVGLRDGMRQDWLAYRISQIEYLVQGLEKIGVVCQQPGGHAAFVDAGKLLPHIPAEQFPAQALACELYKVAGIRSVEIGSLLLGRDPKTGQQLPCPAELLRLTIPRATYTQTHMDFIIEAFKRVKENAKNIKGLDFTYEPKVLRHFTARLKEI

SEQ ID NO: 14915 - DNA, 1569 bp, Fusobacterium nucleatum subsp. vincentii ATCC 49256
  CDS (1)..(1569): transl_table=11
gtgacagttgaacaaagggaacgtgcattaaaggcaactcactacaatgaatttgcttttcctgctggaatgctaacagtggatatgttatcagattcaggaactactgctatgacagatcaacaatggtctgctatgtttttaggtgatgaatcttatggaagaaacaaaggttactatgtattacttgatgcaatgagagattgttttgaaagaggagataatcaaaaaaagattattaaccttgttcgtactgattgccaagacatagaaaaaatgatgaatgaaatgtatttatgtgaatatgaaggcggattatttaatggaggagctgcccaacttgaaagacctaatgctttcttaatgccacaaggtcgtgcagcagaatctatcttatttgaaatagtgcgtaagatacttgctgttcgtgaaccaggaaaagtatttactattccatctaatggacattttgatacaacagaaggaaatattaaacaaatgggttctgtacctcgtaacttgtataataaagaattattatatgaagttccagaaggtggacattatgaaaaaaaccctttcaaaggagatatggatataaataaactgcaacaacttattgatgctgttggagtagaaaatattcctatgatatatacaacaataactaacaacactatatgcggtcaagcagtatctatgaaaagtattagagaaactgcaaaaattgctcataaatatgaaatcccatttatgttagatgctgcaagatgggctgaaaactgttactttataaaaatgaatgaagatggatatagagataagtctattcctgaaattgcaaaagaaatgttctcttactgtgatggattcactgcttcacttaaaaaagatggacatgctaatatgggaggaattttagctttccgtgataaaggatatttctggaagaaattctctgatttcaatgaagatggaacagttaaaacagatgtaggaatcttgttaaaagttaaacaaatatcttcttatggtaatgactcttatggaagtatgtcaggtcgtgatattatggcacttgctgctggactttatgaatgttgtaatttcaactatttacaagaaagagttgaacaatgtaactatctagcagaaggattctataaagcaggtgttaaaggtgttgttctaccagcaggaggacatggagtttatataaacatggatgaattctttgatggaaaaagaggacatgaaacatttgcaggagaaggatttagtcttgaacttattagaagatatggaattcgtgtttctgaattaggggattattctatggaatatgatttaaaaactcctgaacaacaagcagaagttgcaaatgttgtaagatttgcaataaatagaagtgtttattcacaagaacatcttgactatgttattgcagctgtaaaagctctttatgaagatagagaaagtatacctaatatgagaattgtttctggtcataatctaccaatgagacactttcatgctttcttagaaccttatccaaatgaagaaaaatag

SEQ ID NO: 14916 - protein, 522 aa, Fusobacterium nucleatum subsp. vincentii ATCC 49256
MTVEQRERALKATHYNEFAFPAGMLTVDMLSDSGTTAMTDQQWSAMFLGDESYGRNKGYYVLLDAMRDCFERGDNQKKIINLVRTDCQDIEKMMNEMYLCEYEGGLFNGGAAQLERPNAFLMPQGRAAESILFEIVRKILAVREPGKVFTIPSNGHFDTTEGNIKQMGSVPRNLYNKELLYEVPEGGHYEKNPFKGDMDINKLQQLIDAVGVENIPMIYTTITNNTICGQAVSMKSIRETAKIAHKYEIPFMLDAARWAENCYFIKMNEDGYRDKSIPEIAKEMFSYCDGFTASLKKDGHANMGGILAFRDKGYFWKKFSDFNEDGTVKTDVGILLKVKQISSYGNDSYGSMSGRDIMALAAGLYECCNFNYLQERVEQCNYLAEGFYKAGVKGVVLPAGGHGVYINMDEFFDGKRGHETFAGEGFSLELIRRYGIRVSELGDYSMEYDLKTPEQQAEVANVVRFAINRSVYSQEHLDYVIAAVKALYEDRESIPNMRIVSGHNLPMRHFHAFLEPYPNEEK

SEQ ID NO: 14917 - DNA, 1383 bp, Fusobacterium nucleatum subsp. vincentii ATCC 49256
  CDS (1)..(1383): transl_table=11
atgagatatgaagattatccagcagagccatttagaattaaaagtgtagaaactgttaaaatgattgataaggcagcaagagaagaagtaattaaaaaagcaggatataatactttcttaattaactctgaagatgtttacattgacttattaactgatagtggaactaatgctatgagtgataaacaatggggaggattaatgcaaggtgatgaagcctatgcaggaagtagaaatttcttccatttagaagaaactgtacaagaaatatttgggtttaaacatatagttcctactcaccaaggaagaggagcagaaaatattttatctcaaatagctataaaacctggtcaatatgttcctggaaatatgtattttacaactactagatatcaccaagaaagaaatggtggaatttttagagatgttataagagatgaagctcatgatgccactcttaatgttcctttcaaaggagatatagacttaaataaattacaaaaattaatagatgaagttggagcaaaaaatattgcttatgtttgtttagctgtaactgtaaaccttgctggtggacaaccagtttctatgaaaaatatgaaagcagttagagaattaactaaaaaacatggaataaaagttttctatgatgcaactagatgtgttgaaaatgcttacttcattaaagaacaagaagaaggatatcaagataaaactataaaagaaatagtacatgaaatgtttagctatgctgatggatgtactatgagtggtaaaaaagattgtcttgttaatattggtggattcttatgtatgaatgatgaagatttattcttaaaggcaaaagaaatggttgttgtttatgaaggtatgccatcttatggtggacttgctggaagagatatggaagctatggcaataggattaagagaatctctacaatatgaatacataagacatagaattttacaagttagatacttaggagaaaaattaaaagaagcaggagtacctatacttgaaccagttggaggacatgctgtattcttagatgctagaagattctgtcctcatatcccacaagaagaattcccagctcaagctcttgcagcagctatctatgttgaatgtggtgtaagaactatggaaagaggaataatttctgctggtagagatgtaaaaactggtgaaaaccataaacctaaactagaaactgttagagttactataccaagaagagtttatacttataaacatatggatgtagtagcagaaggtataatcaaattatacaaacataaagaagatataaaaccattagaatttgtatatgaaccaaaacaattaagattctttacagctagatttggaataaaaaaataa

SEQ ID NO: 14918 - protein, 460 aa, Fusobacterium nucleatum subsp. vincentii ATCC 49256
MRYEDYPAEPFRIKSVETVKMIDKAAREEVIKKAGYNTFLINSEDVYIDLLTDSGTNAMSDKQWGGLMQGDEAYAGSRNFFHLEETVQEIFGFKHIVPTHQGRGAENILSQIAIKPGQYVPGNMYFTTTRYHQERNGGIFRDVIRDEAHDATLNVPFKGDIDLNKLQKLIDEVGAKNIAYVCLAVTVNLAGGQPVSMKNMKAVRELTKKHGIKVFYDATRCVENAYFIKEQEEGYQDKTIKEIVHEMFSYADGCTMSGKKDCLVNIGGFLCMNDEDLFLKAKEMVVVYEGMPSYGGLAGRDMEAMAIGLRESLQYEYIRHRILQVRYLGEKLKEAGVPILEPVGGHAVFLDARRFCPHIPQEEFPAQALAAAIYVECGVRTMERGIISAGRDVKTGENHKPKLETVRVTIPRRVYTYKHMDVVAEGIIKLYKHKEDIKPLEFVYEPKQLRFFTARFGIKK

SEQ ID NO: 14919 - DNA, 1182 bp, Haemophilus influenzae 86-028NP
  CDS (1)..(1182)
atggaaaattttaaacatttacctgaacctttccgcattcgtgttattgaaccagtaaaaagaactactcgtgagtatcgtgaacaagcgatgttaaaatcaggcatgaatccatttttattagatagtgaagatattttcattgacttacttacagatagcggtactggtgccgttacacaagatatgcaagctgcaatgttacgtggcgatgaagcctatagtggcagtcgcagttattatgcgctagctaaagcagtgaaagatatttttggttacgaatatacaatccctactcaccaaggtcgcggtgctgaacaaatttatattccagtattgattgctaaacgtgaacgtgagaaaggtttagatcgcagcaaaatggtggttttctctaactatttctttgataccacacaaggacatagccaaattaatggggcaacggttcgcaatgtttatatcaaagaggcatttgatacaacagcaaaacatccatttaagggtaatttcgatttagaaaaattagaaaaaggcattcaagaggcgggagcacataatgtaccttacattgtatgtaccattacttgtaactctgcgggtggtcagccagtttctattgcaaacttaaaaggcatgtatgaaattgcgcgtaaatacgatattccagtcatcatggattcagctcgttttgcagaaaacgcctattttgttcaacaacgtgaagaagcttataaagactggactattgaacaaattacttacgaaagctatcgctatgctgatggtttagcgatgtccgccaaaaaagatgcgatggtgccaatggggggtattttagcgtttaaagataaatcaatggaggaagtctatcacgaatgtagaacgctttgtgttgtgcaggaagggttccctacttatggaggtttagaaggtggtgcaatggaacgtttggctgttggcttgcatgatggtatgcgccaagaatggctggcttatcgtattgcgcagattgaatattcggttgcaggcttacaaaaaattggcgtgccttgccaacaaccaggtggacacacgacgctcgtagatgctgttaaattattaccacatattgcaggcgaccaatttccagcacaagcgctttgttgcgaactttatgacggtgcaggtacaagatcgtaa

SEQ ID NO: 14920 - protein, 393 aa, Haemophilus influenzae 86-028NP
MENFKHLPEPFRIRVIEPVKRTTREYREQAMLKSGMNPFLLDSEDIFIDLLTDSGTGAVTQDMQAAMLRGDEAYSGSRSYYALAKAVKDIFGYEYTIPTHQGRGAEQIYIPVLIAKREREKGLDRSKMVVFSNYFFDTTQGHSQINGATVRNVYIKEAFDTTAKHPFKGNFDLEKLEKGIQEAGAHNVPYIVCTITCNSAGGQPVSIANLKGMYEIARKYDIPVIMDSARFAENAYFVQQREEAYKDWTIEQITYESYRYADGLAMSAKKDAMVPMGGILAFKDKSMEEVYHECRTLCVVQEGFPTYGGLEGGAMERLAVGLHDGMRQEWLAYRIAQIEYSVAGLQKIGVPCQQPGGHTTLVDAVKLLPHIAGDQFPAQALCCELYDGAGTRS

SEQ ID NO: 14921 - DNA, 1347 bp, Solibacter usitatus Ellin6076
  CDS (1)..(1347): transl_table=11
gtgcgcaccatcatcgaacccttccgcatcaagagcgtggaaccgctgcaccacaccactcccgcggaacgcgagcgctatctcgccaacgcaggctacaacctcttcctcattgacgcccgccacattctgatcgatctgctcaccgactccggcaccagcgccatgtccaacgcgcaatgggccgcgatcatgcgcggcgacgaaagctacgccggcagcgagagcttcttccgcctgaagcgcgtcgccgacgaactcaccggcttccgccacatggttcccactcaccagggccgcgccgccgagcgcatcctcttcacggtgatgtgcaagcccggcgacgtgatcccctccaacacacatttcgataccacccgggccaacgtcgaattcaccggggcccgggccgtcgatctccctatacccgaagcccgcgacacccaggcccgcctggatttcaaagggaatatggatgtccccgcgctcgaggccctgatctccgccgagggcgcggccaagatccccctcgtgatgctgaccgtcaccaacaactccggcggcggccagcccgtttcactggccaacatcggcgctgtcaaggacgtctgcgcacgccaccgcatcccgctctacctcgacgcctgccgcttcgccgaaaacgcctggttcatccaccagcgcgagcccggctaccaggactggtcgccaaagcaaatcgcccagaaaatgttttcactcgccgatggcgccaccttctccgccaagaaggacgccttcgccaacatcggcggcctgctcttcagcaacgacgagcgggtcttccagcaggagaccaacctcctcatcctcaccgaaggcttcccgacctacggagggctcgccggccgcgatctcgacgccatcgccgtcggcctggaagaaatcctcgaccccgattacctcaactaccgcattgtctccaccggctatcttggccgccacatcgccgaccatggcgtccccatcgtcgagccgcccggcggccacgccatctatatcgatgccgcgcgcatgctcccccatatccccccgcaacagttccccggccaggccctcgcggtggagctctaccgccacgccggaatccgtggcgtcgaaatcggcagccttatgttcgcgggagccgcccagcacgaattgctccgcctcgccatcccacgccgcgtctacacccagagccacatcgattacgtggtggaagcgatcctcgaggtcaacgcgaacaagaacgcaatccgcggtatggaaatcgtcgaagccccgcccttcctgcgccacttcagcgcacggatgaggcagctatag

SEQ ID NO: 14922 - protein, 448 aa, Solibacter usitatus Ellin6076
MRTIIEPFRIKSVEPLHHTTPAERERYLANAGYNLFLIDARHILIDLLTDSGTSAMSNAQWAAIMRGDESYAGSESFFRLKRVADELTGFRHMVPTHQGRAAERILFTVMCKPGDVIPSNTHFDTTRANVEFTGARAVDLPIPEARDTQARLDFKGNMDVPALEALISAEGAAKIPLVMLTVTNNSGGGQPVSLANIGAVKDVCARHRIPLYLDACRFAENAWFIHQREPGYQDWSPKQIAQKMFSLADGATFSAKKDAFANIGGLLFSNDERVFQQETNLLILTEGFPTYGGLAGRDLDAIAVGLEEILDPDYLNYRIVSTGYLGRHIADHGVPIVEPPGGHAIYIDAARMLPHIPPQQFPGQALAVELYRHAGIRGVEIGSLMFAGAAQHELLRLAIPRRVYTQSHIDYVVEAILEVNANKNAIRGMEIVEAPPFLRHFSARMRQL

SEQ ID NO: 14923 - DNA, 1374 bp, Desulfitobacterium hafniense DCB-2
  CDS (1)..(1374): transl_table=11
atgaaaacctatcctgcagaaccctttcggattaaggtcgttgaacccgttcggtcgatgaagcgggcagagcgtgaagaggccatgaaagaagcaggctacaacacttttttgctgaagagtgaggatgtctatattgatctgctcacagattccggcactactgccatgagcgataaacaatgggccggtatgatgatcggtgatgaagcctatgccgggagcaggaatttcctgcacctggatcgggtggttaaagaatattatggcttcaagcacctggtccctactcatcaaggacggggggcggaaaacctgctctcccggctgatgattaaacccggggattatgtgcccggcaatatgtattttaccaccacaagataccatcaggaagccaacggagctaccttcagagatattatcattgatgaagcccatgactcagccaaccggcatcctttcaaaggaaatatcgatctcaggaaactccagaccttaatcgatgaagtaggcgcggagaagattccttacatctgccttgccgttactgtcaatctggccggaggacagcccgtttctctggaaaacatgaaggcggtccatgagcttgcccaccaacacggcatcaaggtgttttttgacgctacccgctgtgtggagaacgcttacttcatcaagaagcgggaagcagactaccaggacaagaccatcaaagaaattctcttggagatgatgagctatgccgacggagccaccatgtcgggtaaaaaagattgtatggtcaatatcggcggttttctggccatgaatgatgatgaattgttcctcagggctaaagaactggtggtggtctttgaaggaatgccttcttacggcggcatggccggccgggacatggaagccatggccatcgggattacggaatcggtggattatgcttatattgaacaccgtgtggagcaggtggcctatcttgccgatcagcttttagcggcgggggttcccattgtggaaccggtgggcggccatgccgtcttccttgatgccagacggtttttgccccaccttgagcaggaccacttcccggcacaggctctggccgcccaattatatatagaatccggggtacgctctatggaaagaggaatcatctccgccggacgtgatcttaaaacaggggaaaaccgccatcctaaactggagctggtaaggctgacgattccccgccgggtttatacttacgctcatatggacatcgtggccagagcggttattgagctttaccagcaaagggagaccatcaaagggcttaaatttgtttacgaaccggaaatgcttcgtttcttcaccgccagatttgaacacatttga

SEQ ID NO: 14924 - protein, 457 aa, Desulfitobacterium hafniense DCB-2
MKTYPAEPFRIKVVEPVRSMKRAEREEAMKEAGYNTFLLKSEDVYIDLLTDSGTTAMSDKQWAGMMIGDEAYAGSRNFLHLDRVVKEYYGFKHLVPTHQGRGAENLLSRLMIKPGDYVPGNMYFTTTRYHQEANGATFRDIIIDEAHDSANRHPFKGNIDLRKLQTLIDEVGAEKIPYICLAVTVNLAGGQPVSLENMKAVHELAHQHGIKVFFDATRCVENAYFIKKREADYQDKTIKEILLEMMSYADGATMSGKKDCMVNIGGFLAMNDDELFLRAKELVVVFEGMPSYGGMAGRDMEAMAIGITESVDYAYIEHRVEQVAYLADQLLAAGVPIVEPVGGHAVFLDARRFLPHLEQDHFPAQALAAQLYIESGVRSMERGIISAGRDLKTGENRHPKLELVRLTIPRRVYTYAHMDIVARAVIELYQQRETIKGLKFVYEPEMLRFFTARFEHI

SEQ ID NO: 14925 - DNA, 1389 bp, Desulfitobacterium hafniense DCB-2
  CDS (1)..(1389): transl_table=11
atggcaatcaagtatgtacccgaaccctttcgaattaaggtggtagagcccttgcggatgcttacccaagaagaaagagaagagaaaatcgccaaggctaattacaaccttttcaacttaaaaggagaggattgctacatcgatttgctgactgactccggaaccaatgccatgagccaggagcagtgggctggtgtgatgagaggcgacgaggcctatgcaggagcttccagctactttaaactcatggaagcaggcaaggatatttttggctttggctatatccaacctgttcaccaaggtcgtgcagcagagaaagttgtcttccccttactgctcagcgaaggtaaatttgcaatttccaacatgttttttgataccactcgcgcccatgtcatcttgtctggcgccagacccattgactgcgtggtagaagaagccaaagatccatccaaacgcgctccctttaaagggaatatggacgttgccaagatggaagaagtcatcaaagagaagggtccggaaaacattggtttggttgtcatgaccatcaccaacaactctgccggcggacaacccgtctccatgaaaaatcttcgtgaagtttctgctttagctaaaaaatatggtattcctatgtgcattgacgcagcccgctatgcggaaaatgctcacttcatcaaacgtgatgagccagaatacaaggacgtatccattaaagatattgttcgtgaaatgttcagctacggcgagctcttcactatgtcagctaagaaagacactatcgtcaatatgggcggcctccttggtgttaaagatgccgattcaccgctggtcttaaaaatcaaagctaattgcatcagttatgaaggcttcttcacttatggcggtctttccggtcgtgatatggaagccttggctatcggtctctacgagggaatcgatgaaaactatctccgttaccgaattggtcaaatggaatacctggcagcccgcttagatgatgccggtattgcctatcagtcccctgtcggcggccatggcgtatttgttgatgctgctgccatgttcccccatattccttacaatgagttccctggtcaggttctttgcgtggagctttataaagaagccggcattcggacttgtgatatcggttcttatatgctgggcaacgacccggataccggcgaacagctaaaggccgactttgaattcagccgccttgccataccacgccgggtctacacccaggcccatcttgacattatggctgatgccttgatcgcaattaaagaacgggctcacactattaaacgcggatataaaatcacttgggaaccccccattctgcgccacttccaggcatcactggcacccatcgagtaa

SEQ ID NO: 14926 - protein, 462 aa, Desulfitobacterium hafniense DCB-2
MAIKYVPEPFRIKVVEPLRMLTQEEREEKIAKANYNLFNLKGEDCYIDLLTDSGTNAMSQEQWAGVMRGDEAYAGASSYFKLMEAGKDIFGFGYIQPVHQGRAAEKVVFPLLLSEGKFAISNMFFDTTRAHVILSGARPIDCVVEEAKDPSKRAPFKGNMDVAKMEEVIKEKGPENIGLVVMTITNNSAGGQPVSMKNLREVSALAKKYGIPMCIDAARYAENAHFIKRDEPEYKDVSIKDIVREMFSYGELFTMSAKKDTIVNMGGLLGVKDADSPLVLKIKANCISYEGFFTYGGLSGRDMEALAIGLYEGIDENYLRYRIGQMEYLAARLDDAGIAYQSPVGGHGVFVDAAAMFPHIPYNEFPGQVLCVELYKEAGIRTCDIGSYMLGNDPDTGEQLKADFEFSRLAIPRRVYTQAHLDIMADALIAIKERAHTIKRGYKITWEPPILRHFQASLAPIE

SEQ ID NO: 14927 - DNA, 1443 bp, uncultured bacterium
  CDS (1)..(1443)
atgggcatccggctggccagcggaaagcagattcccatcgagatgcacaaggtgcggatcctgcagagcatacgactcccctcggttgatgaacggctgaaggccgccgaagagggcggctacaatacgtttctgctccgtacgcgcgacgtcttcctggacatgctcacggacagcggcgtcaacgcgatgagcgaccatcagctggcggggatgattgttgcggacgatgcctacgccggcggcgagagctactaccgtctggctgcggccgtcgaggaggtgctcggcttcaagctctgcatgccggcccaccagggccgggcctgcgagcacctgatagacaagatcctgctgcggccgggtcaggtggtgctgaccaactatcacttcaccaccacgcgggcgcacgtggagctgctgggcggccgcatgctggaactgtacgcggccgaggcgctgaacaccgcgagcacgcaccagttcaagggcaacattgatcccggccggctggacgagtgcctcgggaagtacggtcgcgacggcattgcctacgtgcggctcgaagccacgaccaacctgatcggtggccagccgttctccatggacaatctgcgcaccgtgcgccgcttctgcacggacaacaacctgccactggtgctcgacggcagcctgctgagcgagaacgcgtacctgatcagggaacgtgagagcggctacacggacaagagcgtggcggagatcatgaaggagatgtgctcgcacgcggacatctattacatgtctgcgcgcaagaacacgagcgtgcgcggcggcctcatcgccaccaacgaccgcaactactttgtcgcgctgcgcaactggctgccggtctatgagggattcctgacctacggcggcatgtcggtcaaggaagtcgaggcgatggcgatcggcctcagggagctggtgtcggaagacgtggccggctgttcggtgcgtcaggtgcgccacctcgtggacctgctgcagcagcagggcgtcccggtggtgacgccagccggcgggcttgcctgtcacctggacgctggcaagttcttgccgcacatcccgcagagccaatatcccgccggcgcgctcgcagccgccatatacctcgcctcgggaatccgcacgatggagcgcggcacgatctccaccgatcgcgaccccgatggcaaggagatcatgaccgacgtcgaactgacgcggatggcggtgccgcggcgcgtctacaccgtgtcgcacctcgagtacgcggccgacagcgtggtctggctgtacaagcatcgcgatctcgtgaagggcctccggttcgtggaggcaccgccggtgctgcggttcttcttcgggcgcctggaagcaatcgacaaccggggggccgcgttgtgcggggagtaccgcaaggagctgggcgactactag

SEQ ID NO: 14928 - protein, 480 aa, uncultured bacterium
MGIRLASGKQIPIEMHKVRILQSIRLPSVDERLKAAEEGGYNTFLLRTRDVFLDMLTDSGVNAMSDHQLAGMIVADDAYAGGESYYRLAAAVEEVLGFKLCMPAHQGRACEHLIDKILLRPGQVVLTNYHFTTTRAHVELLGGRMLELYAAEALNTASTHQFKGNIDPGRLDECLGKYGRDGIAYVRLEATTNLIGGQPFSMDNLRTVRRFCTDNNLPLVLDGSLLSENAYLIRERESGYTDKSVAEIMKEMCSHADIYYMSARKNTSVRGGLIATNDRNYFVALRNWLPVYEGFLTYGGMSVKEVEAMAIGLRELVSEDVAGCSVRQVRHLVDLLQQQGVPVVTPAGGLACHLDAGKFLPHIPQSQYPAGALAAAIYLASGIRTMERGTISTDRDPDGKEIMTDVELTRMAVPRRVYTVSHLEYAADSVVWLYKHRDLVKGLRFVEAPPVLRFFFGRLEAIDNRGAALCGEYRKELGDY

SEQ ID NO: 14929 - DNA, 1365 bp, Symbiobacterium thermophilum
  CDS (1)..(1365)
atgcccaagggcgagcccttcaagatcaagatggtggagcccatccggctgatcccccgggaggaccgtgagcgggcgctgaaggaagcgcattacaacccgttcttcctccgatcttctgacgtctacatcgacctgctcaccgactccggtacgggcgcgatgagccagttccagtggtccgccatgatgctgggcgacgagtcgtacgccggcgcaagcagctactacaggctgaaagagacggtcaccgacatcacggggtacgagtacgtcatcccgacccaccagggccgcggcgcagagaaggtcgccttctcgcagctcatcacccggccgggcatgtacgtgctttccaacatgttcttcgacacgacccgcggccacgtgcagctggccggcggccggcccgtcgatctgctcatcgacgtacccaccgaggagtaccaccccttcaagggcaacatggacacggagaggctggagcagttcatccgggagcacggtgcggagaacatcgcctgcatcgtgatgaccgtgaccaacaactccgcgggcgggcagcccgtctccatggccaacatccgggagacttaccagatcgcccggaagtacggcgtgctggtcctgttcgacgtggcccggtacgccgagaactgccacttcatccggatgcgggaggaaggctacgccgacaagcaccccatcgacatcgcccgggagatgttctcctacggcgacgggctgatgatgagtgccaagaaggacgcgctggtcaacatcggcgggctcctcgcctttcgggatgaggaactgttcaccaaggtcggcgcggccgtggtgccgttcgagggcttcctgacctacggcggcctggccgggcgcgatctggaggccatggcggtgggcctccgggaggcgctggaccccgactacctggcgtaccgggtggggcaggtgcagtacctgggcgagatgttgcggaacgcgggcatcccgatccagtggccggtgggcggccatgcggtgttcatcgatgccgcgaagttcctgccgcacgtcccgtgggaccagttccccggccatgccctgaccctcgcgctctacctggagggcggcgtgcgcaccgtagaggtcggctcgctgatgatcggccgcgaccccgagaccggcgagaacgtgcgaggcccgttcgagttcacccggctggcgattccgcggcgggtctacaccaacctgcacctggaggacgtcgccgagaccgtgatcaacgcctttcagaagcgcgaggagatccgcggcgtgaagttcgcccgggagcccaaggtgctccgccacttcacggcctggttcgacccggcttag

SEQ ID NO: 14930 - protein, 454 aa, Symbiobacterium thermophilum
MPKGEPFKIKMVEPIRLIPREDRERALKEAHYNPFFLRSSDVYIDLLTDSGTGAMSQFQWSAMMLGDESYAGASSYYRLKETVTDITGYEYVIPTHQGRGAEKVAFSQLITRPGMYVLSNMFFDTTRGHVQLAGGRPVDLLIDVPTEEYHPFKGNMDTERLEQFIREHGAENIACIVMTVTNNSAGGQPVSMANIRETYQIARKYGVLVLFDVARYAENCHFIRMREEGYADKHPIDIAREMFSYGDGLMMSAKKDALVNIGGLLAFRDEELFTKVGAAVVPFEGFLTYGGLAGRDLEAMAVGLREALDPDYLAYRVGQVQYLGEMLRNAGIPIQWPVGGHAVFIDAAKFLPHVPWDQFPGHALTLALYLEGGVRTVEVGSLMIGRDPETGENVRGPFEFTRLAIPRRVYTNLHLEDVAETVINAFQKREEIRGVKFAREPKVLRHFTAWFDPA

SEQ ID NO: 14931 - DNA, 1365 bp, Symbiobacterium thermophilum; identical to SEQ ID NO: 14897
  CDS (1)..(1365)

SEQ ID NO: 14932 - protein, 454 aa, Symbiobacterium thermophilum; identical to SEQ ID NO: 14898

SEQ ID NO: 14933 - DNA, 1386 bp, Chromobacterium violaceum
  CDS (1)..(1386): transl_table=11
atggcacgacgcattcccgaaccgttccgcatcaagatggtggagccgatccgccaaaccaccgccgaataccgccgccaggcgctgcaggaggccgggtggaatcccttcctgttgaaggccgaggatgtctatatcgatctgttgaccgacagcggcaccggcgcgatgtccgaccgccagtgggccggcctgatgatgggcgacgaggcctacgccggcagccgcaacttcctgcggctggccgacaccgtgcgcgagctgttcggctacgcgcacaccattcccacccaccaggggcgcggcgccgagcagatcctgtttccggagctggtgaagcgctgccgcggcgagcggccggtgtttctgtccaactaccatttcgacaccaccaaggcccatgtcgagctggccggcgcgcgcgcggtcaacgcgctgacgccgcgagcgctggacactggcgcggcctacgactggaagggcgacttcgatctggcgcggctgggcgagatcgtcgaggccgagggggaaaacgtcgcggccatcatcgtcaccgtcacctgcaacagcgccggcggccagccggtgtcgatggccaatatccgcgcggccagcgcactggcccgttcgaagggcattccggtggtgatcgacgcggcgcgcttcgccgagaacgcctggttcatccgcgaacgggatccggcctatgccggcgttgccatctcgtccatcgtgcgcgagatgttcgattacggcgacatgttcaccatgtcggccaagaaggacgggctggtcaatatcggcggcctgtgctgcttcaagaacgatgaggcgctgttccgcgcggtgcaggtgcgctgcgtgccgatggagggcttcatcacttacggcggcctggccggccgcgacatggaggcgttggccatcggcctgaaggagggcttggatgacgcttacctgagctatcgcatcggccaggtggcctacctgggcgagcggctgcgcgagggcggcgtgccgatccagaccccgaccggcggccacgcggtcttcgtcgacgccgcgcggctgctgccgcatatcccggccgggcagttccccgcgcacgcgctggcctgcgagctgtatctggaaggcggcgttagggcggtggagatcggttcgctgctgctggggcgccatccgcagaccggccggcaggagccgtcgccgttcgagctgatgcggctgacgataccgcggcgggtctacaccaacgaccatatggactacatcgccgactgcctgatagacgtgaagcggcgcgcggcgggggtgagagggctggttttcgactacgagccgccgatattgcgccacttcaccgcgcggctgcggccggcgtag

SEQ ID NO: 14934 - protein, 461 aa, Chromobacterium violaceum
MARRIPEPFRIKMVEPIRQTTAEYRRQALQEAGWNPFLLKAEDVYIDLLTDSGTGAMSDRQWAGLMMGDEAYAGSRNFLRLADTVRELFGYAHTIPTHQGRGAEQILFPELVKRCRGERPVFLSNYHFDTTKAHVELAGARAVNALTPRALDTGAAYDWKGDFDLARLGEIVEAEGENVAAIIVTVTCNSAGGQPVSMANIRAASALARSKGIPVVIDAARFAENAWFIRERDPAYAGVAISSIVREMFDYGDMFTMSAKKDGLVNIGGLCCFKNDEALFRAVQVRCVPMEGFITYGGLAGRDMEALAIGLKEGLDDAYLSYRIGQVAYLGERLREGGVPIQTPTGGHAVFVDAARLLPHIPAGQFPAHALACELYLEGGVRAVEIGSLLLGRHPQTGRQEPSPFELMRLTIPRRVYTNDHMDYIADCLIDVKRRAAGVRGLVFDYEPPILRHFTARLRPA

SEQ ID NO: 14935 - DNA, 1419 bp, Clostridium tetani
  CDS (1)..(1419): transl_table=11
atgatcatttattatttaaaattggagggatttaacatgaaaattaaatatgtggcagaaccatttaggattaaaatggtagaacctattaaaatgcttactcgtgaagaaagagaattaaaaattgctgaagcaaaatacaatacatttaaccttagaggagaagatgtatatattgatttattaacagatagtggaacaaatgcaatgagcgatgatcaatgggctggtgtaatgaagggtgacgaagcctatgcgggaggaaagagttactttaaattagtggatgcagtaaaagatatatttggatataaatttgttcaacctgtacaccaaggtcgtgcagcagaaaaagttctttttggattattattaggtgagggaaaatattctatatctaatatgcactttgatacaacaagagcacatgttgaattatcaggtgcaagagccattgattgtgttgtaccagaggcttctgatccaacagtaagaataccattcaaaggtaatatggatgttgaaaaacttgaaaaattaattaaagaacatggagcagacaaaattggagttgttgttatgactataacaaataactcagcaggaggtcaaccagtatccattgaaaatatgaaagaaacagctgaaatttgtaaaaagtataatattagactttgtatagatgcggcacgttatgcagaaaatgcttattttataaaacaacgtgaacctggttatgaaaacaaatccataaaggaaattattaaagaaatatttagttatgcagatatatttacaatgagtgcaaagaaagatgccattgtaaatatgggaggacttctaggaattaaagaagacgaagaattattccaattatgtaaaggtcgtacaatatccttcgaagggtttattacttatggaggactttcaggtcgcgatcttgagagtttggcgattggtctttatgaaggaattgatgaaaattacttaagatatagaataggacaaatggaatatcttgcagcacgtcttgacgaagcagggattgcttatcaatcaccagtaggtggacatggagtattcgtagatgctaagagtatgttcccacatattccatataatgagttccctggacaagttttagctgtagaactttataaagaagcaggaatacgcacatgtgaaattggatcttatatgttaggtaatgatccagatactggagaacaacttaaagcagattttgagtttacaagacttgcaattgcacgtcgtgtttatactcaagcgcatattgatattatggcagatgctttaattacaattaaggaaagagcaaacaccgttaaaggttatagaattacatgggaaccaccaatacttcgtcacttccaagcaagtcttgaaccattaaaataa

SEQ ID NO: 14936 - protein, 472 aa, Clostridium tetani
MIIYYLKLEGFNMKIKYVAEPFRIKMVEPIKMLTREERELKIAEAKYNTFNLRGEDVYIDLLTDSGTNAMSDDQWAGVMKGDEAYAGGKSYFKLVDAVKDIFGYKFVQPVHQGRAAEKVLFGLLLGEGKYSISNMHFDTTRAHVELSGARAIDCVVPEASDPTVRIPFKGNMDVEKLEKLIKEHGADKIGVVVMTITNNSAGGQPVSIENMKETAEICKKYNIRLCIDAARYAENAYFIKQREPGYENKSIKEIIKEIFSYADIFTMSAKKDAIVNMGGLLGIKEDEELFQLCKGRTISFEGFITYGGLSGRDLESLAIGLYEGIDENYLRYRIGQMEYLAARLDEAGIAYQSPVGGHGVFVDAKSMFPHIPYNEFPGQVLAVELYKEAGIRTCEIGSYMLGNDPDTGEQLKADFEFTRLAIARRVYTQAHIDIMADALITIKERANTVKGYRITWEPPILRHFQASLEPLK

SEQ ID NO: 14937 - DNA, 1389 bp, Enterobacter aerogenes
  CDS (1)..(1389): transl_table=11
atgaaacgtatccctgagccgttccgcattaaaatggtcgaaaatattcgtatgaccacctttgacgatcgcgtcaaagcgctgaaagaggcgggctataacccgtttttgctcaatagccaggacgtgtatatcgacctgctgaccgactccggcaccggcgcgatgagcgaccatcaatgggccgggctgatgatgggcgacgaagcctacgccgggtcgcgtaactatcagcatctgtgtgaaaaggtcaaagagattatcggctatccgtataccattcccacccaccaggggcgcggcgcggagcagattctgttcccaagcctgattgctcgccgcaagtcggcgcatccggtgtttatttccaacttccacttcgatactaccgccgctcacgtggagcttaacggcgcaaaagccattaacgtggtgacgccgaaagccttcgacacgacctcgtggtacgactggaaaggcaactttgatattgatttactgaaagcgaccatcgccgagcacggcgcggaaaacgtggcggcgattattactaccgtcacctgtaacagttccggcggccagccggtatcgctggcgaatatgcgcgaggtgtatcaaattgcgcgccagaacaatattccggtggtaatcgactccgcccgcttctgcgaaaacgcctggtttattaaacagcgcgaagagggctatgccgataaatcggtgaaagagattattctcgagatgtaccagtatggcgatatgctgaccatgtccgccaagaaagacccgatggtgaatattggcggactgtgctgcttccgcgatgacgaagagctcttcaacgaagtacgcattcgctgcgtgccgatggaaggctttgtcacctacggcggcctggcggggcgcgatatggaggcgctggctatcggtctggaagaagggaccaacgaggattacctcgcttatcgcatcaatcaggtggagtacctcggtgaacgcctgcgcgaaggcggcattccgattcagtatccgaccggcggccatgcggtgttcgtcgatgctaagctgctgctgccgcatattccgccggagcagttcccggcgcacgcgctaaacaacgagctgtatctggaagcgggcattcgcagcgtggaaatcggctccctgctgctgggacgcgacccggaaaccggtaagcagaaggcgtcgccgatggagctgctgcgcctgaccattccgcgtcgggtttataccaacgatcatatggactatatcgctgatgcgctgatcgccgttaaggcgcgcgccgccacgattaagggcctgacctttacctatgaaccgccggtactgcgccacttcgtcgccagactgaaaccggtgaaataa

SEQ ID NO: 14938 - protein, 462 aa, Enterobacter aerogenes
MKRIPEPFRIKMVENIRMTTFDDRVKALKEAGYNPFLLNSQDVYIDLLTDSGTGAMSDHQWAGLMMGDEAYAGSRNYQHLCEKVKEIIGYPYTIPTHQGRGAEQILFPSLIARRKSAHPVFISNFHFDTTAAHVELNGAKAINVVTPKAFDTTSWYDWKGNFDIDLLKATIAEHGAENVAAIITTVTCNSSGGQPVSLANMREVYQIARQNNIPVVIDSARFCENAWFIKQREEGYADKSVKEIILEMYQYGDMLTMSAKKDPMVNIGGLCCFRDDEELFNEVRIRCVPMEGFVTYGGLAGRDMEALAIGLEEGTNEDYLAYRINQVEYLGERLREGGIPIQYPTGGHAVFVDAKLLLPHIPPEQFPAHALNNELYLEAGIRSVEIGSLLLGRDPETGKQKASPMELLRLTIPRRVYTNDHMDYIADALIAVKARAATIKGLTFTYEPPVLRHFVARLKPVK

SEQ ID NO: 14939 - DNA, 1419 bp, Haemophilus influenzae
  CDS (1)..(1419): transl_table=11
atggaaaattttaaacatttacctgaacctttccgcattcgtgttattgaaccagtaaaaagaactactcgtgagtatcgtgagcaagcgatcttaaaatcaggcatgaatccatttttattggatagtgaagatattttcattgacttacttacagatagcggtactggtgccgttacacaagatatgcaagctgcaatgttacgtggcgatgaagcctatagtggcagtcgcagttattatgcgttagctaaagcagtgaaagatatttttggttatgaatatacaattcctactcatcaaggccgcggtgctgaacaaatttatattccagtattgattgctaaacgtgaacgtgagaaaggtttagatcgcagcaaaatggtggttttctctaactatttctttgataccacacaaggacatagccaaattaatggggcaacggttcgcaatgtttatatcaaagaggcatttgatacaacagcaaaacatccatttaagggtaatttcgatttagaaaaattagaaaaaggcattcaagaggcgggagcacataatgtaccttacattgtatgtaccattacttgtaactctgcgggtggtcagccagtttctattgcaaacttaaaaggcatgtatgaaattgcgcgtaaatacgatattccagtcatcatggattcagctcgttttgcagaaaacgcctattttgttcaacaacgtgaagaagcttataaagactggactattgaacaaattacttacgaaagctatcgctatgctgacggtttagcgatgtccgccaaaaaagatgctatggtgccaatgggggggattttagcgtttaaagataaatcaatggaggaagtctatcacgaatgtagaacgctttgtgttgtgcaagaagggttccctacttatggtggtttagaaggtggtgcaatggaacgcttggctgttggcttacatgatggtatgcgtcaagaatggctggcttatcgtattgcgcaaattgaatatttggttgcaggcttagaaaaaattggtgtgctttgccaacaaccaggtggccacgctgcgttcgtagatgcgggtaaattattaccacatattccagccgaccaattcccagcacaagcactttcttgcgaactttataaagttgcaggtataagagcggtagaaattggctcatttttattagggcgagatccgaagacgggtaaacaactaccatgtccagcagagcttttacgcttaactgtaccacgtgcaacttatacgcaaactcatatggatttcattattgaggcgttccaaaaagtgaaagaaaatgcggagaatattaagggtttaacctttacttatgaaccaaaagttctccgccactttacggcacgtttaaaagaagttgaataa

SEQ ID NO: 14940 - protein, 472 aa, Haemophilus influenzae
MENFKHLPEPFRIRVIEPVKRTTREYREQAILKSGMNPFLLDSEDIFIDLLTDSGTGAVTQDMQAAMLRGDEAYSGSRSYYALAKAVKDIFGYEYTIPTHQGRGAEQIYIPVLIAKREREKGLDRSKMVVFSNYFFDTTQGHSQINGATVRNVYIKEAFDTTAKHPFKGNFDLEKLEKGIQEAGAHNVPYIVCTITCNSAGGQPVSIANLKGMYEIARKYDIPVIMDSARFAENAYFVQQREEAYKDWTIEQITYESYRYADGLAMSAKKDAMVPMGGILAFKDKSMEEVYHECRTLCVVQEGFPTYGGLEGGAMERLAVGLHDGMRQEWLAYRIAQIEYLVAGLEKIGVLCQQPGGHAAFVDAGKLLPHIPADQFPAQALSCELYKVAGIRAVEIGSFLLGRDPKTGKQLPCPAELLRLTVPRATYTQTHMDFIIEAFQKVKENAENIKGLTFTYEPKVLRHFTARLKEVE

SEQ ID NO: 14941 - DNA, 1347 bp, Halobacterium salinarium
  CDS (1)..(1347)
atgcgttctcacacagccacgatggtcgaccgcatcgaggacaccagccgggcggaccgcgaggccgcgctcgccgacgccggccacaacgtcttcgaactcgcaagcgacgacgtggccgtcgacctgctgaccgattcgggaaccggaaccatgagcaacgaccagtgggcggccatgctgcagggcgacgaagcctacgccggcagtgccagcttcgaggacctcgcggtcgccgccgaggacgtgatggggttccagcatatcatccccgcccaccagggccggggcgctgaaaacgtcctctacggggcggtgctctcggctggggacaccgttctgaacaacgcccacttcgacaccacgcgggcgcacgtcgccgccaacgacgccacgcccgtcgactgccccgtcgacggcgcgcgcgaccccgacaccgacgccccgttcaagggcaacttctcggtcgaacgcgcccgccgcgtcgtcgacgacgtcggcgcggacgccgtccccgtcgtcgtgctcaccatcaccaacaactccatggccggccagccggtcagcatcgagaacacccgcgaggtcgccgcgttcgccgacgacatcgacgccacgttcgtcatcgacgcctgccggttcgccgagaacgcccacttcgtccagcagcgcgaacccggctacgagcacgactccgtcgccgccatcgcccgcgagcagctctcgtacgccgacgcctgcgtcatgagcgggaagaaagacggcctggtcaacgtcggcgggttcgtcggcctccacgacgacggccgcctccacgagcagtgccgccagcgcggcatcctctacgagggcttctcgacgtacggcgggatgtccggccgcgacatggcggcgttcgccgtcggcctccgggaggccgtcgaaccgccgtacgtcgccgaacgcgtcgcccaggtccagcggctcgcggacgccctcaccgaccgcgatgtccccatctaccagccggccggcggccacgccgtctacatcgacgccaacgccgcgctcccccacctcccacgcgagcagttccccgggcaggcgttcgtctgtgagctctaccgcgagggcggcgttcgcgccgtggaactcggccggttcgcgttccccgacaccgaccgccgcgacctcgttcggctcgcgctcccccgccgcacgtacggccccgaccacctcgaccacgtcgccgacaccgccgccgcggtctgcgagcgcggcaccgacgtcaccggcctggagatcgtctccgaacccgaactgaccgaactccggcatttctccgcggccctccagccggtcgcgtaa

SEQ ID NO: 14942 - protein, 448 aa, Halobacterium salinarium
MRSHTATMVDRIEDTSRADREAALADAGHNVFELASDDVAVDLLTDSGTGTMSNDQWAAMLQGDEAYAGSASFEDLAVAAEDVMGFQHIIPAHQGRGAENVLYGAVLSAGDTVLNNAHFDTTRAHVAANDATPVDCPVDGARDPDTDAPFKGNFSVERARRVVDDVGADAVPVVVLTITNNSMAGQPVSIENTREVAAFADDIDATFVIDACRFAENAHFVQQREPGYEHDSVAAIAREQLSYADACVMSGKKDGLVNVGGFVGLHDDGRLHEQCRQRGILYEGFSTYGGMSGRDMAAFAVGLREAVEPPYVAERVAQVQRLADALTDRDVPIYQPAGGHAVYIDANAALPHLPREQFPGQAFVCELYREGGVRAVELGRFAFPDTDRRDLVRLALPRRTYGPDHLDHVADTAAAVCERGTDVTGLEIVSEPELTELRHFSAALQPVA

SEQ ID NO: 14943 - DNA, 1416 bp, Pasteurella multocida
  CDS (1)..(1416): transl_table=11
atggaaaacttcaaacatttaccagagccgtttcgtattcgtgtgattgagccagtgagaagaaccacgcgttcgtaccgtgaagaagccattttaaaggcgggaatgaacccattcttactagacagtgaagatgtgtttatcgatctcttaactgacagtggaacaggtgcagtaacacaggaaatgcaagcggcgatgttacgtggcgatgaagcatacagtggtagtcgtagctatcatgcgttagcgaatgcggtgaaagagatttttggttatgaatatacaattccaactcaccaaggtcgtggtgcagaacaaatttatattcccgtattaattaaaaagcgcgagcaagaaaaaggcttagatcgtagcaaaatggtggtgttctctaactatttcttcgataccacacaaggtcatagccaaattaatggtgcgacagtacgcaacgtttatacaaaagaagcgtttgataccagtgttaacgccgatttcaaaggggattttgatcttgaaaaattagaacaagggattcaagaagtcggtgctgaaaacgtcccatatattgtttgcaccattacgtgtaactctgcgggtggtcagcctgtatcattagccaatatgcgagcgatgtatgagattgcgaaaaaatatgatattccagtcgttatggattctgcccgttttgcagaaaatgcctatttcatccaacaacgtgaacctggctataaagagtggacgatcgaacaaatcacttatgaaagctataaatatgctgatgctttagcgatgtctgcgaaaaaagatgcgatggtgccaatgggtggcttactctgctttaaagataaatccatggaagacgtgtataacgagtgtcgtacactttgtgtcgtacaagaaggcttcccgacctatggcggtttagaagggggcgcaatggagcgtttagcggtggggctacgtgatggtatgcgtcaagattggttagcgtatcgtattaatcaaattgagtatttggtgaatggtttagaagcgattggcgtcgtatgtcaacaacctggtggtcacgcggcatttgttgacgcaggaaaattgttaccacatattccagccgatcaattccctgcgcaagcccttgcttgtgaactttataaggtggcgggaattcgtgcagtagaaatcggttcgttcttattaggtcgtgatccaaaaaccggtaaacaattgccttgtcctgcggagttattacgtttaacgattcctcgtgcaacttatactcaaacgcacatggacttcattattgaagcatttaagcaagtcaaagaaaatgcagaaaatattaaagggttaacctttacttatgagccaaaagttttacgtcacttcacggcacgcttaaaagaagtataa

SEQ ID NO: 14944 - protein, 471 aa, Pasteurella multocida
MENFKHLPEPFRIRVIEPVRRTTRSYREEAILKAGMNPFLLDSEDVFIDLLTDSGTGAVTQEMQAAMLRGDEAYSGSRSYHALANAVKEIFGYEYTIPTHQGRGAEQIYIPVLIKKREQEKGLDRSKMVVFSNYFFDTTQGHSQINGATVRNVYTKEAFDTSVNADFKGDFDLEKLEQGIQEVGAENVPYIVCTITCNSAGGQPVSLANMRAMYEIAKKYDIPVVMDSARFAENAYFIQQREPGYKEWTIEQITYESYKYADALAMSAKKDAMVPMGGLLCFKDKSMEDVYNECRTLCVVQEGFPTYGGLEGGAMERLAVGLRDGMRQDWLAYRINQIEYLVNGLEAIGVVCQQPGGHAAFVDAGKLLPHIPADQFPAQALACELYKVAGIRAVEIGSFLLGRDPKTGKQLPCPAELLRLTIPRATYTQTHMDFIIEAFKQVKENAENIKGLTFTYEPKVLRHFTARLKEV

SEQ ID NO: 14945 - DNA, 1401 bp, Photorhabdus luminescens
  CDS (1)..(1401): transl_table=11
atgaaacgtattccagaacctttccgtattaaaatggtagaaaatattcgcatgactactcgtgccgaacgtgaaaaagcattagaagaagccggatataatccattcttattacccagtgacgcggtttatattgatttgctgacagattctggcactggagcaatgagtgatcgccagtgggcggggataatgatgggggatgaagcttatgcaggttcccgtaactattatcatctatgtgataaagtcaatgaattaattggctaccaatatactattccaacccatcaagggcgtggagcagaacagattttatttccgacattaattgctcgtaaaaaagcgcaaggtggtgcaacgcatccggtctttatttctaatttccattttgatacgacagcggctcatgttgaattaaatggcgcgaaagcgattaatgttgttacgtcaaaagcctttgatacaaccacctattatgattggaaaggcgattttgatattgatgaattggaaaaaacgatagcagaacatggcgctgataatgttgtcgcgattatcacaacggttacctgtaatagttccggtggtcagcctatctctctcgctaatatgaaagccgtgtatgagattgcaaagcaacatgatattcctgtggtgattgattcagcccgtttctgtgaaaatgcttggtttattaagcaaagagaaaagggttatgaaaataaatccgttaagcagatcgtcaaggagatgtatcaatatggtgatatgttaaccatgtcagctaaaaaagatcccttggtcaatattggtggtctttgttgtttccgtgatgatgaagatctctttaatgaagtgcgtacccgctgtgtgccaatggaagggtttgtgacttatggcggtcttgccgggcgcgatatggaagcattggcaattggtcttgaagaggggatgaatgagggttatctggcatatcgtattaatcaggtggcttatttaggtaatagattaagagatgcaggtattcctattcaatatccaaccggtggtcatgctgtatttgttgatgctaaattattattaccgcatattccaggggaacaattccccgctcatgcattgaataatgaattatatctggaggcgggaataagaagtgtggaaattggttctttgttattaggtcgtgatccaaaaaccggaaaacagaaaccatcaccgatggaacttttgcgattaactattcctcgtcgcgtttatactaatgatcatatggattatgttgtagaagcctttatttccttgaaggagagaattcctcagattaaaggattaacgtttacttatgaaccatccgtattacgtcatttcgttgcaagattaaaaccaattaaataa

SEQ ID NO: 14946 - protein, 466 aa, Photorhabdus luminescens
MKRIPEPFRIKMVENIRMTTRAEREKALEEAGYNPFLLPSDAVYIDLLTDSGTGAMSDRQWAGIMMGDEAYAGSRNYYHLCDKVNELIGYQYTIPTHQGRGAEQILFPTLIARKKAQGGATHPVFISNFHFDTTAAHVELNGAKAINVVTSKAFDTTTYYDWKGDFDIDELEKTIAEHGADNVVAIITTVTCNSSGGQPISLANMKAVYEIAKQHDIPVVIDSARFCENAWFIKQREKGYENKSVKQIVKEMYQYGDMLTMSAKKDPLVNIGGLCCFRDDEDLFNEVRTRCVPMEGFVTYGGLAGRDMEALAIGLEEGMNEGYLAYRINQVAYLGNRLRDAGIPIQYPTGGHAVFVDAKLLLPHIPGEQFPAHALNNELYLEAGIRSVEIGSLLLGRDPKTGKQKPSPMELLRLTIPRRVYTNDHMDYVVEAFISLKERIPQIKGLTFTYEPSVLRHFVARLKPIK

SEQ ID NO: 14947 - DNA, 1398 bp, Proteus inconstans
  CDS (1)..(1398): transl_table=11
atggctaaaagaattgtagaaccattccgcattaaaatggtagaaaatatccgtattccaagtagagaagaacgtgaagtcgctttaaaagaagcgggatataacccctttttactaccaagtagtgctgtgtatattgacttattaactgactcaggcactacgcgatatgatcatcatggcagcatgatcacaggggatgaggcgtatgcaggatctcgcaactattatgatttaaaagataaagttaaagaaatgtttgattacgattatgtgatccccgctcaccaaggtcgtggtgctgaaaacatgcttttcccagtattattaaaagttaaacaggaacaaggaggagcgaaaaaacccgtatttatttctaacttccactttgatacaacagcagctcacgttgaattaaaccattgtaaagcaattaatattgttaccgaaaaagcctatgactcagatacctatgatgactggaaaggtaactttgatattcaaaaattaaaagataatattgcgccagagtggtgcagaaaacgttgttgccattatttctctattacttgtaatagtgccggtggccagcccgtgtctatggccaatttaaaagaagtatatgaaattgcaaaacaccataacatttttgttgttatggactctgcgcgcttctgtgaaaatgcctattttattaaagaacgtgatcctaaatataaaaacgcgaccattaaagagatcattcttgatatgtataaatatgctgatgcattaacaatgtcagcgaaaaaagacccattattaaatattggtgggttagtctgtattaaaaatgatgagaagatctttactctagcaagacagcgctgtgtgccaatggaaggtttcgtgacctatggtggactggctggtcgtgacatggccgcaatggtacaaggtctcgaggaaggggctggagaagagtatttacattatcgtatcgggcaagttaaatacttaggtgatcgcttgcgtgaaggcggtatttcaattcagtatcctacaggcggccatgcggtattcgttgactgtaagaaacttgttccacatattcctggtgatcagttcccagcacaagcggtaattaatgcgctgtatttagaatcgggtgttcgtgccgttgaaattggatcattcttattaggacgagaccctgaaactggcaaacaaaagcatgcagatatggaatttatgcgattaactattgcgagacgtgtatataccaatgaccatatggattatattgcagatgctctcattggtttaaaagataaatttgcgaccctcaaaggccttgactttgaatatgaaccgccagttttaagacattttactgcgcgattaaaaccaatcaaataa

SEQ ID NO: 14948 - protein, 465 aa, Proteus inconstans
MAKRIVEPFRIKMVENIRIPSREEREVALKEAGYNPFLLPSSAVYIDLLTDSGTTRYDHHGSMITGDEAYAGSRNYYDLKDKVKEMFDYDYVIPAHQGRGAENMLFPVLLKVKQEQGGAKKPVFISNFHFDTTAAHVELNHCKAINIVTEKAYDSDTYDDWKGNFDIQKLKDNIAPEWCRKRCCHYFSITCNSAGGQPVSMANLKEVYEIAKHHNIFVVMDSARFCENAYFIKERDPKYKNATIKEIILDMYKYADALTMSAKKDPLLNIGGLVCIKNDEKIFTLARQRCVPMEGFVTYGGLAGRDMAAMVQGLEEGAGEEYLHYRIGQVKYLGDRLREGGISIQYPTGGHAVFVDCKKLVPHIPGDQFPAQAVINALYLESGVRAVEIGSFLLGRDPETGKQKHADMEFMRLTIARRVYTNDHMDYIADALIGLKDKFATLKGLDFEYEPPVLRHFTARLKPIK

SEQ ID NO: 14949 - DNA, 1404 bp, Proteus vulgaris
  CDS (1)..(1404): transl_table=11
atggctaaaagaatcgtagaaccgttccgtattaaaatggtagaaaaaatccgagttccttcaagagaagaacgtgaagcagcattaaaagaagcaggatataacccatttttactaccaagcagcgcggtatatattgatttattgactgactctggaactaacgcaatgagtgatcatcaatgggcagcgatgattacaggtgatgaagcctatgcgggttcaagaaactattatgatttaaaagataaagcaaaagaactttttaattatgattatattattccagctcaccaaggtcgtggcgctgagaatattctttttcctgtgctattaaaatataaacaaaaagaaggaaaagcgaaaaacccagtttttatttctaacttccactttgatacaaccgctgcccacgtagaattaaatggttgtaaagcaattaatattgttactgaaaaagccttcgattcagaaacctatgatgattggaaaggcgattttgatattaaaaaattaaaagagaatattgcacaacacggtgctgataatattgttgctattgtatcaaccgtgacttgtaatagtgccggcggccagcctgtttctatgagtaatttaaaagaagtttatgaaatagcgaaacaacacggtatttttgttgtgatggattcagctcgtttttgtgagaatgcttattttattaaagcgcgtgatcctaaatataaaaatgccactattaaagaagttatttttgatatgtataaatatgctgatgcattaacaatgtcagcgaaaaaagatccattattaaatatcggtggtttagtcgctattcgtgataatgaagagatatttactttagccagacaacgttgtgtacccatggaaggctttgtaacctatggtggtttagctggtcgtgatatggctgcaatggtacaaggtttagaagaaggaactgaagaagagtatctgcactatcgtattggtcaagttaagtatttaggtgatcgcttacgtgaagcgggtattccaattcaatatcctactggtgggcatgcggttttcgttgactgtaaaaaattagttccgcaaattccgggtgatcaatttcctgctcaagcagttattaatgcactttatctggagtcaggtgtgcgtgcggtagaaattggttcattcttattaggtcgtgatcctgcaacgggtgaacaaaaacatgctgatatggaatttatgcgtttaactattgcacgccgtgtttataccaatgaccatatggattatattgctgatgcattaattgggttaaaagagaagtttgcaacacttaaaggtctagagttcgaatatgaaccacctgtattaagacactttactgcaagattaaaacctatcgaataa

SEQ ID NO: 14950 - protein, 467 aa, Proteus vulgaris
MAKRIVEPFRIKMVEKIRVPSREEREAALKEAGYNPFLLPSSAVYIDLLTDSGTNAMSDHQWAAMITGDEAYAGSRNYYDLKDKAKELFNYDYIIPAHQGRGAENILFPVLLKYKQKEGKAKNPVFISNFHFDTTAAHVELNGCKAINIVTEKAFDSETYDDWKGDFDIKKLKENIAQHGADNIVAIVSTVTCNSAGGQPVSMSNLKEVYEIAKQHGIFVVMDSARFCENAYFIKARDPKYKNATIKEVIFDMYKYADALTMSAKKDPLLNIGGLVAIRDNEEIFTLARQRCVPMEGFVTYGGLAGRDMAAMVQGLEEGTEEEYLHYRIGQVKYLGDRLREAGIPIQYPTGGHAVFVDCKKLVPQIPGDQFPAQAVINALYLESGVRAVEIGSFLLGRDPATGEQKHADMEFMRLTIARRVYTNDHMDYIADALIGLKEKFATLKGLEFEYEPPVLRHFTARLKPIE

SEQ ID NO: 14951 - DNA, 1365 bp, Rhodobacter capsulatus
  CDS (1)..(1365): transl_table=11
atgaaaaccatcatcgaacctttccgcatcaaatcggtcgagccgatccgcctcacctcgcgccccgagcgtgaacgcctggcgcgcgcggccggatacaaccttttcggcctgcactcggatgacgtgctgatcgaccttctgaccgacagcggcaccggcgcgatgtcgtccttgcaatgggccgcggtgatgcagggcgacgaaagctatgccggctcgcccagcttcttccgctttgaagccgcggtgcaaaatctgatgcccttcaagcacatcatcccgacgcatcagggccgcgcggcggaagcgatcctgttctcgatcttcgggggcaagggccgtcgcatcccctcgaacacccatttcgacaccacgcgcggcaatatcgaggcctcgggcgccacgggcgacgatctggtgattgccgagggcaaggacccgcaaaacctgcatccgttcaagggcaacatggatctggcgcggctggaggcttaccttgaggcgcatcacgccgaggtgcccttggtgatgatcaccatcaccaacaatgcgggcggcgggcagccggtgagcctggccaatatccgcgccgtcgccgatctggcgcatcggtatggcaagcctttcgtgatcgacggctgccgctttgccgaaaacgcctggttcatcaagacccgcgaggagggtcaggccgatcgctcgatccccgagatcgtgcgtgactgcttcgcggtggcggatggcatgacgatgtcggcgaaaaaggacgcctttggcaatatcggcggctggctggcgctgaacgacgacgatctggccgaggaggcgcgcgggcatctgatccggaccgaggggttcccgacctatggcgggctggcggggcgtgacttggacgcgctggcgcaggggctggtcgagatcgtcgacgaggattacctgcgctaccgcatccgcacgcatcaatatatcgtcgagcggctggatgcgatgggggttccggtggtgaagcccgcgggcgggcatgcggtcttcatcgacgcgcgggcctggctttcccatatcccgccgctcgaataccccgggcaggcgctggcggtggcgctttatgaaattgcaggcgtccggtcctgcgagatcggcacggcgatgttcggccgccagcccgacggatcggaaaagcccgcggcgatggatctggtgcggctcgccttcccgcgccggacctatacgcaaagccacgccgattacatcgtcgaggctttcgaggagctggcggcaacgaaagacgccctgcgcggctaccggatcgtcaaggagccgaagctgatgcggcatttcacctgccgcttcgagaaactctga

SEQ ID NO: 14952 - protein, 454 aa, Rhodobacter capsulatus
MKTIIEPFRIKSVEPIRLTSRPERERLARAAGYNLFGLHSDDVLIDLLTDSGTGAMSSLQWAAVMQGDESYAGSPSFFRFEAAVQNLMPFKHIIPTHQGRAAEAILFSIFGGKGRRIPSNTHFDTTRGNIEASGATGDDLVIAEGKDPQNLHPFKGNMDLARLEAYLEAHHAEVPLVMITITNNAGGGQPVSLANIRAVADLAHRYGKPFVIDGCRFAENAWFIKTREEGQADRSIPEIVRDCFAVADGMTMSAKKDAFGNIGGWLALNDDDLAEEARGHLIRTEGFPTYGGLAGRDLDALAQGLVEIVDEDYLRYRIRTHQYIVERLDAMGVPVVKPAGGHAVFIDARAWLSHIPPLEYPGQALAVALYEIAGVRSCEIGTAMFGRQPDGSEKPAAMDLVRLAFPRRTYTQSHADYIVEAFEELAATKDALRGYRIVKEPKLMRHFTCRFEKL

SEQ ID NO: 14953 - DNA, 1389 bp, Thermoanaerobacter tengcongensis
  CDS (1)..(1389): transl_table=11
gtgtacgatgatttgacgagaatggctgagccttataagatcaaaatggtggagccgttgaaaattaccacgagggaagagagaataaggcttatcaaagaagccgggtataacttgtttttattaaaatctgacgacgtgtacattgaccttttgactgatagcggcactgctgcgatgagcgattatcaatgggcaggtatgatgctgggggatgaatcttacgcaggaagcagaaactatcagcatttgtgcgaagttgttcaagatatttttggctataagtacgttgtgccaacccatcaagggcgcggagctgaaaaggtgttgtttcctcttctcataaagaagggacagtatgtacttggtaacatgcattttgataccacaaaggcccatattgagctagcaggcggaattggtatagacatggtgataaaggaagctgaggacacagaaaactaccatccttttaaaggaaattttgatgttgaagctttggaaaatttcataaaagaaaaaggtgctgaaaacatagcttttattttagcaacggtgacctgcaacagtgcgggtggacagcctgtttcaatggaaaacataaaagaagtgaggagaattgctgataagtacggtatcaggcttttctttgatgcagcaagatttgcagagaatgcctatttcataaaacagagagaaaaaggctatgaaaacaaatccattaaagaaatagtaagagaaatgttctcctacggcgatggcttcacaatgtctgccaaaaaagatgcgctggtaaacatcggcggccttatcgctataaaggaggatgaggagctttttacaagggttaagacgatgctcatacctatggaaggttttgtaacatacggcgggctcgctgggagagacatggaggctatggcgagaggcttagaagaagttcttgatgaaaattaccttgcttggagaataaatcaggtaaaatatttgggggacaagttgagagaggcaggcataccgattcagtacccgactggcggtcatgctgtatttatagatggcaaaaagtttttgcctcacgtgcctcaggaacaatttccttcccacgcaatttgcgtagaactttatatagaagcaggaattagggctgtagaagtaggtgctcttctagcaggaagggacccagagacaggtcaaaacaggcttccaaaacttgattttgtccgacttaccattcctaggagagtttacacgaacagtcacatggacgtggtagcagaagcagtgaagagggtatatgctagaagagaccaaataaagggttataggtttgtatatgaacctccaattttgagacatttcactgctagattagagcctgtagaatga

SEQ ID NO: 14954 - protein, 462 aa, Thermoanaerobacter tengcongensis
MYDDLTRMAEPYKIKMVEPLKITTREERIRLIKEAGYNLFLLKSDDVYIDLLTDSGTAAMSDYQWAGMMLGDESYAGSRNYQHLCEVVQDIFGYKYVVPTHQGRGAEKVLFPLLIKKGQYVLGNMHFDTTKAHIELAGGIGIDMVIKEAEDTENYHPFKGNFDVEALENFIKEKGAENIAFILATVTCNSAGGQPVSMENIKEVRRIADKYGIRLFFDAARFAENAYFIKQREKGYENKSIKEIVREMFSYGDGFTMSAKKDALVNIGGLIAIKEDEELFTRVKTMLIPMEGFVTYGGLAGRDMEAMARGLEEVLDENYLAWRINQVKYLGDKLREAGIPIQYPTGGHAVFIDGKKFLPHVPQEQFPSHAICVELYIEAGIRAVEVGALLAGRDPETGQNRLPKLDFVRLTIPRRVYTNSHMDVVAEAVKRVYARRDQIKGYRFVYEPPILRHFTARLEPVE

SEQ ID NO: 14955 - DNA, 1419 bp, Vibrio cholerae
  CDS (1)..(1419): transl_table=11
atggaaaattttaaacacttaccagaaccttttcgtattcgtgttattgaaccagttaaacgcaccacacgggaatatcgtgaaaaggcgattttaaatgccggaatgaacccctttttgctcgatagtgaagatgtatttattgacctgctcaccgacagcggcactggcgctatcacgcaggagatgcaagccgcgatgttccgtggtgatgaagcctacagcggcagccgcagctaccacgcactcgcgagagcggttaaagatatttttggttatgaatacacgattccgacccaccaaggtcgtggtgcagagcagatttatattcctgttttgattaaaaagcgtgaaaaagagaaaggactcgatcgcagtaaaatggtcgcactatctaactactttttcgataccactcaaggccatacccaaattaactgctgtgttgctaaaaacgtgtacaccgaggaagcgtttgatactggtgtcaaagctgattttaaaggcaatttcgacttagaaaagctcgaacaagccatccttgaagcgggcccagcaaacgtcccatatattgtcagcaccatcacttgtaactctgcgggtggccagccagtttcgatcgccaacttaaaagccgtgtatgagattgcccagcgttacgacattcccgtgatcatggattctgctcgttttgctgaaaatgcgtattttattcagcaacgtgagcgtgattaccgcaactggagtatcgaagagatcacgcgtgaagcttacaaatacgccgatggactcgcgatgtcggccaaaaaggatgccatggtgcaaatgggcggcttactctgcttcaaagacgaaagcttctttgacgtgtacaccgaatgccgaaccctgtgtgtggtgcaagaaggcttccctacatacggtggcttagaaggcggtgcgatggagcggttggcggttggcttgtatgacggtatgcgccaagattggctcgcttatcgcattaaccaagtggagtatctggtcaatggtttagaagcgattggggttatttgccaacaagctggcggccatgctgcatttgtcgatgcgggtaaactgctgcctcacatcccagcagatcaattccctgctcacgctttagcttgtgaactctataaagtcgcaggcattcgcgcagtagaaattggctcattactactaggacgcgatcctgcaaccggaaaacagcatccttgcccagccgaattgctccgtttaaccattccacgcgcgacttatacgcaaacgcacatggatttcatcatcgaagcatttgagaaggtgaaagccaatgctcgtaacgtcaaaggattggagtttacttacgagccacccgtgctacgccactttacggctcgcttaaaagaaaaagcctaa

SEQ ID NO: 14956 - protein, 472 aa, Vibrio cholerae
MENFKHLPEPFRIRVIEPVKRTTREYREKAILNAGMNPFLLDSEDVFIDLLTDSGTGAITQEMQAAMFRGDEAYSGSRSYHALARAVKDIFGYEYTIPTHQGRGAEQIYIPVLIKKREKEKGLDRSKMVALSNYFFDTTQGHTQINCCVAKNVYTEEAFDTGVKADFKGNFDLEKLEQAILEAGPANVPYIVSTITCNSAGGQPVSIANLKAVYEIAQRYDIPVIMDSARFAENAYFIQQRERDYRNWSIEEITREAYKYADGLAMSAKKDAMVQMGGLLCFKDESFFDVYTECRTLCVVQEGFPTYGGLEGGAMERLAVGLYDGMRQDWLAYRINQVEYLVNGLEAIGVICQQAGGHAAFVDAGKLLPHIPADQFPAHALACELYKVAGIRAVEIGSLLLGRDPATGKQHPCPAELLRLTIPRATYTQTHMDFIIEAFEKVKANARNVKGLEFTYEPPVLRHFTARLKEKA

SEQ ID NO: 14957 - DNA, 1401 bp, Vibrio parahaemolyticus
  CDS (1)..(1401): transl_table=11
atgaaacgtattccagaacctttccgtatcaaaatggttgagccaatcaaaatgaccacgttggctgaccgagaaatcgctctcaaagaagcgggttacaacccatttttattgcgcagtgatgacgtgtatatcgatttgcttaccgattccggcacaggtgccatgagcgataaccagtgggctggcattatgttgggggatgagtcttacgcgggtagtcgtaactactacaacttatgcagcgcagtggagcatttcttcggctacaaactgacggtgcctgcgcaccaaggccgaggagcggagcagatattgttccctgctctgattgaacgtatgcgccaagtacgtggcggtgaaacgccagtgttcatctcgaactatcactttgatactactgcggggcatattgagctcaacggcggtaaggctatcaacgttgtgacggaagaagcgttcgataccacgacgccttacgattggaaaggtaacttcgacctcaacaaactggtagaaacgattgaagagcatggctcgaagaacatctgtgccatcatcacgacagtgacgtgtaacagctcgggtggccaaccggtatcgatggaaaacatgcgcagcgtgtacgaaattgccaccaaatacgatatcccagtggtgattgactcggctcgctattgtgagaatgcttatttcatcaaacagcgtgaagaaggttacgctgacaagtcgattttggaaatcattcgtgaaatgtatcaatacggcgatatgctcacgatgtctgccaagaaagatccaatggtgaacattggtggcatgtgttgtattcgtgatcatcaagagttgttccaagcggtgcaaacgcgctgcgttcctatggaaggttttgtcacttatggcggcatggctgggcgcgatatggaggctttagcccgaggtttgtatgagggcgcggatgaagacttcctgcattatcgaatcagtcaggtgcaatatttgggcgaacgtctgcgggaggggggaattccaatccaatatccaactggtggccatgcggtgtttgttgatgcggcgaaaatattgccgcacattccagccgatcagttcccagcacaagccttgtgtaatgcgttgtatctggaggctgggattcgagctgttgagattggctcattgttgctcggacgtgaccctgaaacgggtgaacagaaagcctctgagcttgaattaatgcgcttaacgattccacgtcgagtctatactaacgaccacatggactatatcgcggatgcgttgatcgagttgaagaaccgagctcatgaattgaaaggtttgatgttcgaatatgagcctccggttttacgtcactttacggctcgcttccgtgaaattgattaa

SEQ ID NO: 14958 - protein, 466 aa, Vibrio parahaemolyticus
MKRIPEPFRIKMVEPIKMTTLADREIALKEAGYNPFLLRSDDVYIDLLTDSGTGAMSDNQWAGIMLGDESYAGSRNYYNLCSAVEHFFGYKLTVPAHQGRGAEQILFPALIERMRQVRGGETPVFISNYHFDTTAGHIELNGGKAINVVTEEAFDTTTPYDWKGNFDLNKLVETIEEHGSKNICAIITTVTCNSSGGQPVSMENMRSVYEIATKYDIPVVIDSARYCENAYFIKQREEGYADKSILEIIREMYQYGDMLTMSAKKDPMVNIGGMCCIRDHQELFQAVQTRCVPMEGFVTYGGMAGRDMEALARGLYEGADEDFLHYRISQVQYLGERLREGGIPIQYPTGGHAVFVDAAKILPHIPADQFPAQALCNALYLEAGIRAVEIGSLLLGRDPETGEQKASELELMRLTIPRRVYTNDHMDYIADALIELKNRAHELKGLMFEYEPPVLRHFTARFREID

SEQ ID NO: 14959 - DNA, 1422 bp, Vibrio vulnificus
  CDS (1)..(1422): transl_table=11
atggataattttaagcatcttccagaaccctttcgtattcgcgttattgagccagtaaaacgcaccactcgcgagtatcgcgaagaagcaattttaaaagcgggcatgaaccctttcctactggatagtgaagatgtctttatcgacttgctgaccgacagtggcacaggggccatcactcaagatatgcaagcggcgatgttccgtggtgatgaagcgtacagtggcagccgcagttatcatgcattggccaacgccgtaaaagacatttttggttacgaattcaccattccgacacaccaaggccgtggtgcagagcagatctacattcctgtgttgatcaaaaaacgtgaaatcgaaaagggattggatcgctctaagatggttgccttgtcaaactacttcttcgataccacccaaggtcacacgcaaattaactgctgtgtggcgaaaaacgtctacaccgaagaagcctttgatacgggcgtgaaagccgactttaaaggcaattttgatttagaaaagctggaagaggcgattctcgaagcgggcccagccaatgtgccatacatcgtcagcaccatcacctgtaactctgctggcggccaaccggtgtcacttgccaacttaaaagcggtgtacgagattgctaaacgttacgatatcccagtgatcatggactctgcccgttttgccgaaaacgcctatttcattcagcaacgcgaaaaggattatcaaaactggagcatcgaggaaatcacccgcgaaagctacaaatacgctgatggtttggccatgtcagcgaagaaagacgccatggtacaaatgggcggtctgctttgcttcaaagatgaaagcttccttgatgtttatactgaatgccgcaccttgtgtgtggttcaagaaggcttccccacttatggtggcttagaaggcggtgcgatggagcgattagcggtgggtctatacgatggtatgcgccaagactggctagcctaccgaattaaccaggtggaatatttggtcaatggcctcgaaagcattggtgtagtttgccagcaagctggtgggcacgcggcctttgttgatgcgggtaaactgcttcctcatattcctgccgatcagttccctgcccatgctttagcgtgcgagctctataaggttgcgggtatccgcgcggtcgaaatcggctcgctgctactcgggcgcgatcccgcgacaggcaagcagcacccgtgtcctgcagagttactgcgcttaaccattccacgcgccacttatactcaaacgcacatggatttcatcatcgaagcatttggtaaagtcaaagccaatgcggcaaacgtcaaaggactcgagttcacctatgagccgcaggtccttcgtcactttaccgcgcgactgaaggaaatcgacgcataa

SEQ ID NO: 14960 - protein, 473 aa, Vibrio vulnificus
MDNFKHLPEPFRIRVIEPVKRTTREYREEAILKAGMNPFLLDSEDVFIDLLTDSGTGAITQDMQAAMFRGDEAYSGSRSYHALANAVKDIFGYEFTIPTHQGRGAEQIYIPVLIKKREIEKGLDRSKMVALSNYFFDTTQGHTQINCCVAKNVYTEEAFDTGVKADFKGNFDLEKLEEAILEAGPANVPYIVSTITCNSAGGQPVSLANLKAVYEIAKRYDIPVIMDSARFAENAYFIQQREKDYQNWSIEEITRESYKYADGLAMSAKKDAMVQMGGLLCFKDESFLDVYTECRTLCVVQEGFPTYGGLEGGAMERLAVGLYDGMRQDWLAYRINQVEYLVNGLESIGVVCQQAGGHAAFVDAGKLLPHIPADQFPAHALACELYKVAGIRAVEIGSLLLGRDPATGKQHPCPAELLRLTIPRATYTQTHMDFIIEAFGKVKANAANVKGLEFTYEPQVLRHFTARLKEIDA

SEQ ID NO: 14961 - DNA, 1371 bp, Citrobacter freundii
  CDS (1)..(1371): transl_table=11
atgaattatccggcagaacccttccgtattaaaagcgttgaaactgtatctatgatcccgcgtgatgaacgcctcaagaaaatgcaggaagcgggttacaatactttcctgttaaattcgaaagatatttatattgacctgctgacagacagtggcactaacgcaatgagcgacaagcagtgggccggaatgatgatgggtgatgaagcgtacgcgggcagcgaaaacttctatcatctggaaagaaccgtgcaggaactgtttggctttaaacatattgttccgactcaccaggggcgtggcgcagaaaacctgttatcgcagctggctattaaacctgggcaatatgttgccgggaatatgtatttcactaccacccgttatcaccaggaaaaaaatggtgcggtgtttgtcgatatcgttcgtgacgaagcgcacgatgccggtctgaatattgcgtttaaaggtgatatcgatcttaaaaaattacaaaagctgattgatgaaaaaggcgcagagaatattgcgtatatctgccttgcggtgacggttaacctcgcgggcggccaaccggtctcgatggctaacatgcgtgcggtgcgtgaactgacagaagcgcatggcattaaagtgttctacgacgctacccgctgcgtagaaaacgcctactttatcaaagagcaagagcagggctttgagaacaagagcatcgccgagatcgtgcatgagatgttcagctacgccgacggttgtaccatgagtggtaaaaaagactgtctggtgaacatcggcggcttcctgtgcatgaacgatgacgaaatgttctcttctgccaaagagttagtcgtggtctacgaagggatgccatcttacggcggcctggccggacgtgatatggaagcgatggcgattggcctgcgtgaagccatgcagtacgaatatattgagcaccgcgtgaagcaggttcgctacctgggcgataagctgaaagccgctggcgtaccgattgttgaaccggtaggcggtcacgcggtattcctcgatgcgcgtcgcttctgcgagcatctgacgcaagatgagttcccggcacaaagtctggctgccagcatctatgtggaaaccggcgtgcgcagtatggagcgcggaattatctctgcgggccgtaataacgtgaccggtgaacaccacagaccgaaactggaaaccgtgcgtctgactattccacgtcgtgtttatacctacgcacatatggatgttgtggctgacggtattattaaactttaccagcacaaagaagatattcgcgggctgaagtttatttacgagccgaagcagttgcgtttctttactgcacgctttgattacatctaa

SEQ ID NO: 14962 - protein, 456 aa, Citrobacter freundii
MNYPAEPFRIKSVETVSMIPRDERLKKMQEAGYNTFLLNSKDIYIDLLTDSGTNAMSDKQWAGMMMGDEAYAGSENFYHLERTVQELFGFKHIVPTHQGRGAENLLSQLAIKPGQYVAGNMYFTTTRYHQEKNGAVFVDIVRDEAHDAGLNIAFKGDIDLKKLQKLIDEKGAENIAYICLAVTVNLAGGQPVSMANMRAVRELTEAHGIKVFYDATRCVENAYFIKEQEQGFENKSIAEIVHEMFSYADGCTMSGKKDCLVNIGGFLCMNDDEMFSSAKELVVVYEGMPSYGGLAGRDMEAMAIGLREAMQYEYIEHRVKQVRYLGDKLKAAGVPIVEPVGGHAVFLDARRFCEHLTQDEFPAQSLAASIYVETGVRSMERGIISAGRNNVTGEHHRPKLETVRLTIPRRVYTYAHMDVVADGIIKLYQHKEDIRGLKFIYEPKQLRFFTARFDYI

SEQ ID NO: 14963 - DNA, 1383 bp, Clostridium tetani
  CDS (1)..(1383)
atggatttaagtaagtaccctgcagaaccttttaaaattaagagtgttgagcctgttaaaatgatttcaagagaagaacgtgaaatagctatgaaagaggctggatacaacacatttaatttaagatcagaggatgtatatattgatttacttactgactcaggaaccaatgctatgagtgatgctcaatgggcaggtatgatgattggagacgaagcttatgctggaagtaaaaactggttatttttagaatcaactataaaagaattatttggatttaaacatgttgttcctactcaccaaggacgtggtgcagaaaatctcctttcaagtatagctattaaaccagggcaatatgtagcaggaaatatgtattttacaactactagatatcatcaagaaaaaaatggtggtatttttgtagatataataagagatgaagctcacgatgcaagtatagatattccttttaaaggtaatattgatgttaataaattagaaaaacttattgaagaaaaaggtgcagaaaacatagcttatgtatgccttgctgttactgtaaatctagcaggtggacaaccagtttctatggctaatatgagagcagttagagaacttacagcaaaacatggaattaaggtattctatgatgctactagatgtgttgaaaatgcatattttataaaagaacaagaggaaggatatgcagatgtttcaattaaagatatagtacacgaaatgtttagctattccgatggtgctactatgtctggtaaaaaagatggtattgtaaatatcggtggattcttagcaattaatgatgaagagttatttggaaaagctaaagaaatagtagtagtttacgaaggtatgccatcctatggtggtatgactggccgtgatatgcaggctatagcaattggatttagagaagcaatgcaatatgaatatatagaacacagaataagacaggttagatatcttggagatagattaaaagaagcgggagttcctatagttgaaccagttggaggacatgctgtattcttagatgcaagaagattttgcccacatctagatcaagagcaattcccagctcaatcactagctgcttcactttacattgactctggtgttagatcaatggaacgtggtatagtttcagcaggcagagatgttaatacaggcgaaaatcataaaccaaaattagagacagttagacttactattccaagaagagtttacacttacaaacatatggatgttgttgctgaatcagttatacatctatataagcataaagaagatataagaccacttaaattcacttatgaacctgcacaattaagattctttactgcaaaatttgattatgcagactaa

SEQ ID NO: 14964 - protein, 460 aa, Clostridium tetani
MDLSKYPAEPFKIKSVEPVKMISREEREIAMKEAGYNTFNLRSEDVYIDLLTDSGTNAMSDAQWAGMMIGDEAYAGSKNWLFLESTIKELFGFKHVVPTHQGRGAENLLSSIAIKPGQYVAGNMYFTTTRYHQEKNGGIFVDIIRDEAHDASIDIPFKGNIDVNKLEKLIEEKGAENIAYVCLAVTVNLAGGQPVSMANMRAVRELTAKHGIKVFYDATRCVENAYFIKEQEEGYADVSIKDIVHEMFSYSDGATMSGKKDGIVNIGGFLAINDEELFGKAKEIVVVYEGMPSYGGMTGRDMQAIAIGFREAMQYEYIEHRIRQVRYLGDRLKEAGVPIVEPVGGHAVFLDARRFCPHLDQEQFPAQSLAASLYIDSGVRSMERGIVSAGRDVNTGENHKPKLETVRLTIPRRVYTYKHMDVVAESVIHLYKHKEDIRPLKFTYEPAQLRFFTAKFDYAD

SEQ ID NO: 14965 - DNA, 1371 bp, Enterobacter agglomerans
  CDS (1)..(1371): transl_table=11
atgaactatcctgccgagcctttccgcattaaaagtgttgaaaccgtatcaatgatctcacgcgatgagcgtgttaaaaaaatgcaagaagcgggctataacacgtttttactgaattcaaaggatatctacatcgatctgctgacagacagcggtacaaatgccatgagtgacaagcagtgggcagggatgatgattggtgatgaagcctacgcaggcagtgaaaacttctaccatctcgaaaaaacggtgaaagagttgtttggtttcaaacacatcgttccaacccaccagggacgcggggcggaaaacctgctctcgcagctggccattaagcccggtcaatatgtcgcaggaaatatgtactttacaacaacccgcttccatcaggaaaaaaatggcgcaacctttgtggatattgtccgcgatgaagcacatgacgccagcctgaatctcccctttaaaggtgatattgacctgaataaattagcgacgctcattaaagaaaaaggcgccgagaacatcgcctatatctgccttgcggtcaccgtgaatctggcgggtgggcagcctgtttcaatggcgaatatgcgtgccgtacatgaaatggccagcacgtatggcattaagatcttttacgatgccacccgttgcgttgaaaatgcctattttatcaaagagcaggaagcgggctacgagaacgtcagtatcaaagatatcgtgcatgaaatgttcagctatgccgatgggtgcaccatgagcggtaaaaaagattgtctggtgaatatcggcggcttcttgtgtatgaacgatgaggagatgttctcagcggcaaaagagttggttgtcgtttatgaaggtatgccgtcatacggcgggctggccggtcgggatatggaagcgatggctattgggctacgtgaagccatgcagtatgaatatattgaacatcgggtcaaacaggtgcgctatctgggcgataaactccgtgaagccggcgtacccattgttgaaccgacgggcggacatgcggtatttcttgatgctcgtcgtttctgtccacacctgacgcaggatcagttccctgcgcagagcctggcagccagcatctatatggaaaccggcgtgcgaagtatggaacgtggaattgtttctgccggtcgtagcaaggaaacgggggagaaccatcgccccaaactggagacggtacgtctcactattccacgccgtgtttacacttacgcgcacatggatgttgttgccgatggcatcattaaactgtaccagcataaagaagatattcgtggtctgacgtttgtttatgaacctaaacaacttcgcttctttactgcgcgttttgactttatttaa

SEQ ID NO: 14966 - protein, 456 aa, Enterobacter agglomerans
MNYPAEPFRIKSVETVSMISRDERVKKMQEAGYNTFLLNSKDIYIDLLTDSGTNAMSDKQWAGMMIGDEAYAGSENFYHLEKTVKELFGFKHIVPTHQGRGAENLLSQLAIKPGQYVAGNMYFTTTRFHQEKNGATFVDIVRDEAHDASLNLPFKGDIDLNKLATLIKEKGAENIAYICLAVTVNLAGGQPVSMANMRAVHEMASTYGIKIFYDATRCVENAYFIKEQEAGYENVSIKDIVHEMFSYADGCTMSGKKDCLVNIGGFLCMNDEEMFSAAKELVVVYEGMPSYGGLAGRDMEAMAIGLREAMQYEYIEHRVKQVRYLGDKLREAGVPIVEPTGGHAVFLDARRFCPHLTQDQFPAQSLAASIYMETGVRSMERGIVSAGRSKETGENHRPKLETVRLTIPRRVYTYAHMDVVADGIIKLYQHKEDIRGLTFVYEPKQLRFFTARFDFI

SEQ ID NO: 14967 - DNA, 1383 bp, Fusobacterium nucleatum
  CDS (1)..(1383): transl_table=11
atgagatttgaagattatccagcagagccatttagaattaaaagtgtagaaactgttaaaatgattgataaggcagcaagagaagaagtaattaaaaaagcaggatataatactttcttaattaactctgaagatgtttacattgatttattaactgatagtggaactaatgctatgagtgataaacaatggggtggattaatgcaaggtgatgaagcttatgcaggaagtagaaatttcttccacttagaagaaactgtaaaagaaatatttgggtttaaacatatagttcctactcaccaaggaagaggagcagaaaatattttatctcaaatagctataaaacctggacaatatgttcctggaaatatgtattttacaactactagatatcaccaagaaagaaatggtggaatatttaaagatattatcagagatgaggcacatgatgctactcttaatgttcctttcaaaggagatattgacttaaataaattacaaaaattaatagatgaagttggagcagaaaacattgcttatgtttgtttagctgtaactgtaaaccttgctggtggacaaccagtttctatgaaaaatatgaaagcagttagagaactaactaaaaaacatggaataaaagttttctatgatgcaactagatgtgttgaaaatgcttacttcattaaagaacaagaagaaggatatcaagataaaactataaaggaaatagtgcatgaaatgtttagctatgctgatggatgtactatgagtggtaaaaaagattgtcttgttaatataggtggatttttatgtatgaatgatgaagatttattcttagctgcaaaagaaatagttgttgtttatgaaggtatgccatcttatggtggacttgctggtagagatatggaagctatggcaatagggttaagagaatctttacaatatgaatacattagacatagaattttacaagttagatacttaggagaaaaattaaaagaagctggtgtacctatacttgaaccagttggaggacatgctgtattcctagatgctagaagattctgtcctcatatcccacaagaagaattcccagctcaagctcttgcagcagctatctatgttgaatgtggtgtaagaactatggaaagaggaataatttctgctggtagagatgtaaaaactggtgaaaaccataaacctaaactagaaactgttagagttactattccaagaagagtttatacttataaacatatggatgtagtagcagaaggtataatcaaattatataaacataaagaagatataaaaccattagaatttgtatatgaaccaaaacaattaagattctttacagctagatttggaataaaaaaataa

SEQ ID NO: 14968 - protein, 460 aa, Fusobacterium nucleatum
MRFEDYPAEPFRIKSVETVKMIDKAAREEVIKKAGYNTFLINSEDVYIDLLTDSGTNAMSDKQWGGLMQGDEAYAGSRNFFHLEETVKEIFGFKHIVPTHQGRGAENILSQIAIKPGQYVPGNMYFTTTRYHQERNGGIFKDIIRDEAHDATLNVPFKGDIDLNKLQKLIDEVGAENIAYVCLAVTVNLAGGQPVSMKNMKAVRELTKKHGIKVFYDATRCVENAYFIKEQEEGYQDKTIKEIVHEMFSYADGCTMSGKKDCLVNIGGFLCMNDEDLFLAAKEIVVVYEGMPSYGGLAGRDMEAMAIGLRESLQYEYIRHRILQVRYLGEKLKEAGVPILEPVGGHAVFLDARRFCPHIPQEEFPAQALAAAIYVECGVRTMERGIISAGRDVKTGENHKPKLETVRVTIPRRVYTYKHMDVVAEGIIKLYKHKEDIKPLEFVYEPKQLRFFTARFGIKK

SEQ ID NO: 14969 - DNA, 1377 bp, Pasteurella multocida
  CDS (1)..(1377): transl_table=11
atgagaaactatcctgcagaaccttataaagtcaaagctgttgaaccgattgcaatgacgactcgtgagcaacgtgaagcctacatgaaaaaagcgggctacaatacgtttttactcaattcagaagaagtgtatattgatttattaaccgatagtggtacctcggccatgagtgataagcaatgggcgggtcttatgatcggtgatgaagcttatgcaggtagccgtaacttcatgcatttacaagacgtggtcagagaatattatggtttcaaatatgtcgtaccaactcaccaaggtcgtggtgcagaaaacttactttcaaccattatgatcaaaccgggcgattatgtaccgggtaatatgtattttactacaacacgcgcgcaccaagagcgtaatggggcgactttcgttgatattattattgatgaagcccatgattcacaaattgatttacctttcaaaggcaatgtcgatgtgaagaaattacaaaaactgattgatgaagtgggtgcggataaaattccttacatctgtttagcagttaccgtaaacttggcaggtggacaacctgtgagtatggcaaacatgcgtgaagtaaaagcattatgtagcaaacatggtattaaagtgatgtttgatgccacacgttgtgtagaaaatgcgtacttcattaaagagcgtgaagcagagtataaagatgcaaccatcaaagatattctaaaagaaatgatgagttatgcagatggttgtaccatgagtggtaaaaaagactgtcttgtgaatattggtggtttcttatgtattaatgatgatgatctttatcaacaagcttgtgaactcgtggtgctctttgaagggatgccatcttatggtggactagctggtcgtgatatggaagcaatggcaattggtattacggaatctgtcgatttccactatatccagcaccgtgttgcacaatgttactacctcgcggataaattagaagcggcgggtgtgccgattgtgaaaccagtgggtggtcatgcggtattcttagatgcgaagaaattccttccacatattccacaagaacaattcccagcacagatgcttgctgcgcaaatttatattgagggtggcgtacgctcaatggaacgtggtattgtatcggcgggtcgtgataagaaaaccggtgcaaaccatacgcctaaattagaattagtgcgtttaactatcccacgtcgtgtttatacttatgcgcatttagatcatgttgctgacaccattattaaactctttaaacacagagatgacattaaaggtcttgatatggtgtatgagcctaaattattacgtttctttacggcgcgttttgaaccgaaagcgtaa

SEQ ID NO: 14970 - protein, 458 aa, Pasteurella multocida
MRNYPAEPYKVKAVEPIAMTTREQREAYMKKAGYNTFLLNSEEVYIDLLTDSGTSAMSDKQWAGLMIGDEAYAGSRNFMHLQDVVREYYGFKYVVPTHQGRGAENLLSTIMIKPGDYVPGNMYFTTTRAHQERNGATFVDIIIDEAHDSQIDLPFKGNVDVKKLQKLIDEVGADKIPYICLAVTVNLAGGQPVSMANMREVKALCSKHGIKVMFDATRCVENAYFIKEREAEYKDATIKDILKEMMSYADGCTMSGKKDCLVNIGGFLCINDDDLYQQACELVVLFEGMPSYGGLAGRDMEAMAIGITESVDFHYIQHRVAQCYYLADKLEAAGVPIVKPVGGHAVFLDAKKFLPHIPQEQFPAQMLAAQIYIEGGVRSMERGIVSAGRDKKTGANHTPKLELVRLTIPRRVYTYAHLDHVADTIIKLFKHRDDIKGLDMVYEPKLLRFFTARFEPKA

SEQ ID NO: 14971 - DNA, 1377 bp, Symbiobacterium sp
  CDS (1)..(1377): transl_table=11
atgcagcgaccctgggcggaaccgtacaagatcaaggcggtggaacccatccgcatgacgacccgggagtaccgggaacaggcgatccgggaggccggctacaacaccttcctgctgcgcagcgaggacgtgtacatcgacctgctgacggactcgggaaccaacgcgatgtcggaccggcagtggggcgccctgatgatgggcgatgaggcctacgccggcgcacgctccttcttccgcctggaggaggcggtgcgcgagatctacggcttcaagtacgtggtgccgacccatcaggggcgcggtgccgagcacctgatctcccgcatcctcatcaagcccggcgactacatccccggcaacatgtacttcacgacgacgcgcacccaccaggagctgcaggggggcacgttcgtcgacgtgatcatcgacgaggcccacgatccccaggccaatcacccgttcaaggggaacgtggacatcgccaagttcgaggcgctcatcgaccgggtcggggccgacaagatcccgtacatcaacgtggcgcttacggtcaacatggccggtggtcagcccgtctccatggccaacctgcgtgaggtgcggaaggtttgcgaccggcacggcatccggatgtggagcgacgcgacccgcgccgtggagaacgcctacttcatcaaggagcgggaggagggctaccaggacaagccggtccgggagatcctgaaggagatgatgtcctacttcgacggctgcaccatgtcgggaaagaaggactgcctggtcaacatcggcggcttcctggccatgaacgaggagtggatcctccagaaggcccgggagcaggtggtcatcttcgagggcatgcccacgtacggcggcctggccgggcgcgacatggaggcgatcgctcagggcatctacgagatggtggacgacgactacatcgcccaccggatccatcaggtgcgctacctgggcgagcagctgctggaggcgggcatccccatcgtgcagcccatcggcggccacgccgtcttcctggacgcccgggccttcctgcctcacatcccgcaggaccagttccctgcccaggcgctggcggcggcgctctacgtggactccggggtgcgcgcgatggagcggggcatcgtctccgccggccgcaacccccagaccggtgagcacaactatcccaagctggagctggtgcgcctcacgatcccgcggcgggtctacaccgaccggcacatggacgtggtggcgtactcggtgaagcacctgtggaaggagcgcgacaccatccgcgggctgcgcatggtctacgagccgcccaccctgcggttcttcacggcccgcttcgagccgatcagctaa

SEQ ID NO: 14972 - protein, 458 aa, Symbiobacterium sp
MQRPWAEPYKIKAVEPIRMTTREYREQAIREAGYNTFLLRSEDVYIDLLTDSGTNAMSDRQWGALMMGDEAYAGARSFFRLEEAVREIYGFKYVVPTHQGRGAEHLISRILIKPGDYIPGNMYFTTTRTHQELQGGTFVDVIIDEAHDPQANHPFKGNVDIAKFEALIDRVGADKIPYINVALTVNMAGGQPVSMANLREVRKVCDRHGIRMWSDATRAVENAYFIKEREEGYQDKPVREILKEMMSYFDGCTMSGKKDCLVNIGGFLAMNEEWILQKAREQVVIFEGMPTYGGLAGRDMEAIAQGIYEMVDDDYIAHRIHQVRYLGEQLLEAGIPIVQPIGGHAVFLDARAFLPHIPQDQFPAQALAAALYVDSGVRAMERGIVSAGRNPQTGEHNYPKLELVRLTIPRRVYTDRHMDVVAYSVKHLWKERDTIRGLRMVYEPPTLRFFTARFEPIS

SEQ ID NO: 14973 - DNA, 27 bp, Artificial sequence
  Primer sequence
atgaaggattatgtaatggaaaacttt

SEQ ID NO: 14974 - DNA, 26 bp, Artificial sequence
  Primer sequence
ttaaacttctttaagttttgcggtga

SEQ ID NO: 14975 - protein, 533 aa, Artificial sequence
  Consensus
  Variant (2)..(2): Xaa in position 2 is any amino acid
  Variant (7)..(7): Xaa in position 7 is any amino acid
  Variant (10)..(10): Xaa in position 10 is any amino acid
  Variant (12)..(18): Xaa in position 12 to 18 is any amino acid
  Variant (20)..(22): Xaa in position 20 to 22 is any amino acid
  Variant (24)..(25): Xaa in position 24 to 25 is any amino acid
  Variant (27)..(28): Xaa in position 27 to 28 is any amino acid
  Variant (30)..(30): Xaa in position 30 is any amino acid
  Variant (32)..(32): Xaa in position 32 is any amino acid
  Variant (34)..(34): Xaa in position 34 is any amino acid
  Variant (36)..(37): Xaa in position 36 to 37 is any amino acid
  Variant (49)..(49): Xaa in position 49 is any amino acid
  Variant (53)..(54): Xaa in position 53 to 54 is any amino acid
  Variant (56)..(56): Xaa in position 56 is any or no amino acid
  Variant (61)..(61): Xaa in position 61 is any amino acid
  Variant (70)..(71): Xaa in position 70 to 71 is any amino acid
  Variant (73)..(74): Xaa in position 73 to 74 is any amino acid
  Variant (76)..(78): Xaa in position 76 to 78 is any amino acid
  Variant (80)..(80): Xaa in position 80 is any amino acid
  Variant (83)..(83): Xaa in position 83 is any amino acid
  Variant (86)..(88): Xaa in position 86 to 88 is any amino acid
  Variant (89)..(134): Xaa in position 89 to 134 is any or no amino acid
  Variant (137)..(137): Xaa in position 137 is any amino acid
  Variant (145)..(145): Xaa in position 145 is any amino acid
  Variant (147)..(150): Xaa in position 147 to 150 is any amino acid
  Variant (153)..(160): Xaa in position 153 to 160 is any amino acid
  Variant (161)..(170): Xaa in position 161 to 170 is any or no amino acid
  Variant (172)..(173): Xaa in position 172 to 173 is any amino acid
  Variant (175)..(175): Xaa in position 175 is any amino acid
  Variant (178)..(179): Xaa in position 178 to 179 is any amino acid
  Variant (181)..(184): Xaa in position 181 to 184 is any amino acid
  Variant (187)..(190): Xaa in position 187 to 190 is any amino acid
  Variant (192)..(195): Xaa in position 192 to 195 is any amino acid
  Variant (197)..(202): Xaa in position 197 to 202 is any amino acid
  Variant (203)..(210): Xaa in position 203 to 210 is any or no amino acid
  Variant (214)..(215): Xaa in position 214 to 215 is any amino acid
  Variant (218)..(218): Xaa in position 218 is any amino acid
  Variant (221)..(223): Xaa in position 221 to 223 is any amino acid
  Variant (225)..(227): Xaa in position 225 to 227 is any amino acid
  Variant (229)..(230): Xaa in position 229 to 230 is any amino acid
  Variant (231)..(231): Xaa in position 231 is any or no amino acid
  Variant (233)..(234): Xaa in position 233 to 234 is any amino acid
  Variant (236)..(238): Xaa in position 236 to 238 is any amino acid
  Variant (241)..(241): Xaa in position 241 is any amino acid
  Variant (243)..(244): Xaa in position 243 to 244 is any amino acid
  Variant (252)..(252): Xaa in position 252 is any amino acid
  Variant (256)..(259): Xaa in position 256 to 259 is any amino acid
  Variant (261)..(263): Xaa in position 261 to 263 is any amino acid
  Variant (265)..(265): Xaa in position 265 is any amino acid
  Variant (267)..(267): Xaa in position 267 is any amino acid
  Variant (269)..(270): Xaa in position 269 to 270 is any amino acid
  Variant (273)..(273): Xaa in position 273 is any amino acid
  Variant (275)..(276): Xaa in position 275 to 276 is any amino acid
  Variant (283)..(285): Xaa in position 283 to 285 is any amino acid
  Variant (287)..(288): Xaa in position 287 to 288 is any amino acid
  Variant (290)..(292): Xaa in position 290 to 292 is any amino acid
  Variant (295)..(296): Xaa in position 295 to 296 is any amino acid
  Variant (298)..(299): Xaa in position 298 to 299 is any amino acid
  Variant (301)..(301): Xaa in position 301 is any amino acid
  Variant (303)..(303): Xaa in position 303 is any amino acid
  Variant (307)..(309): Xaa in position 307 to 309 is any amino acid
  Variant (316)..(316): Xaa in position 316 is any amino acid
  Variant (323)..(323): Xaa in position 323 is any amino acid
  Variant (325)..(327): Xaa in position 325 to 327 is any amino acid
  Variant (329)..(330): Xaa in position 329 to 330 is any amino acid
  Variant (331)..(348): Xaa in position 331 to 348 is any or no amino acid
  Variant (351)..(357): Xaa in position 351 to 357 is any amino acid
  Variant (359)..(360): Xaa in position 359 to 360 is any amino acid
  Variant (363)..(364): Xaa in position 363 to 364 is any amino acid
  Variant (370)..(370): Xaa in position 370 is any amino acid
  Variant (375)..(375): Xaa in position 375 is any amino acid
  Variant (379)..(379): Xaa in position 379 is any amino acid
  Variant (382)..(382): Xaa in position 382 is any amino acid
  Variant (384)..(388): Xaa in position 384 to 388 is any amino acid
  Variant (391)..(392): Xaa in position 391 to 392 is any amino acid
  Variant (395)..(395): Xaa in position 395 is any amino acid
  Variant (398)..(398): Xaa in position 398 is any amino acid
  Variant (401)..(403): Xaa in position 401 to 403 is any amino acid
  Variant (405)..(407): Xaa in position 405 to 407 is any amino acid
  Variant (410)..(413): Xaa in position 410 to 413 is any amino acid
  Variant (414)..(414): Xaa in position 414 is any or no amino acid
  Variant (416)..(416): Xaa in position 416 is any or no amino acid
  Variant (421)..(421): Xaa in position 421 is any amino acid
  Variant (426)..(429): Xaa in position 426 to 429 is any amino acid
  Variant (431)..(433): Xaa in position 431 to 433 is any or no amino acid
  Variant (436)..(439): Xaa in position 436 to 439 is any amino acid
  Variant (443)..(444): Xaa in position 443 to 444 is any amino acid
  Variant (446)..(448): Xaa in position 446 to 448 is any amino acid
  Variant (451)..(453): Xaa in position 451 to 453 is any amino acid
  Variant (457)..(458): Xaa in position 457 to 458 is any amino acid
  Variant (460)..(460): Xaa in position 460 is any amino acid
  Variant (462)..(467): Xaa in position 462 to 467 is any amino acid
  Variant (468)..(470): Xaa in position 468 to 470 is any or no amino acid
  Variant (472)..(479): Xaa in position 472 to 479 is any or no amino acid
  Variant (481)..(482): Xaa in position 481 to 482 is any amino acid
  Variant (485)..(485): Xaa in position 485 is any amino acid
  Variant (489)..(490): Xaa in position 489 to 490 is any amino acid
  Variant (493)..(494): Xaa in position 493 to 494 is any amino acid
  Variant (498)..(498): Xaa in position 498 is any amino acid
  Variant (500)..(505): Xaa in position 500 to 505 is any amino acid
  Variant (507)..(512): Xaa in position 507 to 512 is any amino acid
  Variant (514)..(514): Xaa in position 514 is any amino acid
  Variant (515)..(515): Xaa in position 515 is any or no amino acid
  Variant (518)..(521): Xaa in position 518 to 521 is any amino acid
  Variant (524)..(525): Xaa in position 524 to 525 is any amino acid
  Variant (526)..(527): Xaa in position 526 to 527 is any or no amino acid
  Variant (530)..(530): Xaa in position 530 is any amino acid
  Variant (532)..(532): Xaa in position 532 is any amino acid
EXFRIKXVEXIXXXXXXXRXXXIXXAXXNXFXLXSXXVYIDLLTDSGTXAMSXXQXAAMMXGDEAYAGSXXYXXLXXXVXDIXGYXXXXXXXXXXXXXXXXXXXXXXXXXXXXXXXXXXXXXXXXXXXXXXXXXIPXHQGRGAEXIXXXXLIXXXXXXXXXXXXXXXXXXNXXFXTTXXHXXXXGAXXXXVXXXXAXXXXXXXXXXXXXXFKGXXDLXKLXXXIXXXGXXXIXXIXXXITXNXXGGQPVSMXNMRXXXXIXXXYXIXVXXDAXRXXENAYFIXXXEXXYXXXSIXXIXXEXFXYADXXXMSAKKDXLVNIGGXLXXXDXXXXXXXXXXXXXXXXXXXXLFXXXXXXXVXXEGXXTYGGLXGRDMXALAXGLXEXXXXXYLXXRIXQVXYLXXXLXXXGVXXXXXPXGGHAXFVDAXXXXPXXXHIXXXXFPAXXLXXXLYXXXGIRXXEXGXXXXXXXXXTXXXXXXXXEXXRLXIPRXXYTXXHMDXVXXXXXXLXXXXXXIXXGLXXXXEPXXXXLRXFXA

SEQ ID NO: 14976 - protein, 85 aa, Artificial sequence
  Consensus
  Variant (2)..(2): Xaa in position 2 is Pro or Ser
  Variant (3)..(4): Xaa in position 3 to 4 is any amino acid
  Variant (5)..(5): Xaa in position 5 is Ile, Leu or Met
  Variant (6)..(8): Xaa in position 6 to 8 is any amino acid
  Variant (10)..(10): Xaa in position 10 is any amino acid
  Variant (11)..(18): Xaa in position 11 to 18 is any or no amino acid
  Variant (20)..(25): Xaa in position 20 to 25 is any amino acid
  Variant (26)..(26): Xaa in position 26 is Ala, Ser or Val
  Variant (27)..(28): Xaa in position 27 to 28 is any amino acid
  Variant (30)..(30): Xaa in position 30 is any amino acid
  Variant (32)..(32): Xaa in position 32 is any amino acid
  Variant (33)..(33): Xaa in position 33 is Ile or Leu
  Variant (34)..(34): Xaa in position 34 is any amino acid
  Variant (35)..(35): Xaa in position 35 is Ala, Gly or Ser
  Variant (36)..(39): Xaa in position 36 to 39 is any amino acid
  Variant (49)..(49): Xaa in position 49 is Ala, Gly, Asn, Ser or Thr
  Variant (51)..(51): Xaa in position 51 is Ile, Met or Val
  Variant (52)..(52): Xaa in position 52 is Ser or Thr
  Variant (53)..(53): Xaa in position 53 is Asp, Asn, Gln or Ser
  Variant (54)..(56): Xaa in position 54 to 56 is any amino acid
  Variant (57)..(57): Xaa in position 57 is Ala, Gly or Ser
  Variant (58)..(58): Xaa in position 58 is Ala or Gly
  Variant (59)..(59): Xaa in position 59 is Ile, Leu, Met or Val
  Variant (60)..(60): Xaa in position 60 is Phe, Ile, Leu or Met
  Variant (61)..(61): Xaa in position 61 is any amino acid
  Variant (65)..(65): Xaa in position 65 is Ala or Ser
  Variant (67)..(67): Xaa in position 67 is Ala or Ser
  Variant (69)..(69): Xaa in position 69 is Ala, Gly or Ser
  Variant (70)..(70): Xaa in position 70 is any amino acid
  Variant (71)..(71): Xaa in position 71 is Asn or Ser
  Variant (72)..(72): Xaa in position 72 is Phe, Trp or Tyr
  Variant (73)..(74): Xaa in position 73 to 74 is any amino acid
  Variant (75)..(75): Xaa in position 75 is Phe, Leu or Met
  Variant (76)..(78): Xaa in position 76 to 78 is any amino acid
  Variant (79)..(79): Xaa in position 79 is Ala, Gly, Ile or Val
  Variant (80)..(83): Xaa in position 80 to 83 is any amino acid
  Variant (84)..(84): Xaa in position 84 is Asp, Gly, Asn or Pro
  Variant (85)..(85): Xaa in position 85 is Phe or Tyr
EXXXXXXXEXXXXXXXXXRXXXXXXXXXNXFXXXXXXXXIDLLTDSGTXAXXXXXXXXXXXGDEXYXGXXXXXXXXXXXXXXXXX

SEQ ID NO: 14977 - protein, 41 aa, Artificial sequence
  Consensus
  Variant (2)..(2): Xaa in position 2 is Ala or Thr
  Variant (7)..(7): Xaa in position 7 is Ala or Gly
  Variant (10)..(10): Xaa in position 10 is any amino acid
  Variant (11)..(15): Xaa in position 11 to 15 is any or no amino acid
  Variant (17)..(40): Xaa in position 17 to 40 is any amino acid
  Variant (41)..(41): Xaa in position 41 is Ala, Glu, Gly, Gln or Thr
PXHQGRXAEXXXXXXLXXXXXXXXXXXXXXXXXXXXXXXXX

SEQ ID NO: 14978 - protein, 100 aa, Artificial sequence
  Consensus
  Variant (2)..(13): Xaa in position 2 to 13 is any amino acid
  Variant (14)..(17): Xaa in position 14 to 17 is any or no amino acid
  Variant (19)..(19): Xaa in position 19 is Cys, Asn, Ser or Val
  Variant (21)..(22): Xaa in position 21 to 22 is any amino acid
  Variant (27)..(27): Xaa in position 27 is Ile or Val
  Variant (29)..(29): Xaa in position 29 is Ile, Leu or Met
  Variant (30)..(30): Xaa in position 30 is any amino acid
  Variant (32)..(32): Xaa in position 32 is Ile, Leu or Met
  Variant (33)..(33): Xaa in position 33 is any amino acid
  Variant (34)..(34): Xaa in position 34 is Ala, Asp, Glu, Gly or Ser
  Variant (35)..(37): Xaa in position 35 to 37 is any amino acid
  Variant (38)..(38): Xaa in position 38 is Ile, Leu, Met or Val
  Variant (39)..(39): Xaa in position 39 is Ala, Cys or Thr
  Variant (40)..(43): Xaa in position 40 to 43 is any amino acid
  Variant (44)..(44): Xaa in position 44 is Ile or Val
  Variant (45)..(45): Xaa in position 45 is any amino acid
  Variant (46)..(46): Xaa in position 46 is Phe, Ile, Leu, Met or Val
  Variant (47)..(48): Xaa in position 47 to 48 is any amino acid
  Variant (50)..(50): Xaa in position 50 is Ala, Ser or Val
  Variant (51)..(51): Xaa in position 51 is Ala, Cys or Thr
  Variant (53)..(53): Xaa in position 53 is any amino acid
  Variant (54)..(54): Xaa in position 54 is Ala, Cys, Ser or Val
  Variant (57)..(57): Xaa in position 57 is Ala or Cys
  Variant (58)..(58): Xaa in position 58 is His, Trp or Tyr
  Variant (60)..(60): Xaa in position 60 is Ile or Val
  Variant (61)..(62): Xaa in position 61 to 62 is any amino acid
  Variant (63)..(63): Xaa in position 63 is Asp, Gln or Arg
  Variant (64)..(64): Xaa in position 64 is Asp or Glu
  Variant (65)..(68): Xaa in position 65 to 68 is any amino acid
  Variant (69)..(69): Xaa in position 69 is Asp, Glu, Gly, Asn or Ser
  Variant (70)..(71): Xaa in position 70 to 71 is any amino acid
  Variant (72)..(72): Xaa in position 72 is Ile, Leu, Pro or Val
  Variant (73)..(73): Xaa in position 73 is any amino acid
  Variant (74)..(74): Xaa in position 74 is Asp, Glu, Gln, Ser or Thr
  Variant (75)..(75): Xaa in position 75 is Ile or Val
  Variant (76)..(77): Xaa in position 76 to 77 is any amino acid
  Variant (78)..(78): Xaa in position 78 is Asp, Glu or Lys
  Variant (79)..(83): Xaa in position 79 to 83 is any amino acid
  Variant (84)..(84): Xaa in position 84 is Asp or Glu
  Variant (85)..(88): Xaa in position 85 to 88 is any amino acid
  Variant (90)..(90): Xaa in position 90 is Ala, Gly or Ser
  Variant (94)..(94): Xaa in position 94 is Ala, Cys, Gly, Pro or Thr
  Variant (95)..(95): Xaa in position 95 is Phe, Ile, Leu or Met
  Variant (96)..(96): Xaa in position 96 is Ala, Leu or Val
  Variant (97)..(97): Xaa in position 97 is Asn, Pro or Gln
  Variant (98)..(98): Xaa in position 98 is Ile or Met
IXXXXXXXXXXXXXXXXTXNXXGGQPXSXXNXXXXXXXXXXXXXXXXXDXXRXXENXXFXXXXXXXXXXXXXXXXXXXXXXXXXXXXXSXKKDXXXXXGG

SEQ ID NO: 14979 - protein, 84 aa, Artificial sequence
  Consensus
  Variant (2)..(4): Xaa in position 2 to 4 is any amino acid
  Variant (8)..(8): Xaa in position 8 is Leu or Met
  Variant (9)..(9): Xaa in position 9 is Ala, Glu, Asn, Ser or Thr
  Variant (11)..(11): Xaa in position 11 is any amino acid
  Variant (12)..(12): Xaa in position 12 is Ala or Asp
  Variant (13)..(13): Xaa in position 13 is Ile, Leu or Met
  Variant (14)..(16): Xaa in position 14 to 16 is any amino acid
  Variant (18)..(18): Xaa in position 18 is any amino acid
  Variant (20)..(20): Xaa in position 20 is Phe, Ile or Leu
  Variant (21)..(31): Xaa in position 21 to 31 is any amino acid
  Variant (33)..(33): Xaa in position 33 is Ile or Val
  Variant (34)..(34): Xaa in position 34 is any amino acid
  Variant (36)..(39): Xaa in position 36 to 39 is any amino acid
  Variant (40)..(40): Xaa in position 40 is Ala, Gly, Asn or Val
  Variant (41)..(42): Xaa in position 41 to 42 is any amino acid
  Variant (44)..(46): Xaa in position 44 to 46 is any amino acid
  Variant (47)..(47): Xaa in position 47 is Asp, Glu, Gly or Asn
  Variant (48)..(48): Xaa in position 48 is Ile or Val
  Variant (49)..(49): Xaa in position 49 is Ala, Ile, Leu, Pro or Val
  Variant (50)..(52): Xaa in position 50 to 52 is any amino acid
  Variant (53)..(53): Xaa in position 53 is Ala or Pro
  Variant (54)..(54): Xaa in position 54 is any amino acid
  Variant (56)..(56): Xaa in position 56 is any or no amino acid
  Variant (58)..(58): Xaa in position 58 is Ala, Gly or Thr
  Variant (59)..(60): Xaa in position 59 to 60 is any amino acid
  Variant (61)..(61): Xaa in position 61 is Ile, Leu or Val
  Variant (62)..(62): Xaa in position 62 is Asp or Glu
  Variant (63)..(63): Xaa in position 63 is Ala, Gly or Thr
  Variant (64)..(67): Xaa in position 64 to 67 is any amino acid
  Variant (68)..(68): Xaa in position 68 is Glu, Asn, Pro or Thr
  Variant (69)..(75): Xaa in position 69 to 75 is any amino acid
  Variant (76)..(76): Xaa in position 76 is Gly, Ile or Pro
  Variant (77)..(77): Xaa in position 77 is Ala, Asp, Gly or Ser
  Variant (78)..(80): Xaa in position 78 to 80 is any amino acid
  Variant (81)..(81): Xaa in position 81 is Ala, Cys, Gly, Asn, Ser, Thr or Val
  Variant (82)..(83): Xaa in position 82 to 83 is any amino acid
  Variant (84)..(84): Xaa in position 84 is Ile, Leu or Val
GXXXYGGXXGXXXXXXAXGXXXXXXXXXXXXRXXQXXXXXXXLXXXXXXXXXXXGXHXXXXXXXXXXXXXXXXXXXXXXXXXXX

SEQ ID NO: 14980 - DNA, 1041 bp, Escherichia coli
  CDS (1)..(1041)
atgaaagttatgcgtaccaccgtcgcaactgttgtcgccgcgaccttatcgatgagtgctttctctgtgtttgcagaagcaagcctgacaggtgcaggtgcaaccttccctgcgccggtgtatgccaaatgggctgacacttaccagaaagaaaccggtaataaagttaactaccagggtatcggttcttccggtggcgtaaaacagattatcgctaataccgttgattttggtgcctctgacgcgccgctgtctgacgaaaaactggctcaggaaggtctgttccagttcccgaccgtgattggcggcgtggtgctggcggttaacattccagggctgaagtctggcgaactggtgctggatggtaaaaccctcggcgacatctacctgggcaaaatcaagaagtgggatgatgaagccatcgccaaactgaatccgggtctgaaactgccttcacaaaacattgctgtagtacgccgcgcagatggctccgggacttccttcgtcttcaccagctacctggcgaaagtgaacgaagagtggaaaaacaacgttggtactggctctaccgtaaaatggccgatcggtctgggcggtaaaggtaacgacggtatcgccgcgttcgttcagcgtctgccgggtgcaattggttatgttgaatatgcttacgcgaagcagaacaacctggcgtacaccaaactgatctccgctgatggtaaaccggttagtccgaccgaagaaaacttcgctaatgcagcaaaaggtgcagactggagcaaaaccttcgctcaggatctgaccaaccagaaaggcgaagatgcatggcctattacctctaccacgttcattctgatccacaaagatcagaagaaaccagaacaaggcacagaggtgctgaaattcttcgactgggcgtacaaaaccggggctaaacaggcgaacgacctggattacgccagcctgccggatagtgtagttgaacaggttcgcgctgcgtggaagaccaatattaaagacagtagcggtaagccgctgtactaa

SEQ ID NO: 14981 - protein, 346 aa, Escherichia coli
MKVMRTTVATVVAATLSMSAFSVFAEASLTGAGATFPAPVYAKWADTYQKETGNKVNYQGIGSSGGVKQIIANTVDFGASDAPLSDEKLAQEGLFQFPTVIGGVVLAVNIPGLKSGELVLDGKTLGDIYLGKIKKWDDEAIAKLNPGLKLPSQNIAVVRRADGSGTSFVFTSYLAKVNEEWKNNVGTGSTVKWPIGLGGKGNDGIAAFVQRLPGAIGYVEYAYAKQNNLAYTKLISADGKPVSPTEENFANAAKGADWSKTFAQDLTNQKGEDAWPITSTTFILIHKDQKKPEQGTEVLKFFDWAYKTGAKQANDLDYASLPDSVVEQVRAAWKTNIKDSSGKPLY

SEQ ID NO: 14982 - DNA, 1152 bp, Pyrococcus abyssi GE5
  CDS (1)..(1152): transl_table=11
ttggtgtcttctatgagatggatggccctcctgttaatggggctagttggagtaggcttactaattagtggatgtattggggaagagactcctacgcaccaacccaaggttaattctcgatcaaaagcaaagaatcccgaaataatagtaattaggacgagtggagctacatttccccaatatcaaattcaaaagtggattgagaagtatcagaagataaatccccacgtgaagatagagtatgaaggtggtggaagcggatacgggcaagaggccttcctgaaaggccttaccgacataggaagaactgatcctccagttaaggaatcaacttggaagaagttccttcaaactggggatcaacctcttcagttcccggagatcgttggtgccgtcgtcgttgtctacaacgttcctgaggtcaatgaattgaaattaagcagagaggtgttagctaagatattcttgggagaaattgagtactgggatgatcccgctataaagaggctcaatcccaacgaaaagctacctcataagaaaattatagtgatccatagaagcgatgcaagtggaaccacagcgatattcacgacttatctcagccttataagtaaggaatgggctgagaaagtaggagttggtaaggtagttgattggcctgttgataaagtcggtaggggaattggagcaaaaggtaatcctggagttgttgcagctttaaagcaaactaagtatagcatagcctacactgagctatccttcgcaattgaagagaatctcaaagttgccgccctagaaaataaagccggaaagttcgttaagccaaatgaagagactataaaggcggcggttgccaacgttaaagctttcattccagatccaaccgaaggttacaaggaggatcttaagcagcttcttgacgctccaggagaaaattcctaccccatagtggcatttacccatatcctcgtctggcaaaacaagggaggaaagcattacactccagagaaagccaaagcgataaaggatttcctaaggtggatactcacagaaggacagaaaccagagaacctagctccagggtacgttggtcttcctaaagaagttgctgaaattggcttgaaagccgtagaaatgattgaagagaggtga

SEQ ID NO: 14983 - protein, 383 aa, Pyrococcus abyssi GE5
MVSSMRWMALLLMGLVGVGLLISGCIGEETPTHQPKVNSRSKAKNPEIIVIRTSGATFPQYQIQKWIEKYQKINPHVKIEYEGGGSGYGQEAFLKGLTDIGRTDPPVKESTWKKFLQTGDQPLQFPEIVGAVVVVYNVPEVNELKLSREVLAKIFLGEIEYWDDPAIKRLNPNEKLPHKKIIVIHRSDASGTTAIFTTYLSLISKEWAEKVGVGKVVDWPVDKVGRGIGAKGNPGVVAALKQTKYSIAYTELSFAIEENLKVAALENKAGKFVKPNEETIKAAVANVKAFIPDPTEGYKEDLKQLLDAPGENSYPIVAFTHILVWQNKGGKHYTPEKAKAIKDFLRWILTEGQKPENLAPGYVGLPKEVAEIGLKAVEMIEER

SEQ ID NO: 14984 - DNA, 1122 bp, Aeropyrum pernix K1
  CDS (1)..(1122): transl_table=11
gtgttggataagaagcttgttctaaccgtgctggctgttgttgtgcttctcggtatagggcttgccctggcatctggctggttaggcggtgaacagggagagagcagcggagggtcaggccccgcccaagtagtcctccagggtgagggatcaacattcatatatccacagatccaagcatggagcgaggagataaagaagacttacccctggataaccattaattacaacccaacaggcagcggtgcaggccaaagcgctttcaaagatggcgttgtagacttcgccggtagcgacactcctctgcccagagaagtctggtccgccatgcagggtaatgtcatacagattcccgtagtcataggaatgctagcaatagtgtacaacataccaggactggaggacctcaagctagacgccaagactatagccttgatatacaagggagagatagagtactgggacgatcctaggatagcctcgctaaacccgggagccagcctgccccatgagaagatagttgctgtccataggagcgactcgagcggcacaacccacgtattcaccatattcctccataagggagcccccgatgtttggacggaggacctcgtgggtaagtctgttgactggccggttgacgccacgggccgaggtgtaggaggcaagggcaaccagggtgttatggaagtcgtcaagaatactccatacagtattggatatgtggagtatgcttacgtggtcaaagcgggagaaggggttaacgtggctttagttgccaaccgggatgatgtcttcctgaagccttcgcccgaaggagctcaggcagccgcatctggcgccgtccaaaacctgccggactctccagacgacgactggagcacaggctacgacgcgataatatatgctcctggtaaggacagctacccaataacctcctggtcattcctcctattctataagcagtacaacgatagggataaagcggaagccataaagaagtttatcgaatggattaacacagaaggccaaactaagatcatcgagggctatatacctattcccgacgagataaggcagatcaacatgaaagccgtggagatgatctcgtacacgggctga

SEQ ID NO: 14985 - protein, 373 aa, Aeropyrum pernix K1
MLDKKLVLTVLAVVVLLGIGLALASGWLGGEQGESSGGSGPAQVVLQGEGSTFIYPQIQAWSEEIKKTYPWITINYNPTGSGAGQSAFKDGVVDFAGSDTPLPREVWSAMQGNVIQIPVVIGMLAIVYNIPGLEDLKLDAKTIALIYKGEIEYWDDPRIASLNPGASLPHEKIVAVHRSDSSGTTHVFTIFLHKGAPDVWTEDLVGKSVDWPVDATGRGVGGKGNQGVMEVVKNTPYSIGYVEYAYVVKAGEGVNVALVANRDDVFLKPSPEGAQAAASGAVQNLPDSPDDDWSTGYDAIIYAPGKDSYPITSWSFLLFYKQYNDRDKAEAIKKFIEWINTEGQTKIIEGYIPIPDEIRQINMKAVEMISYTG

SEQ ID NO: 14986 - DNA, 1014 bp, Aquifex aeolicus VF5
  CDS (1)..(1014): transl_table=11
atgaacaggaagaaatttcttcttggggtactagcattagcaatttttcccgccgcaggaatagcaaaggaaaaagtaatcaacggtgctggagcaacttttcccgctcctctctactggaaatgggctgacgcttactacaaggcaaccggtattaaggtaaactaccagtccataggttcaggtggaggagttaggcagatagtaaacagaacagttgactttggagcatctgatgctcccttaaaacctgaggaaacaaaaaaacacaatctggctcaattcccgactgtgattggaggtgttaccgtagcttataacttaaggggagtagaaaatctcaagctctctacaagagcggtttgtgatatttttctcggaaaaattaagtactgggatgacccagttataaagaaggataatcccggagtaaaacttcctcacaagagaattaccgttgttcgcaggagtgacggttcaggaactacctggatattcacaaactacctctccaaagcttgccccgagtggaaggaaaaagtcggttacggaaaagcggtaaggtggcctacaggtataggtgctaaaggaaacgaaggtgtagcaaactatataagaaggataaaaggagctataggctatgtggaatacgcttacgcaattcaaaacaagatacccgtcgcggcagtggaaaacagagatggaaaatttgtaaaaccttctatagaaacattccaagcagctgctgcaaacgcaaagtgggatcctaaaaaagacttctacgaagtcctgacatggcagcccggtgaaaaagcttaccccatagctggtgctacctttatactccttgcaaaggacgaagacaggaaggaaataaataaggaagtagttaaattctttgactgggcttacaaaaatggtgataaaatggctatagagttgcattacgtaccgttgcccgaaaacgttaagaacatgattaggaactactggagagagcatggatggtattaa

SEQ ID NO: 14987 - protein, 337 aa, Aquifex aeolicus VF5
MNRKKFLLGVLALAIFPAAGIAKEKVINGAGATFPAPLYWKWADAYYKATGIKVNYQSIGSGGGVRQIVNRTVDFGASDAPLKPEETKKHNLAQFPTVIGGVTVAYNLRGVENLKLSTRAVCDIFLGKIKYWDDPVIKKDNPGVKLPHKRITVVRRSDGSGTTWIFTNYLSKACPEWKEKVGYGKAVRWPTGIGAKGNEGVANYIRRIKGAIGYVEYAYAIQNKIPVAAVENRDGKFVKPSIETFQAAAANAKWDPKKDFYEVLTWQPGEKAYPIAGATFILLAKDEDRKEINKEVVKFFDWAYKNGDKMAIELHYVPLPENVKNMIRNYWREHGWY

SEQ ID NO: 14988 - DNA, 825 bp, Thermotoga maritima MSB8
  CDS (1)..(825): transl_table=11
atgaaaaggtttgtggtacttcttctttcattagtttcggtttttcttgtggcagaaacgctcgtcatcaagggttccaacacagtctttcccatcgctcagctctggatcgaagagttcaaaaagctccacccggatcttcaggtgactctcgaaggtgcgggctcttccacaggaatcgcggcgctcttcaacggaacgaccgacatcgccaactcgagcagatggctcaaaccctctgaaatcgagagaatgaacaaggaaggaaaatacttcattcctttcctcatcgctttcgacggaatagcgatcattgtgaacaaggacctcggcatcgacgacatctccatcgaaactttgaagaagatctacacaggagagatccagtactggtcacaggtgaatccaaatctcccgaaacagagaatcgttgtttactcgagaaacaccgcttctggtacctacgaaacgtttgaaaacaaagtcctcggtggagcgagaatggctccttacgtgagaatggtcgaaagtacccagcttgaggtagagagtgtttccaaaaatccgtacgctattgcttatgttggtgtgggatacgtcacagacgatgtgaaagtcctgaaggtgaacggtatctacccgacgaaggaaaacattctgaaaggaaaatacccgatagcaagacctctcttcatgtttgtcgatgcgacaaatggatttcctgagatgggaagcctcgtcttcgagtacatcatgttcgccttctcgaagaaaggacaggagctggttgaaaaggcaggttacatagccgcttacggtcagtga

SEQ ID NO: 14989 - protein, 274 aa, Thermotoga maritima MSB8
MKRFVVLLLSLVSVFLVAETLVIKGSNTVFPIAQLWIEEFKKLHPDLQVTLEGAGSSTGIAALFNGTTDIANSSRWLKPSEIERMNKEGKYFIPFLIAFDGIAIIVNKDLGIDDISIETLKKIYTGEIQYWSQVNPNLPKQRIVVYSRNTASGTYETFENKVLGGARMAPYVRMVESTQLEVESVSKNPYAIAYVGVGYVTDDVKVLKVNGIYPTKENILKGKYPIARPLFMFVDATNGFPEMGSLVFEYIMFAFSKKGQELVEKAGYIAAYGQ

SEQ ID NO: 14990 - DNA, 900 bp, Vibrio cholerae O1 biovar eltor str. N16961
  CDS (1)..(900): transl_table=11
ttgtcatattcaccgcctaaagtgagcctcgttcaagtgaaacacaacggcaacccagccacttataggaaattcgtgatgaaaaagacagtaatcggtgctatcgctcttatgggcgcacttgcagtaactccagtgatggcgaaagagacaatctcagcagtgggctcaagcagtgttactccgctgatggaagtgttttctgaaacttacgccaaaatgaatcctgaagttttcattgaagtacaaggcccaggctcttctgcgggtatcaaagccgcgaaaaacggcagcgcggacatcggtatgtcatcgcgcaatctgaaagattctgaaaaagaagcgactctggttgaagaagcgatcgcgcttgacggtatcgcagtcgtggttcacccaagcaatgcggtgaaaggtctgacagcagaacaagtttctgaaatctacaaaggcgaaatcaccaactggaaacaagttggtggtgaagataagccaatcgttgctatcactcgtgacaccgcttcgggtactcgtggtgcattcgaagacatcatggaactgaaaaagaaagtggcggataaagaagtctctgctatttctcaacgtgctcaagtcgcgaacggtaacggcgcactgaaaactatggtcgcttctaacccttatgcgattggttatatttcactcggtaccgttgatacttcagttcacgcactggctgtgaacggtgttgaagcgagcgtagataacgtgaaaaacggtacttacaaagtttctcgtccattccttgtgctctacaaacaagataagccatctgctgaagcgaagaaattcctagattggatgctgtcagctgacgcacaaaagattgtcgctgataaaggctacatcacagttaactaa

SEQ ID NO: 14991 - protein, 299 aa, Vibrio cholerae O1 biovar eltor str. N16961
MSYSPPKVSLVQVKHNGNPATYRKFVMKKTVIGAIALMGALAVTPVMAKETISAVGSSSVTPLMEVFSETYAKMNPEVFIEVQGPGSSAGIKAAKNGSADIGMSSRNLKDSEKEATLVEEAIALDGIAVVVHPSNAVKGLTAEQVSEIYKGEITNWKQVGGEDKPIVAITRDTASGTRGAFEDIMELKKKVADKEVSAISQRAQVANGNGALKTMVASNPYAIGYISLGTVDTSVHALAVNGVEASVDNVKNGTYKVSRPFLVLYKQDKPSAEAKKFLDWMLSADAQKIVADKGYITVN

SEQ ID NO: 14992 - DNA, 837 bp, Vibrio cholerae O1 biovar eltor str. N16961
  CDS (1)..(837): transl_table=11
atgatcaggatggcacttgccgccgtttgcgcacttcttttttccatcacaacgatgacaccctttgtgcaagcaagtgaaataaccatttcaggttccacctcagtggccagaattatggacgtactggctgaaaaatataaccaacaacaccccgagacttatgtcgcagttcaaggtgtgggttctaccgctgggatttctcttttgaaaaaaggcgtcgcggatatcgctatgacctcacgctatctcacggaaagtgaagcgcaaaacaccctacacacttttacgctggcttttgatggtttagcgattgtggtcaaccaagccaatccagtcaccaatcttacgcgagagcagctatacggcatttacaaaggccaaatcaccaactggaaacaggtgggcggtaacgatcaaaaaatcgcggtcgtgactcgcgaagcctcatcgggtactcgctacagctttgaaagcttgatgggattaaccaaaaccgtcaaagatcgtgaggtttccgatgttgcgccgaccgcgcttgtcgtcaatagcaacagcatgatgaaaacgttagtcaaccacaatactcaagcggttggctttatctctattggctcggtcgataaatccgtcaaagcgattcagtttgaaaaagcggatcccacttctgacaacatagctaagcacacttaccaattatcacgcccgttcttaattttgcactactcagataacgcagacgaacagaccaaagagttcatcgccttcttaaagtctgaaagcgctaaaaaattgattgtggaatacggctacattatgccaagtgatgtggaataa

SEQ ID NO: 14993 - protein, 278 aa, Vibrio cholerae O1 biovar eltor str. N16961
MIRMALAAVCALLFSITTMTPFVQASEITISGSTSVARIMDVLAEKYNQQHPETYVAVQGVGSTAGISLLKKGVADIAMTSRYLTESEAQNTLHTFTLAFDGLAIVVNQANPVTNLTREQLYGIYKGQITNWKQVGGNDQKIAVVTREASSGTRYSFESLMGLTKTVKDREVSDVAPTALVVNSNSMMKTLVNHNTQAVGFISIGSVDKSVKAIQFEKADPTSDNIAKHTYQLSRPFLILHYSDNADEQTKEFIAFLKSESAKKLIVEYGYIMPSDVE

SEQ ID NO: 14994 - DNA, 1212 bp, Pasteurella multocida subsp. multocida str. Pm70
  CDS (1)..(1212): transl_table=11
ttggctataaaacaatccactcgccttgcctttttcaaaaaatctgtacaaaaacaaccgcactttttgcactgcaaactgtcattcgcctgtcatcaaactgtcatatttgttcattacaatcactttcgctaccacatggtagtgattgaaaagacactcaaaggagtaacatctatgacaaaacgtgcaatgcttttggctattctattcagtacatttgctttgacgacgcaggcacaaaccattactggcgcgggcgcttcttttccttatccaatctatgccaaatgggcatccatgtatgaaaaacaaacaggtaacaaagtcaactatcaatcaattggctcggggggcggtcagcaacaaattatcgccaaaaccattgattttggtgcctcagatgatccgatgaaagcagaacttttagcacaacatcaattattacaatttccagccattatcggtggcacagtgcctgtcgtgaatttaccagaaatcaccgccggacagcttaaactttctggtgaagttctcgccgatattttcttaggcaaaattaaaaagtggaatgatcccgctatcgccaaattaaaccaaggggctaatttacccgataaagccattatcgtcgtacatcgttctgacggttcaggcaccacattcggttggactaattatctttctaaagtatcgactgaatggaaagaaacagtcggtcaaggtaaatcagtcaaatggcctacgggacaaggcggcaaaggtaacgaaggcgtggctgcttatgtcagcaaaatcaaatattcgattggttatgtggaatatgcgtacgcgaaacaaaaccagctcgcttgggcgtcattacaaaataaagccgggcaatttgtacagccctcagcagaaagttttatggcagctgccgccaatgcacaatgggaaagtgcggtcggtatgggcgtcattttaaccaatgaagaaggcgatacatcttggccagtcaccgcagcaagtttcatcttattgcataagcatgcagaaaagccagaaatcaccaaagctgtctttgatttctttgactgggcattcaagcaaggcaaagtcgcagcaaccgagcttgattatgtgcctctgcctgaggaagttattcagaaaattcaagcgcaatggaaaaccgaggtgaagtccagtgatggcaaaacactttggcaataa

SEQ ID NO: 14995 - protein, 403 aa, Pasteurella multocida subsp. multocida str. Pm70
MAIKQSTRLAFFKKSVQKQPHFLHCKLSFACHQTVIFVHYNHFRYHMVVIEKTLKGVTSMTKRAMLLAILFSTFALTTQAQTITGAGASFPYPIYAKWASMYEKQTGNKVNYQSIGSGGGQQQIIAKTIDFGASDDPMKAELLAQHQLLQFPAIIGGTVPVVNLPEITAGQLKLSGEVLADIFLGKIKKWNDPAIAKLNQGANLPDKAIIVVHRSDGSGTTFGWTNYLSKVSTEWKETVGQGKSVKWPTGQGGKGNEGVAAYVSKIKYSIGYVEYAYAKQNQLAWASLQNKAGQFVQPSAESFMAAAANAQWESAVGMGVILTNEEGDTSWPVTAASFILLHKHAEKPEITKAVFDFFDWAFKQGKVAATELDYVPLPEEVIQKIQAQWKTEVKSSDGKTLWQ

SEQ ID NO: 14996 - DNA, 897 bp, Lactococcus lactis subsp. lactis Il1403
  CDS (1)..(897): transl_table=11
atgaaaaagaaaattcttgttggtcttattactgctggtgcattgttaactttggcagcttgtggttcatcaaacggctcatcatctagtagctcaagttcttctgacaaagctctgtcaggaaaaattattgctggaggttcaactgctcttcaaccattagcacaacaatcgtcaacagaatttatggcaaaaaatactggtgttcaagtgactgtgcaaggtggtggttctggtgttggtttgacacaagttgcagctggttctttccagattgggaactctgatatttttgctgaagaaaaatcaggaattgatgcttctgcaattactgaccataaagtagcggttgttggttttgcaccgattgttaacgcaaaaattgatgttaaaaacttaacttctcaacaattgcaagatgtcttcacaggtaaggtgacaaactggaaagatgtgggcggttcagaccaaaaaattacggttatcggacggactgagggttctggaactcgcgtaaactttgataaattcgcacttggtggagcaacagaggttaaaggcccaacacaagatgcttcaggttcagttgttcaaatggtaggtcaaacaccaggagcgatttcatatgtggcactttcttatgttgatacaagtaaagacatcaaagatatttcgattgatggtgttgagccaacagaagcaaatgttgtaactaatgactacaaagtttggtcttacgaacatatgtacaccaatactaagaaagaaactgcagcagataaagctttcattaaatatgtggcagaaaacaacaaggacatcaaaaaattgggatacattccaatcagtgacatgaaagttgaacgtgacgctgacggaaatatcactaaaaaataa

SEQ ID NO: 14997 - protein, 298 aa, Lactococcus lactis subsp. lactis Il1403
MKKKILVGLITAGALLTLAACGSSNGSSSSSSSSSDKALSGKIIAGGSTALQPLAQQSSTEFMAKNTGVQVTVQGGGSGVGLTQVAAGSFQIGNSDIFAEEKSGIDASAITDHKVAVVGFAPIVNAKIDVKNLTSQQLQDVFTGKVTNWKDVGGSDQKITVIGRTEGSGTRVNFDKFALGGATEVKGPTQDASGSVVQMVGQTPGAISYVALSYVDTSKDIKDISIDGVEPTEANVVTNDYKVWSYEHMYTNTKKETAADKAFIKYVAENNKDIKKLGYIPISDMKVERDADGNITKK

SEQ ID NO: 14998 - DNA, 816 bp, Methanothermobacter thermautotrophicus str. Delta H
  CDS (1)..(816)
atggacaccaaactgatcataggaatagtcgtggcaattgtaattattgcaggcgcagtcctggcacttggaggtggcggacagcaggagaagatagacattgttggttcaacatctgtccagccagttgcagagaaacttgcagctgagtacatgaagaagcacctcaatgttaagataaacgtccagggcggcggatccagtgtcggtatcaagagtgccgctgacggcacagcagacatcggaacaagttcaaaggaactcaagcccgatgagaagaagggcctcacagaataccttataggtaaggatggaatagccataatcgtaaacagcaagaacacagtctcagacctaacaaaggaccaggtgaaggatatcttcagcggtaagataaccaactggaaggaggtcggaggccccgatgcaaagataacagtggtaacacgtgaagacggctcaggaaccaggaaggccttcgaggaaatagtgatgggtaaagagaccaagataaagaaggatgccatagttgaaagttcaacagaggcagttaaacaggcagttaaacaggatccaaacgccataggattcatatcactcgccaatctcgatgaaacagtcaaggcacttaaaatagatggtgtcgcaccatcagagcagacagtcgcagatggatcctacaagatacagagaccattcctgttcctggtaaagggcagcgcaaagggtgcagttaaggacttcatagactgggtcctcagcccggagggacaggcaataatcaaatcagaaaaggttgtaccggcaaaggcctag

SEQ ID NO: 14999 - protein, 271 aa, Methanothermobacter thermautotrophicus str. Delta H
MDTKLIIGIVVAIVIIAGAVLALGGGGQQEKIDIVGSTSVQPVAEKLAAEYMKKHLNVKINVQGGGSSVGIKSAADGTADIGTSSKELKPDEKKGLTEYLIGKDGIAIIVNSKNTVSDLTKDQVKDIFSGKITNWKEVGGPDAKITVVTREDGSGTRKAFEEIVMGKETKIKKDAIVESSTEAVKQAVKQDPNAIGFISLANLDETVKALKIDGVAPSEQTVADGSYKIQRPFLFLVKGSAKGAVKDFIDWVLSPEGQAIIKSEKVVPAKA

SEQ ID NO: 15000 - DNA, 837 bp, Methanothermobacter thermautotrophicus str. Delta H
  CDS (1)..(837)
atgatggacatggagctgaaacccaaaaacatcctcataataatcattatcatcgcactcgcatacctcatgatcaaacccggagcagactatgagagaattgaaattgctggttccacatctgttcagccagttgcagaggaacttgcagctgagtacatgaagaagcaccccgatgttaagataaacgtccagggcggcggttccgggatgggtgtaaggacggtccagcagggaatagtcgatatagggaccagctcaaaggccctgaaacctgaggaaaaggacgaccttcaggaatacgtgataggtaaggatggtatagtgatagccgttaacaaccagaaccccgtcgatgatctgacagtggaccagctcagggatatcttcagcggtaagataaccaactggaaggaggtcggaggccccgatgcagagatacatgtgatagtccgtgaggagggatcagggaccagaagctcattcaaatcacttgtcatgaaggacgagaagataaggtccgatgcaatcgttcagggctccacagaatccgtgaaacaggccataaagagcgacccctacgcaattggattcgtttcaatggcacatatgagttccgatgtgaaggcacttgaggtgaatggagtgacaccctcagagaccaccatagcagacggatcctatccactggtggtcccattcgaattcctgacaaagggagaacccaggggagtcgtaaaggacttcataaagtgggttttctcacctgaagggcaggccattgtaaggagccagaaggttgtaccggcaatagcaaatgtctcggatgatacctag

SEQ ID NO: 15001 - protein, 278 aa, Methanothermobacter thermautotrophicus str. Delta H
MMDMELKPKNILIIIIIIALAYLMIKPGADYERIEIAGSTSVQPVAEELAAEYMKKHPDVKINVQGGGSGMGVRTVQQGIVDIGTSSKALKPEEKDDLQEYVIGKDGIVIAVNNQNPVDDLTVDQLRDIFSGKITNWKEVGGPDAEIHVIVREEGSGTRSSFKSLVMKDEKIRSDAIVQGSTESVKQAIKSDPYAIGFVSMAHMSSDVKALEVNGVTPSETTIADGSYPLVVPFEFLTKGEPRGVVKDFIKWVFSPEGQAIVRSQKVVPAIANVSDDT

SEQ ID NO: 15002 - DNA, 1212 bp, Deinococcus radiodurans R1
  CDS (1)..(1212): transl_table=11
gtgtccgtctcatggtcgctgcaaatgcactctgctgcaactgccggggtcacgaacgtctgggcagggagcggggaaggaagggctgcgtcgccgttcttgccggtaagaaccgttcctctatgcggcacatccccagtcttcggaagccttgacgccccgctgacaaagccccgccacactcggcgacgtatgaagaagaccctgctgggcctcagcgcccttgtcatgatcagcaccgccgccgcccagggcgccatcaccggcgcgggcgcgagcttcccctatcccctgtactccaagatgttcagcgagtacaaggcgagcaacgtcaactaccagtcggtgggctcgggcagcggccagaagcagattctggagcgcaccgtggacttcgcgggcagcgacaaccccatgaccgacgcgcagctggggagcgcccccggcaccctgctgcacgtgcccaccgccatcggcgccgtggtgcccgcctacaacctgcccggcgtgaccaagcccctgaacttcgatggccccacgctcgccaacatctacctcggcaaaatcaagacctggggtgaccccgccatcgccaagctcaaccccggcgtgaccattcccccgctgccgatcaccgtggcgcgccgctccgacggctcgggtaccaccttcgtgttctcggactacctgagcaaagtcagcggcgagtggaagagcaaggtcggcgcgggcaacagccttcagtggcccgtcggcaccggcgccaagggcaacgacggcgtggcgggcgtggtcaagggcacccccggcgccatcggttacgtggaactggtgtacgccaagcagaacaagctgtccttcggcgccgtgaaaaaccgcgcgggcaagttcatcctggccgataacggtcccgccagcaacgcggctctgggcgtggtcatccccgccgatacccgcgtcagtctgaccaacagcgccaacgccggcgcttacccgattgccagcttcacctacctgattttctacaaggatcagaagtacggcaaccgcaccgaagcccaggccaaggcgctcaagaacctgctcacctacgtcgtgaccagcggccagcagtacaacgaaggcctcgactacgccaagctgcccagcaacgtggcggccaaggccaagaccatcatcaactcgatgaactacggcggcaagaagctctga

SEQ ID NO: 15003 - protein, 403 aa, Deinococcus radiodurans R1
MSVSWSLQMHSAATAGVTNVWAGSGEGRAASPFLPVRTVPLCGTSPVFGSLDAPLTKPRHTRRRMKKTLLGLSALVMISTAAAQGAITGAGASFPYPLYSKMFSEYKASNVNYQSVGSGSGQKQILERTVDFAGSDNPMTDAQLGSAPGTLLHVPTAIGAVVPAYNLPGVTKPLNFDGPTLANIYLGKIKTWGDPAIAKLNPGVTIPPLPITVARRSDGSGTTFVFSDYLSKVSGEWKSKVGAGNSLQWPVGTGAKGNDGVAGVVKGTPGAIGYVELVYAKQNKLSFGAVKNRAGKFILADNGPASNAALGVVIPADTRVSLTNSANAGAYPIASFTYLIFYKDQKYGNRTEAQAKALKNLLTYVVTSGQQYNEGLDYAKLPSNVAAKAKTIINSMNYGGKKL

SEQ ID NO: 15004 - DNA, 1290 bp, Mycobacterium leprae TN
  CDS (1)..(1290): transl_table=11
atgactgagcgaaagcccagtttcatgcagtattcaccggtgttgttcaccccaatagcgatgtttctgggttcctgcggtgcatactttccgggtgaccaggccactttgcgctcggccagcggtgcgggtgtgcgtcgaaagtgcgctgagaaagcgagatcggtgaaccacgacaaggtatgcagggcgtttgcgatggtgttgacgacggcggtcaccgccggggtgttatccgcgtgcggtagtgacgtcaatcgcggccatactgcgacaacatccatctcagggaaatcggctgacaccgcggcttgcggcggcaaaagaacaatgacggctgaagggtcgaccgctcaacagaacgcgatcgcattgtttaatcagatttggggaaagttgtgccctgacaagaccgtgtcatacaacccgactgggtcgggtgctggtcgtgagcaattcattgccggccgtatcgacttcgctggctcggactcaccgctgcttgcggatcaactcggcccggccgccaaacgctgtaaaggcaacccggcctgggatctgccgctggtgttcggtccggttgcgttggtttacaacctgccaggcgttcaaatgttgaccgtcaatagtgacgtgttggccaaaatcttcagtggcgtgattacgacatggaacgacgggatactggcggctctcaatccaggtgttgtcctgcccaacctcaggatcatgccgatctatcgggcggatgcatcgggaaccaccgacaacttgcagaagtatttgacgaccgatgcaccacagagctgggccaaaggggtcggtgccgagtttcagggcggtgttggcgaaggggtccagaagtcggctggtgtaatccaggcggtgcagactactccaggcgcctttggttatgttgagaagagcttcgctgatcgggctggattgccgttcgcccagattgacaccggcagtggcggcgtaccgcttaccgacgacacggcacgcaatggcataaacgcagccaacttcgtgtccgtcggcaacgacctagtactggacctgaacgcgatgtacagcaccgaacagtctaatgcttacccgttggtcttggccacatatgaaatcgtctgctcgaaaggctacgatccggacacgtttgcggcgatcaagtcattcctcaccgtggcagccaatgacggtcaggccggtcttgcagcggtcggctatgtcccgctgcccgatacaattaaaaaacgactggtcagcgcgatcaatgcaatgcagtag

SEQ ID NO: 15005 - protein, 429 aa, Mycobacterium leprae TN
MTERKPSFMQYSPVLFTPIAMFLGSCGAYFPGDQATLRSASGAGVRRKCAEKARSVNHDKVCRAFAMVLTTAVTAGVLSACGSDVNRGHTATTSISGKSADTAACGGKRTMTAEGSTAQQNAIALFNQIWGKLCPDKTVSYNPTGSGAGREQFIAGRIDFAGSDSPLLADQLGPAAKRCKGNPAWDLPLVFGPVALVYNLPGVQMLTVNSDVLAKIFSGVITTWNDGILAALNPGVVLPNLRIMPIYRADASGTTDNLQKYLTTDAPQSWAKGVGAEFQGGVGEGVQKSAGVIQAVQTTPGAFGYVEKSFADRAGLPFAQIDTGSGGVPLTDDTARNGINAANFVSVGNDLVLDLNAMYSTEQSNAYPLVLATYEIVCSKGYDPDTFAAIKSFLTVAANDGQAGLAAVGYVPLPDTIKKRLVSAINAMQ

SEQ ID NO: 15006 - DNA, 1170 bp, Mycobacterium tuberculosis CDC1551
  CDS (1)..(1170): transl_table=11
gtgctgttagcttcatttgctgcgagcaaaacagctggtcggccgttaggaactgaattgaaactcaaccgatttggtgccgccgtaggtgtcctggctgcgggtgcgctggtgttgtccgcgtgtggtaacgacgacaatgtgaccgggggaggtgcaaccactggccaggcgtcggcgaaggtcgattgcggggggaagaagacactcaaagccagtgggtcgacggcgcaggccaacgcgatgacccgctttgtcaacgtgttcgagcaggcctgccccggccaaaccctgaactacacggccaatggttcgggcgctggaatcagcgaatttaatggcaaccaaaccgatttcggtggctcagatgtacccctgagcaaggacgaggccgcagcggcgcagcggcgttgcggctcgccggcgtggaatctgccggtggtgttcggcccgatcgcggttacctacaacctcaacagcgtttcctcgctaaatttggacggccccacgttggcgaagatcttcaacggctccattacgcagtggaacaatcccgcgatccaggcgctgaaccgcgacttcacgctgccaggtgagcggattcacgtggtgttccgcagcgatgagtcggggaccacggacaacttccagaggtacctgcaggccgcgtccaacggtgcgtggggtaagggcgctggaaagtcgttccaaggcggcgtcggtgagggcgcgcggggtaacgatggcacgtcagcggccgcgaagaacaccccggggtcgatcacctacaacgagtggtcgttcgcccaggcgcagcacctgaccatggccaacatcgtcacttcggctggtggggacccggtggcgattactatcgactcggtcggccagacgatcgccggggccaccatctccggggtgggcaacgacctggtgctcgacacggactcgttctaccggccgaagcgtcccggctcctatccgatcgtgttagcgacatacgaaatcgtttgctcgaagtatcccgactcgcaggttggcacggctgtgaaggcgttcctgcagagcactatcggcgccggtcaaagcggcctgggggacaacggatacatcccaattccggacgagttcaaatcgaggctgtcgactgcggtcaacgcgatcgcctga

SEQ ID NO: 15007 - protein, 389 aa, Mycobacterium tuberculosis CDC1551
MLLASFAASKTAGRPLGTELKLNRFGAAVGVLAAGALVLSACGNDDNVTGGGATTGQASAKVDCGGKKTLKASGSTAQANAMTRFVNVFEQACPGQTLNYTANGSGAGISEFNGNQTDFGGSDVPLSKDEAAAAQRRCGSPAWNLPVVFGPIAVTYNLNSVSSLNLDGPTLAKIFNGSITQWNNPAIQALNRDFTLPGERIHVVFRSDESGTTDNFQRYLQAASNGAWGKGAGKSFQGGVGEGARGNDGTSAAAKNTPGSITYNEWSFAQAQHLTMANIVTSAGGDPVAITIDSVGQTIAGATISGVGNDLVLDTDSFYRPKRPGSYPIVLATYEIVCSKYPDSQVGTAVKAFLQSTIGAGQSGLGDNGYIPIPDEFKSRLSTAVNAIA

SEQ ID NO: 15008 - DNA, 1218 bp, Sulfolobus solfataricus P2
  CDS (1)..(1218): transl_table=11
atgaaagggttttcaactttggcagttgtgataatattaataatagttgttattgcagtggcagggatttttttcgtgataaattcccaaggtggtcataacactacaactacttcaacaagttcatctttttctacttcgtcacaagcttcatcatctcaaactacagcctcatcacaaatttcggcaagtattatagctggtggttctacttttgttaatccattaatgcaagtgtggattaaagatttccagtcaaattataatggaattcaagtaacttatagtgcagtgggtagtggagcaggagtgaataatttcttacaaggtgcctatgacataggagctacagatgttcctccgcccagtaatttgtatcagcaattaactcaaaaatatggtgaagttctcacaatccctgatgttgtaggtgcagtggatataatatacaatattccaagcttttctggtaccttgaacttaacagctgatgttttagcaaagatatacttagggcaaattcaatattgggatgatccagcaataaaagcattaaatccccactttaatttcactcatcaaaaaataatagcagttcatagaagtgatggaagcggcactacctttatctttacatattggctttacacctcatctcaatcttggaggagttcaaatgttagttatggttataccgttaactggccggtagataaacttggaaacggattaggaggtaagggaagtgatggagttacagcatatgtttctcaaaatccttattcaataggctatgttgaggcacagtacgcaatagcgaagaatttaactccagcggccgtattaaatccatccacaggcgattatgttttaccaactcaagcttcaattgagaccgcaattcaaaacgctaatttatcttcgcttccttcttcattgacaagagatttgtctcaatatctttcagtcttcttaaacgttaaagcacacaacgcttatcctatagtgacgttttcatggctagttattaaggtaaattataccgataagtctaaggcagaagcgatttacttatttttgaagtatattgcaactactggacagactgaattaccatcggggtatattgaattaccatcaaatattcaacaattaattctacaaaatcttaagctaatatcatataataatacgtctgtttataccttggtgagctaa

SEQ ID NO: 15009 - protein, 405 aa, Sulfolobus solfataricus P2
MKGFSTLAVVIILIIVVIAVAGIFFVINSQGGHNTTTTSTSSSFSTSSQASSSQTTASSQISASIIAGGSTFVNPLMQVWIKDFQSNYNGIQVTYSAVGSGAGVNNFLQGAYDIGATDVPPPSNLYQQLTQKYGEVLTIPDVVGAVDIIYNIPSFSGTLNLTADVLAKIYLGQIQYWDDPAIKALNPHFNFTHQKIIAVHRSDGSGTTFIFTYWLYTSSQSWRSSNVSYGYTVNWPVDKLGNGLGGKGSDGVTAYVSQNPYSIGYVEAQYAIAKNLTPAAVLNPSTGDYVLPTQASIETAIQNANLSSLPSSLTRDLSQYLSVFLNVKAHNAYPIVTFSWLVIKVNYTDKSKAEAIYLFLKYIATTGQTELPSGYIELPSNIQQLILQNLKLISYNNTSVYTLVS

SEQ ID NO: 15010 - DNA, 897 bp, Clostridium acetobutylicum ATCC 824
  CDS (1)..(897): transl_table=11
atgaaaagtaaaaaaatcaaattaatgtctgtagctataacaatgacaattatggctggtttatttgtaggatgtggaaattcaaattcaagcagcaataaaagtagttcttcaactacgaagaaggtctctggatcaattacactttcaggatctacagcacttcaaccattggcagaaaaatctgtagatggttttaaagaaaaatatcccgatgtgagtgttaatgttcaaggaggaggaagtggtactggattaaaccaggtgcttcaaggagcagttgaagtgggaaattcagatatctttgcagaagaaaaattaaatgcagatgatgcaaaaaaattaacagatcataaagtatgtgcaataggctttgctgtagttactaacaacgatgtaaatgtaaagaatttaacaaaacagcaggttcaagatatatttactggtaagataacaaactggaatcaagttggtggaccaagtgaagcaataaacatagttcacagacctaaatcctctggaacaagagcaactttcactaaaacagttatggatggaaaagacgaaaaagatgatattggaactacacaggacgccagtggatcagttaaaactgcaatgacaagtgcaaaaggttctataagttacttagcattttcttatcttgtaacagatgagggtaaaaaagatataaatattctatcattagatggagtagaggctacttcaaagaatgtagaaaatggtacttatcctttctggtcatatgagcatatgtacacaaaaggtaaaggaaatgatgcagctaaagcatttatagattatatgatgagttcagataataaagccttaattgaaaaaatgggatatatatcagcatctaatataaagaaatag

SEQ ID NO: 15011 - protein, 298 aa, Clostridium acetobutylicum ATCC 824
MKSKKIKLMSVAITMTIMAGLFVGCGNSNSSSNKSSSSTTKKVSGSITLSGSTALQPLAEKSVDGFKEKYPDVSVNVQGGGSGTGLNQVLQGAVEVGNSDIFAEEKLNADDAKKLTDHKVCAIGFAVVTNNDVNVKNLTKQQVQDIFTGKITNWNQVGGPSEAINIVHRPKSSGTRATFTKTVMDGKDEKDDIGTTQDASGSVKTAMTSAKGSISYLAFSYLVTDEGKKDINILSLDGVEATSKNVENGTYPFWSYEHMYTKGKGNDAAKAFIDYMMSSDNKALIEKMGYISASNIKK

SEQ ID NO: 15012 - DNA, 1002 bp, Synechocystis sp. PCC 6803
  CDS (1)..(1002): transl_table=11
atgcttagttcactgcaaaaagttgctaccttctccgtagtcagcgttatcgtcggttttggtggcattggccaggccattgccggtaccctcaatggtgcgggagcgagttttccggccccactctaccaacgttattttgctgagtataaaaaagctaccggtaatactgtcaattacaactccgtcggtagtggcgctggtattcgtcaatttatcggtgaaaccgttgattttggtgccaccgatgctgtgcccacttccgcccaacgtcaacagatgaaacggggtgtggttatggtgcccaccgctggtggcgctgtggcggtagtttacaatttaccaggcaaaaaagtacaactttctcgcattgccttgggtaaaattttcaccggggaactaaaaacctggaaccaggtggattccaaactgcccaacactcccattcgagttgtggtacgggccgatggtagtggcaccacggatatttttactagccacctcagcgctattagtagcacctttagaagcaagattggtgctagccaagatcccaactggggtttccaagtactgaaaggtccgaaaaatgacggggtagcggcaacggttaagcaaacccccggggcgatcggttatgtccaggacacctttgcccgccgtaacgagggtcccaatctgcaaaccgccaaggtacaaaataaggccggtcagtatgtagaacccagcttggcagaggccaataaagccatcagtggagccaagtttgacgcgaactttgttgctgaaataagtgatcctgcctccggttatcccattgtgggtttgacctggttgttggtgtatcaaaacaataaaaatgccaacgttgccaaggacgtcaaagctttggtgcgctggattttgaccactggccaaaaccataatacccagttggagtacaccaaaattcctcccgccgttgcccaacgggtaattgcagcagttaacaagatcaaataa

SEQ ID NO: 15013 - protein, 333 aa, Synechocystis sp. PCC 6803
MLSSLQKVATFSVVSVIVGFGGIGQAIAGTLNGAGASFPAPLYQRYFAEYKKATGNTVNYNSVGSGAGIRQFIGETVDFGATDAVPTSAQRQQMKRGVVMVPTAGGAVAVVYNLPGKKVQLSRIALGKIFTGELKTWNQVDSKLPNTPIRVVVRADGSGTTDIFTSHLSAISSTFRSKIGASQDPNWGFQVLKGPKNDGVAATVKQTPGAIGYVQDTFARRNEGPNLQTAKVQNKAGQYVEPSLAEANKAISGAKFDANFVAEISDPASGYPIVGLTWLLVYQNNKNANVAKDVKALVRWILTTGQNHNTQLEYTKIPPAVAQRVIAAVNKIK

SEQ ID NO: 15014 - DNA, 1152 bp, Synechocystis sp. PCC 6803
  CDS (1)..(1152): transl_table=11
atgactactttcaagcagattaaaaagttgtccaagcatttagtgcccacagcttctatcctggcactaactgttggtctggcagcctgtggtggcggtggtggtggtggtgacacagcccaaaccggtggtggtgatgcaactacaactactgccgcagatgcctttgccagtaaagtttccttgaccggtgccggtgctagttttcctgctcccctttaccaaggctggtttgtggccctcaatcaagctgtgcctaacttagaagttaactatcagtccgtgggtagtggtgctggggttgagcaattcatgagtaagaccgtggattttggtgccagcgatgtggccatggacgacgaagagattgccaaggttaacggtgaagtggtaatgcttcccatgaccgctggtagcattgttatggcctacaacttgcctggggtggaagggttgaagttatcccaggaagccttggcgggcatcatgttgggcaatattactaaatggaatgaccccaaattagtggcggataatcccgatttgaccttgcccgatcgccctatcacggtggtgcatcgttccgacggtagcggtaccacggcggttttcaccatgaacttggccgccatgagtcccgaatttaaggaaaccatcggtgacggtaaaaccgttgagtggcccaccagtaaaggtaaattcatcggtggtaagggtaacgaaggtgtaaccgctggtattcaacaaaatgagggagccattggctacgttgaatatggctacgccaccaacaataacctgaccatggccagcctccagaacaaggatggacagtttgttgtgccgaccgatgaaaatgcttcggccaccctggctgcagtcgaactgccggaaaacctgcgggaattcatcactaaccccgctggggctgattcctatcccattgttacctacacctggatgttgctttatccccagtacgctgatgcggaaaaggctaaaggtatcgaagcgatggtggaatttggtctgaatgaaggtcaaaccatggcccccactttgggttatgtacctttacctcaaaatgtgcgggaaaaagtggccgccgctgctgacaaaatctcccccgattacaccattaccttgaaatag

SEQ ID NO: 15015 - protein, 383 aa, Synechocystis sp. PCC 6803
MTTFKQIKKLSKHLVPTASILALTVGLAACGGGGGGGDTAQTGGGDATTTTAADAFASKVSLTGAGASFPAPLYQGWFVALNQAVPNLEVNYQSVGSGAGVEQFMSKTVDFGASDVAMDDEEIAKVNGEVVMLPMTAGSIVMAYNLPGVEGLKLSQEALAGIMLGNITKWNDPKLVADNPDLTLPDRPITVVHRSDGSGTTAVFTMNLAAMSPEFKETIGDGKTVEWPTSKGKFIGGKGNEGVTAGIQQNEGAIGYVEYGYATNNNLTMASLQNKDGQFVVPTDENASATLAAVELPENLREFITNPAGADSYPIVTYTWMLLYPQYADAEKAKGIEAMVEFGLNEGQTMAPTLGYVPLPQNVREKVAAAADKISPDYTITLK

SEQ ID NO: 15016 - DNA, 1041 bp, Salmonella typhimurium LT2
  CDS (1)..(1041): transl_table=11
atgaaagttatgcgtaccactgtcgcaactgttgtcgccgcgaccttatcgatgagcgcgttctctgcctttgcagcagcaagcctgacaggtgccggtgcaacgtttcctgcgccggtgtatgccaaatgggcggatacctaccagaaagaaaccggtaacaaagtcaattaccaggggataggctcttccggcggcgtgaaacaaatcaccgcgaataccgttgattttggcgcttccgatgcgccgctgtctgacgaaaaactgaatcaggaaggcctgttccagttcccgacggtgatcggcggcgtggtgctggcggtgaatattccaggcctcaaatccggcgaactggtgctggatggtaaaacgctgggtgacatctacctcggtaaaatcaagaagtgggatgatgaagccatcaccaaactgaacccaggcgtgaagctgccttctcagaacatcgctgtggtgcgtcgcgctgacggttccggtacctccttcgtgttcaccagttacctggcgaaagtcaacgacgagtggaaatcgaaagtgggcgcgggttctaccgtgaactggccaaccggtctgggcggtaaaggtaacgacggcatcgcggcatttgtacagcgtctgccaggcgctatcggctacgttgaatacgcttacgccaagcagaacaacctggcctacaccaaattggtttctgccgacggcaaaccggtaagcccgacggaagagagcttctctaatgcggcgaaaggcgcagactggagcaaaaccttcgcgcaggatctgaccaaccagaaaggtgacgatgtgtggccaatcacttccaccacgtttatcctggtccacaaagcgcagaagaaacctgagcagggtgctgaagtgttgaagttcttcgactgggcctacaaaaatggcgctaagcaggcgaatgatctggactacgccagcctgccggataacgttgttgagcaggttcgtgctgcatggaagaccagtataaaagacagcaacggtaaggcgctgtattaa

SEQ ID NO: 15017 - protein, 346 aa, Salmonella typhimurium LT2
MKVMRTTVATVVAATLSMSAFSAFAAASLTGAGATFPAPVYAKWADTYQKETGNKVNYQGIGSSGGVKQITANTVDFGASDAPLSDEKLNQEGLFQFPTVIGGVVLAVNIPGLKSGELVLDGKTLGDIYLGKIKKWDDEAITKLNPGVKLPSQNIAVVRRADGSGTSFVFTSYLAKVNDEWKSKVGAGSTVNWPTGLGGKGNDGIAAFVQRLPGAIGYVEYAYAKQNNLAYTKLVSADGKPVSPTEESFSNAAKGADWSKTFAQDLTNQKGDDVWPITSTTFILVHKAQKKPEQGAEVLKFFDWAYKNGAKQANDLDYASLPDNVVEQVRAAWKTSIKDSNGKALY

SEQ ID NO: 15018 - DNA, 909 bp, Listeria innocua Clip11262
  CDS (1)..(909): transl_table=11
atgaaaaagaagtatttgggaatagtagcaatgttagcagcagtaatgcttgtcttcgcagcatgtggaagtgacagcagttcaaaagataaagcaaacggatcaacaaaaggggataaagaagtttctggctcattaacagcagtcggatccactgcacttcaaccactcgttgaagcagcttccaaagaatttacaaacactaaccctaaagctcaaatcaatgttcaaggcggcggttctggaactggtttaacacaagtacaacaaggtgcagttgaaattggtaactcggacgtattcgctgaagaaaaagacggcgtagatgcttcaaaacttgttgatcatcgtgtagcagttgttggaatggcacctgtagtaaacaaagatgtaggcgttaaaaatattactaaacaacaattaatcgacattttcactggtaaaacaactaactggaaagacgttggcggtaaagacgaaaaaattacaatcatcaaccgtgcggaaggaagcggaacacgtgctactttcgaaaaatggggacttgatggtaaaacaccagttaaagcacaagaacaagattcatccggtacagttcgtaaaatcgtaagcgaaactccaggagcaatcagctacctagcattctcttacattgacgcttccgtagttggtctttcattagatggcgttgaaccaacagaagaaaaagttgcaactaacgattggaaaatctggtcttatgaacatatgtatacaaatggcgaaccaaaaggcctaacaaaaactttcttaaaatatatgacttctgatgaagtacaaaacaatatcgtaccacaacttggttaccaatcaatcaaatccatgaaagtggaacgcgatgcatctggtaaactaactgacgtaaaataa

SEQ ID NO: 15019 - protein, 302 aa, Listeria innocua Clip11262
MKKKYLGIVAMLAAVMLVFAACGSDSSSKDKANGSTKGDKEVSGSLTAVGSTALQPLVEAASKEFTNTNPKAQINVQGGGSGTGLTQVQQGAVEIGNSDVFAEEKDGVDASKLVDHRVAVVGMAPVVNKDVGVKNITKQQLIDIFTGKTTNWKDVGGKDEKITIINRAEGSGTRATFEKWGLDGKTPVKAQEQDSSGTVRKIVSETPGAISYLAFSYIDASVVGLSLDGVEPTEEKVATNDWKIWSYEHMYTNGEPKGLTKTFLKYMTSDEVQNNIVPQLGYQSIKSMKVERDASGKLTDVK

SEQ ID NO: 15020 - DNA, 1179 bp, Nostoc sp. PCC 7120
  CDS (1)..(1179): transl_table=11
atgctctcatatatcaagagaattaaaaataaccgcattccagtatcaattaccgtattaacactggcgatgagtttagctgcttgtggtgggcagcaaggctcagacaacactgcaactcaagatggttcatccggcacagctaaagatgctacagcttccagccctgcaaaattggatcttggcggcaatgtttcattaactggtgcaggtgcatctttccctgcaccactatatgcaagttggtttacagatttaaataaaaagtatcccaatttgcaaattaactatcagtcagtaggtagtggtgcgggagttgagcaatttattcaaggtactgtagactttggtgccagcgacgttgccatgaaggatgaagaaatccagaaagttcagagaggagtgcttttgttaccggtgactgctggtggaattgtactagcttacaacttgcctggtgtgacagaattgaatttaccaagagttgtttatacagatattctcctgggcaaaatcaagacttgggacgctccagaaattaaagctgctaaccctaatgtcaaccttcccagtcaaccaattacggttgtgtatcgttctgatggtagtggtactacaggagtgtttaccaaacacttggctgctgtcagtccagaatggaaaagtaaggttggtgaaggtaagtctgtttcttggccagtgggagttggtggtaagggtaatgaaggtgttactgcccaaattaaacaaactcaaggtgctataggctacattgagtatggttatgctaaacaaaacaatatcagctatgccactttggaaaataaagccggcaagtttgtgaaatacaatgatgagtcagcatctcaaactctagcagcaatccaattgccagaaaacctacgtgcttttgtgccagacccagatggagatggatcatatccaattgtcagtttcagttggattatggcttataaaaattatcctgatccagtaaaagctaaagcaatggaggctgccattgagtacgctttaactgaagggcagaagatttctggagaattaggttatattcccttacctcaagctgtagtgcagaaaactgctactgttgctgaccaaatcagtccagaatataaaatatctgtaagtggcagtggtactagtgccagcaagtag

SEQ ID NO: 15021 - protein, 392 aa, Nostoc sp. PCC 7120
MLSYIKRIKNNRIPVSITVLTLAMSLAACGGQQGSDNTATQDGSSGTAKDATASSPAKLDLGGNVSLTGAGASFPAPLYASWFTDLNKKYPNLQINYQSVGSGAGVEQFIQGTVDFGASDVAMKDEEIQKVQRGVLLLPVTAGGIVLAYNLPGVTELNLPRVVYTDILLGKIKTWDAPEIKAANPNVNLPSQPITVVYRSDGSGTTGVFTKHLAAVSPEWKSKVGEGKSVSWPVGVGGKGNEGVTAQIKQTQGAIGYIEYGYAKQNNISYATLENKAGKFVKYNDESASQTLAAIQLPENLRAFVPDPDGDGSYPIVSFSWIMAYKNYPDPVKAKAMEAAIEYALTEGQKISGELGYIPLPQAVVQKTATVADQISPEYKISVSGSGTSASK

SEQ ID NO: 15022 - DNA, 1032 bp, Ralstonia solanacearum GMI1000
  CDS (1)..(1032): transl_table=11
atgaaattggtcaagactgcgattgcgggcgttgtttcgctggctttcgctggtatcgcgtttgccgccgacatcaccggcgctggcgcgacgttcccggcgcctgtctataacaagtgggctgacgcctatcagaaggccaccggcaccaaggtgaactatcaaggcatcggctcgtcgggcggcatcaagcagatcaccgccaagaccgtcgatttcggcgcctcggacatgccgctcaaggatgacgagctgagcaaggacggcctgctgcaattcccgaccgtgatcggcggcgtggtgccggtgatcaatctgccgggcgtgaagccgggcgagctggtcctgacgggccaggtgctgggcgacatctacctgggcaaggtcaagaagtggaatgacccggccatcgtcaagctgaatccgaaggccaagctgccggaccaggacatcctggtggtgcgccgtgctgacggttcgggcacctcgttcatcttcacgaactacctgtcgaaggtgagcgccgagtggaagggcaaggtcggcgaaggcacgaccgtgaactggccgaccggcacgggcggcaagggcaacgaaggcgtggccgccttcgtgcagcgtctgggtggcgcgatcggctacgtcgagtacgcctacgccaagcagaaccacatgacccacatcaatctgcagaacgcctcgggcgccgtggtgcagccgaccagcgacgccttcaaggccgccgctgccggcgccgactggagcaagtcgttctaccagatcctgaccaaccagccgggcaaggacgcatggccgatcgccggcgcgaccttcatcctggtgcacaagacccaggacaagccggtccagggcaccgaggtcctgaagttcttcgactgggcctacaagaacggcggcaaggatgcttccgcgctggactacgtgccgctgccggacccggtgctgaaccagattcgcgccacctggaagtcgggcgtgaaggacgcttcgggcaagccgatctacaactga

SEQ ID NO: 15023 - protein, 343 aa, Ralstonia solanacearum GMI1000
MKLVKTAIAGVVSLAFAGIAFAADITGAGATFPAPVYNKWADAYQKATGTKVNYQGIGSSGGIKQITAKTVDFGASDMPLKDDELSKDGLLQFPTVIGGVVPVINLPGVKPGELVLTGQVLGDIYLGKVKKWNDPAIVKLNPKAKLPDQDILVVRRADGSGTSFIFTNYLSKVSAEWKGKVGEGTTVNWPTGTGGKGNEGVAAFVQRLGGAIGYVEYAYAKQNHMTHINLQNASGAVVQPTSDAFKAAAAGADWSKSFYQILTNQPGKDAWPIAGATFILVHKTQDKPVQGTEVLKFFDWAYKNGGKDASALDYVPLPDPVLNQIRATWKSGVKDASGKPIYN

SEQ ID NO: 15024 - DNA, 1062 bp, Ralstonia solanacearum GMI1000
  CDS (1)..(1062): transl_table=11
atgttcaagcacgcagtcctggccctggcgatggtcgcctcgggcttgcccgttctcgcgcgggcggaaatcctcggcgcgggatcgaccgccgcggcaccggtctaccgcatctggtcggcgggctacaccgccgcctcgggcacgacgctcaagtacgacgcggtgggctcgggagagggcctcaagcgcatccgcgcgggcacggtggatttcggcgcatcggatgtgccgctgtcgtcggccgatgcggccaaggccgggctggtgtgcgtgccatcggtggtgacgggggcggtccccttcgtcaatctgccgggcatgccgcacggccagttgcggctcacgggcgaggtgctggcgcgcatcttcctcggcaaggtcgagacctgggacgcgcccgaactgcacgcgctcaaccccggcctggcgctgcccaggctgaagatccaccccgtggtgcgcgccgacggctcgggcacgacctatcacttcaccgactacctgagcgccgtcagcgcagactggaaagccgcctacggcaccaagtcgaccctcgcctggccggccgacttcaccgccgccaagggcagcggcgacgtggtcaaggcggtacaggccacgcccggcgccatcggctacgtcgactacaactacgtcctcgacaacgacctgaacgcggtgcagttgcgcaatgccgccggccatttcgtcagcgcccaggtcagcggcttccgcgatgcggtgctgcagagcgcctggaaccgcaagggcgacttcaccgcgccgctcgtgaacctgcccggccccgacacctggccgatcaccatgggcaccttcatcatcgtgccggccgtgagcgccaacggcgcgcgcacgctggacgcgctcaagttcctgacctggggctacttccatggtgacgagctggccgcccgcgccaagttcgtgccgctgcccgagcgcgtccaggcgatcgcgtaccgggaactggcgcgcgtgaccgataccgccggcaccaccatcggactgcagagcatgcccgcgaactgggccaaatag

SEQ ID NO: 15025 - protein, 353 aa, Ralstonia solanacearum GMI1000
MFKHAVLALAMVASGLPVLARAEILGAGSTAAAPVYRIWSAGYTAASGTTLKYDAVGSGEGLKRIRAGTVDFGASDVPLSSADAAKAGLVCVPSVVTGAVPFVNLPGMPHGQLRLTGEVLARIFLGKVETWDAPELHALNPGLALPRLKIHPVVRADGSGTTYHFTDYLSAVSADWKAAYGTKSTLAWPADFTAAKGSGDVVKAVQATPGAIGYVDYNYVLDNDLNAVQLRNAAGHFVSAQVSGFRDAVLQSAWNRKGDFTAPLVNLPGPDTWPITMGTFIIVPAVSANGARTLDALKFLTWGYFHGDELAARAKFVPLPERVQAIAYRELARVTDTAGTTIGLQSMPANWAK

SEQ ID NO: 15026 - DNA, 1233 bp, Pyrobaculum aerophilum str. IM2
  CDS (1)..(1233): transl_table=11
atgggcataaaaacggtcgtaatagccgccgcggcgattataataattgctctactggcggcgttgcttggtttgggcgggggaggcaagcagacccagtcggcagagccccctcagaccagcgcgccgggccagtcgcagactattaccagcacctcggcgataggcggttctctcactggcggcggatctacttttataaatcctcagatggtggcttggtcaaagaggttctatgaagccactggcggaaaggtgcaagtaaattatcaatccattggctccggggcaggaacagcgcagttcttggagaaaaagctagatttcggcgcatccgacgtgcccatgccgagagataaatatgaacaagtcaaggggcgttttatgcaattccccgtaatcataggctctattgttgttgtgtacaacgtgccggagatagcatatgagaagactgggaagtacctaaacctcacctctgaggtgatctctctaatatacacgggggagattaaacagtggtgtgacgataggataaaggcaattaacccaggcctcgcggacaaactcccctgtagggacattacggctgttcacagaagcgacggctcgggcactaccgccgcctttactctttacttatcaaaggcctatcctccgtggaaccagacagtggggtgggggtatactgttaagtggcctgtcgacgagagaggcaagggcgtcggcgccaagggaaatgaaggcgtggcgcaggcggttttgcagaacgcctattccatcggatatgtggaatacgcctattgggttaaaaacaaagagaagtacgacaaaatcggcggcgtggcgtatcttaaaaacgacaacgacgggaagtactacttcccatccgccgaggccgtaagcgctggtgcatcggcggctctggagagatatagagctaagtatgggcaagtgcccgcgccagacgctgactggaatcccgtctctatagagttttcaaacccgccgaagggatacccactgctgtcttttacctacgtctttgtatggaaggactactccgctgagggctacggcaacgcgccggggaaagccgccttaattaggcagtttctccaatgggtgcttacagaaggccaaaagcagggtaacttagttgagggctacatcccgttgccgccggacttagccgccataggcctagaggcccttaagcaagtgaaaccctaa

SEQ ID NO: 15027 - protein, 410 aa, Pyrobaculum aerophilum str. IM2
MGIKTVVIAAAAIIIIALLAALLGLGGGGKQTQSAEPPQTSAPGQSQTITSTSAIGGSLTGGGSTFINPQMVAWSKRFYEATGGKVQVNYQSIGSGAGTAQFLEKKLDFGASDVPMPRDKYEQVKGRFMQFPVIIGSIVVVYNVPEIAYEKTGKYLNLTSEVISLIYTGEIKQWCDDRIKAINPGLADKLPCRDITAVHRSDGSGTTAAFTLYLSKAYPPWNQTVGWGYTVKWPVDERGKGVGAKGNEGVAQAVLQNAYSIGYVEYAYWVKNKEKYDKIGGVAYLKNDNDGKYYFPSAEAVSAGASAALERYRAKYGQVPAPDADWNPVSIEFSNPPKGYPLLSFTYVFVWKDYSAEGYGNAPGKAALIRQFLQWVLTEGQKQGNLVEGYIPLPPDLAAIGLEALKQVKP

SEQ ID NO: 15028 - DNA, 819 bp, Clostridium perfringens str. 13
  CDS (1)..(819): transl_table=11
atgaataggagaagagtagtaattgcattaagcagtattttagcaatgggatttttattaacaggatgtggtggaggatcaagagctaatataataaaaatttcaggctcaagttcagtaggaccattagtagaggctgaagcagaagtttttaaaaaggatatgccagatattactgttgaggtaaatcaattaggatcatcagcaggaataaaagatgctataaatggaactgtagagataggaatttcttcaagagatttaaaggaaaaggaattggaatctggaattaaagaaaaacctattgcctatgatgggatgtcagtaataattaacaatgaaaatccagtgcaaaatcttacaatggagcagattagggatatatatacagggaaaataacaaactggaaagaggttggtggagaagatactccaatagtattagtttcaagggaagatggatcaggaacaagagatgccttccaagaaattgttggattcaattcagaggaaataagtccacaggctcagatttcagatggttctggaagtattaaaacaatggtatcaggaaataagaatgcaataggatatatatcctttagttacgtagataattcagtgcatgcagttagcattgatggagtaaagcctacagccgaaaatgtgcaaaataaaatgtacaagctatcaagaccatttttattagtatataaagaggaaaatttaaatgaaaattcaaagaaatttatagattttataatgagtaaagaaggacaagaaatagttgaagaagatggattaataagtgtaacttaa

SEQ ID NO: 15029 - protein, 272 aa, Clostridium perfringens str. 13
MNRRRVVIALSSILAMGFLLTGCGGGSRANIIKISGSSSVGPLVEAEAEVFKKDMPDITVEVNQLGSSAGIKDAINGTVEIGISSRDLKEKELESGIKEKPIAYDGMSVIINNENPVQNLTMEQIRDIYTGKITNWKEVGGEDTPIVLVSREDGSGTRDAFQEIVGFNSEEISPQAQISDGSGSIKTMVSGNKNAIGYISFSYVDNSVHAVSIDGVKPTAENVQNKMYKLSRPFLLVYKEENLNENSKKFIDFIMSKEGQEIVEEDGLISVT

SEQ ID NO: 15030 - DNA, 1128 bp, Pyrococcus furiosus DSM 3638
  CDS (1)..(1128): transl_table=11
gtgaagaggctagcaacaatatttattatttttgccttggggctttccttagtggcaagcggttgtatatccgagggaaatgcatccaatgtccctcaagcaacttctaaaactgagataataacgattcgcacaacaggtgcaacttttccccaatatcagctccaaaagtggattagcatatatacaaaaaagaacccaaacgttaagatcgagtatgaaggtggtggaagtgggcatggtcaagaagcatttctaaagggccttacagatataggaagaacagaccccccagttaaagaatccacgtggaaaaagttccttgaaactggtgatcagccccttcagtttcctatagttgtcggtgctgtagtcgtcgttcacaatattccaaatgttgatgagctaaagctcgatggagagaccttagcgaaaatctttatgggccaaatagagtattgggatgatccagcaataaagtcccttaatcctaatgtaaaccttcctcacgaaaaaataatagtaattcataggagtgattcgagtggaaccactgcaatttttaccacttacttgagcttagtcagtgaagaatgggccacaaaagtaggagccggaaagactgtggattggccagttgacaaagttggaaggggaattggtgcaaaaggcaacccaggagttgttcaggccttaaagaacaccccatatagtatagcatacactgagctatcttttgcaatagaggaaaatctcaagatagtagcactcaaaaacaaagccggaaacttcgtcaaacctaccgaggagacaataaaagctgcagtagccgcagttaaggcctttatacccgatcccgctgaggggtataaagaggatattaggcaacttctcaatgctcccggagaaaattcatacccgatagttgcttttacacactttctcgtctggcagaataagggaggaaagcactacagtaaagagaaggctcaagcgattaaggactttcttagatgggttttaacagagggacagaaaccagagaatattgctccaggctacgtaggtctcccacctgaagttgccgaaataggtcttaaggcagttgagatgatagaaacaggttaa

SEQ ID NO: 15031 - protein, 375 aa, Pyrococcus furiosus DSM 3638
MKRLATIFIIFALGLSLVASGCISEGNASNVPQATSKTEIITIRTTGATFPQYQLQKWISIYTKKNPNVKIEYEGGGSGHGQEAFLKGLTDIGRTDPPVKESTWKKFLETGDQPLQFPIVVGAVVVVHNIPNVDELKLDGETLAKIFMGQIEYWDDPAIKSLNPNVNLPHEKIIVIHRSDSSGTTAIFTTYLSLVSEEWATKVGAGKTVDWPVDKVGRGIGAKGNPGVVQALKNTPYSIAYTELSFAIEENLKIVALKNKAGNFVKPTEETIKAAVAAVKAFIPDPAEGYKEDIRQLLNAPGENSYPIVAFTHFLVWQNKGGKHYSKEKAQAIKDFLRWVLTEGQKPENIAPGYVGLPPEVAEIGLKAVEMIETG

SEQ ID NO: 15032 - DNA, 1128 bp, Corynebacterium glutamicum ATCC 13032
  CDS (1)..(1128): transl_table=11
gtgaacctcactcttaagcgctccatcgcccttgtgggcgcagttactgcaggctccttcgctcttgtagcttgctccgactccaatgagtctgattccacctcctcatctgcagcttccaccggttcttccgatgctgcatccattgagggcctttccggtgttaccggtcagctcgttgctgaaggtgcatcttcccagcagtccgcaatggactactttggtatccgttactccgaggctgtcagcggtgcatctctggcttacaccccttcaggttccggttccggccgcaccaacttcgctgcaggccaggttgctttcggtggctccgactccgcaatgaaggacgaccaggctgcagaagcagaagcacgttgcaacggcaacgaagcatggcacctgccattcgttatcggcccagttgcagttgcttacaacctgcctggcgttgacaccctgaacctggacaccaacatcatcgctcagatcttcaagggcgagatcaccaagtggaacgacgaagcaatcgcttcccagaacgagggcaccgacctcccagaccaggacatctccgttctgtaccgttccgaagagtccggtacctccgacaacttccagaagttcctcggagcttccaccgacatctgggagaccgaaggccagcagttcccaaccgaggttggctccggtgcgcagggctccaacggtgtagcttctgaggcttccaacatcgagggtgcaatcacctacgttgaagctggtttcgctaaccagtccggcctgggcgttgcaaacatcgacttcggttccggcccagttgaactcaacgctgagtccgttggcgttgcacttggtgcactcgacttcctgactgagggccacaacatggttgttgacaccgacgctatgttcgcaatgaacgaagccggtgcttacccactgatcctcaccacctacgaaatcgtctgctccgcaggctacgacgagaccacccgcgaccaggtcaaggacttcctgaccgttgcactggactcccaggatgaccagctcgaggctctcggctacatcccagttaccggcgagcactacgatcgcctcgttgcagcagttgaagcaattcagtaa

SEQ ID NO: 15033 - protein, 375 aa, Corynebacterium glutamicum ATCC 13032
MNLTLKRSIALVGAVTAGSFALVACSDSNESDSTSSSAASTGSSDAASIEGLSGVTGQLVAEGASSQQSAMDYFGIRYSEAVSGASLAYTPSGSGSGRTNFAAGQVAFGGSDSAMKDDQAAEAEARCNGNEAWHLPFVIGPVAVAYNLPGVDTLNLDTNIIAQIFKGEITKWNDEAIASQNEGTDLPDQDISVLYRSEESGTSDNFQKFLGASTDIWETEGQQFPTEVGSGAQGSNGVASEASNIEGAITYVEAGFANQSGLGVANIDFGSGPVELNAESVGVALGALDFLTEGHNMVVDTDAMFAMNEAGAYPLILTTYEIVCSAGYDETTRDQVKDFLTVALDSQDDQLEALGYIPVTGEHYDRLVAAVEAIQ

SEQ ID NO: 15034 - DNA, 990 bp, Methanopyrus kandleri AV19
  CDS (1)..(990): transl_table=11
gtggggggtgaaattttgaagaagtacctaattgcggctgtggtcgcgatcgcggtcatcgcaggaggcgcggcttactactactccacagcgggtgcagtaaaaacacagctaaggataggaggatcgacgagtctaatgccatttatgatgaaggttgcagcttatgtcggtgaagaacaccgaatgacatggaagcagattggcgaacaagtgggtgttcaaggactacctgacgagcccgtacagttgatggtttctgatggtggatcctccgcaggtattaagggtctcattgagggaacgttcgatatcgctatggcatcgagaccactgaagcctgaagaagctcagcagttaagtgatcctgtgatgtgtcctgtggtcctatcagcgattgtaccgatcgtgaatgggaagacgctaggccagttagacgacatcgacccgaagacgcttagggacatctataccggtaagatcaagtactgggatcaggtgaagccgggtctaccacacaagaaaatcgtcgtaatcggtcgtgcgaagggttcaggcacgcggtcaacgtttgacaagtacctaaacatccaggattacaccaaggacgccatcctctgtgggtctaactcggaggtcctggagaaggtagagaagacgccgtacgctatcggttacgtggattacgcctacgtcgtcaaagccaagaagggcggtaaggtgccgagcgcggtgaagccgctgaaagtcaacggtgttgaagccaacgagcagacgatcatcgcgaagaagtacccactggtcagggccgagtacctgatcatcgaccgctccaatgccccgaagacggcgatcgctttgatcaagtggatcaggaagccggacgtcaacaaggagttcgcggagaaggtgggatacgtcccggtacccgaggatgcaccgctgttctctaagaagccgtacatagagatcaaaccgctagttaagtaa

SEQ ID NO: 15035 - protein, 329 aa, Methanopyrus kandleri AV19
MGGEILKKYLIAAVVAIAVIAGGAAYYYSTAGAVKTQLRIGGSTSLMPFMMKVAAYVGEEHRMTWKQIGEQVGVQGLPDEPVQLMVSDGGSSAGIKGLIEGTFDIAMASRPLKPEEAQQLSDPVMCPVVLSAIVPIVNGKTLGQLDDIDPKTLRDIYTGKIKYWDQVKPGLPHKKIVVIGRAKGSGTRSTFDKYLNIQDYTKDAILCGSNSEVLEKVEKTPYAIGYVDYAYVVKAKKGGKVPSAVKPLKVNGVEANEQTIIAKKYPLVRAEYLIIDRSNAPKTAIALIKWIRKPDVNKEFAEKVGYVPVPEDAPLFSKKPYIEIKPLVK

SEQ ID NO: 15036 - DNA, 999 bp, Methanosarcina acetivorans C2A
  CDS (1)..(999): transl_table=11
atggtatttaagaacgataaagcagtatctccagtcgtagcaacactcgtactggttgttgtcgcaatcatcggcgcagcagcagtcggtgcattactcggtgcattcagcagcgatgtctcggatgaagcaagcgcaggcgaaacttccggtgcttcttcgacagaacttttaattggtggttctaccactgtccagccagtctctgaggttctcgcagatgcttacatggaagaacacaagggaataaaagtcaatgttcagggcggcggttccggtgctggagtttccggtgcagagaaaggagtgctggatattggttcttcctctagcgcaattgcaaaagcagaccacccagatttacaggtctttgagattggtggtagtgcagtggtgcttattggtagtaacgaagtgaccgcaattgaagtacccggcgctgacgcggctgctcagcaggcaaatatgaaagcaatttacaccgctgctgttgagggtgtagctgaatatgacgatacccttacagcctcaactggtgccgcattgacagtcttacagagatcttctgcaagcggcactgaggaaactttctcagaatacattggtgacggtagcaaaacattcatagacggtacagaagcactcggcaaagcttcaaatggtgatgtgtatagcgcggttaagtcagcttcaacacctacaatcggtttcgtagactacggattttataactccgacgactctacagagcttcacttaattggtcttggctgcacacaggctgaaataaccccaacgaatatcaaagctgcattaaaagtaaaatcaaccggaacaggtacagcagacttcccaaccggtctttgcagaaacctgtactactgtactcttggaagcccatcttcaaccgagcagagctttatcaacttcgccatgagccctggagcgattgacttcttccacgaagcagggacattcagcgcatacgattaccagtaa

SEQ ID NO: 15037 - protein, 332 aa, Methanosarcina acetivorans C2A
MVFKNDKAVSPVVATLVLVVVAIIGAAAVGALLGAFSSDVSDEASAGETSGASSTELLIGGSTTVQPVSEVLADAYMEEHKGIKVNVQGGGSGAGVSGAEKGVLDIGSSSSAIAKADHPDLQVFEIGGSAVVLIGSNEVTAIEVPGADAAAQQANMKAIYTAAVEGVAEYDDTLTASTGAALTVLQRSSASGTEETFSEYIGDGSKTFIDGTEALGKASNGDVYSAVKSASTPTIGFVDYGFYNSDDSTELHLIGLGCTQAEITPTNIKAALKVKSTGTGTADFPTGLCRNLYYCTLGSPSSTEQSFINFAMSPGAIDFFHEAGTFSAYDYQ

SEQ ID NO: 15038 - DNA, 1475 bp, Streptomyces coelicolor A3(2)
  CDS (363)..(1475)
gtcgacgagctgctcaccacccgtcttccctgaacacccagacctgagcactcacccacgcgtactcagccccgcgcactcaccccacgcactcagccctgagcacccacccccgcgcactcagccctgagcacccaccccccgcacccagcgaggcccgagcgccccggaaccggcccgtgtcctcgacgtaagcgttccgtgacctcaccgcaccgtccacaggggttcacccggcgttcatttacgcccttcggcgccttcatctcatctgcctaatttcggccttaccactcctcgcacgccgccgaattcaggacggcggctcctggaaggaactccctcaagtgaagcttcagcgcatgaaccggcgggccctcgctctcggtgctctcgccgtctccggcgccctggccctcacggcgtgcggctccgacgacaccggcggcaacagcggcagcgactccagctccgccgccgccaacagcaacatcaagtgcgacgacgccaagggccagctccaggcctccggctcgtccgcccagaagaacgccatcgacgcctgggtcaagcagtacgtcgccgcctgcaacggcgtgcagatcaactacaacccgaccggttccggcgcgggcatcaccgccttcacgcagggccagaccgcgttcgccggttcggactccgcgctgaagccggacgagatcgaggcctcgaagaaggtctgcaaggacggccaggccatcgacctgccgatggtcggcggcccgatcgcggtcggcttcaacgtcaccggcgtcgactcgctcgtcctggacgcgccgaccatggcgaagatcttcgacagcaagatcaccaactggaacgacgaggcgatcaagaagctcaaccccgacgccaagctgcccgacctgaagatccaggccttccaccgctcggacgagtccggcaccacggacaacttcaccaagtacctgaaggccgccgcgcccgacgactggaagtacgagggcggcaagtcctgggaggccaagggcggccagtccgcgcagggctcctccggcctggccggccaggtgaagcagacccccggcgccatctcgtacttcgagctgtcctacgccaaggacggcatcaagaccgtcgacgtcaagaccgcagccgccgagccggtcaaggccaccgtcgagaacgccaccgccgccatcggcgcggccaaggtcgtcggcaccggcaaggacctggcgctggagctggactacaccccggacgccgccggcgcctacccgctggtcctggtgacgtacgagatcgcctgcgacaagggcaacaaggcggacaccctgcccgccaccaagtccttcctgaactacatggcctcggaggacggccagggcctgctggcggacgccggctacgccccgatgcccaccgagatcatcaccaaggtccgcgagaccatctcgggcctgagctga

SEQ ID NO: 15039 - protein, 370 aa, Streptomyces coelicolor A3(2)
MNRRALALGALAVSGALALTACGSDDTGGNSGSDSSSAAANSNIKCDDAKGQLQASGSSAQKNAIDAWVKQYVAACNGVQINYNPTGSGAGITAFTQGQTAFAGSDSALKPDEIEASKKVCKDGQAIDLPMVGGPIAVGFNVTGVDSLVLDAPTMAKIFDSKITNWNDEAIKKLNPDAKLPDLKIQAFHRSDESGTTDNFTKYLKAAAPDDWKYEGGKSWEAKGGQSAQGSSGLAGQVKQTPGAISYFELSYAKDGIKTVDVKTAAAEPVKATVENATAAIGAAKVVGTGKDLALELDYTPDAAGAYPLVLVTYEIACDKGNKADTLPATKSFLNYMASEDGQGLLADAGYAPMPTEIITKVRETISGLS

SEQ ID NO: 15040 - DNA, 909 bp, Methanosarcina mazei Go1
  CDS (1)..(909): transl_table=11
atggtaaataaattaaaaacatatgcaatcctcacgttactggtgtttggacttgtatttctgggaattggatgtaccggaaatgaaaatggcgaaagttcttctcagggtgaagaaacctcttcaggggaagttcccggggctgaatcccggagtattactctgaaaggttcagatacggttctcccccttgctcaggctgaagctgaagaattcatgcttgaaaaccctgacaaaagtgtaactgtcaccggtggtgggtcgggtgttgggattacagctctcattgatggtgaagtcgacattgctgcagcatcccgagaaattaaagccgaagaaatagaagctgctcagtctaacggcatcacccctgtggagacaacaattgcctatgacggcatttcagttgttgttaaccccgggaaccctgtttctgaacttacctttgaccagctgcgcggcatctacaatggaagcatcagcaactggaaggacgtaggtggagaagacaggaagattgtggtgatttccagggacagcagttcaggtacttacgaatatttcaaggaagaggttttacagggagatgaatatagacctgatgcacttacccagcctgcaacagggggaatagttggggaagtttctcagaatcccaatgcaatcggatatatcggtgttgcataccttgatcaaagtgtaaaagccttaagcctggatgcaggaaacggccctgaaaccccaagtcctgaaaacatcctcagcggtgcataccctctttcaaggtctctttacttctacaccaatggtgaaccctcaggcttgacaaaggagttcgttgactttgtactcagcgaaacaggacagagcctggtaactgaagtagggtacttccctgcagatcagtaa

SEQ ID NO: 15041 - protein, 302 aa, Methanosarcina mazei Go1
MVNKLKTYAILTLLVFGLVFLGIGCTGNENGESSSQGEETSSGEVPGAESRSITLKGSDTVLPLAQAEAEEFMLENPDKSVTVTGGGSGVGITALIDGEVDIAAASREIKAEEIEAAQSNGITPVETTIAYDGISVVVNPGNPVSELTFDQLRGIYNGSISNWKDVGGEDRKIVVISRDSSSGTYEYFKEEVLQGDEYRPDALTQPATGGIVGEVSQNPNAIGYIGVAYLDQSVKALSLDAGNGPETPSPENILSGAYPLSRSLYFYTNGEPSGLTKEFVDFVLSETGQSLVTEVGYFPADQ

SEQ ID NO: 15042 - DNA, 1092 bp, Xanthomonas campestris pv. campestris str. ATCC 33913
  CDS (1)..(1092): transl_table=11
atgaaactgcagtcggccagcctgaccgccctgtccctcaccatcgcccttgccctggcggcctgctcgcccggcaaggacgcgcagtccggcgatcccgcacaaggcggtgccaacgcaggcgcggcggccggcgagagcaagagtgcggagatcgccggcgccggtgcgtccttcatctacccgctggtgtccaagtggtcggccgactacaacgccgccaccggcaacaaggtcaattaccagtcgatcggttcgggcggcggcattgcgcagatcaaggccggcaccgtggatttcggctcctccgacaagccgctcgatagcgccgagctgcagcaggccggcctgggccagttcccctcggccatcggcggcgtggtgccggtggtgaacatcgaaggcatggcgcccggcaagctgcgcctgaccggcgccctgctcggcgacatcttcctgggcaaggtcaccatgtggaacgacgcggcgattgctgcggccaacccgggcgtgaccctgccggcgaccaagatcaacctggtgcatcgctccgacggttcgggcaccacattcaacttctccaactacctgtccaaggtcagcccggagtggaagaccaaggtcggcgaaggcacctcggtgcagtggccgggcggcgtgggcggcaagggcaacgaaggcgtggcctcctacgtgcagcagatcaagggctcgatcggctatgtcgaactggcctacgcgctgcagaacaagatgccgtacgcgtcgatgcagaacgctgccggccagtgggtggagccgaacgctgaaagcttcggcgccgcagcggccagcgccgactggaccaatgccaaggacttcaacctggtgatcaccaatgcaccgggcgagaaggcctggccgatcaccgcgaccaacttcatgctgatgcacaagcagcccaaggacgcggcccgcagcaaggccacgctggacttcttcaagtgggcactggaaaacggccaggcccaggccagcgaactgcattacgtgccgctgccgccggagctggtgaagcagatcgaagcctactggggcagcgagttcaagtga

SEQ ID NO: 15043 - protein, 363 aa, Xanthomonas campestris pv. campestris str. ATCC 33913
MKLQSASLTALSLTIALALAACSPGKDAQSGDPAQGGANAGAAAGESKSAEIAGAGASFIYPLVSKWSADYNAATGNKVNYQSIGSGGGIAQIKAGTVDFGSSDKPLDSAELQQAGLGQFPSAIGGVVPVVNIEGMAPGKLRLTGALLGDIFLGKVTMWNDAAIAAANPGVTLPATKINLVHRSDGSGTTFNFSNYLSKVSPEWKTKVGEGTSVQWPGGVGGKGNEGVASYVQQIKGSIGYVELAYALQNKMPYASMQNAAGQWVEPNAESFGAAAASADWTNAKDFNLVITNAPGEKAWPITATNFMLMHKQPKDAARSKATLDFFKWALENGQAQASELHYVPLPPELVKQIEAYWGSEFK

SEQ ID NO: 15044 - DNA, 1092 bp, Xanthomonas axonopodis pv. citri str. 306
  CDS (1)..(1092): transl_table=11
atgaaattgcagtcggccagcctgaccgccctgtccctcaccattgccctcgccctggccgcgtgctcgcccggcaaggacgcgcagtccgcagacgccgcaaagggcgcgccagccgcaggcgccgccgccagcgacagcaagggtgctgaaatttccggcgccggtgcttccttcatctatccgctggtgtccaagtggtcggccgactacaacgccgccaccggcaacaaggtcaactatcaatcgatcggctccggcggcggcattgcgcagatcaaggccggcacggtggatttcggttcgaccgacaagccactggacagcgccgaactgcaacaggctggcctggggcagttcccgtccgccatcggcggcgtggtgccggtggtgaatctggaaggcatcgcgccgggcaagctgcgcttgaccggcgccctgctgggcgacatcttcctgggcaaggtcacgatgtggaacgacgcggccattgtcgcggccaacccgggcgtgaccctgcccgccaccaagatcaacctggtgcatcgctcggatggttcgggcaccaccttcaacttctccaactacctgtccaaggtcagcccggagtggaagagcaaggtcggcgaaggcacctcggtgcagtggccgggtggcgtgggcggcaagggcaacgagggcgttgcgtcgtacgtgcagcagatcaagggctcgatcggctatgtcgagcttgcctacgctctgcagaacaagatgccgtacacctcgctgcagaacgcggccggccaatggatcgagccgaatgcggaaagctttgccgccgccgctgccagcgccgactgggccaacgcccgtgacttcaatctggtgatcaccaatgcgccgggcgagaaggcatggccgatcaccgcgaccaacttcatgttgatgcacaagcagcccaaggacgccgcgcgcagcaaggcgacgctggacttcttcaagtgggcgctggaaaacggccaggcccaggccagcgaattgcactacgtgccgctgccgccggagctggtgaagcagatcgaagcctactggggcagcgagttcaagtaa

SEQ ID NO: 15045 - protein, 363 aa, Xanthomonas axonopodis pv. citri str. 306
MKLQSASLTALSLTIALALAACSPGKDAQSADAAKGAPAAGAAASDSKGAEISGAGASFIYPLVSKWSADYNAATGNKVNYQSIGSGGGIAQIKAGTVDFGSTDKPLDSAELQQAGLGQFPSAIGGVVPVVNLEGIAPGKLRLTGALLGDIFLGKVTMWNDAAIVAANPGVTLPATKINLVHRSDGSGTTFNFSNYLSKVSPEWKSKVGEGTSVQWPGGVGGKGNEGVASYVQQIKGSIGYVELAYALQNKMPYTSLQNAAGQWIEPNAESFAAAAASADWANARDFNLVITNAPGEKAWPITATNFMLMHKQPKDAARSKATLDFFKWALENGQAQASELHYVPLPPELVKQIEAYWGSEFK

SEQ ID NO: 15046 - DNA, 1020 bp, Xanthomonas axonopodis pv. citri str. 306
  CDS (1)..(1020): transl_table=11
gtgatccactccttcaagacccgtctggccgtcggcgtgctcgccgcttcgctggcactgtgcgcccaggctgccgacgtcaccggtgccggtgcgtcgttcatctacccggtgatgtccaagtggtcggccgactacaacgcggccaccaagaagcaggtcaactaccaatcgatcggttcgggcggcggcattgcccagatcaaggcggccagcgtggacttcggctcttccgatgccccgctcaagccggaagaactggccgctgccggcctggcgcagtttccctcggtgatcggcggcgtggtaccggtggtcaacgtgccgggcattgccgccggtacgctcaagttggacggcaagactctgggcgacatcttcctgggcaaggtcagcacctggaacgacccggccatcgccgcgctcaacccgggcgtgaaactgccggaaggcaagatcaccgtggtgcaccgctccgacggctcgggcaccagcttcaacttcaccaactacctctccaaggtcaacccggactggaagggcaaggtcggcgaaggcacggcggtgcagtggccgaccggcatcggcggcaagggcaacgagggcgtggctgcctacgtgaagcagatcaagggcggcatcggctatgtcgagctgtcgtacgcgctgcagaacaagatggcctacaccgcaatgaagaacgcggccggcaagttcgtgcagccgtcggatgaaaccttcgccgccgctgccaacagcgccgactggggcacggccaaggacttctatctggtgatgaccaacgcggccggcgataacgcctggccgatcacggcgaccaacttcatcctggtgcagaaaaagccgaagaatccggctggactgaagaacacgctggaattcttccgctgggtctacaccaagggcgatgcgcaggccaaacagttggactacgtgccgctgccggacacgctggtgacccagatcgaggcgtactgggccaagaatctgccgcactaa

SEQ ID NO: 15047 - protein, 339 aa, Xanthomonas axonopodis pv. citri str. 306
MIHSFKTRLAVGVLAASLALCAQAADVTGAGASFIYPVMSKWSADYNAATKKQVNYQSIGSGGGIAQIKAASVDFGSSDAPLKPEELAAAGLAQFPSVIGGVVPVVNVPGIAAGTLKLDGKTLGDIFLGKVSTWNDPAIAALNPGVKLPEGKITVVHRSDGSGTSFNFTNYLSKVNPDWKGKVGEGTAVQWPTGIGGKGNEGVAAYVKQIKGGIGYVELSYALQNKMAYTAMKNAAGKFVQPSDETFAAAANSADWGTAKDFYLVMTNAAGDNAWPITATNFILVQKKPKNPAGLKNTLEFFRWVYTKGDAQAKQLDYVPLPDTLVTQIEAYWAKNLPH

SEQ ID NO: 15048 - DNA, 1041 bp, Yersinia pestis KIM
  CDS (1)..(1041): transl_table=11
atgaaactgatgcgtaccaccgtagccagcattgtggcagcgactttatctatgactgctgtatccgcgttcgctgctgcaagcctgacaggtgcaggtgcgacattccccgcaccggtgtatgccaagtgggcagattcttatcagaaagaaacaggtaacaaaattaactatcaaggtatcggttcttccggtggcgtgaagcaaattattgccaatactgttgattttggtgcttctgatgcgccattaacagatgaaaaactggctactgaaggtttgttccaattcccgaccgtgattggcggtgtggtgttagccgtgaatattcctggcattaaatccggtgagctgacattagacggtaaaacgctgggtgatatctatctgggcactgtgaaaaagtggaatgatcctgcgattgttaagttgaacccaggcgttaaattaccggatcaaaatattgctgttgtacgtcgtgctgacggctcgggtacctcatttgttttcaccagctacttggctaaagtgaacgcagaatggaaagagaaagtcggggctggctctaccgtgaactggccaaccggtttaggtggtaaaggtaacgacggtatcgctgcttttgttcagcgcctgcctggctcaattggctatgtagaatatgcttacgcgaaacaaaataatttggcttacactaaactgatttcagcagatgggaagcccgttagcccaactgagcacagctttagctctgcagcaaaaggtgtggactggagcaaatcatttgctcaagacttaaccaatcaaaaaggtgatgatgtttggccaattacctcaacgaccttcatcttagtgcataaagaacagaagaatgctgctaatggcacagaagtattgaaattctttgactggggttacacacacggcgctaaacaagctaacgaactggattatgcaacattacccgcggaagttgttgaacaagtacgtgcagcttggaaaactcagattaaagatagcagcggcaagccaatcttctga

SEQ ID NO: 15049 - protein, 346 aa, Yersinia pestis KIM
MKLMRTTVASIVAATLSMTAVSAFAAASLTGAGATFPAPVYAKWADSYQKETGNKINYQGIGSSGGVKQIIANTVDFGASDAPLTDEKLATEGLFQFPTVIGGVVLAVNIPGIKSGELTLDGKTLGDIYLGTVKKWNDPAIVKLNPGVKLPDQNIAVVRRADGSGTSFVFTSYLAKVNAEWKEKVGAGSTVNWPTGLGGKGNDGIAAFVQRLPGSIGYVEYAYAKQNNLAYTKLISADGKPVSPTEHSFSSAAKGVDWSKSFAQDLTNQKGDDVWPITSTTFILVHKEQKNAANGTEVLKFFDWGYTHGAKQANELDYATLPAEVVEQVRAAWKTQIKDSSGKPIF

SEQ ID NO: 15050 - DNA, 1134 bp, Bifidobacterium longum NCC2705
  CDS (1)..(1134): transl_table=11
atgcagaagaacatcctcgttcgctccattgccgctctgtccggcattgtgatgctcgcttccgtggccgcctgcggcgataacaccgccaccacgaccgacaacagctcctcctccgattccacttccaagtccaccccgatctccggcaacttctcgggcgccggcgcctcctctcagcaggccgctgttgaagcttggatcgccggcttccagggcaccaaccctgaggccaagatcgcctacaacccgtccggttccggcgctggcgtgcagaccttcctgaccggtgccaccgcttgggccggctccgacaaggcccttgccgatgacgaagttgagcagtccaagtccgtgtgcactgaaggcaccgccttcgatgtcccggtctacatctccccgatcgccgtggttttcaacctcaagggcgtttccgatgccggcaagcacatcaacatggacgctgccaccatcgccaagatcttcgacggcaagatcaccaagtggaacgatccggccatcgccgatcagaacaaggacctgaagctgcccgacaccgccatcaccgtggtgcaccgctccgataagtccggcaccacccagaacttcgtctcctacttcaaggacgtcacccctgacaactggacctacgacctctccgagaactggccgaacgaggttggccagggtgccaagggcacttctggcgtgatctccaccgtcaagcaggccgacggcaccatcggctacgctgacttctctcaggtcggcgacctgggcaccgtggccgtcaaggtcggcgacaagtacaacgagatttccgccgaggccggctccaaggtcattggggattccaagcaggacgacaccgttaagggtgataaccgcatcgtcatcaagatcaaccacgccaccgaggccgagggcgcttacccgattgtcctggtctcctacgacatcgtctgcccggcctacaaggacaccaagcaggctgagttcgccaaggcttggctgacctacgtgacctccgacgagggccagaaggccgctcaggatgccgccggcaccgctccgctgccctcctccctgaagtccgagatcaccaagtccatcgaggccatcaagaccaagtga

SEQ ID NO: 15051 - protein, 377 aa, Bifidobacterium longum NCC2705
MQKNILVRSIAALSGIVMLASVAACGDNTATTTDNSSSSDSTSKSTPISGNFSGAGASSQQAAVEAWIAGFQGTNPEAKIAYNPSGSGAGVQTFLTGATAWAGSDKALADDEVEQSKSVCTEGTAFDVPVYISPIAVVFNLKGVSDAGKHINMDAATIAKIFDGKITKWNDPAIADQNKDLKLPDTAITVVHRSDKSGTTQNFVSYFKDVTPDNWTYDLSENWPNEVGQGAKGTSGVISTVKQADGTIGYADFSQVGDLGTVAVKVGDKYNEISAEAGSKVIGDSKQDDTVKGDNRIVIKINHATEAEGAYPIVLVSYDIVCPAYKDTKQAEFAKAWLTYVTSDEGQKAAQDAAGTAPLPSSLKSEITKSIEAIKTK

SEQ ID NO: 15052 - DNA, 864 bp, Streptococcus mutans UA159
  CDS (1)..(864): transl_table=11
atgaaaaagaaaaaagtaactttattcgcaatgctagccctggctagtcttgtcttagcggcatgttccaattggattgataaagggcagtcaattaccagtgttggttctacggctttgcagcctttagttgaagcttcttcggatgaatttggacatgctaacattggcaaaacagttaatgttcaaggtggaggttctggtacaggactttctcaagttcaatcaggtgccattcaaattggaaatagcgatctttttgctgaagaaaaagatggtattgatgccagtaagttagtcgaccataaagttgctgttgcaggaattgctgtcattactaacaaaaaagttaaagtatcaaatttaacccttgatcaattaagaaaaattttcacgggagaatatacaaactggaaacagcttggcgggcaagatttggaaatttcgatcatcaatcgtgctgctagttcgggttcacgtgctacctttgacagtgtcgtcatgaaaggaaaaagtgccagacaaagtcaagaacaagattcaaatgggatggtgaagtcaattgtttcacagacaccgggcgctatttcttacctcgcttttgcttacgttgataagtcagtgaaaactttaaagttaaatggttatgaaccaaccgttaagaatgtcacaactaataattggccgctctggtcttatgaacacatgtatactaaaggaaaagccaaaggtttaaccaaagaatttttaaagttcatgatgagtgacaagattcaaaaaggtgttgtgaccagaatgggttatatttctgttaatgatatgaaagtggttaagcgtgcagatggcactgtaattgctaagtaa

SEQ ID NO: 15053 - protein, 287 aa, Streptococcus mutans UA159
MKKKKVTLFAMLALASLVLAACSNWIDKGQSITSVGSTALQPLVEASSDEFGHANIGKTVNVQGGGSGTGLSQVQSGAIQIGNSDLFAEEKDGIDASKLVDHKVAVAGIAVITNKKVKVSNLTLDQLRKIFTGEYTNWKQLGGQDLEISIINRAASSGSRATFDSVVMKGKSARQSQEQDSNGMVKSIVSQTPGAISYLAFAYVDKSVKTLKLNGYEPTVKNVTTNNWPLWSYEHMYTKGKAKGLTKEFLKFMMSDKIQKGVVTRMGYISVNDMKVVKRADGTVIAK

SEQ ID NO: 15054 - DNA, 1122 bp, Corynebacterium efficiens YS-314
  CDS (1)..(1122): transl_table=11
gtgaacctcatcttcaagcgttctgctgccctcgttggcgccgtggccgtcagctccttcgccctcgttgcctgtggcgactccgaagagaccgacaccaccggcaccaccgccgagaccaccggagcggcctccgctgagggactgaccggtacctccggtcagctcgtcggcgagggtgcttcctcccagcagtccgccatggactacttcggcgtccagtactccgaggctgttgacggtgcctccctcgcctacaccgcatccggctcaggctccggacgtaagaacttcgtcggtggccaggtcgccttcggcggttccgactccccgatggatgatgcgcaggccgcggaggccatggaccgttgcgatggcaacgaggcatggcacctgcccttcgttatcggcccggtcgccatcgcctacaacctgcccggcgtggaggacctgaacctgtccaccgccaccgtggcaaacatcttcaagggtgagatcaccaagtggaatgatgacgccatcgccgctgagaacgagggcgttgacctccccgacaccgacatctccgttgtctaccgctccgatgagtccggcaccaccgacaacttccagaagttcctgaccgccgctgagcctgacctgtgggagaccaccggccaggtcttcccggcgaccgtcggtgagggcgccaacggctccaacggtgttgcatcccaggtcaccgcaatcgagggtggcatcacctacgttgaggctggcttcgcacagcagcagggcctgggcatcgccaacctcgacttcggcaacggcccggttgagctcaacgccgagtccgtcggtgtggcactggacaacctggagttcctcaccgagggcaacaacatggtcgttgacaccgaggcactcttcgccgcggacgatgcaggttcctacccgctgatcctcaccacctacgagatcgtctgctccgccggctacgacgacaccacccgcgaccagatcaaggacttcctgaccgtcgcactcgactcccaggatgagaacctcgaggctctcggctacatcccggtcaccggcacccactacgaccgcctggtcgaagcagtcgcggcaatccagtaa

SEQ ID NO: 15055 - protein, 373 aa, Corynebacterium efficiens YS-314
MNLIFKRSAALVGAVAVSSFALVACGDSEETDTTGTTAETTGAASAEGLTGTSGQLVGEGASSQQSAMDYFGVQYSEAVDGASLAYTASGSGSGRKNFVGGQVAFGGSDSPMDDAQAAEAMDRCDGNEAWHLPFVIGPVAIAYNLPGVEDLNLSTATVANIFKGEITKWNDDAIAAENEGVDLPDTDISVVYRSDESGTTDNFQKFLTAAEPDLWETTGQVFPATVGEGANGSNGVASQVTAIEGGITYVEAGFAQQQGLGIANLDFGNGPVELNAESVGVALDNLEFLTEGNNMVVDTEALFAADDAGSYPLILTTYEIVCSAGYDDTTRDQIKDFLTVALDSQDENLEALGYIPVTGTHYDRLVEAVAAIQ

SEQ ID NO: 15056 - DNA, 822 bp, Vibrio vulnificus CMCP6
  CDS (1)..(822): transl_table=11
atgaaaaagacagtaatcggtgcaatcgctcttatgagtgctctgacagtgacaaccgcttcggcaaaagaaacgatctctgcagtgggttcaagcagcgtaactccactgatggaagttttctctgaaacatacatgaagaaaaacccagaagtttttattgaagttcaaggaccaggttcatcggcaggtgttaaagcggcaaaaaatggctctgcagatctcggtatgtcttcacgtgacctaaaatcgtctgagaaagaaaccgctttggttgaagaagtgattgctcgcgacggtatcgcagtggttgttaacccaaagaacacgctgaaaggcctcactgctgagcaagtttctgccatctataaaggcgaagtgacgaactggaaacaagtcggtggtgaagacaaacctatcgttgcaattactcgtgatacagcatcaggtacacgtggcgcatttgaagacattcttaaactgaagaagaaaatctcgggtaaagaagtgtctgcaatctctcaacgtgctcaagtggcaaacggtaacggtgcactgaaaacgatggttgcttcaaacccttacgcgattggttacatctcgctaggtactgttgatgagtcggttcacccgctagctatcgatggcacggatgcgtctattccaaacgtgaaaaacggttcatacaaagtcgctcgtccattccttgttctttacaagcagggcaaaccatctgctgaaacgcagaagttccttgattggatgctgacccctgaagcacaagccattgtagagaagaaaggctacatctcagttaactaa

SEQ ID NO: 15057 - protein, 273 aa, Vibrio vulnificus CMCP6
MKKTVIGAIALMSALTVTTASAKETISAVGSSSVTPLMEVFSETYMKKNPEVFIEVQGPGSSAGVKAAKNGSADLGMSSRDLKSSEKETALVEEVIARDGIAVVVNPKNTLKGLTAEQVSAIYKGEVTNWKQVGGEDKPIVAITRDTASGTRGAFEDILKLKKKISGKEVSAISQRAQVANGNGALKTMVASNPYAIGYISLGTVDESVHPLAIDGTDASIPNVKNGSYKVARPFLVLYKQGKPSAETQKFLDWMLTPEAQAIVEKKGYISVN

SEQ ID NO: 15058 - DNA, 1026 bp, Bradyrhizobium japonicum USDA 110
  CDS (1)..(1026)
atggagaccagcatgaatttcctcaaaacgatcgtcgctgccggcttggtcgccgcatcgacgacggcggcctttgctgccgatatcaccggcgccggcgcgacgttcccgttcccgatctattccaagtgggccgacgcctacaagaaagagaccggcaacggtctgaactaccagtcgatcggctccggcggcggcatcaagcagatccaggccaagaccgtgaccttcggcgccagcgacgcgccgctcaaggccgagcagctcgagaaggacggcctcgtccagtggccgatggtgatgggtgccatcgttccggtcgtcaacatcgagggcgtgaagccgggcgagatggtgttcgacggcgagacgctcgccagcatctatctcggcaagatcaccaagtgggacgatgccgcgatcaagaagctcaatccgaacctgaagctgccctcggacgcgatcaccgtggttcgccgctcggacggttcgggcaccaccttcaacttcaccaactacctctccaaggccagcgcggactggaagagcaaggtcggcgagggcacggccgtcgagtggccggtcggcgtcggcgccaagggcaacgagggcgtgtccggcaacatcggccagaccaagaactcgatcggttacgtcgagtacgcctatgccaagcagaacaagctgacctacaccggtctcgtcaacaaggccggcaagccggtgcagccgaccgtcgaggccttccaggcggccgcctcgaacgccgactgggccaaggcgcccggctactacgtcatcctgaccgaccagcccggcgagaagtcctggccgatcacggcggcgaccttcatcctcatgcacaaggatgccaccgacaaggcagcctcgcaggaagccatcaagttcttccgctgggccttcaagaacggcggcaaggcggccgaagagctcgactacatcccgatgcccgagggcgtcgtgaccctgatcgagaagacctgggctgccgagatcaagagctaa

SEQ ID NO: 15059 - protein, 341 aa, Bradyrhizobium japonicum USDA 110
METSMNFLKTIVAAGLVAASTTAAFAADITGAGATFPFPIYSKWADAYKKETGNGLNYQSIGSGGGIKQIQAKTVTFGASDAPLKAEQLEKDGLVQWPMVMGAIVPVVNIEGVKPGEMVFDGETLASIYLGKITKWDDAAIKKLNPNLKLPSDAITVVRRSDGSGTTFNFTNYLSKASADWKSKVGEGTAVEWPVGVGAKGNEGVSGNIGQTKNSIGYVEYAYAKQNKLTYTGLVNKAGKPVQPTVEAFQAAASNADWAKAPGYYVILTDQPGEKSWPITAATFILMHKDATDKAASQEAIKFFRWAFKNGGKAAEELDYIPMPEGVVTLIEKTWAAEIKS

SEQ ID NO: 15060 - DNA, 888 bp, Clostridium tetani E88
  CDS (1)..(888): transl_table=11
atggagggttttcatatgaaaaaaaacaacctaaaatttttgattgtaactctattaattataacaacatcaatagtatttgcagcctgtagtggaaaaaataattcttctaaaggagaaaaaataggaactattacttctttaggttccacagcattaaaaccgttagtagaagaatcagctaaaaaattcaaagaaaaaaatccaaaggttaatataaatgttcaaggaggaggaagtggtgctggaattagccaagtatctgaaggaacggtagaaataggaaattctgatgttccagcagaaacaaagttaaaagataaggagaaattaaagcaattagtagaccataaagtatgtgctataggcttttctgttgtgactcataaagatgtaaaagtggacaacttaacaaaggagcaaatacagggtatatttacaggaaaatatactaactggaaagaagtagggggagaagacttacaaataaatgtagtgaatagaccaaaatcttcaggaacaagagctacttttaaagatacaataatgggagatgagaatgaaaaggaagggcttggaatagttcaggactcaagtgatgcagtttctaaatcaatacaaagcactaaaggctcaataagttatcttgctttatcctatttaacagaagaaaaatcacaagaattaaaattattaaaaattgataatatggaagcttcaaaggaaaatataataaataaaaaatatcctttttggtcctatgaacacatgtacacaaaaggggaagcacaaggtttagtaaaagaatttcttgattatatgacaagtgatgacaataaagcagtagttgaaaaattaggctatattcctatgggaaatttaaaataa

SEQ ID NO: 15061 - protein, 295 aa, Clostridium tetani E88
MEGFHMKKNNLKFLIVTLLIITTSIVFAACSGKNNSSKGEKIGTITSLGSTALKPLVEESAKKFKEKNPKVNINVQGGGSGAGISQVSEGTVEIGNSDVPAETKLKDKEKLKQLVDHKVCAIGFSVVTHKDVKVDNLTKEQIQGIFTGKYTNWKEVGGEDLQINVVNRPKSSGTRATFKDTIMGDENEKEGLGIVQDSSDAVSKSIQSTKGSISYLALSYLTEEKSQELKLLKIDNMEASKENIINKKYPFWSYEHMYTKGEAQGLVKEFLDYMTSDDNKAVVEKLGYIPMGNLK

SEQ ID NO: 15062 - DNA, 876 bp, Lactobacillus plantarum WCFS1
  CDS (1)..(876): transl_table=11
atgagaaaaagtcgggtcatccaattaatcgtgttaatcgcgatcattggactagttggattagggtacacacatcgtgatcgaactagtgccagtgaatcaattaccgcggttggatcaacggccttacagccactggttgaagcagccggtgaacaatacagcagcaaccataccggtgtgtttatcaatgtgcagggtggtggctctggaacgggactcagtcaaattcaggcgggggccgtggcaatcggtaattctgatatttttgccgaagaacagtctggcattacagcgagcaagttaattgatcaccgggtagccgtcgtcggtattgcccccatcgttaataaaaaggcgggcattaccaatttgacgcagcagcaactcattcagatttttactggcaaggtcacgaattggcgtgaagttggtggacgtaatttaccgattacgttaattaaccgtgctcaaggctccggaacccggaagacatttgagcgatacgccttaaagggtaatcagagtgttgattcccaagaacaagattcgtcaggattagctcggtcaattgttgctagtacacctggcgcaattagttatgtggctttttcttacttagacaactcagtccagaccgtcaatgttgatggtattcggccaaccgaaaaaaatgtgcggaataatcgctggtacatctggtcctacgaacatttatatacggggaagcaccccaatcagttaaccaaaaaatttattgattacattttatcaaccgctgttcagcagaagttagtcaagcagttaggttatatttcggtccatgacatgcaagtacagcggaatgcggccggtaaagtttcagttatgaaatga

SEQ ID NO: 15063 - protein, 291 aa, Lactobacillus plantarum WCFS1
MRKSRVIQLIVLIAIIGLVGLGYTHRDRTSASESITAVGSTALQPLVEAAGEQYSSNHTGVFINVQGGGSGTGLSQIQAGAVAIGNSDIFAEEQSGITASKLIDHRVAVVGIAPIVNKKAGITNLTQQQLIQIFTGKVTNWREVGGRNLPITLINRAQGSGTRKTFERYALKGNQSVDSQEQDSSGLARSIVASTPGAISYVAFSYLDNSVQTVNVDGIRPTEKNVRNNRWYIWSYEHLYTGKHPNQLTKKFIDYILSTAVQQKLVKQLGYISVHDMQVQRNAAGKVSVMK

SEQ ID NO: 15064 - DNA, 1071 bp, Tropheryma whipplei str. Twist
  CDS (1)..(1071): transl_table=11
gtgtgtcgcttggatagaaagctttttctcgtatttgcttcagttgtaactcttttttctgtttcatgttttggaaactccaaaacctctttagaggggtcggtatcagtaactggggcttctagtcagagcgtggcccaatcagtttggatatcagaatttcgcaagatccatccgggtgtaacagtcaactatgaacctcaggggtctggtgcggggcgtagggcattcttgtctggtgcagttgatctggccgcgacagatgttccctttgctgaccccgagctcacgggggactttaagggttgtactgcggatggtccgcttcagcttcctgtctatatctctccgatcgcgatagcttataaccttccaggggtctctgacctaaaacttgacgcttccgtaattgctgggattttcagtggggcaataactacttgggattcgcctagaatttctgctctcaatcctggcatagagttgccgaataaaaagataaccgctgtgcaccgctcggataattcggggactacagagaatttttcagattatattcataccaatgcccccagtgattggccccataaaccatcaactaagttcccttatacatacggtgaggccgctaaaggtacctctggggtagcgcaggttttgaaagctacagttggctctataggttatttggatctctctttggctcgtggaatgtctcttgcgaccctgaaggttggttcgggcttttcaaaaccatcggccgagagtgctaccctgacagtgagcgactctgaatttccgagcaagaatccgaatagtttttctgtaaagataaatcgcaggacagagaaagctggcgcctggccccttatccttgtcagttatgtcgttgcttgcgttggctacaaaaaaggcaacaaagacgctattttctcgtatctcaagtttattctttctgaaaaagcccagggtcaagcagcacaacaggctggctctgctccattaccggaatctctttcaaagaaacttctcgagcttgtcaataaaatcgctgagaaaaacggcgcctaa

SEQ ID NO: 15065 - protein, 356 aa, Tropheryma whipplei str. Twist
MCRLDRKLFLVFASVVTLFSVSCFGNSKTSLEGSVSVTGASSQSVAQSVWISEFRKIHPGVTVNYEPQGSGAGRRAFLSGAVDLAATDVPFADPELTGDFKGCTADGPLQLPVYISPIAIAYNLPGVSDLKLDASVIAGIFSGAITTWDSPRISALNPGIELPNKKITAVHRSDNSGTTENFSDYIHTNAPSDWPHKPSTKFPYTYGEAAKGTSGVAQVLKATVGSIGYLDLSLARGMSLATLKVGSGFSKPSAESATLTVSDSEFPSKNPNSFSVKINRRTEKAGAWPLILVSYVVACVGYKKGNKDAIFSYLKFILSEKAQGQAAQQAGSAPLPESLSKKLLELVNKIAEKNGA

SEQ ID NO: 15066 - DNA, 1071 bp, Tropheryma whipplei TW08/27
  CDS (1)..(1071): transl_table=11
gtgtgtcgcttggatagaaagctttttctcgtatttgcttcagttgtaactcttttttctgtttcatgttttggaaactccaaaacctctttagaggggtcggtatcagtaactggggcttctagtcagagcgtggcccaatcagtttggatatcagaatttcgcaagatccatccgggtgtaacagtcaactatgaacctcaggggtctggtgcggggcgtagggcattcttgtctggtgcagttgatctggccgcgacagatgttccctttgctgaccccgagctcacgggggactttaagggttgtactgcggatggtccgcttcagcttcctgtctatatctctccgatcgcgatagcttataaccttccaggggtctctgacctaaaacttgacgcttccgtaattgctgggattttcagtggggcaataactacttgggattcgcctagaatttccgctctcaaccctggcatagagttgccgagtaaaaagataaccgctgtgcaccgctcggataattcggggactacggagaatttttcagattatatccatactaatgcccccagtgattggccccataaaccatcaactaagttcccttacacatacggtgaggccgctaaaggtacctctggggtagcgcaggttttgaaagctacagttggctctataggttatttggatctctctttggctcgtggaatgtctcttgcgaccctgaaggttggttcgggcttttcaaaaccatcggccgagagtgctaccctgacagtgagcgactctgaatttccgagcaagaatccgaatagtttttctgtaaagataaatcgcaggacagagaaagctggcgcctggcctcttatccttgtcagttatgtcgttgcttgcgttggttacaaaaaaggcaacaaagacgctattttctcgtatctcaagtttattctttctgaaaaagcccagggtcaagcagcacaacaggctggctctgctccattgccggaatctctttcaaagaaactcctcgagcttgtcaataaaatcgctgagaaaaacggcgcctaa

SEQ ID NO: 15067 - protein, 356 aa, Tropheryma whipplei TW08/27
MCRLDRKLFLVFASVVTLFSVSCFGNSKTSLEGSVSVTGASSQSVAQSVWISEFRKIHPGVTVNYEPQGSGAGRRAFLSGAVDLAATDVPFADPELTGDFKGCTADGPLQLPVYISPIAIAYNLPGVSDLKLDASVIAGIFSGAITTWDSPRISALNPGIELPSKKITAVHRSDNSGTTENFSDYIHTNAPSDWPHKPSTKFPYTYGEAAKGTSGVAQVLKATVGSIGYLDLSLARGMSLATLKVGSGFSKPSAESATLTVSDSEFPSKNPNSFSVKINRRTEKAGAWPLILVSYVVACVGYKKGNKDAIFSYLKFILSEKAQGQAAQQAGSAPLPESLSKKLLELVNKIAEKNGA

SEQ ID NO: 15068 - DNA, 1026 bp, Pseudomonas syringae pv. tomato str. DC3000
  CDS (1)..(1026): transl_table=11
gtgatactgctgactaaaaaacgcttgtcgcttctgatcgcttcgctgtgcctcagcggtgtggcccacgcgactgacgtaaccggcgctggttcgagtttcgttttcccggttatttcggcgtggtcccaggactacagcaaaagcaacgattccaaaaatcgcatcaactaccagtccatcggttcgggcggtggtatcgctcagatcaaggcggctaccgttgacttcggcgcatccgatgccccgatgtccgctgaggacctgcaagccggtggcctgggtcagttcccgagcgtgatcggcggtatcgtgccgatcgtcaacgtcgaaggcgttgaaagcggtgagttgaaactggacggcgcattgcttgccaagatcttcatgggcgaagtcaagaagtggaacgaccctgcaatcgtcgctctgaacccaggcgtcaagctgcctgagaccgcgatcactgttgttcaccgttcggacggctcgggcactacctacaacttcaccaactacctgagcaaagtcagcccggagtggaacgagaagctgaagtttggttcgaccgtgcaatggcctgccggtgtgggcggtaaaggtaacgaaggtgtttctgcctacgtgaagcagatcaagggttcgatcggctacgtcgagtactcgtacgcggtcaccaacaagctgtcctacacccagttgaagaacgctgccggcaaattcatcaagccagacgccaaggcttttgctgctgctgccgactcggccaagtgggaagatgccaaggacttcaacctgatcatgaccaacgctccgggtgacaccgcgtggccaatcaccgctaccacctggatcatcatgtacaagaaagccaagaacgaagagaaaagcgctgctgctttcgacttcttcaaatggtccctggaaaacggccagcaacaggccgagaaactggactatgtcgctttgccgaaatcgctggttgatcgcgtagagaactactggaaaacggaattcaccaagtaa

SEQ ID NO: 15069 - protein, 341 aa, Pseudomonas syringae pv. tomato str. DC3000
MILLTKKRLSLLIASLCLSGVAHATDVTGAGSSFVFPVISAWSQDYSKSNDSKNRINYQSIGSGGGIAQIKAATVDFGASDAPMSAEDLQAGGLGQFPSVIGGIVPIVNVEGVESGELKLDGALLAKIFMGEVKKWNDPAIVALNPGVKLPETAITVVHRSDGSGTTYNFTNYLSKVSPEWNEKLKFGSTVQWPAGVGGKGNEGVSAYVKQIKGSIGYVEYSYAVTNKLSYTQLKNAAGKFIKPDAKAFAAAADSAKWEDAKDFNLIMTNAPGDTAWPITATTWIIMYKKAKNEEKSAAAFDFFKWSLENGQQQAEKLDYVALPKSLVDRVENYWKTEFTK

SEQ ID NO: 15070 - DNA, 828 bp, Vibrio parahaemolyticus RIMD 2210633
  CDS (1)..(828): transl_table=11
atgttacgttttactgtggcaactttactagccatggctgtctcccttccttctgctatggcgaaagaagtcaacatttcaggttcaacttccgttgctcgcgtgatggacgtactcgccgaagaatacaacaagacacacccagataattacatcgctgtacagggcattggttctagtgcggggatcaccatggtgaacaaaggtgtcgtgaaacttggtatgagctctcgctatctgacagaaagcgaaaaaggcgaagacttgaatgtgtttccaattgcttacgatggccttgccgttgttgtgaaccgtacaaactctgtgactaacctttcagcacaacaactgtttgacatctacaaaggcgaaatcaaaaactggaaagaagtcggcggcgcggatcaaccgatagcagttgtcacgcgagaagcatcttctggctcgcgctacagctttgagagtttgttgggtctaaccaaaatcattaacgaccgtctggtttctgatatcagcccaaacaacttagttgtaaacagcaacagcatggttaaaaccattgtgaaccataacacacgtgcgattggttttatttcggtggggtctgtagacctttctgtgaaggcgattcagtttaacgggattgaaccaacagcagcgaacatcgcaaatcacaaatacaaactggctcgaccatttttggtgctttacaaagtcgactcgctagatcaagcaggcaaagactttgtcgcgttcctaaaatcggaagcgggacaaaaaaccattgctgactacgggtacataccggttaaaaactttaaccagtaa

SEQ ID NO: 15071 - protein, 275 aa, Vibrio parahaemolyticus RIMD 2210633
MLRFTVATLLAMAVSLPSAMAKEVNISGSTSVARVMDVLAEEYNKTHPDNYIAVQGIGSSAGITMVNKGVVKLGMSSRYLTESEKGEDLNVFPIAYDGLAVVVNRTNSVTNLSAQQLFDIYKGEIKNWKEVGGADQPIAVVTREASSGSRYSFESLLGLTKIINDRLVSDISPNNLVVNSNSMVKTIVNHNTRAIGFISVGSVDLSVKAIQFNGIEPTAANIANHKYKLARPFLVLYKVDSLDQAGKDFVAFLKSEAGQKTIADYGYIPVKNFNQ

SEQ ID NO: 15072 - DNA, 822 bp, Vibrio parahaemolyticus RIMD 2210633
  CDS (1)..(822): transl_table=11
atgaaaaagacagtaatcggtgcaatcgcacttctaggcgcaatggcagtgactcctgtttctgctaaagaaactatctctgcagtgggttctagcagcgtaactccactgatggaagttttctctgaaacatacatgaagacgaacccgaacgtattcatcgaggttcaaggccctggctcttcagctggcgttaaagcggcgaaaaatggttcagcagacttaggtatgtcttctcgtaacctgaaggaatcagaaaaagagccaacacttgttgaagaagtggttgctcgtgacggtatcgcggttgttgttaacccacaaaacaagctagcaggtctaactgctgagcaagtgacagcaatctacaaaggcgaagtatcaaactggaaagaagtgggtggcgaagacaagccaatcgtagcaatcactcgtgataccgcttctggtactcgtggtgcatttgaagacatcatggcgctgaaaatgaaaatttctggcaagaaagtttcagcaatctctcaacgtgctcaagttgctaacggtaacggcgcacttaaaacaatggttgcgtctaacccatacgcaatcggctacatctcactaggtacagtagacaacacagttaacgctctagcaatcgacggtgttgatgcaacagtcgctaacgttaaaaacggttcttacaaagtagctcgcccattccttgtgctttacaaagaaggcaagccatctgcagaaacgcaaaaattcctagattggatgctaactgaagatgcgcaaaagctagttgaccaaaacggttacatctcagttcactaa

SEQ ID NO: 15073 - protein, 273 aa, Vibrio parahaemolyticus RIMD 2210633
MKKTVIGAIALLGAMAVTPVSAKETISAVGSSSVTPLMEVFSETYMKTNPNVFIEVQGPGSSAGVKAAKNGSADLGMSSRNLKESEKEPTLVEEVVARDGIAVVVNPQNKLAGLTAEQVTAIYKGEVSNWKEVGGEDKPIVAITRDTASGTRGAFEDIMALKMKISGKKVSAISQRAQVANGNGALKTMVASNPYAIGYISLGTVDNTVNALAIDGVDATVANVKNGSYKVARPFLVLYKEGKPSAETQKFLDWMLTEDAQKLVDQNGYISVH

SEQ ID NO: 15074 - DNA, 1110 bp, Bacteroides thetaiotaomicron VPI-5482
  CDS (1)..(1110): transl_table=11
atggcaacaattagaaacaaagaaatcagtaaaacaggcggtgtatgcctgtcattcgtagctgtactggcaatagcggcagcaactttatttaccagtggaaaaccggttgaggagttatccgaaaatgccgctgtgggtcgtaaatcggtgattaccgccgccggagccacattgccgttacctttctacagcgaggcgttcaagatgtactgggagaagaacgacatccccgttacttatgccggtatcggtacggaacgcggattcagaagcctgaagaatcaacagatagactttgcaggtgtggacgttccacctaccaaagcggaactggacagtctgccggtaaaatctatccttgtacctacgtgcatgggggcagtgactatcgcctataacctggaaggtgtggataacctgcgcctgacgggagagctgatagcagatatctatatgggtaagatattgaaatggaatgatgcaaggattgcggcagtgaacgccggcaagcaattgcccgacaaggaaatctatcccgttttccgtctggacggtagcggaacgacttatatcttcagtgactacctgacgaaagtgagtacggactggaaggccaagattggcacgggaaaagccttgacctttccacgtggagtagcggctacgggaaatacgggcgtggccggactggtaggtaaagttccgggtgctatcggatacgtggcttcggaatatgcagccagcttcaatacgcagagtgcatggctgaaaaacgctgccggaaactttgtgcagcccacttcggaaagcgttaccgctgtcgcaagcgtgggggatgctacgggcatgattaccgattcagaggttgccgacgcttatcctatcagttgcttcacatgggtggtactttataaggagcagaactatgccgggcgtagtcgcagtgaagcggaagaaaccgtgaagctgctggaatggctgatcagcccggaagctcagactatcactacccaggtgcaatgttcaccgctgccggaaaaggctgtggaatatgccaagaacatgttgaaggaggtgacatacgacggaaaagcattgagaaagtaa

SEQ ID NO: 15075 - protein, 369 aa, Bacteroides thetaiotaomicron VPI-5482
MATIRNKEISKTGGVCLSFVAVLAIAAATLFTSGKPVEELSENAAVGRKSVITAAGATLPLPFYSEAFKMYWEKNDIPVTYAGIGTERGFRSLKNQQIDFAGVDVPPTKAELDSLPVKSILVPTCMGAVTIAYNLEGVDNLRLTGELIADIYMGKILKWNDARIAAVNAGKQLPDKEIYPVFRLDGSGTTYIFSDYLTKVSTDWKAKIGTGKALTFPRGVAATGNTGVAGLVGKVPGAIGYVASEYAASFNTQSAWLKNAAGNFVQPTSESVTAVASVGDATGMITDSEVADAYPISCFTWVVLYKEQNYAGRSRSEAEETVKLLEWLISPEAQTITTQVQCSPLPEKAVEYAKNMLKEVTYDGKALRK

SEQ ID NO: 15076 - DNA, 1107 bp, Streptomyces avermitilis MA-4680
  CDS (1)..(1107)
atgaaccggcgggccctcaccctcggtgctctcgccgtctccggcgccctggccctcacggcgtgcggctctgacgacaccggcaagagcaacaccgacgccacgacgtcgtccaacagcgccatcaagtgcgacaacgccaagggccagctccaggcctccggctcgtccgcgcagaagaacgcgatcgacgcgtgggtcaaggcgtacaccgcgagctgcaagggcgtgcagatcaactacaacccgacgggttcgggtgccggtgtcaccgcgttcacccagggccagacggcgttcgccggttcggactcgccgctgaagcccgaagaggtcacggcctccaagaaggcctgcggcggcagccaggccatcgacctgccgatggtcggcggcccgatcgcgatcggcttccacctgtccggcgtggacagcctgaccctggacgccgccaccctcgccaagatcttcgacggcaagatcacgaagtgggacgacgaggcgatcgcgaagctgaacccgagcgccaagctccccagcaccaagatccaggcgttccaccgctcggacgagtccggcaccacggacaacttcaccaagtacctgaaggccgtcgccccctccgactggaagtactccggcggcaaggcctggcaggccaagggcggccagtccgcgcagggctcctccggcctggcccagcaggtgaagcagaccgagggcgcgatctcgtacttcgagctctcgtacgccgccgacggcatcagcaccgtcgacctgaagacgggcgccgccaccccggtgaaggccagcgtcgagaacgccaccaaggccatctcgaccgccaaggtcgccggcaccggcaaggacctgtcgctgtccctgaactacaagccgaccgaggagggcgcctacccgctcaccctggtcacctacgagatcgtctgcgagaagggcaacaaggcggacaccctgcccgccaccaagtccttcctcacctacatcgcgagcgaggacggtcagaagctgctgaccgacgccaagtacgcgccgatccccgacgagatcatctccaaggtccgcacgaccatctcgagcctgagctga

SEQ ID NO: 15077 - protein, 368 aa, Streptomyces avermitilis MA-4680
MNRRALTLGALAVSGALALTACGSDDTGKSNTDATTSSNSAIKCDNAKGQLQASGSSAQKNAIDAWVKAYTASCKGVQINYNPTGSGAGVTAFTQGQTAFAGSDSPLKPEEVTASKKACGGSQAIDLPMVGGPIAIGFHLSGVDSLTLDAATLAKIFDGKITKWDDEAIAKLNPSAKLPSTKIQAFHRSDESGTTDNFTKYLKAVAPSDWKYSGGKAWQAKGGQSAQGSSGLAQQVKQTEGAISYFELSYAADGISTVDLKTGAATPVKASVENATKAISTAKVAGTGKDLSLSLNYKPTEEGAYPLTLVTYEIVCEKGNKADTLPATKSFLTYIASEDGQKLLTDAKYAPIPDEIISKVRTTISSLS

SEQ ID NO: 15078 - DNA, 1113 bp, Mycobacterium bovis AF2122/97
  CDS (1)..(1113): transl_table=11
gtgaagttcgcccgatccggcgcagcggtaagcctgttggccgccggcacactggtgttgacagcatgcggcggtggcaccaacagctcgtcgtcaggcgcaggcggcacgtctgggtcggtgcactgcggcggcaagaaggagctccactccagcggctcgaccgcacaagaaaatgccatggagcagttcgtctatgcctacgtgcgatcgtgcccgggctacacgttggactacaacgccaacgggtccggtgccggggtgacccagtttctcaacaacgaaaccgatttcgccggctcggatgtcccgttgaatccgtcgaccggtcaacctgaccgggcggcggagcggtgcggttccccggcatgggacctgccgacggtgttcggcccgatcgcgatcacctacaatatcaagggcgtgagcacgctgaatcttgacggacccactaccgccaagattttcaacggcaccatcaccgtgtggaatgatccacagatccaagccctcaactccggcaccgacctgccgccaacaccgattagcgttatcttccgcagcgacaagtccggtacgtcggacaacttccagaaatacctcgacggcgcatccaacggggcgtggggcaaaggcgccagcgaaacgttcaacgggggcgtcggcgtcggcgccagcgggaacaacggcacgtcggccctactgcagacgaccgacgggtcgatcacctacaacgagtggtcgtttgcggtgggtaagcagttgaacatggcccagatcatcacgtcggcgggtccggatccagtggcgatcaccaccgagtcggtcggcaagacaatcgccggggccaagatcatgggacaaggcaacgacctggtattggacacgtcgtcgttctacaggcccacccagcctggctcttacccgatcgtgctggcgacctatgagatcgtctgctcgaaatacccggatgcgacgaccggtactgcggtaagggcgtttatgcaagccgcgattggtccaggccaagaaggcctggaccaatacggctccattccgttgcccaaatcgttccaagcaaaattggcggccgcggtgaatgctatttcttga

SEQ ID NO: 15079 - protein, 370 aa, Mycobacterium bovis AF2122/97
MKFARSGAAVSLLAAGTLVLTACGGGTNSSSSGAGGTSGSVHCGGKKELHSSGSTAQENAMEQFVYAYVRSCPGYTLDYNANGSGAGVTQFLNNETDFAGSDVPLNPSTGQPDRAAERCGSPAWDLPTVFGPIAITYNIKGVSTLNLDGPTTAKIFNGTITVWNDPQIQALNSGTDLPPTPISVIFRSDKSGTSDNFQKYLDGASNGAWGKGASETFNGGVGVGASGNNGTSALLQTTDGSITYNEWSFAVGKQLNMAQIITSAGPDPVAITTESVGKTIAGAKIMGQGNDLVLDTSSFYRPTQPGSYPIVLATYEIVCSKYPDATTGTAVRAFMQAAIGPGQEGLDQYGSIPLPKSFQAKLAAAVNAIS

SEQ ID NO: 15080 - DNA, 1125 bp, Mycobacterium bovis AF2122/97
  CDS (1)..(1125): transl_table=11
gtgaaaattcgtttgcatacgctgttggccgtgttgaccgctgcgccgctgctgctagcagcggcgggctgtggctcgaaaccaccgagcggttcgcctgaaacgggcgccggcgccggtactgtcgcgactacccccgcgtcgtcgccggtgacgttggcggagaccggtagcacgctgctctacccgctgttcaacctgtggggtccggcctttcacgagaggtatccgaacgtcacgatcaccgctcagggcaccggttctggtgccgggatcgcgcaggccgccgccgggacggtcaacattggggcctccgacgcctatctgtcggaaggtgatatggccgcgcacaaggggctgatgaacatcgcgctagccatctccgctcagcaggtcaactacaacctgcccggagtgagcgagcacctcaagctgaacggaaaagtcctggcggccatgtaccagggcaccatcaaaacctgggacgacccgcagatcgctgcgctcaaccccggcgtgaacctgcccggcaccgcggtagttccgctgcaccgctccgacgggtccggtgacaccttcttgttcacccagtacctgtccaagcaagatcccgagggctggggcaagtcgcccggcttcggcaccaccgtcgacttcccggcggtgccgggtgcgctgggtgagaacggcaacggcggcatggtgaccggttgcgccgagacaccgggctgcgtggcctatatcggcatcagcttcctcgaccaggccagtcaacggggactcggcgaggcccaactaggcaatagctctggcaatttcttgttgcccgacgcgcaaagcattcaggccgcggcggctggcttcgcatcgaaaaccccggcgaaccaggcgatttcgatgatcgacgggcccgccccggacggctacccgatcatcaactacgagtacgccatcgtcaacaaccggcaaaaggacgccgccaccgcgcagaccttgcaggcatttctgcactgggcgatcaccgacggcaacaaggcctcgttcctcgaccaggctcatttccagccgctgccgcccgcggtggtgaagttgtctgacgcgttgatcgcgacgatttccagctag

SEQ ID NO: 15081 - protein, 374 aa, Mycobacterium bovis AF2122/97
MKIRLHTLLAVLTAAPLLLAAAGCGSKPPSGSPETGAGAGTVATTPASSPVTLAETGSTLLYPLFNLWGPAFHERYPNVTITAQGTGSGAGIAQAAAGTVNIGASDAYLSEGDMAAHKGLMNIALAISAQQVNYNLPGVSEHLKLNGKVLAAMYQGTIKTWDDPQIAALNPGVNLPGTAVVPLHRSDGSGDTFLFTQYLSKQDPEGWGKSPGFGTTVDFPAVPGALGENGNGGMVTGCAETPGCVAYIGISFLDQASQRGLGEAQLGNSSGNFLLPDAQSIQAAAAGFASKTPANQAISMIDGPAPDGYPIINYEYAIVNNRQKDAATAQTLQAFLHWAITDGNKASFLDQAHFQPLPPAVVKLSDALIATISS

SEQ ID NO: 15082 - DNA, 993 bp, Prochlorococcus marinus subsp. marinus str. CCMP1375
  CDS (1)..(993): transl_table=11
atgtccttctctaagaaggcgtcattatttgtatccattgccgctcttgcagctggcattgttgcttgtgggtcaaataattccgcaacaaacattaggcttagcggagcaggtgcttccttcccttccaaaatctacacccggtggtttgctgaccttaacaatgaaggtggtcctagggttaactaccaagctgttggctctggctctgggcgaaaagctttcattgatgaaaccgttgattttggagcatcggatgacccaatgaaagcccaagatatcgcaaaagttaaacgaggattagttcagatcccaatggtgggagggacagtcgcttttggatataacaatcctgattgcgaactcaagcttactcagagacaagcagttcgtattgcaataggcaaaatcaataattggagcgagcttgggtgccctgctcaaaagattacttggattcaccgttctgatggctctggcacaaccaaggcttttaccaattcaatggaagctttctctaaagagtggacattaggaactggtaaatccgtagcatggcctgtaggtattggagggaaaggcaatgcaggggttgctggagttattaaaaacacccccggtgctattggttatgtaaaccagtcttatatcaaaggaaatgtcagagccgctgctttacaaaatttgtctggtgagtttctaaaaccaaacataaattctggtgctaaagcccttaatggaatcactttagatccaaatctggctggtagcaacccaaacccaacagcaaaaggtgcctatccaattgctactttaacttgggtccttgcttatgaaactggcaatggctctaaaacagaggcaattatagcttccttaggataccttcttagcgacaaggctcaagccaaggctcctagcctaggatttgttcctctaacaggagatatccttatgaaagctcgtaaagctgtgaccagaattgggaagtaa

SEQ ID NO: 15083 - protein, 330 aa, Prochlorococcus marinus subsp. marinus str. CCMP1375
MSFSKKASLFVSIAALAAGIVACGSNNSATNIRLSGAGASFPSKIYTRWFADLNNEGGPRVNYQAVGSGSGRKAFIDETVDFGASDDPMKAQDIAKVKRGLVQIPMVGGTVAFGYNNPDCELKLTQRQAVRIAIGKINNWSELGCPAQKITWIHRSDGSGTTKAFTNSMEAFSKEWTLGTGKSVAWPVGIGGKGNAGVAGVIKNTPGAIGYVNQSYIKGNVRAAALQNLSGEFLKPNINSGAKALNGITLDPNLAGSNPNPTAKGAYPIATLTWVLAYETGNGSKTEAIIASLGYLLSDKAQAKAPSLGFVPLTGDILMKARKAVTRIGK

SEQ ID NO: 15084 - DNA, 1041 bp, Bordetella pertussis Tohama I
  CDS (1)..(1041): transl_table=11
atgttcaaacgtgtcttcaaacagatttcgatcggcgccgcgctgagcgcagccgttttcgccgcccaggccgccgatgtgaccggcgcgggcgcgtcgttcccgtaccccatctacgccaagtgggcctccgactacaaggctgccaccaacaacgccgtcaactaccagtccatcggttcgggcggcggccagcagcagatcaaggccaagacggtcgacttcggcgcctcggatgacccgctcaaggccgaagacctggaaaagaatggcctgctgcagttcccggccgtgatcggcggcaccgtgccggtgatcaacatcgacggcatcgcgccgggccagctgaagctgtcgggcgccgtgctggccgacatcttcctgggcaaggtcaagaagtgggacgacgccgccatcaaggcgctcaaccccgacctgaagctgccctcggccgacatcgtggtggtgcaccgttcggacggttcgggcacgaccttcggctggaccaactacctgtcgaaagtgtcgtccgcctggaaagagcaagtgggcgagggcaaggccgtcaagtggcccaccggccagggcggcaagggcaacgaaggcgtggccgcctacgtgggccagctgaagaactcgatcggttatgtcgagtacgcctacgccaagcagaacaagctggcctggacgcagctgcagaacaaggacggcaagttcgtccagcccgagcagaaggcgttcgccgccgccgccgccaatgccgactggaagagcgcgcccggcatgggcgtggtgctgaccaacgagccgggcgccgattcgtggcccgtgaccgccgctaccttcatcctggtgcacaagagccaggacaagccggtccagggccgcgcggtgctggagttcttcgactgggcgttcaagaacggcgccaagtcggccgaagcgctggactacgtgccgctgcccgaggccgtgaccacggaaatccgcgccgcctggggtgaagtcaagggcgccgacggcaaggccgtgtggcagtaa

SEQ ID NO: 15085 - protein, 346 aa, Bordetella pertussis Tohama I
MFKRVFKQISIGAALSAAVFAAQAADVTGAGASFPYPIYAKWASDYKAATNNAVNYQSIGSGGGQQQIKAKTVDFGASDDPLKAEDLEKNGLLQFPAVIGGTVPVINIDGIAPGQLKLSGAVLADIFLGKVKKWDDAAIKALNPDLKLPSADIVVVHRSDGSGTTFGWTNYLSKVSSAWKEQVGEGKAVKWPTGQGGKGNEGVAAYVGQLKNSIGYVEYAYAKQNKLAWTQLQNKDGKFVQPEQKAFAAAAANADWKSAPGMGVVLTNEPGADSWPVTAATFILVHKSQDKPVQGRAVLEFFDWAFKNGAKSAEALDYVPLPEAVTTEIRAAWGEVKGADGKAVWQ

SEQ ID NO: 15086 - DNA, 1041 bp, Bordetella bronchiseptica RB50
  CDS (1)..(1041)
atgttcaaacgtgtcttcaaacagatttcgatcggcgccgcgctgagcgcagccgttttcgccgcccaggccgccgatgtgaccggcgcgggcgcgtcgttcccgtaccccatctacgccaagtgggcctccgactacaaggctgccaccaacaacgccgtcaactaccagtccatcggttcgggcggcggccagcagcagatcaaggccaagacggtcgacttcggcgcctcggatgacccgctcaaggccgaagacctggaaaagaacggcctgttgcagttcccggccgtgatcggcggcaccgtgccggtgatcaacgtcgacggcatcgcgccgggccagctgaagctgtcgggcgccgtgctggccgacatcttcctgggcaaggtcaagaagtgggacgacgccgccatcaaggcgctcaaccccgacctgaagctgccctcggccgacatcgtggtggtgcaccgttcggacggttcgggcacgaccttcggctggaccaactacctgtcgaaagtgtcgcccgcctggaaagagcaagtgggcgagggcaaggccgtcaagtggcccaccggccagggcggcaagggcaacgaaggcgtggccgcctacgtgggccagctgaagaactcgatcggttatgtcgagtacgcctacgccaagcagaacaagctggcctggacgcagctgcagaacaaggacggcaagttcgtccagcccgagcagaaggcgttcgccgctgccgccgccaatgccgactggaagagcgcgcccggcatgggcgtggtgctgaccaacgagccgggcgccgattcgtggcccgtgaccgccgccaccttcatcctggtgcacaagagccaggacaagccggtccagggccgcgcggtgctggagttcttcgactgggcgttcaagaacggcgccaagtcggccgaagcgctggactacgtgccgctgcccgaggccgtgaccacggaaatccgcgccgcctggggtgaagtcaagggcgccgacggcaaggccgtgtggcagtaa

SEQ ID NO: 15087 - protein, 346 aa, Bordetella bronchiseptica RB50
MFKRVFKQISIGAALSAAVFAAQAADVTGAGASFPYPIYAKWASDYKAATNNAVNYQSIGSGGGQQQIKAKTVDFGASDDPLKAEDLEKNGLLQFPAVIGGTVPVINVDGIAPGQLKLSGAVLADIFLGKVKKWDDAAIKALNPDLKLPSADIVVVHRSDGSGTTFGWTNYLSKVSPAWKEQVGEGKAVKWPTGQGGKGNEGVAAYVGQLKNSIGYVEYAYAKQNKLAWTQLQNKDGKFVQPEQKAFAAAAANADWKSAPGMGVVLTNEPGADSWPVTAATFILVHKSQDKPVQGRAVLEFFDWAFKNGAKSAEALDYVPLPEAVTTEIRAAWGEVKGADGKAVWQ

SEQ ID NO: 15088 - DNA, 972 bp, Prochlorococcus marinus subsp. pastoris str. CCMP1986
  CDS (1)..(972): transl_table=11
atgagcattgcaaagaaagctctcctattcacttctgcgctagctcttatagctggtccaagtgtaaccgcttcaacaagattgagtggagctggtgcttcatttccagcaaaaatctatactagatggttttctgatttagcaaaatcaggtggaccaagagttaattaccaggcagttggttctggttctggaagaaaagcatttattgatcaaactgttaacttcggtgcatcagatgatccaatgaaagataaggatattgcaaaggttactagaggtctagttcaaattcctatggttggtggaactattgctttcggatacaactatgattgcgatttaaaacttactcaagaacaagcagtacaggttgcaatgggtatggttaaaaactggaaagaattaggttgtaaagccggcaaactaacttgggcacatcgctctgatggttcaggaactactaaggctttcacaaactctatggaagcattttcaccaacatggactctaggaactggtaaatcagttaagtggccagcaggtgttggagcaaaaggaaattcaggtgttgccggtgtaattcaaaatactccaggtgcaattggttatgttaaccagtcctatattaaaggtaatgttaaggcagcagcacttcagaatttatcaggtgaatttttaaaaccatctgttgaagctggagctaaagctcttaacggcattactttagatgaaaatcttgcgggtaagaatcctaatccaacagcaaaaggtgcatatccaattgcttctctaacatggatacttgcttatgaaaaaggcaatggtagaaatactaaagctatcaagaagtcattaagcacacttctaagtgatgaatatcaagataaagctccaactttaggatttgttccacttaaaggagatatccttgagaaatcaagagctgcagttaagaaaattggtagataa

SEQ ID NO: 15089 - protein, 323 aa, Prochlorococcus marinus subsp. pastoris str. CCMP1986
MSIAKKALLFTSALALIAGPSVTASTRLSGAGASFPAKIYTRWFSDLAKSGGPRVNYQAVGSGSGRKAFIDQTVNFGASDDPMKDKDIAKVTRGLVQIPMVGGTIAFGYNYDCDLKLTQEQAVQVAMGMVKNWKELGCKAGKLTWAHRSDGSGTTKAFTNSMEAFSPTWTLGTGKSVKWPAGVGAKGNSGVAGVIQNTPGAIGYVNQSYIKGNVKAAALQNLSGEFLKPSVEAGAKALNGITLDENLAGKNPNPTAKGAYPIASLTWILAYEKGNGRNTKAIKKSLSTLLSDEYQDKAPTLGFVPLKGDILEKSRAAVKKIGR

SEQ ID NO: 15090 - DNA, 1011 bp, Synechococcus sp. WH 8102
  CDS (1)..(1011): transl_table=11
atgcgtcgttccaacagctttcgtgccctggcggccatcgccggcctgagcgcctccatggctctcacctcctgctccagtggtggcagcggcggcggcgatgacaaggtcaccggaaagctcaacggcgctggcgcctccttcccggcagccatctaccagcgctggttccaggaactccagccggagggcgtcacggtgaactaccaatccgtgggatccggcgctggcgtgcgtcagttcatggccaacaccgttgatttcggtgcatcggacaaaccgatgaaggaagccgaaatcgccaaggtggagcgaggtgtgctgcagattccgatgacggctggagcgatcgctgtggcctacaacctcgaagggtgtgacctcaagctcaccaccgagcaactggcaggaatcttcctcggcaagatcaaaaacttcagtgaactgggctgcgcagaccagaaactcaccgtggtccgtcgctccgatggttccggcaccacctacaacttcaccaagcacctgtccgccatcagcgaagagtggaagaacggccccggcgccgctaaatccatcaagtggcccaccggtgttggctcgaaaggcaatgagggtgtggcggcccagctgaatcagatcccaggtggtgtgggctatgtggaagccgcctacgtaaaaggcaagctccaggctgcagccgttaccaacgcctcaggcgaacaggtgaagcccaccaacgaaaccgagagcactgccctcgactccatcgacatcggccccgacctcatcggtggcaaccccaacccccctgcgggctacccgatcgtgaccttcacctgggtgctggcctacgaaacgggcaatggcgacaagaccgctgctctgaagaagaccctcgagttcatgctctccgaaaaagcccaatcccaggctcccgagctgggctacgtcagcctgccgacgggtgtggtggagaagtccctggctgcggtcgaaaagatcagcgaatga

SEQ ID NO: 15091 - protein, 336 aa, Synechococcus sp. WH 8102
MRRSNSFRALAAIAGLSASMALTSCSSGGSGGGDDKVTGKLNGAGASFPAAIYQRWFQELQPEGVTVNYQSVGSGAGVRQFMANTVDFGASDKPMKEAEIAKVERGVLQIPMTAGAIAVAYNLEGCDLKLTTEQLAGIFLGKIKNFSELGCADQKLTVVRRSDGSGTTYNFTKHLSAISEEWKNGPGAAKSIKWPTGVGSKGNEGVAAQLNQIPGGVGYVEAAYVKGKLQAAAVTNASGEQVKPTNETESTALDSIDIGPDLIGGNPNPPAGYPIVTFTWVLAYETGNGDKTAALKKTLEFMLSEKAQSQAPELGYVSLPTGVVEKSLAAVEKISE

SEQ ID NO: 15092 - DNA, 1038 bp, Chromobacterium violaceum ATCC 12472
  CDS (1)..(1038): transl_table=11
atgaaacagtctgttcgtctggccgccatcctgggttccacgctgatcgcaggctcggtctacgcggctgacatcaccggcgccggcgcgaccttcccctacccgctgtacgccaagtgggcggcgacgtacaagggcagcaccggcaacaacatgaactaccagtccattggctccggcggcggcatcaagcagatccagtccaagaccgtggatttcggcgcctccgacatgccgctgaagccggaagagctggaaaaggccggcctgacccagttcccgaccgtgatgggcggcgtggtgccggtgtacaacatcccgggcatcgccgccggccagatcaagttcaccggcccgctgctggccgacatctacatgggcaaggtttccaaatggaacgacgccgccatcgccaagctgaacccgggcgtcaagctgcctgaccagcgcatctcggtggtgcgccgctccgacggctccggcaccaccttcatcttcaccaattacctgtccaaggtttcgccggaatgggcgaaagacgtcggctccaacaccgccgtcagctggaagggcagctcggtcggcggcaagggcaacgaaggcgtggccaactacgtgtcgcgcatcaagggcgccatcggctacgtcgaatacgcctacgccaagcagaacaagctggcctacggcctgctgcagaaccaggccggcgctttcgtgaagccggatgaggcctcgttcaaggccgccgcggccaacgccgactggaaaaaggccccgggcttctacctgctgctgaccaaccagccgggcaaggccagctggccgatcgccggcgccaccttcatcctgatgcacaagaagcaggacaagccggcccaagccgccgaagtgctgaaatacttcgactgggcttacaagaacggcgacaagaccgcgcaggagctggactacattccgatgcccgacaatgtgaagggcgtgatccgcaccagctggaaacagatcaccgacggcagcggcaaggctgtctggaactga

SEQ ID NO: 15093 - protein, 345 aa, Chromobacterium violaceum ATCC 12472
MKQSVRLAAILGSTLIAGSVYAADITGAGATFPYPLYAKWAATYKGSTGNNMNYQSIGSGGGIKQIQSKTVDFGASDMPLKPEELEKAGLTQFPTVMGGVVPVYNIPGIAAGQIKFTGPLLADIYMGKVSKWNDAAIAKLNPGVKLPDQRISVVRRSDGSGTTFIFTNYLSKVSPEWAKDVGSNTAVSWKGSSVGGKGNEGVANYVSRIKGAIGYVEYAYAKQNKLAYGLLQNQAGAFVKPDEASFKAAAANADWKKAPGFYLLLTNQPGKASWPIAGATFILMHKKQDKPAQAAEVLKYFDWAYKNGDKTAQELDYIPMPDNVKGVIRTSWKQITDGSGKAVWN

SEQ ID NO: 15094 - DNA, 840 bp, Wolinella succinogenes DSM 1740
  CDS (1)..(840): transl_table=11
atgaaaaagagtcctatttggcttattccctatttaatacccctttttttgggagcagcctcccttaaaatcacaggggcaagcacgattcagcctattatcgaaaaatccgcctcagaatacgccaaaaatcactctgtcgccttcaacattagcgccggcggaagcggaaaaggaatgaaagattcgattgaacacctcaacgacattggcatggcttctcgtagcctcagcgctaaagaggagcagtcactcatcaaggtgaccattggctttgacgctctggccatcatcgtcaatcaacacaaccccctgaccgccctcacccaaaagcaggtcgccgatatctatagcggcaagatcagggagtggcgagagcttggatggagcgaaggggggaagatcatgctgataaacaaagagattggacgaagtactctagagctctttgagggctactctaagctcacccaccccaatcgccccaatgccaaactcgaaaactccatcgctaaagagcgctttgatattggctccaatctcgaatccatcacactcaccgcaggcatgaagtccgccattggctatgtctcctcaggcacagccgatctctccattaaggcgggctcccctattaagattctctctctagatggaatcgttcccaccaaagagagcattcaaagcgagaaatatcctattgttcgaggtctcaatcttgcctatcataaaaatgccgaaaacccagaaatcgccccttttattgatttcatcctcagccaagaagggcaaaagatcgtccaatcttttggatttttgcccattacaaaggataaatga

SEQ ID NO: 15095 - protein, 279 aa, Wolinella succinogenes DSM 1740
MKKSPIWLIPYLIPLFLGAASLKITGASTIQPIIEKSASEYAKNHSVAFNISAGGSGKGMKDSIEHLNDIGMASRSLSAKEEQSLIKVTIGFDALAIIVNQHNPLTALTQKQVADIYSGKIREWRELGWSEGGKIMLINKEIGRSTLELFEGYSKLTHPNRPNAKLENSIAKERFDIGSNLESITLTAGMKSAIGYVSSGTADLSIKAGSPIKILSLDGIVPTKESIQSEKYPIVRGLNLAYHKNAENPEIAPFIDFILSQEGQKIVQSFGFLPITKDK

SEQ ID NO: 15096 - DNA, 927 bp, Wolinella succinogenes DSM 1740
  CDS (1)..(927): transl_table=11
gtgattctcatgcgcccttttccttttcttttggccttggccttgacctttttgcaagcaggcgaaaccctgcttggctcgggggcaaccttccccgctaatgcctatgcagagtggatcaaagagtatgaaaagagcacccaaaatcgtgtctcttatctctctattggatcaggcggaggaatcaaacagatcaaaagtggtgtggtcgattttggtgcaagcgaagagcctctcaaagagagtgaattggccgtaggatttcatcaattcccctctctaagaggctccattgccctagtctataacctcccctctctcaaagatggtgatctacgcctcacgcctgagctcatcagtgatatctacctgggccttatcactcactggcaagaccccaaaatcagagctctcaatcccaacatcccccttcccaatctccccatcaccccccttcatcgaaatgatggaagcggaaccacccttgccttcacaagctacatggatcaccaatccaagacttggagcgaaagcattgggaagggcaaggcgctcgcttggccaaaaggcatgggcgctaaaggcaacgcgggcatgagccagcttgtctcccaaaaagaggggagtctaggctatgtagagctctcctataaactccaagagaagctgagcgctgcccttctccctctctcctctgatctcaaagagtggctctctcccgtggatgtcgaaaaaggatacccgcttatcactacaagctacatcatttttcccctcaaaagcaaaaaagcacgcgaggtggtccacttttttgactactcgtttaagcagggagatgcaacccttagaagacttggattcatccctttgaataaagaagaaaaaggattgatccaaaagcgttggcaagaacttgggctcttataa

SEQ ID NO: 15097 - protein, 308 aa, Wolinella succinogenes DSM 1740
MILMRPFPFLLALALTFLQAGETLLGSGATFPANAYAEWIKEYEKSTQNRVSYLSIGSGGGIKQIKSGVVDFGASEEPLKESELAVGFHQFPSLRGSIALVYNLPSLKDGDLRLTPELISDIYLGLITHWQDPKIRALNPNIPLPNLPITPLHRNDGSGTTLAFTSYMDHQSKTWSESIGKGKALAWPKGMGAKGNAGMSQLVSQKEGSLGYVELSYKLQEKLSAALLPLSSDLKEWLSPVDVEKGYPLITTSYIIFPLKSKKAREVVHFFDYSFKQGDATLRRLGFIPLNKEEKGLIQKRWQELGLL

SEQ ID NO: 15098 - DNA, 1014 bp, Gloeobacter violaceus PCC 7421
  CDS (1)..(1014): transl_table=11
atgaagaataaaccacttgctgtcgccgccagtatcgtggcgcttgctgcgggtgcgaccctggcgcaggggcttcccgcgcaggcaccgtccgttaagatcgatggatcgagcacggtctacccgatcacccgcgccgccgtcaaagccttcgaggccgaacacaagcaattccagggcaaaatcgccgtcaacttctccggcaccggcggtggatttcgcaagttctgcagcggtgagaccgatatttccgacgcttcgcggccgatcctccaaagggagatggatgagtgccgacgggcaaacgtcgcctttatggaactgccggtggccttcgacgcgctcacggtcgtcgtccaccccaaaaatacctgggctagcgagatcaccgtcgccgagctcaaaaaaatctgggagcgcgcctcccagggcaaaatcacccgctggagtcaggtgcgccccggctttcccgaccggccgctcaggctgtatggccccgggcgcgactcagggacgtatgactactttgctgaagccattctgggctccgccgacaccgacacccgcagcgattacgaggcatctgaggacgacgacgtgctggtagaaggagtagctgcggatcccaacgcgctgggttattttggctacgcctactacgaagcgaacctgaacagactgaagaccctggccgtcgatagcggcaaaggcccggtagcccctaccgacaaaaacgtcgagaagggcacctatgctccgctgtcgcgaccgctgttcatctacgtcaacatcgtctcggcgcaaaaaaaagcggaagtgcgcgaatttgtagacttttaccttgaaaacggcgcgaagctcgcttccttggtgggctatgtacccttaccggcggaaggctatcacatcgccaacaaccacttccatcggggcaagcgcggcacggtgtacggtgggcgggcctacctggggctgaccatccgcgaggtgctcctcaaaaccgccagcttctag

SEQ ID NO: 15099 - protein, 337 aa, Gloeobacter violaceus PCC 7421
MKNKPLAVAASIVALAAGATLAQGLPAQAPSVKIDGSSTVYPITRAAVKAFEAEHKQFQGKIAVNFSGTGGGFRKFCSGETDISDASRPILQREMDECRRANVAFMELPVAFDALTVVVHPKNTWASEITVAELKKIWERASQGKITRWSQVRPGFPDRPLRLYGPGRDSGTYDYFAEAILGSADTDTRSDYEASEDDDVLVEGVAADPNALGYFGYAYYEANLNRLKTLAVDSGKGPVAPTDKNVEKGTYAPLSRPLFIYVNIVSAQKKAEVREFVDFYLENGAKLASLVGYVPLPAEGYHIANNHFHRGKRGTVYGGRAYLGLTIREVLLKTASF

SEQ ID NO: 15100 - DNA, 1017 bp, Gloeobacter violaceus PCC 7421
  CDS (1)..(1017): transl_table=11
atgaacatgtcaaaaaacctgttggccactgctgcgctcgcggtgggcgcggtgggcgcggccctggcccagaacgcttccgacgagcaagtcaaagtcaaaattgatggatcgagcacggtctacccgatcacccgcgctgccgccaaggccttcgaggagcaaaacaagccgtaccaggggacgattgccgtcgccttttccggtaccggcgggggcttcaaaaagttctgcgccggcacaaccgatatcagcgacgcctcgcggccgatactccaaaaagaaatcgacgcctgccgcaacaacaacgtcgcctttatggaactgccggtggccttcgacgcgctcacggtcgtcgtccaccccaaaaatacctgggctagcgagatcaccgtcgccgaactcaaaaaaatctgggagcgcgcctcccagggcaaagtcacccgctggagccaggtgcgagcgggctttcccgaccggccgctcaagctctacggacccggccgcgactcgggcacctacgattactttgccgaggcgattttgggctccgccaacaccgacacccgcagcgactatgtcgacagcgaggacgacgatgtgctggtcaaaggggtcagcgaagatcccgacgccctgggctacttcggctacgcctactacgaagcgaacaaagataaattgaaggcgctcgccgtcgacggcggcaaaggcccggtgcctcctaccgacaagaatgttgagaaggggacctacgccccgctctcgcggccgctgttcatttacgtcaacatcgtctcgacccagaaaaagcccgaagtgcgcgaatttgtaaagtattatctggacaacggcgagaagctcgcggcttcagtgggctacgtgcccttgccggaggagggctaccacatcgcgagcaaccactttttccgcggcaagcgtggcacggtctacggcgggcgggcctatctggggctgagtatccgcgaggtgctcctcaagaccgccagtttctga

SEQ ID NO: 15101 - protein, 338 aa, Gloeobacter violaceus PCC 7421
MNMSKNLLATAALAVGAVGAALAQNASDEQVKVKIDGSSTVYPITRAAAKAFEEQNKPYQGTIAVAFSGTGGGFKKFCAGTTDISDASRPILQKEIDACRNNNVAFMELPVAFDALTVVVHPKNTWASEITVAELKKIWERASQGKVTRWSQVRAGFPDRPLKLYGPGRDSGTYDYFAEAILGSANTDTRSDYVDSEDDDVLVKGVSEDPDALGYFGYAYYEANKDKLKALAVDGGKGPVPPTDKNVEKGTYAPLSRPLFIYVNIVSTQKKPEVREFVKYYLDNGEKLAASVGYVPLPEEGYHIASNHFFRGKRGTVYGGRAYLGLSIREVLLKTASF

SEQ ID NO: 15102 - DNA, 1044 bp, Gloeobacter violaceus PCC 7421
  CDS (1)..(1044): transl_table=11
atgcagaccaacaagtggacccgcagggcttttgtttcggtagtggctctggcttcactcgcttctcccctgttgacgcaggtcgcccacgccctgaccctcagcggcgccggcgcaacgttcccgcagccactctatgaaaagtggttcttcgagtacaacaagaagaaccccgatgtcaaaatcaactaccagggcatcggcagcggcggcggcatcaaccagatcaccaacaagacggttgatttcggcgcttccgacgcggcaatgaacgacgagcagctcgccaaggtcggcggctcctcgaagatgctgatgctgcccatgaccgccggtgcagtggctatcacctttaacgtgcccggtgtgaagtcgggtttgcggatcacccgcgtggctttgaccgatatttttctgggcaaggtcaccaagtggaacgacccggccatcgcctcggtcaaccgcgacgtcaagctgccggatttgcccatcgccgtggtgcgccgctccgacagctccggtacgacctttatcttcaccaaccacctgtcggcgatcaaatcctcggattggtccgagaaagtcggcaagggcacctcggtgaactggcccaccggcatcggcgccaagggcaaccagggcgtctccgcccaggtccagcagactcccggtgcgattggctatgtcgagtacgcctacgccaccgagaacaacctgccggtggccgcggtcgaaaaccgcgaaggcaagttcgtgctgccgacggtcaaggcgaccgagaccgccctcgacgggaccaagtaccccgaaaatttccgcgtcttcatcgaagatccggacggggccggttcctatccgatcgtgggcctcacctggctgctggtgtacaaagaaggcaacgacaaggccaaggccgctgaactgaagaagttcgtcaactgggccttgaccgaggggcaacagtacgtcgagcccctcaagtacaccccgctgcctgccgccgtctccaaaaacgtgatcaaggcggccgagcagatcaagtaa

SEQ ID NO: 15103 - protein, 347 aa, Gloeobacter violaceus PCC 7421
MQTNKWTRRAFVSVVALASLASPLLTQVAHALTLSGAGATFPQPLYEKWFFEYNKKNPDVKINYQGIGSGGGINQITNKTVDFGASDAAMNDEQLAKVGGSSKMLMLPMTAGAVAITFNVPGVKSGLRITRVALTDIFLGKVTKWNDPAIASVNRDVKLPDLPIAVVRRSDSSGTTFIFTNHLSAIKSSDWSEKVGKGTSVNWPTGIGAKGNQGVSAQVQQTPGAIGYVEYAYATENNLPVAAVENREGKFVLPTVKATETALDGTKYPENFRVFIEDPDGAGSYPIVGLTWLLVYKEGNDKAKAAELKKFVNWALTEGQQYVEPLKYTPLPAAVSKNVIKAAEQIK

SEQ ID NO: 15104 - DNA, 1050 bp, Gloeobacter violaceus PCC 7421
  CDS (1)..(1050): transl_table=11
atgctgggagcaaaccttttgttgtcccagtgccagtcttccccaccggagggtcccagtgccaccgcccctagccccggcggcgcaccggccggtgcggtgaccctctccggcgccggggccaccttcccggcaccgctctatcagcggtggttctacgattatggccaggccaacccgaacgtcaaagtcagctaccagggcgtgggcagcggcgccggcatcaagcagtttcaaagcaaaaccgtcgattttgccgcgagcgacgtggcaatgagcgacgaggagattgccgcggtgccggcggatcgaggcgtggtgctattgccgatgaccgccggtagcgtcgtgctcatctacaacgtaccgggtgcgccggagaatcttaaactctcccgcgccgtctacagcgatatgttcctgggcaagattaaaaactggaacgacccgaagattgccgcactcaacccgggtgtcaaactgccggatctggccgccacggtggtgcgccgcgccgacggcagcggcacgaccggcgtgttcactcgccacctgagtgccgtcagccccgagtggaaaacgaaagtcggcgaaggcatcgccgtcaaatggcccacgggtgtaggcggcaagggcaacgacggtgtgacggctcaggtccagcagaaccccggctcgatcggctacgtggaatacggctacgccaccaacaacaagttgccctacgcttcgcttgaaaacaaagagggcaactatgtcctgccgacgctggaaaattccgccgcggccctcgcctcggtagagttgccgcccaacctgcgcgcttttatcgccgatccgcccggtaaggattcgtatccactggtcacttacacctggatcctcgcacccaagacaatggacacccccgaaaaggcgacggctttgaaggaagttctcaagtggtgcctcaccgaagggcaaaagtcgagcgaatccctcggatacattgaactgcccaaaccggttaccgagcgcgtcctggcggctgtcgagcaaattggcagctaa

SEQ ID NO: 15105 - protein, 349 aa, Gloeobacter violaceus PCC 7421
MLGANLLLSQCQSSPPEGPSATAPSPGGAPAGAVTLSGAGATFPAPLYQRWFYDYGQANPNVKVSYQGVGSGAGIKQFQSKTVDFAASDVAMSDEEIAAVPADRGVVLLPMTAGSVVLIYNVPGAPENLKLSRAVYSDMFLGKIKNWNDPKIAALNPGVKLPDLAATVVRRADGSGTTGVFTRHLSAVSPEWKTKVGEGIAVKWPTGVGGKGNDGVTAQVQQNPGSIGYVEYGYATNNKLPYASLENKEGNYVLPTLENSAAALASVELPPNLRAFIADPPGKDSYPLVTYTWILAPKTMDTPEKATALKEVLKWCLTEGQKSSESLGYIELPKPVTERVLAAVEQIGS

SEQ ID NO: 15106 - DNA, 1041 bp, Photorhabdus luminescens subsp. laumondii TTO1
  CDS (1)..(1041): transl_table=11
atgaaactgatgcgtaccaccgtaaccggcataatggcagcggcgttttctttgacaaccctgcctgtatttgctgccactagtttaaccggggcaggtgcgacatttcccgcaccggtgtatgccaagtgggcggattcttatcaaaaagagacaggtaataaagtcaattatcaaggcatcggttcttccggtggcgtaaaacaaattctggcaaataccgttgatttcggggcttccgatgcccctttatctgatgaaaagttagctgctgatggtttgtttcaattcccgaccgtcatcggtggggtggtactggcggttaatatcccggggattaaatctggtgaattgacattggatggtaaaactttaggcgatatttacttaggtaaagtgaaaaagtggaatgatccagcaattactcaattgaatccgggagtcaaactgccggaacaagatattgctgtgatacgtcgtgctgacggttccggtacttcctttgtatttactcgctacctctctaaagtgaataaagcgtggcaagaaaaagttggcgtgggttccaccgtaagctggcctattggtttgggtggtaaaggtaatgatgggattgccgcatttgttcaacgtctgacgggttccattggttatgttgaatatgcttacgctaaacagaatcatctggcttataccaaattggtatctgctaatggcaacattgttagcccgacagaagagagtttcagtgccgcagcgaagaaagcagaatggcataaaacgtttgctcaggatttgacaaaccagcaaggtgaaaatgtgtggccgatgacttccactacatttgttctggttcatcaacagcaaaaagatgcagtgaaaggggcagaaatattgaaattctttgactgggcttatgagaaaggcagtaaacaggcaaacgatctggattatgcaactctgcctaaagaggtgattgagcaagttcgtgcggcttggaaaacccagataaaagatagcaatggcaaggccctgtattaa

SEQ ID NO: 15107 - protein, 346 aa, Photorhabdus luminescens subsp. laumondii TTO1
MKLMRTTVTGIMAAAFSLTTLPVFAATSLTGAGATFPAPVYAKWADSYQKETGNKVNYQGIGSSGGVKQILANTVDFGASDAPLSDEKLAADGLFQFPTVIGGVVLAVNIPGIKSGELTLDGKTLGDIYLGKVKKWNDPAITQLNPGVKLPEQDIAVIRRADGSGTSFVFTRYLSKVNKAWQEKVGVGSTVSWPIGLGGKGNDGIAAFVQRLTGSIGYVEYAYAKQNHLAYTKLVSANGNIVSPTEESFSAAAKKAEWHKTFAQDLTNQQGENVWPMTSTTFVLVHQQQKDAVKGAEILKFFDWAYEKGSKQANDLDYATLPKEVIEQVRAAWKTQIKDSNGKALY

SEQ ID NO: 15108 - DNA, 825 bp, Vibrio vulnificus YJ016
  CDS (1)..(825): transl_table=11
gtgatgaaaaagacagtaatcggtgcaatcgctcttatgagtgctctgacagtgacaaccgcttcggcaaaagaaacgatctctgcagtgggttcaagcagcgtaactccactgatggaagttttctctgaaacatacatgaagaaaaacccagaagtttttattgaagttcaaggaccaggttcatcggcaggtgttaaagcggcaaaaaatggctctgcagatcttggtatgtcttcacgtgacctaaaatcgtctgagaaagaaaccgctttggttgaagaagtgattgctcgcgacggtatcgcagtggttgttaacccaaaaaacacgctgaaaggcctcactgctgagcaagtttctgccatctataaaggtgaagtgacgaactggaaacaagttggtggtgaagacaaacctatcgttgcgattactcgtgatacagcatcaggtactcgtggcgcatttgaagacattcttaaactgaagaagaaaatctcgggtaaagaagtgtctgccatctctcaacgtgctcaagtggcaaacggtaacggtgcactgaaaacgatggttgcttcaaacccttacgcgattggttacatctcgctaggtactgttgatgagtcggttcacccgctagctatcgatggcacggatgcgtctattccaaacgtgaaaaacggttcatacaaagtagctcgtccattccttgttctttacaagcagggcaaaccatctgctgaaacgcagaagttccttgattggatgctgacccctgaagcacaagccattgtagagaagaaaggctacatctcagttaactaa

SEQ ID NO: 15109 - protein, 274 aa, Vibrio vulnificus YJ016
MMKKTVIGAIALMSALTVTTASAKETISAVGSSSVTPLMEVFSETYMKKNPEVFIEVQGPGSSAGVKAAKNGSADLGMSSRDLKSSEKETALVEEVIARDGIAVVVNPKNTLKGLTAEQVSAIYKGEVTNWKQVGGEDKPIVAITRDTASGTRGAFEDILKLKKKISGKEVSAISQRAQVANGNGALKTMVASNPYAIGYISLGTVDESVHPLAIDGTDASIPNVKNGSYKVARPFLVLYKQGKPSAETQKFLDWMLTPEAQAIVEKKGYISVN

SEQ ID NO: 15110 - DNA, 1086 bp, Corynebacterium diphtheriae NCTC 13129
  CDS (1)..(1086): transl_table=11
gtgaactcctctgtcaccatcaagcgccttagcgcctccattgcctttgtcagcgcagcaggtattgcactgacaggatgctcggaaactgaatcgtcctcttccgctgcgtttactggtgcgtcgggcgaactcgtcgcagaaggtgcatcttcgcaacaaaacgcgatggattatttcaatgtgcgctaccaagaagccttctcgggttcctctttagcctataacgcctcaggttctggatctgggcgcaagaactttattgcaggccaagtagctttcggtggttcggattcaccactggcacaagagcagattcagccagcgacggatcgttgtaatggcaacgacgcctggcatttgccaatggtggtgggccctgtggctgtggcttataacttgtcgggtgtagatcatctgaacttgcctacggcggtgattgccaagatctttgctggcaagatcacccagtggaatgaccctgcgattgcagaggctaacaagggtgtctcgcttcccgataccaagatttctgttatttatcgctcggatgagtctggtacctcggataatttccaaaagttcttaactactgcggccccgcaggagtggaccacgtctggttcggcattccctgcgtctgttggctcgggtgcgaatggttctaatggtgtggcctcggaaaccaagactatcgacggcgccattacctacgtggaatccggttttgcccgccagcaaggcctcaacgttgccgccatcgacttcggtgccggtcccgtagaactcaattctgcttcggtgggcaaggcccttgatgctttgagcttcaagactgagggccacgacatggtggtggacaccaaagcactgttcgcacaaaaagcagaaggcacatatccgctggttttgaccacctacgagattgtttgctcggcaggatacgacgaagctacccgcaccaatgtgaaaaacttcttgtcccaggtgctgaaatcccaagattccaaactggaagaactcggctatatccctgttcaaggcaaacacctcgagcgccttaccgctgccgtggacgcgctataa

SEQ ID NO: 15111 - protein, 361 aa, Corynebacterium diphtheriae NCTC 13129
MNSSVTIKRLSASIAFVSAAGIALTGCSETESSSSAAFTGASGELVAEGASSQQNAMDYFNVRYQEAFSGSSLAYNASGSGSGRKNFIAGQVAFGGSDSPLAQEQIQPATDRCNGNDAWHLPMVVGPVAVAYNLSGVDHLNLPTAVIAKIFAGKITQWNDPAIAEANKGVSLPDTKISVIYRSDESGTSDNFQKFLTTAAPQEWTTSGSAFPASVGSGANGSNGVASETKTIDGAITYVESGFARQQGLNVAAIDFGAGPVELNSASVGKALDALSFKTEGHDMVVDTKALFAQKAEGTYPLVLTTYEIVCSAGYDEATRTNVKNFLSQVLKSQDSKLEELGYIPVQGKHLERLTAAVDAL

SEQ ID NO: 15112 - DNA, 1005 bp, Rhodopseudomonas palustris CGA009
  CDS (1)..(1005): transl_table=11
atgcgtgtacttcgcaccgctttgatggcgctcgccatcggctcgtccggcgtgacggccggtcatgccgagacgccggtgatggggaccggttcggcgttcgccgcgccgatctacatcaaatgggccgaacaactgaaagcgaccaagggtgtcgcgatcaactatcaaccttcggggtcttcggtcgggcaactccaggtgctgaagggcctgacggatttcggtgcgtcggatgtgccgatggaggacagcaagctcaaggaaggggacatcatgcagttccccaccgtcgtgggtggctacgccgttgtggtcaacattcccggtgtcctgcccggcaagctgcggctcaccgcgccggtgctggccgacatcttcatgggcggcatcaggtcgtgggatgaccagcagatcgtgcagctcaatcccggtttggcgctgcccaacctgccgatttcgctgctgtatcatgctggcggctcgggcggcacctacgcgatctcccgctatctgtcgaagaacagcgcggcgtggcgcgacaagatggggatcggcatgacgctgagttggccggtcggcgccggcgtcaagggcagctatggctcggcctcgacggtaccgatgacgtccggcgggatcggctatgccgagctgtcctatgtcaccgccaacaatcttgcgaccgtgcaacttcagaataggtcgggccggttcgtactgccgaacggaagcagtttcgctgccgccgccgagaatggcgattggtcggtgccgaactatgcggtcgatctcaccgacatgccgggcgagcacgcctggccgatcgtgacggcgacctttgcgctggtgccacgaggtcctgcgaaacgcgccacgtcggccgccgttctggacttcttccgatgggccttcgcgcatggcgacggcatcgcgcggtcgctgcagttcgttcctctgccgggcaaggtcaaagccgacatcgtcaagcatctgatgaactga

SEQ ID NO: 15113 - protein, 334 aa, Rhodopseudomonas palustris CGA009
MRVLRTALMALAIGSSGVTAGHAETPVMGTGSAFAAPIYIKWAEQLKATKGVAINYQPSGSSVGQLQVLKGLTDFGASDVPMEDSKLKEGDIMQFPTVVGGYAVVVNIPGVLPGKLRLTAPVLADIFMGGIRSWDDQQIVQLNPGLALPNLPISLLYHAGGSGGTYAISRYLSKNSAAWRDKMGIGMTLSWPVGAGVKGSYGSASTVPMTSGGIGYAELSYVTANNLATVQLQNRSGRFVLPNGSSFAAAAENGDWSVPNYAVDLTDMPGEHAWPIVTATFALVPRGPAKRATSAAVLDFFRWAFAHGDGIARSLQFVPLPGKVKADIVKHLMN

SEQ ID NO: 15114 - DNA, 1011 bp, Rhodopseudomonas palustris CGA009
  CDS (1)..(1011): transl_table=11
atgaatttcatcaaggcaatcgtcgcggccggtatggttgcggcgtcgacctcggccttcgccgccgacatcacgggcgctggcgccactttcccgtacccggtctactcgaagtgggcggacacctataagaaggacaccggcaacggtctgaactaccagtcgatcggttcgggcgccggcatcaagcagatcattgccaagaccgtgacgttcggcgcaaccgacgcgccgttgaagccggagcagctcgagaaggaaggcctggtgcagtggccgatggtgatgggcgccatcgtgccggtcgtgaacctcgaaggcgtgaagccgggtgagatggtgctcgacggcgagaccctggccaacatctacatcggcaagatcaccaagtgggacgacccggcgatcaagaagctgaacccgaaggtcagcctgccgggcgacgcgatcaccgtggttcgccgctccgacggttcgggcaccaccttcaacttcaccgactacctgtccaaggtcagcgctgactggaagaccaaggttggttcgggcaccgcggtcgagtggccggtcggcgtcggcgccaagggcaacgaaggcgtcgccggcaacgtcggtcagaccaagaattcgatcggctacgtcgaatacgcctacgccaagcagaacaagctgacctacaccggcctggtgaacagcgctggcaagaccgttcagccgacgattgcggccttccaggctgccgcggcgaatgccgattgggccaaggctccgggctactacctgatcctgaccaaccagccgggcgaagcctcgtggccgatcaccgccgcgaccttcatcctgatgcacaaggagccggtcgacaaggcggcttccggcgaagccgtgaagttcttcaagtgggcgttcgagaagggcggcaaggctgccgaagagctcgactacatcccgatgccggaaccggtcgtcaagctgatcgagaagacctgggccgcggacatcaagagctga

SEQ ID NO: 15115 - protein, 336 aa, Rhodopseudomonas palustris CGA009
MNFIKAIVAAGMVAASTSAFAADITGAGATFPYPVYSKWADTYKKDTGNGLNYQSIGSGAGIKQIIAKTVTFGATDAPLKPEQLEKEGLVQWPMVMGAIVPVVNLEGVKPGEMVLDGETLANIYIGKITKWDDPAIKKLNPKVSLPGDAITVVRRSDGSGTTFNFTDYLSKVSADWKTKVGSGTAVEWPVGVGAKGNEGVAGNVGQTKNSIGYVEYAYAKQNKLTYTGLVNSAGKTVQPTIAAFQAAAANADWAKAPGYYLILTNQPGEASWPITAATFILMHKEPVDKAASGEAVKFFKWAFEKGGKAAEELDYIPMPEPVVKLIEKTWAADIKS

SEQ ID NO: 15116 - DNA, 1029 bp, Geobacter sulfurreducens PCA
  CDS (1)..(1029): transl_table=11
atgaaaaaactcacgttgggcggaaagatcggccggattacccctgccctggcggccgccgtcatgggcctcacgatcacggcgagtccggtccttgccgcggacaaactcgtgaagatcgacgggtccagcaccgtctaccccatcaccgaggcggttgccgaggaattccagaaggccaagagaggcgccgtcaaggtaacggtcggcatttccggcaccggcggcgggttcaagaagttttgccgcggcgagattgacctatccggagcctcccgccccatcctcaagaaggagatggaagcgtgcaagcaggctggtatccagtacatcgagctgcccgtagcctatgacgccctcaccgtggtggtgaacccccagaacacctgggtcaagagcatgaccgtggacgagctcaagaagatttgggagcccgccgcccaggggaagatcacgaagtggaaccaggtcaaccccgcgtggccgaaccaacccctcaagctcttcgggccgggcgccgactcgggcaccttcgactacttcaccgaggcggtggtgggcaaggccaaatccagccgcggcgactttaccgccagcgaagacgacaacgtgctcgtgcagggcgtgtcccgcgacaggggtggactgggctacttcggctatgcctactacgccgagaacagcaagaagctcaaggcagttcccattgttgagaaggctggcaagccggcggtttccccgtccattgacaccgtcaagaacggcagctaccagcccctgtcccgtcccatcttcatctacgtgaacgccaagtcggtggacaagcccgaggtgaaggaattcgtagacttctacctgaatcaggcgccgaagctctccaaagcagtcaagtacgtgccgcttcccgacaaggcctatgcccttgccaagtcgaacttcgccaagaagaagaccggcaccggtttcggcggggagcctgaagtgggtgtctcggtggaggaactcctccagcgcgaaggaaagcactga

SEQ ID NO: 15117 - protein, 342 aa, Geobacter sulfurreducens PCA
MKKLTLGGKIGRITPALAAAVMGLTITASPVLAADKLVKIDGSSTVYPITEAVAEEFQKAKRGAVKVTVGISGTGGGFKKFCRGEIDLSGASRPILKKEMEACKQAGIQYIELPVAYDALTVVVNPQNTWVKSMTVDELKKIWEPAAQGKITKWNQVNPAWPNQPLKLFGPGADSGTFDYFTEAVVGKAKSSRGDFTASEDDNVLVQGVSRDRGGLGYFGYAYYAENSKKLKAVPIVEKAGKPAVSPSIDTVKNGSYQPLSRPIFIYVNAKSVDKPEVKEFVDFYLNQAPKLSKAVKYVPLPDKAYALAKSNFAKKKTGTGFGGEPEVGVSVEELLQREGKH

SEQ ID NO: 15118 - DNA, 1137 bp, Mycobacterium avium subsp. paratuberculosis str. k10
  CDS (1)..(1137): transl_table=11
ttggtggccccggccgtcgggggcgggaggagttgcgtgagtttcgctcgatctggcgccgtactgagcctgctggccgccgccgcgttgacgctgacggggtgcggcggcgactccaagtcgtcgtcggggtcgggcgcgcacgtggactgcggcggtaagaaggtgctcaaggacagcgggtccaccgcccagcagaacgcgatcgagcaattcgtctacgcctacgtccgggcctgcccgggctacacgctggactacaacgcgaacggctccggcgccggtgtcacgcagttcctcaacaatcagaccgacctcgcgggttcggacatcccgctggaccgcaccaccggccagaccgaccgggcggcggcgcggtgcaattcgcccgcctgggacctgccgaccgtgttcggtccgatcgcggtgacctaccacctcaccggggtgagcgggctcaaactggacgggccgaccgtcgcgaagatcttcaacggcgccatcaccaagtgggacgacccggcgctcaaggcggtcaatccgggcctcaacctgccgtcgacgcccatcgcggtgatcttccgcagcgacaagtccggcaccaccgccaactttcagaagtacctggacggggcgtccaacggcgcctggggcaagggcaccagcgagatgttcaccggcggcgtcgggcagggggccagcggcaacaacggcacctcggcgctgctgcagaacaccgaggggtcgatcacctacaacgagtggtcgttcgcggtcggcaagcagctgagcatggcgtcgatcatcacctcggcggggccggacgcggtgcccatcaccaaggagtccgtcgaaaagaccatcgccggggccacctttcaggggcagggcaacgacctggtgctggacacctcgtcgttctaccggcccacccagcagggcgcgtacccgatcgtgctggcgacctacgaaatcgtctgctcgaaatatccggacgcggcgacggggtccgcggtgaaggcgttcatgcaggccgcgatcggtcccggccaggacggtctggaccagtacggttccatcccgctgccgggttcgttcacggcgaagctgtcgagcgcggtcaatgcgatttcctga

SEQ ID NO: 15119 - protein, 378 aa, Mycobacterium avium subsp. paratuberculosis str. k10
MVAPAVGGGRSCVSFARSGAVLSLLAAAALTLTGCGGDSKSSSGSGAHVDCGGKKVLKDSGSTAQQNAIEQFVYAYVRACPGYTLDYNANGSGAGVTQFLNNQTDLAGSDIPLDRTTGQTDRAAARCNSPAWDLPTVFGPIAVTYHLTGVSGLKLDGPTVAKIFNGAITKWDDPALKAVNPGLNLPSTPIAVIFRSDKSGTTANFQKYLDGASNGAWGKGTSEMFTGGVGQGASGNNGTSALLQNTEGSITYNEWSFAVGKQLSMASIITSAGPDAVPITKESVEKTIAGATFQGQGNDLVLDTSSFYRPTQQGAYPIVLATYEIVCSKYPDAATGSAVKAFMQAAIGPGQDGLDQYGSIPLPGSFTAKLSSAVNAIS

SEQ ID NO: 15120 - DNA, 879 bp, Desulfovibrio vulgaris subsp. vulgaris str. Hildenborough
  CDS (1)..(879): transl_table=11
atgtcacgcgtcatctccacccgtctctccacgtaccgcgaccgtctcgttcgtgccgcgggccacgccttcgtcgtctgcgccttcgtcgtccttgcgcaggttgcccatgccgcctcaccgctggaagccttcaagggcatgtccggcaatctcgatatcgccggaggtacggcgcacatccccgtcatgaaagaggccgcgaagcgcatcatgacgcagaatgccgccatccggatttccgtcgcgggcggcgggtccggcgtcggggtccagcaggtgggcgagggccttgtggccatcggcaacaccgggcgtgcgctttcggaggccgaggtcgccaagtacggtctcgtctcgttccccttcgccatcgacggcgtggccgtggttgtgaaccccgccaaccctgtcggcgcgctcactgcggcacaggtacgcgacatctacgcgggcaaggtgaccaactggaaggcactcggcggtgcggacagggccatcaccctctatacgcgtgacgaggccagcggcacgcgcgaggtgttcgacggcaagctgcttgccaagggcgccgtcgcagcctcggccaatgtcgtgccctccaatggcgcgatgaagaccgccgtggcgcaggatgccggggccataggctatgtgggcatcggccacatcgacacttcggtgaaggccccggtgctcgacggcatggtggctacgcaggagaacgccgccaacggcagttatacggtcacccgcaagctctacatgaacaccaagggtcagcccaccggacttgtccgcgccttcatcgactatctgttcaccgacgaaggtgccgatatcatccgcgccagcggctacatccccacaggccggtga

SEQ ID NO: 15121 - protein, 292 aa, Desulfovibrio vulgaris subsp. vulgaris str. Hildenborough
MSRVISTRLSTYRDRLVRAAGHAFVVCAFVVLAQVAHAASPLEAFKGMSGNLDIAGGTAHIPVMKEAAKRIMTQNAAIRISVAGGGSGVGVQQVGEGLVAIGNTGRALSEAEVAKYGLVSFPFAIDGVAVVVNPANPVGALTAAQVRDIYAGKVTNWKALGGADRAITLYTRDEASGTREVFDGKLLAKGAVAASANVVPSNGAMKTAVAQDAGAIGYVGIGHIDTSVKAPVLDGMVATQENAANGSYTVTRKLYMNTKGQPTGLVRAFIDYLFTDEGADIIRASGYIPTGR

SEQ ID NO: 15122 - DNA, 1041 bp, Erwinia carotovora subsp. atroseptica SCRI1043
  CDS (1)..(1041)
atgaaactgatgcgtaccactcttgccagtgttgttgcggcaaccttttctttgacggcattttctgcttttgctgctgctaacctcaccggtgccggtgcgacattcccagcgcctgtttatgctaaatgggctgactcctatcaaaaagaaaccggcaataaagttaactatcaaggaatcggttcttctggcggtgtaaaacagattatcgctaaaacggtagactttggtgcttctgatgcgccgctggctgacgacaaattagcacaggatggtttattccagttcccaaccgttatcggtggcgtggtactggcagtgaacgttcctggtatcaaatctggtgaattgacgctggatggtaaaacactgggtgatatctacctgggtaaaatcaaaaaatggaacgacccggcgattaccaagctgaacccgaatgccaagctgccggatcaggatattgctgtggttcgtcgtgctgacggttctggtacttctttcgtgttcaccagctatctggcgaaagtgaacccagaatggaaagagaagattggtgctggttctactgtgaactggccgaccggtctgggcggtaaaggtaacgatggtatcgcggcgttcgtacagcgtctgcctggttctatcggttacgtagaatatgcgtatgccaagcagaacaacctggcttacaccaaactgatttctgccgatggcaaagcggttagcccgactggcgcaagtttcagcaacgcggccaaagagatcgactggagcaagtctttcgctcaggatctgactaaccagaaaggcgctgatgcatggccgatcacgtcaaccacgttcatcctggttcataccaaacaggaaaaacctgagcagggcgctgaagtgttgaaattcttcgactgggcgttcaagaaaggcggtgagcaagcagaagcactggattacgccacactgccaaaagaagtgactgagcaaatccgtgctgcctggaaaactcaggtcaaagacagcagcggtaaagcactgtactga

SEQ ID NO: 15123 - protein, 346 aa, Erwinia carotovora subsp. atroseptica SCRI1043
MKLMRTTLASVVAATFSLTAFSAFAAANLTGAGATFPAPVYAKWADSYQKETGNKVNYQGIGSSGGVKQIIAKTVDFGASDAPLADDKLAQDGLFQFPTVIGGVVLAVNVPGIKSGELTLDGKTLGDIYLGKIKKWNDPAITKLNPNAKLPDQDIAVVRRADGSGTSFVFTSYLAKVNPEWKEKIGAGSTVNWPTGLGGKGNDGIAAFVQRLPGSIGYVEYAYAKQNNLAYTKLISADGKAVSPTGASFSNAAKEIDWSKSFAQDLTNQKGADAWPITSTTFILVHTKQEKPEQGAEVLKFFDWAFKKGGEQAEALDYATLPKEVTEQIRAAWKTQVKDSSGKALY

SEQ ID NO: 15124 - DNA, 1152 bp, Propionibacterium acnes KPA171202
  CDS (1)..(1152): transl_table=11
gtgaatcgtttcgccaaaatcactgccctggctgctatcagcgccatctccctcaccgcttgtggtgccaatggtgacaagggttccagttctgcctcgtcctccaagaccacctcgactgccagctccgccgcccagcccagcgattcctcggctgacgctgtctcgttcaagcccgcctgccctggtggcagcatctccggtgctggttcctcggctcagctgaacgccatcaaccaagttatttccgactacaaggctgcctgttcctcagcaaccgtcaactactcccccaccggctccggcgctggcgtgaagtccttcatcggtaggcaaaccgactgggccggttctgactccgtcctcaacgctgacaagggggagcctgataaggccaagcagcgctgcaacgccgacccatggcacctcccgatggctgctggcccgattgccgtggtctacaacgtcgacggcgtcaaagatctaaccctctccaccgcgaccctcgccaagattttctccggcgccatcacaaactggaacgacgacgccatcaagaaggagaacccgaaagccgcgttgccgtcggcccagatcgaggtgttttaccgcaaggacgagtcgggcaccaccgacaacttcaccaagttcctcaacaaggcggccggtgacatctggactgagaagcactccaagacatggaaaggtgcgggcaagggcgccgataagtcggccggcatcgcccaggctgtcaagagcaccaagaactcgatctcgtacgacgagtggtcctacgctacaaagaacagcctcgacatggccgccatcgataacggaaacggtccggtcaagctgaccggtgagtctgccggtaaggccgtctcggccgctaaggtcgtcggacagggccatgacctgcagctcgagctccagtacaagaacaccccggcgggcgtgtatccggccgttctcgtaacctacgagatcgcttgttccaagggccaggactccggcaaggccgcgctcttgaaggacttcctgtccttctacgcttctgagagggagcagaagaagatccaggaccttggttacgctccgctaccctccgacgttgcttcgaaggttctgggttccgcccaggccctctcctga

SEQ ID NO: 15125 - protein, 383 aa, Propionibacterium acnes KPA171202
MNRFAKITALAAISAISLTACGANGDKGSSSASSSKTTSTASSAAQPSDSSADAVSFKPACPGGSISGAGSSAQLNAINQVISDYKAACSSATVNYSPTGSGAGVKSFIGRQTDWAGSDSVLNADKGEPDKAKQRCNADPWHLPMAAGPIAVVYNVDGVKDLTLSTATLAKIFSGAITNWNDDAIKKENPKAALPSAQIEVFYRKDESGTTDNFTKFLNKAAGDIWTEKHSKTWKGAGKGADKSAGIAQAVKSTKNSISYDEWSYATKNSLDMAAIDNGNGPVKLTGESAGKAVSAAKVVGQGHDLQLELQYKNTPAGVYPAVLVTYEIACSKGQDSGKAALLKDFLSFYASEREQKKIQDLGYAPLPSDVASKVLGSAQALS

SEQ ID NO: 15126 - DNA, 867 bp, Streptococcus pyogenes MGAS10394
  CDS (1)..(867): transl_table=11
atgaaaatgaaaaaaaaattctttttgttaagtctcttggccctatcaactttctttttatccgcatgttctagctggattgataaaggtgagtcaataaccgctgtaggatcaacagcactacaacccttagtagaagcagtagctgatgaatttggaagcagtaatctaggcaagactgtcaatgttcaaggtggtggttcaggtacagggttgtctcaagttcaatcaggagctgtccaaattggaaatagtgatgtctttgcagaagaaaaagatggtattgatccttctaaattagttgatcatcaagtagctgttgcaggacttgcagttattgccaatcctaaagtcaaggtttccaatctcagtagtcagcagttgcaaaagattttttcaggagaatataccaattggaaacaagttggaggagaagatcttgcgatttcagtgatcaaccgagcagcaagttctggctcacgagcaacctttgacagtgttatcatgaaaggggtcaacgctaaacaaagtcaagagcaagactccaatgggatggttaaatcgattgtttcacaaataccaggtgccatttcttacctttcctttgcctacgttgattcatctgttaaatctttgcaattaaatgggtttaaggcaaatgctaagaatgtggctacaaatgattggccaatctggtcctacgaacacatgtacaccaaagataaaccaacagggttgaccaaggaatttcttgattatatgttttcagatgaagtacaacagaacattgttacacatatgggatatatttcgataaatgatatggaagtggtcaaatctcatgatggaaaagtaacaaaaaggtaa

SEQ ID NO: 15127 - protein, 288 aa, Streptococcus pyogenes MGAS10394
MKMKKKFFLLSLLALSTFFLSACSSWIDKGESITAVGSTALQPLVEAVADEFGSSNLGKTVNVQGGGSGTGLSQVQSGAVQIGNSDVFAEEKDGIDPSKLVDHQVAVAGLAVIANPKVKVSNLSSQQLQKIFSGEYTNWKQVGGEDLAISVINRAASSGSRATFDSVIMKGVNAKQSQEQDSNGMVKSIVSQIPGAISYLSFAYVDSSVKSLQLNGFKANAKNVATNDWPIWSYEHMYTKDKPTGLTKEFLDYMFSDEVQQNIVTHMGYISINDMEVVKSHDGKVTKR

SEQ ID NO: 15128 - DNA, 1095 bp, Leifsonia xyli subsp. xyli str. CTCB07
  CDS (1)..(1095): transl_table=11
gtgaaactgaagcgccttggcgttcccgtggccctcctggccgcggccgctctttccctcaccgcctgcgcagccaacgaaggcagcagcccggcggccacctcggcgaagccgtcgaatctctccggcaccctcaacggcatcggctcttccgcccagggagccgcccagaccgtctggatcgccggcttccagcaggacaacccgaaggcgaccgtcaactacgacccgcaaggctccggcgccggtcgcaagagtttcatcgcgggcgcaaccgacttcgccggctcggacgccgcgctcaacgacaccgagctctcctccacgttcgcgggttgcgccgcaggcagcaaggccatcgacctgccagtctacgtctccccgatcgcgatcgcgtacaacatcgacggtgtgaaggacctcaagctcgacgccgccaccatcgcgggcatcttctcgggcaagatcgccacttgggacgacgcgaagatcaaggggctgaacgcggacgcctcgctcccgtccgccccgatcactgtcgtacaccgttccgacgactcgggcaccacgcagaacttcaccgactacctcgcagcgaacgcgcccgacgtgtggaccgctcccgcgtcgcagacgttcccgttccagatcggtgacgcggcgaagggcacctcgggcgtcgcagaagccacgaagaacgccaagaactcgatcacctacatcgacgagtcgggctcggccggcctgtccatcgcacagctgaaggtcggcgacagcttcgaaaagatcagcgccgatggcgcagccgctgtggtcgccgcctccccgatcgccgctggccgcggcagcaacgacctcgccatcaagatcgaccgcaaggacaccgccaagggagcctggccgctggtcctcgtctcgtacgtcatcgcctgccaggagtacaaggactccgccaaggccgatctggtgaagggctacatcgactacttggtctccggccacgcccagaaggccgccgcaaagcaggccggctccgctccgctcgcgagcgatctctccgacaaggtctccaaggccgtcgccagcatcaagtaa

SEQ ID NO: 15129 - protein, 364 aa, Leifsonia xyli subsp. xyli str. CTCB07
MKLKRLGVPVALLAAAALSLTACAANEGSSPAATSAKPSNLSGTLNGIGSSAQGAAQTVWIAGFQQDNPKATVNYDPQGSGAGRKSFIAGATDFAGSDAALNDTELSSTFAGCAAGSKAIDLPVYVSPIAIAYNIDGVKDLKLDAATIAGIFSGKIATWDDAKIKGLNADASLPSAPITVVHRSDDSGTTQNFTDYLAANAPDVWTAPASQTFPFQIGDAAKGTSGVAEATKNAKNSITYIDESGSAGLSIAQLKVGDSFEKISADGAAAVVAASPIAAGRGSNDLAIKIDRKDTAKGAWPLVLVSYVIACQEYKDSAKADLVKGYIDYLVSGHAQKAAAKQAGSAPLASDLSDKVSKAVASIK

SEQ ID NO: 15130 - DNA, 855 bp, Symbiobacterium thermophilum IAM 14863
  CDS (1)..(855): transl_table=11
atggctgtgcttcgcagtcgcccgctggcggccatcctgctcgcggcaacgctgctcctcgccggctgtggcagccgcccgcaggccgatcccaacgaccccctggcggggaccatcacggccagcggctccaccgccctcctgccgctcgcctcgctggcggctgagatcttcatggaggagcacctcaacgtgacggtgaacgtcagcggcggcggctcgtacaacggcctgcagcaggtggcggtcggcgccgtggacatcggcaactccgacatcccggccaccggggagctggccgacgtgctggtggagcaccgggtcgccatcgccccgttcgtcatcatcgtccaccccgagaaccccgtggacgggctgacgatggagcagctggccgggatcctccggggcgagatcaccaactggcaggaggtcggcggtcccgacctggagatcgtggtcgtcagccggcagcagtcgtcgggttcgcgggcgaccatcgtggagaaggtgctggccggcgaaggcgacatctcgccccaggccctggtgcaggactccaacggcaaggtggtgaccaccgtgcagtatacccccggggccatcggctacatcgacgcgtcctatcaccggccgtcgaaggtgaaggccctggcgctggacggcgtcgcctactccccggacgccgtgctggagggtcggtggccgatctggacctacgagtatatgtacaccaagggggaacctgccgggcttgcgcgcgcgttcctggagttcgtgctgagccccgagttccaggaggagtacgtggcggagctgggcttcgtgcccatcacccgggagactgcccgctga

SEQ ID NO: 15131 - protein, 284 aa, Symbiobacterium thermophilum IAM 14863
MAVLRSRPLAAILLAATLLLAGCGSRPQADPNDPLAGTITASGSTALLPLASLAAEIFMEEHLNVTVNVSGGGSYNGLQQVAVGAVDIGNSDIPATGELADVLVEHRVAIAPFVIIVHPENPVDGLTMEQLAGILRGEITNWQEVGGPDLEIVVVSRQQSSGSRATIVEKVLAGEGDISPQALVQDSNGKVVTTVQYTPGAIGYIDASYHRPSKVKALALDGVAYSPDAVLEGRWPIWTYEYMYTKGEPAGLARAFLEFVLSPEFQEEYVAELGFVPITRETAR

SEQ ID NO: 15132 - DNA, 918 bp, Bacillus licheniformis ATCC 14580
  CDS (1)..(918): transl_table=11
gtgaaaccatttaaaaaaatcacactgatgttcatcatgtccgttttagttgtcttcgcagcagcttgtggaagcagcagtacaaacaacaatgcagacgaaggcaaacaaagcgataaaacagagaataaggcttcaggttctttgacgatttcgggttcttcggcgatgcagcctcttgtcttagcagcggctgaaaaattcatggatgaaaatcctgatgccgatattcaagttcaggctggaggttctggtacaggcctttcccaagtggctgaaggcacagtccaaatcggaaactccgatgtctttgccgaagaaaaagaaggcattcctgccaaagaacttaccgatcatcaagttgcggttgtcggaatggcagctgccgttaaccctgaagtaggcatcgatgacatttcgttagaagatctcaaaaaggtattcacaggtaaaatcaaaaactggaaagaactaggcgggaaagatcaaaagatcacccttgtcaaccgtcctgattcttcaggaacccgcgcgacttttgtcaaatatgcacttgatggagagactccagctgaaggaatcacggaagattcttcaaacacagtgaaaaagttaatcgctgaaacgcctggtgcaatcggatatcttgcgttctcgtatatcaaggatgatactgtcactccgctttcaatcgacggcgttaagccgacagccgaaaatgtacaaaaaggcaaattcccgatctgggcttaccagcattcttatacgaaaggcgaacctgaaggcttggcgaaagaattcctcgactatttgatgagcgatgacattcaaaaatccatcgtgacggagcagggctacattccagtaacagacatggaagtaaaacgcgacgcggatggaaagcaaactgataaataa

SEQ ID NO: 15133 - protein, 305 aa, Bacillus licheniformis ATCC 14580
MKPFKKITLMFIMSVLVVFAAACGSSSTNNNADEGKQSDKTENKASGSLTISGSSAMQPLVLAAAEKFMDENPDADIQVQAGGSGTGLSQVAEGTVQIGNSDVFAEEKEGIPAKELTDHQVAVVGMAAAVNPEVGIDDISLEDLKKVFTGKIKNWKELGGKDQKITLVNRPDSSGTRATFVKYALDGETPAEGITEDSSNTVKKLIAETPGAIGYLAFSYIKDDTVTPLSIDGVKPTAENVQKGKFPIWAYQHSYTKGEPEGLAKEFLDYLMSDDIQKSIVTEQGYIPVTDMEVKRDADGKQTDK

SEQ ID NO: 15134 - DNA, 1113 bp, Nocardia farcinica IFM 10152
  CDS (1)..(1113): transl_table=11
gtgaatttcaagcgcagcagcgccctggtgggtgctctggccgtcgtcgccatgcctctcgccgcctgtggcagtgacgacaacaccagcggtgacaccagcaacgcggccaacagcagcgtcgcctgcggcggcaaggagtcgctgaaggccagcggcgcctcctcccagaagaacgcgatggagcgcttcatcgccgcctacgaagccaactgcgacggctacaccctcaactacacctccagcggctccggcgcgggcgtcaacgagttcctcggcggccagaccgacttcggtggctcggactccccgctcagccagtccaagggcgagcctgccaaggcccaggaacgctgcggcgccccggcctggaacctgccgaccgtgttcggccccatcgccatcacctacaacatcgacggcgtgaccgacctcgtgctggacggcccgaccgcggcgaagatcttcaacggcaccatcaagacctgggacgcccccgagatcaaggcgctgaacccgaacgcgcagctgcccgccgcgccgatcgcggtgatcttccgctccgacgagtcgggtaccaccgacaacttccagctctacctggacgcggcctcgggcggcgcctggggcaagggcggcggcaagaccttcaacggcggtgtcggtgagggcgccaagggcaacgagggcacctcggccgcgatcaagaacaccaagaactcgatcacctacaacgagtggtccttcgccaagtcgcagaacctctcggtcgcccagatcgtcacctcggccgggccggagccggtgaagctctcggtcgagaccgcgggcaaggccatcgacggcgtgaagatcaagggcgagggcaacgacctggtcctcgacaccagctcgttctaccagccgaccgtggcgggctcctacccgatcatgatggcgacctacgagatcgtgtgctcgaagtacgccgatgccgccaccggccaggccgtcaaggcgttcctgacctcggcggtgaccaacgggcagaacggcctggaggacaacgggtacatcccgatccccgagcagttcaagacccggctgaccacggcgatcaacgccatctcctga

SEQ ID NO: 15135 - protein, 370 aa, Nocardia farcinica IFM 10152
MNFKRSSALVGALAVVAMPLAACGSDDNTSGDTSNAANSSVACGGKESLKASGASSQKNAMERFIAAYEANCDGYTLNYTSSGSGAGVNEFLGGQTDFGGSDSPLSQSKGEPAKAQERCGAPAWNLPTVFGPIAITYNIDGVTDLVLDGPTAAKIFNGTIKTWDAPEIKALNPNAQLPAAPIAVIFRSDESGTTDNFQLYLDAASGGAWGKGGGKTFNGGVGEGAKGNEGTSAAIKNTKNSITYNEWSFAKSQNLSVAQIVTSAGPEPVKLSVETAGKAIDGVKIKGEGNDLVLDTSSFYQPTVAGSYPIMMATYEIVCSKYADAATGQAVKAFLTSAVTNGQNGLEDNGYIPIPEQFKTRLTTAINAIS

SEQ ID NO: 15136 - DNA, 825 bp, Photobacterium profundum SS9
  CDS (1)..(825): transl_table=11
atgaaaacaaaggttatcggtgcactagctcttgcaggttcaatggcattcagtgttgctgcagttgcaaacgaaactatctctgttgtaggttcaagttcagttacaccattaatggaagtgtttggtgaaacttacagccaagcacactctaatgtttttgttgaagttcaaggcccaggttcatcagctggtgttcgtgccgcaaccgatggttctgctgatttaggtatgagttctcgtaatcttaaagattcagagaaatcagatgatttaaaagaaattgtcgttgcacgtgatggtatcgctgttgtagttaacaacaagaacccaatcactgacttatcaaaagaagacgtaacgaagatttacaaaggtgaaatcactaactggaaccaagttggcggtgaagataagccaatcgtagtggtaacacgtgacacagcatctggtacacgcggtgctttcgaagacatcatgtcgctgaagaaaaaaattaacgacatcacagtatcagctatctctcagcgtgctcaggttacaagtggtaacggccaacttaaaacaacagttgctaacaacccgtttgcaattggttatatctctcttggtactgttgatgattcactaaaagcactatcaatcgacggtcacgtaccttcagttgcagctatcaaatctggtgaataccaagttcaacgtcctttccttgtgctttacaagacaagcaaaattaacccaaccacgcagtctttcttagattggacgctaaccactgaagcacagaaaattgtttcagctaaaggctacattgcagttaactaa

SEQ ID NO: 15137 - protein, 274 aa, Photobacterium profundum SS9
MKTKVIGALALAGSMAFSVAAVANETISVVGSSSVTPLMEVFGETYSQAHSNVFVEVQGPGSSAGVRAATDGSADLGMSSRNLKDSEKSDDLKEIVVARDGIAVVVNNKNPITDLSKEDVTKIYKGEITNWNQVGGEDKPIVVVTRDTASGTRGAFEDIMSLKKKINDITVSAISQRAQVTSGNGQLKTTVANNPFAIGYISLGTVDDSLKALSIDGHVPSVAAIKSGEYQVQRPFLVLYKTSKINPTTQSFLDWTLTTEAQKIVSAKGYIAVN

SEQ ID NO: 15138 - DNA, 858 bp, Photobacterium profundum SS9
  CDS (1)..(858): transl_table=11
gtgaaatctaacttattacggagaaagtcaatgttttttagggcaactacccttgtggcattgtgtgcaagcgtggcgtttagtgcacaagccaaaacagatactgtcacaattactggatcaacatcagtaagccatgtgatggaaatcttagcagaagcttattcaacctctcatatagatacttttattgctgttcaaggcataggttcttctgctggcatttctgcagtaaaacaagatgccacagaaataggtatgagctctcgccgtctgagtgaagatgagataaaccctgatgtgaaaatggtaacaattgcacatgatggcattgctttggtcgtcaatcaaaacaaccctgttaacaacctcacaaaagagcaagtatcaaagatttaccatggggaaattaaaaactggcaggaagtcggtggtccaaatctaaaaatggctgttgttagccgtgaaaatgcttctggctcacgcttttcttttgaagactttatgggcttaacccaaaacattgaaggtcaaagggtatctgatataaacccacaactcttagtagttaacactaatggcatggtgaaaagtttagtctctcgtaatgtacatgcacttggctatatgtctttaggttctgtggatgactctattaagccgttgtcttttgaaggcgttaagccaaccattgataacctcgaatcaggagagtatttaatctctcgcccttttttaatgttatataaagagaagaacgtatcaaaaaatgcacaagcgtttttaaactacgttatttctaatgaagggcagaatattatcggtgaacgtggatacattacgaaccataaaagttaa

SEQ ID NO: 15139 - protein, 285 aa, Photobacterium profundum SS9
MKSNLLRRKSMFFRATTLVALCASVAFSAQAKTDTVTITGSTSVSHVMEILAEAYSTSHIDTFIAVQGIGSSAGISAVKQDATEIGMSSRRLSEDEINPDVKMVTIAHDGIALVVNQNNPVNNLTKEQVSKIYHGEIKNWQEVGGPNLKMAVVSRENASGSRFSFEDFMGLTQNIEGQRVSDINPQLLVVNTNGMVKSLVSRNVHALGYMSLGSVDDSIKPLSFEGVKPTIDNLESGEYLISRPFLMLYKEKNVSKNAQAFLNYVISNEGQNIIGERGYITNHKS

SEQ ID NO: 15140 - DNA, 4956 bp, Acanthamoeba polyphaga mimivirus
  CDS (1)..(4956)
atgaaaagtattggtatatttgtagtagccttatggctaactcatttttgtgacggaggacaattaggagctcgtatttatagttccggaagtgaatcatcagttttattgtttgatcaatacatcaataaatatgcatttacaaatggagatgttaagattatctatgagggaaaatctatttttgaaattttgtctgaaacttatgttacggattttaatatattcgacagagctatttcacaagacaatttggatatgtttcaaattgtccaatttcctttggcaggtcaagcaattgtaatgacatacaatctacctgaactagttaattcaagttacagattagtgattgatagagaaactttgggaaaaatctggtatggtgctattagtaaatggaatgatacagctattcaaaatctcaatccgactgttggtcatttattacctgatactgatattatacttggatacagcgacgattacattatgacaatttcaggattgataaaaatggcattgagtagttttagtccagaatttgataccgaacttaaatatgctaataatacttttaatggtatgaatccgacaaaaaatggtagaggacataatatcggtgaaacatctaccgtccgattagaatggctcaaaaaaacatcttatggtttaacatatattaattatgctgatgtgtataataatggtacagattcaactgtacctatgaacatgtataataaagccggatattttgtcgagccaaatttagttagtgttcaagcggctatgtccgatttcaagatattttatgccaataacaattctactattgatatttacgatgctcctggtaataaatcttggccattggcttacgtaaattatcttggatgttcaagtgcttttggacctatggcagattgcacacgtacaattcaaatgactaattttattgcttggatatacactaatgatgcagcttctgaatctgcaattgaacttcaattttatcctttggataaaacactacaaaaagtagctattgacaatttatacaatatcaaatgtaataacatagcagttttatctcaacagtatttaataggttttggagcacccattagcgttatgtcgttatggcctaattcatggactacagttgcatctactgcacgatattatagtgctccatcatctcaagctcttgaattacaagaaacttatggtgccgattttggaataactgtgaccggagttcctaatacatatttcaataaaatgcccgatttaggtgttatgccattagctgcttttactattgttccagcctataatattccagcaatcaatggaacaaacggaacattaattcttgattatgagattattacggatatttatttaggaatcataaataattggaatgacagtcgaattagggctctcaatggaattgaaatcaatagaaaacttccaaacgttagtataacagtaatttatcaggctgtttcatcggattataatttcatgtttactgatttcatgagtaagaaatcaccaaaatttgcgaaaaaaattggttcaacatattttccaatactaacacttccaaataattctatgataattacaacagatatttatgatgttggtaatcaacttattagtaattccaattcttttgcattttggccttattttggtataactatgttgtcaagacaaccgacagttcaagcggcatcaattcgaactgaaaagggtaatattattagttctaattcaacaactttagaaaaagccatcaataattttataagtaaaggtggttcaattgaagacgctccatacataatgggtgaaaatgatgaatcttggccgttatcagctttaatgacaatgatttacagacaatctacaatacattacgctgcgaaagcagctgctgttgcagactttgcatattggactcagtccaatccaactgctataaatattgccactattcaaggaatgtatgtagcatccaataatcctacactcaaaagtcgcaatttaaatttattgaaaaattttgtagttgatggagaacctattagttctattgcaaactgtatttaccaaggtacaatttgttcggatatgggtacttgtaataataatagttgtttatgtaattcttatcgcaaaggtatttattgtgaaaatattgtttctagttctggagaaagtattggaatcattttggctattgttatacctgtttcatttgtcatttgttgtattattattgtactagtaattgcactcattgtttctatcaggcttcatcaacgcgttgaagacgaatgggaagtagattttcatgaattggatttcatggaatcacttggatccggaggatcaggggaagtgtttaaggcaatgtggaaaggaacagaagttgctgtcaaaaaattagtaaattccaacattactaaagatgcagaaagaaatttcaaacaagaaatccatcgtatgacttcacttcgacatccaaatgttgtgttatttatggcagcttctacgagacctcccaatatgtgtattgtcatggaatttatgtctctaggttctctgtatgatcttcttggtaacgaacttgttactgaaattcctcctgttcttagaattagaattgcttatcaagcagcaaaaggtatgcattttctacattcttccgatattgtccacagagatcttaagtctcttaatttgcttcttgattccaaatggaatgtcaaagttagtgattttggtttaactaaaattaaagacaataataaaggaaaatcttccacaaaagaagattcagtttgttctattcaatggactgctcctgaagtactttcagaaaaacaagatattgattatattttagcagatgtttattcatttggtattattatgtgggaattaatgactcgattaagaccctatattggtttatctccagccgctatagcggttgctgttataagagataatttaagacctgaaattcaagaagaagacattaatctcatgtcttccgattacgtggaattagttaatatttgctggcacaaagacacaatgattcgtccgagttttcttgaaatcatgactaaattgtctactctcattggaggttcaggtattacaactggtacttcaacttcttcatcaaatcaatcaagtgattacataggaccaaatataattactcgaacaaaaaatattcacaataatgacgaaacaaaaaattcattcggctctacaacatatggatctaatacaatttcaagttcttcgaacacggagtctgataaaatcttgtcgaaattaaacaagaaaaaaattccaactggtgaagtaatcattgtttttaccgatattatttcggcagaacaactctggcatcataatccactagcaatgaaaaatgcaacggttctttataatgcagtaataagagaaacgttagataaaattggtggatatgaaagttttatttacaaagatcataatagtggagaaggatctttttgtctagtttttcaagaagcaatagacgctatagatttttgttcaattagtcaaaaaaagttactagaaatagattggcctgaagaattattggatcatccagctgcagcgagtgaaaaagacattaatgggacaatgatttttgctggtcctcgtgttaggatgggattgcatgctggaacagtcaaaattatgcaagatccagttactcgtagatatgaatattctggtgttaccgttaatattgcggctaagattactatgatgacacatggtggtcaagttattatgagtgagcaagttaccgataaaatctccaataatgattgttccaatattaaatcgttaggacaaattgagattactgatactaataactacaaagtaaatatatttgaattaaggattgagggattaataggtagattctttggaggtgttgcattttataattatgattcggtcacagaatcaacagatcttgatgatacttatccagacagtcttaatttctcgacaaatggaatactttatgggggtattaaacaagaaaatgagtatctttcatctgctggattatgtagatggattattaactacgatgatattcaaataggtaaacaaattggagtaggatcttatggaattgttaatatgggtaaatggaaaaatattaatgttgctgttaaaaaatttgtcaaacaaaaaatagatgaaaaacaaatgcttgaatttagagctgaaattgcttttctttcacaattacgtcatcctcatatcatcttaatgattggagcttgtctaaaacgtccaaatatttgcattgtgactgaatttatgggaaacggtagtttgagaaatgtcataaaaacaactaagccagagtggaaactcaaaatcaaaatgttgtatcaaacagctttaggaattggatatttgcataattctgatccaattattattcatcgtgacattaaaccatccaatattctagttgatgatagtatgaatgtgaaaattgctgattttggatttgcacgtatcaaagaggaaaattccgtaatgacacgttgtggaactccttgttggactgctcctgaaattattcgtggagaaaaatatacagagaaagtagatgtattctcttttggaattgttatgtgggaagttctcacttgcaaagaaccattttctggttgtaattttatgaaagtttcaatggacattttagagggagcgcgtcctcaaattccttcggattgtcctattgattttaccaaattaatgaaacaatgttggcatgctaaacctgataaaagacctagtatggaagatgttattatgggtttgaatgatatgcttggaccagaaaaatctttgtaa

SEQ ID NO: 15141 - protein, 1651 aa, Acanthamoeba polyphaga mimivirus
MKSIGIFVVALWLTHFCDGGQLGARIYSSGSESSVLLFDQYINKYAFTNGDVKIIYEGKSIFEILSETYVTDFNIFDRAISQDNLDMFQIVQFPLAGQAIVMTYNLPELVNSSYRLVIDRETLGKIWYGAISKWNDTAIQNLNPTVGHLLPDTDIILGYSDDYIMTISGLIKMALSSFSPEFDTELKYANNTFNGMNPTKNGRGHNIGETSTVRLEWLKKTSYGLTYINYADVYNNGTDSTVPMNMYNKAGYFVEPNLVSVQAAMSDFKIFYANNNSTIDIYDAPGNKSWPLAYVNYLGCSSAFGPMADCTRTIQMTNFIAWIYTNDAASESAIELQFYPLDKTLQKVAIDNLYNIKCNNIAVLSQQYLIGFGAPISVMSLWPNSWTTVASTARYYSAPSSQALELQETYGADFGITVTGVPNTYFNKMPDLGVMPLAAFTIVPAYNIPAINGTNGTLILDYEIITDIYLGIINNWNDSRIRALNGIEINRKLPNVSITVIYQAVSSDYNFMFTDFMSKKSPKFAKKIGSTYFPILTLPNNSMIITTDIYDVGNQLISNSNSFAFWPYFGITMLSRQPTVQAASIRTEKGNIISSNSTTLEKAINNFISKGGSIEDAPYIMGENDESWPLSALMTMIYRQSTIHYAAKAAAVADFAYWTQSNPTAINIATIQGMYVASNNPTLKSRNLNLLKNFVVDGEPISSIANCIYQGTICSDMGTCNNNSCLCNSYRKGIYCENIVSSSGESIGIILAIVIPVSFVICCIIIVLVIALIVSIRLHQRVEDEWEVDFHELDFMESLGSGGSGEVFKAMWKGTEVAVKKLVNSNITKDAERNFKQEIHRMTSLRHPNVVLFMAASTRPPNMCIVMEFMSLGSLYDLLGNELVTEIPPVLRIRIAYQAAKGMHFLHSSDIVHRDLKSLNLLLDSKWNVKVSDFGLTKIKDNNKGKSSTKEDSVCSIQWTAPEVLSEKQDIDYILADVYSFGIIMWELMTRLRPYIGLSPAAIAVAVIRDNLRPEIQEEDINLMSSDYVELVNICWHKDTMIRPSFLEIMTKLSTLIGGSGITTGTSTSSSNQSSDYIGPNIITRTKNIHNNDETKNSFGSTTYGSNTISSSSNTESDKILSKLNKKKIPTGEVIIVFTDIISAEQLWHHNPLAMKNATVLYNAVIRETLDKIGGYESFIYKDHNSGEGSFCLVFQEAIDAIDFCSISQKKLLEIDWPEELLDHPAAASEKDINGTMIFAGPRVRMGLHAGTVKIMQDPVTRRYEYSGVTVNIAAKITMMTHGGQVIMSEQVTDKISNNDCSNIKSLGQIEITDTNNYKVNIFELRIEGLIGRFFGGVAFYNYDSVTESTDLDDTYPDSLNFSTNGILYGGIKQENEYLSSAGLCRWIINYDDIQIGKQIGVGSYGIVNMGKWKNINVAVKKFVKQKIDEKQMLEFRAEIAFLSQLRHPHIILMIGACLKRPNICIVTEFMGNGSLRNVIKTTKPEWKLKIKMLYQTALGIGYLHNSDPIIIHRDIKPSNILVDDSMNVKIADFGFARIKEENSVMTRCGTPCWTAPEIIRGEKYTEKVDVFSFGIVMWEVLTCKEPFSGCNFMKVSMDILEGARPQIPSDCPIDFTKLMKQCWHAKPDKRPSMEDVIMGLNDMLGPEKSL

SEQ ID NO: 15142 - DNA, 4974 bp, Acanthamoeba polyphaga mimivirus
  CDS (1)..(4974)
atgaggttgaatagtcaaatagttttctgcattgttgtggttataagttgtctgagtatgattgaatgcaaaatgggttctaggatttactgttctggatcattgtcatctgttgaattgtttagtcaatacatcagtaattatgctcttcgcaatgatgatgtcacaatcatctacgctggaatgtcagttgatgaaatcaacgctgatgtttatattgccgattgtagcgcttatgatagagccattccgcaaatttatatgatttcgtatggattgattcaatttcccatagtcggacaagctattgtcatcatttataatgttcctggtctgtctagtcacaatatgattattgatagagaaacacttggtagaatttggactggtaacattagaaagtggaatgatattcaaatccaaaatttgaatcctgatattgcttctcaactgcctaacgaaacaattacattgggatacaatgatgcatactatctgtcaatttcagagataatgcagttggctctacgaaattttagcgaagaatttgctaatgcccatactattgcaggaggtaaatttggaaatatgattccggcaaaacaaggatatgcgattgatgctggtgaagcatcagaaagcagaattgattgggttaaaaatactccgttcagtcttagttttgccgattttgcgacagtttatcctcgaaatgtatcctacatgcatatgtacaataaggccggaaaactcgttgaacctaatattacgacagtacaatccgcgatggcagatttcaaggaaatttataccactaatgatttcaccattgatatttttgacgcatcaggagaaaactcttggccaatctcatgggtaaactatatttctatgacttcgacttttcaacaagctgattgtattagaaccaaagaacttttggattttattgcttggttctacatgaacaatgaaatcgctgaaatcattaaggaatatcaatattatcctcttgataacacaattaaaaagattgccattgacaatatgtacaatgtaacttgtaatggaaaagtttcgcaagagcatcagtatttgattgcatttggatcacctctctcgattatggcgtcatggcccaatacatgggcatcatctatgacaactgtaaaatactatgcttctttgtctgatcaagcgattgaattgcaaaaaactttcagtggtgattttggaattactatcaaagattttgacaaaaataagtatttgtcatctacaatggaagatattggagtttcacatttagctgcttttaacattgtacctgcatacaatattcctgaattcattggtcttaatgagacattggtattgaattatgaaactattgttgacatttatttgggacttgtcacaaactggaatgattctagcatccgaaattcaaacaatccgtatattaacagtctattgcctaacaagacaatcactgttgttgtccaaaaagtagaatcggatgttaatgagttgttcacaaattttttgagttgtaaatcagacaaattcaacaatgctattggacctacaaatcttcctgaattcgattttgtttcaaacaatgttgtttatactgaagacgtgtacggagttggaaatacacttgttagtaccgattattcattcgcattttggcctgaacctggaattagattgttgtctcacatggcaattgttcaagctgctagtattcaaacatcgactggaacaatcatcaaaccgactaatgaaactcttagtaaagctgttgataataagattaatagtattaatcgtagagatattgaagatggtagttggccatttattgcgatgatgtcattggtatatcatcaaaaaactatgcaatctttctccaaggcttcagcacttgctgattttatttattggacacaatttgatgatacagcagcgagtatcgctgatactcaaggatattatgtggctagtattcatccaacgattttgagagaaaatctcgaacttcttcaatcatttacttttgaagatcgcacagttagtaaagtcgccaattgtatttttgaaggaacaatttgttacaacaaaggaacttgtaacaataatgtttgtttgtgtaatattgatcgcgaaggacagttttgtgaattggaaaaaacacaatcagacacaaatattgttacaattattttggctgttgtaattccaattgcatttattattgtgtgtattatttgtatccttgttgtagctctaatcttttcacttaggtttagaaaaggaatcagtgatgactgggaaattgatttccacgaattggaacttggagaacaacttggtactggagcttttggtgaagttcataaaggaacctggagaggtactgaagttgctgtcaaaatgatatcgccagataaaaccatcaccaaagatattgaaagaaatttcaaggatgaagtcagagtaatgacaactttgcgacatcctaacgttgttcttttcatggctgcttcaacaaaaccacccaaaatgtgtattgtaatggaattcatggctcttggctcattgcatgatttgttgaaaaacgaactcatcccagatataccttttgctctcaaagtcaaaatcgcatatcaagcatcaaagggtatgcatttcctgcattcatcaggaatcactcatcgtgatctcaagtctttgaatctacttcttgacattaagtggaatgttaaagttagtgattttggattgactaaattcaaatcagatgttaagtccattaatcctgaaaaatttgcaggtactattcaatggacagctcctgaaattcttagtgaagatagagaagtggactacattttgtctgatgtttattcgtttggcattattatgtgggaattgataactcgtgatcaaccctattttggtatgagtccggctgcaattgctgtttcagttattcgagacaattatagaccagttatctcagaccaactcagatcagaagttgctccagaatacattgaactactcacaagttgctggcactttgatccaaccattcgtccaacttttttggaaattatgacaagattgtctaatttgatgggagattctggtatgactggtatgtcatcatcttcatccaatagttctaaatttgattacaatagtttcggaaaagttcaacaattcgcaattaatcgtactgatcctgatggaatagttcaaaattcatacaatagaacagatagttatgatttgggttctaataattctcactcatccataacatccgataccaacaaatctaataaatatttgaggcagacaaatattcaacatcctactggagaagtagtagttgtatttactgatattatttcagctgctcaattgtgggaatttgatgcatccgaaatgaagaacgccacaattttgtataacaaacttgtaagatccatttgtaacgaatgtggtggatatgaaagtcttatttccaaagaaagaaatagtggagaaggatctttttgtttgattttttcagatgtgcaaaatgccattaccttttgtgaagaactacagaaacaactagtcggtgtgaattggtctcctaaacttttggaacatccgattaccgctattgagaaagatattaatggtacaatcatatatgccggacttcgtgtcagaataggattgcattttggatcaacaaagattaattacgatcctataagtcgtaagtatgagtatatcggccctactgtcactacagcagctgctgtaacaactataactcacggtggccaaattataatgacagaagatgttgctaataagctttcaaccgaaaattcaaacaaaccggtatgtttgggacgagtagatattgatggtattccggattctctggtattgtacgaatatgtaatttctgcattgattggtcgctttttcggcggagtgactcgaaaaaatgctagttttgtcagtaatgagacatcaactgattatgacgatatggatactgacaattctacattttcagcaagggttccgcatcaagcttaccaatatcatgcagctattgaaaacaacgagcgctatcttacatccgctggactttgtagttgggtcattaattatgatgagattaagatgggtgaacagatcggattgggatcctatggcgtagtttatcgtggtaaatggaaaaatgtcgatgtggctattaagaaattcatcaagcaaaaaatcgatgaaaatcatcttctgggtattagagaagagatcgcatttttgaagaaactacatcatcccaacatcattacaatggttggtgcttctctaaagaagcccaatatttgtattgttactgaatatatggcaaaaggtaatttgagggatgctatgcgaacttgtacccccaaactagaatggcaccaaaaaatcaaaattctagttaacattgctaaaggaatcagttatcttcacagtttcgatcctccgattattcatcgtgacattaagccatcaaatattctcatcgatgaaaattggaatgtcaaaattgccgattttggatttgctcgcatcaaagaagagaacgccatcatgactcgttgtggtactccttgttggactgctcctgaaattattcgtaatgatatctatgacgaaaaggtcgatgtattttcttttggaattgttatgtgggaagtattgacttgtaaagaaccttttattggagcaaacttcatgaagattaccatggatattttggaagatgtgagacctaaaattcctcaagattgtcccgaagaatttgccaaacttatgagaaaatgctggcatgctaagtcaaccaagagaccgacaatggacgatgttattattgtacttgctaagttttgtcctgatattagtgtgtaa

SEQ ID NO: 15143 - protein, 1657 aa, Acanthamoeba polyphaga mimivirus
MRLNSQIVFCIVVVISCLSMIECKMGSRIYCSGSLSSVELFSQYISNYALRNDDVTIIYAGMSVDEINADVYIADCSAYDRAIPQIYMISYGLIQFPIVGQAIVIIYNVPGLSSHNMIIDRETLGRIWTGNIRKWNDIQIQNLNPDIASQLPNETITLGYNDAYYLSISEIMQLALRNFSEEFANAHTIAGGKFGNMIPAKQGYAIDAGEASESRIDWVKNTPFSLSFADFATVYPRNVSYMHMYNKAGKLVEPNITTVQSAMADFKEIYTTNDFTIDIFDASGENSWPISWVNYISMTSTFQQADCIRTKELLDFIAWFYMNNEIAEIIKEYQYYPLDNTIKKIAIDNMYNVTCNGKVSQEHQYLIAFGSPLSIMASWPNTWASSMTTVKYYASLSDQAIELQKTFSGDFGITIKDFDKNKYLSSTMEDIGVSHLAAFNIVPAYNIPEFIGLNETLVLNYETIVDIYLGLVTNWNDSSIRNSNNPYINSLLPNKTITVVVQKVESDVNELFTNFLSCKSDKFNNAIGPTNLPEFDFVSNNVVYTEDVYGVGNTLVSTDYSFAFWPEPGIRLLSHMAIVQAASIQTSTGTIIKPTNETLSKAVDNKINSINRRDIEDGSWPFIAMMSLVYHQKTMQSFSKASALADFIYWTQFDDTAASIADTQGYYVASIHPTILRENLELLQSFTFEDRTVSKVANCIFEGTICYNKGTCNNNVCLCNIDREGQFCELEKTQSDTNIVTIILAVVIPIAFIIVCIICILVVALIFSLRFRKGISDDWEIDFHELELGEQLGTGAFGEVHKGTWRGTEVAVKMISPDKTITKDIERNFKDEVRVMTTLRHPNVVLFMAASTKPPKMCIVMEFMALGSLHDLLKNELIPDIPFALKVKIAYQASKGMHFLHSSGITHRDLKSLNLLLDIKWNVKVSDFGLTKFKSDVKSINPEKFAGTIQWTAPEILSEDREVDYILSDVYSFGIIMWELITRDQPYFGMSPAAIAVSVIRDNYRPVISDQLRSEVAPEYIELLTSCWHFDPTIRPTFLEIMTRLSNLMGDSGMTGMSSSSSNSSKFDYNSFGKVQQFAINRTDPDGIVQNSYNRTDSYDLGSNNSHSSITSDTNKSNKYLRQTNIQHPTGEVVVVFTDIISAAQLWEFDASEMKNATILYNKLVRSICNECGGYESLISKERNSGEGSFCLIFSDVQNAITFCEELQKQLVGVNWSPKLLEHPITAIEKDINGTIIYAGLRVRIGLHFGSTKINYDPISRKYEYIGPTVTTAAAVTTITHGGQIIMTEDVANKLSTENSNKPVCLGRVDIDGIPDSLVLYEYVISALIGRFFGGVTRKNASFVSNETSTDYDDMDTDNSTFSARVPHQAYQYHAAIENNERYLTSAGLCSWVINYDEIKMGEQIGLGSYGVVYRGKWKNVDVAIKKFIKQKIDENHLLGIREEIAFLKKLHHPNIITMVGASLKKPNICIVTEYMAKGNLRDAMRTCTPKLEWHQKIKILVNIAKGISYLHSFDPPIIHRDIKPSNILIDENWNVKIADFGFARIKEENAIMTRCGTPCWTAPEIIRNDIYDEKVDVFSFGIVMWEVLTCKEPFIGANFMKITMDILEDVRPKIPQDCPEEFAKLMRKCWHAKSTKRPTMDDVIIVLAKFCPDISV

SEQ ID NO: 15144 - DNA, 4875 bp, Acanthamoeba polyphaga mimivirus
  CDS (1)..(4875)
atgcattctgtctacactaaatacaccattattttgatactgttggttatttatcaaggattacctacaaatacgcaagtagcatccagaatttttggcgttggtagtaaatcatccgggcctctttatcgtcaattgattgatatttattcgtatacttacgataatgccgtgttcattttcgaggacttacctattgatgttatattgacccaagtcgattatattgattatgtgggtcttgacagatgtatttctcatgaatatgaagaaatatttaatctggtgcaatttcccctggctggtcaagctattgtgatgacttacaacattcctgaactggcgaatctcgatactagaattgtcattgatagacaaaccttgggaaaaatttggactggtgaaatttccaagtggaatcatccagatattatcgcacttaatcctactcttaacggtactttacctgacaaagaaattaaattaggttacaatgatgatggtaacgtatcaatttctggtattgttcaagctgcattatcaagtttttatggtaattttgcaactgaatttaataatgccggacagttattcgcgaatatgtctttcgcaaatgaatctcgatgtgtaaatattggaccatcttctcgggagcgctttgattgggttaaaaacactacttacagtttgacttttgtaaattatgctgacgttttcaataataccaatcctaatatttccgttatgaacatgtacaataaggccggaaatttggttgaaccttctcttgaaagtgtacaattcgcaatggctgatttcaaagatgaatatagtaacaacaactttgctcttgatgtttttgatgctcccggtaataattcgtggcctctatcttatgtcaattatattgtgatgagcaagagatttttccaattggattgtagtcgagctgatgttgttttaaagtttatcgcatgggtttatactaataccgctgctagtaaggcactaacacaaaaccaattctatccacttgataataccctaaagaaagtatcgattgataacatttacattgtcaagtgtaataatgtttcggtttctgagcaacagtatctaatctcttttggaggttcaacatctattgtaccatcatggttgactgcctttacttcaggttcaattgtggcaaagtattattcaacactatcttcgaattcaatcgaactacttacaacacacggttgtgattttgcggttacgattaatggtgtagatcagaaattttatcaggaaattgaagatttggcagttatgccattggctgcattttcaattgttccagcctataatatccctgaaattgttggaaaaacacttgttctagatatcgatgtcattgtgaaaatttatttgggcgagattaccaattggaacgatacaaagattcgtaatctcaatccagaaatatccaattatctacccaatgcaataatcaatgttgttgttcaaaacattgaatccgatatcaatcaaatttttactaaatttttgagtcaagaaagtgaaattttttctcaagaaatcgggcaaacatataatccggatctatcattgtttaattcaagtgtaatttttgttgatgatattgacggtttgggagatgaacttattgacaataaatactcatttggtttttggactgattttggtgtaagattgttgtccagagttcaaaccgtccaaatggctagtttgaaaatcaatgatgacattattgaacccaattatgacactctcaaaaatgccattagttctgaatctaaccaaattgcacgatctactaattctaatgtctggcctattacatctatgatatctattgtttaccctgaaactactatgaaaaacaaagataaagctgttgctattgcagaatttatgtactggacacaatatgatcctctggctattaatagcgccaataacaagggatactatttggcatcatcagatcctcaattaaggagcgttgttttggatttgttgaaaaattttaagttcgaggatgaaagtgttagtagctatgctaactgtatttatcaaggtagtatttgtagtaattttggtacttgtattgaaagtgcttgtatttgtaattctagtagaactggaacttattgcgaaaagattataactgattcagaaaataatactctaattattattcttgcaacagtcattccaattgcttgtatttttggattactgctactaactctacttatcgttattattttcttgttgaaacatcgtaacacaacaaataatgattgggaaattgatttttctgaactggaaattggtgaaaccctaggaacaggaggttatggagaagtttacaaatccatttggaagggaacagaagttgcagtcaagttgatctccagtaaacatgtttctaaagatatggaacgttctttctttgaagaagttaaaataatgactagtctacgtcatcccaatgtggttttgtttatggctgctagtacaaaatcaccaaatatgtgtattgtgatggagtttatgtctcttggatctctttacgatcttcttggtaacgaacttattccagaaattccttatgctcttaaaattaagatggcttatcaggcttcaaaaggtatgcattttcttcattcatcaggtattgttcatcgagatttgaagtcgcttaatttgcttttggattcaaaatggaatgtcaaggtcagtgattttggtcttactaaagtcaaatctgaacttgacaaaaagaaaaccaatgataacattattggaactattcattggattgctccagagattctaaatgatagtactgaagttgattatattctggcagatgtttattcgttcggaatcattctttgggaattattgacacgtgaacaaccgtacaagggaatgactcctgctgccatagctgtatctgttattcgagatggaatgagaccaccaatttcagatgaggctgttaccgcgcattctattgaatacattgatcttatcaaacagtgttggcattctgatactattattagacctacattccttgaaattatgacaagattgtctaatattcttggagattctagtaatatgacgtctggaacaagttcatccagtctatcaagtggtggaattggaaaatctatcacggatagtaagtcaagtaatagtaggtccagtgttgaatcatctaatacaagcaatacattcagaggaatagatagacataattcgcatcctactggagaagttacggttgcatttattgatattatttctgccagtaaactatgggaatacgatcctgatggtatgtgtgaatcaaccaaaatgtataacgagattatacgccgagtaaccaagaaatatggtggttatgaaagtttcatttccaaagacagaaacagtggtgaaggatcattctgtctggtattttcggacgctattcaagccattaactcttgtgaagagatgcaacttcaactactcaatgctaactggcccaaaaagattctgcaacatccggcagcagcagaagaatttgatagaactgatcaactcatattccgtggactcagggttcgaatggctcttcattgtggatctgtaaagatttctcaagatccaatgacccgaaaatatcaatattcaggatcaactgtcaatattacaggaaaaattactaccctaacacatggtggacaaattattgtttctgaaaatctttatcaaaaagtaaataatgatttcacatttattacggtaggaaagatcgatattcctgattatccaagcaaaatgaccctttatgaaatcaagttcgagattctcaaaaatagattctttggaggtatcacatatgttaattataatgatgatactgattcaggaacagctgatgattcaaattatgattctggaaagattatcgatattgattacatggctgatatcgataaagaagattcattcttgacttcagctaatatgtgtagatggatcattaattacgatgaaatcagtattggaaaacaaattggtctcggatcttatggaattgttttcaacggtaaatggaaaggagttgatgttgcagtcaagaaatttgtcaaacaaaaactttctgaaactcaactccttgaattcagggcagagatggcatttttgtctgaattgaaacattctaatattgttacctttatcggagcttgtatcaagaaaccaaacatttgcattgtgactgaatatatgagaatgggtaatttgagagatgttttgaaaaatcctgacattaaaattacttttgccaacaaattaaaattgctttatggagcggctatgggtattgattatcttcattcatcaaacccaatgattgttcatcgagacattaagccagcaaacattcttgttgatgaacatttcaatgtcaaaattgccgattttggatttgctcgtatcaaagaagacaataccacaatgactcgttgtggtactccttgttggactgctcctgaagttattcgtggagaaaaatattgtgaaaaggctgatgtattttcctttggtgtagttatgtgggaagttttgactggtaaagaaccttttgctgaatgtaattttatgaaggtttcattggatattttggaaggaggtcgtcctataattccatccgattgtccacatgaatttgctaaactcatcaagaaatgttggcatgctaaagcacacaaaagacctactatgacggaagtagttcaacaactaatgttgattaccgaacagtttgatcataaagtttaa

SEQ ID NO: 15145 - protein, 1624 aa, Acanthamoeba polyphaga mimivirus
MHSVYTKYTIILILLVIYQGLPTNTQVASRIFGVGSKSSGPLYRQLIDIYSYTYDNAVFIFEDLPIDVILTQVDYIDYVGLDRCISHEYEEIFNLVQFPLAGQAIVMTYNIPELANLDTRIVIDRQTLGKIWTGEISKWNHPDIIALNPTLNGTLPDKEIKLGYNDDGNVSISGIVQAALSSFYGNFATEFNNAGQLFANMSFANESRCVNIGPSSRERFDWVKNTTYSLTFVNYADVFNNTNPNISVMNMYNKAGNLVEPSLESVQFAMADFKDEYSNNNFALDVFDAPGNNSWPLSYVNYIVMSKRFFQLDCSRADVVLKFIAWVYTNTAASKALTQNQFYPLDNTLKKVSIDNIYIVKCNNVSVSEQQYLISFGGSTSIVPSWLTAFTSGSIVAKYYSTLSSNSIELLTTHGCDFAVTINGVDQKFYQEIEDLAVMPLAAFSIVPAYNIPEIVGKTLVLDIDVIVKIYLGEITNWNDTKIRNLNPEISNYLPNAIINVVVQNIESDINQIFTKFLSQESEIFSQEIGQTYNPDLSLFNSSVIFVDDIDGLGDELIDNKYSFGFWTDFGVRLLSRVQTVQMASLKINDDIIEPNYDTLKNAISSESNQIARSTNSNVWPITSMISIVYPETTMKNKDKAVAIAEFMYWTQYDPLAINSANNKGYYLASSDPQLRSVVLDLLKNFKFEDESVSSYANCIYQGSICSNFGTCIESACICNSSRTGTYCEKIITDSENNTLIIILATVIPIACIFGLLLLTLLIVIIFLLKHRNTTNNDWEIDFSELEIGETLGTGGYGEVYKSIWKGTEVAVKLISSKHVSKDMERSFFEEVKIMTSLRHPNVVLFMAASTKSPNMCIVMEFMSLGSLYDLLGNELIPEIPYALKIKMAYQASKGMHFLHSSGIVHRDLKSLNLLLDSKWNVKVSDFGLTKVKSELDKKKTNDNIIGTIHWIAPEILNDSTEVDYILADVYSFGIILWELLTREQPYKGMTPAAIAVSVIRDGMRPPISDEAVTAHSIEYIDLIKQCWHSDTIIRPTFLEIMTRLSNILGDSSNMTSGTSSSSLSSGGIGKSITDSKSSNSRSSVESSNTSNTFRGIDRHNSHPTGEVTVAFIDIISASKLWEYDPDGMCESTKMYNEIIRRVTKKYGGYESFISKDRNSGEGSFCLVFSDAIQAINSCEEMQLQLLNANWPKKILQHPAAAEEFDRTDQLIFRGLRVRMALHCGSVKISQDPMTRKYQYSGSTVNITGKITTLTHGGQIIVSENLYQKVNNDFTFITVGKIDIPDYPSKMTLYEIKFEILKNRFFGGITYVNYNDDTDSGTADDSNYDSGKIIDIDYMADIDKEDSFLTSANMCRWIINYDEISIGKQIGLGSYGIVFNGKWKGVDVAVKKFVKQKLSETQLLEFRAEMAFLSELKHSNIVTFIGACIKKPNICIVTEYMRMGNLRDVLKNPDIKITFANKLKLLYGAAMGIDYLHSSNPMIVHRDIKPANILVDEHFNVKIADFGFARIKEDNTTMTRCGTPCWTAPEVIRGEKYCEKADVFSFGVVMWEVLTGKEPFAECNFMKVSLDILEGGRPIIPSDCPHEFAKLIKKCWHAKAHKRPTMTEVVQQLMLITEQFDHKV

SEQ ID NO: 15146 - DNA, 891 bp, Geobacillus kaustophilus HTA426
  CDS (1)..(891): transl_table=11
atgtggagcaaacgagtcaaattgggattggccgccttgttgatgaccggcgttttggccggctgcgggcagactgaaaagaacaacgcgggcggcaatgaaggaacggcaaagaaagaagaaacctactccggcaccattgcactagcgggatctacagcgcttcagccgctggcagaggaagcggcaaacgcgtttatggaaaagtatccggacgtatcgatcaccgttcaaggcggcggcagcggtacgggcgtcaaccaagtggcagccggcgccgtgcaaatcggcaactcggatgtgccggcggcggagaagctggacgacaaatcgaaagcgtcagagcttgttgaccataaagtggccggcatcgcctttgcgattgtggtcaacgacgatgtgaaggtcgataatttaacgacgaagcaaattcaagatattttcagcggaaagattaaaaactggaaagaagtcggcggaccagatgaagccattcacgtgatcaaccgtccggcgtcatcgggtacgcgggcgacatttgagaaaacgatcatgaaaggcgtaaaaatcgatgattccatcggtacggtgcaagattcgaacggagcggtcgaacaggcgatcagctcgacgccgggcgctgtcagctatgtagccatgtcgtatttaattggggaaaagaaaaacttgaaaacggtcaaaattgacggcgcggaaccgacggtggaaaacatccgcacggaaaagtacccgttttggtcgtatgaatacatgattaccaaaggggaagcgaaggaagaagtgcgagcgtttatcgactttgtcaagagcgaagaatttgcgccgaccgttaaaaagatggggtatatcccgatgacggaattggagtag

SEQ ID NO: 15147 - protein, 296 aa, Geobacillus kaustophilus HTA426
MWSKRVKLGLAALLMTGVLAGCGQTEKNNAGGNEGTAKKEETYSGTIALAGSTALQPLAEEAANAFMEKYPDVSITVQGGGSGTGVNQVAAGAVQIGNSDVPAAEKLDDKSKASELVDHKVAGIAFAIVVNDDVKVDNLTTKQIQDIFSGKIKNWKEVGGPDEAIHVINRPASSGTRATFEKTIMKGVKIDDSIGTVQDSNGAVEQAISSTPGAVSYVAMSYLIGEKKNLKTVKIDGAEPTVENIRTEKYPFWSYEYMITKGEAKEEVRAFIDFVKSEEFAPTVKKMGYIPMTELE

SEQ ID NO: 15148 - DNA, 1041 bp, Salmonella enterica subsp. enterica serovar Paratyphi A str. ATCC
  CDS (1)..(1041): transl_table=11
atgaaagttatgcgtaccactgtcgcaactgttgtcgccgcgaccttatcgatgagcgcgttctctgcctttgcagcagcaagcctgacaggtgccggtgcaacgtttcctgcgccggtgtatgccaaatgggcggatacctaccagaaagaaaccggtaacaaagtcaattaccaggggataggctcttccggcggcgtgaaacaaattaccgcgaataccgttgattttggcgcttccgatgcgccgctgtctgacgaaaaactgaatcaggaaggcctattccagtttccgacggtgatcggcggcgtggtgctggcggtgaatattccaggcctcaaatccggcgaactggtgctggatggtaaaacgctgggtgacatctacctcggtaaaatcaagaagtgggatgatgaagccatcaccaaactgaacccaggcgtgaagctgccctcacagaatatcgctgtggtgcgtcgcgctgacggttccggtacctccttcgtgttcaccagttacctggcgaaagtcaacgacgagtggaaatcgaaagtgggcgcgggttctaccgtgaactggccaaccggtctgggcggtaaaggtaacgacggcatcgcggcatttgtacagcgtctgccaggcgctatcggctacgttgaatacgcttacgctaagcagaacaacctggcctacaccaaactggtttccgccgacggcaaaccggtaagcccgacggaagagagcttctctaatgcggcgaaaggcgcagactggagcaaaaccttcgcgcaggatctgaccaaccagaaaggtgacgatgtgtggccaatcacctccaccacgtttatcctggtccacaaagcgcagaagaaacctgagcagggtgctgaagtgttgaagttcttcgactgggcctacaaaaatggcgctaagcaggcgaatgatctggactacgccagcctgccggataacgttgttgagcaggttcgtaccgcctggaagaccagtataaaagacagcaacggtaaggcgctgtattaa

SEQ ID NO: 15149 - protein, 346 aa, Salmonella enterica subsp. enterica serovar Paratyphi A str. ATCC
MKVMRTTVATVVAATLSMSAFSAFAAASLTGAGATFPAPVYAKWADTYQKETGNKVNYQGIGSSGGVKQITANTVDFGASDAPLSDEKLNQEGLFQFPTVIGGVVLAVNIPGLKSGELVLDGKTLGDIYLGKIKKWDDEAITKLNPGVKLPSQNIAVVRRADGSGTSFVFTSYLAKVNDEWKSKVGAGSTVNWPTGLGGKGNDGIAAFVQRLPGAIGYVEYAYAKQNNLAYTKLVSADGKPVSPTEESFSNAAKGADWSKTFAQDLTNQKGDDVWPITSTTFILVHKAQKKPEQGAEVLKFFDWAYKNGAKQANDLDYASLPDNVVEQVRTAWKTSIKDSNGKALY

SEQ ID NO: 15150 - DNA, 1041 bp, Zymomonas mobilis subsp. mobilis ZM4
  CDS (1)..(1041): transl_table=11
atggttaagaaaatagctgcccttgttggtttcgtcagcctttttggcagcacggcctatgcaacgactatttccggtgcaggcgcaacatttccagcacctgtttatggaaaatgggccaattcctatcgcaaccagacgggtgctgttatcaattatcagcctattggttccggtggcggtattaagcaaattaaagcctctaccgttgatttcggagcgtctgacaagcctttgaaaaccgaagagctttcaaaagatggtctttatcagttcccgaccgtgatgggaggcattgtgcctatcattaacttgccgggtttgcggtcaggtcgcttgcatttaacaggcagcattcttgccgatatttatcttggtaaaattacccgttggaatgacccgcggatcgcgtctatcaacccgtggttaaaattaccgccagtaccgattacggtggtgcatcgcgcggatggttccggcacgtccttccagtttacgtcttatctgtcgctgaaaagtcctgaatggacctcccgcgtcggtgccagcgatgccgtgcaatggccgattggtcttggtggtaaaggcaatgatggggtagccgcctttgttaaacagacaatcggttcaatcggctatgtcgaatatgcctatacccgtcaaagcacggtgccttatgctttgattgccaatcgtgacggtcgcttcccgcatccttccactgaaagtttcaaagccgcctcggcttctgcggattggacgcatgcagctgggaataatatttcccttctggatcagaagggcgctgaaagctggccaatcgtttcaacgacctatattcttttacatcgcacccccagcaaacctgaaaccacggctgaaatcctaaaattctttgattggggatatcagaatggcgatcaggatgctttatctcttgactatgcgccattaccgaaagaagtgaagacgttcatccgccagcaatggggatcgaacattcaagttaacgggaaagccgtctataacgctgcccgctag

SEQ ID NO: 15151 - protein, 346 aa, Zymomonas mobilis subsp. mobilis ZM4
MVKKIAALVGFVSLFGSTAYATTISGAGATFPAPVYGKWANSYRNQTGAVINYQPIGSGGGIKQIKASTVDFGASDKPLKTEELSKDGLYQFPTVMGGIVPIINLPGLRSGRLHLTGSILADIYLGKITRWNDPRIASINPWLKLPPVPITVVHRADGSGTSFQFTSYLSLKSPEWTSRVGASDAVQWPIGLGGKGNDGVAAFVKQTIGSIGYVEYAYTRQSTVPYALIANRDGRFPHPSTESFKAASASADWTHAAGNNISLLDQKGAESWPIVSTTYILLHRTPSKPETTAEILKFFDWGYQNGDQDALSLDYAPLPKEVKTFIRQQWGSNIQVNGKAVYNAAR

SEQ ID NO: 15152 - DNA, 921 bp, Bacillus clausii KSM-K16
  CDS (1)..(921): transl_table=11
atgaaaaaagtccaattaggagcagtatttgcgtcgtttttgtttgttgccaccgcttgcggaggcggaaacgcaaatgagccagcagagacagattcggcagaaggcaataatactgaagaaaacgaagcgtcaggcagcatcttagtgtcaggctcaagtgcaatggagccactaattgcagccgcaagtgaagagtttatgaatgaaaatatcgatgcaagcatttcagtgcaagcaggtgggtctggccaagggctgtcatctgttgcaagcggacaagtccaaattggaaactccgatgtgtttgctgaagaaaaagaagatattcccgctgaagaacttgtcgaccaccgtattgccgttgtaggcatggggccggcaacgcatcctgaagtaggcgttgaagatatttcgactgaagatttaattgctgtatttacaggggaagtaaccaattggagcgaacttggtggcgctgaccaagaaatcgtgattgtgaaccgcccagattcttctgggacgagggatacatttgtgaaatatggccttgaagacaacgagcctgttccaggagacattacggaggactcttccaatgccgtgatgaaaatcattagtgaaacacctggggccatcggttatctcgctttctcttattatgacgaacaaggaacggttttgccgctttccgtagatggcgttgaacaaacagatgaaaacgtcatttcaggtgaatacccaatttgggcgtatatgcattcttacacgaaaggcgaacctgaaggcttaacggcacagttcattgagtatttgcaaggtgattttgtacaaggcacgttgatcccagaaatgggctacattcctgaagcggacatgcaagttgaacgagatgcggaaggaaacgatacaccaaaataa

SEQ ID NO: 15153 - protein, 306 aa, Bacillus clausii KSM-K16
MKKVQLGAVFASFLFVATACGGGNANEPAETDSAEGNNTEENEASGSILVSGSSAMEPLIAAASEEFMNENIDASISVQAGGSGQGLSSVASGQVQIGNSDVFAEEKEDIPAEELVDHRIAVVGMGPATHPEVGVEDISTEDLIAVFTGEVTNWSELGGADQEIVIVNRPDSSGTRDTFVKYGLEDNEPVPGDITEDSSNAVMKIISETPGAIGYLAFSYYDEQGTVLPLSVDGVEQTDENVISGEYPIWAYMHSYTKGEPEGLTAQFIEYLQGDFVQGTLIPEMGYIPEADMQVERDAEGNDTPK

SEQ ID NO: 15154 - DNA, 1152 bp, Thermococcus kodakarensis KOD1
  CDS (1)..(1152): transl_table=11
atgaagaaagccatctcggtgtttatcgtcctgctgctggggctttccctggtggcaagcggctgcatatctagtgaaaagagccctagcacaagcccgtccagcacggcacgggcttcaagccagggcacttcccagaccaaggtaataaccatccgcaccacaggtgcaaccttcccccagtaccagatacagaagtggattgagatatacatgaagagccaccccaacgtcaagatcgagtacgaaggtggaggaagcggacacgggcaggaggcgttcctcaagggcctcacccacataggcaggacagatccacccgttaaggagtcaacctggaagaagttcctcgcaactggcgaccagcccctccagttccccgaaatcgttggtgcggttgtcgttgccttcaacgttccaggcgttgacgagctgaagctcgacggggagaccctcgccaagatattcatgggtgagatagagtactgggacgacgatgccatcaaggccttcaaccccagcgcgaacctcccgcacgaaaagataatagtcgtccacaggagtgattcaagcggaactactgcaatcttcaccacctacctgagtctcgtcaacaaggagtgggcagataaggttggagcgggaaagaccgttgactggcccgttgacaaggttggaaggggcattggtggaaagggcaaccctggagtcgtccaggcccttaagaacaccaagtacagcatagcctacaccgagctctccttcgccatagaggagaacctcaaggttgtggcactcaaaaacaaagccggaaacttcgttaagcccactgacgatgcgataaaagccgccgtcgccggtgttaaagctttcataccaagcccaaccgagggctacaaggaggacctcaaccagctcctcaacgccccgggagagaactcctacccgatagttgccttcacccacctcctcgtatggcagaacaagggtggaaagcactacagcaaggaagaggtccaggccatcaaggagttccttaggtgggtcttaacagagggacagaagccagagaaccttgcccccggctacgtcggtcttccaccagaggtcgccaagataggcctccaggcagttgacatgatagagggctga

SEQ ID NO: 15155 - protein, 383 aa, Thermococcus kodakarensis KOD1
MKKAISVFIVLLLGLSLVASGCISSEKSPSTSPSSTARASSQGTSQTKVITIRTTGATFPQYQIQKWIEIYMKSHPNVKIEYEGGGSGHGQEAFLKGLTHIGRTDPPVKESTWKKFLATGDQPLQFPEIVGAVVVAFNVPGVDELKLDGETLAKIFMGEIEYWDDDAIKAFNPSANLPHEKIIVVHRSDSSGTTAIFTTYLSLVNKEWADKVGAGKTVDWPVDKVGRGIGGKGNPGVVQALKNTKYSIAYTELSFAIEENLKVVALKNKAGNFVKPTDDAIKAAVAGVKAFIPSPTEGYKEDLNQLLNAPGENSYPIVAFTHLLVWQNKGGKHYSKEEVQAIKEFLRWVLTEGQKPENLAPGYVGLPPEVAKIGLQAVDMIEG

SEQ ID NO: 15156 - DNA, 984 bp, Staphylococcus aureus subsp. aureus COL
  CDS (1)..(984): transl_table=11
atgaaaaaatggcaatttgttggtactacagctttaggtgcaacactattattaggtgcttgtggtggcggtaatggtggcagtggtaatagtgatttaaaaggggaagctaaaggtgatggctcatcaacagtagcaccaattgtggagaaattaaatgaaaaatgggctcaagatcactcggatgctaaaatctcagcaggacaagctggtacaggtgctggtttccaaaaattcattgcaggagatatcgacttcgctgatgcttctagaccaattaaagatgaagagaagcaaaaattacaagataagaatatcaaatacaaagaattcaaaattgcgcaagatggtgtaacggttgctgtaaataaagaaaatgattttgtagatgaattagacaaacagcaattaaaagcaatttattctggaaaagctaaaacatggaaagatgttaatagtaaatggccagataaaaaaataaatgctgtatcaccaaactcaagtcatggtacttatgacttctttgaaaatgaagtaatgaataaagaagatattaaagcagaaaaaaatgctgatacaaatgctatcgtttcttctgtaacgaaaaacaaagagggaatcggatactttggatataacttctacgtacaaaataaagataaattaaaagaagttaaaatcaaagatgaaaatggtaaagcaacagagcctacgaaaaaaacaattcaagataactcttatgcattaagtagaccattattcatttatgtaaatgaaaaagcattgaaagataataaagtaatgtcagaatttatcaaattcgtcttagaagataaaggtaaagcagctgaagaagctggatatgtagcagcaccagagaaaacatacaaatcacaattagatgatttaaaagcatttattgataaaaatcaaaaatcagacgacaagaaatctgatgataaaaagtctgaagacaaaaaataa

SEQ ID NO: 15157 - protein, 327 aa, Staphylococcus aureus subsp. aureus COL
MKKWQFVGTTALGATLLLGACGGGNGGSGNSDLKGEAKGDGSSTVAPIVEKLNEKWAQDHSDAKISAGQAGTGAGFQKFIAGDIDFADASRPIKDEEKQKLQDKNIKYKEFKIAQDGVTVAVNKENDFVDELDKQQLKAIYSGKAKTWKDVNSKWPDKKINAVSPNSSHGTYDFFENEVMNKEDIKAEKNADTNAIVSSVTKNKEGIGYFGYNFYVQNKDKLKEVKIKDENGKATEPTKKTIQDNSYALSRPLFIYVNEKALKDNKVMSEFIKFVLEDKGKAAEEAGYVAAPEKTYKSQLDDLKAFIDKNQKSDDKKSDDKKSEDKK

SEQ ID NO: 15158 - DNA, 978 bp, Staphylococcus epidermidis RP62A
  CDS (1)..(978): transl_table=11
atgaaaaagtggcaattagtcggtactactgtattaggagcttcggttttacttggcgcttgtggcggaaatgatggaggttcaggagacggcaaagatcttaaaggttctgctaaaggtgaaggatcgtctacagtagctcctatcgttgaaaaattaaacgaaaaatgggctaaagatcataaagacgctaaaatttcttcaggtcaagctggtacaggtgctggtttccaaaaatttattgctggcgaaactgatttctcagacgcttcaagacctattaaagacgaagaaaagaaaaaattagaagataaagggattaaatatcacgaattcaaaattgcacaagatggtgtaacaattgcagttaataaagataacgactttgttaaagaattaactaaatcacaattaaaagatatttactctggaaaagctaaaacatggaaagacgttaactctagttggccagataaaaaaatcaatgctgtttcacctaactcaagtcatggtacttacgacttctttgaagaagaagttatggataaacaagatatcaaagctgagaagaatgctgatactaacgcgattgtatcttcagtaactaaaaacaaagaaggtatcggttacttcggttataatttctacgaacaaaataaagataaattaaaagaagtaaaaatcaaagatgacaatggcaaagttacagaaccaactaagaaaacaattcaaaacggttcatacgcactaagcagaccattatttatctatgctaaagacaaatcattaaaagacaataaagtaatgtcagaattcatgaaatttgtacttgaagatgaaggtcaagcagctgaagacgctggttatgtagcttcacctaagaaaacttataaatctcaattagatgacttaaaagattttttagataaacatcaaaagtctgataagaaagacgacaaaacatcagaagataaataa

SEQ ID NO: 15159 - protein, 325 aa, Staphylococcus epidermidis RP62A
MKKWQLVGTTVLGASVLLGACGGNDGGSGDGKDLKGSAKGEGSSTVAPIVEKLNEKWAKDHKDAKISSGQAGTGAGFQKFIAGETDFSDASRPIKDEEKKKLEDKGIKYHEFKIAQDGVTIAVNKDNDFVKELTKSQLKDIYSGKAKTWKDVNSSWPDKKINAVSPNSSHGTYDFFEEEVMDKQDIKAEKNADTNAIVSSVTKNKEGIGYFGYNFYEQNKDKLKEVKIKDDNGKVTEPTKKTIQNGSYALSRPLFIYAKDKSLKDNKVMSEFMKFVLEDEGQAAEDAGYVASPKKTYKSQLDDLKDFLDKHQKSDKKDDKTSEDK

SEQ ID NO: 15160 - DNA, 990 bp, Gluconobacter oxydans 621H
  CDS (1)..(990): transl_table=11
atgtttcatcgtgtggggtttatcgcgcgcggccttgcggtcgctcttgttgtcatggtcttcgggacggcgcattccgccactctcacagggggcggatcgagcttcgccgcgcccctttaccgagcctggagcgctgaactccaccgccagaccggcttttccctgacataccgcagcgtcggttccggcgagggacagaggctcatcatggcgggagccgtggatttcggggcgtcggatctcccgctttcgggggacgttctggatgaacgggggctttaccagttcccgacggcgatcggcgcgatcgtggtggtcatcaatgttcccggcatcgcgtccaaccagatgaagctggacggaccaacgcttgccgccctgtttgacggcaggatcacgtcatgggccgatccgcgcatccgtgcgctcaatcccggcctgcgcctgccggatctggatgtgctgcccatccatcgtgaggaggcctcgggcaccagtcaggtcttcagcgactatcttcatgccgtcgcccccgactggaaagccgggatgtggggtgatggctcggaagcgcggggcaatgacggggttgcggccagcgtgcggcagtccatcggcgggatcggctttgtggaatacgccttcgcgcgtcgggacaggctgaataccgttcggctgaaaaaccatgccgggcagttcgtcgcccccggcaaagcggctttcacaggtgcggccagcagcgcggactggctccatgcggaccattatgccgtcaatcttctggccgcaccgggggctcaggcctggccgatcatgagcgcgaccttcgccctcgttcccgtccatccggcggccccagcaacgcgcgccgccgtaaaagcatttttcagatacggcctgaaacagagcgatgatgccacgcgggatctggattacgtgccgttaccgacgcccgtaaaagaaaggattctggccagctggccctga

SEQ ID NO: 15161 - protein, 329 aa, Gluconobacter oxydans 621H
MFHRVGFIARGLAVALVVMVFGTAHSATLTGGGSSFAAPLYRAWSAELHRQTGFSLTYRSVGSGEGQRLIMAGAVDFGASDLPLSGDVLDERGLYQFPTAIGAIVVVINVPGIASNQMKLDGPTLAALFDGRITSWADPRIRALNPGLRLPDLDVLPIHREEASGTSQVFSDYLHAVAPDWKAGMWGDGSEARGNDGVAASVRQSIGGIGFVEYAFARRDRLNTVRLKNHAGQFVAPGKAAFTGAASSADWLHADHYAVNLLAAPGAQAWPIMSATFALVPVHPAAPATRAAVKAFFRYGLKQSDDATRDLDYVPLPTPVKERILASWP

SEQ ID NO: 15162 - DNA, 1029 bp, Gluconobacter oxydans 621H
  CDS (1)..(1029): transl_table=11
atgatcaagagcagagctccgctattcggtcttctcgtcgccacggcccttggcacggctgccatgaccccgttcgtgtcgtcggcgcaggctgcggacatcacgggcgcagggtccagcttcgccgcaccgatctatggtgcgtggggcacggcggccaagagccaggccggtatcgccgtgaactaccagagcgtgggctccagcgccggtcaggatcaggtcattgcccgcacggttgactttggtgcctccgacaagccgatgagcggtgatcgtctggccaaggaaaagctgtaccagttcccaaccgtcatgagcggtatcgtggtcgtggcgaacgtgccgggtattgctccgggccagctccgtctcgatggcccgacgctggccggtctgtatgacggcgagatcacgacctgggatgacgaccgcatcaaggccctgaacccgggtctgaagctgccggatacggatgtcgcgccgatccaccgtgcggatggttcgggcacgagctacgtcttcacgtcctatctgtcgcaggtttccccgacctggaagcagaagcttggtgccggcacgtccatcgcctggccgggtggttcgggtgcacgtggcaatgacggcattgccgccatggtgcgtcagacggaaggtggcgtgggttacgtcgagtattcctatgccgcgcagaaccacctgaacatcgcccagatgaagaaccacagcggtgccttcgttgccccgacgctggccagcttcgcggaagccgccaaggctgctgactgggcccatgccgatcactatgcggtgaacctgctggacacggatggcgcatcgtcctggccgatcgtgacggcaacgttcgttctggtgccggttgatgccgcccagaaggagtccggcaaggctgtgcgcaacttctttacgtggggttttcagcatggtgacgcggacaatgcccgcctcgactatgtcggtctgccgcagaacgtgaagacggacattctggccaactggccgaagtaa

SEQ ID NO: 15163 - protein, 342 aa, Gluconobacter oxydans 621H
MIKSRAPLFGLLVATALGTAAMTPFVSSAQAADITGAGSSFAAPIYGAWGTAAKSQAGIAVNYQSVGSSAGQDQVIARTVDFGASDKPMSGDRLAKEKLYQFPTVMSGIVVVANVPGIAPGQLRLDGPTLAGLYDGEITTWDDDRIKALNPGLKLPDTDVAPIHRADGSGTSYVFTSYLSQVSPTWKQKLGAGTSIAWPGGSGARGNDGIAAMVRQTEGGVGYVEYSYAAQNHLNIAQMKNHSGAFVAPTLASFAEAAKAADWAHADHYAVNLLDTDGASSWPIVTATFVLVPVDAAQKESGKAVRNFFTWGFQHGDADNARLDYVGLPQNVKTDILANWPK

SEQ ID NO: 15164 - DNA, 1119 bp, Xanthomonas oryzae pv. oryzae KACC10331
  CDS (1)..(1119): transl_table=11
atggctttgtcatttctcagacaccgcatggtcatgtcgttacactgcaatggcaccactgcgggacgttcttcatcccttcactccaggagctgttccgtgatccactccttcaagacccgtctggccgttggcgtactcgccgcttcgctggctctgtgcgcccaggctgccgatgtcaccggcgctggcgcgtcgtttatttacccggtgatgtccaagtggtcggccgactacaacgctgccaccaagaagcaggtcaactatcaatcgatcggttcaggcggcggtattgcccagatcaaggcggccagcgtggacttcggctcgtccgatgccccgctcaagccggaagaactggccgcagccggcctggcgcagtttccctcggtgatcggcggcgtggtgccggtggtcaacgtgccgggcgtggccgccggtgcgctcaagctggacggcaagaccctgggcgacatcttcctgggcaaggtcagcacctggaacgatccggccatcgccgcgctcaatccaggcgtgaagctgccggaaggcaagatcaccgtggtgcatcgctccgacggctcgggcaccagcttcaacttcaccaactacctgtccaaggtcaatccggactggaagagcaaggtgggcgaaggcactgccgtgcagtggccgaccggtatcggcggcaagggcaacgagggcgtcgctgcctacgtgaagcagatcaagggcggcatcggctacgtcgagctgtcgtacgcgctgcagaacaagatggcctacaccgcgatgaagaatgctgccggcaagttcgtgcagccgtccgatgaaaccttcgccgccgctgccaacagcgccgattggggcagcagcaaggacttctatctggtgatgaccaatgcggcgggcgacaacgcctggccgatcacggcgaccaattttatcttggtgcagaagaagccgaagaacccgaccggcctgaaaaacacgctggacttcttccgctgggtctatagcaagggcgacgcccaggccaagcagctggactacgtaccgctgccggacgcgctggtgacccagatcgaggcctactgggccacgaatctgcccaaataa

SEQ ID NO: 15165 - protein, 372 aa, Xanthomonas oryzae pv. oryzae KACC10331
MALSFLRHRMVMSLHCNGTTAGRSSSLHSRSCSVIHSFKTRLAVGVLAASLALCAQAADVTGAGASFIYPVMSKWSADYNAATKKQVNYQSIGSGGGIAQIKAASVDFGSSDAPLKPEELAAAGLAQFPSVIGGVVPVVNVPGVAAGALKLDGKTLGDIFLGKVSTWNDPAIAALNPGVKLPEGKITVVHRSDGSGTSFNFTNYLSKVNPDWKSKVGEGTAVQWPTGIGGKGNEGVAAYVKQIKGGIGYVELSYALQNKMAYTAMKNAAGKFVQPSDETFAAAANSADWGSSKDFYLVMTNAAGDNAWPITATNFILVQKKPKNPTGLKNTLDFFRWVYSKGDAQAKQLDYVPLPDALVTQIEAYWATNLPK

SEQ ID NO: 15166 - DNA, 1137 bp, Xanthomonas oryzae pv. oryzae KACC10331
  CDS (1)..(1137): transl_table=11
gtgggatctgccggataccccggccaatccagcctcggagcctccatgaaactgcagtcggccagcctgaccgccctgtcccttaccatcgccatcgcccttgccgcgtgttcgcccggcaaggacgcacaatccggcgacgccgcaaagggcgcgccgaccgcaggcgctaccgccagcgacaccaagggtgctgaaatctccggcgccggcgcttccttcatctacccgctggtgtccaagtggtcggccgactacaacgccgccaccggcaacaaggtcaattaccagtcgatcggctccggcggcggcattgcgcagatcaaggccggcaccgtggatttcggctcgaccgacaagccgctggacagcgccgaactgcagcaggcaggcctgggccagttcccgtccgccatcggcggcgtggtgccggtggtcaatctggacggcatcgcaccgggcaagctgcgcctgaccggcgccctgctgggcgacatcttcctgggcaaggtcacgatgtggaacgacgcggccattgtcgcggccaacccgggcgtgaccctgccggccaccaagatcaatctggtgcatcgttcggacggttcgggcaccaccttcaacttctccaactacctgtccaaggtcagcccggagtggaagagcaaggtcggcgaaggtacctcggtgcagtggccgggcggcgtgggtggcaagggcaacgaaggcgttgcctcgtatgtgcagcagatcaagggctcgatcggttacgtcgagctggcctacgccctgcagaacaagatgccgtacacctcgctgcagaacgcagccggccagtggatcgagccgaacgcggaaagctttgccgccgccgctgccagcgccgactgggccaacgccaaggacttcaatctggtgattaccaatgctccgggcgaaaaggcgtggccgatcaccgccaccaacttcatgctgatgcacaagcagcccaaggacgcggcgcgcagcaaggcgacgctggacttcttcaagtgggcgttggaaaacggccaggcccaggccagcgaactgcattacgtgccgctgccgccggagctggtgaagcagatcgaagcctattggggcagcgagttcaagtaa

SEQ ID NO: 15167 - protein, 378 aa, Xanthomonas oryzae pv. oryzae KACC10331
MGSAGYPGQSSLGASMKLQSASLTALSLTIAIALAACSPGKDAQSGDAAKGAPTAGATASDTKGAEISGAGASFIYPLVSKWSADYNAATGNKVNYQSIGSGGGIAQIKAGTVDFGSTDKPLDSAELQQAGLGQFPSAIGGVVPVVNLDGIAPGKLRLTGALLGDIFLGKVTMWNDAAIVAANPGVTLPATKINLVHRSDGSGTTFNFSNYLSKVSPEWKSKVGEGTSVQWPGGVGGKGNEGVASYVQQIKGSIGYVELAYALQNKMPYTSLQNAAGQWIEPNAESFAAAAASADWANAKDFNLVITNAPGEKAWPITATNFMLMHKQPKDAARSKATLDFFKWALENGQAQASELHYVPLPPELVKQIEAYWGSEFK

SEQ ID NO: 15168 - DNA, 813 bp, Vibrio fischeri ES114
  CDS (1)..(813): transl_table=11
atgttcaaagcgtttagttacaccaccatatttacagcgttactttttagctcctcaacttttgctgcaaatacagtaattgcaggttctacatctgtttctacactattggaaccctttattgatgaatacaataaagacaataaaccacttgttgatttgcaaagtattggttcaagtgcaggcattaaactactggttgatgacacagtaaatcttgctatcagctctcgtgagttaacagacaaagaaaaagagacattaagttcaactcttatcgcttatgatgccatcgcaattgttgtccaccctgacaacccaattactgaattatctacagagaacatctggaaaatctatcacggtgatattaaaaactggaaagaattgggtggcaccgatcgtaagatctctgtaatttcacgtgaaattgcttcaggctctcgcttctcgtttgaaaaacactttggtttaacacaagaaatcaactcattcactgtatcagatattagcgataacgctcttgttgttaatggtacgggtatggttaagagcattgtttcacgcaacccttatgctattggctatgtatctgctggaacacttggtgatcttgctcaactccgtgtactaaaagtagataacgtactaccaagccaagaagctattatggaaaataaatattctctttcccaccctttcttatttgtatacaagaaccaaacagtatctaaagaatcgacagagtttatgaattacattgcttcaccagaagcaactaaaaccatccaatcacttggttatatcaagtaa

SEQ ID NO: 15169 - protein, 270 aa, Vibrio fischeri ES114
MFKAFSYTTIFTALLFSSSTFAANTVIAGSTSVSTLLEPFIDEYNKDNKPLVDLQSIGSSAGIKLLVDDTVNLAISSRELTDKEKETLSSTLIAYDAIAIVVHPDNPITELSTENIWKIYHGDIKNWKELGGTDRKISVISREIASGSRFSFEKHFGLTQEINSFTVSDISDNALVVNGTGMVKSIVSRNPYAIGYVSAGTLGDLAQLRVLKVDNVLPSQEAIMENKYSLSHPFLFVYKNQTVSKESTEFMNYIASPEATKTIQSLGYIK

SEQ ID NO: 15170 - DNA, 852 bp, Bacteroides fragilis NCTC 9343
  CDS (1)..(852): transl_table=11
gtgttactctgtggtgaatcaaactcaaaacttaatcatatgaaagttagaactatcttattcgccgccctctcactcgcagcattgcatgccaacgctcagcgcatcaaaggcagtgacaccgtactgcccgtagcccagcaaaccgccgaacgcttcatgaaccgtgaacccgacgcccgtgtcacagtcaccggaggcggtacaggggtaggcatctccgccctgatggacaacaccactgacatcgccatggcttcacgccccatcaaattcagcgaaaagatgaaagccaaagccgccaaacgggatatagacgaagtgatcgtcgcttacgatgcgctggctgtcgttgtacacccgtccaatccggtgaaaaaactcacccgccggcaactggaagacatcttccgcggaaaaataaccaactggaaacaagtgggaggcgacgaccgcaagatcgtggtttactctcgcgagacctcttccggcacctacgagttcttcaaagagagcgtcctcaagaacaagaattatatgagcagcagtctctccatgcccgccaccggagccattatccaatccgtcagccagaccaaaggggcaatcggctatgtagggctcgcttatgtgtcgccgcgcatcaagactctgtccatctcgtatgatggcgagcactatgccaccccgaccgtagagaacgccaccaacaagacttatcccatcgtccgccccctctactactattatgatgcaaagaacaaaacacaaatcgctcccctgctcgagtttattctctctcccgaaggacaggatattataaaaaagagtggatatatacccgtgaaataa

SEQ ID NO: 15171 - protein, 283 aa, Bacteroides fragilis NCTC 9343
MLLCGESNSKLNHMKVRTILFAALSLAALHANAQRIKGSDTVLPVAQQTAERFMNREPDARVTVTGGGTGVGISALMDNTTDIAMASRPIKFSEKMKAKAAKRDIDEVIVAYDALAVVVHPSNPVKKLTRRQLEDIFRGKITNWKQVGGDDRKIVVYSRETSSGTYEFFKESVLKNKNYMSSSLSMPATGAIIQSVSQTKGAIGYVGLAYVSPRIKTLSISYDGEHYATPTVENATNKTYPIVRPLYYYYDAKNKTQIAPLLEFILSPEGQDIIKKSGYIPVK

SEQ ID NO: 15172 - DNA, 966 bp, Cyanophage P-SSM4
  CDS (1)..(966): transl_table=11
atgaaagcattcgcagttgccctgctcggtctgtttacgatcacaccgatagcagaagcatcaaccagactaagtggagcaggagcatctttccctgccaaaatttacactcgttggttcgctgaccttgcaaaagaaaaaggtgcagcaagagtaaactatcaggcagttggttctggtagtggaagaaaagcatttattgaccagacagtaaattttggtgcgtctgatgatcctatgaaggacaaggacattgccaaagtgacaagaggattagttcaaattcctatgacaggtggaactattgcatttggatataacaatcctggttgtgagttaaaacttacacaacaacaggcagttgaagttgctatgggtatgattgacaactggaaggaacttggttgtgatgaccagaaactaacttgggcacatcgctcagatggttctggaacaactaaggcattcacaaatagtatggaagcattctctcctacatggacactaggtacaggtaaatctgtagcgtggcctaaaggagttggtggtaaaggtaatgcaggagtagcaggagtaattaaaaatacacctggtgctatcggttatgtgaatcaatcttatattgatgacactgttagagcagcagcacttcaaaacttaaacggtgagtttctaaaaccatctgttgaagcaggagcaaaggcacttaatggtattgagttagatgagaatctagcaggaaagaatcctaacccaacagcagaaggagcatatcctattgctacattgacatggatacttgcatatgaaactggtaatggtagaaacactgaagcaatcaagtcttcattgagcagactactaagtgatgagtatcaggacaaagcacctaagttagggtttgttcctcttaaaggtgacattcttgagaaggcaaaatcagctgttgacaagattggcaaatag

SEQ ID NO: 15173 - protein, 321 aa, Cyanophage P-SSM4
MKAFAVALLGLFTITPIAEASTRLSGAGASFPAKIYTRWFADLAKEKGAARVNYQAVGSGSGRKAFIDQTVNFGASDDPMKDKDIAKVTRGLVQIPMTGGTIAFGYNNPGCELKLTQQQAVEVAMGMIDNWKELGCDDQKLTWAHRSDGSGTTKAFTNSMEAFSPTWTLGTGKSVAWPKGVGGKGNAGVAGVIKNTPGAIGYVNQSYIDDTVRAAALQNLNGEFLKPSVEAGAKALNGIELDENLAGKNPNPTAEGAYPIATLTWILAYETGNGRNTEAIKSSLSRLLSDEYQDKAPKLGFVPLKGDILEKAKSAVDKIGK

SEQ ID NO: 15174 - DNA, 1041 bp, Salmonella enterica subsp. enterica serovar Choleraesuis str
  CDS (1)..(1041): transl_table=11
atgaaagttatgcgtaccactgtcgcaactgttgtcgccgcgaccttatcgatgagcgcgttctctgcctttgcagcagcaagcctgacaggtgccggtgcaacgtttcctgcgccggtgtatgccaaatgggcggatacctaccagaaagaaaccggtaacaaagtcaattaccaggggataggctcttccggcggcgtgaaacaaatcaccgcgaataccgttgattttggcgcttccgatgcgccgctgtctgacgaaaaactgaatcaggaaggcctgttccagtttccgacggtgatcggcggcgtggtgctggcggtgaatattccaggcctcaaatccggtgaactggtgctggatggtaaaacgctgggtgacatctacctcggtaaaatcaagaagtgggatgatgaagccatcaccaaactgaacccaggcgtgaagctgccttctcagaacatcgctgtggtgcgtcgcgctgacggttccggtacctccttcgtgttcaccagttacctggcgaaagtcaacgacgagtggaaatcgaaagtgggcgcgggttctaccgtgaactggccaaccggtctgggcggtaaaggtaacgacggcatcgcggcatttgtacagcgtctgccaggcgctatcggctacgttgaatacgcttacgctaagcagaacaacctggcctacaccaaactggtttctgccgacggcaagccggtaagcccgacggaagatagcttctctaatgcggcgaaaggcgcagactggagcaaaaccttcgcgcaggatctgaccaaccagaaaggtgacgatgtgtggccaatcacctccaccacctttatcttggtccacaaagcgcagaagaaacctgagcagggtgctgaagtgctgaagttcttcgactgggcctacaaaaatggcgctaaacaggcgaatgatctggactacgccagcctgccggataacgttgttgagcaggttcgtaccgcctggaagaccagtataaaagacagcaacggtaaggcgctgtattaa

SEQ ID NO: 15175 - protein, 346 aa, Salmonella enterica subsp. enterica serovar Choleraesuis str
MKVMRTTVATVVAATLSMSAFSAFAAASLTGAGATFPAPVYAKWADTYQKETGNKVNYQGIGSSGGVKQITANTVDFGASDAPLSDEKLNQEGLFQFPTVIGGVVLAVNIPGLKSGELVLDGKTLGDIYLGKIKKWDDEAITKLNPGVKLPSQNIAVVRRADGSGTSFVFTSYLAKVNDEWKSKVGAGSTVNWPTGLGGKGNDGIAAFVQRLPGAIGYVEYAYAKQNNLAYTKLVSADGKPVSPTEDSFSNAAKGADWSKTFAQDLTNQKGDDVWPITSTTFILVHKAQKKPEQGAEVLKFFDWAYKNGAKQANDLDYASLPDNVVEQVRTAWKTSIKDSNGKALY

SEQ ID NO: 15176 - DNA, 747 bp, Leptospirillum ferrooxidans
  CDS (1)..(747): transl_table=11
atgagaagaacacaaggtctcctcctccggagcgcagtctttgggatttttttgcttctgatctctttttccggggcgcatgcggaggagctcttgctgtctggctcttccatgcttcttcctttgaatcgtgtctgggcccaggcctatggaaaagaccattccgatgtcaggattctagcttcgggacccggatccggagcgggaattgtttccgcagtttcaggagatgcgagtatcggagcctccgatgtcttcctgacagagaaggatcgcaaaaaggacaggaatattctcctgataccagtcgctctcgagggcacgattcctgtggtcaatttgcctcttcaggggaagatgcccctgaaaatgaacgggactgttcttgccgatctctttttgggaaaaatccacttctggaatgatcctgcactggccaaactcaatccggggcggactcttccccatcttcctgtccgggtttttcaccggtccgattcttccggaacgaccttcgtactgacagactatctcgaaaggacctcgacctcgtggcacgatttggtcggccgggatgttcttcccatatggcctgtctttgcaggagcttcgggggttttgggatcggcagccatggctaaggccgtccgggaccattccggttcgatcggttatgtcggcctgggatgggtccgggcatcgcatctttctcctgtggcacttaaaacagggagggacgctttgtag

SEQ ID NO: 15177 - protein, 248 aa, Leptospirillum ferrooxidans
MRRTQGLLLRSAVFGIFLLLISFSGAHAEELLLSGSSMLLPLNRVWAQAYGKDHSDVRILASGPGSGAGIVSAVSGDASIGASDVFLTEKDRKKDRNILLIPVALEGTIPVVNLPLQGKMPLKMNGTVLADLFLGKIHFWNDPALAKLNPGRTLPHLPVRVFHRSDSSGTTFVLTDYLERTSTSWHDLVGRDVLPIWPVFAGASGVLGSAAMAKAVRDHSGSIGYVGLGWVRASHLSPVALKTGRDAL

SEQ ID NO: 15178 - DNA, 1104 bp, Corynebacterium jeikeium K411
  CDS (1)..(1104): transl_table=11
gtgaagttcaccatgaagcgcgccagcgctgcagctgcgactctgttcgctggttccctgattctgaccggctgctccaatgctgacaacaacgaaggcggcggcagcagcagcgaaggctctcgcccgatggaggaggctaccggcgaactgcgtggcgaaggcgcttcctcgcaggacaacgcaatccagaacatcttcggtccggcgttctctgagactggcgcaaccctggcttacaacgcgtctggttccggtgacggccagaagaagttcatcgctggccaggccgattttgcgggttccgactctccgctgaaggatgaccagattgcggacgctaagaagcgttgcgatggaaacgacgcatggcacctgccgatggttatcggcccggttgcaatcgcttaccacctggagggcgtggacgaactgaacctgtccaccaagaccgttgccaagatcttcaagggcgagatcaagaagtgggacgacgaggccatcaaggctgagaacgagggcgttgacctgccgtccgacccgatcgaggttgtgtaccgctctgacgagtccggcacctccgacaacttccagaagttcctggctgcttccagcggcgagtgggactctgagggtaagaacttcccgaccaaggttggcaccggtgctccgaagtccaagggtgttgctgaccaggttgcagctaccaacggtgcaatcacctacgttgagtccggctttgctgaggagctcgacgcagtcaacatcgccaagatcgacttcggttccggcccggttgagctgaacaaggagaacgtgaacaaggctctggctgaggctgagttcaagggcgagggtaacgacctggtcgttgactctgagaagctgtacagcatgaacggcgagggcgagtacccgctggttctgaccacctacgagatcgtctgctccgctggttacgacgacaacacctcgaagctggtcaagaacttcctgaacaccatcctgaacaaccagaacgatgagctggctgaccagggctacattccggtggacggcgagttcaagtccaagctggagaagtctgtcgacgctctgaagtaa

SEQ ID NO: 15179 - protein, 367 aa, Corynebacterium jeikeium K411
MKFTMKRASAAAATLFAGSLILTGCSNADNNEGGGSSSEGSRPMEEATGELRGEGASSQDNAIQNIFGPAFSETGATLAYNASGSGDGQKKFIAGQADFAGSDSPLKDDQIADAKKRCDGNDAWHLPMVIGPVAIAYHLEGVDELNLSTKTVAKIFKGEIKKWDDEAIKAENEGVDLPSDPIEVVYRSDESGTSDNFQKFLAASSGEWDSEGKNFPTKVGTGAPKSKGVADQVAATNGAITYVESGFAEELDAVNIAKIDFGSGPVELNKENVNKALAEAEFKGEGNDLVVDSEKLYSMNGEGEYPLVLTTYEIVCSAGYDDNTSKLVKNFLNTILNNQNDELADQGYIPVDGEFKSKLEKSVDALK

SEQ ID NO: 15180 - DNA, 1095 bp, Xylella fastidiosa Ann-1
  CDS (1)..(1095)
atgaaagtacattttgctggtttcactctcctttgtttatgcactgccgtaacaatcaccggctgtaaaccttccaacgataaccagtcaagaggtgtcagtcaggatgcgaacagtacgactccaccctctgccgagcaaaccaagagtgtgaagatttcaggcgcaggtgcctcatttatctatccactgatctcgcaatggtcagccgactacaacgccgccactggcaataaaattaactatcagtcaatcggctcaggcggtggtattgcccaaatcaaagccgccacaatcgattttggttcttctgacaagccacttgacagcagcgaactgacccaagcgggtctagggcagtttccatcggccataggcggcgtcgtgccggtggtcaatctagacaacatcgaaccaggcaaactacgcctaacaggccccctgcttgcagatattttcctggggaagatcagtaagtggaatgacgcagcaatcatcagcgccaatccggggctacatcttccagacactaaaatcaacatcgtgcatcgttccgatggctctggcacgacattcaatttcagcaactatttatcaaaagtcagcgcggaatggaaacagaaagtgggtgaaggcacttcagtgcagtggcccggaggcgtcggcggtaaaggcaacgaaggtgtagcctcatatgttcaacagattaaaggctcgatcggctacgttgaactggcgtatgcgcttcagaacaaaatgtcatatacagcactccagaacgctgctggtcaatgggtacaaccaagcgcagaaagctttgcagcggccgcatccaacgcagactggagcaatgcaaaggatttcaatttggtcatcaccaacgctactggggaaggcgcttggccaatcacagccacaaactttatattgatgcgcaagcaaactaaggatgcagcgcaaagaaaagccactctagacttcttcaagtggtgctttgaaaatgggcagaagcaagccaatgaattacactacgtgccattgccaccaaatctggtgaagcaaatcgaagcttattgggcaagcgaattcaagtaa

SEQ ID NO: 15181 - protein, 364 aa, Xylella fastidiosa Ann-1
MKVHFAGFTLLCLCTAVTITGCKPSNDNQSRGVSQDANSTTPPSAEQTKSVKISGAGASFIYPLISQWSADYNAATGNKINYQSIGSGGGIAQIKAATIDFGSSDKPLDSSELTQAGLGQFPSAIGGVVPVVNLDNIEPGKLRLTGPLLADIFLGKISKWNDAAIISANPGLHLPDTKINIVHRSDGSGTTFNFSNYLSKVSAEWKQKVGEGTSVQWPGGVGGKGNEGVASYVQQIKGSIGYVELAYALQNKMSYTALQNAAGQWVQPSAESFAAAASNADWSNAKDFNLVITNATGEGAWPITATNFILMRKQTKDAAQRKATLDFFKWCFENGQKQANELHYVPLPPNLVKQIEAYWASEFK

SEQ ID NO: 15182 - DNA, 1044 bp, Nostoc punctiforme PCC 73102
  CDS (1)..(1044)
atgattttttcgaccaccaccttgaatcgtgtcattgctacttcattggtgacaacttctgttgcacttagtccattttttggtgcgatcgcacaagctgaaactctcaatggtgcaggagcaacttttccggctccgctttacgaacggtatgctcgtgaagtgaagaagaaatatccagacttgaaaattaactatcaagcaattggtagtggcggcggtattcgtcaagtcaccgctggaaccgttgactttggtggtagtgatgctgcaatgaaagatgatgaaatcagtaaagtcaagaacggtgtaatcttagtacctacagcaggtggtgccgtttctgttgtttataatcttccaggtgttaacgatctcaagttgtcccgtaagacactaccagaaattttctcaggtcaaattaccaaatgggatgacgcaaaaattaaagctgataatcccggtgtcaatctaccaagtcaagcaattaaatttgttgttcgcgctgatggtagcggtacaactttcattttcactaaccacttaagtgctaccagcggttattttaaaggcagagttggagctaacactgctccaaaatggaatctgccaaacgtcctgaaaggcaaaggcaatccaggcgtagctgctatagtatctcgtactcctggttctattggttatgtagaatatgcctacgccgtcaaaaacaatctgaaatcagcactagtacaaaataagaaaggagaatttgttgctccttctttagagtctgcaaatgcagctttgtcaactgtcacttttccagacaattaccgtgtttttgtaggagaaccagcacaaggttatccgatcgttggccttacttggatgatggtttacaaacagtatgctaatgctgctaaagctgatgcaattaagaaatggattaattgggtattgaaggacggtcaacagtataacgatgacctcaactacaccaaaattccatctgatgtagcaaatcgggtgcttcaaacagtgaatagctctgtcaaaccttaa

SEQ ID NO: 15183 - protein, 347 aa, Nostoc punctiforme PCC 73102
MIFSTTTLNRVIATSLVTTSVALSPFFGAIAQAETLNGAGATFPAPLYERYAREVKKKYPDLKINYQAIGSGGGIRQVTAGTVDFGGSDAAMKDDEISKVKNGVILVPTAGGAVSVVYNLPGVNDLKLSRKTLPEIFSGQITKWDDAKIKADNPGVNLPSQAIKFVVRADGSGTTFIFTNHLSATSGYFKGRVGANTAPKWNLPNVLKGKGNPGVAAIVSRTPGSIGYVEYAYAVKNNLKSALVQNKKGEFVAPSLESANAALSTVTFPDNYRVFVGEPAQGYPIVGLTWMMVYKQYANAAKADAIKKWINWVLKDGQQYNDDLNYTKIPSDVANRVLQTVNSSVKP

SEQ ID NO: 15184 - DNA, 801 bp, Bifidobacterium longum DJO10A
  misc_feature (686)..(735): n is a, c, g, or t
  CDS (1)..(801)
atgcagaagaacatcctcgttcgctccattgccgctctgtccggcattgtgatgctcgcttccgtggccgcctgcggcgataacactgccgccacgaccgacaacagctcctcctccgattccacttccaagtccaccccgatctccggcaacttctcgggcgccggcgcctcctctcagcaggccgccgttgaagcttggatcgccggcttccagggcaccaaccctgaggccaagatcgcctacaacccgtccggttccggcgctggcgtgcagaccttcctgaccggtgccaccgcttgggccggctccgacaaggcccttgccgatgacgaagttgagcagtccaagtccgtgtgcactgaaggcaccgccttcgatgtcccggtctacatctccccgatcgccgtggtcttcaacctcaagggcgtttccgatgccggcaagcacatcaacatggacgctgccaccatcgccaagatcttcgacggcaagatcaccaagtggaacgatccggccatcgccgatcagaacaaggacctgaagctgcccgacaccgccatcaccgtggtgcaccgctccgataagtccggcaccacccagaacttcgtctcctacttcaaggacgtcacccctgacaactggacctacgacctctccgaaaactggccgaacgaggttggccnnnnnnnnnnnnnnnnnnnnnnnnnnnnnnnnnnnnnnnnnnnnnnnnnntgccaagggcacttccggcgtgatctccaccgtcaagcaggccgacggcaccatcggctacgctga

SEQ ID NO: 15185 - protein, 266 aa, Bifidobacterium longum DJO10A
  misc_feature (229)..(245): Xaa can be any naturally occuring amino acid
MQKNILVRSIAALSGIVMLASVAACGDNTAATTDNSSSSDSTSKSTPISGNFSGAGASSQQAAVEAWIAGFQGTNPEAKIAYNPSGSGAGVQTFLTGATAWAGSDKALADDEVEQSKSVCTEGTAFDVPVYISPIAVVFNLKGVSDAGKHINMDAATIAKIFDGKITKWNDPAIADQNKDLKLPDTAITVVHRSDKSGTTQNFVSYFKDVTPDNWTYDLSENWPNEVGXXXXXXXXXXXXXXXXXCQGHFRRDLHRQAGRRHHRLR

SEQ ID NO: 15186 - DNA, 996 bp, Pseudomonas syringae pv. syringae B728a
  CDS (1)..(996)
ttgtcgcttctgatcgcatcgctgtgccttagcggtgtggctcacgcgactgatgtaacaggcgctggttcgagtttcgtctacccggttatttcggcgtggtcccaggactacagcaagagcaaggataaccgtatcaactatcagtccatcggttcgggtggtggtattgcccagatcaaggctgcgaccgttgacttcggtgcatccgatgctccgatgtccgcagaagacctgcaggccggcggtctgggtcagtttccgagcgtgatcggcggtatcgtgccgatcgtcaacgtcgaaggcgtcgaaagtggcgagctgaagctggacggtccaaccatcgccaagatcttcatgggcgagatcaagaagtggaacgaccctgcaatcactgcgctgaactcgggcgtcaaactgcctgataccgccatcaccgtcgttcaccgttcggacggttcgggcaccacgtacaacttcaccaactacctgagcaaagtcagccccgagtggaacgagaagctgaagttcggttcgaccgtacagtggccagcaggcgtgggcggcaagggtaacgaaggtgtttcggcctacgtgaagcagatcaagggttcgatcggctacgtcgagtactcctacgcgaccaccaacaagctgtcctacactcagctgaaaaacgcggctggcaaatttatcaaaccagacgccaaggctttcgcagcagctgctgacaccgccgactgggcgagcgccaaagacttcaacctgatcatgaccaacgcgccgggtgaggctgcatggccgatcaccgcgaccacctggatcatcatgtacaagaaagccaagaacgaagagaaaagcaccgcggctttcgacttcttcaagtggtccctggaaaacggccagaagcaggccgagaaactggaatacgtagcattgcctaaatcgctggttgatcgcgtggaaagctactggaaaacggaattcaccaagtaa

SEQ ID NO: 15187 - protein, 331 aa, Pseudomonas syringae pv. syringae B728a
MSLLIASLCLSGVAHATDVTGAGSSFVYPVISAWSQDYSKSKDNRINYQSIGSGGGIAQIKAATVDFGASDAPMSAEDLQAGGLGQFPSVIGGIVPIVNVEGVESGELKLDGPTIAKIFMGEIKKWNDPAITALNSGVKLPDTAITVVHRSDGSGTTYNFTNYLSKVSPEWNEKLKFGSTVQWPAGVGGKGNEGVSAYVKQIKGSIGYVEYSYATTNKLSYTQLKNAAGKFIKPDAKAFAAAADTADWASAKDFNLIMTNAPGEAAWPITATTWIIMYKKAKNEEKSTAAFDFFKWSLENGQKQAEKLEYVALPKSLVDRVESYWKTEFTK

SEQ ID NO: 15188 - DNA, 810 bp, Desulfovibrio desulfuricans G20
  CDS (1)..(810)
atgcgtatgaaacatcttgccatcgtcgccgccctggtgctcggcctcacttcttccgcttttgccggacagaagatcaaaatcgccggttccacaaccattctgcccatcatgcagcgtgtggttgaagcatacatgaaagccaaccccgatgtggaaatcgcagtttccggcggcggttcttccaacggcatcaaagcgctgctggacggcaccaccgacatcgccatggcatcgcgcaccatgaaagacaaagaaatcaaaatggccgccgaaaaaggcatgaaccccaagcaggttgtcatcgcccttgatgccgtgattcccattgtcaacaaaagcaaccccgtcaacgacctgaccattgaccagctgcaggccatctatgcaggcaaggtcaccaactggaaagaagtcggcggcaaagacgaaggcattgtggtggtttcgcgcgacacgtcttccggcacctacgagacctggagccactttgtaatgggtaaaacccgcgtgttccccggtgcgcttctgcaggcatcttccggcgcagtgctgcaggccgtggccaaaaacccccgcgccatcagctacgacggcatcggctacgttgacaactcggtcaagccgctgaccgtgaacggtgtggaaggcaacgcaaccaccgccaaggacaaaagcttccccgtcgcccgcaccctgcaggtatatgtagacggcagcgtttccggtgcggccaagggccttatcgacttcatcctgtcgcccgaaggccagaacattgtggaagaagccggcttcatcaagctgtaa

SEQ ID NO: 15189 - protein, 269 aa, Desulfovibrio desulfuricans G20
MRMKHLAIVAALVLGLTSSAFAGQKIKIAGSTTILPIMQRVVEAYMKANPDVEIAVSGGGSSNGIKALLDGTTDIAMASRTMKDKEIKMAAEKGMNPKQVVIALDAVIPIVNKSNPVNDLTIDQLQAIYAGKVTNWKEVGGKDEGIVVVSRDTSSGTYETWSHFVMGKTRVFPGALLQASSGAVLQAVAKNPRAISYDGIGYVDNSVKPLTVNGVEGNATTAKDKSFPVARTLQVYVDGSVSGAAKGLIDFILSPEGQNIVEEAGFIKL

SEQ ID NO: 15190 - DNA, 1044 bp, Actinobacillus pleuropneumoniae serovar 1 str. 4074
  CDS (1)..(1044)
atgttattggtaaaaacagctaaaaaattcgttgttatcggactttcattaggcgtaatggcatcaagttatgctgaaacgattaccggtgcaggcgcttcattcccctatccgatttatgcgaaatgggcttcactttatgaaaaagaaacgggtaataaagtgaattatcaatctatcggttccggcggaggtcagcaacaaattatcgcaaaaacgattgatttcggtgcgtcggacgatccgatgaaagcggaattattggatcaacacaaattattacaattcccggcaattatcggcggtacggtaccggtggtgaacttaccggaatttaaagcgggtgaattaaaattatccggtacggtattggcggatattttcctcggtaaaattactaaatggaatgacccggcgattaaagcgttaaacgcatcgttaaatttaccggataaaagtattgtcgttgtacgtcgttcggacggttcgggtacaacattcggttggactaactatttatcgaaagtgtcgctggaatggaaagaaaaagtcggtgaaggtaaatcggttaaatggcctaccggtcaaggcggtaaaggtaatgaaggcgtagccgcttatgtgaaacaacttaaatattccatcggttatgtcgaatatgcttatgcgaaacaaaataacttagcttgggcttcgttacaaaaccaagcgggtaaatttgtacaaccgtcacgcgaaagttttatggcggcggctgcaaatgcgcagtgggataaagcgaaaggtatgggcattatgcttaccaatgaaagcggcgataattcatggcctgtgacggcggcaagtttcatccttgttcaccaacaggcggataatccgaccgcaaccaaagcggtgtttgacttcttcgattgggcttttgaaaaaggtaaaaatgcggcgtcggagttagattatgtgccgttaccggatgaagtcgtaacgaaaatcaaacaaaaatggcaaaacgaagtaaaagataaagacggtaaagcggttcgctaa

SEQ ID NO: 15191 - protein, 347 aa, Actinobacillus pleuropneumoniae serovar 1 str. 4074
MLLVKTAKKFVVIGLSLGVMASSYAETITGAGASFPYPIYAKWASLYEKETGNKVNYQSIGSGGGQQQIIAKTIDFGASDDPMKAELLDQHKLLQFPAIIGGTVPVVNLPEFKAGELKLSGTVLADIFLGKITKWNDPAIKALNASLNLPDKSIVVVRRSDGSGTTFGWTNYLSKVSLEWKEKVGEGKSVKWPTGQGGKGNEGVAAYVKQLKYSIGYVEYAYAKQNNLAWASLQNQAGKFVQPSRESFMAAAANAQWDKAKGMGIMLTNESGDNSWPVTAASFILVHQQADNPTATKAVFDFFDWAFEKGKNAASELDYVPLPDEVVTKIKQKWQNEVKDKDGKAVR

SEQ ID NO: 15192 - DNA, 1179 bp, Pseudomonas aeruginosa UCBPP-PA14
  CDS (1)..(1179)
atgtacaagcgctctctgatcgctgcctcgctgagcgtggccgccctcgtatccgcccaagccatggccgacatcaacggcggtggcgccaccctgccgcaacagctgtaccaggagcccggcgtcctgaccgccggctttgccgcctacatcggcgtaggcagtggcaacggcaaggcggccttcctgaacaacgactacaccaagttcgtcgccggcaccaccaacaagaacgtgcattgggctggtagcgactccaaactgagcaagaccaacgaaaccaacccctatctgagcgcccatggctccgcctggggtccgctgatccaggtgccgtcggtagccacttctgtcgctctgccgttcaacaagtcaggtagcaacgccgtcaacttcgcagacgtgaacaccctttgcggtgtcttctccggccgtctgaccgattggagtcagattcctggctcgggccgtagcggcgccatcacagtggtctaccgttccgagagcagcggcaccaccgaactgttcacccgcttcctcaacgcctcctgctccagcaccctcgaaggtggcaccttcgccatcaccaccagcttcggtagcagcttctccggcggcctgccggctggcgccgtatcggcccagggcagccaggccgtgatgaatgcgctcaacgccgcccaaggccgcatcacctacatgagcccggacttcgccgcgccgaccctggccggtctcgacgacgccaccaaggtcgcccaggttcgcggcgtatccccggcgccggccaacgtttcggcggccatcggcgccgttactccgccgactactgcccagcgttccgatccgaacaactgggtaccggtcttcgctgccaccgccaaccccaacgacccgagcgtgcgtccgtatccgaccagcggctacccgatcctcggcttcaccaacctgatcttcagccagtgctacgccaacgccacccagacccagcaggtgcgcgacttcttcacccgtcactacggcgccaccgccaacaacgacaccgcgatcaccaaccatcgcttcgtgccgctgccggcttcctggaagcttgccgtacgccagtcgttcctgacctccaccaacaacttgtacatcggccattccaacgtctgcaacggcatcggccgtccgctctaa

SEQ ID NO: 15193 - protein, 392 aa, Pseudomonas aeruginosa UCBPP-PA14
MYKRSLIAASLSVAALVSAQAMADINGGGATLPQQLYQEPGVLTAGFAAYIGVGSGNGKAAFLNNDYTKFVAGTTNKNVHWAGSDSKLSKTNETNPYLSAHGSAWGPLIQVPSVATSVALPFNKSGSNAVNFADVNTLCGVFSGRLTDWSQIPGSGRSGAITVVYRSESSGTTELFTRFLNASCSSTLEGGTFAITTSFGSSFSGGLPAGAVSAQGSQAVMNALNAAQGRITYMSPDFAAPTLAGLDDATKVAQVRGVSPAPANVSAAIGAVTPPTTAQRSDPNNWVPVFAATANPNDPSVRPYPTSGYPILGFTNLIFSQCYANATQTQQVRDFFTRHYGATANNDTAITNHRFVPLPASWKLAVRQSFLTSTNNLYIGHSNVCNGIGRPL

SEQ ID NO: 15194 - DNA, 1155 bp, Psychrobacter sp. 273-4
  CDS (1)..(1155)
atgcgttattcattcatggcagtagcaatcgctagcactttggtattagccgcttgtaaccaaacgaccagcaacaacgagagcgataaaaccaacgagcctgctacagcagcgccagcaaatgccgctgctagtggcgacgctagtgctagctcagctgaaagtgcatcgatgaacattactggtgctggtgcctcttttccgcagcctatctatgctaaatggtcagatgcttacaataaagccaccggtggtcaggtgaactatcagtccattggctcatctggcggtatcaaacaaatcgttgcgaagaccgtggattttggagcatctgatgcgcctatgacaccagaagagttaaacgaagctggtctgattcagttcccaactgtcattggtggcgtagtgcctatcgtcaatatcgatggcatcaaggctggtcagttaaagctcgatggcaaaatgcttgccgatatttatttgggcaaaatcagtaaatggaacgaccctgccatcgcggctatgaatccagaacttaaattaccagacgctgccattaccacggtatttcgctcggatggttctggtacgacttttaacttcactgactatctagcaaaagtttcaagcgattggaatgacagtgtgggtgtcgataaaacagtcaaatggccaacatcggctaccggtgctggtggtaaaggcaacgagggtgtgtcgagctacgtcacacgcatgaaaaactctatcggctatgttgaatatgcttacgctaagcaaaacggtatggcacacgtcgcccttaaaaacgctgcaggcaatatcgtacaaccttctgcccaaacttttgcagcggcaggcgacattgactggtcaaagcaagaaggcttctataaagttattaccaactctgaaacagcgcaagcttggccaatcgccgcggcgacttttatcttagtacataagcagccacaagatgccaagcaagtcgccggcgtattaaagttctttgactgggcttatactcaaggtgatgacgatgcaatggcgcttgattacgtgccgttttctgatactgccgttgctttgtttaaagcaaaatggaatgaggtaaaaggcagcgacggccaacctgtctataagcctgcacaataa

SEQ ID NO: 15195 - protein, 384 aa, Psychrobacter sp. 273-4
MRYSFMAVAIASTLVLAACNQTTSNNESDKTNEPATAAPANAAASGDASASSAESASMNITGAGASFPQPIYAKWSDAYNKATGGQVNYQSIGSSGGIKQIVAKTVDFGASDAPMTPEELNEAGLIQFPTVIGGVVPIVNIDGIKAGQLKLDGKMLADIYLGKISKWNDPAIAAMNPELKLPDAAITTVFRSDGSGTTFNFTDYLAKVSSDWNDSVGVDKTVKWPTSATGAGGKGNEGVSSYVTRMKNSIGYVEYAYAKQNGMAHVALKNAAGNIVQPSAQTFAAAGDIDWSKQEGFYKVITNSETAQAWPIAAATFILVHKQPQDAKQVAGVLKFFDWAYTQGDDDAMALDYVPFSDTAVALFKAKWNEVKGSDGQPVYKPAQ

SEQ ID NO: 15196 - DNA, 975 bp, Dechloromonas aromatica RCB
  CDS (1)..(975)
atgaccggtgccgggtcgtctgccgcctacccgatctacaagctgtgggcggatcaactgaaacgtgaaggcggtttcgtgctgaactacgatcccgtcggctcatcggccggggtcgagagagctcgcgcccgtcaggccgatttcggcgccacggatgtcgcactcaaaagtgagcaactggccaaggacaaccttatcctctttccaacggtcatcaccggcgcagttcccgtcatcaacctgcccaagatggaaaaaccgcttgttctggacggccccacgctggccagaatcttcctgggggaaattgagcactgggatgcacctgagatccgcgccttgaatcccggcctgagccttcccgcaaaaccgatagtcgcggtcgtccgcagcgatggctctggcaccacttacaactttgccgattatctggccaaggtcagtccggcatggaaacagaagatgggcgttgccacgaacctcaaatggccagcctcgttcacgtcggtcaagggcagcaagggcgttgccgaagcagtgaaatcgacgcccgggagcatcagttacgtggattacaactacgtactggattacaagctcacgggggcagccatgaagaatgcggacggcgccatcgtcgaagccgggccttacaccttccgtgaagcgcttgcccagagcgtctggaagcaaaccggcgacttcactcagacgctgaccaatcagaccgggaaaagcagctggcccatcacgatgggcacttttatcgtcatgccccgagtctccaacaatccggaacggaccatccaggtcacccgtttcttcaccgaggcattcatgcgcggtgacgaccttgcgaaacaggccaacttcgtccgcctgccgtcgatcatccaggggaaagccttccgggtgatttcggaaatcgtcgatgcaaagggcgttcccatcggcataaacagcctccgataa

SEQ ID NO: 15197 - protein, 324 aa, Dechloromonas aromatica RCB
MTGAGSSAAYPIYKLWADQLKREGGFVLNYDPVGSSAGVERARARQADFGATDVALKSEQLAKDNLILFPTVITGAVPVINLPKMEKPLVLDGPTLARIFLGEIEHWDAPEIRALNPGLSLPAKPIVAVVRSDGSGTTYNFADYLAKVSPAWKQKMGVATNLKWPASFTSVKGSKGVAEAVKSTPGSISYVDYNYVLDYKLTGAAMKNADGAIVEAGPYTFREALAQSVWKQTGDFTQTLTNQTGKSSWPITMGTFIVMPRVSNNPERTIQVTRFFTEAFMRGDDLAKQANFVRLPSIIQGKAFRVISEIVDAKGVPIGINSLR

SEQ ID NO: 15198 - DNA, 1014 bp, Haemophilus influenzae R2846
  CDS (1)..(1014)
atgcataaaatgaaaaaaaatcttattatcgttttaaccttaggtacgttaccttttgctcaagctaatagcatcactggtgctggagcgtctttcccttatccaatttatgcgaagtgggcatctttatatgagaaagaaactgggaataaagttaattatcaatccatcggttcgggcggcggacaacagcaaattattgcaaaaacggttgattttggtgcctctgacgatccgatgaaatccgaattattacaacaacaccaactagtccaattccctgcggttatcggtggtatagtgcctgttgttaatttgcctgaaattaaacctggtaaattaaagttatcaggtaagctgttagcagaaatcttccttggtaagattaaaaaatggaacgatcctgacttagttgcattaaatccaacgcttcctttaccaaataaaaacattattgtgattcatcgttcagacggctctggaacaacatttggcttcactaattatctatctaaagtttcgaacgattggaaaaatcaagttggtgaaggtaaatcagtgaagtggttaacaggtcaaggtggaaaggggaatgagggaattgcttcttatgttcgccaaatgaaatacaccattggttatgtagagtatgcctatgccaaacaaaatcagcttgcttggatttcattacaaaatcaagcagggcaatttgtacagccttctaatgaaagtttcatggcagctgcaagtcacgcaaaatggcacgaaaaggcgggaatgggtgttatattaaccaatgaaacgggggaaaaatcttggccaattacggcagcgagttttattttattaaataaatattctgacaatcctgaaacaactaaaaatgtattagccttttttgattgggcattctcaagagggcaagatgcggcaactgaattagattatgtgccaattccagctgatgtggtatctaccattaaaagtcaatggaaaacagagctaaaacaataa

SEQ ID NO: 15199 - protein, 337 aa, Haemophilus influenzae R2846
MHKMKKNLIIVLTLGTLPFAQANSITGAGASFPYPIYAKWASLYEKETGNKVNYQSIGSGGGQQQIIAKTVDFGASDDPMKSELLQQHQLVQFPAVIGGIVPVVNLPEIKPGKLKLSGKLLAEIFLGKIKKWNDPDLVALNPTLPLPNKNIIVIHRSDGSGTTFGFTNYLSKVSNDWKNQVGEGKSVKWLTGQGGKGNEGIASYVRQMKYTIGYVEYAYAKQNQLAWISLQNQAGQFVQPSNESFMAAASHAKWHEKAGMGVILTNETGEKSWPITAASFILLNKYSDNPETTKNVLAFFDWAFSRGQDAATELDYVPIPADVVSTIKSQWKTELKQ

SEQ ID NO: 15200 - DNA, 1182 bp, Anabaena variabilis ATCC 29413
  CDS (1)..(1182)
atgctctcatatatcaagagaattaaaaataaccgcattccagtatcaattaccgtattaacactggcgatgagtttagctgcttgtggtgggcagcaaggctcagacaatactgcaactcaagatggttcatctggtacagctaaagatgctacagcttccagcccagtaaaattggatcttggtggcaatgtcacattaactggagctggtgcatcgtttcctgcaccgttatatcaaagttggttcacggaattaaacaaaaagtaccccaatttacaagttaactatcagtcagtaggtagcggcgctggagttgaacaatttatccaaggtacggtagatttcggtgctagtgacgtagccatgaaggatgaagaaatccaaaaagtaccgcaagacaaaggtactttattactaccaatgactgctggtagtattgtcttggcttataatctccctgatgttgctgacctgaaactaccaagggcagtttacacagacattttgctaggtaatattaaaacttggaacgacaaaaaaattgctgatgccaaccctggtgtaaatcttcctaatcagccaattacagttgtatatcgttccgatggtagtggaactacaggggtatttactaaacacctcagtgccatcaatccagattggaaaagcaaagtaggcgatggtaaaactgtcaattggcctgtgggtgttggtgcgaagggaaatgaaggtgtaacagctcaagtccaacaaacccaaggctctattggttacatagaatatggctacgccaaacaaaacggactcaagtttgcggcgttagaaaataaagatggtaaatttgtgatacccacagaagaatcagcatctaaaactttagaagctgtcaccttaccaacagacctccgcgcttttattgcagacccagaaggtgcagaatcttatcctatagtcacctacacttggattatgacttataaaaaatatgctgatccagtgaaagcgaaagcagtggaagccgcaattgagtatggtttaacagaagggcaaaaggtcgccgcagaactggggtatgttcccctacctcaaaatgtggtggcaaaggtagcggctgtggctgaccaaattagtccagattataaaattgcagtaagtggcaacacaagcgctagcaagtaa

SEQ ID NO: 15201 - protein, 393 aa, Anabaena variabilis ATCC 29413
MLSYIKRIKNNRIPVSITVLTLAMSLAACGGQQGSDNTATQDGSSGTAKDATASSPVKLDLGGNVTLTGAGASFPAPLYQSWFTELNKKYPNLQVNYQSVGSGAGVEQFIQGTVDFGASDVAMKDEEIQKVPQDKGTLLLPMTAGSIVLAYNLPDVADLKLPRAVYTDILLGNIKTWNDKKIADANPGVNLPNQPITVVYRSDGSGTTGVFTKHLSAINPDWKSKVGDGKTVNWPVGVGAKGNEGVTAQVQQTQGSIGYIEYGYAKQNGLKFAALENKDGKFVIPTEESASKTLEAVTLPTDLRAFIADPEGAESYPIVTYTWIMTYKKYADPVKAKAVEAAIEYGLTEGQKVAAELGYVPLPQNVVAKVAAVADQISPDYKIAVSGNTSASK

SEQ ID NO: 15202 - DNA, 1044 bp, Anabaena variabilis ATCC 29413
  CDS (1)..(1044)
atgaatttttccaccaccgtcttacagcgtgtatttactactgctgtggtaacatctgctgttgttgttactcctatttttacagcgatcgctcaagctcaaactctcaacggtgcaggagcgacttttccggctccactttatgaacggtatgctcgtgaagttagaaaaaagcatccagaactgagaattaactatcaaggaattggtagtggtggtggtattcggcaagtaacagccggaactgttgacttcggtggtagtgatgcggcaatgacagatgctgaaattgctaaagtcaaaaatggtgtcatccttgttcccacagccggcggtgctgtttccgtcgtctataacgttccgggtgtcaataatctgagattatcccgtactacactaccagcaattttttctggtcaaattaccaactggaatgatgccaaaattaaagctgataatcctggtgtaaatctgccaaaccagccaattagatttgctgtgcgtgcggatagtagtggtaccacattcatttttacaaaccacttgagtgctattagtggttatttcaaaggcagaattggcgctaatactgcacccaaatggactttacctaatgtcctcaaaggtaaaggaaaccctggtgtagcatcattagtggctcgtactcctggctctattggttatgttgaatatgcttatgcagccaaaaataacctcaaatcagcgcagattcaaaacaaaaaaggagaatttgtagccccttctctccaatctgctaacgctgctttatcagctgtcagtttcccagacaatttccgcgtttttgtgggagatccaggacaaggttatcccattgtgggactcacctggatgatggtttatagacaatatgctgatgcggctaagtctcaagccatcaagaaatggatcaattgggttctaaaagacggtcaacaattcaatgatgaccttaattacacaagaattcctgatgctgtagctaatcgtgtgttgcaaacagtcaatagcaacgtcaaaccatag

SEQ ID NO: 15203 - protein, 347 aa, Anabaena variabilis ATCC 29413
MNFSTTVLQRVFTTAVVTSAVVVTPIFTAIAQAQTLNGAGATFPAPLYERYAREVRKKHPELRINYQGIGSGGGIRQVTAGTVDFGGSDAAMTDAEIAKVKNGVILVPTAGGAVSVVYNVPGVNNLRLSRTTLPAIFSGQITNWNDAKIKADNPGVNLPNQPIRFAVRADSSGTTFIFTNHLSAISGYFKGRIGANTAPKWTLPNVLKGKGNPGVASLVARTPGSIGYVEYAYAAKNNLKSAQIQNKKGEFVAPSLQSANAALSAVSFPDNFRVFVGDPGQGYPIVGLTWMMVYRQYADAAKSQAIKKWINWVLKDGQQFNDDLNYTRIPDAVANRVLQTVNSNVKP

SEQ ID NO: 15204 - DNA, 1032 bp, Ralstonia eutropha JMP134
  CDS (1)..(1032)
atgaagctggtcaagactgccgtggcaggcatcgtttcgatggtcgtagcgggtactgcgttcgcggcggaaattaccggtgcaggcgcttccttcccggcgcccgtctattccaagtgggccgacgcataccaaaaagcaacgggcaacaaggtcaactatcaatccatcggctcgtcgggcggcatcaagcagattggcgccaagacggtcgatttcggcgcttcggatgccccgctgaaggacgaagatctgaacaagcagggtctggtccagttcccgactgtgatcggcggcgtggtgccggtgatcaacctgcaaggtgtgaagccgggcgacctgaccatcacgggcgaagtgctggccaatatctacctgggcaagatcaagaagtgggacgatccggccatcaaggcactgaacccgcacgccaagctgccgaaccaggacatcctgccggtgcgccgcgctgacggttcgggcaccaccttcatcttcacgaactacctgtcgaaggtcagccccgaatggcagaagtcggtgggcgaaggcaccaccgtcaactggccgggcggtggcacgggcggcaagggcaacgaaggcgttgccgctttcgtgcagcgtctgaatggcgcgatcggctacgtcgagtacgcctacgccaagcagaacaagatgacgcacgtgaacatgaagaacgcggccggcgccgtggttcagcccggtgacgacgccttcaaggctgccgccgccggtgcggactggagcaagagctactaccagatcctgacgaaccagccgggcaaggcggcatggccgatcgccggcgcgaccttcatcctggtccacaagaaccaggaaaaggctgcgcaaggcgcggaagtgctgaagttcttcgactgggcctacaagagcggcaccaacatggccgccgacctggactacgtgccgctgccggatgcggtcgtgaaccagattcgcacgacctggaagacgagcgttaaggacgcgtcgggcaaggcgctgtactaa

SEQ ID NO: 15205 - protein, 343 aa, Ralstonia eutropha JMP134
MKLVKTAVAGIVSMVVAGTAFAAEITGAGASFPAPVYSKWADAYQKATGNKVNYQSIGSSGGIKQIGAKTVDFGASDAPLKDEDLNKQGLVQFPTVIGGVVPVINLQGVKPGDLTITGEVLANIYLGKIKKWDDPAIKALNPHAKLPNQDILPVRRADGSGTTFIFTNYLSKVSPEWQKSVGEGTTVNWPGGGTGGKGNEGVAAFVQRLNGAIGYVEYAYAKQNKMTHVNMKNAAGAVVQPGDDAFKAAAAGADWSKSYYQILTNQPGKAAWPIAGATFILVHKNQEKAAQGAEVLKFFDWAYKSGTNMAADLDYVPLPDAVVNQIRTTWKTSVKDASGKALY

SEQ ID NO: 15206 - DNA, 1026 bp, Burkholderia cepacia R18194
  CDS (1)..(1026)
atgaacatccggatcttgattccctgcaccctggttcttgttgccctcagtgctcacgctgcggatatcaccggcgcgggcagcacatttgccgcaccgatctacgcaaagtgggccgatgcgtacaagaagtcgggcggtggcaaggtcaactatcaaggtatcggctcgtcgggcggcttgaagcaaatcaacgcgaagaccgtcgattttgccggttcggacgctccgctgaaggatgacgagctcgcgaaggcaggcctgttccagttcccgacggtggtcggtggcgtggtgcccgtcgtcaacgtgccgggcgtgaaggccggcgaactgacactgtcgggcccggtgctcggcgacatctacctcggcaagatcacgaagtggaacgaccccgccatcaccgcactgaacccgaaggtcaagctgtcggatacggacatcgctgtagttcgccgcgccgacggttcgggcacgagcttcatctggacgaactacctgtcgaaggtgaacggcacatggaagtcgaaggtcggcgaaggcacgacggtcaactggccgacgggcaccggcggcaagggcaatgacggcgttgcagcgttcgtgcagcgcctgccgggcgcgatcggctacgtcgaatgggcatacgcgaagaagaacaacatggtctacaccgcgctgaaaaactcgacgggcacggtggtcgagccgaagacggaaacgttcaaggccgctgcggcaggtgcgaactggtcgaagtcgttctaccagatcctgacggacgagccgggcaaagacgcgtggccggtcgtcggcgcgacgttcgtgctgctgcacgcaacgcaagagaaaccggcacaaggtgcagaaacgctcaagttcttcgactgggcatttcacaacggcaatcaggccgcctcggatctggactacatctcgcttcccgattccgtggtggccgaaattcgcaagcaatggaaagcgaaggtcaaggatgcctccggtaagccggttgcaaactga

SEQ ID NO: 15207 - protein, 341 aa, Burkholderia cepacia R18194
MNIRILIPCTLVLVALSAHAADITGAGSTFAAPIYAKWADAYKKSGGGKVNYQGIGSSGGLKQINAKTVDFAGSDAPLKDDELAKAGLFQFPTVVGGVVPVVNVPGVKAGELTLSGPVLGDIYLGKITKWNDPAITALNPKVKLSDTDIAVVRRADGSGTSFIWTNYLSKVNGTWKSKVGEGTTVNWPTGTGGKGNDGVAAFVQRLPGAIGYVEWAYAKKNNMVYTALKNSTGTVVEPKTETFKAAAAGANWSKSFYQILTDEPGKDAWPVVGATFVLLHATQEKPAQGAETLKFFDWAFHNGNQAASDLDYISLPDSVVAEIRKQWKAKVKDASGKPVAN

SEQ ID NO: 15208 - DNA, 915 bp, Burkholderia cepacia R18194
  CDS (1)..(915)
atgcaaaccgcgattgccggcctggctggcgcgcttttcgccgtcgccgctcacgctgccgacatcacgggcgcaggcagcacgttcgcgatgccgatctatacgaaatgggctgctgactaccagcagaccggcggcgcgaaggtcaactaccaaggtatcggctcgtcgggcggcctgaagcagatcgtcgcgaagacggtcgattttgccggttcggacgctccgctgaaggatgacgagcttgcaaaggaaggcctgttccagttcccgacggtggtcggcggcgtggtgccggtcgtcaacgtgccgggcgtgaaggccggtgaactgacgctgtcgggcccggtgctcggcgacatctacctcggcaagatcaagaagtggaacgacccggcgatcgccgcgctgaacccgaaggtcaagctgccggacacggacatcgccgtggttcgccgcgctgacggctcgggcacgagcttcatctggacgaactacctgtcgaaggtcaacgacgagtggaagtcgaaggtcggcgaaggcacgacggtcaactggccgacgggcacgggcggcaagggcaacgacggcgtcgcagccttcgtgcagcgcctgccgggcgcagtcggctacgtcgaatgggcgtacgcgaagaagaacaacatggtctacacggccctgaagaattcgacgggcacggtggtcgagccgaagacggaaacgttcaaggccgctgctgcaggcgcgaactggtcgaagtcgttctaccatgacgaaccagccgggcaaggaagcatggccggtcgtcggcgcgacgttcgtgctgctgcacgcaaagcaggacaagccggagcagggcgcggaaacgctgaagttcttcagctgggcgttcaagaacggcgagaaggctgctga

SEQ ID NO: 15209 - protein, 304 aa, Burkholderia cepacia R18194
MQTAIAGLAGALFAVAAHAADITGAGSTFAMPIYTKWAADYQQTGGAKVNYQGIGSSGGLKQIVAKTVDFAGSDAPLKDDELAKEGLFQFPTVVGGVVPVVNVPGVKAGELTLSGPVLGDIYLGKIKKWNDPAIAALNPKVKLPDTDIAVVRRADGSGTSFIWTNYLSKVNDEWKSKVGEGTTVNWPTGTGGKGNDGVAAFVQRLPGAVGYVEWAYAKKNNMVYTALKNSTGTVVEPKTETFKAAAAGANWSKSFYHDEPAGQGSMAGRRRDVRAAARKAGQAGAGRGNAEVLQLGVQERREGC

SEQ ID NO: 15210 - DNA, 1041 bp, Rubrivivax gelatinosus PM1
  CDS (1)..(1041)
atgaacgtttctctcctccgctccaccctcgcggcggtcgcgctgatcgccgtggccggcactgcctcggcgcaggacatcaccggcgccggcgcctccttcccggccccggtctattcgaagtgggccgatgcgtacaacaaggccaccggcgcgcgcctcaactaccagtcgatcggttcgggcggcgggatcaagcagatcaaggccaagacggtcgatttcggtgcgtccgatgcgccgctgaaggacgaagagctggccaaggacggcatggtgcagttcccgaccgtgatcggcggcgtggtcccggtcgtcaacatcaagggcatcgccccaggccagatgaagctgaccggccaggtgctgggtgacatctatctggggaagatcaccaagtggaacgaccccgcgatcgccgcgctcaacgccggcgtgacgctgcccgatgcctcgatcgccgcggtgcgccgcgccgacggttcgggcaccaccttcctgttcacgaactacctgtccaaggtcaacgcggaatggaagaccaaggtcggtgaaggcaccgcggtcaactggccgaccggcgctggcggcaagggcaacgagggcgtgtcggctttcgtgcagcgtctgccgaactcgatcggctatgtcgagtacgcgtacgccaagcagaacaagatgtcgcacgtgatgctgaagaacagggacggccagttcgtcggtccggacgaagacaacttcaaggccgccgccgccggcgcggaatgggcgaagagcttctaccaggtcctgaccgagcagccgggcaaggaagcctggccgatcaccggcgcgaccttcatcctgatgcacaagtctcaggacaagcccgagagtgcctccaacgcgctgaagttcttcgagtgggcctacagcagcggcgacaagatggcggccgacctcgactacgttccgatgcccgacaccgtcaagacgatgatccgcaagctgtgggcggacaacatcaaggacgcctccggcaaggccgtcgcctacaagtga

SEQ ID NO: 15211 - protein, 346 aa, Rubrivivax gelatinosus PM1
MNVSLLRSTLAAVALIAVAGTASAQDITGAGASFPAPVYSKWADAYNKATGARLNYQSIGSGGGIKQIKAKTVDFGASDAPLKDEELAKDGMVQFPTVIGGVVPVVNIKGIAPGQMKLTGQVLGDIYLGKITKWNDPAIAALNAGVTLPDASIAAVRRADGSGTTFLFTNYLSKVNAEWKTKVGEGTAVNWPTGAGGKGNEGVSAFVQRLPNSIGYVEYAYAKQNKMSHVMLKNRDGQFVGPDEDNFKAAAAGAEWAKSFYQVLTEQPGKEAWPITGATFILMHKSQDKPESASNALKFFEWAYSSGDKMAADLDYVPMPDTVKTMIRKLWADNIKDASGKAVAYK

SEQ ID NO: 15212 - DNA, 1110 bp, Pseudomonas fluorescens PfO-1
  CDS (1)..(1110)
atgttcaagcgcactctgatcgcagcttccctgaccgtcgctgccctggcttccgcccaggccatggccgccaacgtaaccggtggtggcgcgactctgcctgccgctctgtacaaaggttctgccaacagcatcctgccagccaacttcagctacctgggtaccggtagcggcaccggcaagaccgctttcctgaccaacaactcggcactgttcaacaccaccggttcggttcacttcgccggtagcgactcgatcctcagcgcttcggaaatcagcacctacaacaccaacttcggcgcttcgtacggcccgctgattcaactgccttcggtggctacttcggttgccattccgtacaaaaaatccggtcagaccgctctgaacctgaccagcgctcagctgtgcgacgccttctccggcgccaaaaccacctggggcgctctgctgggcacttccgacaccacgccgatccgcgttgtttatcgcaacgtttccagcggcaccacggaaatcctgacccgtcacctgaactcgatctgcccgaccaagttcgccaccaactccaccttcgccagcgctcgtctgccagccggttcgaccctgcctacgacctgggtaggcgttgccggtactgctgacgtggccactcaagtcaacgccgttgacggctccatcggttacgttggtccggacggtgtgaacgccgccagcaacgccgtggttgctcgcgtcaacggcgtacagccaaccaccgccaacgtttcgctggcactgggttcggcgactctgccaaccgcgccttcgaaccctgcccagtgggtaccggtcgttcctaacccagccagcggttacccgatcgtggcttacaccaacttcatcttcggccagtgctacaaggacgcaaccgtggccgctgacgtcaaatccttcctgaccactcactacagcaacccgggcaacaacgctgccaccatcgctcacagcttcactccggttccaaccaactggaaagcggccgtgactgccaacttcatcaccaacacctcgggcaacaacctggacatcaacaacgccagcgtctgcaacgctgtcggccgtcctttgtaa

SEQ ID NO: 15213 - protein, 369 aa, Pseudomonas fluorescens PfO-1
MFKRTLIAASLTVAALASAQAMAANVTGGGATLPAALYKGSANSILPANFSYLGTGSGTGKTAFLTNNSALFNTTGSVHFAGSDSILSASEISTYNTNFGASYGPLIQLPSVATSVAIPYKKSGQTALNLTSAQLCDAFSGAKTTWGALLGTSDTTPIRVVYRNVSSGTTEILTRHLNSICPTKFATNSTFASARLPAGSTLPTTWVGVAGTADVATQVNAVDGSIGYVGPDGVNAASNAVVARVNGVQPTTANVSLALGSATLPTAPSNPAQWVPVVPNPASGYPIVAYTNFIFGQCYKDATVAADVKSFLTTHYSNPGNNAATIAHSFTPVPTNWKAAVTANFITNTSGNNLDINNASVCNAVGRPL

SEQ ID NO: 15214 - DNA, 1014 bp, Burkholderia fungorum LB400
  CDS (1)..(1014)
ttgaccggtgtggtcggcgctctattggcggtcacggcgcacggcgccgacattgccggcgccggcagcaccttcgccgcgccgatttatacgaaatgggccggcgcataccagcaggcaggcggcggcgcggtgagctatcgcgctgtcgggtcgaccgaaggcgtgaaggaaatcatggagagccaggtcgatttcgccgggtcggacgcgccgttgagcgacgacgaacttgccaggaacggcttgctccagtttccaatggtgatcggcggggtcgtgccggtcgtcaatctgcccggtatcaagcccggtgagttgattctctccgggcgtgtgctcgcggatatctacctgggcaaaatcatcaactgggacgcgccggccattgccgccatcaatcccaggatcaagctgccggatacgcctatcgccgttgtccgccgccttgacggttccggtaccacgctgatctggacgcactatctcgcgcaggccaattctgaatggaagagccggatcggcgaagggacttcggtgcgctggccacgcggtataggcggaagaggtaatgaaggggtggccactttcgtccagcatttgccaggtgcgatcggctacgttgcgtgggatttcacgaagcagaaccatatgtcgtacacggcgatggaaaatgcctcgggtgccgtggttcagcctggaccggagacattcaaggcggccgccgcgagcgcggactggtccagatctcttttcccaatcctgaccaatgagccgggcgcgaacgcgtggcctgtggtcggtgcgacatatgtactgcttcacagtacgcagaacaaaccggagcgcggcgaggcgacactgaagttcctggagtgggcgctgaccaacggcgaccaggctgcggaggatctggactatgtgccgctgccgccgccggtggtgagcgaaattcgcacgcagttgcatgcgcgggtgaagaatccgtcgggtaaggcaattgccggcgaatga

SEQ ID NO: 15215 - protein, 337 aa, Burkholderia fungorum LB400
MTGVVGALLAVTAHGADIAGAGSTFAAPIYTKWAGAYQQAGGGAVSYRAVGSTEGVKEIMESQVDFAGSDAPLSDDELARNGLLQFPMVIGGVVPVVNLPGIKPGELILSGRVLADIYLGKIINWDAPAIAAINPRIKLPDTPIAVVRRLDGSGTTLIWTHYLAQANSEWKSRIGEGTSVRWPRGIGGRGNEGVATFVQHLPGAIGYVAWDFTKQNHMSYTAMENASGAVVQPGPETFKAAAASADWSRSLFPILTNEPGANAWPVVGATYVLLHSTQNKPERGEATLKFLEWALTNGDQAAEDLDYVPLPPPVVSEIRTQLHARVKNPSGKAIAGE

SEQ ID NO: 15216 - DNA, 1026 bp, Burkholderia fungorum LB400
  CDS (1)..(1026)
atgaatctcaagcaacttacgctgattctatgtgcgttgtgtgccagcgccgcgcacgccgcagacatcaccggcgcgggcagcacctttgccgcgccgatttacacgaagtgggccgacgcctatcagaaaacgggcggcggcaaagtcaattatcagggtattggttcgtcgggcggcatcaagcagatcctcgccaagacggtggacttcgccggctcggacgccccgctgaaagacgacgaattagccaaagacggcctgttccagtttcccacggtggttggcggcgtggtgcctgccatcaacgtgccgggactgaaggcgggcgaactggtgctgtcgggtgaagtactcggcgacatctatctgggcaagatcaagaagtggaacgatccccagatagccgcgttgaacccgaagatcaagttgccggatacggacattgccgtggttcgccgtgccgatggttcgggtacgagcttcatctggacgaactacctgtccaaggtgaatccggagtggaaatccaaagtgggcgaaggcgcgacggtgaactggcctaccggcactggcggcaagggtaacgacggcgtcgccgcattcgttcagcgcctgccgggcgcgataggctatgtcgaatgggcgtatgcgaagcagaaccacatgacctacgcctcgatgaaaaatgcttcgggcaccatagtcgagccgacaaccgacaccttcaaggccgcagcggcgggcgccgactggtcgaagtcgttctatcagatcctgacgaacgagccgggcaagaacgcgtggcccgtggtcggcgcaacattcgtgctgctgtatacgacgcaggacaaagcagcgcaaggcgccgaaacgctgaagttcttcgattgggcgttcaggaacggcggcaaggcagccgacgatctcgactatatttcgctgccggaatcggtaacggctgaaatccgcgcgcagtggaagcagaaggtgaaggacgcgtcgggcaagccggtcgcgccataa

SEQ ID NO: 15217 - protein, 341 aa, Burkholderia fungorum LB400
MNLKQLTLILCALCASAAHAADITGAGSTFAAPIYTKWADAYQKTGGGKVNYQGIGSSGGIKQILAKTVDFAGSDAPLKDDELAKDGLFQFPTVVGGVVPAINVPGLKAGELVLSGEVLGDIYLGKIKKWNDPQIAALNPKIKLPDTDIAVVRRADGSGTSFIWTNYLSKVNPEWKSKVGEGATVNWPTGTGGKGNDGVAAFVQRLPGAIGYVEWAYAKQNHMTYASMKNASGTIVEPTTDTFKAAAAGADWSKSFYQILTNEPGKNAWPVVGATFVLLYTTQDKAAQGAETLKFFDWAFRNGGKAADDLDYISLPESVTAEIRAQWKQKVKDASGKPVAP

SEQ ID NO: 15218 - DNA, 1032 bp, Burkholderia fungorum LB400
  CDS (1)..(1032)
atgaaattgatgcaaaccgtgttcgctggcgtcgctggcgcgcttttcgcgatcgcagcgcaagccgcagacatcaccggcgcgggcagcaccttcgcagcaccgatttacacgaagtgggctgacgcctaccagaagtccggtggcggcaaggttaactatcagggcatcggttcgtcgggcggcgtgaagcagatcgtcgcgaagaccgtcgacttcgccggttcggacgctccgctgaaggacgacgagctcgccaaggaaggcctgttccagttcccgacggtggtcggcggcgtggtgccggtcgtcaacgtgccgggcgtgaagccggctgaactgacgctgtcgggcgaagtgctcggcgacatctacctgggcaagatcaagaagtggaacgatccggcgatcgttgcgctgaacccgaaggtcaagctgccggataccgacatcgccgtggtccgccgcgccgatggttcgggcaccagcttcatctggacgaactacctgtcgaaggtcaacgcagactggaagtcgaaggtgggtgaaggttcgacggtcaactggccgacgggcacgggcggcaagggcaacgacggcgtcgcggccttcgtgcaacgtctgccgggcgcaatcggctacgtggaatgggcgtatgcgaagcagaaccacatgacgtacgtcgcactgaagaactcgtcgggtgcagtggtcgagccgaagacggacacgttcaaggcagcggcagcaggcgcggactggtcgaagtcgttctaccagatcctgacgaacgagccgggcaagaacgcatggccgatcgtcggcgcaacgttcgtgctggttcacacggcacaggacaagccggcgcaaggcaccgaaacgctgaagttcttcgactgggcattcaagaacggcacgcaagccgcgaacgatctggactacatctcgctgccggattcggtcgtgtcggaaatccgcacgcagtggaagtcgaaggtgaaggacacgtcgggcaaggcaatcgccgagtaa

SEQ ID NO: 15219 - protein, 343 aa, Burkholderia fungorum LB400
MKLMQTVFAGVAGALFAIAAQAADITGAGSTFAAPIYTKWADAYQKSGGGKVNYQGIGSSGGVKQIVAKTVDFAGSDAPLKDDELAKEGLFQFPTVVGGVVPVVNVPGVKPAELTLSGEVLGDIYLGKIKKWNDPAIVALNPKVKLPDTDIAVVRRADGSGTSFIWTNYLSKVNADWKSKVGEGSTVNWPTGTGGKGNDGVAAFVQRLPGAIGYVEWAYAKQNHMTYVALKNSSGAVVEPKTDTFKAAAAGADWSKSFYQILTNEPGKNAWPIVGATFVLVHTAQDKPAQGTETLKFFDWAFKNGTQAANDLDYISLPDSVVSEIRTQWKSKVKDTSGKAIAE

SEQ ID NO: 15220 - DNA, 1119 bp, Thermobifida fusca
  CDS (1)..(1119)
atgaagctcattaggtacggcaagatcgcgggcgtgaccctcgccagcgcccttgcgctctccgcctgcggcagtgaccaggcagtcgctcccgaggagaccggcggcacggccgcgggcagtgtcgactgtgtccaaggcggcgggaccctggccggagccggcgccagctcccaagaaaaggcgatggcggcgtgggtcgctgcgtacaccagcgcctgcgcggacaccaccgtcaactacgactcggtgggctccggtgccggacgctcccagttcatcgagggcgccgtctccttcgccgggtccgactccccgatggacgaagaggagaccgcgcaggccaccgagcgctgcggcggctccgaagccgtccacctgcccgcctacatcagcccgatcgccatcatcttcaacctcgagggcgtcgactcgctcaacctgcgccccgaggtgatcgctgacatcttcaaccagaagatcaccaagtggaacgacgaggcgatcgccgcggacaaccctgatgtcgacctccccgacgccgacatcatcccggtcaaccgctccgacgagtccggcaccaccgagaacttcgtgcagtacctgtccgaggccgcccccgaccactggccgcacgaagtcagcggtgactggccgattcccccggtcgaagccgcccagggatcctctggcgttgtctccgctgtccaaggcggtaccgggacgatcggctacgtcgacgcctcgcacgccacggaattcggcaccgtggccgtcggcgtgggcgacagcttcgtcccctacagcccggaggccgccgcagcgatcgtcgactccgcagaaccgcgggaaggcaacaccgaaaacgacctggcagtcagcctcaactacgccaccgacgaggacggcgtctacccgatcgtgctcgtcagctacgagatcgtgtgcctggagtacgaggaccagaccgaagccgacctggtgaagagcttcatcggctacgtgatcagcgaagagggccagcaggccgccgctaacgaagccggctctgcgccgctctccgatgccacccgcgacaagatccaagccgtactggacaagatccaggttgcgagctga

SEQ ID NO: 15221 - protein, 372 aa, Thermobifida fusca
MKLIRYGKIAGVTLASALALSACGSDQAVAPEETGGTAAGSVDCVQGGGTLAGAGASSQEKAMAAWVAAYTSACADTTVNYDSVGSGAGRSQFIEGAVSFAGSDSPMDEEETAQATERCGGSEAVHLPAYISPIAIIFNLEGVDSLNLRPEVIADIFNQKITKWNDEAIAADNPDVDLPDADIIPVNRSDESGTTENFVQYLSEAAPDHWPHEVSGDWPIPPVEAAQGSSGVVSAVQGGTGTIGYVDASHATEFGTVAVGVGDSFVPYSPEAAAAIVDSAEPREGNTENDLAVSLNYATDEDGVYPIVLVSYEIVCLEYEDQTEADLVKSFIGYVISEEGQQAAANEAGSAPLSDATRDKIQAVLDKIQVAS

SEQ ID NO: 15222 - DNA, 1056 bp, Thermobifida fusca
  CDS (1)..(1056)
ttgacactggtagccgggtgcggcagcgacaacgcggtacgcggcggcgcgcagatcccggtgcccgaagacctggagtgtttcgacggcgccattcgcggcgccggctccagtgcccaggaactggccatgcaggtgtggatctccgcactccagaccgcctgcgacgatgcgcggatctactacgacgcgatcggctcaggcggcggacggaaccagttcatcgacggcgcggtggacttcgccgggtccgacgcggccatggacgaaggcgaacaggaggaggcccgccagcgctgcgactccgacgtcatccacctgcccgcctacgtggtaccgatcgcggtggccttcaacctggagggcatcgactcgctcaacctgacccccgacacgcttgcccgcctgttcagcggcgacatcacccggtggaacgacccggcgatcgcggagaccaaccccgacgtcgacctccccgaccttcccgtggtcccggtcagccgttcagacgagtccggcactacggagaacttcacggcctacctggcggctgctgctcctgacgcatggcctcacgaccctgacgggcagtggccctttcccccggtggaagccgggcagggcaacagcggcgtggcccaggcgatccgtggcggtcagggcacgatcggctacctggaggcgtcccacgctgaaggcatggccacggtccgcgtgggctcgggggacagcttcgtcgccccgtcgccggagtctgcggcacggatcgtatcggtctccccgcggcgggacagcaccaccccgcacgaccacgccatggagttggactactccgctaccgaagccgacgcctaccccatcgtgctggtcagctacgagatcgcctgcctgtcgtacgcggacgccgccaccgcggagggagtgcgcaccttcctgtcctacctgctcagcgcggaaggccaggaagcagcgtctcaggaatccgggtcggctccgctcgacgcggaactgcgcgcagagctgctggagtccgtggcggcgatcggcacccactga

SEQ ID NO: 15223 - protein, 351 aa, Thermobifida fusca
MTLVAGCGSDNAVRGGAQIPVPEDLECFDGAIRGAGSSAQELAMQVWISALQTACDDARIYYDAIGSGGGRNQFIDGAVDFAGSDAAMDEGEQEEARQRCDSDVIHLPAYVVPIAVAFNLEGIDSLNLTPDTLARLFSGDITRWNDPAIAETNPDVDLPDLPVVPVSRSDESGTTENFTAYLAAAAPDAWPHDPDGQWPFPPVEAGQGNSGVAQAIRGGQGTIGYLEASHAEGMATVRVGSGDSFVAPSPESAARIVSVSPRRDSTTPHDHAMELDYSATEADAYPIVLVSYEIACLSYADAATAEGVRTFLSYLLSAEGQEAASQESGSAPLDAELRAELLESVAAIGTH

SEQ ID NO: 15224 - DNA, 867 bp, Oenococcus oeni PSU-1
  CDS (1)..(867)
atgaagaaatggttagtgagtttacttgcgttggcagctattggcggtgcgtcattgacgagcgctaatctgggtacaagcgccttcgcagcttctaagtcaaagttgactggaaaggtcttagctgttggttcaacagcacttcagcccctcgccgaacaactcggtgagcgtttttcaagtgcgaattcttcagtccaaatcacggttcaaggtggtggctctggtgccggcttaacacaagttcaagctggctcggtccaaattggtgattcggatatctttgcttctcaagaagatggaattgatcctagtaagattgtcgatcacaaggttgctgttattggaattgcgcccgtggtcaataaggacgttggtgtaaagagtttgacgaaaagtcagttaaagaagatttttaccggtaaagttacaaattgggaccaagtcggtggtaaagatcaaaagatcgatttaattaatagagcttctggttctggtacacgtaccgtttttgaaaatgctattttaggcaatgcaactgctgcaagttctcaggaacaagacagtaacggaacggtccagaagattgtttcaaccactccaggcgctatctcttatttggcttttagttatattaaaggtcaaagtggtttaaaagcacttaaaattaatggtgtttccccaaccaataaaaatgttgaaaacaacaagtggaaagtctggggttatgagcatatgtacaccaagggcaaagcgaccggtgctaccaaagcttttatcaattatttctacaaatctagtaacaaaagtttaattaaaaaacttggttatattcctttgccaagtatgaaagtcgttaaacgataa

SEQ ID NO: 15225 - protein, 288 aa, Oenococcus oeni PSU-1
MKKWLVSLLALAAIGGASLTSANLGTSAFAASKSKLTGKVLAVGSTALQPLAEQLGERFSSANSSVQITVQGGGSGAGLTQVQAGSVQIGDSDIFASQEDGIDPSKIVDHKVAVIGIAPVVNKDVGVKSLTKSQLKKIFTGKVTNWDQVGGKDQKIDLINRASGSGTRTVFENAILGNATAASSQEQDSNGTVQKIVSTTPGAISYLAFSYIKGQSGLKALKINGVSPTNKNVENNKWKVWGYEHMYTKGKATGATKAFINYFYKSSNKSLIKKLGYIPLPSMKVVKR

SEQ ID NO: 15226 - DNA, 1077 bp, Trichodesmium erythraeum IMS101
  CDS (1)..(1077)
atgaaattttgtataaatctttctaggataactcatcttactgcaaaagtatctgccgttgtcctaacaattggtttaacagcttgtagtagtagtgatcttggaagttctcaagtaagccttttaggtgcgggagcttcttttccatcacctatatatcaacgttggtttcaagacttggggaacagtggcctaaacctacaagtagattatcagtcagtaggtagcggcgctggtgttgagagatttactcaagaactagtagattttggtgcttctgacgtcgcaatgaaagatgaggaaatttccaaagtaaaccgaggagttatcctgctaccaatgactgcaggtagtattgttttagcttacaacttgccgaatgtttctaatctcaaactttccagggaagcttatgtagatatccttttgggtaaaattaaaaaatggaatgacccgaagatcaaagcaattaaccctggcgtaactctcagagatcaaaaaattacagttatatatcgctctgatggtagtggtacaactggagttttcacaaagcatttgagtgctattagtccagaatggaaacagacagtaggggaaggtaaaaccgttcaatggcctgtaggtattggtggtgccaagaacgatggtgtaactgctcaaattactcaaactgaaggagcaataggatatgttgagtatggttatgctaagaatgctggtttgaatatggcttccctacaaaacaaatctggtaaatatataaatcctacttttgaatcagcagaagcaactttaggagcagttgcactacctgaaaatttacgagcttttattagtgacccagaaggggataattcttatccaattgtaacttacacttggattcttgcctatagtaaatatgatgacgcagccaaagctcaaggtgtggaaaaaatgattgaatatggtttaaatgaaggtcaaaaagttagttctgagttaggttatattcctttacctaagaatgtacgtcaaaaagttctagaaactgcggataaaattagtcaagattacaacatgaccctcaaatag

SEQ ID NO: 15227 - protein, 358 aa, Trichodesmium erythraeum IMS101
MKFCINLSRITHLTAKVSAVVLTIGLTACSSSDLGSSQVSLLGAGASFPSPIYQRWFQDLGNSGLNLQVDYQSVGSGAGVERFTQELVDFGASDVAMKDEEISKVNRGVILLPMTAGSIVLAYNLPNVSNLKLSREAYVDILLGKIKKWNDPKIKAINPGVTLRDQKITVIYRSDGSGTTGVFTKHLSAISPEWKQTVGEGKTVQWPVGIGGAKNDGVTAQITQTEGAIGYVEYGYAKNAGLNMASLQNKSGKYINPTFESAEATLGAVALPENLRAFISDPEGDNSYPIVTYTWILAYSKYDDAAKAQGVEKMIEYGLNEGQKVSSELGYIPLPKNVRQKVLETADKISQDYNMTLK

SEQ ID NO: 15228 - DNA, 1086 bp, Trichodesmium erythraeum IMS101
  CDS (1)..(1086)
atggtatttagtcttaattttcgtcagataatttgtaatacttctaaattctctgcagtagccttaaccattggtctagttactacaattgctggagttaagtacagtctcgctaaacaaagagtcaaccttataggtgcaggtgcatcttttccagctccactataccaacgttggtttagtgatatgagaaataataattttgaggttcaagtagattatcaatcagttggtagtggtgctggtgttgaaagatttactcaaggactagtagatttcggtgcttctgatgtggcaatgaaagatagtgaaatagccaaggtctctcgaggagttatgatgctgcccatgactgcaggtagtgttgtattggcttacaatttaccaggtatatccgacctgaagttatccaggaaagtttatgtagatatccttttgggtaggattaagaattggaatgactcagaaattgctactattaattccggtgtaaatttgccagatctaccaattaccgtagtttatcgttccgatggtagtggaactacaggagtgtttacaaagcatctaaattctattagtcaggagtggaaaaagaaagtaggagaaggtaaaactgttcagtggcctgtaggcataggtggccaaaaaaatgatggcgtaagtgctttaattcgtcaaacaaaaggtgctataggttacgtagagtttggttttgctaaaaatgctaaacttaatactgcagctttagagaataaatctggtaattatattaaggcttctttagagtctgctaagtctactctagcagcagtaaaattacctaaaaatctccgtgcttttattagtgacccagaaggtagtaattcttatcctattgttacttatacttggatgctaatttataatcaatataatgatgcagctaaagctcagggtatagaaaaaatgattgaatatggattaaatgaagggcaaaaggtaagtgctgatttaggttatattccactacctaacaatgttcgtcaaacagttgcggcagctgcagataaaatcagctctagccatcaaattagccttaagtaa

SEQ ID NO: 15229 - protein, 361 aa, Trichodesmium erythraeum IMS101
MVFSLNFRQIICNTSKFSAVALTIGLVTTIAGVKYSLAKQRVNLIGAGASFPAPLYQRWFSDMRNNNFEVQVDYQSVGSGAGVERFTQGLVDFGASDVAMKDSEIAKVSRGVMMLPMTAGSVVLAYNLPGISDLKLSRKVYVDILLGRIKNWNDSEIATINSGVNLPDLPITVVYRSDGSGTTGVFTKHLNSISQEWKKKVGEGKTVQWPVGIGGQKNDGVSALIRQTKGAIGYVEFGFAKNAKLNTAALENKSGNYIKASLESAKSTLAAVKLPKNLRAFISDPEGSNSYPIVTYTWMLIYNQYNDAAKAQGIEKMIEYGLNEGQKVSADLGYIPLPNNVRQTVAAAADKISSSHQISLK

SEQ ID NO: 15230 - DNA, 870 bp, Streptococcus suis 89/1591
  CDS (1)..(870)
atgaaaaaaaagcagaagcttggaattgcagctttgtttcttttgagtagtatggctctttctggttgttcttcttggatcgatcgaggagagtctattacagccgtaggttcgacggcgcttcaaccacttgttgaggcagcagcagatgaatttggtagtgtcaatatcggtaaatccgtcaacgttcagggtggtggatcaggtactggcttgtcacaagttcagtctggagctgttcagattggtaactctgacgtatttgctgaggaaaaagatggtattgatgcaagtaaacttgttgaccatcaagtagcagtagctggtttggccgttattgtaaatgagcaggtatcggttaaagatattactacagaagatctgcgtaaaatttttactggtgagattaccaactggaaagaactaggtggtaaggatttggaaatttcaatcattaaccgtgcagctagttcaggttcacgtgcgacctttgatagtgttatcatggatggacaaaccgcaactcagagtcaagaacaagattctaacggtatggtaaaatctattgttgctcagacaccaggtgcaatttcctacctatcatttgcttatctagatgattccgttaaaacaattaagttaaacggttttgaaccaactgctgaaaatgtagcaacaaatgattggccaatttggtcctatgagcatatgtatacgatgggaaaagcgactgatttgacagaagaatttttagattacatgatgtcagatgaagttcaaaatggtatcgttgaaagtatgggatacatttctatcaacgatatgaaagttgtgaaaagtgctgatggcacggtgactgagaaggagtaa

SEQ ID NO: 15231 - protein, 289 aa, Streptococcus suis 89/1591
MKKKQKLGIAALFLLSSMALSGCSSWIDRGESITAVGSTALQPLVEAAADEFGSVNIGKSVNVQGGGSGTGLSQVQSGAVQIGNSDVFAEEKDGIDASKLVDHQVAVAGLAVIVNEQVSVKDITTEDLRKIFTGEITNWKELGGKDLEISIINRAASSGSRATFDSVIMDGQTATQSQEQDSNGMVKSIVAQTPGAISYLSFAYLDDSVKTIKLNGFEPTAENVATNDWPIWSYEHMYTMGKATDLTEEFLDYMMSDEVQNGIVESMGYISINDMKVVKSADGTVTEKE

SEQ ID NO: 15232 - DNA, 1026 bp, Thiobacillus denitrificans ATCC 25259
  CDS (1)..(1026)
atgttcggttcgaaacacctgtatttcaagcttgccggggcggcggccgccgtcgcgatgagcgttgcggccttgccggcgctggccgtcgacatcaccggcgcgggggcgaccttcccctacgccgtctacactaaatgggcggaagcctacaaggccgcttccggcaaccaggtcaactaccagggcatcggctcttcggggggcgtcaagcagatcaaggccaagaccgtcgacttcgcaggcaccgacgcgccggtcaaggaaagcgatctcgatgccgcgcatctggttcagtttcctaccgtcatgggcggcgtgaccatcgtcgtcaacctgcctggcgttgcctcggggcagctcaagctcgacggcgccaccgccgccgacatcttccgcggcacgatcaccaagtggaacgacccgcgcatcgccaagctcaaccccggcgtcaagctgcccggcacggcgatcacgatttcgcatcgctcggacggctccggcactaccttcgtcttcaccaactatctcgccaagcagtcggccgatttcaagcgtgacgtcggcgccggcaacaccgtcaactggcccgccaatgccgtcggcggcaagggcaacccgggcgtcgcggcgaacgtgatgaagatcccaggtgcgatcggctacgtcgacatcgccgacgcgatgaagaacaagatgactttcgttgcgctgaagaacaaggccggcaattacatcgtcccgaaccaggacgcggtcgccgacgccgctgcgggcgcgaacttccacgtccgcggcatggcgcccgacctgctcgaccagtcgcacaagaacgcctggccgatcacctcggcgacctacgtgctcgcctacgagcaggccgacgcgacgaagcagaaggcggtcgtcgatttcttcaagtggtcgctcaacaatgggcagaaaatggccgaggaactcggtttcgtcgccttgccgccgaacgtcgtcaagatggtcgaagccgaaatgaagaacatcaagtga

SEQ ID NO: 15233 - protein, 341 aa, Thiobacillus denitrificans ATCC 25259
MFGSKHLYFKLAGAAAAVAMSVAALPALAVDITGAGATFPYAVYTKWAEAYKAASGNQVNYQGIGSSGGVKQIKAKTVDFAGTDAPVKESDLDAAHLVQFPTVMGGVTIVVNLPGVASGQLKLDGATAADIFRGTITKWNDPRIAKLNPGVKLPGTAITISHRSDGSGTTFVFTNYLAKQSADFKRDVGAGNTVNWPANAVGGKGNPGVAANVMKIPGAIGYVDIADAMKNKMTFVALKNKAGNYIVPNQDAVADAAAGANFHVRGMAPDLLDQSHKNAWPITSATYVLAYEQADATKQKAVVDFFKWSLNNGQKMAEELGFVALPPNVVKMVEAEMKNIK

SEQ ID NO: 15234 - DNA, 1131 bp, Brevibacterium linens BL2
  CDS (1)..(1131)
atgttctcatattcgaaaggcatcttcgtgaagctgaagcacctggcaccctccgctgcaatcctcgcagtcggcgcactcaccctgtcggcatgcggcggaacctccgccaccggagaggaagcaagcagcggtggcgacagcgacctgcagggcaccctcaccggcatcggcgcttcatcgcagaaggctgcgatggacgcatggaccgccgacttcgcctcggagaactccggcgtgaccgtcaactactcccccgatggctcgggtgcaggccgcgagcagttcctggctggcaacgctcagttcgccggctctgacgctcacctcgacgatgacgaagtcgagcagggcaaagaagcttgcggcgccgatggagcctacgagttccccgtctacatctccccgatcgcggtggcgttcaacgtcgagggcgtcgacgaactcaacctctcccctgcaacgatcgccaagatcttcaagggcgaaatcagcacgtggaacgacgaggcaatcaaggccgataacccggatgctgatctgcctgacacgaagatcaccgccgtgcaccgttccgatgactccggcaccacggagaacttcgccgagtacctcaaggccacagccgagaaggactgggacgctgaggtcagcggagacttcccgaaggacttcggtggcgaagctgcacagggcaccgatggtgtcgtgcagaccgtttccgacaccgatggagccatcggctacgccgacgcttccgctgtcggttcactgggcaaggccaaggtgaaggtcggcgaggaattcgtcgagctctccgccgatgccgcctcgaaggtcgtcgacgcttccgagaaggtcgaaggccgcagcgaaggcgacctcgccttcgatctggctcgcgacaccaccgagtcgggcgcctacccgatcgtcctcgtgtcctaccacgtcgtctgctcgtcctacaaggaccaggagaccgtggacatggtcaaggcctgggagaagttcgtcgtctccgaagaaggacagaagtcggcagcggattccgctggctcggctccactgtctgacgacctgcgttcgcagatcgaaacagtcatcgattcgatcaaggttgaaggctga

SEQ ID NO: 15235 - protein, 376 aa, Brevibacterium linens BL2
MFSYSKGIFVKLKHLAPSAAILAVGALTLSACGGTSATGEEASSGGDSDLQGTLTGIGASSQKAAMDAWTADFASENSGVTVNYSPDGSGAGREQFLAGNAQFAGSDAHLDDDEVEQGKEACGADGAYEFPVYISPIAVAFNVEGVDELNLSPATIAKIFKGEISTWNDEAIKADNPDADLPDTKITAVHRSDDSGTTENFAEYLKATAEKDWDAEVSGDFPKDFGGEAAQGTDGVVQTVSDTDGAIGYADASAVGSLGKAKVKVGEEFVELSADAASKVVDASEKVEGRSEGDLAFDLARDTTESGAYPIVLVSYHVVCSSYKDQETVDMVKAWEKFVVSEEGQKSAADSAGSAPLSDDLRSQIETVIDSIKVEG

SEQ ID NO: 15236 - DNA, 1023 bp, Deinococcus geothermalis DSM 11300
  CDS (1)..(1023): transl_table=11
atgaagaagtttttccttctgggcctgattctcaccggcacggctgcggcacaaacgaccatcacgggtgcgggcgcttcttttccctatcccctctacagcaagatgttcgccgaatacaagaacgccaccggcgtcaatgtgaactatcagtcggtggggagtggtgccggtcagaagcagattctggagcgcacggttgactttgcgggctcggacaaccccatgagtgatgagaccctcaaaagtgctccggcgcccctgctgcacattcccaccgccattggtgcggtggtacccgcctacaacctgccgggcgtgacccagcccctgaagtttaccgggcgggtgctggccgacatctacctgggcaagatcaagaactggaacgacaaggccatcgccgcgctgaatcctggtgtgaccctgccgccgctgcccatcacggtcgctcgccgcagcgacggttcaggcacgacctacgtcttctcggactacctgagcaaagtgtcgccggagtggaaaagcaaggtgggcgtgggcaacagcctccagtggccggtagggacaggcgcgaagggcaatgacggcgtggcgggcgttgtgaagagtacccccggcgcgattggctacgtggaactggtgtatgccaagcagaacaaactgacctttgggagcgtgcagaaccgcgccgggaaatttgtgctggccgataatggcccggctgcggccgccgcgctgggtgtggtgattcctgccgacacccgcgtgagcctgaccaacagcgcgaacgcagaggcttaccccattgccagcttcacctacgtgatcttctatcaggaccaaaagtacgggaaccgcaccgaagcgcaggccaaggccctcaagaatctgctgacctggatggtcactaccgggcagcagtacaacgaggggctggattacgccaagctgcccgccaatgtggtcaataaggccaagagcatcatcaattcgatgacctacggcggcaagcggctctga

SEQ ID NO: 15237 - protein, 340 aa, Deinococcus geothermalis DSM 11300
MKKFFLLGLILTGTAAAQTTITGAGASFPYPLYSKMFAEYKNATGVNVNYQSVGSGAGQKQILERTVDFAGSDNPMSDETLKSAPAPLLHIPTAIGAVVPAYNLPGVTQPLKFTGRVLADIYLGKIKNWNDKAIAALNPGVTLPPLPITVARRSDGSGTTYVFSDYLSKVSPEWKSKVGVGNSLQWPVGTGAKGNDGVAGVVKSTPGAIGYVELVYAKQNKLTFGSVQNRAGKFVLADNGPAAAAALGVVIPADTRVSLTNSANAEAYPIASFTYVIFYQDQKYGNRTEAQAKALKNLLTWMVTTGQQYNEGLDYAKLPANVVNKAKSIINSMTYGGKRL

SEQ ID NO: 15238 - DNA, 819 bp, Anaeromyxobacter dehalogenans 2CP-C
  CDS (1)..(819): transl_table=11
atgaagcgcatgctgctcgccctcgccgcggtcgtcgcggtggtcccggccctcgcctccgccgccgtgaccgtgaagggctccgacacgatggtgatcctcgcccagcgctgggccgaggactacatgaacaagaaccccggcaagaaggtgcaggtcaccggcggcggctccggcaccggcatcgcggcgctcatcaacggcaccaccgacatcgcgaacgcgtcgcgctcgatgaagtcggacgagaagggcaaggtccgcgagcgctacagcgtgctcccgaccgagatcccggtcgcccaggacggcgtggcgctgtacgtgaacgaggcgaacccggtgagccagctcaccatcgaccagctgcaccagatctacgtgggcgacgtcaccaactggaagcaggtgggcgggcccgaccagcgcatcgtcctctactcccgcgagaactcctcgggcacctacgtgttcttcaaggagcacgtgctgaagggcgacgactacgccccggccgcgcagacgctccccggcaccgccgcggtggtgaacgcggtcgcgaaggagaagggcggcatcggctacggcggcgccgcctacgccaagggggtgaaggaggtcaaggtggtgggcgccgacggccaggcgtacgcgcccagcgcggagaacgtgaagagcgggaagtacccgctggcccgcccgctgttcatgtacacgcgcgccaagccggccggcgaggtgaaggcgttcatcgactactgcctctcgcccgagggccagcagctcgtcaccaaggtcggctacttcccgatcaagtag

SEQ ID NO: 15239 - protein, 272 aa, Anaeromyxobacter dehalogenans 2CP-C
MKRMLLALAAVVAVVPALASAAVTVKGSDTMVILAQRWAEDYMNKNPGKKVQVTGGGSGTGIAALINGTTDIANASRSMKSDEKGKVRERYSVLPTEIPVAQDGVALYVNEANPVSQLTIDQLHQIYVGDVTNWKQVGGPDQRIVLYSRENSSGTYVFFKEHVLKGDDYAPAAQTLPGTAAVVNAVAKEKGGIGYGGAAYAKGVKEVKVVGADGQAYAPSAENVKSGKYPLARPLFMYTRAKPAGEVKAFIDYCLSPEGQQLVTKVGYFPIK

SEQ ID NO: 15240 - DNA, 1122 bp, Arthrobacter sp. FB24
  CDS (1)..(1122): transl_table=11
gtgaaggcactccgcttcggccgccacgcggctatcgctgtcatcgcagccggcgcactcgcgctcaccgcctgcggttccgacaacgccacgaatacggcacagtccggcgccccgtctgccacgggagcgaaggtcaccggcacgctgaccggcatcggttcctccgcccagggtgcagccatggacgtatggaagaccaacttcgcatccgcaaaccagggtgccaacgtgcagtactccccggatggctccggcgccggacgcaaggccatcatcgacggttcggcccagttcgccggttccgacgcctacctcaaggacgaggagctcgccagctccaaggaaaagtgcggccccgagggtgcgatcaacattccggtgtacatctccccgatcgccatcgccttcaacattccggatgtcaaggaactgaagctggatgccgccaccgtggccaagatcttccgcggcgaaatcgccaactggaacgatcccgcgatcgcagcaatgaacccggacgccaagctgccggacctcaaggtcacgccggtcaaccgttccgatgactccggcaccaccagcaacttcaccgattacctggccgccgcagctcctgaggtctggaccgacaaggctgccggcgtctggcccgcatccctgaagggcgagaacgccaagggcacctccggcgtggtcaagaccgtcaccgacaccccgggcgccgtaacctacgccgatgactcggccgtcagcggcaagcttggcatcgcccaggtcaaggtgggcgataccttcaccaagatctccgccgaggctgcggccaaggccgtggacgccggcaagcccgttgaaggccgttccgccaacgacctgtccatcaagctggaccgcaagaccaccatcgagggcgcctacccggttgtcctggtctccttccacgtggtctgctccacctacgccacccaggaaaccgttgacctggtgaaggccttcgaaaactacgtggtttccgacgccggccagcaggctgcagcagacgccgcgaagtccgctcccctctccaaggaactccaggagaaggctgccaaggccatcgagaccatcaaggtcaagtcctag

SEQ ID NO: 15241 - protein, 373 aa, Arthrobacter sp. FB24
MKALRFGRHAAIAVIAAGALALTACGSDNATNTAQSGAPSATGAKVTGTLTGIGSSAQGAAMDVWKTNFASANQGANVQYSPDGSGAGRKAIIDGSAQFAGSDAYLKDEELASSKEKCGPEGAINIPVYISPIAIAFNIPDVKELKLDAATVAKIFRGEIANWNDPAIAAMNPDAKLPDLKVTPVNRSDDSGTTSNFTDYLAAAAPEVWTDKAAGVWPASLKGENAKGTSGVVKTVTDTPGAVTYADDSAVSGKLGIAQVKVGDTFTKISAEAAAKAVDAGKPVEGRSANDLSIKLDRKTTIEGAYPVVLVSFHVVCSTYATQETVDLVKAFENYVVSDAGQQAAADAAKSAPLSKELQEKAAKAIETIKVKS

SEQ ID NO: 15242 - DNA, 1026 bp, Burkholderia vietnamiensis G4
  CDS (1)..(1026): transl_table=11
atgcaaaccgcgattgctggcctggctggcgcacttttcgcagttgctgcgcacgctgccgacatcacgggcgcaggcagcacgttcgctatgccgatctatacgaaatgggctgccgactaccagcagtcgggcggcgcgaaggtgaactaccaaggtatcggctcgtcgggcggcctgaagcagatcatcgcgaagacggtcgattttgccggctcggacgctccgctgaaggatgaggacctcgcgaaggacggcctgttccagttcccgacggtggtcggcggcgtggtgccggtcgtcaacgtgccgggcgtgaaggccggcgaactgacgctgtcgggcccggtgctcggcgacatctacctcggcaagatcaagaagtggaacgacccggcgatcgccgcgctgaacccgaaggtcaagctgccggatacggacatcgcggtcgtgcgccgcgccgacggctcgggcacgagcttcatctggacgaactacctgtcgaaggtcaacgatgagtggaagtcgaagatcggcgaaggcacgacggtcaactggccgacgggcacgggcggcaagggtaacgacggcgtcgcggcgttcgtgcagcgcctgccgggcgcgatcggctacgtcgaatgggcgtacgcgaagaagaacaacatgatctacaccgccctgaagaactcgacgggcacggtggtcgagccgaagacggaaacgttcaaggccgctgcagccggcgcgaactggtcgaagtcgttctaccagatcctgacgaaccagccgggcaaggaagcatggccggtcgtcggcgcgacgttcgtgctgctgcacgcgaagcaggacaagccggagcagggcgccgaaacgctgaagttcttcagctgggcgttcaagaacggcgagaaggcagcggacagcctcgactacatctcgctgccgccggcagtcgaagcggaaatccgcaagcagtggaagaccaaggtgacggacgcagcgggcaagccggtcgccaccgagtaa

SEQ ID NO: 15243 - protein, 341 aa, Burkholderia vietnamiensis G4
MQTAIAGLAGALFAVAAHAADITGAGSTFAMPIYTKWAADYQQSGGAKVNYQGIGSSGGLKQIIAKTVDFAGSDAPLKDEDLAKDGLFQFPTVVGGVVPVVNVPGVKAGELTLSGPVLGDIYLGKIKKWNDPAIAALNPKVKLPDTDIAVVRRADGSGTSFIWTNYLSKVNDEWKSKIGEGTTVNWPTGTGGKGNDGVAAFVQRLPGAIGYVEWAYAKKNNMIYTALKNSTGTVVEPKTETFKAAAAGANWSKSFYQILTNQPGKEAWPVVGATFVLLHAKQDKPEQGAETLKFFSWAFKNGEKAADSLDYISLPPAVEAEIRKQWKTKVTDAAGKPVATE

SEQ ID NO: 15244 - DNA, 1335 bp, Burkholderia vietnamiensis G4
  CDS (1)..(1335): transl_table=11
atgaaatccagcaagcgcaagatctgtcaggtcctggctctcgtcgtcgcgggcatgggcgcatcggtggcgatggccgccggcccggtgattcagggcggcggctcgtcgctcgtcgcaccgacgatcggcgccgtgtcgccggcgtccggtgaaatcggcctgttcggcacgtccgaaggcacgttcacgtactactcggtcggctcgggcgccggccagaacgcgttcctgaacaaccagccgaccttcttcggctcgggcgtgaccggcacggtgcatttcgccaacagcgatgccgcgctcacgaccgctcaggtcagcgcgtacaacaacacgggcctcggcaccagcaacggcccgctgatccagatcccgtacatcgtgacggccatcacggtgccggtcgtcaacggccctgccgtgacgagcacgacgacgccgcaaacgacgccgggtcaggcgcacagcgtcgcgctgaacgacgacgacctgtgcggcatcttctcgggcaagctgacgaactggaaccaggtcaccaacccggaaaccggctcggcctatccgctgaacaaggcgatctcggtcgtctaccgtgcggacggcagcggcacgaccgaactgctgacccgccatctgcacgcggtttgcacgacggccaataccaagaccggcgtgtcgttcgtcgattcgctgacgttcgcgaacacggtcgcattcccgtccggcgtgccggcgaacttcgtcgcggcgtcgggcagcggcggcgtgcgcgcttcgctcgcgtcgttgtcggctgccggtacggccgccgtcgcgtatctgagcccggactacacgaacacgttcctcgcgtcgcaaagctcggtcgtcacgtcgtcgggcgcgctgcaactgccgatcgcgagcctgtacaacacggcggccaaggcgtactacgccccgacgtatacgaacgccaagacggcgctcggcacgatcgctccgccttcgggcattgccgccagcgatccgaccaactgggtgccggtgtcgggctcggcgtataccgcattggcgaaccctgcatccggttatccggtctccggcacgagccagatcatcctgagccagtgctatgcgaacggcgccgcggctacggcgatccacgacttcctcaacaaccactacacgaacgcgagctacgcgtcggtcgtgcacggcaacggcttcgacaccgttccgtcgagcttccagaccgcgatttccgcgaacttcctgagcaactcgagcggcaacttcctcgacatcaacgactcgaccatctgcggttcgggtggctacgcgggccggtaa

SEQ ID NO: 15245 - protein, 444 aa, Burkholderia vietnamiensis G4
MKSSKRKICQVLALVVAGMGASVAMAAGPVIQGGGSSLVAPTIGAVSPASGEIGLFGTSEGTFTYYSVGSGAGQNAFLNNQPTFFGSGVTGTVHFANSDAALTTAQVSAYNNTGLGTSNGPLIQIPYIVTAITVPVVNGPAVTSTTTPQTTPGQAHSVALNDDDLCGIFSGKLTNWNQVTNPETGSAYPLNKAISVVYRADGSGTTELLTRHLHAVCTTANTKTGVSFVDSLTFANTVAFPSGVPANFVAASGSGGVRASLASLSAAGTAAVAYLSPDYTNTFLASQSSVVTSSGALQLPIASLYNTAAKAYYAPTYTNAKTALGTIAPPSGIAASDPTNWVPVSGSAYTALANPASGYPVSGTSQIILSQCYANGAAATAIHDFLNNHYTNASYASVVHGNGFDTVPSSFQTAISANFLSNSSGNFLDINDSTICGSGGYAGR

SEQ ID NO: 15246 - DNA, 1026 bp, Burkholderia cenocepacia AU 1054
  CDS (1)..(1026): transl_table=11
atgcaaaccgcgattgccggcctggctggcgcgcttttcgccgtcgccgcccacgctgccgacatcacgggcgcaggtagcacgttcgcgatgccgatctatacgaaatgggctgcggactaccagcagtccggcggttcgaaggtcaactaccagggcatcggctcgtcgggcggcctgaagcagatcgtcgcgaagacggtcgattttgccggttcggacgctccgctgaaggatgaagaactcgcgaaggaaggcctgttccagttcccgacggtggtcggcggcgtggtgccggtcgtcaacgtgccgggcgtgaaggccggcgaactgacgctgtcgggcccggtgctcggcgacatctacctcggcaagatcaagaagtggaacgatccggcgatcgccgcgctgaacccgaaggtcaagctgccggatacggacatcgccgtggtccgccgcgctgacggctcgggcacgagcttcatctggacgaactacctgtcgaaggtcaacgacgagtggaagtcgaagatcggcgaaggcacgacggtcaactggccgacgggcacgggcggcaagggcaacgacggcgtcgcggccttcgtgcagcgtctgccgggcgcgatcggctacgtcgagtgggcgtacgcgaagaagaacaacatgacctacactgcgctgaagaattcgacgggcacggtggtcgagccgaagacggaaacgttcaaggccgcagcagcaggcgcgaactggtcgaagtcgttctaccagatcctgacgaaccagccgggcaaggaagcgtggccggtcgtcggcgcgacgttcgtgctgctgcacgcgaagcaggacaagccggagcagggcgcggaaacgctgaagttcttcagctgggcgttcaagaacggcgagaaggctgccgacagcctcgactacatctcgctgccggcgacggtcgagacggaaatccgcaagcagtggaagacgaaggtgacggacgcttcgggcaagccggtcgccgccgagtaa

SEQ ID NO: 15247 - protein, 341 aa, Burkholderia cenocepacia AU 1054
MQTAIAGLAGALFAVAAHAADITGAGSTFAMPIYTKWAADYQQSGGSKVNYQGIGSSGGLKQIVAKTVDFAGSDAPLKDEELAKEGLFQFPTVVGGVVPVVNVPGVKAGELTLSGPVLGDIYLGKIKKWNDPAIAALNPKVKLPDTDIAVVRRADGSGTSFIWTNYLSKVNDEWKSKIGEGTTVNWPTGTGGKGNDGVAAFVQRLPGAIGYVEWAYAKKNNMTYTALKNSTGTVVEPKTETFKAAAAGANWSKSFYQILTNQPGKEAWPVVGATFVLLHAKQDKPEQGAETLKFFSWAFKNGEKAADSLDYISLPATVETEIRKQWKTKVTDASGKPVAAE

SEQ ID NO: 15248 - DNA, 1044 bp, Polaromonas sp. JS666
  CDS (1)..(1044): transl_table=11
atgaaattgagtttcaaagcttctgcgactgctgtgatgggtgttgccatcatgtcgtttgccacgttgtcggccgcgcaggatgtcacgggcgctggagccagtttccccgctccgctgtattccaaatgggctgctgactacaacaaggccaccagcatcaagattaattaccagtcggtcggctctggcgcgggtttgcggcagattgaggccaagaccgtggactttggcgcatcagacgctcccctgaaggatgaagagctcgccaaaaaagggctggtgcagtttccgaccgtgattggtggcgtggttcctgtggtcaatatcaagggcgtcgctccgggccaactgaagctgagcggtcaggtcctgggtgacatctacctgggcaagatcaccaagtggaccgaccccgccatcaaggcgatgaatcctgcactggccttgccggatgcggccatcgcgccggtccgccgagctgatggttcaggtaccagcttcattttcaccaattatttgagcaaggccaacgccgagtggaaggccaaagtgggtgaaggtacggcggtgaactggccggcgggtgctggcggcaagggtaacgagggcgtcgcggcgtttgtcggtcgcctgcccaactcgattggctatgtggagtacgcctatgtcaagcagaacaagatgacgtttgtccagctgaagaatgctgccggcaatttcgtgtcgccggatgatgcggcattcaaggctgctgctgcaggcgccgactggtccaagagtttttaccagatactgactgagcagcccggcaaggatgcatggcctatcacgggcgccacctttatcctgatgcagaaggcgcaggacaagcccgcgcaggccgctgcctcgctcaaattcttcgagtgggcctataagaacggcgacaagatcgctgacgacctggactatgtgcccatgcccgccagcgtgaagacgatcatcgaaaaatcgtgggctgacatcaaggacacgtcgggcaaggctgttgcttacaaataa

SEQ ID NO: 15249 - protein, 347 aa, Polaromonas sp. JS666
MKLSFKASATAVMGVAIMSFATLSAAQDVTGAGASFPAPLYSKWAADYNKATSIKINYQSVGSGAGLRQIEAKTVDFGASDAPLKDEELAKKGLVQFPTVIGGVVPVVNIKGVAPGQLKLSGQVLGDIYLGKITKWTDPAIKAMNPALALPDAAIAPVRRADGSGTSFIFTNYLSKANAEWKAKVGEGTAVNWPAGAGGKGNEGVAAFVGRLPNSIGYVEYAYVKQNKMTFVQLKNAAGNFVSPDDAAFKAAAAGADWSKSFYQILTEQPGKDAWPITGATFILMQKAQDKPAQAAASLKFFEWAYKNGDKIADDLDYVPMPASVKTIIEKSWADIKDTSGKAVAYK

SEQ ID NO: 15250 - DNA, 1080 bp, Polaromonas sp. JS666
  CDS (1)..(1080): transl_table=11
atgaagaaaaatttattcgctattttcacggccttcacggccgttttgttttttgcgcaggccggcgctgcctcggctgagacgatttccggcgccggatcttcggctgccgcacccatctaccaggcttgggctcgcgcctaccagaaatcgacaggtgcggccctggcctatgagccggttggctcgtccgccggcctgaagaaaattcgtgcccatgagacgggtttcggcgcctcggacgtcgcgcccaccgaggccgagctggccgcgagcgggctgcttgtcttccccgttgcgattaccggcatctcgccggtcgtgaatttgcccaaggtaggggacggccagttgcgattgaccggcgaggtccttgcgcgcatctttctgggcgagatcacgcagtggaatgcggccgagatcgtgcagctgaacccgggcctgaagctgcccgatctgccggtcaaggtggtggtgcgcggtgacggctccggaaccacctacaacttcgccgactatctggccaagctgagccccacctggaaagccaaatacggggtcaagaccagtgtcgattggccggccacctttgtggcggtcaagggcagcgacgctgtcgtcaaaaacgtcagggaaacggttggcacgatcggctatgtggaccacggctacgtcagggaccataagctcacgacggtgcagctgaagaacctcgacggcgagtttgtcagcccgtccatcgtcgcgtttcgggccgcgctttccagcagcgaatgggccagcaccggatcgtttaccagcacgctgaccaacaaggccggcaaggcaacatggccgatcaccatgggcaccttcgcgcttgtgcctaaggttgcggaccagcccgcccaaaccctgcccgcgctcaggttcttcgtgtgggcgtttctcaatggcgacgcactggtccaggaaaacaacttcgtgcggcttcccgatcgtgtgcaggccacggcgttcaaggcgatcacgtccgtaaaggacaaggcgggtaacgccattgccatggggctgatgacttcttccggctcggctcgctag

SEQ ID NO: 15251 - protein, 359 aa, Polaromonas sp. JS666
MKKNLFAIFTAFTAVLFFAQAGAASAETISGAGSSAAAPIYQAWARAYQKSTGAALAYEPVGSSAGLKKIRAHETGFGASDVAPTEAELAASGLLVFPVAITGISPVVNLPKVGDGQLRLTGEVLARIFLGEITQWNAAEIVQLNPGLKLPDLPVKVVVRGDGSGTTYNFADYLAKLSPTWKAKYGVKTSVDWPATFVAVKGSDAVVKNVRETVGTIGYVDHGYVRDHKLTTVQLKNLDGEFVSPSIVAFRAALSSSEWASTGSFTSTLTNKAGKATWPITMGTFALVPKVADQPAQTLPALRFFVWAFLNGDALVQENNFVRLPDRVQATAFKAITSVKDKAGNAIAMGLMTSSGSAR

SEQ ID NO: 15252 - DNA, 1149 bp, Crocosphaera watsonii WH 8501
  CDS (1)..(1149): transl_table=11
atgttcacaactgtgaaatcaagtaaacgcaccataataacatccctatcaattctgagtttagcggtcagtttgggagcttgtggtggcggttcttctgatactggcactgcccctagtggtggtggtaaccaaggcacaactacagctttaaaccctcccctagatggtgatgtggctttaactggtgccggtgcctctttcccagcccccctatatcaaaactggtttgtgcaactcaacacagcagtccccaaattaaaagttaactatcagtccgttggtagtggtgctggtgtggaacagtttacccaaggaaccgttgactttggggctagtgatgtggccatgacagacgaagaaattggcaaaatcgaaagaggaacaattttactccccgtcactgctggtagtatcgtgatggcttataacttacctggattagagggactgaaactctcaagagacgcttacgttggtattttcaaaggggatattaccaactggaatgatcccaaaattgctgaagctaaccctgatttagaactaccaaatcaaccaatcaccgtagttcaccgttccgatggtagtggtaccactggggtatttaccaagcatctcagttctatcagcccagaatgggaagcttccattggtcaaggtaaaagtgtggaatggcctacaaacaaaggtaaatttattggtggtaaaggaaacgaaggggtaaccgcttctattcaacagaatcaaggttctattggctacattgagtatggttacgccaaacaaaatagtatccctgtagcaaccctacaaaattcctctggtaactttattgttcctaccgatgacagtgcttcggcaactttagacgctgttaccctacctgagaatttacgggcatttatcaccgatcccgaaggagataattcttatcccatcgttacctacacttggattttagcctacgaaaactacgacgacccccaaaaggcgatcgcagtagaaagcatgatccaatacgctttaaccgaaggacaagaacaaagcaaggcattaggttatgttcccttacctcctagtgtgagagaaaaagtagctgctgctgctgatgtcattagtcctgattatgaaattaaattgaactaa

SEQ ID NO: 15253 - protein, 382 aa, Crocosphaera watsonii WH 8501
MFTTVKSSKRTIITSLSILSLAVSLGACGGGSSDTGTAPSGGGNQGTTTALNPPLDGDVALTGAGASFPAPLYQNWFVQLNTAVPKLKVNYQSVGSGAGVEQFTQGTVDFGASDVAMTDEEIGKIERGTILLPVTAGSIVMAYNLPGLEGLKLSRDAYVGIFKGDITNWNDPKIAEANPDLELPNQPITVVHRSDGSGTTGVFTKHLSSISPEWEASIGQGKSVEWPTNKGKFIGGKGNEGVTASIQQNQGSIGYIEYGYAKQNSIPVATLQNSSGNFIVPTDDSASATLDAVTLPENLRAFITDPEGDNSYPIVTYTWILAYENYDDPQKAIAVESMIQYALTEGQEQSKALGYVPLPPSVREKVAAAADVISPDYEIKLN

SEQ ID NO: 15254 - DNA, 1029 bp, Geobacter metallireducens GS-15
  CDS (1)..(1029): transl_table=11
atgctcaaagcattacggaaaagtctcgcgatcctcgcgactctggcagtaaccgccgcggccggccaggccggtgcggaaaccctcatcaacggcgcaggcgccaccttcccctacccgctctactccaagtggttcagcgagtacgccaagatcgatccctcggtgaaattcaactaccagtccatcggcagcggcggcggcatcaagcagatcactgcccagaccgtcgacttcggcgccagcgacaagttcctgagcgatgcggaactgaaggcggcccccggcaagctcctccacattccgaccgtcatgggtgcggtcgtcgtaacctacaaccttccgggcgctccgaaggggctgaagctcaaggctgaagacgtggccgacatcttcctcggcaagatcagcaagtggaacgatccgcgcatcgcagacgacaaccccggcgtcaagcttcccaatagcccgatcatcgtcgtgcaccgctccgacggcagcggcaccaccagcatcttcaccgacttcctctccggcgtgaaccaggagtgggccaagaaggtcggcaaaggtgcctcggtcaagtggcccatcggcctcggcggcaaggggaacgagggtgttgccggccagatcaagaccactgcaaactccatcggctatgttgagcttgcctatgccttcgagaacaagctcccctacgcgaccctcaagaacaagagcggcagctgggtagtcccctccatccagacgacgagcgcagcggcagccgcagccgtcaaacacatgccggctgattaccggatctccctggtgaaccagccgggcaaggacgcctaccccatcgtcggcttcacctggctcctcgtgtacgaaaagcagaaagacgccgtcaaagggaaaaagctggtggaattcctgaactggagcctccgcaacggccagaagatggcagcaccgctcctctacgcgccgctccccgagaacgtcaagaagatggtggagaagaccatcaagaccgtcaagtaa

SEQ ID NO: 15255 - protein, 342 aa, Geobacter metallireducens GS-15
MLKALRKSLAILATLAVTAAAGQAGAETLINGAGATFPYPLYSKWFSEYAKIDPSVKFNYQSIGSGGGIKQITAQTVDFGASDKFLSDAELKAAPGKLLHIPTVMGAVVVTYNLPGAPKGLKLKAEDVADIFLGKISKWNDPRIADDNPGVKLPNSPIIVVHRSDGSGTTSIFTDFLSGVNQEWAKKVGKGASVKWPIGLGGKGNEGVAGQIKTTANSIGYVELAYAFENKLPYATLKNKSGSWVVPSIQTTSAAAAAAVKHMPADYRISLVNQPGKDAYPIVGFTWLLVYEKQKDAVKGKKLVEFLNWSLRNGQKMAAPLLYAPLPENVKKMVEKTIKTVK

SEQ ID NO: 15256 - DNA, 930 bp, Moorella thermoacetica ATCC 39073
  CDS (1)..(930): transl_table=11
gtgctgagtaaaggtaaatggctggcgatcttagtgattgccctggtggcggtactggctgtagcgggctgcggtaagaaagagttcccggctccccagcagggtagcagccagcaaaacagcaaccagcagtccggcgggagcggcgccataacagcagcgggttctacggccctgcaacccctggtagatgaagcggccaagcagtatatggaaaagaacccgggtgttcgcatcgtcgtcaacggcggcggcagcggtaacggcctctctcaggtgttccagggtgccgtccagataggcaactccgatatctttgccgaggaaaaggacggtatcgacgcctcccaactggtggatcacaaggtagccgttgtgggcatggcggccgttgttaatcctgacgtcaaagtggacaaccttacccagcagcagcttattgacatctttaccggtaaaattaccaactggaaagacgtcggcggtcctgaccagaagatcaacatcgtcaaccggcccaagggttccggtacccgggcgacctttaaaaaatatgccttaaacggtgcggaagaagcccagggtatcgccatggagcaggatgcctccggtaccgtgcgcaagaccattgccgaaaccccaggcgctatcggctacctggctctctcctacattgattccagcgtccagcccctcaaaattgacggggttgaacctacggcagccaatattgtggacaacaagtacaaggtctgggcatacgagcatatgtacaccaaaggccagccgacgggggaagtcaagaaattcctggatttcataatgagcgacgaagtccagaagaacctggtaaccaagatgggctacatccccgtaaccgacatgaaggttgaacgcgacgcccagggaaatgtgactcccaagaagtag

SEQ ID NO: 15257 - protein, 309 aa, Moorella thermoacetica ATCC 39073
MLSKGKWLAILVIALVAVLAVAGCGKKEFPAPQQGSSQQNSNQQSGGSGAITAAGSTALQPLVDEAAKQYMEKNPGVRIVVNGGGSGNGLSQVFQGAVQIGNSDIFAEEKDGIDASQLVDHKVAVVGMAAVVNPDVKVDNLTQQQLIDIFTGKITNWKDVGGPDQKINIVNRPKGSGTRATFKKYALNGAEEAQGIAMEQDASGTVRKTIAETPGAIGYLALSYIDSSVQPLKIDGVEPTAANIVDNKYKVWAYEHMYTKGQPTGEVKKFLDFIMSDEVQKNLVTKMGYIPVTDMKVERDAQGNVTPKK

SEQ ID NO: 15258 - DNA, 873 bp, Pelodictyon phaeoclathratiforme BU-1
  CDS (1)..(873): transl_table=11
atgattaaccaaatttttcagtttattcttactaactcaatgataacaatcactatgaaactttttaaaaaaatacttttaagtgcgactgttttcggtctcatggcttcaggcactgcacaggctgctggtaaaatcgttatcgacggttcaaccacagtaggaccaatcgccaaagccttcgccgatcactataccaaaacaaccggtgtacaggtatccgtcagtgagtcgggttcaggcaacggcgcaaaaagcctgatcaacaaaacctgtgacatcgcaaccatgtcaagagcaatgaaagaccaggaactggctgccgccagaagcaaaggcgtcaatcccgtcgaacatgtcgtcgcgcttgatggtctctcaattgttgtgcatccgagcaatcgcatcaatgcgctcaccaaagcacagatccgcggtatttacatgggcaaatacaccaactggagccaggttggtggaccaaattctgcaatcgtgattatccagcgtgaatcgaacagcggtactgccgacacatttaaagagctcgttatgggcaaagataacccgatttccaagagagcagagacccagtcaagcaacggcgccatcaagagccgtgtagcatcaacaccttctgcgatcagctatatcggactcggttttgttgactcgtcggtcaaggctgttctggttgatggaatcgaagctgatgtcaagaccgtcaagaacaacacgtacccgatccatcgtccgcttttcatgtacaccaatggccagccaacaggcgctgtcaagcagttcattgatctgccaaaaactgctgaagggaaacgcatcatcagcgagaccggttttgtgaacgtctattaa

SEQ ID NO: 15259 - protein, 290 aa, Pelodictyon phaeoclathratiforme BU-1
MINQIFQFILTNSMITITMKLFKKILLSATVFGLMASGTAQAAGKIVIDGSTTVGPIAKAFADHYTKTTGVQVSVSESGSGNGAKSLINKTCDIATMSRAMKDQELAAARSKGVNPVEHVVALDGLSIVVHPSNRINALTKAQIRGIYMGKYTNWSQVGGPNSAIVIIQRESNSGTADTFKELVMGKDNPISKRAETQSSNGAIKSRVASTPSAISYIGLGFVDSSVKAVLVDGIEADVKTVKNNTYPIHRPLFMYTNGQPTGAVKQFIDLPKTAEGKRIISETGFVNVY

SEQ ID NO: 15260 - DNA, 819 bp, Prosthecochloris aestuarii DSM 271
  CDS (1)..(819): transl_table=11
atgaagatgctgaaaaaactctttatgctctttactgtgcttagctttgcagctgcagggccggttcaggctggagatgctattgtcatggacggttctactacggtaggtccgatcgctaaatcatttgccgcgtactttaccaagaaatacggtgttcaggtcacggtcagtgagtctggcagcggtaacggtgcaaaaagtatcatcaatggtgcttgtgatatcgccaacatgtctcgcggtatgaaggatgctgaggttgcagcagcaaagagcaaaggcgttgatcctgtttctcacgttgtcgctcttgacggtattgccgtcgtcgttcatccgagcaactttgtcaatgcactctcaaaagctcagattatggacatctaccgcggcaaggttaccaactggagccaggtcggcggaccttcagccaatatcgttgtgatccagcgtgaatcgaacagcgggacccaggactctttccgctcgctggttatcggtaaaggcaataccattaccaagagagctgaaacgcaggccagcaacggtgctgtcaagagccgtgtttctacaacaccggcagctatcggttttatcggcctcggttttgtagatgattctgtcaaagctcttaacgtcgatggtgttactccaagcgttgaaaccgtcaaaagcggtcagtatccggttgcccgccctcttttcatggtgaccaatggagagccgaccggcaatgtcaagaagttcatcgatcttccgaaaactgccgacggtaagcagatgatcagtgaacttggtttcgttaacaaatactga

SEQ ID NO: 15261 - protein, 272 aa, Prosthecochloris aestuarii DSM 271
MKMLKKLFMLFTVLSFAAAGPVQAGDAIVMDGSTTVGPIAKSFAAYFTKKYGVQVTVSESGSGNGAKSIINGACDIANMSRGMKDAEVAAAKSKGVDPVSHVVALDGIAVVVHPSNFVNALSKAQIMDIYRGKVTNWSQVGGPSANIVVIQRESNSGTQDSFRSLVIGKGNTITKRAETQASNGAVKSRVSTTPAAIGFIGLGFVDDSVKALNVDGVTPSVETVKSGQYPVARPLFMVTNGEPTGNVKKFIDLPKTADGKQMISELGFVNKY

SEQ ID NO: 15262 - DNA, 1002 bp, Ralstonia metallidurans CH34
  CDS (1)..(1002): transl_table=11
atgggcagacacatcgcggcgctggcgctgctattcgccgcggtcagtgcatttgccggagatgtcactggggctggttccacattcgtctacccgctgatggcgaaatgggcggccacgtattacgccaggacaggccggcagatcgattaccaacccatcggctcaggcaacggcatccggcagatcaaggcggcaagcatcacgttcggcaccacggacatgccgctcaaacccgaagagctcgagcgcgcaggactggcccagtttcccatcgcggtaggcggcgtcgtgccggtgatcaacctgcagggcattggcgcggggcagatccacatgacgggcgcgctgctggccgatatctatcgcggcaagatcgccaactggaacgatgcggccattgcgtcggccaatcccggcgtgcagtttcccgacctgaagatcacggtggtccatcgcagcgacggctcgggcaccacgttcaactggaccgactacctttccaaggtcagccccgaatggaaggcggcagtcggggcaggcaccacggtgcgttggcccatcgggatgaacgcgagcggcaatgagggcgtatcgctctatatccacaatattcgcggcgcgatcggctatgtggaactgacctacgcgctgcagaagagcctgccctatgcgttggtccagaaccgcgatggtctctacgtgaagccttcgcgcgaatcgttcagcgccgcggtgacggccgtggaatggaacccgcggctcgacttctatcaggtgctgaccaatgcgccgggcccgaacgcgtggccgatcacgggcacggtcttcgtgctgatgcagcgttccgccgcgcacccgtcgaatacgaaggatgcgctggcgttctttcagtgggcgcttgccgaagggcaatccgatgcgtcggccgagcactacgtggcactgccgccggaactggtgaagcaggtgatcgcgtactgggcggagaccttcaagtag

SEQ ID NO: 15263 - protein, 333 aa, Ralstonia metallidurans CH34
MGRHIAALALLFAAVSAFAGDVTGAGSTFVYPLMAKWAATYYARTGRQIDYQPIGSGNGIRQIKAASITFGTTDMPLKPEELERAGLAQFPIAVGGVVPVINLQGIGAGQIHMTGALLADIYRGKIANWNDAAIASANPGVQFPDLKITVVHRSDGSGTTFNWTDYLSKVSPEWKAAVGAGTTVRWPIGMNASGNEGVSLYIHNIRGAIGYVELTYALQKSLPYALVQNRDGLYVKPSRESFSAAVTAVEWNPRLDFYQVLTNAPGPNAWPITGTVFVLMQRSAAHPSNTKDALAFFQWALAEGQSDASAEHYVALPPELVKQVIAYWAETFK

SEQ ID NO: 15264 - DNA, 1032 bp, Ralstonia metallidurans CH34
  CDS (1)..(1032): transl_table=11
atgaagctagtcaagactgccgtagcaggcatcgtgtcgattgtggtggcgggtactgcgttcgcggcggaaattaccggtgctggcgcttccttcccggcgcctgtgtattccaagtgggctgatgcctaccaaaaagcaacgggcaacaaggtcaactatcaatctatcggctcgtcgggtggtatcaagcagattggcgccaagaccgtcgatttcggcgcttcggacgctccgctgaaggacgacgagctggcaaagggcaacctgatccagttcccgaccgtgatcggtggcgtggtgccggtgattaacctgcaaggcgtgaagccgggcgagctcatcatcacgggtgacgtgctggccaacatctacctgggcaagatcaagaagtgggacgatcccgcgatcaaggccctgaacccgaaggtccacctgccgagccaggacatcctgccggtgcgtcgtgccgacggctcgggcacgacgttcatcttcacgaactacctctcgaaggtcagtcctgactggaagaactcggtgggcgaaggcaccacggtgaactggccgggcggtggcacgggcggcaagggtaacgaaggcgttgccgccttcgtgcagcgtctgaatggcgccatcggctacgtcgagtatgcctatgccaagcagaacaagatgacgtacctgacgatgaagaactcggccggcgagatcgtcaagcctagcgacgaagccttcaaagcggccgctgccggcgctgactggagcaagtcgttctaccagatcctgacgaacgagccgggcaagaccgcatggccgatcgctggcgccaccttcatcctgctgcacaagacgcaggataaggcggcacaaggccaggaagtcatgaagttcttcgactgggcctacaagagcggtggcacgatggctgctgagctggactacgtaccgctgccggaatcggtcgtgaaccagattcgctcgacctggaagagcagcgtcaaggacggttcgggtaaggcactgtactaa

SEQ ID NO: 15265 - protein, 343 aa, Ralstonia metallidurans CH34
MKLVKTAVAGIVSIVVAGTAFAAEITGAGASFPAPVYSKWADAYQKATGNKVNYQSIGSSGGIKQIGAKTVDFGASDAPLKDDELAKGNLIQFPTVIGGVVPVINLQGVKPGELIITGDVLANIYLGKIKKWDDPAIKALNPKVHLPSQDILPVRRADGSGTTFIFTNYLSKVSPDWKNSVGEGTTVNWPGGGTGGKGNEGVAAFVQRLNGAIGYVEYAYAKQNKMTYLTMKNSAGEIVKPSDEAFKAAAAGADWSKSFYQILTNEPGKTAWPIAGATFILLHKTQDKAAQGQEVMKFFDWAYKSGGTMAAELDYVPLPESVVNQIRSTWKSSVKDGSGKALY

SEQ ID NO: 15266 - DNA, 1113 bp, Rubrobacter xylanophilus DSM 9941
  CDS (1)..(1113): transl_table=11
ttgagcggactcaagggttggaagctggtctgtgccggtttggcgctctcctcgctgctgcttgcgggctgcgccaccgtcgacgaggcctcgccccagcagggcggcggttccggaggcggctcgcagggggcggcccagcggataaacggcgccggggcctccttccccgcgcccttctactcggcggtcttccagcgcttcgcgcaggaggaggggatagaggtcaactaccagtccatcggctcgagcggcggtcgcgagcagttcatccagaagaccgtcgccttcggcgcctcggacgagccgatgagcgaggaggagatgcgggaggccgggggcaacccgctccacatcgccaccgtgggcggggcggtggtccccgtgtacaacatcgagggggtggacagcgggctcaacttcaccggccgggtgctcgccgacatctacctcggcaacatcacccgctggaacgacccggccatagcggagctcaacccgggcgtggagctgccggacgccaagatagcggtcgtccaccgctccgacggctcgggcaccaccaacatctggaccagctacctggccgcggtgagccccgagtggaagagcgggcccggcgcgggcggcgagataaagtggccgaccggcatcggcggcgacggcaacgagggcgtggccgggctcgtcaagcagacccccaactccatcggctacgtggggctggagtacgcggtgcagaacgagctggcctacggcgacgttggcgaggagggggccttcgtccggcccagcgtcgagagcgcccgggcggccatcgcggcggccggggacgagatcccggaggacctcaggttcaccatctcctcggccaacccgcagggcgagggggtctacccgatcacgggcctcacctggatcctcgtgcgccagcagatggacgacccggcgcagtgcagggccgtggcgcaggctgcctggtacctgacccacgaggggcagagcctcgctcccgacctcaactacgtgccgctcccggagaacatcgtctcccgggacgaggagctgatccggagcatggaggccgggggcgagaagtgctacgcgggctag

SEQ ID NO: 15267 - protein, 370 aa, Rubrobacter xylanophilus DSM 9941
MSGLKGWKLVCAGLALSSLLLAGCATVDEASPQQGGGSGGGSQGAAQRINGAGASFPAPFYSAVFQRFAQEEGIEVNYQSIGSSGGREQFIQKTVAFGASDEPMSEEEMREAGGNPLHIATVGGAVVPVYNIEGVDSGLNFTGRVLADIYLGNITRWNDPAIAELNPGVELPDAKIAVVHRSDGSGTTNIWTSYLAAVSPEWKSGPGAGGEIKWPTGIGGDGNEGVAGLVKQTPNSIGYVGLEYAVQNELAYGDVGEEGAFVRPSVESARAAIAAAGDEIPEDLRFTISSANPQGEGVYPITGLTWILVRQQMDDPAQCRAVAQAAWYLTHEGQSLAPDLNYVPLPENIVSRDEELIRSMEAGGEKCYAG

SEQ ID NO: 15268 - DNA, 891 bp, Enterococcus faecium DO
  CDS (1)..(891): transl_table=11
atgaaaaaagtattgtttactctaggtatgatgggaattcttttagccggatgcggctcaggatcaggaaatacagatggctctgccacacaaaataattcaagtgactcaaatgaacaagtaaaaatcgttgcggtaggttcgacagcattacagccgttagtcgatgcagcacaagaaagctttgtacaagaaaatccaaattatcaaatctctgtacaaggaggaggaagcggaactggtttgagccaagtcgaagctggagcagttactatcggaaactctgatgtatttgcagaagaaagagacggagttgatgcttcaaaattagtggatcataaagtagcagtggtcgggatggcaccaatcgtcaataaagatacagatgtcaaagatatcaccaaacaggaattgattgatatctttacaggaaaaatcactaactggaaggaagttggcgggaaagatcaaaaaatcaacgtcgtgaaccgtgcaaacggcagcggtacccgcgcgacattcgaaaaatggggactggatggtgctacccctgtgcagtcccaagaacaagattcatcaggaacagttcggcagctggtaagtcaaacaccaggagcaatcagctatttagctttctcatatctcgatgattccacacaagcactaagtatcgacggtgtagaaccaaaagaagagaatgtagcagataacagctggggaatctggtcatatgaacatatgtacacgaacggaaaaccttcccctgaagtccaaaaattcttagactacatgatgacagaagaaatccaagaaggacctgtcaaagaattgggctatttaccaatcacaatgatggaagtagaacgtgatcacgaaggaaatatcaaataa

SEQ ID NO: 15269 - protein, 296 aa, Enterococcus faecium DO
MKKVLFTLGMMGILLAGCGSGSGNTDGSATQNNSSDSNEQVKIVAVGSTALQPLVDAAQESFVQENPNYQISVQGGGSGTGLSQVEAGAVTIGNSDVFAEERDGVDASKLVDHKVAVVGMAPIVNKDTDVKDITKQELIDIFTGKITNWKEVGGKDQKINVVNRANGSGTRATFEKWGLDGATPVQSQEQDSSGTVRQLVSQTPGAISYLAFSYLDDSTQALSIDGVEPKEENVADNSWGIWSYEHMYTNGKPSPEVQKFLDYMMTEEIQEGPVKELGYLPITMMEVERDHEGNIK

SEQ ID NO: 15270 - DNA, 1113 bp, Kineococcus radiotolerans SRS30216
  CDS (1)..(1113): transl_table=11
gtgacgttctcgacagcctcccgcctcctcggcctcgccgccgtgggtgttctcgccctcgccggttgcggctccgacgacaacaccgcaggcagcacgaccgaaggctcggcctcgtcgtcggcttcgaccgccatcgactgcgcccccggcaccctgaacggcgaggggtccagcgcgcagaagaacgccatcgaccaggtcacccaggccggctaccaggcccagtgcaccgacgccacgatcaactacaacgcgaccggctccggcgcgggccgcaagcagttcacctccggccaggtcgactgggccggctcggactccgcgctcaaggaggaggaggtcgccgcggcgaccgcccgctgcgagggcaaccaggcctggaacctgccgatggtcgccggcccgatcgccatcgcctacaacgtcgacggcgtggacgacctcgtcctcgacgccgccaccgccgcgaagatcttctccggcaccatcaccacctggaacgacccggccatcgccgcgctgaaccccgacgcgacgctgcccagcaccgcgatcagcgtgttcttccgcaccggtacctccggcaccaccgagaacttcaccaagtacctgcacgccgcggcccccgaggcgtggaccgccgagggcaaccaggagtgggccggcaagggcgagggccgcgagggctccgccggtgtcgcgcaggccgtcgccggcgcccccggcggcatcacctacgtcgagtggtcctacgcccaggacaacaacctggccgtcgcccagatcgacaacggctccggcgccgtcgagctgaccggcgagtccgccggcaagaccgtcgccaccgccacccagaccggcaccggcaacgacctgtcgctgaagatcgactacgcgaccaaggaggcgggcgcctacccgatcgtcctggtcacctacgagatcgtctgctccaagggcctggacgccgagaagaccgccctgctgaagtccttcctcacctacttcgccgaggacgagacccaggagggcctgcaggagatcggctacgcgccgctccccgccgaggtctccgagaaggtccggaccgccatcgaagccatcgcctga

SEQ ID NO: 15271 - protein, 370 aa, Kineococcus radiotolerans SRS30216
MTFSTASRLLGLAAVGVLALAGCGSDDNTAGSTTEGSASSSASTAIDCAPGTLNGEGSSAQKNAIDQVTQAGYQAQCTDATINYNATGSGAGRKQFTSGQVDWAGSDSALKEEEVAAATARCEGNQAWNLPMVAGPIAIAYNVDGVDDLVLDAATAAKIFSGTITTWNDPAIAALNPDATLPSTAISVFFRTGTSGTTENFTKYLHAAAPEAWTAEGNQEWAGKGEGREGSAGVAQAVAGAPGGITYVEWSYAQDNNLAVAQIDNGSGAVELTGESAGKTVATATQTGTGNDLSLKIDYATKEAGAYPIVLVTYEIVCSKGLDAEKTALLKSFLTYFAEDETQEGLQEIGYAPLPAEVSEKVRTAIEAIA

SEQ ID NO: 15272 - DNA, 1026 bp, Nitrobacter hamburgensis X14
  CDS (1)..(1026): transl_table=11
atgagttttattaaggccatcgtcgccgccggcctcgttgccgcctcggcgtccgccttttcgcttccggcgagggcggccgacatcaccggtgcgggcgcgaccttcccgttcccggtctattccaaatgggccgatgcctacaagaaagagaccggcaatagcgtgaattatcagtcgatcgggtcgggcgccggcatcaagcagatcctcgccaagaccgtgaccttcggcgcgaccgacgcgccgctgaaggccgacaagctcgacaaggacggcctgctgcagtggccgatggtgatgggcgcgatcgtccccgtcgtgaacgtcgaaggcgtgacgcctggcgagttggtcctttcgggtgaactgctcggcgacatctatctcggcaaggtcaccaggtgggacgaccctgcgatcgcaaagctcaacccgaagctcaagctgccttcggccccgatcgcggttgtgcatcgttcggacgggtcgggcacctcgttcaacttcaccaattatctgtccaaggtgaacgccgagtggaaatccaaggtcggcgagggcactgcggtcgagtggccggcgggcgtcggcgccaagggcaacgaaggcgtctccggcaatgtcggccagaccaagaactcgatcggctatgtcgagtatgcctatgccaagcagaacaagctgacctacgccgcgctcatcaacaaggccggcaagatcgtgcagccgaccgtcgcctccttccaggccgcggccggcaacgccgactgggcgcacgcgccgggctactacgtgatcctgaccgatcagccgggcgaggcttcctggccgatcaccgcggcgacgttcatcctgatgcacaaggagccgatcgacaaaacggcctccgccgaagccatcaagttcttcaagtggtcgttcgagaagggcggcaagatggccgaggatctcgactacattccgatgccggaccaggtcttaaagcagatcgagaaaacctggacctccgagatcaagagctga

SEQ ID NO: 15273 - protein, 341 aa, Nitrobacter hamburgensis X14
MSFIKAIVAAGLVAASASAFSLPARAADITGAGATFPFPVYSKWADAYKKETGNSVNYQSIGSGAGIKQILAKTVTFGATDAPLKADKLDKDGLLQWPMVMGAIVPVVNVEGVTPGELVLSGELLGDIYLGKVTRWDDPAIAKLNPKLKLPSAPIAVVHRSDGSGTSFNFTNYLSKVNAEWKSKVGEGTAVEWPAGVGAKGNEGVSGNVGQTKNSIGYVEYAYAKQNKLTYAALINKAGKIVQPTVASFQAAAGNADWAHAPGYYVILTDQPGEASWPITAATFILMHKEPIDKTASAEAIKFFKWSFEKGGKMAEDLDYIPMPDQVLKQIEKTWTSEIKS

SEQ ID NO: 15274 - DNA, 873 bp, Burkholderia mallei FMH
  CDS (1)..(873)
atgcaaaccgcgttcgccggtctcgccggcgcgcttttcgcggtcgccgcacacgccgacatcacgggcgcgggcagcaccttcgccatgccgatttacacgaaatgggcagccgactatcagcagtcgggcggcgcgaaggtcaactatcagggcatcggctcgtcgggcggcctcaagcagatcgtcgcgaagacggtcgatttcgccggctcggatgcgccgctcaaggatgacgagctcgcgaaggaaggcctgttccagttcccgacggtggtcggcggcgtcgtgcccgtcatcaacgtgccgggcgtgaaggcgggcgaactgacgctgtcgggcgcggtgctcggcgacatctatctcggcaagatcaagaagtggaacgatccggccatcgcggcgctgaacccgaaggtcaagctgccggatacggacatcgcggtcgtgcgccgcgcggacggctcgggcacgagcttcatctggacgaattacctgtcgaaggtcaacgacgagtggaagtcgaaggtcggcgaaggcacgacggtcaactggccgaccggcacgggcggcaagggcaacgacggcgtcgcggcgttcgtgcagcgtctgccgggcgcgatcggctatgtcgagtgggcgtacgcgaagaagaacaacatggtctacaccgcgctgaagaactcgacgggcacggtggtcgagccgaagacggagacgttcaaggcggctgccgccggcgcgaactggtcgaagtcgttctaccagatcctgacgaaccagccgggcaaggaagcgtggccggtcgtcggcgcgacgttcgtgctgctgcacgcgaagcaggacaagccggcacagggcgcggaaacgtag

SEQ ID NO: 15275 - protein, 290 aa, Burkholderia mallei FMH
MQTAFAGLAGALFAVAAHADITGAGSTFAMPIYTKWAADYQQSGGAKVNYQGIGSSGGLKQIVAKTVDFAGSDAPLKDDELAKEGLFQFPTVVGGVVPVINVPGVKAGELTLSGAVLGDIYLGKIKKWNDPAIAALNPKVKLPDTDIAVVRRADGSGTSFIWTNYLSKVNDEWKSKVGEGTTVNWPTGTGGKGNDGVAAFVQRLPGAIGYVEWAYAKKNNMVYTALKNSTGTVVEPKTETFKAAAAGANWSKSFYQILTNQPGKEAWPVVGATFVLLHAKQDKPAQGAET

SEQ ID NO: 15276 - DNA, 879 bp, Burkholderia mallei JHU
  CDS (1)..(879)
atgcaaaccgcgttcgccggtctcgccggcgcgcttttcgcggtcgccgcacacgccgacatcacgggcgcgggcagcaccttcgccatgccgatttacacgaaatgggcagccgactatcagcagtcgggcggcgcgaaggtcaactatcagggcatcggctcgtcgggcggcctcaagcagatcgtcgcgaagacggtcgatttcgccggctcggatgcgccgctcaaggatgacgagctcgcgaaggaaggcctgttccagttcccgacggtggtcggcggcgtcgtgcccgtcatcaacgtgccgggcgtgaaggcgggcgaactgacgctgtcgggcgcggtgctcggcgacatctatctcggcaagatcaagaagtggaacgatccggccatcgcggcgctgaacccgaaggtcaagctgccggatacggacatcgcggtcgtgcgccgcgcggacggctcgggcacgagcttcatctggacgaattacctgtcgaaggtcaacgacgagtggaagtcgaaggtcggcgaaggcacgacggtcaactggccgaccggcacgggcggcaagggcaacgacggcgtcgcggcgttcgtgcagcgtctgccgggcgcgatcggctatgtcgagtgggcgtacgcgaagaagaacaacatggtctacaccgcgctgaagaactcgacgggcacggtggtcgagccgaagacggagacgttcaaggcggctgccgccggcgcgaactggtcgaagtcgttctaccagatcctgacgaaccagccgggcaaggaagcgtggccggtcgtcggcgcgacgttcgtgctgctgcacgcgaagcaggacaagccggcacagggcgcggaaacgctgaagtag

SEQ ID NO: 15277 - protein, 292 aa, Burkholderia mallei JHU
MQTAFAGLAGALFAVAAHADITGAGSTFAMPIYTKWAADYQQSGGAKVNYQGIGSSGGLKQIVAKTVDFAGSDAPLKDDELAKEGLFQFPTVVGGVVPVINVPGVKAGELTLSGAVLGDIYLGKIKKWNDPAIAALNPKVKLPDTDIAVVRRADGSGTSFIWTNYLSKVNDEWKSKVGEGTTVNWPTGTGGKGNDGVAAFVQRLPGAIGYVEWAYAKKNNMVYTALKNSTGTVVEPKTETFKAAAAGANWSKSFYQILTNQPGKEAWPVVGATFVLLHAKQDKPAQGAETLK

SEQ ID NO: 15278 - DNA, 1041 bp, Enterobacter cloacae
  CDS (1)..(1041): transl_table=11
atgaaagttatgcgtaccactgtcgcaactgttgtcgccgcgaccttatctctgagcgcgttctctgtatttgcagaagcaagcctgactggcgctggtgcaaccttccctgcgccggtgtatgccaaatgggcggatacctaccagaaagaaaccggtaacaaggttaactatcagggtatcggctcctccggtggcgttaaacaaattaccgcgaacactgttgatttcggcgcatcagacgctccgctgtctgatgacagactggctcaggaaggcctgttccagttccctaccgtgatcggtggtgtggttctggccatcaacctgccgggcgtgaagtcaggtgagctggtgttggacggcaagacgctgggtgacatctacctgggcaaaatcaaaaaatgggatgacgaagcgatcgctaaactcaacccaggcctgaagctgccttctcagaacatcgccgtggttcgccgcgcggatggttccggtacctcttttgtgttcaccagctacctggcaaaagtgaacgaagagtggaaatctaaagtcggctccggctctaccgttaactggccaaccggtctgggcggtaagggtaacgacggtatcgccgcgttcgtacagcgtctgcctggctcaattggttacgtagagtatgcgtacgctaagcagaacaacctgtcctacaccaaactggtatcagccgacggcaaaccggttagcccgaccgaagagaactttgctaacgcggcgaaaggcgctgactggagcaaatccttcgcgcaggatctgactaaccagaaaggcgaaggtgcatggccaatcacctctaccaccttcatcctggttcacaaagagcagaagaaacctgagcagggcgccgaagtgctgaagttcttcgactgggcgtacaaaaacggcggcaaacaggctaacgccctggattacgccaccctgccggacaacgtggttgagcagattcgcgctgcatggaaaaccaacgtgaaagacagcagcggtaaagcgctgtactaa

SEQ ID NO: 15279 - protein, 346 aa, Enterobacter cloacae
MKVMRTTVATVVAATLSLSAFSVFAEASLTGAGATFPAPVYAKWADTYQKETGNKVNYQGIGSSGGVKQITANTVDFGASDAPLSDDRLAQEGLFQFPTVIGGVVLAINLPGVKSGELVLDGKTLGDIYLGKIKKWDDEAIAKLNPGLKLPSQNIAVVRRADGSGTSFVFTSYLAKVNEEWKSKVGSGSTVNWPTGLGGKGNDGIAAFVQRLPGSIGYVEYAYAKQNNLSYTKLVSADGKPVSPTEENFANAAKGADWSKSFAQDLTNQKGEGAWPITSTTFILVHKEQKKPEQGAEVLKFFDWAYKNGGKQANALDYATLPDNVVEQIRAAWKTNVKDSSGKALY

SEQ ID NO: 15280 - DNA, 540 bp, Pectobacterium carotovorum
  CDS (1)..(540): transl_table=11
atgaaaccgatgcgtaccactcttgccagtgttgttgcggcaaccctttctctgacggcattttctgctttagctgctaacctcaccggtgccggtgcgacattccctgcgcctgtttatgcgaaatgggctgactcctatcaaaaagaaaccggtaataaagttaactatcaaggcatcggttcttctggcggtgtaaaacagattatcgctaaaacggtcgatttcggtgcttctgacgcccctctggctgacgacaaattagcacaggatggtttattccagttcccaaccgttatcggtggcgtggtgctggcagtgaacgttcctggtatcaaatctggcgatttaacgctggatggtaaaacgctgggtgatatctacctgggtaacatcaacaaatggagcgacccagcaatcactaaactgaacccgaatgccaagctgccggatcaggacattgctgtggttcgtcgtgctgacggctctggtacgtctttcgtgttcaccagctatctggccaaagttaacccggaatag

SEQ ID NO: 15281 - protein, 179 aa, Pectobacterium carotovorum
MKPMRTTLASVVAATLSLTAFSALAANLTGAGATFPAPVYAKWADSYQKETGNKVNYQGIGSSGGVKQIIAKTVDFGASDAPLADDKLAQDGLFQFPTVIGGVVLAVNVPGIKSGDLTLDGKTLGDIYLGNINKWSDPAITKLNPNAKLPDQDIAVVRRADGSGTSFVFTSYLAKVNPE

SEQ ID NO: 15282 - DNA, 996 bp, Prochlorococcus marinus
  CDS (1)..(996): transl_table=11
atgacatccatgaacatagctaagaaagctttggttttcacttctgcagtagccattgctgctggtacaagtgttcctggcacaagtgtttctgctaaaacaagattaagtggtgctggagcatcatttcctgccaaaatttacacccgttggttcaaagatttagcctcttcaggggggccaagagttaattaccaagctgttggttctggttctggaagaaaagcttttattgaccagaccgtaaactttggtgcctcagatgatcctatgaaagataaagatatcgccaaggttacaagaggtttagttcaaatcccaatggtgggtggaactattgcatttggttataactacgactgtgatttaaaacttactcaagagcaagccgtgcgagttgcaatgggtatggttaaaaactggaaagaattaggctgtaaatctggtaaattaacttgggcacatcgttctgatggttcaggaactactaaggctttcacaaactctatggaagcattttcaccaacatggactttaggaactggtaaatcagttaagtggccagcaggtgttggagcaaaaggaaattcaggtgtcgctggagttatacaaaacactcctggcgcgattggttatgttaaccagtcttatataaaaggtaatgtcaaagctgctgcacttcagaatttgtcaggtgaatttttgaaaccatctgtagaagctggagctaaggctcttaatggtattactttagatgaaaatcttgctggtaaaaatcctaatccaacagcaaaaggagcatatcctatagcttcattaacatggatacttgcttatgaagaaggtaacggtagaaacactaaagctattaagcaagcctttaatacattgttaagtgatgagtatcaagataaagctccatcactaggatttgttcctttgaaaggcgatattcttgagaaatcaagagctgccgttaagaaaattggtagataa

SEQ ID NO: 15283 - protein, 331 aa, Prochlorococcus marinus
MTSMNIAKKALVFTSAVAIAAGTSVPGTSVSAKTRLSGAGASFPAKIYTRWFKDLASSGGPRVNYQAVGSGSGRKAFIDQTVNFGASDDPMKDKDIAKVTRGLVQIPMVGGTIAFGYNYDCDLKLTQEQAVRVAMGMVKNWKELGCKSGKLTWAHRSDGSGTTKAFTNSMEAFSPTWTLGTGKSVKWPAGVGAKGNSGVAGVIQNTPGAIGYVNQSYIKGNVKAAALQNLSGEFLKPSVEAGAKALNGITLDENLAGKNPNPTAKGAYPIASLTWILAYEEGNGRNTKAIKQAFNTLLSDEYQDKAPSLGFVPLKGDILEKSRAAVKKIGR

SEQ ID NO: 15284 - DNA, 981 bp, Synechococcus sp
  CDS (1)..(981): transl_table=11
atgagcttcgccaagaaggctctcattttttcctctttgctggctcttggagctggcgtttccgcatctgccgctgatcgtctgaacggtgcaggtgcgtctttcccagccaagatctaccagcgctggttcgctgaactggccaaggccggtggccctcaggtcaactatcaggctgttggatccggttccggccgtaaggctttcatcgaccagaccgtgaacttcggtgcttctgacgatccgatgaagcccaaggacatggccaaggtgaagcgcggtgtcgtgcagatccccatggtgggcggcaccatcgccttcggttacaacaagcccggttgcaacctcaagctgacccagaagcaggctgttcaggtggcgatcggcaagatcaccaactggaagcagctcggttgcgcccccggcaacatcacctgggtgcaccgttccgacggttctggcaccaccaaggccttcaccaactccatgcaggccttctcctctgagtggaccctgggtaccggcaagtccgtcaagtggcccggtaagaacgctgtgggtgccaagggcaactccggcgtcgctggcaccattcagaacaaagttggcgccatcggttacgtcaaccagtcctacatcaagggcaaggttgtggctgcagccctgcagaacaagtccggtgaattcctcaagccttctgtgaaggccggtgccaccgcactgaacggcatcaagctggattccaacctggctggcaagaaccccaacccttctgccaagggtgcttaccccatcgccaccctcacctgggtgctggcttacaagaccggcaacggcaagaacaccgctgccatcaaggaagccttcaacttcatgctgagcaacaaggctcaggaccaggctcccagcctcggtttcgttcccctgaagggcggcatcctcagcaaggccaaggctgctgtgaacaagatcggcaagtga

SEQ ID NO: 15285 - protein, 326 aa, Synechococcus sp
MSFAKKALIFSSLLALGAGVSASAADRLNGAGASFPAKIYQRWFAELAKAGGPQVNYQAVGSGSGRKAFIDQTVNFGASDDPMKPKDMAKVKRGVVQIPMVGGTIAFGYNKPGCNLKLTQKQAVQVAIGKITNWKQLGCAPGNITWVHRSDGSGTTKAFTNSMQAFSSEWTLGTGKSVKWPGKNAVGAKGNSGVAGTIQNKVGAIGYVNQSYIKGKVVAAALQNKSGEFLKPSVKAGATALNGIKLDSNLAGKNPNPSAKGAYPIATLTWVLAYKTGNGKNTAAIKEAFNFMLSNKAQDQAPSLGFVPLKGGILSKAKAAVNKIGK

SEQ ID NO: 15286 - DNA, 1125 bp, Mycobacterium intracellulare
  CDS (1)..(1125): transl_table=11
gtgaagagtcgtctgggtacgctgctgggtctggtggccatcgcgccgccggtcctcgggatcgcggcttgcggtgcgcacgcgacgcggggggcgccgagcaccgggccggccgccggcagcgtcgccaccgccccggcgacgtccacgatcgagctctccgagaccggcagcacgctgctctacccgctgttcagcgagtggggcgccgcctaccgcgccaagcacccgaacgtcaccgtcaccacccagggcagcggctcgggcgccgggatctcccaggccgccgccggggcggtcgtcatcggcgcctccgacgcctacctgtccgcgggcgacatggccgcgcacaaggggctgatgaacatcgcgctggccatctcggcgcagcaggtcaactacaacctgcccggggtgcatcagcacctcaagctcaacggcaaggtgctggccggcatgtaccggggcacgatcaagacctggaacgacccgcagatcgccggcatcaaccccggcctgcagctccccgcgaccccggtggtgccgctgcaccgctccgatgggtccggcagcacgtttcagttcacccagtacctgtccaagcaggaccccgacggctggggccgctcgcccgggttcggcaccaccgtctccttcccggccgtgcccgaagcgctgggcgagaacggcgacggcgccatggtgaccggctgcgccgcgaacccgggctgtgtggcctacaccagcatcggctcgctcgacgaggccgaccagcacggcctcggcgaggccaagctgggcaacgcctccggcaaatacctgctgcccaacgccaagagcatccaggccgcggccgccggattcgcctcgaaaaccccggcgaaccaggcgatctcgctgatcaacggccccgccacggatgggtacccgatcgtcaactacgagtacgcgatcgtcaacgcggaccagcgcgacgacgccaccgcccaaacgctgcaggcgttcctgcactgggcgatcaccgagggcaacggcccgtcgtttttggacaaggttcacttccagccgctgccggccgaggtggtgacgctgtcggacgcccagatcgccaagatcggcggatga

SEQ ID NO: 15287 - protein, 374 aa, Mycobacterium intracellulare
MKSRLGTLLGLVAIAPPVLGIAACGAHATRGAPSTGPAAGSVATAPATSTIELSETGSTLLYPLFSEWGAAYRAKHPNVTVTTQGSGSGAGISQAAAGAVVIGASDAYLSAGDMAAHKGLMNIALAISAQQVNYNLPGVHQHLKLNGKVLAGMYRGTIKTWNDPQIAGINPGLQLPATPVVPLHRSDGSGSTFQFTQYLSKQDPDGWGRSPGFGTTVSFPAVPEALGENGDGAMVTGCAANPGCVAYTSIGSLDEADQHGLGEAKLGNASGKYLLPNAKSIQAAAAGFASKTPANQAISLINGPATDGYPIVNYEYAIVNADQRDDATAQTLQAFLHWAITEGNGPSFLDKVHFQPLPAEVVTLSDAQIAKIGG

SEQ ID NO: 15288 - DNA, 873 bp, Lactobacillus reuteri
  CDS (1)..(873): transl_table=11
atgaaaaaaacgattatcggggttgttatcgtcgcaatagtttgttggttaggtgggtcatgggtactcgctaagcaacaaccatcacaagaaaaaattaccattgtcggctcaacagctcttcaaccattagctgaagcagttgcaaataattaccgaactaagcatccccaaaccagcattattgtacagggtggtggttcaggaaccggtcttagtcaggtacaagcaggagcagtaaatatcggatctgctgatatctttgctgaccagcaagatgggattaatgccaataaattagatgacaatattgttgctgtttcgggaatagtaccaattgttaatgaagagcttggcattaagaatttaacaatgaaacagcttcaacaaatttttactggtcaaattacgaattggcaagaagttggcggacctgatttgccaattacagttattaatcgtgctcatggaagtggaaccagggttgcgtttgaacagacggtattgaaaccggggatgcaggcagtaaatgctcaagaacaagattcaaacgggacagtcaaagaaattattagaaatacaccaggggcaatcacctatattgcatttgcttatcttaatgaccaagttcagtcagttagccttgatggagtagcgccaactgctgataacattacgactaataagtggccattatggtcatatgagcacatgtatacgcaaaaacagccatcccaatcaactgcaaatttcattaagtatatgcaaagcgagaaagttcaaaagacgcttgtaacagaagctcactatattagcattcatgatatgaaagttgaaaaaacaccaactgggaaagtaactgaaaggaaatag

SEQ ID NO: 15289 - protein, 290 aa, Lactobacillus reuteri
MKKTIIGVVIVAIVCWLGGSWVLAKQQPSQEKITIVGSTALQPLAEAVANNYRTKHPQTSIIVQGGGSGTGLSQVQAGAVNIGSADIFADQQDGINANKLDDNIVAVSGIVPIVNEELGIKNLTMKQLQQIFTGQITNWQEVGGPDLPITVINRAHGSGTRVAFEQTVLKPGMQAVNAQEQDSNGTVKEIIRNTPGAITYIAFAYLNDQVQSVSLDGVAPTADNITTNKWPLWSYEHMYTQKQPSQSTANFIKYMQSEKVQKTLVTEAHYISIHDMKVEKTPTGKVTERK

SEQ ID NO: 15290 - DNA, 1041 bp, Erwinia amylovora
  CDS (1)..(1041): transl_table=11
atgacttcgatgcacaaaactctggctcaatgcgttgcattaaccctttctctgagcgctgtttctgcgctggctgcgacgaatctgaccggcgctggcggcacctttccggctccggtttataacaagtgggcggcagagtaccacaccgccacgggcagccaggttaactatcagggtatcggctcttccggcggcgtgaagcaaattatcgcgaaaaccgccgactttggtgcgtcagatgcaccgatgaaagacgaagatttggctaaaaatggcctgttccagttcccgacggtgattggcggggtggtactggcggtcaatattcctggtatcaaatccggggagctgacgctggatggtaaaaccgtgggggatatctaccttggtactgtcaagaagtggaacgatccggctatcaccaaactcaacccgggcgtaaagttgcctgatgccaatatcaacgtggtacgccgcgctgatggttccgggacctcatttgtctttaccagctatctgtctaaagtgaacaaagactggagcagcaaagtcggcaaaggcagcaccgttaactggccggtgggcctgggcggtaaaggtaatgacggcgttgctgcattcgtacagcgtttgccaggatctgtcggctatgtcgaatacgcctatgctaaacagaacagcctcgcctacaccaaactggtcgatgccgacggcaaagcgattgccccgagcgagaaaagcttcagcgatgcggctaaaggcgcagactggagcacctcgttcgctcaggatctgaccttccagaaaggcgataacgcctggccgatcacctctaccacctttatcctggttcataaagagcaggccaacaccgcgaagggcgcagccgtgttgcagttctttgactgggcttataaaaacggtggcaaaaccaccagcgcgctggactatgcatcgctgccagctcccgtcgtggagcagatccgcgccgcctggaaaagcaacgtgaaagacagttccggcaaggcgttgtactga

SEQ ID NO: 15291 - protein, 346 aa, Erwinia amylovora
MTSMHKTLAQCVALTLSLSAVSALAATNLTGAGGTFPAPVYNKWAAEYHTATGSQVNYQGIGSSGGVKQIIAKTADFGASDAPMKDEDLAKNGLFQFPTVIGGVVLAVNIPGIKSGELTLDGKTVGDIYLGTVKKWNDPAITKLNPGVKLPDANINVVRRADGSGTSFVFTSYLSKVNKDWSSKVGKGSTVNWPVGLGGKGNDGVAAFVQRLPGSVGYVEYAYAKQNSLAYTKLVDADGKAIAPSEKSFSDAAKGADWSTSFAQDLTFQKGDNAWPITSTTFILVHKEQANTAKGAAVLQFFDWAYKNGGKTTSALDYASLPAPVVEQIRAAWKSNVKDSSGKALY

SEQ ID NO: 15292 - DNA, 987 bp, Mycobacterium leprae
  CDS (1)..(987): transl_table=11
gtgagctgcggtgggaagccgacactgaaagctagcgggtcgacagcccaggccaacgcgatgacccgctttgttaatgcgttcgaacggtcatgtccaggacagacgttgaactatacggctaatggttccggtgcgggggttagcgaattcaacggtaatcaaacagatttcggtggctcagactcaccgttgagtaggaaggagtatgccgcagcagagcaacgttgtggctcgcaggcgtggaatttaccggtggtcttcggccccatcgcgatcacttacaacgtgaacggcctgagttcactgaacctggacggtccgacaaccgcgaagatcttcaatggttccatcgccagttggaacgatcccgcgatccaagcgctgaacactggcgtcgcccttccggctgagccgattcatgtcgtgttccgcaacgacgagtccggtaccacggataatttccagaggtaccttgacgtcgcatcaaacggtgagtggggcaaaggtatcggcaagacctttaaaggcggtgttggtgagggtgccaagggcaatgacggtacgtcggcggccgtcaagtccactgaagggtcgatcacctacaacgaatggtcgttcgcttcggcgcggaagctgaacacggccaagatcgccacgtcggccgatccagaacccattgcgatcagcgtcgactcggtcggcaagacaatttctggggctacgatcattggagagggtaacgatttagtgcttgacacggtctcgttttacaagccggctcagcccggctcctacccaatcgtgctggcgacctacgagattgtctgctcgaagtatcccgatgcccaggtcggtagggctgtgaaggcattcctgcagagcaccatcggtggaggccagaatggcctaggggacaacggatatgtacctattccggattctttcaaatccagattgtcgactgcggctaatgccatcgcttga

SEQ ID NO: 15293 - protein, 328 aa, Mycobacterium leprae
MSCGGKPTLKASGSTAQANAMTRFVNAFERSCPGQTLNYTANGSGAGVSEFNGNQTDFGGSDSPLSRKEYAAAEQRCGSQAWNLPVVFGPIAITYNVNGLSSLNLDGPTTAKIFNGSIASWNDPAIQALNTGVALPAEPIHVVFRNDESGTTDNFQRYLDVASNGEWGKGIGKTFKGGVGEGAKGNDGTSAAVKSTEGSITYNEWSFASARKLNTAKIATSADPEPIAISVDSVGKTISGATIIGEGNDLVLDTVSFYKPAQPGSYPIVLATYEIVCSKYPDAQVGRAVKAFLQSTIGGGQNGLGDNGYVPIPDSFKSRLSTAANAIA

SEQ ID NO: 15294 - DNA, 765 bp, Escherichia coli
  CDS (1)..(765): transl_table=11
atgaaagttatgcgtaccaccgtcgcaactgttgtcgccgcgaccttatcgatgagcgctttctctgtgtttgcagaagcaagcctgacaggtgcaggtgcaaccttccctgcgccggtgtatgccaaatgggctgacacttaccagaaagaaaccggtaataaagttaactaccagggtatcggttcttccggtggcgtaaaacagattatcgctaataccgttgattttggtgcctctgacgcgccgctgtctgacgaaaaactggctcaggaaggtctgttccagttcccgaccgtgattggcggcgtggtgctggcggttaacattccagggctgaagtctggcgaactggtgctggatggtaaaaccctcggcgacatctacctgggcaaaatcaagaagtgggatgatgaagccatcgccaaactgaatccgggtctgaaactgccttcacaaaacattgctgtagtacgccgcgcagatggctccgggacttccttcgtcttcaccagctacctggcgaaagtgaacgaagagtggaaaaacaacgttggtactggctctaccgtaaaatggccgatcggtctgggcggtaaaggtaacgacggtatcgccgcgttcgttcagcgtctgccgggtgcaattggttatgttgaatatgcttacgcgaagcagaacaacctggcgtacaccaaactgatctccgctgatggtaaaccggttagtccgaccgaagaaaacttcgctaatgcagcaaaatag

SEQ ID NO: 15295 - protein, 254 aa, Escherichia coli
MKVMRTTVATVVAATLSMSAFSVFAEASLTGAGATFPAPVYAKWADTYQKETGNKVNYQGIGSSGGVKQIIANTVDFGASDAPLSDEKLAQEGLFQFPTVIGGVVLAVNIPGLKSGELVLDGKTLGDIYLGKIKKWDDEAIAKLNPGLKLPSQNIAVVRRADGSGTSFVFTSYLAKVNEEWKNNVGTGSTVKWPIGLGGKGNDGIAAFVQRLPGAIGYVEYAYAKQNNLAYTKLISADGKPVSPTEENFANAAK

SEQ ID NO: 15296 - DNA, 1020 bp, Xanthomonas oryzae
  CDS (1)..(1020): transl_table=11
gtgatccactccttcaagacccgtctggccgttggcgtactcgccgcttcgctggctctgtgcgcccaggctgccgatgtcaccggcgctggccggtcgtttatttacccggtgatgtccaagtggtcggccgactacaacgctgccaccaagaagcaggtcaactatcaatcgatcggttcaggcggcggtattgcccagatcaaggcggccagcgtggacttcggctcgtccgatgccccgctcaagccggaagaactggccgcagccggcctggcgcagtttccctcggtgatcggcggcgtggtgccggtggtcaacgtgccgggcgtggccgccggtgcgctcaagctggacggcaagaccctgggcgacatcttcctgggcaaggtcagcacctggaacgatccggccatcgccgcgctcaatccaggcgtgaagctgccggaaggcaagatcaccgtggtgcatcgctccgacggctcgggcaccagcttcaacttcaccaactacctgtccaaggtcaatccggactggaagagcaaggtgggcgaaggcactgccgtgcagtggccgaccggtatcggcggcaagggcaacgagggcgtcgctgcctacgtgaagcagatcaagggcggcatcggctacgtcgagctgtcgtacgcgctgcagaacaagatggcctacaccgcgatgaagaatgctgccggcaagttcgtgcagccgtccgatgaaaccttcgccgccgctgccaacagcgccgattggggcagcagcaaggacttctatctggtgatgaccaatgcggcgggcgacaacgcctggccgatcacggcgaccaattttatcttggtgcagaagaagccgaagaacccgaccggcctgaaaaacacgctggacttcttccgctgggtctacagcaagggcgacgcccaggccaagcagctggactacgtaccgctgccggacgcgctggtgacccagatcgaggcctactgggccacgaatctgcccaaataa

SEQ ID NO: 15297 - protein, 339 aa, Xanthomonas oryzae
MIHSFKTRLAVGVLAASLALCAQAADVTGAGRSFIYPVMSKWSADYNAATKKQVNYQSIGSGGGIAQIKAASVDFGSSDAPLKPEELAAAGLAQFPSVIGGVVPVVNVPGVAAGALKLDGKTLGDIFLGKVSTWNDPAIAALNPGVKLPEGKITVVHRSDGSGTSFNFTNYLSKVNPDWKSKVGEGTAVQWPTGIGGKGNEGVAAYVKQIKGGIGYVELSYALQNKMAYTAMKNAAGKFVQPSDETFAAAANSADWGSSKDFYLVMTNAAGDNAWPITATNFILVQKKPKNPTGLKNTLDFFRWVYSKGDAQAKQLDYVPLPDALVTQIEAYWATNLPK

SEQ ID NO: 15298 - DNA, 1122 bp, Mycobacterium smegmatis
  CDS (1)..(1122): transl_table=11
atgggccggaaggttggcaggccggttggtatcgccgcggcggccatcgcggcgctcacgctcagcgcgtgcggcagcgacaacaacgctccggccaccggcacctccggcgcggccccctccggcagcgccgcctcggccgagtgcggtggcaagaactcgctgacggccgaggggtcgaccgcgcaacagaacgcgatcgccgagttcaacaaggcgtggggccaggtgtgcgggggcaagaacctctcctacaaccccaccggatccggcgcgggccgcgagcagttcatcgccaagcaggtcgacatcgcgggttctgactccgcgctcagcggtgatcaggtggcggccgcggccgaacgctgcggtggcaatccggcctggaacctgccgctggtgttcggtccggtggcgatggcgtacaacctcgagggcgtcgacaagctggtactcaacggcgacctgctggccaagatcttccaaggccagatcaccaagtggaacgatccggcgatcgcggggctcaacgagggcacctcgctgcccgacgccgcgatcacacccatctaccgctcggattcctccggcaccaccgacaacttccagaagtacctcactgccgccgcgccgcagtcgtggaccaagggtgacggcagcgagttcaacggcggcgcaggcgagggcgcccagaagtcgtcgggcgtggtgcaggccgtgcaggcgacgccgggttcgatcggctacgtcgagaagggcttcgccgagcaggcgggcctgcccttcgcgcagatcgacagcggtgccggtgcggtcgagctgaccgacgagtcggccgcaaaggccatcgacgccgcgaagttcgcggccgagggcaacgaccttgcactcgacctgaactcgctgtacggcacgaaggaggccggcgcgtacccgctggtgctcgccacctacgagatcgtgtgctccaagggttatgacgccgacaccgcggccgcggtgaagtcgttcctgaccgtcgccgccaacgaggggcaggccaacctctcggccgccggctatgtgccgctgcccaacgccttcaaagagcgtttgctcacttccatcgatgcgatcagctag

SEQ ID NO: 15299 - protein, 373 aa, Mycobacterium smegmatis
MGRKVGRPVGIAAAAIAALTLSACGSDNNAPATGTSGAAPSGSAASAECGGKNSLTAEGSTAQQNAIAEFNKAWGQVCGGKNLSYNPTGSGAGREQFIAKQVDIAGSDSALSGDQVAAAAERCGGNPAWNLPLVFGPVAMAYNLEGVDKLVLNGDLLAKIFQGQITKWNDPAIAGLNEGTSLPDAAITPIYRSDSSGTTDNFQKYLTAAAPQSWTKGDGSEFNGGAGEGAQKSSGVVQAVQATPGSIGYVEKGFAEQAGLPFAQIDSGAGAVELTDESAAKAIDAAKFAAEGNDLALDLNSLYGTKEAGAYPLVLATYEIVCSKGYDADTAAAVKSFLTVAANEGQANLSAAGYVPLPNAFKERLLTSIDAIS

SEQ ID NO: 15300 - DNA, 1113 bp, Mycobacterium tuberculosis
  CDS (1)..(1113): transl_table=11
atgaaactcaaccgatttggtgccgccgtaggtgtcctggctgcgggtgcgctggtgttgtccgcgtgtggtaacgacgacaatgtgaccgggggaggtgcaaccactggccaggcgtcggcgaaggtcgattgcggggggaagaagacactcaaagccagtgggtcgacggcgcaggccaacgcgatgacccgctttgtcaacgtgttcgagcaggcctgccccggccaaaccctgaactacacggccaatggttcgggcgctggaatcagcgaatttaatggcaaccaaaccgatttcggtggctcagatgtacccctgagcaaggacgaggccgcagcggcgcagcggcgttgcggctcgccggcgtggaatctgccggtggtgttcggcccgatcgcggttacctacaacctcaacagcgtttcctcgctaaatttggacggccccacgttggcgaagatcttcaacggctccattacgcagtggaacaatcccgcgatccaggcgctgaaccgcgacttcacgctgccaggtgagcggattcacgtggtgttccgcagcgatgagtcggggaccacggacaacttccagaggtacctgcaggccgcgtccaacggtgcgtggggtaagggcgctggaaagtcgttccaagacggcgtcggtgagggcgcgcggggtaacgatggcacgtcagcggccgcgaagaacaccccggggtcgatcacctacaacgagtggtcgttcgcccaggcgcaccacctgaccatggccaacatcgtcacttcggctggtggggacccggtggcgattactatcgactcggtcggccagacgatcgccggggccaccatctccggggtgggcaacgacctggtgctcgacacggactcgttctaccggccgaagcgtcccggctcctatccgatcgtgttagcgacatacgaaatcgtttgctcgaagtatcccgactcgcaggttggcacggctgtgaaggcgttcctgcagagcactatcggcgccggtcaaagcggcctgggggacaacggatacatcccaattccggacgagttcaaatcgaggctgtcgactgcggtcaacgcgatcgcctga

SEQ ID NO: 15301 - protein, 370 aa, Mycobacterium tuberculosis
MKLNRFGAAVGVLAAGALVLSACGNDDNVTGGGATTGQASAKVDCGGKKTLKASGSTAQANAMTRFVNVFEQACPGQTLNYTANGSGAGISEFNGNQTDFGGSDVPLSKDEAAAAQRRCGSPAWNLPVVFGPIAVTYNLNSVSSLNLDGPTLAKIFNGSITQWNNPAIQALNRDFTLPGERIHVVFRSDESGTTDNFQRYLQAASNGAWGKGAGKSFQDGVGEGARGNDGTSAAAKNTPGSITYNEWSFAQAHHLTMANIVTSAGGDPVAITIDSVGQTIAGATISGVGNDLVLDTDSFYRPKRPGSYPIVLATYEIVCSKYPDSQVGTAVKAFLQSTIGAGQSGLGDNGYIPIPDEFKSRLSTAVNAIA

SEQ ID NO: 15302 - DNA, 1041 bp, Edwardsiella tarda
  CDS (1)..(1041): transl_table=11
atgaaactgatgcgtaccgctgtcgctgggattgtcgccgcgaccgtctccttgagtgccaccccggccttcgccgctgagagcctgacaggtgccggcgctaccttcccggcgccggtttatgccaagtgggccgattcctaccagaaagaaaccggtaacaaagtgaattatcaaggtattggttcttctggcggcgtgaagcagatcatcgcgaacaccgtcgatttcggtgcctccgatgcaccgctaagcgatgagaagctggcggccgacggtctgtttcaattccctaccgtgatcggtggggtcgtgatggcagtgaacctaccgggggtgaagtcgggtgagttgacattagatggtgagacgctgggcgacatctacctgggtaagattaagaagtggaatgacgcggcgatcgccaaactcaatccgggcgttaaactgccggatcagaatattgccgtggtgcggcgtgcggatggttccggtacctctttcgtctttaccagctacttgagcaaagttaatccgcaatggaaggccgatgttggtgccggttcgacggtgaattggccgaccggtttagggggtaagggcaatgacggcgtcgccgcttttgtccagcgtctgccgggctctattggctacgtcgagtatgcctacgctaaacagaataagttggcgtacaccaaactggtttctgctgatggtcaagcggttagcccgacggaggtcagcttcagcaatgcggctaaaggggccgattggagccgctctttcgctcaggatctgacgaaccaggcgggcgataatgtatggccgatcacctcgacgacgtttattctggtgcataaggcatcgaccaagccaaagcagacggctgaggtactgaagttcttcgattgggcctataacgatggcgccaagcaggccaatgcattggattatgccaccttacccgcgtccgtggtggagcagatccgcgcggcctggaagacgagcgtcaaggatagcggcggtaacgccctgtattga

SEQ ID NO: 15303 - protein, 346 aa, Edwardsiella tarda
MKLMRTAVAGIVAATVSLSATPAFAAESLTGAGATFPAPVYAKWADSYQKETGNKVNYQGIGSSGGVKQIIANTVDFGASDAPLSDEKLAADGLFQFPTVIGGVVMAVNLPGVKSGELTLDGETLGDIYLGKIKKWNDAAIAKLNPGVKLPDQNIAVVRRADGSGTSFVFTSYLSKVNPQWKADVGAGSTVNWPTGLGGKGNDGVAAFVQRLPGSIGYVEYAYAKQNKLAYTKLVSADGQAVSPTEVSFSNAAKGADWSRSFAQDLTNQAGDNVWPITSTTFILVHKASTKPKQTAEVLKFFDWAYNDGAKQANALDYATLPASVVEQIRAAWKTSVKDSGGNALY

SEQ ID NO: 15304 - DNA, 636 bp, Edwardsiella tarda
  CDS (1)..(636): transl_table=11
atgaaactgatgcgtaccgctgtcgccgggattgtcaccgcgaccgtctccctgagcgccatgcctgcctttgcggcggagagcctgacaggtgccggcgccaccttccctgcgccggtttacgccaagtgggcagactcctatcagaaagagaccggtaataaagtaaactatcaaggcattggctcctccggcggtgtgaagcagatcattgctaacaccgttgacttcggcgcctccgatgcgcccctgagcgaagaaaagctggcggcggacggcctatttcagtttccgacggttatcggcggcgtggtgatggccgttaacctgccgggtattacgtcgggcgagctgacgttggacggtgaaacgctgggtgatatctacctgggtaaaattaagaagtggaacgacgcggcaatcgctaagctgaacccgggggttaaactgccggatcaggcgattgccgtggtgcgccgcgccgatggttctggcacctcgtttgtctttaccagctacctgaacaaagtcaacgcacagtggaagagtgacgtcggcgccggctccaccgttaactggccgacgggcctgggtggaaaaggtaacgatggcgttgccgcctttgtacagcgttag

SEQ ID NO: 15305 - protein, 211 aa, Edwardsiella tarda
MKLMRTAVAGIVTATVSLSAMPAFAAESLTGAGATFPAPVYAKWADSYQKETGNKVNYQGIGSSGGVKQIIANTVDFGASDAPLSEEKLAADGLFQFPTVIGGVVMAVNLPGITSGELTLDGETLGDIYLGKIKKWNDAAIAKLNPGVKLPDQAIAVVRRADGSGTSFVFTSYLNKVNAQWKSDVGAGSTVNWPTGLGGKGNDGVAAFVQR

SEQ ID NO: 15306 - DNA, 945 bp, Edwardsiella tarda
  CDS (1)..(945): transl_table=11
atgaaactgatgcgtaccgctgtcgccgggattgtcgccgcgaccgtctccctgagcgccatgcctgcctttgcggcggagagcctgacaggtgccggcgccaccttccctgcgccggtttacgccaagtgggcagactcctatcagaaagagaccggtaataaagtaaactatcaaggcattggctcctccggcggtgtgaagcagatcattgctaacaccgttgacttcggcgcctccgatgcgcccctgagcgaagaaaagctggcggcggacggcctatttcagtttccgacggttatcggcggcgtggtgatggccgttaacctgccgggtattacgtcgggcgagctgacgttggacggtgaaacgctgggtgatatctacctgggtaaaattaagaagtggaacgacgcggcaatcgctaagctgaacccgggggttaaactgccggatcaggcgattgccgtggtgcgccgcgccgatggttctggcacctcgtttgtctttaccagctacctgaacaaagtcaacgcacagtggaagagtgacgtcggcgccggctccaccgttaactggccgacgggcctgggtggaaaaggtaacgatggcgttgccgcctttgtacagcgtctgccgggcgccatcggctacgtcgagtatgcctatgccaagcagaataagctggcctacaccaagctgatctcctccgaggggcaggcggtcagtccgacggaggtcagcttcagcaatgcggcaaaaggcgccgactggagcgcatctttcgctcaggatctgacgaatcagcccggcgataacgtatggccgatcacctcgaccaccttcattctggttcataaagaatccagcaagcctaagcaaacggcagaggtgctgaagttcttcgattgggcctacagtaaaggggctaagcaggctaactag

SEQ ID NO: 15307 - protein, 314 aa, Edwardsiella tarda
MKLMRTAVAGIVAATVSLSAMPAFAAESLTGAGATFPAPVYAKWADSYQKETGNKVNYQGIGSSGGVKQIIANTVDFGASDAPLSEEKLAADGLFQFPTVIGGVVMAVNLPGITSGELTLDGETLGDIYLGKIKKWNDAAIAKLNPGVKLPDQAIAVVRRADGSGTSFVFTSYLNKVNAQWKSDVGAGSTVNWPTGLGGKGNDGVAAFVQRLPGAIGYVEYAYAKQNKLAYTKLISSEGQAVSPTEVSFSNAAKGADWSASFAQDLTNQPGDNVWPITSTTFILVHKESSKPKQTAEVLKFFDWAYSKGAKQAN

SEQ ID NO: 15308 - DNA, 1137 bp, Streptomyces griseus subsp
  CDS (1)..(1137): transl_table=11
gtgaagcttcagcgcaagaaccggcttcgtgccaccgcgctcggtgccctcgccgtctccggcgccctggtcctcacggcgtgcggttcggacgacaacaccggtggcggtacggccgggacgggcgagaagacgaccgccgcgtcgaacgtcgactgcggcaaggccaagggccagctgcgcgcctccggctccagcgctcagaagaacgccatggacctctgggtcaagaactacatggccgcctgctccggcgtggagatcaactacaactcctcctcctccggcgagggcatcgtcgccttcaaccagggcaccgtcggcttcgccggctccgactcggcgctgaagcccgaagaggtcgccgactccaagaagatgtgcaagaccggccagggcatcaacctcccgatggtcggcggcccggtcgcgatcggcttccacctggaaggcgtcgacgccctcacgctggacgccccgaccctcgccaagatcttcgacagcaagatcaagaagtggaacgacccggcgatcgccaagctgaacgacggcgtgaagctgccggacaaggcgatccaggccttccaccgctccgaggactccggcaccacgcagaacctcggcaagtacctcggcgcggccgccccgagcgactggaagtacgaggccgagaagaagtggccggcccccggtggccaggccgcgtccggctcctccggcgtcgccgcccaggtcaagcaggtcgacggcgcgatcggctacttcgagctctcctacgccaagtcccagtccatcccgaccgtggacatcaacaccggtggcgccaccccggtgaaggccacctcggagaacgcctccaaggccatcgccgccgccaagatcaagggcaccggcaaggacctggcgctcgacctcgactacaccaccaaggccgagggcgcctacccgctggtcctggtgacgtacgaggtcgtctgcgacaccggcaacaagcccgagacgctcgacaccgtcaagtccttcctctcctacaccgcctccgacgacggccagaagatcctgaccgacgccggctacgccccgatcccggccgagatcaacgccaaggtccgcgagaccatcggctccctctcgtaa

SEQ ID NO: 15309 - protein, 378 aa, Streptomyces griseus subsp
MKLQRKNRLRATALGALAVSGALVLTACGSDDNTGGGTAGTGEKTTAASNVDCGKAKGQLRASGSSAQKNAMDLWVKNYMAACSGVEINYNSSSSGEGIVAFNQGTVGFAGSDSALKPEEVADSKKMCKTGQGINLPMVGGPVAIGFHLEGVDALTLDAPTLAKIFDSKIKKWNDPAIAKLNDGVKLPDKAIQAFHRSEDSGTTQNLGKYLGAAAPSDWKYEAEKKWPAPGGQAASGSSGVAAQVKQVDGAIGYFELSYAKSQSIPTVDINTGGATPVKATSENASKAIAAAKIKGTGKDLALDLDYTTKAEGAYPLVLVTYEVVCDTGNKPETLDTVKSFLSYTASDDGQKILTDAGYAPIPAEINAKVRETIGSLS

SEQ ID NO: 15310 - DNA, 1017 bp, Burkholderia sp
  CDS (1)..(1017): transl_table=11
atgaatctgttcaaaacgctggccatcggctttgccgcttcctgctataccctgcccgtgcacacggctgagattactggcgcgggcagtactttcgccgccccggtctatgcgcaatgggcgcacgcataccggaaagccagcggcgtcaaagtgaattatcagggaatcggctcatccgctggcctcaagcaaatcatcgcaaaaaccgttgattttgcggcgagcgatacgcccttgacggcgaatgcattatccaaggccggtctgcttcagtttccgaccatcgccggcggcgttgtaccggtggtgaatgttcctggtatccagccaggcgaaatggttctgagcggtcaggtattaggcgatatttatctgggcaaaatcacaaaatggaacgaccctgaaatcatcaaactcaatccggcgctgcacacacgcgcccggctgcccgatctcacgattgccgtggtgcggcgcgcggacggctcgggcaccagcgcgctctggacccattatttatcgcagaccaacgcgcaatggaaaaagaccgttggcgaaggcgcaaccgtcagctggccggcgggcatcgggggaaaaggaaatgacggcgtcgccgccttcgttgggcgtctgaaaggcgcaatcggttatatcgagtggtcctatgccaagcaaaacaagatatcctatgtcaggctgcgcaatccggagggcgcgatcgtggcgcccaacgtgcatacctttaaagcggccttggagcgcatagactggacaaaatcctctgaacctatggccccgattccgcgacaaaacgcctggccgattgtgggccttacttttgcgctcctgcatgcgacgcagccggtctcccagaacgccgcgcaggctttgaaattttttgactggtctttcagaaacggcgcacagctcgcaagcgatctcggttatataatgctgcccgcaacagccatcgatcaggtgcgtatacgatggccaatacgccttgaaaattag

SEQ ID NO: 15311 - protein, 338 aa, Burkholderia sp
MNLFKTLAIGFAASCYTLPVHTAEITGAGSTFAAPVYAQWAHAYRKASGVKVNYQGIGSSAGLKQIIAKTVDFAASDTPLTANALSKAGLLQFPTIAGGVVPVVNVPGIQPGEMVLSGQVLGDIYLGKITKWNDPEIIKLNPALHTRARLPDLTIAVVRRADGSGTSALWTHYLSQTNAQWKKTVGEGATVSWPAGIGGKGNDGVAAFVGRLKGAIGYIEWSYAKQNKISYVRLRNPEGAIVAPNVHTFKAALERIDWTKSSEPMAPIPRQNAWPIVGLTFALLHATQPVSQNAAQALKFFDWSFRNGAQLASDLGYIMLPATAIDQVRIRWPIRLEN

SEQ ID NO: 15312 - DNA, 1107 bp, Pseudomonas aeruginosa
  CDS (1)..(1107): transl_table=11
atgttcaagcgctctctgatcgctgcctcgctgagcgtggccgccctcgtatccgcccaagccatggccgtcaccggcggtggcgcttccctgccggccgagctgtacaaaggctccgccgacagcatcctgccggccaacttcagctatgccgtgaccggcagcggcaccggcaagaacgctttcctgaccaacaactcctcgctgttcggcaccaccggtaccgttcactatgccggtagcgactcggtcctcagcggtagcgaactgaccacctacaacagcaactacaacggcacctacggtccgctgatccagatcccgtcggtagccacctcggtcaccgtgccctatcgcaaggacggcaacaccacgctcaacctgaccagcgcccaactctgcgacgccttctccggcgccaagaccacctggggtcaactgctgggcaccaccgacagcacgccgatccgcatcgtctatcgcaccggtagcagcggcaccaccgaactgttcacccgccacctgaactcgatctgcccgactcgcttcgccaccaactcgacctttaccaacgcccgtctgccggccggcggtacgttgccgagcaactgggttggcgtcgccgccacttccaccgtggtgtcgaccgtcaaggcaaccaacggctccctcggctatgtcagcccggatgcggtgaacatcaacagcaacgccgaggtttcccgtgtgaacggcaacctgccgacccaggctaacgtttccactgccctgggcagcgtggctccgccggccaacgccgccgaccgtgcggaccccagcaagtgggttccggtgttcaccaatccgagcgccggctactccatcgtcggttacaccaacttcgtcttcggccagtgctacaaggacgccagcgtttccaccgacgtccgcgccttcatcaacaagcactacggtggcactaccaccaacgccgcagttgccgcccatggcttcatcccgctgactccggcctggaagagcgccatcgtgagcgccttctacaccggcaccagcgaaaacctggccatcggcaacaccaacgtctgcaacaccaaaggccgcccgtaa

SEQ ID NO: 15313 - protein, 368 aa, Pseudomonas aeruginosa
MFKRSLIAASLSVAALVSAQAMAVTGGGASLPAELYKGSADSILPANFSYAVTGSGTGKNAFLTNNSSLFGTTGTVHYAGSDSVLSGSELTTYNSNYNGTYGPLIQIPSVATSVTVPYRKDGNTTLNLTSAQLCDAFSGAKTTWGQLLGTTDSTPIRIVYRTGSSGTTELFTRHLNSICPTRFATNSTFTNARLPAGGTLPSNWVGVAATSTVVSTVKATNGSLGYVSPDAVNINSNAEVSRVNGNLPTQANVSTALGSVAPPANAADRADPSKWVPVFTNPSAGYSIVGYTNFVFGQCYKDASVSTDVRAFINKHYGGTTTNAAVAAHGFIPLTPAWKSAIVSAFYTGTSENLAIGNTNVCNTKGRP

SEQ ID NO: 15314 - DNA, 1125 bp, Mycobacterium tuberculosis
  CDS (1)..(1125): transl_table=11
gtgaaaattcgtttgcatacgctgttggccgtgttgaccgctgcgccgctgctgctagcagcggcgggctgtggctcgaaaccaccgagcggttcgcctgaaacgggcgccggcgccggtactgtcgcgactacccccgcgtcgtcgccggtgacgttggcggagaccggtagcacgctgctctacccgctgttcaacctgtggggtccggcctttcacgagaggtatccgaacgtcacgatcaccgctcagggcaccggttctggtgccgggatcgcgcaggccgccgccgggacggtcaacattggggcctccgacgcctatctgtcggaaggtgatatggccgcgcacaaggggctgatgaacatcgcgctagccatctccgctcagcaggtcaactacaacctgcccggagtgagcgagcacctcaagctgaacggaaaagtcctggcggccatgtaccagggcaccatcaaaacctgggacgacccgcagatcgctgcgctcaaccccggcgtgaacctgcccggcaccgcggtagttccgctgcaccgctccgacgggtccggtgacaccttcttgttcacccagtacctgtccaagcaagatcccgagggctggggcaagtcgcccggcttcggcaccaccgtcgacttcccggcggtgccgggtgcgctgggtgagaacggcaacggcggcatggtgaccggttgcgccgagacaccgggctgcgtggcctatatcggcatcagcttcctcgaccaggccagtcaacggggactcggcgaggcccaactaggcaatagctctggcaatttcttgttgcccgacgcgcaaagcattcaggccgcggcggctggcttcgcatcgaaaaccccggcgaaccaggcgatttcgatgatcgacgggcccgccccggacggctacccgatcatcaactacgagtacgccatcgtcaacaaccggcaaaaggacgccgccaccgcgcagaccttgcaggcatttctgcactgggcgatcaccgacggcaacaaggcctcgttcctcgaccaggttcatttccagccgctgccgcccgcggtggtgaagttgtctgacgcgttgatcgcgacgatttccagctag

SEQ ID NO: 15315 - protein, 374 aa, Mycobacterium tuberculosis
MKIRLHTLLAVLTAAPLLLAAAGCGSKPPSGSPETGAGAGTVATTPASSPVTLAETGSTLLYPLFNLWGPAFHERYPNVTITAQGTGSGAGIAQAAAGTVNIGASDAYLSEGDMAAHKGLMNIALAISAQQVNYNLPGVSEHLKLNGKVLAAMYQGTIKTWDDPQIAALNPGVNLPGTAVVPLHRSDGSGDTFLFTQYLSKQDPEGWGKSPGFGTTVDFPAVPGALGENGNGGMVTGCAETPGCVAYIGISFLDQASQRGLGEAQLGNSSGNFLLPDAQSIQAAAAGFASKTPANQAISMIDGPAPDGYPIINYEYAIVNNRQKDAATAQTLQAFLHWAITDGNKASFLDQVHFQPLPPAVVKLSDALIATISS

SEQ ID NO: 15316 - DNA, 1113 bp, Mycobacterium tuberculosis
  CDS (1)..(1113): transl_table=11
gtgaagttcgcccgatccggcgcagcggtaagcctgttggccgccggcacactggtgttgacagcatgcggcggtggcaccaacagctcgtcgtcaggcgcaggcggcacgtctgggtcggtgcactgcggcggcaagaaggagctccactccagcggctcgaccgcacaagaaaatgccatggagcagttcgtctatgcctacgtgcgatcgtgcccgggctacacgttggactacaacgccaacgggtccggtgccggggtgacccagtttctcaacaacgaaaccgatttcgccggctcggatgtcccgttgaatccgtcgaccggtcaacctgaccggtcggcggagcggtgcggttccccggcatgggacctgccgacggtgttcggcccgatcgcgatcacctacaatatcaagggcgtgagcacgctgaatcttgacggacccactaccgccaagattttcaacggcaccatcaccgtgtggaatgatccacagatccaagccctcaactccggcaccgacctgccgccaacaccgattagcgttatcttccgcagcgacaagtccggtacgtcggacaacttccagaaatacctcgacggcgcatccaacggggcgtggggcaaaggcgccagcgaaacgttcaacgggggcgtcggcgtcggcgccagcgggaacaacggcacgtcggccctactgcagacgaccgacgggtcgatcacctacaacgagtggtcgtttgcggtgggtaagcagttgaacatggcccagatcatcacgtcggcgggtccggatccagtggcgatcaccaccgagtcggtcggcaagacaatcgccggggccaagatcatgggacaaggcaacgacctggtattggacacgtcgtcgttctacaggcccacccagcctggctcttacccgatcgtgctggcgacctatgagatcgtctgctcgaaatacccggatgcgacgaccggtactgcggtaagggcgtttatgcaagccgcgattggtccaggccaagaaggcctggaccaatacggctccattccgttgcccaaatcgttccaagcaaaattggcggccgcggtgaatgctatttcttga

SEQ ID NO: 15317 - protein, 370 aa, Mycobacterium tuberculosis
MKFARSGAAVSLLAAGTLVLTACGGGTNSSSSGAGGTSGSVHCGGKKELHSSGSTAQENAMEQFVYAYVRSCPGYTLDYNANGSGAGVTQFLNNETDFAGSDVPLNPSTGQPDRSAERCGSPAWDLPTVFGPIAITYNIKGVSTLNLDGPTTAKIFNGTITVWNDPQIQALNSGTDLPPTPISVIFRSDKSGTSDNFQKYLDGASNGAWGKGASETFNGGVGVGASGNNGTSALLQTTDGSITYNEWSFAVGKQLNMAQIITSAGPDPVAITTESVGKTIAGAKIMGQGNDLVLDTSSFYRPTQPGSYPIVLATYEIVCSKYPDATTGTAVRAFMQAAIGPGQEGLDQYGSIPLPKSFQAKLAAAVNAIS

SEQ ID NO: 15318 - DNA, 1110 bp, Mycobacterium avium
  CDS (1)..(1110): transl_table=11
ttgaaactcaaccgatttggtgccgtgctgagcgtcttgagcgccggcgcgctggtgttgtcgggatgcggaagcgataacaacggggctggcgccggcgccgccggctcgtcgtcgagcaaggtgagctgcggtggcaagaaggccctcaaggccagcggctcgaccgcccaggccaacgcgatgacccgattcgtcaacgccttcgaacaggcctgtcccggccagacactgaactacacggccaacggttccggtgccgggatcagcgaattcaacggcaagcaaaccgatttcggtggttccgactcgccgctggcgcccagtgaatacgccgcggcgcagcagcgttgcggctcgccggcctggaatctgccggtggttttcggcccgatcgccatcacctacaacgtcgccgggctgaactcgctgaacctggacggcgcgaccgccgccaaaatcttcaacggcgccatcacgacgtggaatgacccggggatccaggcgctcaaccccggcgttgccctgcccgccgagccgattcacgtcgtcttccgcaacgacgaatccggcaccaccgacaatttccagaaatatctcgatgccgccgccgacggcgcctggggcaagggcgccggcaagaccttcaagggcggcgtcggcgagggagccaagggcaacgacggcacctcggcggcgatcaaggccaccgaagggtccatcacctacaacgagtggtcgttcgctcaggcgcagaagctgaacatggccaagatcatcacgtcggccggtccggacgcggtggcgatcagcgccgactcggtgggcaagacgatcgcgggagccaagatctccggccagggcaacgatctggtgctcgacaccctgtcgttctacaagcccacccaggccgggtcgtacccgatcgtgctggccacctacgagatcgtctgctcgaagtaccccgacccccaggtcggcacggcggtcaaggcgttcctgcagagcaccgtcggcgccggccagaacggtctggccgacaacggctatatcccgatccccgacgccttcaagtcgagactgtctgctgccatcaacgcgatcacctaa

SEQ ID NO: 15319 - protein, 369 aa, Mycobacterium avium
MKLNRFGAVLSVLSAGALVLSGCGSDNNGAGAGAAGSSSSKVSCGGKKALKASGSTAQANAMTRFVNAFEQACPGQTLNYTANGSGAGISEFNGKQTDFGGSDSPLAPSEYAAAQQRCGSPAWNLPVVFGPIAITYNVAGLNSLNLDGATAAKIFNGAITTWNDPGIQALNPGVALPAEPIHVVFRNDESGTTDNFQKYLDAAADGAWGKGAGKTFKGGVGEGAKGNDGTSAAIKATEGSITYNEWSFAQAQKLNMAKIITSAGPDAVAISADSVGKTIAGAKISGQGNDLVLDTLSFYKPTQAGSYPIVLATYEIVCSKYPDPQVGTAVKAFLQSTVGAGQNGLADNGYIPIPDAFKSRLSAAINAIT

SEQ ID NO: 15320 - DNA, 1113 bp, Mycobacterium bovis
  CDS (1)..(1113): transl_table=11
ttgaaactcaaccgatttggtgccgccgtaggtgtcctggctgcgggtgcgctggtgttgtccgcgtgtggtaacgacgacaatgtgaccgggggaggtgcaaccactggccaggcgtcggcgaaggtcgattgcggggggaagaagacactcaaagccagtgggtcgacggcgcaggccaacgcgatgacccgctttgtcaacgtgttcgagcaggcctgccccggccaaaccctgaactacacggccaatggttcgggcgctggaatcagcgaatttaatggcaaccaaaccgatttcggtggctcagatgtacccctgagcaaggacgaggccgcagcggcgcagcggcgttgcggctcgccggcgtggaatctgccggtggtgttcggcccgatcgcggttacctacaacctcaacagcgtttcctcgctaaatttggacggccccacgttggcgaagatcttcaacggctccattacgcagtggaacaatcccgcgatccaggcgctgaaccgcgacttcacgctgccaggtgagcggattcacgtggtgttccgcagcgatgagtcggggaccacggacaacttccagaggtacctgcaggccgcgtccaacggtgcgtggggtaagggcgctggaaagtcgttccaaggcggcgtcggtgagggcgcgcggggtaacgatggcacgtcagcggccgcgaagaacaccccggggtcgatcacctacaacgagtggtcgttcgcccaggcgcagcacctgaccatggccaacatcgtcacttcggctggtggggacccggtggcgattactatcgactcggtcggccagacgatcgccggggccaccatctccggggtgggcaacgacctggtgctcgacacggactcgttctaccggccgaagcgtcccggctcctatccgatcgtgttagcgacatacgaaatcgtttgctcgaagtatcccgactcgcaggttggcacggctgtgaaggcgttcctgcagagcactatcggcgccggtcaaagcggcctgggggacaacggatacatcccaattccggacgagttcaaatcgaggctgtcgactgcggtcaacgcgatcgcctga

SEQ ID NO: 15321 - protein, 370 aa, Mycobacterium bovis
MKLNRFGAAVGVLAAGALVLSACGNDDNVTGGGATTGQASAKVDCGGKKTLKASGSTAQANAMTRFVNVFEQACPGQTLNYTANGSGAGISEFNGNQTDFGGSDVPLSKDEAAAAQRRCGSPAWNLPVVFGPIAVTYNLNSVSSLNLDGPTLAKIFNGSITQWNNPAIQALNRDFTLPGERIHVVFRSDESGTTDNFQRYLQAASNGAWGKGAGKSFQGGVGEGARGNDGTSAAAKNTPGSITYNEWSFAQAQHLTMANIVTSAGGDPVAITIDSVGQTIAGATISGVGNDLVLDTDSFYRPKRPGSYPIVLATYEIVCSKYPDSQVGTAVKAFLQSTIGAGQSGLGDNGYIPIPDEFKSRLSTAVNAIA

SEQ ID NO: 15322 - DNA, 1110 bp, Mycobacterium leprae
  CDS (1)..(1110): transl_table=11
ttgaagctcaaccagtttggtgccgcgattgggctcctggctactggtgcgctgttgtcgggctgcggcagcgacaacaacgcagctgtaggaagtgcacggacaggcccatcgtcaggccaggtgagctgcggtgggaagccgacactgaaagctagcgggtcgacagcccaggccaacgcgatgacccgctttgttaatgcgttcgaacggtcatgtccaggacagacgttgaactatacggctaatggttccggtgcgggggttagcgaattcaacggtaatcaaacagatttcggtggctcagactcaccgttgagtaggaaggagtatgccgcagcagagcaacgttgtggctcgcaggcgtggaatttaccggtggtcttcggccccatcgcgatcacttacaacgtgaacggcctgagttcactgaacctggacggtccgacaaccgcgaagatcttcaatggttccatcgccagttggaacgatcccgcgatccaagcgctgaacactggcgtcgcccttccggctgagccgattcatgtcgtgttccgcaacgacgagtccggtaccacggataatttccagaggtaccttgacgtcgcatcaaacggtgagtggggcaaaggtatcggcaagacctttaaaggcggtgttggtgagggtgccaagggcaatgacggtacgtcggcggccgtcaagtccactgaagggtcgatcacctacaacgaatggtcgttcgcttcggcgcggaagctgaacacggccaagatcgccacgtcggccgatccagaacccattgcgatcagcgtcgactcggtcggcaagacaatttctggggctacgatcattggagagggtaacgatttagtgcttgacacggtctcgttttacaagccggctcagcccggctcctacccaatcgtgctggcgacctacgagattgtctgctcgaagtatcccgatgcccaggtcggtagggctgtgaaggcattcctgcagagcaccatcggtggaggccagaatggcctaggggacaacggatatgtacctattccggattctttcaaatccagattgtcgactgcggctaatgccatcgcttga

SEQ ID NO: 15323 - protein, 369 aa, Mycobacterium leprae
MKLNQFGAAIGLLATGALLSGCGSDNNAAVGSARTGPSSGQVSCGGKPTLKASGSTAQANAMTRFVNAFERSCPGQTLNYTANGSGAGVSEFNGNQTDFGGSDSPLSRKEYAAAEQRCGSQAWNLPVVFGPIAITYNVNGLSSLNLDGPTTAKIFNGSIASWNDPAIQALNTGVALPAEPIHVVFRNDESGTTDNFQRYLDVASNGEWGKGIGKTFKGGVGEGAKGNDGTSAAVKSTEGSITYNEWSFASARKLNTAKIATSADPEPIAISVDSVGKTISGATIIGEGNDLVLDTVSFYKPAQPGSYPIVLATYEIVCSKYPDAQVGRAVKAFLQSTIGGGQNGLGDNGYVPIPDSFKSRLSTAANAIA

SEQ ID NO: 15324 - DNA, 1170 bp, Methanococcus jannaschii
  CDS (1)..(1170): transl_table=11
ttgaatgacaccacacaacctacaaaaggtgatgctgtgaaaaaaatattggcattaatattggggctgtgtttaatagtcccagtaatttcaatagctggatgtgttggtggaggtaattctcaaccgtcaaataatgaaaaaccaagtaccataataattaggactacaggggcaacattcccaaaataccaaatccagaaatggattgaagattatcaaaaaacccatcctaatgtcaagattgagtatgagggaggaggttcaggatacgggcaagaggcatttgcaaaaggtttaactgatattggaagaactgaccctccagttaaagaaagcatgtggaagaaattcttatcaacaggagaccaaccattacaattcccagaaattgttggtgctgtggttgtaacctacaacatcccagaaattggagataaaactttaaaattgagtagggatgttttagctgatatattcttaggtaagattgaatactgggacgatgaaagaattaaaaaaataaacccagaaattgctgataaactcccacatgagaagattatcgttgttcatagaagtgacgcaagtggaacaaccgccatatttacaacatatctaagcttaattagtaaggaatgggctgaaaaagttggagctggaaaaactgttaattggccaactgataatataggcaggggagtcgctggaaaaggaaatccaggtgttgtagcaatagtgaaatcaacgccttatacagttgcatatactgagctttcatatgcaatagaacaaaaacttccagttgcagcattagaaaacaaaaatggtaaatttgttaaaccaacagatgaaacaataaaagcagcagtttcagcagttaaggcaagtattccaaacccaacagaaggatacaaagaggatttaaagcagatgttggatgcccctggagacaatgcctatccaatagttgcattcacacacttattagtttgggaaaacaaaaatggtaagcactactctccagaaaaagctaaagctataaaagatttcttaacatgggtattaacagaagggcagaaaccagagcatttagctccaggttatgtaggattaccagaagatgttgctaagattggattaaatgctgtaaatatgataaaagaataa

SEQ ID NO: 15325 - protein, 389 aa, Methanococcus jannaschii
MNDTTQPTKGDAVKKILALILGLCLIVPVISIAGCVGGGNSQPSNNEKPSTIIIRTTGATFPKYQIQKWIEDYQKTHPNVKIEYEGGGSGYGQEAFAKGLTDIGRTDPPVKESMWKKFLSTGDQPLQFPEIVGAVVVTYNIPEIGDKTLKLSRDVLADIFLGKIEYWDDERIKKINPEIADKLPHEKIIVVHRSDASGTTAIFTTYLSLISKEWAEKVGAGKTVNWPTDNIGRGVAGKGNPGVVAIVKSTPYTVAYTELSYAIEQKLPVAALENKNGKFVKPTDETIKAAVSAVKASIPNPTEGYKEDLKQMLDAPGDNAYPIVAFTHLLVWENKNGKHYSPEKAKAIKDFLTWVLTEGQKPEHLAPGYVGLPEDVAKIGLNAVNMIKE

SEQ ID NO: 15326 - DNA, 1035 bp, Pasteurella multocida
  CDS (1)..(1035)
atgacaaaacgtgcaatgcttttggctattctattcagtacatttgctttgacgacgcaggcacaaaccattactggcgcgggcgcttcttttccttatccaatctatgccaaatgggcatccatgtatgaaaaacaaacaggtaacaaagtcaactatcaatcaattggctcggggggcggtcagcaacaaattatcgccaaaaccattgattttggtgcctcagatgatccgatgaaagcagaacttttagcacaacatcaattattacaatttccagccattatcggtggcacagtgcctgtcgtgaatttaccagaaatcaccgccggacagcttaaactttctggtgaagttctcgccgatattttcttaggcaaaattaaaaagtggaatgatcccgctatcgccaaattaaaccaaggggctaatttacccgataaagccattatcgtcgtacatcgttctgacggttcaggcaccacattcggttggactaattatctttctaaagtatcgactgaatggaaagaaacagtcggtcaaggtaaatcagtcaaatggcctacgggacaaggcggcaaaggtaacgaaggcgtggctgcttatgtcagcaaaatcaaatattcgattggttatgtggaatatgcgtacgcgaaacaaaaccagctcgcttgggcgtcattacaaaataaagccgggcaatttgtacagccctcagcagaaagttttatggcagctgccgccaatgcacaatgggaaagtgcggtcggtatgggcgtcattttaaccaatgaagaaggcgatacatcttggccagtcaccgcagcaagtttcatcttattgcataagcatgcagaaaagccagaaatcaccaaagctgtctttgatttctttgactgggcattcaagcaaggcaaagtcgcagcaaccgagcttgattatgtgcctctgcctgaggaagttattcagaaaattcaagcgcaatggaaaaccgaggtgaagtccagtgatggcaaaacactttggcaataa

SEQ ID NO: 15327 - protein, 344 aa, Pasteurella multocida
MTKRAMLLAILFSTFALTTQAQTITGAGASFPYPIYAKWASMYEKQTGNKVNYQSIGSGGGQQQIIAKTIDFGASDDPMKAELLAQHQLLQFPAIIGGTVPVVNLPEITAGQLKLSGEVLADIFLGKIKKWNDPAIAKLNQGANLPDKAIIVVHRSDGSGTTFGWTNYLSKVSTEWKETVGQGKSVKWPTGQGGKGNEGVAAYVSKIKYSIGYVEYAYAKQNQLAWASLQNKAGQFVQPSAESFMAAAANAQWESAVGMGVILTNEEGDTSWPVTAASFILLHKHAEKPEITKAVFDFFDWAFKQGKVAATELDYVPLPEEVIQKIQAQWKTEVKSSDGKTLWQ

SEQ ID NO: 15328 - DNA, 1056 bp, Rhizobium loti
  CDS (1)..(1056): transl_table=11
atgagacatttcatccgctcggcggccgttgcgatcgcaatggctacagcgtctaccttcaccctttccgcagccatcgcagctgacctttccggcgctggctcgaccttcatctatccggtgttcgccaagtgggccgacacctacaagaaggacaccggcgtcggcctcaactatcagtcgatcggttcgggcggcggcatcaagcaggtcatcgccaagaccgtgaccttcggcgccaccgacaagccgatgtccgatgccgatctggaaaagaacggcctcgtgcagttcccgatggtgatgggcggcatcgtgccgatcgtcaacctcaccggcgtcaagccgggcgaactcgtcctcgacggcaagacgctcgcccagatctatctcggcgccatcaccacctgggacgatgccgcgatcaaggcgctgaaccccagcctcaccctgccgtcgaccgcgatcgccgtcgtgcatcgttcggacggctcgggcaccaccttcaacttcaccaactatctggtaaagctctcgcccgactggaaggacaaggtcggttcggacaccgccgtcgaatggccgacgggcgtcggcgccaagggcagcgaaggcgttgccaacaccgtcaagcagacggatggcggcatcggctacgtcgaatacgcctatgccaagcagaacaacctgtcctactccaagatgctgaacgcagccggcaaggtcgtcgagccgtcgctcgaatccttcggcgctgccgcttcgaatgccgacttcaagggcgccaagaacttcaacgtcatcatcaccaacgagcccggcgacaccacctggccgatcgcggcctcgacctgggtcctgatccacaaggctccggatgatgccgctgccaccggcgaagccctgaagttctttgcctgggcctacaaggacggcaaggaaaccgccaaggcgctcgactatgtctcgatccccgacagcgtcgtcgacctgatcaaggcttcgtggaaggccgacatccaggccggcggcaagcccgtctacgccggcgagtaa

SEQ ID NO: 15329 - protein, 351 aa, Rhizobium loti
MRHFIRSAAVAIAMATASTFTLSAAIAADLSGAGSTFIYPVFAKWADTYKKDTGVGLNYQSIGSGGGIKQVIAKTVTFGATDKPMSDADLEKNGLVQFPMVMGGIVPIVNLTGVKPGELVLDGKTLAQIYLGAITTWDDAAIKALNPSLTLPSTAIAVVHRSDGSGTTFNFTNYLVKLSPDWKDKVGSDTAVEWPTGVGAKGSEGVANTVKQTDGGIGYVEYAYAKQNNLSYSKMLNAAGKVVEPSLESFGAAASNADFKGAKNFNVIITNEPGDTTWPIAASTWVLIHKAPDDAAATGEALKFFAWAYKDGKETAKALDYVSIPDSVVDLIKASWKADIQAGGKPVYAGE

SEQ ID NO: 15330 - DNA, 1095 bp, Xylella fastidiosa
  CDS (1)..(1095): transl_table=11
atgaaagtatattttgctggtttcactctcctttgtttatgcactgccgtaacaatcaccggctgtaaaccttccaacgataaccagtcaacaggtgtcagtcaggatgggaacagtacgacgccaccctctgccgagcaaaccaagagtgtgaaaatttcaggcgcaggcgcctcatttatctatccactgatctcgcaatggtcagccgactacaacgccgccactggcaataaaattaactatcagtcaatcggctcaggcggtggtattgcccaaatcaaagccgccacaatcgattttggttcttctgataagccacttgacagcagcgaactgacccaagcgggtctagggcagtttccatcggccataggtggcgtcgtgccggtggtcaatctagacaacatcgaaccaggcaaactacgcctgacaggcccactgcttgcagatattttcctagggaagatcagtaagtggaatgacgcagcaatcatcagcgccaatccggggttacatcttcccgacactaaaatcaacatcgtgcatcgttccgatggctctggcacgacattcaatttcagcaactatctatccaaagtcagcgcggaatggaaacagaaagtgggtgaaggcacttcagtgcagtggcctgggggcgtcggcggtaagggcaacgaaggtgtagcctcatatgttcaacagattaaaggctcaatcggctacgttgaactggcgtatgcgcttcagaacaaaatgtcatatacagcgctccagaacgctgctggtcaatgggtacaaccaagcgcagaaagctttgcagccgccgcatccaacgcagactggagcaatgcaaaggatttcaatttggtcattaccaacgctactggggaagcagcttggccgatcacagcgacaaactttatattgatgcgcaagcaaactaaggatgcagcgcaaagaaaagccactctagacttcttcaagtggtcctttgaaaatgggcagaaacaagccaatgaattgcactatgtgccattgccaccaaatctggtgaagcaaatcgaagcttactgggcaagcgaattcaagtaa

SEQ ID NO: 15331 - protein, 364 aa, Xylella fastidiosa
MKVYFAGFTLLCLCTAVTITGCKPSNDNQSTGVSQDGNSTTPPSAEQTKSVKISGAGASFIYPLISQWSADYNAATGNKINYQSIGSGGGIAQIKAATIDFGSSDKPLDSSELTQAGLGQFPSAIGGVVPVVNLDNIEPGKLRLTGPLLADIFLGKISKWNDAAIISANPGLHLPDTKINIVHRSDGSGTTFNFSNYLSKVSAEWKQKVGEGTSVQWPGGVGGKGNEGVASYVQQIKGSIGYVELAYALQNKMSYTALQNAAGQWVQPSAESFAAAASNADWSNAKDFNLVITNATGEAAWPITATNFILMRKQTKDAAQRKATLDFFKWSFENGQKQANELHYVPLPPNLVKQIEAYWASEFK

SEQ ID NO: 15332 - DNA, 1095 bp, Xylella fastidiosa
  CDS (1)..(1095): transl_table=11
atgaaagtacattttgctggtttcactctcctttgtttatgcactgccgtaacaatcaccggctgtaaaccttccaacgataaccagtcaacaggcgtcagtcaggatgcgaacagtacgacgcccccctctgccgagcaaaccaagagtgtgaagatttcaggcgcaggtgcctcatttatatatccactgatctcgcaatggtcagccgactacaacgccgccactggcaataaaattaactatcagtcaatcggctcaggcggtggtattgcccaaatcaaagccgccacaatcgattttggttcttctgacaagccacttgacagcagcgaactgaccaaagcgggtctagggcagtttccatcggccataggcggcgtcgtgccggtggtcaatctagacaacatcgaaccaggcaaactacgccttacaggccccctgcttgcagatattttcctggggaagatcagtaagtggaatgacgcagcaatcatcagcgccaatccggggttacatcttcccgacactaaaatcaacatcgtgcatcgttccgatggctctggcacgacattcaatttcagcaactatctatcaaaagtcagcgcggaatggaaacagaaagtgggtgaaggcacttcagtgcagtggcccggaggcgtcggcggtaaaggcaacgaaggtgtagcctcatatgttcaacagattaaaggctcgatcggctacgttgaactggcgtatgcgcttcagaacaaaatgtcatatacagcactccagaacgctgctggtcaatgggtacaaccaagcgcagaaagctttgcagccgccgcatccaacgcagactggagcaatgcaaaggatttcaatttggtcatcaccaacgctactggggaaggcgcttggccaatcacagccacaaactttatattgatgcccaagcaaactaaggatgcagcgcaaagaaaagccactctagacttcttcaagtggtgctttgaaaatgggcagaaacaagccaatgaattacactacgtgccattgccaccaaatctggtgaagcaaatcgaagcttattgggcaagcgaattcaagtaa

SEQ ID NO: 15333 - protein, 364 aa, Xylella fastidiosa
MKVHFAGFTLLCLCTAVTITGCKPSNDNQSTGVSQDANSTTPPSAEQTKSVKISGAGASFIYPLISQWSADYNAATGNKINYQSIGSGGGIAQIKAATIDFGSSDKPLDSSELTKAGLGQFPSAIGGVVPVVNLDNIEPGKLRLTGPLLADIFLGKISKWNDAAIISANPGLHLPDTKINIVHRSDGSGTTFNFSNYLSKVSAEWKQKVGEGTSVQWPGGVGGKGNEGVASYVQQIKGSIGYVELAYALQNKMSYTALQNAAGQWVQPSAESFAAAASNADWSNAKDFNLVITNATGEGAWPITATNFILMPKQTKDAAQRKATLDFFKWCFENGQKQANELHYVPLPPNLVKQIEAYWASEFK

SEQ ID NO: 15334 - DNA, 903 bp, Bacillus subtilis
  CDS (1)..(903): transl_table=11
atgaaaaaaaacaaattggtgcttatgcttctgatggctgcttttatgatgattgcagctgcatgcggaaatgcaggagaaagtaaaaaatcgaatagcgattctgcaaaaggagaagaaaaggcatcaggttctttaaccatttctggttcatcggcaatgcagccactagtacttgcagccgcggaaaaatttatggaagaaaaccctgatgctgatatacaggtacaagctggcggttctggaacagggctttctcaagtctctgaaggagctgttcagatcgggaattcagacgtttttgctgaagaaaaagaaggcatcgatgcaaaagcgcttgtcgatcatcaagtcgctgtagttggtatggcagcagctgtaaaccctgatgctggtgtaaaggatatttcaaaagatgaattgaaaaaaatcttcactggcaaaatcaaaaactggaaagagctcggcggcaaagaccaaaagattacacttgtaaaccgccctgattcttccggcacacgtgctacatttgtgaaatatgcgcttgacggagcggagcctgcagaaggcattactgaagattcctccaacacggtgaaaaagatcattgctgatactccgggagcgattggatatcttgcattctcatatttaacagatgacaaagtaactgctctatctattgacggtgttaaacctgaagcgaaaaatgtagcaactggcgagtatccgatctgggcttatcaacattcttatacaaaaggtgaagcgacaggtttagctaaagaatttcttgattatctaaagagtgaagacattcaaaaaagcattgttactgaccaaggctacattccggttactgatatgaaagtgacacgtgatgccaacgggaagcaaagctga

SEQ ID NO: 15335 - protein, 300 aa, Bacillus subtilis
MKKNKLVLMLLMAAFMMIAAACGNAGESKKSNSDSAKGEEKASGSLTISGSSAMQPLVLAAAEKFMEENPDADIQVQAGGSGTGLSQVSEGAVQIGNSDVFAEEKEGIDAKALVDHQVAVVGMAAAVNPDAGVKDISKDELKKIFTGKIKNWKELGGKDQKITLVNRPDSSGTRATFVKYALDGAEPAEGITEDSSNTVKKIIADTPGAIGYLAFSYLTDDKVTALSIDGVKPEAKNVATGEYPIWAYQHSYTKGEATGLAKEFLDYLKSEDIQKSIVTDQGYIPVTDMKVTRDANGKQS

SEQ ID NO: 15336 - DNA, 24 bp, Artificial sequence
  Primer sequence
atgaaagttatgcgtaccaccgtc

SEQ ID NO: 15337 - DNA, 23 bp, Artificial sequence
  Primer sequence
ttagtacagcggcttaccgctac

SEQ ID NO: 15338 - protein, 548 aa, Artificial sequence
  Consensus
  Variant (2)..(4): Xaa in position 2 to 4 is any amino acid
  Variant (18)..(18): Xaa in position 18 is any amino acid
  Variant (25)..(25): Xaa in position 25 is any amino acid
  Variant (28)..(28): Xaa in position 28 is any amino acid
  Variant (34)..(34): Xaa in position 34 is any amino acid
  Variant (38)..(38): Xaa in position 38 is any amino acid
  Variant (58)..(58): Xaa in position 58 is any amino acid
  Variant (78)..(78): Xaa in position 78 is any amino acid
  Variant (80)..(80): Xaa in position 80 is any amino acid
  Variant (90)..(90): Xaa in position 90 is any or no amino acid
  Variant (92)..(137): Xaa in position 92 to 137 is any or no amino acid
  Variant (153)..(153): Xaa in position 153 is any amino acid
  Variant (158)..(161): Xaa in position 158 to 161 is any amino acid
  Variant (162)..(163): Xaa in position 162 to 163 is any or no amino acid
  Variant (165)..(173): Xaa in position 165 to 173 is any or no amino acid
  Variant (176)..(176): Xaa in position 176 is any amino acid
  Variant (191)..(192): Xaa in position 191 to 192 is any amino acid
  Variant (197)..(197): Xaa in position 197 is any amino acid
  Variant (201)..(207): Xaa in position 201 to 207 is any or no amino acid
  Variant (210)..(213): Xaa in position 210 to 213 is any amino acid
  Variant (222)..(222): Xaa in position 222 is any amino acid
  Variant (226)..(227): Xaa in position 226 to 227 is any amino acid
  Variant (229)..(229): Xaa in position 229 is any amino acid
  Variant (231)..(231): Xaa in position 231 is any amino acid
  Variant (238)..(238): Xaa in position 238 is any amino acid
  Variant (245)..(245): Xaa in position 245 is any amino acid
  Variant (260)..(260): Xaa in position 260 is any amino acid
  Variant (262)..(262): Xaa in position 262 is any amino acid
  Variant (288)..(288): Xaa in position 288 is any amino acid
  Variant (291)..(291): Xaa in position 291 is any amino acid
  Variant (294)..(294): Xaa in position 294 is any amino acid
  Variant (299)..(299): Xaa in position 299 is any amino acid
  Variant (334)..(351): Xaa in position 334 to 351 is any or no amino acid
  Variant (355)..(357): Xaa in position 355 to 357 is any or no amino acid
  Variant (359)..(361): Xaa in position 359 to 361 is any amino acid
  Variant (364)..(364): Xaa in position 364 is any amino acid
  Variant (368)..(368): Xaa in position 368 is any amino acid
  Variant (386)..(386): Xaa in position 386 is any amino acid
  Variant (390)..(391): Xaa in position 390 to 391 is any amino acid
  Variant (395)..(395): Xaa in position 395 is any amino acid
  Variant (399)..(399): Xaa in position 399 is any amino acid
  Variant (402)..(402): Xaa in position 402 is any amino acid
  Variant (407)..(407): Xaa in position 407 is any amino acid
  Variant (409)..(409): Xaa in position 409 is any amino acid
  Variant (415)..(415): Xaa in position 415 is any or no amino acid
  Variant (418)..(418): Xaa in position 418 is any amino acid
  Variant (420)..(420): Xaa in position 420 is any or no amino acid
  Variant (430)..(430): Xaa in position 430 is any amino acid
  Variant (435)..(443): Xaa in position 435 to 443 is any or no amino acid
  Variant (447)..(447): Xaa in position 447 is any amino acid
  Variant (457)..(457): Xaa in position 457 is any amino acid
  Variant (480)..(480): Xaa in position 480 is any or no amino acid
  Variant (485)..(489): Xaa in position 485 to 489 is any or no amino acid
  Variant (504)..(504): Xaa in position 504 is any amino acid
  Variant (508)..(508): Xaa in position 508 is any amino acid
  Variant (515)..(515): Xaa in position 515 is any amino acid
  Variant (517)..(519): Xaa in position 517 to 519 is any amino acid
  Variant (522)..(522): Xaa in position 522 is any amino acid
  Variant (525)..(525): Xaa in position 525 is any or no amino acid
  Variant (528)..(528): Xaa in position 528 is any amino acid
  Variant (530)..(530): Xaa in position 530 is any amino acid
  Variant (534)..(534): Xaa in position 534 is any amino acid
  Variant (535)..(536): Xaa in position 535 to 536 is any or no amino acid
  Variant (547)..(547): Xaa in position 547 is any amino acid
KXXXEPFRIKMVEPIRMXTREEREXAIXEAGYNXFLLXSEDVYIDLLTDSGTGAMSDXQWAAMMLGDEAYAGSRSYYXLXEAVKDIFGYXYXXXXXXXXXXXXXXXXXXXXXXXXXXXXXXXXXXXXXXXXXXXXXXIIPTHQGRGAENILFXVLIKXXXXXXGXXXXXXXXXSNXHFDTTRAHVELNGAXXVDVVXDEAXXXXXXXDTXXXXPFKGNMDLXKLEXXIXEXGAENIAXIVLTITXNSAGGQPVSMANMRXVXEIAKKYGIPVVIDAARFAENAYFIKXREXGYXDKSIXEIVREMFSYADGLTMSAKKDALVNIGGLLAIKDEXXXXXXXXXXXXXXXXXXELFXXXRXXXVVXEGFXTYGGLAGRDMEALAIGLXEGMXXDYLXYRIXQVXYLGDXLXEAGVPXIQXPXGGHAVFVDAXKLLPXXXXXXXXXHIPXDQFPAQALAXELYLEAGIRAVEIGSLLLGRDPXTGEQXXXXXELVRLTIPRRVYTQXHMDXVAEAVIXLXXXREXIKXGLXFXYEPXXXVLRHFTARLEXI

SEQ ID NO: 15339 - protein, 51 aa, Artificial sequence
  Consensus
  Variant (2)..(30): Xaa in position 2 to 30 is any amino acid
  Variant (31)..(31): Xaa in position 31 is any or no amino acid
  Variant (34)..(35): Xaa in position 34 to 35 is any or no amino acid
  Variant (37)..(38): Xaa in position 37 to 38 is any amino acid
  Variant (39)..(39): Xaa in position 39 is Ala, Glu, Asn, Gln or Ser
  Variant (40)..(46): Xaa in position 40 to 46 is any amino acid
  Variant (47)..(47): Xaa in position 47 is Phe, Ile, Leu or Val
  Variant (48)..(48): Xaa in position 48 is Ala or Gly
  Variant (49)..(49): Xaa in position 49 is any amino acid
  Variant (50)..(50): Xaa in position 50 is Ala, Ser or Thr
  Variant (51)..(51): Xaa in position 51 is Asp, Glu, Gly or Ser
GXXXXXXXXXXXXXXXXXXXXXXXXXXXXXXGSXXGXXXXXXXXXXXXXXX

SEQ ID NO: 15340 - protein, 28 aa, Artificial sequence
  Consensus
  Variant (2)..(10): Xaa in position 2 to 10 is any amino acid
  Variant (11)..(12): Xaa in position 11 to 12 is any or no amino acid
  Variant (14)..(17): Xaa in position 14 to 17 is any amino acid
  Variant (19)..(21): Xaa in position 19 to 21 is any amino acid
  Variant (24)..(24): Xaa in position 24 is Ser or Thr
  Variant (25)..(27): Xaa in position 25 to 27 is any amino acid
  Variant (28)..(28): Xaa in position 28 is Phe or Trp
NXXXXXXXXXXXIXXXXRXXXSGXXXXX

SEQ ID NO: 15341 - DNA, 2077 bp, Saccharomyces cerevisiae; identical to SEQ ID NO: 3739
  CDS (482)..(1987)

SEQ ID NO: 15342 - protein, 501 aa, Saccharomyces cerevisiae; identical to SEQ ID NO: 3740

SEQ ID NO: 15343 - DNA, 1668 bp, Caenorhabditis elegans; identical to SEQ ID NO: 3749
  CDS (121)..(1668)

SEQ ID NO: 15344 - protein, 515 aa, Caenorhabditis elegans
MVNQSGGDSEDSTSPRAAGCRTRRRTMSGGRAEHHLLTTKTGKKIYTKGRPPWYDKKGKSLKHPFVIGVCGGSASGKTTVAEKIVERLGIPWVTILSMDSFYKVLTPEEIKAAHESRYNFDGPNAFDFDLLYEVLKRLREGKSVDVPVYDFNTHSRDPNSKMMYGADVLIFEGILAFHDERIKNLMDMKVFVDTDGDLRLARRIVRDVTDRGRDIDGIMEQYFTFVKPAFDKYIAPCMDSADLIVPRGGENDVAIDMIVQNVMAQLVERGYDRNQNNRDRHDLVRDDLPDCLPENLFILKETPQVKGLVTFVRDRETSRDNHIFYSDRLMRILIEECMNHMPYKDVEIEMAGGRKTIGKRKDAQICGLPIMRAGECMETALRSIVKDCVIGKILIQTNETTFDPELHYIRLPPHITRYKVIIMDATVTTGSAAMMAIRVLLDHDVKEEDIFVASLLMGQQGAHALAYAFPKVKLITTAMDHQMTENCYLIPGMGNFGDRYYGTGLEQDMDEPFDM

SEQ ID NO: 15345 - DNA, 1365 bp, Schizosaccharomyces pombe; identical to SEQ ID NO: 3751
  CDS (1)..(1365)

SEQ ID NO: 15346 - protein, 454 aa, Schizosaccharomyces pombe; identical to SEQ ID NO: 3752

SEQ ID NO: 15347 - DNA, 1521 bp, Debaryomyces hansenii CBS767; identical to SEQ ID NO: 3757
  CDS (1)..(1521)

SEQ ID NO: 15348 - protein, 506 aa, Debaryomyces hansenii CBS767; identical to SEQ ID NO: 3758

SEQ ID NO: 15349 - DNA, 1353 bp, Yarrowia lipolytica CLIB99; identical to SEQ ID NO: 3759
  CDS (1)..(1353)

SEQ ID NO: 15350 - protein, 450 aa, Yarrowia lipolytica CLIB99; identical to SEQ ID NO: 3760

SEQ ID NO: 15351 - DNA, 1380 bp, Kluyveromyces lactis NRRL Y; identical to SEQ ID NO: 3761
  CDS (1)..(1380)

SEQ ID NO: 15352 - protein, 459 aa, Kluyveromyces lactis NRRL Y; identical to SEQ ID NO: 3762

SEQ ID NO: 15353 - DNA, 1431 bp, Candida glabrata CBS138; identical to SEQ ID NO: 3767
  CDS (1)..(1431)

SEQ ID NO: 15354 - protein, 476 aa, Candida glabrata CBS138; identical to SEQ ID NO: 3768

SEQ ID NO: 15355 - DNA, 1965 bp, Oryza sativa; identical to SEQ ID NO: 3773
  CDS (257)..(1726)

SEQ ID NO: 15356 - protein, 489 aa, Oryza sativa; identical to SEQ ID NO: 3774

SEQ ID NO: 15357 - DNA, 1374 bp, Cryptosporidium parvum
  CDS (1)..(1374)
atgtctaatatcagtcttgaaaaattaatttctaaagacatatattatggcgatcaagctttaacgcctagcagcaattcaaatgtttttgttattgcagttgcaggaggaagtgcaagcggaaaaacaagcgtatgtaccagaattttttcagagttaggagataaacgagttacggtaattgagactgatagtttttataaaactcctgtcttagaagaggggcaaactatggcagactacaactttgatcatcctaattctgtggactttgaacttctatacaatgttttactaagtttgaaaaacggggaaggggttcacatccctaactactgttttaaacaacataagagattggaaacaggaaggaaggtttctccagcatctattattattgttgaaggcatatttattcttttccatccaaaaattagacatcttataaatatgtcaatttttgtcgatacggacgatgatattcgtcttgtacgtagaataagaagagatactattgagagaggcagacaaattgacgatattcttaatcaatatgagaaaacggttaagccatcctatgatgaattcatttatccgactagaagatatgcagatatcgtaattccgcattatccaaatgaagttgctgttgaccttgttgtacaacatcttagatacaagttaaaaatggatgatttaagaaaaatttactctaatttgcatattattccttctaattgtcaaatacgccatatgcactctattataaggaataaggatacatcagtggtggactttgtcttttggtcagatagattaattcgactggtcgtcgaaaatgctcttagccatttgtcttttactggtcaaacaattgaaacacctattggagaactttacgacggagtgcaatttaattacaaggataaactctgcgcggtctcaatagttagaggaggagaaagtatggaaataggtttatctgctgtttgtaaagatatcccaataggaaaaattctactggagttccaaaatcctaaaacggaacttgatgcccagtttgataaacctaagattatctattgcaaattacccgatgatattgcctcaaggaatgtatttattttggatcctattcttgggaatggatttggggtattttctgcaattaaatatttgttatcaaagggggttttgcagcgtaaaattattgttcttagtcttattgttgctcacaatgcaatacacagaatatgtaaagagttcccggaggtaactctaattacgactgaaattgaccgtgatgttaactctgatggttttgtaattccaggattaggttgttttgctgatcgatactttggaactgaataa

SEQ ID NO: 15358 - protein, 457 aa, Cryptosporidium parvum
MSNISLEKLISKDIYYGDQALTPSSNSNVFVIAVAGGSASGKTSVCTRIFSELGDKRVTVIETDSFYKTPVLEEGQTMADYNFDHPNSVDFELLYNVLLSLKNGEGVHIPNYCFKQHKRLETGRKVSPASIIIVEGIFILFHPKIRHLINMSIFVDTDDDIRLVRRIRRDTIERGRQIDDILNQYEKTVKPSYDEFIYPTRRYADIVIPHYPNEVAVDLVVQHLRYKLKMDDLRKIYSNLHIIPSNCQIRHMHSIIRNKDTSVVDFVFWSDRLIRLVVENALSHLSFTGQTIETPIGELYDGVQFNYKDKLCAVSIVRGGESMEIGLSAVCKDIPIGKILLEFQNPKTELDAQFDKPKIIYCKLPDDIASRNVFILDPILGNGFGVFSAIKYLLSKGVLQRKIIVLSLIVAHNAIHRICKEFPEVTLITTEIDRDVNSDGFVIPGLGCFADRYFGTE

SEQ ID NO: 15359 - DNA, 1862 bp, Oryza sativa
  CDS (98)..(1573)
cacccaatccgcgtgtcaaaacctccggcctccgcaccgtgcgcgccagctcagcacgtcggcggcggcggcggcggcggcgacggcgaggggagagatggacgccgcgatggagtcggcggtggggccgcacttcagcgggctccgcctcgactcgcgccgcctctcctcctcctccctccccacctccccctccgccgcctccagcaacggctgcggcggcaacgacgcccccgccgcggttaacgggttcgcgccgccgccgcccccctccgccgccgcagccgcggaggaggggagcaagcagcccttcgtgatcggtgtgtcgggagggacggcgtcggggaagacgacggtctgcgacatgatcatccagcagctgcacgaccaccgcgtcgtgctcgtcaaccaggattcattctaccgtggtttaactgaggaagaatctgaccgtgtgcaagattacaactttgatcacccagatgcatttgatacagagcaacttttagagtgcatgggacagcttaaaagtgggctatctgtaaatattcctatatatgattttaagaaccaccgtcgatgctctgaaagttttagaaaggttaatgcatcagatgtcatcattttggagggcattttagtttttcatgatcaaagggttcgtgatttgatggatatgaaaatttttgttgacacagatgccgatattagacttgcccggcgtataaggcgtgatacagttgaaagaggtagagatgtcatctcagtgctggagcagtatgggaggtttgtgaagcctgcgttcgatgattttgttcttccttccaaaaaatatgctgatgtgatcataccgcgagggggagataaccatgttgccatagatttaattgtgcaacatattcgtacaaaacttggtcagcatgacttatgcaaaatctacccaaatgtttatgtggttaatacaactttccagatacgtggaatgcatactcttattcgcgaccgggacattgcaactccagatttcgtcttttattcagatcgtctgattcgtctggtagttgagcatggactggggcatttgcctttcacagagaagcagattgttacaccaacagggtctacttacatgggagttgacttttgtaagaagctctgtggtgtgtcaattattcgaagtggagaaagcatggagaatgcattacgtgcttgttgtaaggggattaaaataggcaaaattctaatacatcgggatggggacaatggacaacagctcatataccacaagtttcccttggatattgctgaacgacatgttctactcatggatcctgtgcttggtacaggtaactcggcaaatcaagctatagaacttcttataagtagtggagttcctgaggagcggatcatgtttctcaatctcatctcggctcctgaaggggtccattgtgtctgcaagcgattccctcgtctgaagattgtaacctcagagatcgaaactgggttgaacgaggagtaccgggtgatcccagggttaggagagtatggtgatcgctacttcggtacagactaatcagggattgatactggcttctttggcgatgtgaaaagatcacattagagctaacattaccgtgagagagatatatactggtgtttggttgtttgtggtataccattggaggtaccgaaatcgtgcgatttcgtgtgttagtgtttgctgctgtgataaaaacttcgggtgttgaattttgaaggcccctgtcgctagttacagcggcgtgtgaaaaaagggaaaaatttgtgacatgtagagcccacttctcgggcctgaatgcggcagatgccgtgtggtttcactt

SEQ ID NO: 15360 - protein, 491 aa, Oryza sativa
MDAAMESAVGPHFSGLRLDSRRLSSSSLPTSPSAASSNGCGGNDAPAAVNGFAPPPPPSAAAAAEEGSKQPFVIGVSGGTASGKTTVCDMIIQQLHDHRVVLVNQDSFYRGLTEEESDRVQDYNFDHPDAFDTEQLLECMGQLKSGLSVNIPIYDFKNHRRCSESFRKVNASDVIILEGILVFHDQRVRDLMDMKIFVDTDADIRLARRIRRDTVERGRDVISVLEQYGRFVKPAFDDFVLPSKKYADVIIPRGGDNHVAIDLIVQHIRTKLGQHDLCKIYPNVYVVNTTFQIRGMHTLIRDRDIATPDFVFYSDRLIRLVVEHGLGHLPFTEKQIVTPTGSTYMGVDFCKKLCGVSIIRSGESMENALRACCKGIKIGKILIHRDGDNGQQLIYHKFPLDIAERHVLLMDPVLGTGNSANQAIELLISSGVPEERIMFLNLISAPEGVHCVCKRFPRLKIVTSEIETGLNEEYRVIPGLGEYGDRYFGTD

SEQ ID NO: 15361 - DNA, 1497 bp, Ashbya gossypii; identical to SEQ ID NO: 3797
  CDS (1)..(1497)

SEQ ID NO: 15362 - protein, 498 aa, Ashbya gossypii; identical to SEQ ID NO: 3798

SEQ ID NO: 15363 - DNA, 1425 bp, Neurospora crassa; identical to SEQ ID NO: 3817
  CDS (1)..(1425)

SEQ ID NO: 15364 - protein, 474 aa, Neurospora crassa; identical to SEQ ID NO: 3818

SEQ ID NO: 15365 - DNA, 1831 bp, Arabidopsis thaliana; identical to SEQ ID NO: 3841
  CDS (116)..(1525)

SEQ ID NO: 15366 - protein, 469 aa, Arabidopsis thaliana; identical to SEQ ID NO: 3842

SEQ ID NO: 15367 - DNA, 1870 bp, Arabidopsis thaliana
  CDS (207)..(1607)
cgcatatacatacacttatatacgttatcaatatattttatttttaataagtccagtttttgtctgtgcatcgagtttaacaggcaatgctcgtgtctctctctctttatatgtttagattctttatctggaacttggaagctcttttgttagctatatctaatcggtgatctcgaagcttattcaatccctctttcttttttcgaatggcttcaaagtcggatgtgaatataatagagacatcctcaaaggttcatttctcaggatttcatcaaatggatggtttagcttcaaatagaccagagcaaatggctgaggaagaagaacatggtcaaccttttgtgatcggagttgctggaggtgcagcatccgggaaaacaactgtctgtgatatgattatgcagcaactgcatgatcagagagctgttgttgtaaatcaggattctttctaccataatgtaaatgaagtggagcttgtaagagttcatgattacaattttgaccatcctgacgctttcgatactgagcaattattgtcttccatggagaagttaagaaaaggacaagcagtagatattcctaattatgacttcaaaagttacaagaacaatgtttttccacctagaagggtgaatccttctgacgttataattctggaaggtatactcattttccatgaccctcgggtgcgagatttgatgaacatgaagatatttgtagacgcagatgccgatgtgcgtctagcgagaaggataaaacgcgatactgttgagaagggcagagatattgccactgttcttgaccagtactcaaagtttgtgaagccagcatttgaggatttcatactcccaacaaagaaatacgcagatataataattccccgaggtggtgataaccatgttgctattgatttgattgtgcaacacatccatacgaagctcggtcaacatgatctctgtaaaatttatccaaatctttatgttattcaatcaacttttcagatacgtggtatgcacactctaatccgcgactctaaaacaacaaagcatgactttatcttctactccgatcgattgatacgtttggtcgttgaacatggcctcggacaccttccctttacagaaaagcaagtggttactccaacaggatctgtgtattcgggtgtggacttctgtaagaaactgtgtggtgtctcagttatcagaagcggtgagagtatggagaacgctcttagagcatgctgcaaaggcatcaaaattgggaagattctgattcatagagaaggcgacaatggtcaacagcttatctacgagaagctaccctcagacatttcagaaaggcatgtgcttttactggatccaatcctcgggacaggaaactcggcggtgcaagcgataagactgctcataagtaaaggcgtgcctgaatccaacatcatatttctcaatttgatatctgcacctgaaggagtaaatgtggtgtgcaaaaagttcccaaggataaagattgtgacttcagagatagaactcggtttaaacgacgagttccgagttgttcctggtatgggcgagtttggagaccgctattttggaaccgatgatgagtgagagagtgcgagcttgccttgcctccctcgaaaattttgatttcttttgtttcaactgttatacgtagtacttttatgatcggattcacacatatgtatacggtaatatcaaaacaaactgagtgtgaacgtattcacagtttttgggtcatcgtccacgtgtctctctataattgggtgactgttgaagtcatacaaaatgtaaaactttaaagagtcttttggtgtgcaatgaagtgacgtgagcgtataaaagttaccgac

SEQ ID NO: 15368 - protein, 466 aa, Arabidopsis thaliana
MASKSDVNIIETSSKVHFSGFHQMDGLASNRPEQMAEEEEHGQPFVIGVAGGAASGKTTVCDMIMQQLHDQRAVVVNQDSFYHNVNEVELVRVHDYNFDHPDAFDTEQLLSSMEKLRKGQAVDIPNYDFKSYKNNVFPPRRVNPSDVIILEGILIFHDPRVRDLMNMKIFVDADADVRLARRIKRDTVEKGRDIATVLDQYSKFVKPAFEDFILPTKKYADIIIPRGGDNHVAIDLIVQHIHTKLGQHDLCKIYPNLYVIQSTFQIRGMHTLIRDSKTTKHDFIFYSDRLIRLVVEHGLGHLPFTEKQVVTPTGSVYSGVDFCKKLCGVSVIRSGESMENALRACCKGIKIGKILIHREGDNGQQLIYEKLPSDISERHVLLLDPILGTGNSAVQAIRLLISKGVPESNIIFLNLISAPEGVNVVCKKFPRIKIVTSEIELGLNDEFRVVPGMGEFGDRYFGTDDE

SEQ ID NO: 15369 - DNA, 1711 bp, Cryptosporidium parvum; identical to SEQ ID NO: 3855
  CDS (290)..(1549)

SEQ ID NO: 15370 - protein, 419 aa, Cryptosporidium parvum; identical to SEQ ID NO: 3856

SEQ ID NO: 15371 - DNA, 1844 bp, Arabidopsis thaliana
  CDS (61)..(1521)
ttcgattcgccggaaaaatcataaaatccaaatctacaaccacctttttatcgcaatccaatgccggaagattcttcttctttagactacgcgatggagaaggcatcagggcctcacttctccggtcttcgcttcgacggccttctctcttcttctccacccaattcctccgtcgtctcttcactccgatcagctgtttcttcttcttctccgtcttcttccgatcccgaagcgcctaagcagcccttcattatcggggtttctggtggtacggcttctggtaagaccacggtctgtgacatgataatccagcaacttcatgaccatcgtgtcgttttagttaatcaggattccttttatcgtggtttgacatctgaggagttgcagcgtgtgcaagagtataactttgatcatcctgatgcgtttgacactgagcagcttttgcattgtgctgagactctcaagagcgggcaaccctatcaagttccaatctatgactttaagactcatcaacgtagatctgatactttccgccaggtcaatgcttctgatgtaataatattggaagggattctagttttccatgactcacgagttcggaatctgatgaatatgaagatctttgttgatacagatgctgatgtaaggcttgctcgcagaattaggcgtgacacagttgagaggggtagggatgtcaattctgtgcttgaacagtatgcaaagtttgtgaagccggcatttgatgacttcgtgctcccttcaaagaaatatgctgacgtgatcattcctcgaggaggtgataatcacgttgcagtcgatttgattacgcaacatatccacacaaaacttgggcagcatgatctctgcaaaatctacccaaatgtttatgttatccagtcaacatttcagataagaggcatgcatacacttattcgggaaaaggacatatcaaagcatgactttgtgttttattcagatagactcattcgtctggtcgtggagcatggtcttggtcatttgccattcactgagaaacaagtagttactccaacaggagctgtatataccggtgttgatttctgcaagaaactttgtggggtctcaattattagaagtggtgaaagcatggaaaatgcattacgcgcttgctgcaaaggaattaaaatagggaagattctcatccaccgtgatggcgataatggaaaacagcttatttatgagaagcttcctcacgacatatctgaacgccatgtcctgcttctagatcctgtcttagccacaggtaactcggctaatcaagccattgaactactcatacagaaaggtgttcctgaagctcacattatattcctcaaccttatatcggcgccggagggaatccactgtgtctgcaaacgttttccagcattgaaaattgtgacgtctgaaatagaccaatgtctgaaccaagaattcagagttataccgggcttaggcgagtttggcgatcgttacttcggcaccgacgaggaagaccagtagccaccactcaacactgtgactggtttcaaaggaaaagcctaaatttatgactagagcgacagtagaggcacttgcatgtctttgtagtttgtgctaaagaatctttatcttattgtttatgaagctcctcttgcttacttgaattatttttgaaaaactacgttaattttctcattaaaaaaatgatcgggacaatgctagttttctaaaccggtggaaaaagacataaccaatccttttatacatgattttgacaatcgtacgaaaaaaaaaaaaaaaaaaaaaaaaaaaaaaaaaaaaaaaaaaaaaaaaaaaaaaaaaaa

SEQ ID NO: 15372 - protein, 486 aa, Arabidopsis thaliana; identical to SEQ ID NO: 3858

SEQ ID NO: 15373 - DNA, 3183 bp, Arabidopsis thaliana
  CDS (1)..(3183)
atggcttcaaagtcggatgtgaatataatagagacatcctcaaaggttcatttctcaggatttcatcaaatggatggtttagcttcaaatagaccagagcaaatggctgaggaagaagaacatggtcaaccttttgtgatcggtgagagtcgtggagttgctggaggtgcagcatccgggaaaacaactgtctgtgatatgattatgcagcaactgcatgatcagagagctgttgttgtaaatcaggattctttctaccataatgtaaatgaagtggagcttgtaagagttcatgattacaattttgaccatcctgacgctttcgatactgagcaattattgtcttccatggagaagttaagaaaaggacaagcagtagatattcctaattatgacttcaaaagttacaagaacaatgtttttccacctagaagggtgaatccttctgacgttataattctggaaggtatactcattttccatgaccctcgggtgcgagatttgatgaacatgaagatatttgtagacgcaggtctttcccataccaaacctgttaacacttatgtagtcaaatccgtagcatatatgagacgctgcacttgtatatgtactcatgaagatgccgatgtgcgtctagcgagaaggataaaacgcgatactgttgagaagggcagagatattgccactgttcttgaccagtactcaaagtttgtgaagccagcatttgaggatttcatactcccaacaaagaaatacgcagatataataattccccgaggtggtgataaccatgttgctattgatttgattgtgcaacacatccatacgaagctcggtcaacatgatctctgtaaaatttatccaaatctttatgttattcaatcaacttttcaggtcgttgaacatggcctcggacaccttccctttacagaaaagcaagtggttactccaacaggatctgtgtattcgggtgtggacttctgtaagaaactgtgtggtgtctcagttatcagaagcggtgagagtatggagaacgctcttagagcatgctgcaaaggcatcaaaattgggaagattctgattcatagagaaggcgacaatggtcaacaggtttgtgttctttctctgctcatcacttctcctaactatttactaacaacaaatggcactcaccagcttatctacgagaagctaccctcagacatttcagaaaggcatgtgcttttactggatccaatcctcgggacaggaaactcggcggtgcaagcgataagactgctcataagtaaaggcgtgcctgaatccaacatcatatttctcaatttgatatctgcacctgaaggagtaaatgtggtgtgcaaaaagttcccaaggataaagattgtgacttcagagatagaactcggtttaaacgacgagttccgagttgttcctggtatgggcgaggtttcgattccttaccatctccgcaaaacccttcagaaaatcagagagtataccggaaagcagcactcggatgaggatatctttgccgtctataaggattccttcaatgatcctcatgagaccgctcagaagctcctcttcttagatacatttcatgaggtgagaagtaaaagggagaaaaagaaggaggcaagtcctatagtgccagttacacaaccaagtggcagaggtggtcggaggaactttgcttcaagtaactcttatcaaggtagtggaagaaatgcttcttttaaaagggaaaatggagctaatcatgtaacaagaggttctagaactgctcagcctgccactaacaaagcaagcaacatcacagtacctaatgaaacaaaggtttctggtcctgctagtattccgagtgaggtcagcaatcataaagctcaagatgatccttctttgatttctgcttcacgttgcagtagcaagtcagatcaagccattgaaattgagactgcgtccaaacaaggcaaaaatcaatcgcttcctaagccagatgttagcgaacagtcacacgtaacattccctttccaccttcaggttgccaaaggactgcaaaatggtctgacgtttggcagttttgattccaattttgtgaaagaggtatcttctagcaatggtgctagtgggggatatgactcaaattttgagtcttctcacgggacaggggatgatgagagggaatcttctcccactaccaatggtattactggggttgcttcggctaggttcgtgactgagatactttcactctacatattagaagaaacatcaacagtttctgaagataaggattatgggatatcaaattctgcaactggagctgagcctgtggtgcactcggatcacattgtcccacctgtagaagaagtaccgaaggaggaagctttatcaaacacagaaactcatcaaattgcttatggtcaagaagctccactcagtgtgtttggtcttgtcccctcgttgtcagcaataggccaacccgttaacacagaagcagcggagactcagcccggaaattccaactctccacctatttcattagtatcatatcctccagatcagagctccatagcagcagccactcaacagacaaattttcttaggcagcaataccctcccaatttcttcccttacggctattactcaccgtattatatgccaccgccgtacattcaccagttcttgagcccaaacgggatccctcagcagtcttattttccacaaggagctgctctaacagcaccttctcatgcaaaaccagttgacaacactgaaaaccctcccaccacaaacccttacctacacacttctcccatggttgctagcagcatcccatctacaaccaccttaaattctatccatagtgaagaaaaggcatctcacctgactgaaagtgcagctgcatggattgggcagggatttggcaacctgcaggtgaatccaatgtataacctagcataccaaggtcagccacttggttttccagtcgtgcaggctggtcatggtggcctcatgggaatgcaccaaccaacacagcccatggcagctgcttcaactacatatcagaccttaccaccaccgccacacacaacaacggctatgggtgaacccataggacacccgcacattgcttatcagcaacctcaagctgctctaacgaattgggttaacaactattag

SEQ ID NO: 15374 - protein, 1060 aa, Arabidopsis thaliana
MASKSDVNIIETSSKVHFSGFHQMDGLASNRPEQMAEEEEHGQPFVIGESRGVAGGAASGKTTVCDMIMQQLHDQRAVVVNQDSFYHNVNEVELVRVHDYNFDHPDAFDTEQLLSSMEKLRKGQAVDIPNYDFKSYKNNVFPPRRVNPSDVIILEGILIFHDPRVRDLMNMKIFVDAGLSHTKPVNTYVVKSVAYMRRCTCICTHEDADVRLARRIKRDTVEKGRDIATVLDQYSKFVKPAFEDFILPTKKYADIIIPRGGDNHVAIDLIVQHIHTKLGQHDLCKIYPNLYVIQSTFQVVEHGLGHLPFTEKQVVTPTGSVYSGVDFCKKLCGVSVIRSGESMENALRACCKGIKIGKILIHREGDNGQQVCVLSLLITSPNYLLTTNGTHQLIYEKLPSDISERHVLLLDPILGTGNSAVQAIRLLISKGVPESNIIFLNLISAPEGVNVVCKKFPRIKIVTSEIELGLNDEFRVVPGMGEVSIPYHLRKTLQKIREYTGKQHSDEDIFAVYKDSFNDPHETAQKLLFLDTFHEVRSKREKKKEASPIVPVTQPSGRGGRRNFASSNSYQGSGRNASFKRENGANHVTRGSRTAQPATNKASNITVPNETKVSGPASIPSEVSNHKAQDDPSLISASRCSSKSDQAIEIETASKQGKNQSLPKPDVSEQSHVTFPFHLQVAKGLQNGLTFGSFDSNFVKEVSSSNGASGGYDSNFESSHGTGDDERESSPTTNGITGVASARFVTEILSLYILEETSTVSEDKDYGISNSATGAEPVVHSDHIVPPVEEVPKEEALSNTETHQIAYGQEAPLSVFGLVPSLSAIGQPVNTEAAETQPGNSNSPPISLVSYPPDQSSIAAATQQTNFLRQQYPPNFFPYGYYSPYYMPPPYIHQFLSPNGIPQQSYFPQGAALTAPSHAKPVDNTENPPTTNPYLHTSPMVASSIPSTTTLNSIHSEEKASHLTESAAAWIGQGFGNLQVNPMYNLAYQGQPLGFPVVQAGHGGLMGMHQPTQPMAAASTTYQTLPPPPHTTTAMGEPIGHPHIAYQQPQAALTNWVNNY

SEQ ID NO: 15375 - DNA, 1629 bp, Arabidopsis thaliana
  CDS (1)..(1629)
atggcttcaaagtcggatgtgaatataatagagacatcctcaaaggttcatttctcaggatttcatcaaatggatggtttagcttcaaatagaccagagcaaatggctgaggaagaagaacatggtcaaccttttgtgatcggtgagagtcgtggagttgctggaggtgcagcatccgggaaaacaactgtctgtgatatgattatgcagcaactgcatgatcagagagctgttgttgtaaatcaggattctttctaccataatgtaaatgaagtggagcttgtaagagttcatgattacaattttgaccatcctgacgctttcgatactgagcaattattgtcttccatggagaagttaagaaaaggacaagcagtagatattcctaattatgacttcaaaagttacaagaacaatgtttttccacctagaagggtgaatccttctgacgttataattctggaaggtatactcattttccatgaccctcgggtgcgagatttgatgaacatgaagatatttgtagacgcaggtctttcccataccaaacctgttaacacttatgtagtcaaatccgtagcatatatgagacgctgcacttgtatatgtactcatgaagatgccgatgtgcgtctagcgagaaggataaaacgcgatactgttgagaagggcagagatattgccactgttcttgaccagtactcaaagtttgtgaagccagcatttgaggatttcatactcccaacaaagaaatacgcagatataataattccccgaggtggtgataaccatgttgctattgatttgattgtgcaacacatccatacgaagctcggtcaacatgatctctgtaaaatttatccaaatctttatgttattcaatcaacttttcagatacgtggtatgcacactctaatccgcgactctaaaacaacaaagcatgactttatcttctactccgatcgattgatacgtttggtcgttgaacatggcctcggacaccttccctttacagaaaagcaagtggttactccaacaggtaagctaatgaaaaagattataccttactacaatcttggagaagaactctccaatcatagatctgtgtattcgggtgtggacttctgtaagaaactgtgtggtgtctcagttatcagaagcggtgagagtatggagaacgctcttagagcatgctgcaaaggcatcaaaattgggaagattctgattcatagagaaggcgacaatggtcaacaggtttgtgttctttctctgctcatcacttctcctaactatttactaacaacaaatggcactcaccagcttatctacgagaagctaccctcagacatttcagaaaggcatgtgcttttactggatccaatcctcgggacagcaggaaactcggcggtgcaagcgataagactgctcataagtaaaggcgtgcctgaatccaacatcatatttctcaatttgatatctgcacctgaaggagtaaatgtggtgtgcaaaaagttcccaaggataaagattgtgacttcagagatagaactcggtttaaacgacgagttccgagttgttcctggtatgggcgagtttggagaccgctattttggaaccgatgatgagtga

SEQ ID NO: 15376 - protein, 542 aa, Arabidopsis thaliana
MASKSDVNIIETSSKVHFSGFHQMDGLASNRPEQMAEEEEHGQPFVIGESRGVAGGAASGKTTVCDMIMQQLHDQRAVVVNQDSFYHNVNEVELVRVHDYNFDHPDAFDTEQLLSSMEKLRKGQAVDIPNYDFKSYKNNVFPPRRVNPSDVIILEGILIFHDPRVRDLMNMKIFVDAGLSHTKPVNTYVVKSVAYMRRCTCICTHEDADVRLARRIKRDTVEKGRDIATVLDQYSKFVKPAFEDFILPTKKYADIIIPRGGDNHVAIDLIVQHIHTKLGQHDLCKIYPNLYVIQSTFQIRGMHTLIRDSKTTKHDFIFYSDRLIRLVVEHGLGHLPFTEKQVVTPTGKLMKKIIPYYNLGEELSNHRSVYSGVDFCKKLCGVSVIRSGESMENALRACCKGIKIGKILIHREGDNGQQVCVLSLLITSPNYLLTTNGTHQLIYEKLPSDISERHVLLLDPILGTAGNSAVQAIRLLISKGVPESNIIFLNLISAPEGVNVVCKKFPRIKIVTSEIELGLNDEFRVVPGMGEFGDRYFGTDDE

SEQ ID NO: 15377 - DNA, 1758 bp, Arabidopsis thaliana
  CDS (101)..(1552)
ctgaattgtgcagaaatcgtcgtcactgatcacttccgattccttttttttctccttaaatcgcaattttcactctcctttaccttcgccgagaaactcaatgccagaagattcaacggcgattgactatgtcatggagaaggcatcggggcctcacttctccggtcttcgccttgacggtcttctttcttctccgtcgaaatcctccgtctcttctccttctcacttccgtttgagtaattcttctttttcggctaccgacgatcccgccgctcctcatcagcccttcgttatcggagttactggtggtacagcttctggtaagacgacggtatgtgacatgataatccagcaacttcatgatcatcgcattgttttagttaaccaggattcgttttaccgtggtttgacatctgaagaacttgagcatgtacaagaatacaattttgatcatcctgatgcctttgacactgagcagcttttgcattgcgttgacatactcaagagtgggcaaccctatcaaattccaatttatgacttcaagacccatcaacgtaaagtagatgcttttcgccaggtcaatgcttgtgatgtcatcattttggaagggattctagtttttcatgactcacgagttcgggacctaatgaatatgaagatcttcgttgacacagatgctgatgtgaggcttgctcgcagaatcaggcgtgacacggttgagaggggtagggatgttgactctgtgcttgaacagtatgcaaagtttgtgaagcctgcgtttgatgattttgtgctcccctcaaagaaatatgctgatgtgatcattccacgaggaggtgacaatcacgttgcagttgatttgattgtgcaacatatccacacaaaacttgggcaacatgatctctgcaaaatctacccaaatgtttttgttattgaaacaacatttcagataagaggcatgcacactctcattcgagagaaggacatatcaaaacatgacttcgtgttttactcagatcgcctcattcgtttggttgtggagcatggtcttggccatttgcctttcactgagaaacaagtagttactccgacaggatctgtgtatagcggtgttgatttctgcaagaaactctgtggggtctcagtcattcgaagtggtgaaagcatggaaaacgcattgcgcgcatgttgcaaagggattaagatagggaagattctcatccatcgtgacggagacaatggaatgcagcttatatacgagaagcttccaagtgatatctccgagcgtcatgtcctgctattagatcctgttttaggcacaggtaactctgcaaatcaggcgatagaactactcatacagaaaggagtacctgaagcccacattatattcctcaatcttatctcagcgccagaaggaatccattgcgtctgcaaacggttcccaaagttgaagattgtgacgtcagaaatcgatcagtgtctgaacgaagagttcagggttataccaggcttgggtgagtttggtgatcgctactttggtaccgacgagtagaagaagtaccaaagtgtttgtcaatggttattgtgcttgtgtgtgaatggaagtgttttactttgtctaaagaatcttcacgggctttgtttttttttagttccctctgcttggaagcttctcgcttactaattactagaattgaaaactcatttcaagattcttggcttaagcagttcatatccgacgactttttcgtcaacaac

SEQ ID NO: 15378 - protein, 483 aa, Arabidopsis thaliana; identical to SEQ ID NO: 3864

SEQ ID NO: 15379 - DNA, 1398 bp, Arabidopsis thaliana; identical to SEQ ID NO: 3865
  CDS (1)..(1398)

SEQ ID NO: 15380 - protein, 465 aa, Arabidopsis thaliana; identical to SEQ ID NO: 3866

SEQ ID NO: 15381 - DNA, 1863 bp, Drosophila melanogaster
  CDS (77)..(1762)
cacgacgaagtaaatcaccgcgtgtttttttctaatcgctgcaactggctgctgcaatcactattctcttgtcgaaatgtctgtgacccagacgaaacaaatcaagttctacaacccatcgagttccgctagctccgacagcgatgaccgttcactctcggatgtcacagagcaactctatgtggatccgtatgccgacctaagcaatggcttgcccggggatctcaactgctgtccggcctcgcccaccacagtgcctgctaaagcatcgttggattcgcctcttaaacgttccggtaggagacagcgaaccacatccattggcaaccagaccaccacagcgaatccgtccgaatgcatcatacgcgcaaataaccgcacgatctacacggccggacgaccgccgtggtacaattgtgctgggcaacaggtggagcccttcgtcataggaatctgcggcggtagtgcctctggcaagaccacagtggctgagaaaatcatcgaaagcctagacgttccatgggtaacactgttgtccatggactgtttctacaagatccttaatgagaaacagcatgagcaggccctgatcaacgaatataacttcgatcacccggatgccttcgacatcgagctgctgctggacgtgctcaccaagctgaaggagggccgaaaggtggaagttcctgtctataattttgtgacacatggtcgtgagagccaaacgaaaaccatgtacggggccaatgtgatcatcttcgagggtattcttacctttcatagtcctgaagtacttaaattgctagacatgaagatatttgtggacacagatcccgatattcgtctggccaggcggttaagaagggacatctctcagcgcggacgagacctcaagggcgtgctgaagcaataccttaatatggttaagccctcctattgcaattacatagctccaacaatggcccatgcagatatcattgttcctcgtggaggcgacaacaaggtggccatccatctcattgttcagcacgtgcacacacagctgcaactgcgcggatttaagctgcgcgaaactctggccaactcctacaaggaccagccaatgccacattctctgcacttgctgcatcccacgccccaaataaagggcctgcacacgttcatccgttgccgaaatacgtcccgcgatgagtttattttttactcaaagcgcctgatacggctagtcattgaatatgcgctaagcttatttccctttaagaaaacaacagtggagactccacaaggtgtcctttacgagggcaagcgtatggaatcgcgaaaaatatgcggcgtctcaattctccgagctggtgaaacaatggaacaagccgtttgtgatgtgtgcaaggacattcgcatcggaaagatcctcatccagaccaatcttaagaccggcgagccggagctttactacctgaggctgcctaaagacataaaagactacaaggtgatactaatggatgccaccgtggccacaggagcagcggccatgatggccattcgggtgctgctggatcacgatgtacccgaggacaacattatcttggcctcgcttttgatggctgagatcggtgtgcactccattgcctatgccttcccaaaggtgaaaattgttacttccgctctggatccggagattaatagtaagttttatgttatacccggcattggtaactttggcgatcgctactttggcacggaaccctctgatgagtactaaggagatctgggccaatccatacctatatggaaccatcaagtttctaatgtatcttaggttaagttcaaaacgttacttaaattatgaatttggaacgagat

SEQ ID NO: 15382 - protein, 561 aa, Drosophila melanogaster; identical to SEQ ID NO: 3868

SEQ ID NO: 15383 - DNA, 1847 bp, Homo sapiens
  CDS (45)..(1691)
ttgcgcgccgcccggccaggcccgcaaagaggcctccgagcgccatggctgcgcccccggcccgcgcggacgctgatccttcgcccacgtcgccacctacggcccgagacacaccaggccggcaggctgagaaaagcgagaccgcgtgcgaggaccgcagcaatgcagagtccctggacaggctcctgccacctgtgggcactgggcgctctccccggaagcggaccaccagccagtgcaagtcagagcctcccctgctgcgtacaagcaagcgtaccatctacaccgccgggcggccgccctggtacaatgaacacggcacgcaatccaaagaggccttcgccatcggcttgggaggcggcagtgcctctgggaagaccactgtggccagaatgatcatcgaggccctggatgtgccctgggtggtcttgctgtccatggactccttctacaaggtgctgactgagcagcagcaggaacaggccgcacacaacaacttcaacttcgaccacccagatgcctttgacttcgacctcatcatttccaccctcaagaagctgaagcaggggaagagtgtcaaggtgcccatttatgacttcaccacgcacagccggaagaaggactggaaaacactgtatggtgcaaacgtcatcatctttgagggcatcatggcctttgctgacaagacactgttggagctcctggacatgaagatctttgtggacacagactccgacatccgcctggtacggcggctgcgccgggacatcagtgagcgcggccgggacatcgagggtgtcatcaagcagtacaacaagtttgtcaagccctccttcgaccagtacatccagcccaccatgcgcctggcagacatcgtggtccccagagggagcggcaacacggtggccatcaacctgattgtgcagcacgtgcacagccagctggaggagcgtgaactcagcgtcagggctgcgctggcctcggcacaccagtgccacccgctgccccggacgctgagcgtcctgaagagcacgccgcaggtacggggcatgcacaccatcatcagggacaaggagaccagtcgcgacgagttcatcttctactccaagagactgatgcggctgctcatcgagcacgcgctctccttcctgccctttcaggactgcgtcgtacagaccccgcaggggcaggactatgcgggcaagtgctatgcggggaagcagatcaccggtgtgtccattctgcgcgccggtgaaaccatggagcccgcgctgcgcgctgtgtgcaaagacgtgcgcatcggcaccatcctcatccagaccaaccagcttaccggggagcccgagctccactacctgaggctgcccaaggacatcagcgatgaccacgtgatcctcatggactgcaccgtgtccacgggcgcggcggccatgatggcagtgcgcgtgctcctggaccacgacgtgcctgaggacaagatctttttgctgtcgctgctcatggcagagatgggcgtgcactcagtggcctatgcatttccgcgagtgagaatcatcaccacggcggtggacaagcgggtcaatgaccttttccgcatcatcccaggcattgggaactttggcgaccgctactttgggacagacgcggtccccgatggcagtgacgaggaggaagtggcctacacgggttagctgcccagtgagccatcccgtccccaccaccctcctcctgcctcctgacccaggactgttgaatacaaagatgttaatttttaaaatgttactagtataatttattctatgcattttataaaataaataaagctttagaaaaaaaaaaaaaaaaaa

SEQ ID NO: 15384 - protein, 548 aa, Homo sapiens
MAAPPARADADPSPTSPPTARDTPGRQAEKSETACEDRSNAESLDRLLPPVGTGRSPRKRTTSQCKSEPPLLRTSKRTIYTAGRPPWYNEHGTQSKEAFAIGLGGGSASGKTTVARMIIEALDVPWVVLLSMDSFYKVLTEQQQEQAAHNNFNFDHPDAFDFDLIISTLKKLKQGKSVKVPIYDFTTHSRKKDWKTLYGANVIIFEGIMAFADKTLLELLDMKIFVDTDSDIRLVRRLRRDISERGRDIEGVIKQYNKFVKPSFDQYIQPTMRLADIVVPRGSGNTVAINLIVQHVHSQLEERELSVRAALASAHQCHPLPRTLSVLKSTPQVRGMHTIIRDKETSRDEFIFYSKRLMRLLIEHALSFLPFQDCVVQTPQGQDYAGKCYAGKQITGVSILRAGETMEPALRAVCKDVRIGTILIQTNQLTGEPELHYLRLPKDISDDHVILMDCTVSTGAAAMMAVRVLLDHDVPEDKIFLLSLLMAEMGVHSVAYAFPRVRIITTAVDKRVNDLFRIIPGIGNFGDRYFGTDAVPDGSDEEEVAYTG

SEQ ID NO: 15385 - DNA, 23 bp, Artificial sequence
  Primer sequence
atgtcccatcgtatagcaccttc

SEQ ID NO: 15386 - DNA, 27 bp, Artificial sequence
  Primer sequence
tcaatcacaaccaaaatactttgaatc

SEQ ID NO: 15387 - protein, 466 aa, Artificial sequence
  Consensus
  Variant (2)..(4): Xaa in position 2 to 4 is any amino acid
  Variant (5)..(8): Xaa in position 5 to 8 is any or no amino acid
  Variant (10)..(12): Xaa in position 10 to 12 is any amino acid
  Variant (16)..(38): Xaa in position 16 to 38 is any amino acid
  Variant (41)..(57): Xaa in position 41 to 57 is any amino acid
  Variant (60)..(60): Xaa in position 60 is any amino acid
  Variant (62)..(78): Xaa in position 62 to 78 is any amino acid
  Variant (80)..(84): Xaa in position 80 to 84 is any amino acid
  Variant (86)..(86): Xaa in position 86 is any amino acid
  Variant (88)..(88): Xaa in position 88 is any amino acid
  Variant (90)..(110): Xaa in position 90 to 110 is any amino acid
  Variant (114)..(124): Xaa in position 114 to 124 is any amino acid
  Variant (126)..(134): Xaa in position 126 to 134 is any amino acid
  Variant (135)..(163): Xaa in position 135 to 163 is any or no amino acid
  Variant (165)..(165): Xaa in position 165 is any amino acid
  Variant (167)..(168): Xaa in position 167 to 168 is any amino acid
  Variant (170)..(170): Xaa in position 170 is any amino acid
  Variant (173)..(174): Xaa in position 173 to 174 is any amino acid
  Variant (177)..(180): Xaa in position 177 to 180 is any amino acid
  Variant (183)..(189): Xaa in position 183 to 189 is any amino acid
  Variant (191)..(194): Xaa in position 191 to 194 is any amino acid
  Variant (198)..(214): Xaa in position 198 to 214 is any amino acid
  Variant (216)..(219): Xaa in position 216 to 219 is any amino acid
  Variant (221)..(222): Xaa in position 221 to 222 is any amino acid
  Variant (224)..(234): Xaa in position 224 to 234 is any amino acid
  Variant (236)..(293): Xaa in position 236 to 293 is any amino acid
  Variant (295)..(297): Xaa in position 295 to 297 is any amino acid
  Variant (299)..(341): Xaa in position 299 to 341 is any amino acid
  Variant (342)..(361): Xaa in position 342 to 361 is any or no amino acid
  Variant (363)..(363): Xaa in position 363 is any amino acid
  Variant (365)..(380): Xaa in position 365 to 380 is any amino acid
  Variant (382)..(383): Xaa in position 382 to 383 is any amino acid
  Variant (385)..(400): Xaa in position 385 to 400 is any amino acid
  Variant (401)..(423): Xaa in position 401 to 423 is any or no amino acid
  Variant (425)..(451): Xaa in position 425 to 451 is any amino acid
  Variant (453)..(455): Xaa in position 453 to 455 is any amino acid
  Variant (457)..(465): Xaa in position 457 to 465 is any amino acid
IXXXXXXXGXXXSGKXXXXXXXXXXXXXXXXXXXXXXXFYXXXXXXXXXXXXXXXXXFDXPXXXXXXXXXXXXXXXXXGXXXXXPXYXFXXXXXXXXXXXXXXXXXXXXXEGIXXXXXXXXXXXLXXXXXXXXXXXXXXXXXXXXXXXXXXXXXXXXXXXXXXDXDXXLXRRXXRDXXXXGRXXXXXXXQXXXXVKPXXXXXXXXXXXXXXXXXPXXXXNXXAXXXXXXXXXXXLXXXXXXXXXXXXXXXXXXXXXXXXXXXXXXXXXXXXXXXXXXXXXXXXXXXXXXXXXXFXXXRXXXXXXXXXXXXXXXXXXXXXXXXXXXXXXXXXXXXXXXXXXXXXXXXXXXXXXXXXXXXXXXRXGXXXXXXXXXXXXXXXXGXXLXXXXXXXXXXXXXXXXXXXXXXXXXXXXXXXXXXXXXXXPXXXXXXXXXXXXXXXXXXXXXXXXXXXAXXXLXXXXXXXXXI

SEQ ID NO: 15388 - protein, 528 aa, Artificial sequence
  Consensus
  Variant (3)..(4): Xaa in position 3 to 4 is any amino acid
  Variant (5)..(8): Xaa in position 5 to 8 is any or no amino acid
  Variant (10)..(12): Xaa in position 10 to 12 is any amino acid
  Variant (17)..(17): Xaa in position 17 is any amino acid
  Variant (19)..(21): Xaa in position 19 to 21 is any amino acid
  Variant (23)..(31): Xaa in position 23 to 31 is any amino acid
  Variant (33)..(36): Xaa in position 33 to 36 is any amino acid
  Variant (38)..(38): Xaa in position 38 is any amino acid
  Variant (41)..(42): Xaa in position 41 to 42 is any amino acid
  Variant (44)..(55): Xaa in position 44 to 55 is any amino acid
  Variant (57)..(57): Xaa in position 57 is any amino acid
  Variant (60)..(60): Xaa in position 60 is any amino acid
  Variant (62)..(62): Xaa in position 62 is any amino acid
  Variant (64)..(64): Xaa in position 64 is any amino acid
  Variant (66)..(75): Xaa in position 66 to 75 is any amino acid
  Variant (77)..(78): Xaa in position 77 to 78 is any amino acid
  Variant (80)..(84): Xaa in position 80 to 84 is any amino acid
  Variant (86)..(86): Xaa in position 86 is any amino acid
  Variant (88)..(88): Xaa in position 88 is any amino acid
  Variant (90)..(91): Xaa in position 90 to 91 is any amino acid
  Variant (93)..(106): Xaa in position 93 to 106 is any amino acid
  Variant (108)..(110): Xaa in position 108 to 110 is any amino acid
  Variant (114)..(117): Xaa in position 114 to 117 is any amino acid
  Variant (119)..(124): Xaa in position 119 to 124 is any amino acid
  Variant (126)..(128): Xaa in position 126 to 128 is any amino acid
  Variant (130)..(131): Xaa in position 130 to 131 is any amino acid
  Variant (134)..(134): Xaa in position 134 is any amino acid
  Variant (135)..(163): Xaa in position 135 to 163 is any or no amino acid
  Variant (165)..(165): Xaa in position 165 is any amino acid
  Variant (167)..(168): Xaa in position 167 to 168 is any amino acid
  Variant (170)..(170): Xaa in position 170 is any amino acid
  Variant (173)..(174): Xaa in position 173 to 174 is any amino acid
  Variant (177)..(179): Xaa in position 177 to 179 is any amino acid
  Variant (183)..(189): Xaa in position 183 to 189 is any amino acid
  Variant (191)..(194): Xaa in position 191 to 194 is any amino acid
  Variant (198)..(204): Xaa in position 198 to 204 is any amino acid
  Variant (206)..(209): Xaa in position 206 to 209 is any amino acid
  Variant (212)..(214): Xaa in position 212 to 214 is any amino acid
  Variant (216)..(219): Xaa in position 216 to 219 is any amino acid
  Variant (221)..(222): Xaa in position 221 to 222 is any amino acid
  Variant (224)..(229): Xaa in position 224 to 229 is any amino acid
  Variant (231)..(234): Xaa in position 231 to 234 is any amino acid
  Variant (236)..(245): Xaa in position 236 to 245 is any amino acid
  Variant (247)..(271): Xaa in position 247 to 271 is any amino acid
  Variant (273)..(273): Xaa in position 273 is any amino acid
  Variant (275)..(279): Xaa in position 275 to 279 is any amino acid
  Variant (281)..(290): Xaa in position 281 to 290 is any amino acid
  Variant (293)..(293): Xaa in position 293 is any amino acid
  Variant (296)..(297): Xaa in position 296 to 297 is any amino acid
  Variant (299)..(307): Xaa in position 299 to 307 is any amino acid
  Variant (309)..(341): Xaa in position 309 to 341 is any amino acid
  Variant (342)..(361): Xaa in position 342 to 361 is any or no amino acid
  Variant (363)..(363): Xaa in position 363 is any amino acid
  Variant (365)..(370): Xaa in position 365 to 370 is any amino acid
  Variant (372)..(379): Xaa in position 372 to 379 is any amino acid
  Variant (383)..(383): Xaa in position 383 is any amino acid
  Variant (386)..(391): Xaa in position 386 to 391 is any amino acid
  Variant (393)..(394): Xaa in position 393 to 394 is any amino acid
  Variant (395)..(417): Xaa in position 395 to 417 is any or no amino acid
  Variant (419)..(422): Xaa in position 419 to 422 is any amino acid
  Variant (425)..(426): Xaa in position 425 to 426 is any amino acid
  Variant (428)..(434): Xaa in position 428 to 434 is any amino acid
  Variant (436)..(436): Xaa in position 436 is any amino acid
  Variant (438)..(438): Xaa in position 438 is any amino acid
  Variant (440)..(445): Xaa in position 440 to 445 is any amino acid
  Variant (447)..(451): Xaa in position 447 to 451 is any amino acid
  Variant (453)..(455): Xaa in position 453 to 455 is any amino acid
  Variant (457)..(460): Xaa in position 457 to 460 is any amino acid
  Variant (462)..(465): Xaa in position 462 to 465 is any amino acid
  Variant (467)..(476): Xaa in position 467 to 476 is any amino acid
  Variant (478)..(484): Xaa in position 478 to 484 is any amino acid
  Variant (486)..(525): Xaa in position 486 to 525 is any amino acid
IGXXXXXXGXXXSGKTXVXXXIXXXXXXXXXVXXXXDXFYXXLXXXXXXXXXXXXYXFDXPXAXDXXXXXXXXXXLXXGXXXXXPXYXFXXHXXXXXXXXXXXXXXVXXXEGIXXXXDXXXXXXLXXXKXXVDXXXXXXXXXXXXXXXXXXXXXXXXXXXXXXDXDXXLXRRXXRDXXXRGRXXXXXXXQXXXXVKPXXXXXXXPXXXXADXXXPXXXXNXXAXXXXXXHXXXXLXXXXXXXXXXLXXXXXXXXXXXXXXXXXXXXXXXXXTXQXXXXXTXXXXXXXXXXDFXFYXXRXXXXXXXXXLXXXXXXXXXXXXXXXXXXXXXXXXXXXXXXXXXXXXXXXXXXXXXXXXXXXXXRXGXXXXXXLXXXXXXXXIGKXLIXXXXXXGXXXXXXXXXXXXXXXXXXXXXXXXXLXXXXLPXXIXXXXXXXVXLXDXXXXXXGXXXXXAXXXLXXXXVXXXXIXXXXXXXXXXGXXXXXXXFXXXXXXXXXXXXXXXXXXXXXXXXXXXXXXXXXXXXXXXXYFG

SEQ ID NO: 15389 - protein, 45 aa, Artificial sequence
  Consensus
  Variant (1)..(1): Xaa in position 1 is Phe, Tyr, Ser or Arg
  Variant (2)..(2): Xaa in position 2 is Val, Ile, Ala or Phe
  Variant (4)..(4): Xaa in position 4 is Gly or Ala
  Variant (5)..(8): Xaa in position 5 to 8 is any or no amino acid
  Variant (9)..(9): Xaa in position 9 is Val, Ile or Leu
  Variant (10)..(10): Xaa in position 10 is any amino acid
  Variant (12)..(12): Xaa in position 12 is any amino acid
  Variant (13)..(13): Xaa in position 13 is Ser, Ala or Thr
  Variant (14)..(14): Xaa in position 14 is Ala, Gly or Ser
  Variant (18)..(19): Xaa in position 18 to 19 is Thr or Ser
  Variant (20)..(20): Xaa in position 20 is Val or Leu
  Variant (21)..(21): Xaa in position 21 is Cys, Ala or Ser
  Variant (22)..(23): Xaa in position 22 to 23 is any amino acid
  Variant (24)..(24): Xaa in position 24 is Ile or Leu
  Variant (25)..(25): Xaa in position 25 is Ile, Val, Met or Phe
  Variant (26)..(27): Xaa in position 26 to 27 is any amino acid
  Variant (28)..(28): Xaa in position 28 is Leu or Ile
  Variant (29)..(30): Xaa in position 29 to 30 is any amino acid
  Variant (31)..(31): Xaa in position 31 is Pro, Gln, His or Lys
  Variant (32)..(32): Xaa in position 32 is Trp, Arg or His
  Variant (33)..(33): Xaa in position 33 is Val, Thr, Ala or Ile
  Variant (34)..(34): Xaa in position 34 is Val or Thr
  Variant (35)..(35): Xaa in position 35 is Leu, Val or Ile
  Variant (36)..(36): Xaa in position 36 is Ile, Leu or Val
  Variant (37)..(37): Xaa in position 37 is Ser, Asn, Glu or Thr
  Variant (38)..(38): Xaa in position 38 is any amino acid
  Variant (39)..(39): Xaa in position 39 is Asp or Glu
  Variant (40)..(40): Xaa in position 40 is Ser, Asn or Cys
  Variant (43)..(44): Xaa in position 43 to 44 is any amino acid
  Variant (45)..(45): Xaa in position 45 is Leu, Pro or Val
XXIXXXXXXXGXXXSGKXXXXXXXXXXXXXXXXXXXXXXXFYXXX

SEQ ID NO: 15390 - protein, 78 aa, Artificial sequence
  Consensus
  Variant (1)..(1): Xaa in position 1 is Tyr, Phe or His
  Variant (2)..(2): Xaa in position 2 is Asn or Asp
  Variant (5)..(5): Xaa in position 5 is any amino acid
  Variant (7)..(7): Xaa in position 7 is any amino acid
  Variant (8)..(8): Xaa in position 8 is Ala or Ser
  Variant (9)..(9): Xaa in position 9 is any amino acid
  Variant (10)..(10): Xaa in position 10 is Asp or Asn
  Variant (11)..(11): Xaa in position 11 is any amino acid
  Variant (12)..(12): Xaa in position 12 is Glu or Asp
  Variant (13)..(13): Xaa in position 13 is any amino acid
  Variant (14)..(14): Xaa in position 14 is Leu, Ala or Ile
  Variant (15)..(17): Xaa in position 15 to 17 is any amino acid
  Variant (18)..(18): Xaa in position 18 is Leu, Met, Val, Ile or Ala
  Variant (19)..(20): Xaa in position 19 to 20 is any amino acid
  Variant (21)..(21): Xaa in position 21 is Leu or Ile
  Variant (22)..(22): Xaa in position 22 is Lys or Arg
  Variant (23)..(23): Xaa in position 23 is any amino acid
  Variant (25)..(28): Xaa in position 25 to 28 is any amino acid
  Variant (29)..(29): Xaa in position 29 is Ile, Val or Met
  Variant (31)..(31): Xaa in position 31 is any amino acid
  Variant (33)..(33): Xaa in position 33 is Asp, Ser, Cys or Asn
  Variant (35)..(36): Xaa in position 35 to 36 is any amino acid
  Variant (37)..(37): Xaa in position 37 is His or Tyr
  Variant (38)..(38): Xaa in position 38 is any amino acid
  Variant (39)..(39): Xaa in position 39 is Arg, Ser or Asn
  Variant (40)..(44): Xaa in position 40 to 44 is any amino acid
  Variant (45)..(46): Xaa in position 45 to 46 is any or no amino acid
  Variant (47)..(47): Xaa in position 47 is Val, Ile, Met or Leu
  Variant (48)..(48): Xaa in position 48 is Tyr, Asn, Ser or Phe
  Variant (49)..(49): Xaa in position 49 is Gly, Pro, Ala or Ser
  Variant (50)..(50): Xaa in position 50 is any amino acid
  Variant (51)..(51): Xaa in position 51 is Asp, Ser, Asn or His
  Variant (52)..(52): Xaa in position 52 is Val or Ile
  Variant (53)..(53): Xaa in position 53 is Ile, Val or Leu
  Variant (54)..(54): Xaa in position 54 is Ile or Val
  Variant (55)..(55): Xaa in position 55 is Leu, Phe, Ile or Val
  Variant (59)..(59): Xaa in position 59 is Leu, Tyr, Phe or Met
  Variant (60)..(60): Xaa in position 60 is any amino acid
  Variant (61)..(61): Xaa in position 61 is Leu or Phe
  Variant (62)..(62): Xaa in position 62 is any amino acid
  Variant (63)..(63): Xaa in position 63 is Asp, His or Ser
  Variant (64)..(65): Xaa in position 64 to 65 is any amino acid
  Variant (66)..(66): Xaa in position 66 is any or no amino acid
  Variant (67)..(67): Xaa in position 67 is Val, Leu or Ile
  Variant (68)..(69): Xaa in position 68 to 69 is any amino acid
  Variant (71)..(71): Xaa in position 71 is Met, Leu or Ile
  Variant (72)..(72): Xaa in position 72 is Asp or Asn
  Variant (73)..(73): Xaa in position 73 is Met, Leu, Ile or Val
  Variant (74)..(74): Xaa in position 74 is Lys or Ser
  Variant (75)..(75): Xaa in position 75 is Ile or Val
  Variant (76)..(76): Xaa in position 76 is Phe or Tyr
  Variant (77)..(77): Xaa in position 77 is Val, Cys or Leu
  Variant (78)..(78): Xaa in position 78 is Asp, Cys or Glu
XXFDXPXXXXXXXXXXXXXXXXXGXXXXXPXYXFXXXXXXXXXXXXXXXXXXXXXEGIXXXXXXXXXXXLXXXXXXXX

SEQ ID NO: 15391 - protein, 72 aa, Artificial sequence
  Consensus
  Variant (2)..(2): Xaa in position 2 is any amino acid
  Variant (4)..(4): Xaa in position 4 is Ile, Val, Thr or Leu
  Variant (5)..(5): Xaa in position 5 is Arg or Cys
  Variant (7)..(7): Xaa in position 7 is Ala, Ser, Val or Thr
  Variant (10)..(10): Xaa in position 10 is Ile or Leu
  Variant (11)..(11): Xaa in position 11 is any amino acid
  Variant (14)..(16): Xaa in position 14 to 16 is any amino acid
  Variant (17)..(17): Xaa in position 17 is Arg, Lys or Asn
  Variant (20)..(20): Xaa in position 20 is Asp, Gln, Asn or Glu
  Variant (21)..(21): Xaa in position 21 is Ile, Leu, Val or Met
  Variant (22)..(23): Xaa in position 22 to 23 is any amino acid
  Variant (24)..(24): Xaa in position 24 is Val, Ile, Cys or Ala
  Variant (25)..(25): Xaa in position 25 is Leu, Ile or Met
  Variant (26)..(26): Xaa in position 26 is any amino acid
  Variant (28)..(28): Xaa in position 28 is Tyr or Trp
  Variant (29)..(31): Xaa in position 29 to 31 is any amino acid
  Variant (35)..(35): Xaa in position 35 is any amino acid
  Variant (36)..(36): Xaa in position 36 is Phe, Ala or Tyr
  Variant (37)..(38): Xaa in position 37 to 38 is any amino acid
  Variant (39)..(39): Xaa in position 39 is Phe or Tyr
  Variant (40)..(40): Xaa in position 40 is Val or Ile
  Variant (41)..(41): Xaa in position 41 is any amino acid
  Variant (42)..(42): Xaa in position 42 is Pro or Arg
  Variant (43)..(46): Xaa in position 43 to 46 is any amino acid
  Variant (47)..(47): Xaa in position 47 is Ala or Thr
  Variant (48)..(48): Xaa in position 48 is Asp or Asn
  Variant (49)..(49): Xaa in position 49 is Ile, Ala, Val or Leu
  Variant (50)..(50): Xaa in position 50 is Ile, Val or Leu
  Variant (51)..(51): Xaa in position 51 is Ile, Val or Phe
  Variant (53)..(53): Xaa in position 53 is Arg, Ser or His
  Variant (54)..(54): Xaa in position 54 is Gly, Met or Tyr
  Variant (55)..(55): Xaa in position 55 is any amino acid
  Variant (56)..(56): Xaa in position 56 is any or no amino acid
  Variant (58)..(58): Xaa in position 58 is any amino acid
  Variant (59)..(59): Xaa in position 59 is Val, Ile, Thr or Leu
  Variant (61)..(61): Xaa in position 61 is Ile, Val, Thr or Met
  Variant (62)..(62): Xaa in position 62 is any amino acid
  Variant (63)..(63): Xaa in position 63 is Leu or Met
  Variant (64)..(64): Xaa in position 64 is Ile, Val, Leu or Met
  Variant (65)..(65): Xaa in position 65 is any amino acid
  Variant (66)..(66): Xaa in position 66 is Gln, Asn or Lys
  Variant (67)..(67): Xaa in position 67 is His, Phe or Asn
  Variant (68)..(68): Xaa in position 68 is Ile, Val or Leu
  Variant (69)..(71): Xaa in position 69 to 71 is any amino acid
DXDXXLXRRXXRDXXXXGRXXXXXXXQXXXXVKPXXXXXXXXXXXXXXXXXPXXXXNXXAXXXXXXXXXXXL

SEQ ID NO: 15392 - protein, 42 aa, Artificial sequence
  Consensus
  Variant (1)..(1): Xaa in position 1 is Leu, Ile or Val
  Variant (2)..(3): Xaa in position 2 to 3 is any amino acid
  Variant (4)..(4): Xaa in position 4 is Leu, Ile or Val
  Variant (5)..(6): Xaa in position 5 to 6 is any amino acid
  Variant (7)..(7): Xaa in position 7 is Thr, Asn or Ser
  Variant (8)..(8): Xaa in position 8 is any amino acid
  Variant (9)..(9): Xaa in position 9 is Gln, His or Glu
  Variant (10)..(12): Xaa in position 10 to 12 is any amino acid
  Variant (13)..(13): Xaa in position 13 is Met, Leu or Ile
  Variant (14)..(14): Xaa in position 14 is any amino acid
  Variant (15)..(15): Xaa in position 15 is Thr or Ser
  Variant (16)..(16): Xaa in position 16 is any amino acid
  Variant (17)..(17): Xaa in position 17 is Ile, Leu or Val
  Variant (18)..(25): Xaa in position 18 to 25 is any amino acid
  Variant (26)..(26): Xaa in position 26 is Asp, Glu or Asn
  Variant (27)..(27): Xaa in position 27 is Phe, Trp, Leu or His
  Variant (28)..(28): Xaa in position 28 is any amino acid
  Variant (30)..(30): Xaa in position 30 is Tyr, Phe, Trp or Gln
  Variant (31)..(32): Xaa in position 31 to 32 is any amino acid
  Variant (34)..(34): Xaa in position 34 is Leu, Ile or Phe
  Variant (35)..(35): Xaa in position 35 is any amino acid
  Variant (36)..(36): Xaa in position 36 is Arg, Thr or Ile
  Variant (37)..(37): Xaa in position 37 is Leu, Ile or Met
  Variant (38)..(38): Xaa in position 38 is Val, Leu or Ile
  Variant (39)..(39): Xaa in position 39 is Val, Ile, Met or Leu
  Variant (40)..(41): Xaa in position 40 to 41 is any amino acid
  Variant (42)..(42): Xaa in position 42 is Ala, Gly, Cys or Thr
XXXXXXXXXXXXXXXXXXXXXXXXXXXXFXXXRXXXXXXXXX

SEQ ID NO: 15393 - protein, 29 aa, Artificial sequence
  Consensus
  Variant (1)..(1): Xaa in position 1 is Gly or Ala
  Variant (2)..(2): Xaa in position 2 is Val, Ile or Leu
  Variant (3)..(3): Xaa in position 3 is any amino acid
  Variant (4)..(4): Xaa in position 4 is Ile, Val or Thr
  Variant (5)..(5): Xaa in position 5 is Ile, Leu, Val or Met
  Variant (7)..(7): Xaa in position 7 is Ser, Ala or Gly
  Variant (9)..(10): Xaa in position 9 to 10 is any amino acid
  Variant (11)..(11): Xaa in position 11 is Met, Phe or Leu
  Variant (12)..(12): Xaa in position 12 is Glu, Met or Asp
  Variant (13)..(13): Xaa in position 13 is any amino acid
  Variant (14)..(14): Xaa in position 14 is Ala, Ser or Gly
  Variant (15)..(15): Xaa in position 15 is Leu, Val or Ile
  Variant (16)..(19): Xaa in position 16 to 19 is any amino acid
  Variant (20)..(20): Xaa in position 20 is Lys, Pro or Asn
  Variant (21)..(24): Xaa in position 21 to 24 is any amino acid
  Variant (26)..(26): Xaa in position 26 is Lys, Thr or Arg
  Variant (27)..(27): Xaa in position 27 is Ile, Leu or Val
  Variant (29)..(29): Xaa in position 29 is Ile, Leu or Val
XXXXXRXGXXXXXXXXXXXXXXXXGXXLX

SEQ ID NO: 15394 - protein, 49 aa, Artificial sequence
  Consensus
  Variant (1)..(1): Xaa in position 1 is Leu or Ile
  Variant (2)..(2): Xaa in position 2 is His, Ile, Tyr or Val
  Variant (3)..(5): Xaa in position 3 to 5 is any amino acid
  Variant (6)..(6): Xaa in position 6 is Leu, Ile or Phe
  Variant (8)..(9): Xaa in position 8 to 9 is any amino acid
  Variant (10)..(10): Xaa in position 10 is Ile or Leu
  Variant (11)..(14): Xaa in position 11 to 14 is any amino acid
  Variant (15)..(17): Xaa in position 15 to 17 is any or no amino acid
  Variant (18)..(18): Xaa in position 18 is Val or Ile
  Variant (19)..(19): Xaa in position 19 is Leu, Phe, Ile or Val
  Variant (20)..(20): Xaa in position 20 is Leu or Ile
  Variant (21)..(21): Xaa in position 21 is Leu, Met, Phe or Cys
  Variant (22)..(22): Xaa in position 22 is Asp, Ala or Glu
  Variant (23)..(24): Xaa in position 23 to 24 is any amino acid
  Variant (25)..(25): Xaa in position 25 is Leu, Ile, Val or Met
  Variant (26)..(26): Xaa in position 26 is any amino acid
  Variant (27)..(27): Xaa in position 27 is any or no amino acid
  Variant (28)..(28): Xaa in position 28 is Thr, Ser, Asn or Ala
  Variant (29)..(29): Xaa in position 29 is Gly or His
  Variant (30)..(31): Xaa in position 30 to 31 is any amino acid
  Variant (32)..(32): Xaa in position 32 is Ala, Val, Met or Ile
  Variant (33)..(34): Xaa in position 33 to 34 is any amino acid
  Variant (36)..(36): Xaa in position 36 is Ile, Val or Thr
  Variant (37)..(37): Xaa in position 37 is any amino acid
  Variant (38)..(38): Xaa in position 38 is Val, Leu, Tyr or Ile
  Variant (40)..(40): Xaa in position 40 is Leu, Ile, Val or Thr
  Variant (41)..(43): Xaa in position 41 to 43 is any amino acid
  Variant (44)..(44): Xaa in position 44 is Val or Ile
  Variant (45)..(48): Xaa in position 45 to 48 is any amino acid
XXXXXXPXXXXXXXXXXXXXXXXXXXXXXXXXXXAXXXLXXXXXXXXXI

SEQ ID NO: 15395 - DNA, 612 bp, Escherichia coli
  CDS (1)..(612)
atgaacatgccaatgaccgaaagaataagagcaggcaagctatttaccgatatgtgcgaaggcttaccggaaaaaagacttcgtgggaaaacgttaatgtatgagtttaatcactcgcatccatcagaagttgaaaaaagagaaagcctgattaaagaaatgtttgccacggtaggggaaaacgcctgggtagaaccgcctgtctatttctcttacggttccaacatccatataggccgcaatttttatgcaaatttcaatttaaccattgtcgatgactacacggtaacaatcggtgataacgtactgattgcacccaacgttactctttccgttacgggacaccctgtacaccatgaattgagaaaaaacggcgagatgtactcttttccgataacgattggcaataacgtctggatcggaagtcatgtggttattaatccaggcgtcaccatcggggataattctgttattggcgcgggtagtatcgtcacaaaagacattccaccaaacgtcgtggcggctggcgttccttgtcgggttattcgcgaaataaacgaccgggataagcactattatttcaaagattataaagttgaatcgtcagtttaa

SEQ ID NO: 15396 - protein, 203 aa, Escherichia coli
MNMPMTERIRAGKLFTDMCEGLPEKRLRGKTLMYEFNHSHPSEVEKRESLIKEMFATVGENAWVEPPVYFSYGSNIHIGRNFYANFNLTIVDDYTVTIGDNVLIAPNVTLSVTGHPVHHELRKNGEMYSFPITIGNNVWIGSHVVINPGVTIGDNSVIGAGSIVTKDIPPNVVAAGVPCRVIREINDRDKHYYFKDYKVESSV

SEQ ID NO: 15397 - DNA, 558 bp, Mesorhizobium loti MAFF303099
  CDS (1)..(558): transl_table=11
atggcgcatgagggccgcacaaggacaattgctgcgagaacgtcggaatcggcggccatgctggcggacgtcaagcgggcgatggcgatcactgcccgtctcaaccgcttgacgtttaacgacgcggacgaagtccgcttcctgttcggcgagctgatcggcagacaagtggacggcagcttcctgctgatcccgcccttctacgcgactggcggcgccgggacccgagtagggcgcaatgtcttcatcaatcagaactgcactttttatgatcttggcgggctcgacattgccgacgatgtgctgatcgggccgaatgtcagcctgatcacgtcaggccatccgctcgaaccgtcgcggcgccgcgccttcaccaccgcgaggccgatcgtcatcgaacgcaacgtctggatcgccgccggcgctacggtgatcggcggcgtgacggtcggcgaaaacgccgtcgtcgcggcaggctcggtggtcacgaaagacgttcccgcgaacacgcttgtcggcggaaacccggcgcgggttatccggtccattgccgagtga

SEQ ID NO: 15398 - protein, 185 aa, Mesorhizobium loti MAFF303099
MAHEGRTRTIAARTSESAAMLADVKRAMAITARLNRLTFNDADEVRFLFGELIGRQVDGSFLLIPPFYATGGAGTRVGRNVFINQNCTFYDLGGLDIADDVLIGPNVSLITSGHPLEPSRRRAFTTARPIVIERNVWIAAGATVIGGVTVGENAVVAAGSVVTKDVPANTLVGGNPARVIRSIAE

SEQ ID NO: 15399 - DNA, 591 bp, Mesorhizobium loti MAFF303099
  CDS (1)..(591): transl_table=11
atgggatttgcaagaaaacttcgaaccatgctcggtcttagacgagcgccaaagccggaaaagataccgctgcacgcatcgatcgggcgaagaacgctcttttacacgaagcccagcaatatctatggctgtgacgagacctcgccgcttgagataggagcgttctgctccatagcggaggagacgctgttcctttgccgcgccaatcatccgacgcacttcgtctcgacttttccatttgaagttcacatgacaaattcgatcgcggcctttgatgacctggtggtcaacgggccgacaaaaatcggcaacgatgtctggattggacgacgcgcaatcatcctgccgggaataaccattggagatggtgccgttgtcggagccggctcggtcgtcacgaaggacgtcgcaccctacgcggtcgtcgcgggaaatcccgccaggttcatccggaacaggtttacggatgaccagatcgcgagtttgctggcgattcgctggtgggagtggagcgacgagaggatcaaggccgaactgccgaccttccttggatcgattgatgccttcatcgccgccaaccgtgcatcatag

SEQ ID NO: 15400 - protein, 196 aa, Mesorhizobium loti MAFF303099
MGFARKLRTMLGLRRAPKPEKIPLHASIGRRTLFYTKPSNIYGCDETSPLEIGAFCSIAEETLFLCRANHPTHFVSTFPFEVHMTNSIAAFDDLVVNGPTKIGNDVWIGRRAIILPGITIGDGAVVGAGSVVTKDVAPYAVVAGNPARFIRNRFTDDQIASLLAIRWWEWSDERIKAELPTFLGSIDAFIAANRAS

SEQ ID NO: 15401 - DNA, 558 bp, Mesorhizobium loti MAFF303099
  CDS (1)..(558): transl_table=11
atgacgggaagcgaacgcgcgaagatggcggccggcgaatggtacacttgcctcgatgacgaactggaggcgctgcgtgccctcgcgcgcgacgcggtgttcgagcacaattgcctgccgccgcggcagcgcggcaatctcgggccgggcctgaaggcattgctcggcggcgtgggcgatggcgcccgcgtcgaggcgccgttccactgcgcctacggcttaaacatttttctcggcgacggcgtcttcctcaatgccggctgcaccattctcgacacggcagccgtacgcatcggcaagggaacgctgcttggccccaatgtgcagatctattgcgccgaacaccacaggcaagctgctgggcgacaggcggggctggagatcgccaggccggtcgagatcggcgcccatgcctggatcggcggcagcgccatcatccttggcggcgtcaccatcggcgagggcgccatcgtcggcgccggcgcggtggtgacgcgtgatgtgcctgcaaacgagacggcggtcggcaatccggcgcgaccggtcaagcgcggctga

SEQ ID NO: 15402 - protein, 185 aa, Mesorhizobium loti MAFF303099
MTGSERAKMAAGEWYTCLDDELEALRALARDAVFEHNCLPPRQRGNLGPGLKALLGGVGDGARVEAPFHCAYGLNIFLGDGVFLNAGCTILDTAAVRIGKGTLLGPNVQIYCAEHHRQAAGRQAGLEIARPVEIGAHAWIGGSAIILGGVTIGEGAIVGAGAVVTRDVPANETAVGNPARPVKRG

SEQ ID NO: 15403 - DNA, 579 bp, Vibrio cholerae O1 biovar eltor str. N16961
  CDS (1)..(579): transl_table=11
atgaagatgagcgaattagaaaaaatgctcaaaggtgaacactttgacggcgcatccgcggaaattgaggcactgcgcagccaagcgggaaggctcaagctcgagatcaaccaaagtcttgatgaagcggagcgctatgcactgcaacgtgagctgtttggtcatctcggtcataaaagttgcgtacagcctccttttcactgtgagtttggcaaaaccattcgtattggcgatcacaccttcatcaacatgaacgtggtgatgttggatggtgcacccatcacgattggggatcacgtattaatcggcccgagtactcaattttacaccgcatcgcactctttagattatcgtcgtcgccaagcgtgggaaaccatctgcaaaccgattgtgattgaagatgatgtctggattggtggaaatgtcgtcattaatcaaggggtcacgattggtgctcgttctgtcgtagcggcgaattccgtggtcaatcaggatgttccaccggatacgttagtcggtggcactcctgcgcgtattttgcgctcactaaaagatcctgccgaatcaatggcagaatga

SEQ ID NO: 15404 - protein, 192 aa, Vibrio cholerae O1 biovar eltor str. N16961
MKMSELEKMLKGEHFDGASAEIEALRSQAGRLKLEINQSLDEAERYALQRELFGHLGHKSCVQPPFHCEFGKTIRIGDHTFINMNVVMLDGAPITIGDHVLIGPSTQFYTASHSLDYRRRQAWETICKPIVIEDDVWIGGNVVINQGVTIGARSVVAANSVVNQDVPPDTLVGGTPARILRSLKDPAESMAE

SEQ ID NO: 15405 - DNA, 561 bp, Bacillus halodurans C-125
  CDS (1)..(561): transl_table=11
atgagaacagaaaaagaaaaaatgctagcaggagaacgatataaggcatgggatccagagctagtcaaggatcgagagagggcaagacggttaacacgtctgtttaatcaaacgacagaaactgaggagaagcagcgaacggaattgatcaaagagctgttcggctctatgggagaaagcgtcaatattgaaccaacatttcgatgtgattatggctataacatccatgtagggaacaacttttttgccaattttgattgtgttattttagatgtttgtgaagtgcgaattggcgcaaactgtatgcttgctccgggagtccatatttatacagctacccaccccattcacccacttgagcgagtggagggtcctgaatatggaaaaccggttacgatccggaataatgtttggattggtggccgagcgatcgttaatcctggagtgacgataggaaataatgctgttattgcctcgggatcagtagtaacgaaagatgttccagaaaatgtagttgttgctggaaatcctgccaaagttattcaaacgattgacgtgtaa

SEQ ID NO: 15406 - protein, 186 aa, Bacillus halodurans C-125
MRTEKEKMLAGERYKAWDPELVKDRERARRLTRLFNQTTETEEKQRTELIKELFGSMGESVNIEPTFRCDYGYNIHVGNNFFANFDCVILDVCEVRIGANCMLAPGVHIYTATHPIHPLERVEGPEYGKPVTIRNNVWIGGRAIVNPGVTIGNNAVIASGSVVTKDVPENVVVAGNPAKVIQTIDV

SEQ ID NO: 15407 - DNA, 612 bp, Pasteurella multocida subsp. multocida str. Pm70
  CDS (1)..(612): transl_table=11
atgttgacagacaaagaaaaacgacatttaggtttagcgcatcagccttatgatccggaattggcagagatgcgtttacgtaataaagaattattgcatgaatataatgtgttaactcgcccttcagataaacaaacaaaagcccgtttgatcttatctattcttggtaaagctgcgaatacacctcacattaatacgcctttttattgtgattacgggcaatttattgaagtcggaaaaaacttttttgcgaattatcactgtactatcctagatacaggaggcgtgaagattggcgatgatgtgttatttgctccgaatgtgagtttatacaccgtagggcatccaattgatcctgaattgcgtaaggcagaatgggaacaagcactacccattgtgattgggaataatgtgtggattgggggcaatgtggtgattttaggcggcgttactattggtgacaatactgtgattggggcgggttctgtggtcacaaaagatattccggcaaattgtgtagccgtgggcaatccatgtaaagtacaacgaatgattagcccgcaggaccgagaggattatttacaacgttttaaaccagactggaatgattga

SEQ ID NO: 15408 - protein, 203 aa, Pasteurella multocida subsp. multocida str. Pm70
MLTDKEKRHLGLAHQPYDPELAEMRLRNKELLHEYNVLTRPSDKQTKARLILSILGKAANTPHINTPFYCDYGQFIEVGKNFFANYHCTILDTGGVKIGDDVLFAPNVSLYTVGHPIDPELRKAEWEQALPIVIGNNVWIGGNVVILGGVTIGDNTVIGAGSVVTKDIPANCVAVGNPCKVQRMISPQDREDYLQRFKPDWND

SEQ ID NO: 15409 - DNA, 771 bp, Lactococcus lactis subsp. lactis Il1403
  CDS (1)..(771): transl_table=11
atggaagcacaaaaactatcagcacaagaaataattcaatttatcgggaacgctgagaaaaaaacacgtgtcaaggtaaccttatcaggaatgcctagttttaaagcagctggttttcttgctgaaaatgggcgtccaaattttaaggcactagccaataaaggaatccaagttctgggagattttcacacacattacagcttaaaaattatcattggagattggcaagcagtacgtccattgctttctggcttgactgagaataaagattacaccctagaacttgaaggccgaaattcagctgttcctctccttgataccagagaaatcaatgctcgaattgagccaggagcaattattcgtgaccaagtaactattggcgatagtgcggtcattatgatgggggctatcatcaatatcggagctgaaattggtgaaggcacaatgattgatatgggggcaattttgggtggccgtgcgacggttggtaagaactctcatattggtgctggagctgttttggctggtgttattgagcctgcaagtgctgaacctgttcgtgttggggataatgtccttgtgggagccaatgctgttgtaatcgaaggagtacaagtcggttcaggttctgttgttgcagcaggggcaattgttacccaagatgttccagaaaacgttgttgttgcgggtgttccagctcgaattatcaaagaaatagatgaaaaaacacaacaaaaaacggctttagaagatgcccttagaaatttgtaa

SEQ ID NO: 15410 - protein, 256 aa, Lactococcus lactis subsp. lactis Il1403
MEAQKLSAQEIIQFIGNAEKKTRVKVTLSGMPSFKAAGFLAENGRPNFKALANKGIQVLGDFHTHYSLKIIIGDWQAVRPLLSGLTENKDYTLELEGRNSAVPLLDTREINARIEPGAIIRDQVTIGDSAVIMMGAIINIGAEIGEGTMIDMGAILGGRATVGKNSHIGAGAVLAGVIEPASAEPVRVGDNVLVGANAVVIEGVQVGSGSVVAAGAIVTQDVPENVVVAGVPARIIKEIDEKTQQKTALEDALRNL

SEQ ID NO: 15411 - DNA, 612 bp, Lactococcus lactis subsp. lactis Il1403
  CDS (1)..(612): transl_table=11
atgaataagaaacaattaaagacactaattaattcaggaaaaacatacgatgacgccgatttagacttgtctgaatatcgtaaccatgccctttttgaaagccgccgttataatcaaaaaattaataacaatgagggttatcatccagaaatcttagagaatctttttgaacatttaggtaaaaatccttatattgaatctaattttcgctgtgaatttggcttcaatataagaattggcgataatgtcctcattaatcatgatatgattattttagactgtaatcaggtcacgattggcaataatgtttactttggtccccgctgtggtttatttgctgccaatcattcggaagatccaagtttaagaactgctggcggggtctattcaaagccaattacggttgggaaccaagtctggttgggggcaaatgtcagccttcttcctggtgtaagcattggtgacaatagtattattggtgcaggaagcgtcgttaccaaagatattccagaaaatgtgattgctgctggtaatccttgccaagtgatacgtccaattcgaacagaggatcaagaatggattaaaaaagataaattatttatttcaaaataa

SEQ ID NO: 15412 - protein, 203 aa, Lactococcus lactis subsp. lactis Il1403
MNKKQLKTLINSGKTYDDADLDLSEYRNHALFESRRYNQKINNNEGYHPEILENLFEHLGKNPYIESNFRCEFGFNIRIGDNVLINHDMIILDCNQVTIGNNVYFGPRCGLFAANHSEDPSLRTAGGVYSKPITVGNQVWLGANVSLLPGVSIGDNSIIGAGSVVTKDIPENVIAAGNPCQVIRPIRTEDQEWIKKDKLFISK

SEQ ID NO: 15413 - DNA, 603 bp, Lactococcus lactis subsp. lactis Il1403
  CDS (1)..(603): transl_table=11
atgagaacgttagatgaagcagaaaaattacgtttagcaaagctatctatttttgataaaataaataaaggtgattggtaccaatatagcaaagaagtagaactacaaaaaatagtcaaaaattctagtcaaaaaatttctgaaattaatgataaggcaaaagaaaatattgatgaagcaagaaaactcttggaggattttcttccaaatttacctcaaagttcagaaatatattttccaataattgctttggaatatcccaatcgttttaaagtcggagaaaatacttttattaatagtggacttcagattattagtgcgggtaaggttaagattgggaaaaactgttttattggaccaaattgtcaattatttacacctaatcatcatgccagggatgtgtttttaagacgtgaaggctggcaatatgatgggccaatagtaattggtaatgattgttggcttggcggttcagtgattcttttgcctggagtttctttaggagatgatgttgtcgttggtgctggctctgtggtgaccaaatcatttcctagccactgcataattgctggaaatccggcacgcttaataaaaaatgaataa

SEQ ID NO: 15414 - protein, 200 aa, Lactococcus lactis subsp. lactis Il1403
MRTLDEAEKLRLAKLSIFDKINKGDWYQYSKEVELQKIVKNSSQKISEINDKAKENIDEARKLLEDFLPNLPQSSEIYFPIIALEYPNRFKVGENTFINSGLQIISAGKVKIGKNCFIGPNCQLFTPNHHARDVFLRREGWQYDGPIVIGNDCWLGGSVILLPGVSLGDDVVVGAGSVVTKSFPSHCIIAGNPARLIKNE

SEQ ID NO: 15415 - DNA, 612 bp, Lactococcus lactis subsp. lactis Il1403
  CDS (1)..(612): transl_table=11
gtgaaaatgagcgaatttaaaagaatggttgctggcgaactctataaagcaagtaaagttgaaccagaatacaaacctgataataatcgagcattaaatcaagaaattaaccaactcaatctacttgatacagaaaaaattgtggcacttgaaaaagaactttttggtcaaactggtgatgagttatttgtaaatccaccgctttacatcgactatggtaaaaatacaagaattggtcagcgcttttatgccaatatggactgtatttttctggatgttgcaccgattacgattggcgatgatgtgatgtttggacctcgcgtcagtctgattacggcttctcatccaattgatgccggagttcgacagcgtggactagaatatggaaaagcgattacgattggtaatcgagtttggctcggtgcaggagtaattgttaatccgggcgttacgattggcgaaaatacaattgtgggttcaggaacggtagtgacaaaaaatttgccagcaaatgtgattgcagtaggtaatccagcacgaattctccgcgaaattactgattctgaccgactttactgggaagaaaaagagaacgaatattatgaaaaataa

SEQ ID NO: 15416 - protein, 203 aa, Lactococcus lactis subsp. lactis Il1403
MKMSEFKRMVAGELYKASKVEPEYKPDNNRALNQEINQLNLLDTEKIVALEKELFGQTGDELFVNPPLYIDYGKNTRIGQRFYANMDCIFLDVAPITIGDDVMFGPRVSLITASHPIDAGVRQRGLEYGKAITIGNRVWLGAGVIVNPGVTIGENTIVGSGTVVTKNLPANVIAVGNPARILREITDSDRLYWEEKENEYYEK

SEQ ID NO: 15417 - DNA, 462 bp, Lactococcus lactis subsp. lactis Il1403
  CDS (1)..(462): transl_table=11
atgttttcagaaattggggaaaattgttttattcaaccccctttttatgctaattttggcggaaaaaatgttcattttgggacagagatttatgctaattttaatctaacattggttgacgatacagatatttttgtaggaaatcatgtcatgtttggaccaaatgttacgattgacacggcgacacatcctgtctcgcctgacttacgtaaacgaggggctcaatataataaaaaagtttacattgaagaaaacgtttggctaggtgctggtgtaattgttttacctggtgttagaattggaaaaaatagtgtgattggcgcagggagtcttgtaactaaagacattccagataatgtggttgcttttggaactccttgtatggttaaaagaaaaattaatgattctgactttaaaacttatgatcatggaaaaaagattgatttagatgagttcatctga

SEQ ID NO: 15418 - protein, 153 aa, Lactococcus lactis subsp. lactis Il1403
MFSEIGENCFIQPPFYANFGGKNVHFGTEIYANFNLTLVDDTDIFVGNHVMFGPNVTIDTATHPVSPDLRKRGAQYNKKVYIEENVWLGAGVIVLPGVRIGKNSVIGAGSLVTKDIPDNVVAFGTPCMVKRKINDSDFKTYDHGKKIDLDEFI

SEQ ID NO: 15419 - DNA, 567 bp, Streptococcus pyogenes M1 GAS
  CDS (1)..(567): transl_table=11
atgaccacagaatttgacaaaatgactagaggcgaatggtatgatgctaattttgattcggaactgattcaaaaacgcatgatggcacaagacctctgtttcgatttaaaccaattaaagcctagtcgagaagaagaacgctctgccgttttaaaccaactttttggacaatcttttgagggcttggtcctgctcagccctttcatctgtgactatggtaagaacattacttttgggaagaattgctttattaacagcaattgttatttcatggatggggcgaagattgccttgggcgataatgtctttgtaggtccttcgacaggtttttacacggcaaatcaccctctagattataaacgccgcaatgaggggcttgaaaaagctttaccaattaccataggagataatgtctggtttggtgccaatgtcaatgttatgcccggcgttactattggcagtggttgtgtgattgcgtcaggatcagttgttacccatgatattccagtcaattcccttgcggcaggtgttccttgccaagttgtacggaaaattgagcaggagtag

SEQ ID NO: 15420 - protein, 188 aa, Streptococcus pyogenes M1 GAS
MTTEFDKMTRGEWYDANFDSELIQKRMMAQDLCFDLNQLKPSREEERSAVLNQLFGQSFEGLVLLSPFICDYGKNITFGKNCFINSNCYFMDGAKIALGDNVFVGPSTGFYTANHPLDYKRRNEGLEKALPITIGDNVWFGANVNVMPGVTIGSGCVIASGSVVTHDIPVNSLAAGVPCQVVRKIEQE

SEQ ID NO: 15421 - DNA, 513 bp, Neisseria meningitidis Z2491
  CDS (1)..(513): transl_table=11
ttgatgggatcaaaattctttttcctgctgctgcgttttgccggttcggtgttgccgccgtcgcatatgcgcggcatcgtcggcagacgggtacgcggttttttggcgcggcgggtttctccgcatatcggacgcggggtcaatatcgaacgcggggcgtatgtgtttccggatacggttttgggcgacggctcgggcatcggggcaaactgtgaaatctgccgtgggccggtggtcggcaaaaatgtgatgatggagccggaatgcctgctctattcgaccaaccacaagtttgaccgtgaaaacaaacgctttgagggctacacggaaatccgtccgattacgttggaggacgatgtctggccggggcgcagggtgattgtaatggcaggcgtaaccgtcggacgcggctcggtcgtgggcgcaggcgcggtggttacaaaagacattccgccctactctttggcggcaggcaatccggcagtggtgaaaaagaatctgccggaaggttga

SEQ ID NO: 15422 - protein, 170 aa, Neisseria meningitidis Z2491
MMGSKFFFLLLRFAGSVLPPSHMRGIVGRRVRGFLARRVSPHIGRGVNIERGAYVFPDTVLGDGSGIGANCEICRGPVVGKNVMMEPECLLYSTNHKFDRENKRFEGYTEIRPITLEDDVWPGRRVIVMAGVTVGRGSVVGAGAVVTKDIPPYSLAAGNPAVVKKNLPEG

SEQ ID NO: 15423 - DNA, 549 bp, Escherichia coli O157:H7
  CDS (1)..(549): transl_table=11
atgcaggatttaagcggtttctcggtgccgaaagggttccggggcggcaacgctattaaagtgcaattgtggtgggcagtacaggcaacaatatttgcctggtcgccacaagtattgtatcgctggcgggcatttttattacgtttattcggcgcaaaaataggaaaaaacgtagttattcgtccgtcagtaaaaattacctatccgtggaaattaaccttaggtgattacgtgtgggtcggcgatgacgtcaatttatataccctcggtgaaataaccattggcgcacattcggtgatatcgcaaaaaagttatttatgcaccgggagccacgaccatgcaagtcaacatttcaccattaacgccacgcctattgtgattggcgagaaatgctggctggcaaccgatgtttttgttgccccaggcgtcacgattggcgacggcaccgtcgtgggtgcgcgaagcagtgtttttaaatcgcttccggcaaatgtggtttgccgggggaatcccgcagtggtgatacgcaaacgcgttgaaactgaataa

SEQ ID NO: 15424 - protein, 182 aa, Escherichia coli O157:H7
MQDLSGFSVPKGFRGGNAIKVQLWWAVQATIFAWSPQVLYRWRAFLLRLFGAKIGKNVVIRPSVKITYPWKLTLGDYVWVGDDVNLYTLGEITIGAHSVISQKSYLCTGSHDHASQHFTINATPIVIGEKCWLATDVFVAPGVTIGDGTVVGARSSVFKSLPANVVCRGNPAVVIRKRVETE

SEQ ID NO: 15425 - DNA, 558 bp, Streptococcus pneumoniae TIGR4
  CDS (1)..(558): transl_table=11
atgactagcgaataccagaaaatgatagcaggagagttttaccgtccatcagacccagaactgagagccttagctcaggcttctcgccaaaaacaggccgcctttaacaaggaagagaaccccttgaagggagccgaaatcatcaagacttggtttgcctcaaccgggaaaaatctttacatcaacactcgcttgatggtggactacggtgtcaacatccatctaggggaaaatttttattctaattggaacttgaccatgctggatatctgtcccattcgtatcggggacaatgctatgattggtcctaattgtcagtttttgacacccctccatccactagatccacaggaacgcaattcaggtatcgagtacggaaagcctatcacaatcggagataatttctggactggtggtggcgtcattgtccttcctggagtgacactgggaaataatgtcgttgcaggagcaggggcagtaattaccaaatcttttggcgacaacgttgtcctagctggcaatcctgcgcgcgtgattaaggaaatacctgttaaatag

SEQ ID NO: 15426 - protein, 185 aa, Streptococcus pneumoniae TIGR4
MTSEYQKMIAGEFYRPSDPELRALAQASRQKQAAFNKEENPLKGAEIIKTWFASTGKNLYINTRLMVDYGVNIHLGENFYSNWNLTMLDICPIRIGDNAMIGPNCQFLTPLHPLDPQERNSGIEYGKPITIGDNFWTGGGVIVLPGVTLGNNVVAGAGAVITKSFGDNVVLAGNPARVIKEIPVK

SEQ ID NO: 15427 - DNA, 561 bp, Clostridium acetobutylicum ATCC 824
  CDS (1)..(561): transl_table=11
atgtttaagtcaataaggtatgatataaatagagttttgcagaatgatcctgctgcgaggaacggacttgaagtttttttgttgtatccatgtatacatgcacttatttggtatagaatagcccacgttttttataaacataagatgttttttattgcaagactattatcacaaattgtaagagcttttacaggaatagagattcatccaggagcgactataggaaaaggactttttattgatcatggtatgggagttgtaataggagaaacagctgaaataggtgataatgttgttatgtatcatggttctaccttagggggaactggaaaggaaactggcaagagacatccaactgttggaaataatgtgtttataggttcaggtgcaaaggtgttaggaccaataaaacttggtgatggatgtaagataggtgctaatgctgttgttcttaaagatgtaccttccaatagtacagctgtaggtattccagcaaaagtaattttgcccagtagtaaaaaagaaaaagtaattgattttaatgattattgcaataaataa

SEQ ID NO: 15428 - protein, 186 aa, Clostridium acetobutylicum ATCC 824
MFKSIRYDINRVLQNDPAARNGLEVFLLYPCIHALIWYRIAHVFYKHKMFFIARLLSQIVRAFTGIEIHPGATIGKGLFIDHGMGVVIGETAEIGDNVVMYHGSTLGGTGKETGKRHPTVGNNVFIGSGAKVLGPIKLGDGCKIGANAVVLKDVPSNSTAVGIPAKVILPSSKKEKVIDFNDYCNK

SEQ ID NO: 15429 - DNA, 615 bp, Clostridium acetobutylicum ATCC 824
  CDS (1)..(615): transl_table=11
atgaatcaaaaagaaagaatgctggcaggtcttccgtataaggcttggctagatggattattagaggaacgaatggataataaaaagaagatatatgagtataatcattgcaaaccagatgaaagtgaaaaaatagatgagttaataaaggatattttcggtaaagtaggtgtaggtgcacatattgaagcaccgtttcattgtgattatggaaaaaatattgaaatcggagataatttttttgcaaactacaactgtattattttagatgttggaaaagtgactataggcgacaatgtacaatttgctccaaatgtatctctatatacagcaggacatccaatacatcctgcttcacgtaattctggatatgagtatggtattagtataactataggaaataatgtttggcttggtggaaatgttgttgtaaatcctggggtccatataggggataatgttgttgttggttcaggaagtgttgttacaaaggatattcctgataatgtaatagcagttggaaatccgtgtaaagttattcgtgaaattacagaagaagaccgaaaatattattataaaaactatgagtttgatgttgatgattatactgtttaa

SEQ ID NO: 15430 - protein, 204 aa, Clostridium acetobutylicum ATCC 824
MNQKERMLAGLPYKAWLDGLLEERMDNKKKIYEYNHCKPDESEKIDELIKDIFGKVGVGAHIEAPFHCDYGKNIEIGDNFFANYNCIILDVGKVTIGDNVQFAPNVSLYTAGHPIHPASRNSGYEYGISITIGNNVWLGGNVVVNPGVHIGDNVVVGSGSVVTKDIPDNVIAVGNPCKVIREITEEDRKYYYKNYEFDVDDYTV

SEQ ID NO: 15431 - DNA, 600 bp, Staphylococcus aureus subsp. aureus Mu50
  CDS (1)..(600): transl_table=11
atgactgaaaaagaaaaaatgttagcagaaaaatggtacgatgcaaactttgatcaagacttaatcaatgaacgtgcacgagcgaaagatatttgctttgaattaaatcatacaaagccgagtgatacaaataaaagaaaggaattaatcgatcaattatttcaaacaacaacagacaatgtaagtatttcgattccttttgatacagattatggttggaacgttaaactaggaaaaaatgtctatgtaaacaccaattgttattttatggatggtggacagattacaattggcgataatgtttttataggacctaattgtggattctacacagcaacacatccacttaatttttatcatagaaatgaaggttatgaaaaagccggacccattcatattggcagtaatacttggtttggcggtcatgtagccgtgttaccaggggtgacgattggagaaggcagtgtgattggtgctggtagtgttgtcactaaagatattccgccacacagcttagcggttggaaacccttgtaaagtcgttcgtaaaattgataatgacctaccatccgaaacattaaatgacgaaacgataaagtag

SEQ ID NO: 15432 - protein, 199 aa, Staphylococcus aureus subsp. aureus Mu50
MTEKEKMLAEKWYDANFDQDLINERARAKDICFELNHTKPSDTNKRKELIDQLFQTTTDNVSISIPFDTDYGWNVKLGKNVYVNTNCYFMDGGQITIGDNVFIGPNCGFYTATHPLNFYHRNEGYEKAGPIHIGSNTWFGGHVAVLPGVTIGEGSVIGAGSVVTKDIPPHSLAVGNPCKVVRKIDNDLPSETLNDETIK

SEQ ID NO: 15433 - DNA, 552 bp, Escherichia coli K12
  CDS (1)..(552): transl_table=11
atgagcacagaaaaagaaaagatgattgctggtgagttgtatcgctcggcagatgagacgttatctcgcgatcgcctgcgcgctcgtcagcttattcaccgatacaatcattccctggcggaagagcacacattacgccagcaaattctcgctgatctattcggtcaggtgacagaggcttatattgagccaacgtttcgctgtgactatggctataacatttttctcggtaataattttttcgccaacttcgattgcgtgatgcttgatgtctgccctattcgcatcggtgataactgtatgttggcaccaggcgttcatatctacacggcaacacatcccatcgaccctgtagcacgtaatagcggtgctgaactggggaaacccgtcaccatcggtaataacgtctggattggcggacgcgcggtcattaaccctggtgtgaccattggtgataacgtcgtggtagcctcaggtgcagttgtcacaaaagatgtcccggacaacgttgtcgtgggcggtaatccagccagaataattaaaaaattgtaa

SEQ ID NO: 15434 - protein, 183 aa, Escherichia coli K12
MSTEKEKMIAGELYRSADETLSRDRLRARQLIHRYNHSLAEEHTLRQQILADLFGQVTEAYIEPTFRCDYGYNIFLGNNFFANFDCVMLDVCPIRIGDNCMLAPGVHIYTATHPIDPVARNSGAELGKPVTIGNNVWIGGRAVINPGVTIGDNVVVASGAVVTKDVPDNVVVGGNPARIIKKL

SEQ ID NO: 15435 - DNA, 615 bp, Sinorhizobium meliloti 1021
  CDS (1)..(615): transl_table=11
atgagccagaaactcggccccgaacccaccatccatccgactgcgagcgtcgtgaactcgaccctcggccgctacaccgaagtccaggaacgctcgcgcctcgacgaggtcgagttcggcgactattcctacatcatgcaggacggttcgatctggtgcgcgacggtcggcaaattcgtcaacatcgccgcggccgtgcgcatcaatgccaccaaccacccgacttggcgggcgacgctgcatcatttcacctatcgcgcacctatgtactgggacgatgcggagcccgaccacgatctcttcgcctggcggcggcagaaccgggtgacgatcggccacgacgtctggatcggccacggcgctacggtcctgcccggcgtgagcgtcggcaacggagccgtgatcggcgccggcgccgtcgtctccaaggacgtcgcgccctacacgatcgtcggcggggtccctgcgaaactcatccgcgaccgcttcacggccaggatcggcgaagccatggaccggctcgcctggtgggattgggatcacgccaagctgcgccacgcgctggacgatttccgggaactgacggcggaggagtttcttgtgcggtatagttag

SEQ ID NO: 15436 - protein, 204 aa, Sinorhizobium meliloti 1021
MSQKLGPEPTIHPTASVVNSTLGRYTEVQERSRLDEVEFGDYSYIMQDGSIWCATVGKFVNIAAAVRINATNHPTWRATLHHFTYRAPMYWDDAEPDHDLFAWRRQNRVTIGHDVWIGHGATVLPGVSVGNGAVIGAGAVVSKDVAPYTIVGGVPAKLIRDRFTARIGEAMDRLAWWDWDHAKLRHALDDFRELTAEEFLVRYS

SEQ ID NO: 15437 - DNA, 552 bp, Salmonella typhimurium LT2
  CDS (1)..(552): transl_table=11
atgagtgacgaaaaacaaaaaatgatcgctggggcactgtattgcccgaccgatgaaactttatgccaggatcgactgcgggcgcgtcaactcatccatcaatacaattatactacgcctgatgaaataaataagcgtcaggcgattttacgcgacctgttgggtcgatgcgaagacgcctatattgaaccttccttccgttgcgactacggctataatatttttcttggtcactccttttacgctaacttcgactgcgtcatgcttgatgtttgcccaattcatattggcgataattgtatgctcgcgccaggggtacatatctataccgccacgcatccgctggacgccgtcgaacgcaacagcggcagagaattaggtaaacccgtcactatcggaaataatgtctggataggcggacgagccgtcgttaatccgggcgtaaccatcggcgataacgtcgtcgtcgcttcaggcgctgtggtgataaaaaacgtaccgccagacgttgtggtaggcggaaatccggcgcgaatcattaaaaaattgtag

SEQ ID NO: 15438 - protein, 183 aa, Salmonella typhimurium LT2
MSDEKQKMIAGALYCPTDETLCQDRLRARQLIHQYNYTTPDEINKRQAILRDLLGRCEDAYIEPSFRCDYGYNIFLGHSFYANFDCVMLDVCPIHIGDNCMLAPGVHIYTATHPLDAVERNSGRELGKPVTIGNNVWIGGRAVVNPGVTIGDNVVVASGAVVIKNVPPDVVVGGNPARIIKKL

SEQ ID NO: 15439 - DNA, 564 bp, Listeria monocytogenes EGD-e
  CDS (1)..(564): transl_table=11
atgaaaacagaactagaaaagatgattgcaggagaaatgtatgatcctagcgacagagagcttgcacacggaagaaatcgtgcgcgtaagttctgcagagagattaacgatgcgatggattcagagtcccgtgcaagcgtgctgaagcgtctattcggcggaacgaaagaaaatgtttatgtggaacctgatttccgtgtcgattacggttctaatatttatgtaggcgaaaatttttacgctaattttgattgtgttattttagatgtttgcgaagtacatattggcgacaactgcatgatggcgccgggtgttcatatctatactgcgacacatccgcttgatccagtagaacgtaatagtggattagagcttggtaaaccagttgaaattggcgacaatgtttggattggtggacgagcaattattaatccaggcgtaaaacttggaaataatgttgtcgttgcttcaggtgcggttgtcacgaaaagtttcccggataatgtcgttgttgcgggtaacccagcgcgcgttattaaaacaattgaggttgaggaaaaatga

SEQ ID NO: 15440 - protein, 187 aa, Listeria monocytogenes EGD-e
MKTELEKMIAGEMYDPSDRELAHGRNRARKFCREINDAMDSESRASVLKRLFGGTKENVYVEPDFRVDYGSNIYVGENFYANFDCVILDVCEVHIGDNCMMAPGVHIYTATHPLDPVERNSGLELGKPVEIGDNVWIGGRAIINPGVKLGNNVVVASGAVVTKSFPDNVVVAGNPARVIKTIEVEEK

SEQ ID NO: 15441 - DNA, 570 bp, Listeria innocua Clip11262
  CDS (1)..(570): transl_table=11
atgatagaacaagatttacagaaaagactagtcgaacaagaaattctccaagggtcggatttgttagatgaaattcacgaagtaaaacaaaacaatgaacaacttatcatcgaactaaacaccaagtaccacacaaaaaaagaagtgactaaatatctcagtgacatcaccggaaaaccagtcgatccgtcagtcgatgtctcacttcctttttacagcgacttcgggaaacacattacttttgggaaaaatatctttatcaatttaaatgtaactttcgtggatttgggtgggattacgattgaagataatgtcttaattggtccgggagcaagacttgtgaccgtcaaccatttagtcagccctaaaaagagacgtggactgcgggtagcaccgatttgtgtgaagaaaaacgcctggattggtgcaaacgcaacgatattgtcaggtgtaacaatcggcgaaaatgccatcgttgctgcggatgctaccgtcacaaaagacgtcccagcaaacgtcatcgtcgccggaagcccagccaaacaaatccgtaaaattatcgaggaataa

SEQ ID NO: 15442 - protein, 189 aa, Listeria innocua Clip11262
MIEQDLQKRLVEQEILQGSDLLDEIHEVKQNNEQLIIELNTKYHTKKEVTKYLSDITGKPVDPSVDVSLPFYSDFGKHITFGKNIFINLNVTFVDLGGITIEDNVLIGPGARLVTVNHLVSPKKRRGLRVAPICVKKNAWIGANATILSGVTIGENAIVAADATVTKDVPANVIVAGSPAKQIRKIIEE

SEQ ID NO: 15443 - DNA, 564 bp, Listeria innocua Clip11262
  CDS (1)..(564): transl_table=11
atgaagacagaactagaaaagatgattgcaggagaaatgtataatcctagcgacagagaacttgtacacggaagaagtcgtgcgcgtaagttctgcagagagattaacgatacaatggattctgagtctcgtaaaagcgtgcttaagcgtctgttcggcggaacaaaagaaaatgtttatgtcgaaccagattttcgcgtagattatggttctaatatttatgttggcgaaaatttctacgctaattttgattgtgtgattttagacgtttgtgaagtacatattggtgataattgtatgatggcgccaggtgttcatatttatacggcaacgcatccccttgatccagtagaacgtaatagtgggctagagcttggtaaaccagttgaaattggcgataatgtttggattggtggtcgggcaattattaatccgggcgtgaaacttggaaataatgtcgtggttgcttcaggcgcagttgtaacgaaaagcttccccgataatgtcgtcgttgccggtaacccagcgcgcgttattaaaacaattgaggttgaggaaaaatga

SEQ ID NO: 15444 - protein, 187 aa, Listeria innocua Clip11262
MKTELEKMIAGEMYNPSDRELVHGRSRARKFCREINDTMDSESRKSVLKRLFGGTKENVYVEPDFRVDYGSNIYVGENFYANFDCVILDVCEVHIGDNCMMAPGVHIYTATHPLDPVERNSGLELGKPVEIGDNVWIGGRAIINPGVKLGNNVVVASGAVVTKSFPDNVVVAGNPARVIKTIEVEEK

SEQ ID NO: 15445 - DNA, 579 bp, Nostoc sp. PCC 7120
  CDS (1)..(579): transl_table=11
gtgaaacaaattatatatatggaaaaaactgaaaaacaaaaaatgttggcaggtgaattatacctagcagatgatccagaattagcagccgagagtaaacgagccagtcggttgttgcgaatgtataacgccacaaccgaagaacaaccagaacaacgcaggcaaattttacaagaattatttgcccaggtaggtgaaaaaatcactatcgtaccaccgcttcattgtgactacggtagcaacatctatgcaggcaacggagtatatatgaactacggttgcgtaattttagactgcaacaaagtagaaatcggcgaaaatgttttgttagctccccacgtacagatttatactgcttaccatcccaccgaaccggaaattcgtctatctggaagagaattggctgccccaattaaaattggtaataacgtctggattggtggtggtgcaattatttgtccaggggtaacaattggggacaataccacgattggtgctgggagcgtagttgtcaaagacatccctactaacgttgtagccgttgggaatccttgccgaataattcgcaatttagcctaa

SEQ ID NO: 15446 - protein, 192 aa, Nostoc sp. PCC 7120
MKQIIYMEKTEKQKMLAGELYLADDPELAAESKRASRLLRMYNATTEEQPEQRRQILQELFAQVGEKITIVPPLHCDYGSNIYAGNGVYMNYGCVILDCNKVEIGENVLLAPHVQIYTAYHPTEPEIRLSGRELAAPIKIGNNVWIGGGAIICPGVTIGDNTTIGAGSVVVKDIPTNVVAVGNPCRIIRNLA

SEQ ID NO: 15447 - DNA, 828 bp, Nostoc sp. PCC 7120
  CDS (1)..(828): transl_table=11
gtgggtattcatgtatcaatactcactaaattaatactggataaatatcaggataattggcactacagaaccaaagatacatatccaacacatcagccacatcgttcacaatatttatcggataacttaatcatgaatcatcagagatattctgccaaattacagcgatttcaagaacttctggcaatcactgttttcgggaatatccccacactactgttaggcccaaaattaaggaatctcgtatatcgaatgatttttgctcacataggcagccccgtatatattcaacatggagtagaatttaccaacgcttctaatattgaaatcggcaatagtgtacatctcttcaacggtgtccgtcttgatgccaaagggcatccaaataataaaattgctttggcagatggagtggcaattgagcgcaacgttgatatagggtgtctggaaaatacgtgtattcacattgacgtggaaactttcattgcttctgatgtttgtatttctgggccaggagacatcacaattggtaagcgttgcatgattgctgctcattcaggtatatatgccaacaatcacaactttacagatccgatattgccgattaaataccaaggtgttactcgtaaaggaattgtgattgaggatgattgttggctaggacatggagtaacggtattagatggtgtgactattggtaaaggaagtgttattggcgcaggggcagttgtcaccaaagatattcccccattctccgtagctgtaggcgcacctgcacgagtaattaaaagccgcattgcccaggatttagttgcatctggagattag

SEQ ID NO: 15448 - protein, 275 aa, Nostoc sp. PCC 7120
MGIHVSILTKLILDKYQDNWHYRTKDTYPTHQPHRSQYLSDNLIMNHQRYSAKLQRFQELLAITVFGNIPTLLLGPKLRNLVYRMIFAHIGSPVYIQHGVEFTNASNIEIGNSVHLFNGVRLDAKGHPNNKIALADGVAIERNVDIGCLENTCIHIDVETFIASDVCISGPGDITIGKRCMIAAHSGIYANNHNFTDPILPIKYQGVTRKGIVIEDDCWLGHGVTVLDGVTIGKGSVIGAGAVVTKDIPPFSVAVGAPARVIKSRIAQDLVASGD

SEQ ID NO: 15449 - DNA, 513 bp, Ralstonia solanacearum GMI1000
  CDS (1)..(513): transl_table=11
atgaagtatttcgccgtggtggtgttcgagtcggtcatgcggctgctgtttgcgctgccgcgcttccgcctggccaatgcgctcaagagcggcttcctgcggctgtgcggcgcgagcatcggccggcgggtggtgttttatccgggcgtctggatctgcaccggccgcaatctgcgcgtcggcgatcacgtggatttcgcgctggacgtgctggtgacctccgacggcggcgtgcgcatcggcgaccgcacgctgatcgggtaccgctcccagatcctgtcgagcaaccacgcgatcccggcggggcgcggccgcatcttcggggccggccatgtccgcaagccggtggagatcggcacggacgtatggatcggcgcgaactgcgtgattctccccggcgtgaccatcggggacggcgcggtggtggccgccggcagcatcgtcaccaaggatgtgcctgcttatagcgtggtcggcgggtgtccggccacacccatcaagatgagggactag

SEQ ID NO: 15450 - protein, 170 aa, Ralstonia solanacearum GMI1000
MKYFAVVVFESVMRLLFALPRFRLANALKSGFLRLCGASIGRRVVFYPGVWICTGRNLRVGDHVDFALDVLVTSDGGVRIGDRTLIGYRSQILSSNHAIPAGRGRIFGAGHVRKPVEIGTDVWIGANCVILPGVTIGDGAVVAAGSIVTKDVPAYSVVGGCPATPIKMRD

SEQ ID NO: 15451 - DNA, 618 bp, Agrobacterium tumefaciens str. C58
  CDS (1)..(618): transl_table=11
atgagtgtcaaggtcggtctcgaacccgtcatccatgaaagtgcccgcgtcaccaattcttcgatcggccgctataccgaaatttcggagcgctgccgcctcgaggaggtcgagatgggcgactactcctacgtcatgcaggatggcgcaatctggtgtgccaccatcggcaaattcgtcaacatcgccgcttccgtccgcatcaatgccaccaatcatccgatgcagcgggccacattgcaccatttcacctatcgcgcccgcagctactgggacgacgccgaagatgaaactgacttcttcgccgcccgccgcgccaaacgggtggtgatcggccacgatgtctggatcggccatggtgcgaccatcctgcccggcatcacggtggggaacggtgcagtcatcggggccggggcggtcgtttccaaagatgttgcgccctacaccatcgtcggcggcgtgcccgcccggctgatccgcgagcgttttcccgcggagcttggcaagcgcatggatgatctgaattggtgggattgggaccatgcgaggctgcgcagcgcgctggaggatttccgcgcactcgacgccgaggatttcgtggcgaaatatggcggatga

SEQ ID NO: 15452 - protein, 205 aa, Agrobacterium tumefaciens str. C58
MSVKVGLEPVIHESARVTNSSIGRYTEISERCRLEEVEMGDYSYVMQDGAIWCATIGKFVNIAASVRINATNHPMQRATLHHFTYRARSYWDDAEDETDFFAARRAKRVVIGHDVWIGHGATILPGITVGNGAVIGAGAVVSKDVAPYTIVGGVPARLIRERFPAELGKRMDDLNWWDWDHARLRSALEDFRALDAEDFVAKYGG

SEQ ID NO: 15453 - DNA, 561 bp, Agrobacterium tumefaciens str. C58
  CDS (1)..(561): transl_table=11
atgtccactgagcgggaaaagatggccgcgggcgaatggtacagctgcatgggtgccgaactggatatgctgcgctggcattcacgccgggcggttcaccagcacaataccatgccgccggatgagcgcggcaccatcgggccgctgctgcgcgcactttttgcctccgtgggcgaaggtgcattcatcgaggcgccttttcattgcgcctacggtttcaacattacgctcggcaggaatgcctatctcaatgccggctgcaccattctcgattctgcgaaggtcgcgataggcgacggcgcgatgctcggccccgccgtgcagatctattgtgcggaacaccatcttgatccggttccgcgcgcgcaggggattgagattgcaaagcctgtcacgatcggccgtgatgtctggatcggcggcggagcgatcattctggccggtatcaccatcggtgacggtgcaattgtcggtgccggctcggtggtgacgcgcaatgtgccggcgcgtgcaacggtcgtgggaaatcccgcccgacccataaatcgtatagccggctga

SEQ ID NO: 15454 - protein, 186 aa, Agrobacterium tumefaciens str. C58
MSTEREKMAAGEWYSCMGAELDMLRWHSRRAVHQHNTMPPDERGTIGPLLRALFASVGEGAFIEAPFHCAYGFNITLGRNAYLNAGCTILDSAKVAIGDGAMLGPAVQIYCAEHHLDPVPRAQGIEIAKPVTIGRDVWIGGGAIILAGITIGDGAIVGAGSVVTRNVPARATVVGNPARPINRIAG

SEQ ID NO: 15455 - DNA, 633 bp, Agrobacterium tumefaciens str. C58
  CDS (1)..(633): transl_table=11
atggactcgaccgcacagatcaagcgcccgaaactcgcagagaccgtcattcatgcgacggcgagcataagagattcgaacattggcagatgctgcgaggtcctggctgacacctcgctgcacaatgttgaacttgggaattactcctatctcgggccgcgctgcatggtgggtgatgcgataatcggaaagttctgcgccattgctgcggaggtcaggataggcgctccgaaccacccgatggaccggccatccacgcatcgtttcagctactgcccggaatattacgctgccgatgcggtgcgcgacgacgccttcttcgcccagcgaaagcaggatcgcgccatcatcggtcacgatgtctggatcggccacggggtcatcgtcttgccgggtgtaacggttggagacggcgcggttcttgccgccggtgccgttgtcaccaaagatgtgccgccctacaccatcgtcggcggcgttcccgcaaaaatcattcgcgagcgcttttcacgatccatcgcggagaagcttgccgccatcgcctggtgggactggccattcgagacgatcatggcgcggctcgccgacttccagtcaggagatatcgaagccttttgcgagcgctggtcgtag

SEQ ID NO: 15456 - protein, 210 aa, Agrobacterium tumefaciens str. C58
MDSTAQIKRPKLAETVIHATASIRDSNIGRCCEVLADTSLHNVELGNYSYLGPRCMVGDAIIGKFCAIAAEVRIGAPNHPMDRPSTHRFSYCPEYYAADAVRDDAFFAQRKQDRAIIGHDVWIGHGVIVLPGVTVGDGAVLAAGAVVTKDVPPYTIVGGVPAKIIRERFSRSIAEKLAAIAWWDWPFETIMARLADFQSGDIEAFCERWS

SEQ ID NO: 15457 - DNA, 687 bp, Brucella melitensis 16M
  CDS (1)..(687): transl_table=11
atgaaccgatacaggactgccgggcaatatgcaaaaatttcagaaagctatgaaatgacgcagggcgacgacctccgtttccagaacggcgagccgcatattcattcgaccgcgcagctcaaatccgtcaagctggggcgctatgccgatatcggggaacgggtgatcctgcgtgaagtaacggtgggtgatttcacctatttcgagcgcaatggcgaggggatttatgccgaaatcggcaagttctgctccattgccgccaatgtgcggatcaatgcgcttgaacatccgatggagcggctcaccacgcataaggtgagctaccggcccaacgaatatttccgctatcttggcgttgatggcgattttcgcgccagacggcaggcaaggcgggtcgtgatcggcaatgatgtgtggatcggccatggcgcggttatcacgccgggcgtggtgattggccatggtgcggtgatcggggccaatgcggtggtgacaagggatgtcgcaccctatttagtggtgggcggcgttccggcgcggcttatccgcaaacggttcagcgatgcggtgatcgcgcgcctgcttgcgctttcctggtgggactggcctgtggaaaagctctatgaggctgttcccgatatgcaggcgcttgagatcgaggcgtttttggaaaagtggggcggatga

SEQ ID NO: 15458 - protein, 228 aa, Brucella melitensis 16M
MNRYRTAGQYAKISESYEMTQGDDLRFQNGEPHIHSTAQLKSVKLGRYADIGERVILREVTVGDFTYFERNGEGIYAEIGKFCSIAANVRINALEHPMERLTTHKVSYRPNEYFRYLGVDGDFRARRQARRVVIGNDVWIGHGAVITPGVVIGHGAVIGANAVVTRDVAPYLVVGGVPARLIRKRFSDAVIARLLALSWWDWPVEKLYEAVPDMQALEIEAFLEKWGG

SEQ ID NO: 15459 - DNA, 681 bp, Pyrobaculum aerophilum str. IM2
  CDS (1)..(681): transl_table=11
atgggctatgtctcaaacaaagctaaaatcttggcgaagtacgtctccccagatgcgtacatatacgggccgtcagtcatcggcgccgggagttttattgacgccgccgtgatcggctatcccgcccgccagaaaattcttagcgggtttaaatcccctgacgaggtcagcaacggggcgaggataggggaggaggtcattattagaagcggcgttgtgatatatgaagacgtggaaataggcgacagggccgagtttggacacggcgttttagtaagagagttaacaagaatagggcgcggggtgagaatcggcaccagcgccataatagagcgcgatgttaaaataggcgacagggcgtggattcagtctatggtgtacatccccaacggcactgttatagaggaggacgtctttatagggccaaatgccgtcattacaaacgacaagtaccctcccagcaagaggctcgccccagtggtaattaggcggggcgctgtgattggggccaacgcgactttaatagcaggtattgaagtcggagagggcgctgtcgtggccgcaggggccgtcgtgacgagagacgtcccgccgggggttgtggtcgccggcgtccccgcccgggttattggaaaggcggaggagtatatgaggaagcgggcggcttacgagcagtcgtga

SEQ ID NO: 15460 - protein, 226 aa, Pyrobaculum aerophilum str. IM2
MGYVSNKAKILAKYVSPDAYIYGPSVIGAGSFIDAAVIGYPARQKILSGFKSPDEVSNGARIGEEVIIRSGVVIYEDVEIGDRAEFGHGVLVRELTRIGRGVRIGTSAIIERDVKIGDRAWIQSMVYIPNGTVIEEDVFIGPNAVITNDKYPPSKRLAPVVIRRGAVIGANATLIAGIEVGEGAVVAAGAVVTRDVPPGVVVAGVPARVIGKAEEYMRKRAAYEQS

SEQ ID NO: 15461 - DNA, 585 bp, Clostridium perfringens str. 13
  CDS (1)..(585): transl_table=11
atggctatgacagaaaaagaaaaaatgatagcaggtctgccttataaccctgctgacccagaattaactaaaggtagaattagagctagaattttatttcagaaatttaataaattagacttacctgataacgaagaggaagctaataaaacttttaaagaaagaagtagtatattaaaaaaacttttaggctcaacaggtgaaagcatctatatggaacctaatttcaaatgtgattatggttataacatatcagttggtaataacttttacgcaaattttgattgtataatgcttgatgtttgtaaaattaccataggagaaaattgtttctttgcccctggagttcacatttatacagctactcatccaattgatcctattgaaaggctaaactatgaatttggtaagcctgtaaccataggtaataatgtttggattggaggacatgctacaataaacccaggtgtaactataggaaataatgtagtggtagcctctggagccgttgtaactaaggatgtccctgataatgtagtggtaggtggaaatccagcaaaaattattaaaaaaagtttgtgctaa

SEQ ID NO: 15462 - protein, 194 aa, Clostridium perfringens str. 13
MAMTEKEKMIAGLPYNPADPELTKGRIRARILFQKFNKLDLPDNEEEANKTFKERSSILKKLLGSTGESIYMEPNFKCDYGYNISVGNNFYANFDCIMLDVCKITIGENCFFAPGVHIYTATHPIDPIERLNYEFGKPVTIGNNVWIGGHATINPGVTIGNNVVVASGAVVTKDVPDNVVVGGNPAKIIKKSLC

SEQ ID NO: 15463 - DNA, 501 bp, Pyrococcus furiosus DSM 3638
  CDS (1)..(501): transl_table=11
atgatggtgaataccatgaatattttaaggaaaatatttcgtagaatatgtagaacagcagtaaaatttgttttccctaacggttttaggatactgctattaagatggagcggggttaaagtgggaaaagatgtggcaataaatgaagggtttacgatggcttgtgatatcggatatgaagaaaatttagttattgaagatagagttgcaatcgggcctaatgttactattgtgataacttctcatcctaacaattcacatctcagaaatttaaaagacagatatccttcaatagaagtgtttggaaaagtccacataaaacatgacgcatggataggggcgggagccattatactcccaaatgttacaataggagagttctcaattataggggcaggatcggttgtaactaaagacgttccgccatatagtatagcggttggagtcccggctagggtagtaaagaaacttaaaatagaaaagaagactgaaaatacttaa

SEQ ID NO: 15464 - protein, 166 aa, Pyrococcus furiosus DSM 3638
MMVNTMNILRKIFRRICRTAVKFVFPNGFRILLLRWSGVKVGKDVAINEGFTMACDIGYEENLVIEDRVAIGPNVTIVITSHPNNSHLRNLKDRYPSIEVFGKVHIKHDAWIGAGAIILPNVTIGEFSIIGAGSVVTKDVPPYSIAVGVPARVVKKLKIEKKTENT

SEQ ID NO: 15465 - DNA, 687 bp, Corynebacterium glutamicum ATCC 13032
  CDS (1)..(687): transl_table=11
atggaggatatggacaatgactttgaatctatcgagaaaatgagcagcggcgattggtacgtggctaccggcgcggaacgtgaagaagtggcacaaaaaacagcgttacttttccacgaatacaaccaaattggacctacagaccccgcacgaactgccgaaatactaagaactgtactaaatcctgccagcggaacctgcacgatcaaagcgccagccatcattgaatacggcttcaacaccacgatcggcgagcatgtgttcatcaactttggcctcaccattttagatatcgcaccggttcgcatcggggcacgcagcatgctcgggccaaactgtcagctcttcaccgcaggtcacccggtcgatgactgggaaatgcgctccggtgggtgggaaaatggcgcacccatttccattggcgaggatacgtggctgggtggaaatgtcaccgtcgttggtggcgtgagcattggcgataggtgtgtgattggcgcgggggccgtggtgaccaaggatattccggatgattctattgctgtgggcaaccctgcgcgagtagtgcggaaacgtgatgatagccggctcgaacgttcgcagctgccagaaggtgcttccgtggatgcgttggggattcttcctacaaaatcacctaggctgtcagaaaatattgccgaaaaatattaa

SEQ ID NO: 15466 - protein, 228 aa, Corynebacterium glutamicum ATCC 13032
MEDMDNDFESIEKMSSGDWYVATGAEREEVAQKTALLFHEYNQIGPTDPARTAEILRTVLNPASGTCTIKAPAIIEYGFNTTIGEHVFINFGLTILDIAPVRIGARSMLGPNCQLFTAGHPVDDWEMRSGGWENGAPISIGEDTWLGGNVTVVGGVSIGDRCVIGAGAVVTKDIPDDSIAVGNPARVVRKRDDSRLERSQLPEGASVDALGILPTKSPRLSENIAEKY

SEQ ID NO: 15467 - DNA, 576 bp, Methanosarcina acetivorans C2A
  CDS (1)..(576): transl_table=11
atgagcgaaaaagtgttgaataaagacatttttgaacgtgataggtctggagaaccagtttccatagatgacccggaatatccaaagttaaaggaagtgatgcttcgtgctgcggaactaaccaccagattgaatacttcagttcatgatgaggatgaaatcaggagcctgttcagtgagttgataggttcggaggtggatgaatcctcccgggtaactcctccattctatacagatttcggacgaaatatcaaggtcggtaaaaatgtgtttatcaatcatgcatgcacctttatggatagaggaggcataacaatcgaggatgacaccaagataggaccaaaagccaatcttatcacatccaatcatccattggatccagcccatagaaaggaattaatttcaactccgatatggattaaaaggaatgtatggatcggtgctgctgcaactattttacccggtgtaactgtcggagagaactctgtaatagcagccgcagctgtagttacacaagatgttcctcctaacacagtcgtggctggcgtaccagcaaaagttatcagaacattgtaa

SEQ ID NO: 15468 - protein, 191 aa, Methanosarcina acetivorans C2A
MSEKVLNKDIFERDRSGEPVSIDDPEYPKLKEVMLRAAELTTRLNTSVHDEDEIRSLFSELIGSEVDESSRVTPPFYTDFGRNIKVGKNVFINHACTFMDRGGITIEDDTKIGPKANLITSNHPLDPAHRKELISTPIWIKRNVWIGAAATILPGVTVGENSVIAAAAVVTQDVPPNTVVAGVPAKVIRTL

SEQ ID NO: 15469 - DNA, 600 bp, Methanosarcina acetivorans C2A
  CDS (1)..(600): transl_table=11
atgaggaaaacaacaatggatgaaatgactgagaaagaaaaagcagcccggggtttattatacaatgcaagctatgataaagagctgatagatgaacgagcttattgtaaagcactttgctatgaatataatcagcttcatccagcgaaaatcgtggaaaggacagctttaattcagaaactctttggcaaaactgggggttcttttcttattgagccgccatttatatgcgactacggttacaacatagaaataggcagcaatttctatgcaaatcacaactgtatcatcctcgacgaagcaaaggttgtttttggcgataacgtgatgatcgctccaaactgtggcttctatacagctggacatcctcttgatgcagaacgtcgtaacgcgggactggagtatgcttatccgataaaagtcgggggcaatgtatggataggcggcaatgttgttgtactgcccgggataactattggagatagtactgtcatcggcgctggaagtgttgtgacaaaagacattccgtctggcgttgttgctgctgggaatccttgcagggttattcgtgagataagcgatgaagataagaaattttaa

SEQ ID NO: 15470 - protein, 199 aa, Methanosarcina acetivorans C2A
MRKTTMDEMTEKEKAARGLLYNASYDKELIDERAYCKALCYEYNQLHPAKIVERTALIQKLFGKTGGSFLIEPPFICDYGYNIEIGSNFYANHNCIILDEAKVVFGDNVMIAPNCGFYTAGHPLDAERRNAGLEYAYPIKVGGNVWIGGNVVVLPGITIGDSTVIGAGSVVTKDIPSGVVAAGNPCRVIREISDEDKKF

SEQ ID NO: 15471 - DNA, 525 bp, Methanosarcina acetivorans C2A
  CDS (1)..(525): transl_table=11
atgatatccaacagagataaagtgacttttggtgaagtatccaatcactatcatagtaataaaatcttatttggattcaggtatctgaagaactggtttttagaacagcttgcatcagtttttcctgttccttcctggagagcaaaattgcacaaaatgaggggagtaaatattgggaaaaacgtatacgtcggttatggtgtggtttttgatcggctccaccctgagctaatcacaattggagattatgcagagattggtgaccggtgtatactgtctgcccatacaagaggcagtttaactacaagacaagcgtatccgagaaccatggctccaatcaaaataggatccggagtttctattaacccgggatgtatcattatacagggagtcgagattggtgaaaactcgataataggaatagggtccgtagttacgagagatatctccccaaacagtcttgctcttggctaccctgccagagttgttaaaaagcttgatggcgtaggtgagctccaaacctga

SEQ ID NO: 15472 - protein, 174 aa, Methanosarcina acetivorans C2A
MISNRDKVTFGEVSNHYHSNKILFGFRYLKNWFLEQLASVFPVPSWRAKLHKMRGVNIGKNVYVGYGVVFDRLHPELITIGDYAEIGDRCILSAHTRGSLTTRQAYPRTMAPIKIGSGVSINPGCIIIQGVEIGENSIIGIGSVVTRDISPNSLALGYPARVVKKLDGVGELQT

SEQ ID NO: 15473 - DNA, 555 bp, Methanosarcina acetivorans C2A
  CDS (1)..(555): transl_table=11
ttgaaatcaaaagtaatcaattatctaaaatctcttgaaaagtatactgcccttatattctattattcaattgctcgacatctccctccttcagatgagccacaatctttaaagttatcaaaaccaattaggggatttttagcttccaaaatttttgatgaatgtggggttggtgtcaatcttgaaaaaggagcttacattgcagatggtaaatttattcgagtaggaaattattccggcattggtataaactctcttgttcagagaaatgtgagtataggaaatgatgttatgatgggaagagatgtcattataatgaccaccagtcatgaaacttcagatgcatcaattcctatgagataccaaggtggaaaagaggtttctcctgtcattataggcgatgatgtttggattggaagtagagttataatattaccaggagtaaggattggaactggttcaataattggtgctggagcagttgttactcgagatgtagagccatattctgtagtagggggaacccccgcaaagataataaaaaaaaggaagtag

SEQ ID NO: 15474 - protein, 184 aa, Methanosarcina acetivorans C2A
MKSKVINYLKSLEKYTALIFYYSIARHLPPSDEPQSLKLSKPIRGFLASKIFDECGVGVNLEKGAYIADGKFIRVGNYSGIGINSLVQRNVSIGNDVMMGRDVIIMTTSHETSDASIPMRYQGGKEVSPVIIGDDVWIGSRVIILPGVRIGTGSIIGAGAVVTRDVEPYSVVGGTPAKIIKKRK

SEQ ID NO: 15475 - DNA, 663 bp, Thermoanaerobacter tengcongensis MB4
  CDS (1)..(663): transl_table=11
atgtttaaaactttaaaagaagacattgaagtagtttttgaaagagaccctgctgcaaagagcgttttggaggttttactgtgttatcccgggctccacgccataatacttcacagaattgcccattacttctataaaaaaggttttatactgctgccgaggttgatttcacatataaaccgttttttgacaggcattgaaatacatccaggtgcaaaaattgggcgcagatttttcatagaccacggcatgggagttgtaataggagagactacggaaattggagacaatgtgacgatatatcaaggagtgactttgggaggtactggtaaagaaaagggaaaaaggcatcctacgataaaggacaatgtagttataggcagtggagctaaagttttgggacctattgtggtaggggaaaattcaaaaataggagcaggagctgtcgttttaaaagatgtgcccccaaatagcactgtagttggcgttcctgcaaggtgcgtcaaaaaagacaacatacgcatagcaagatcttatgaagtggacctggaacatggcaagctccctgaccctgtagaggaagagctaagaaggttaagagagaggatagagaggcttgaaaaaattttaatggaaagggatgaggaagatgaggctgtataa

SEQ ID NO: 15476 - protein, 220 aa, Thermoanaerobacter tengcongensis MB4
MFKTLKEDIEVVFERDPAAKSVLEVLLCYPGLHAIILHRIAHYFYKKGFILLPRLISHINRFLTGIEIHPGAKIGRRFFIDHGMGVVIGETTEIGDNVTIYQGVTLGGTGKEKGKRHPTIKDNVVIGSGAKVLGPIVVGENSKIGAGAVVLKDVPPNSTVVGVPARCVKKDNIRIARSYEVDLEHGKLPDPVEEELRRLRERIERLEKILMERDEEDEAV

SEQ ID NO: 15477 - DNA, 528 bp, Streptomyces coelicolor A3(2)
  CDS (1)..(528)
atgtatgtccatacgcccgagttcgcacgtcatgcggagcggatcgtggaggtgaccgatgcgacgtctcgactgaacgtgcttccgttcagcgacagtgcaggtcgttcggaactactttccgttgtgttcggaggcccactgccggaatcggtgacgatctacccgccgttcttcaccgagtacgggctgaacacgacgttcggggagaacgtcttcgtcaatcagggatgcaccttcatggacaagggaggcatccgcatcgggaaccgagtcatgatcgccccgaaggccagcctcgtcaccggaggccatccgctgcccctggccgagcgccgcgcacacctctccttcgccccgatcgtcgtcgaggacgacgtgtggatcggcacggccgccgtgatcacgcagggggtgaccatcggtgcgggcgcggtagtggctgccggtgcggtggtcacccgtgatgtccctgcgggcaccgtcgtcgcgggagtgcccgcccgcgtgatcaagcagatcggctga

SEQ ID NO: 15478 - protein, 175 aa, Streptomyces coelicolor A3(2)
MYVHTPEFARHAERIVEVTDATSRLNVLPFSDSAGRSELLSVVFGGPLPESVTIYPPFFTEYGLNTTFGENVFVNQGCTFMDKGGIRIGNRVMIAPKASLVTGGHPLPLAERRAHLSFAPIVVEDDVWIGTAAVITQGVTIGAGAVVAAGAVVTRDVPAGTVVAGVPARVIKQIG

SEQ ID NO: 15479 - DNA, 804 bp, Streptomyces coelicolor A3(2)
  CDS (1)..(804)
atgccccaccgcaagaacacgttctcgtcctggcggagccgcctcgcccagaaggccgtccacgcgggctgggcctgggtgcagcgcaccggttccgtcaccgccgcgcacccggggcggttccggttcggcgcgctgggcacgggcacccggctcgccttcccgctcggcacggtcttcggcgagccctggatccaggtcggcgcgcactgcatcatcggcgagcaggtcacgctgaccgccgggctcatgcccgacctcgacctcggaccggaaccgatcctgcgcatcggcgacggggtcgtcctcggccgcggcagccacgtcatcgcggacaccaccgtcaccatcggcagcgactgctacttcggcccgtacgtctacgtcacctccaccaaccactcctacgacgacccgcaccagcccatcggcaagcagtggccgcggatggacccggtggagatcggccccggctgctggatcggcacgggcgcggtgatcctgcccggcgcccggatcggacggaacgtggtcgtggccgccggtgccgtggtccggggcgcggtccccgaccacgccgtggtggcgggcgcccccgcccgcgtcgtacggcgctggacaccggccgagggctggcagccgccgctgcggaccccggccccggtgccgattcccgacgggatcacgccggggcagctgcgggagctgtcgaagctggacgacgaggcggtggcccgtctcgccgaactggacgacccggagcgggcggcgggcaggctcgccgaaccggccgcggagggctga

SEQ ID NO: 15480 - protein, 267 aa, Streptomyces coelicolor A3(2)
MPHRKNTFSSWRSRLAQKAVHAGWAWVQRTGSVTAAHPGRFRFGALGTGTRLAFPLGTVFGEPWIQVGAHCIIGEQVTLTAGLMPDLDLGPEPILRIGDGVVLGRGSHVIADTTVTIGSDCYFGPYVYVTSTNHSYDDPHQPIGKQWPRMDPVEIGPGCWIGTGAVILPGARIGRNVVVAAGAVVRGAVPDHAVVAGAPARVVRRWTPAEGWQPPLRTPAPVPIPDGITPGQLRELSKLDDEAVARLAELDDPERAAGRLAEPAAEG

SEQ ID NO: 15481 - DNA, 582 bp, Streptomyces coelicolor A3(2)
  CDS (1)..(582)
atgccgacggaccacttcgcgggcgactcccgcaccaacctcgaacgcatgcaggcgggcgacctctacatcgccgacgaccccgagatcgcccgcaggcagcagcaggcggtacggctggcggcccgctaccaggccggctacgcggaggacgcggaggcggcgcgcccgctcctcgtcgaactgctcggctccctgggtgccgaggcccacgtgcggccgccgctgtacgtcgactacggcagcaacatcaccgtcggcgcgcgcaccttcgtcaactacaacctgacggcgctggacgtcgcggcgatcaccatcggcgaggactgccagatcgggccgaacgtccagctgctcacccccacgcaccccctggagcccggaccgcggcgggacaagctggaggccgcccgcccgatcgtcatcggcgacaacgtctggctgggcggcggcgcgatcgtgctgccgggcgtcaccatcggggacaactccgtcatcggtgccggtgccgtcgtcaccagggacgtaccggcgaacgtcgtggcggtcggcaaccctgcccggccggtgcggaacgtgtaa

SEQ ID NO: 15482 - protein, 193 aa, Streptomyces coelicolor A3(2)
MPTDHFAGDSRTNLERMQAGDLYIADDPEIARRQQQAVRLAARYQAGYAEDAEAARPLLVELLGSLGAEAHVRPPLYVDYGSNITVGARTFVNYNLTALDVAAITIGEDCQIGPNVQLLTPTHPLEPGPRRDKLEAARPIVIGDNVWLGGGAIVLPGVTIGDNSVIGAGAVVTRDVPANVVAVGNPARPVRNV

SEQ ID NO: 15483 - DNA, 564 bp, Methanosarcina mazei Go1
  CDS (1)..(564): transl_table=11
atggggggcattaccataactgccgtaatatcaaacagagataaagtaacttttggtgaagtggctgatcattaccacagcaataaactcatttttgggctgaagtactttaagaactgggttctggaacgcgttgctgcgtggttcccgattccttcgtggagagctaaatttcataaaatgagaggcgtgaatctcgggaaaaacgtgtatgtaggctacgatgtggtttttgacaggcttcaccctgaaatgatcacagtgggagattactctgaaataggagaccgctgcattctctctgcccattccagaggcagtctgaccacaaggcaggcatatccgaggaccatagagcccataaaaatagggtgtggagtttctgtaaatccaggctgcataattactcagggggtcgagatcggggataactcaataatcggtataggttccgtggttactcgtgacatttctccaaacagccttgcccttggttatccggctcgagttatcaaaaaacttgacggtgtgggtgagctccagaccagttttaatgatacttaa

SEQ ID NO: 15484 - protein, 187 aa, Methanosarcina mazei Go1
MGGITITAVISNRDKVTFGEVADHYHSNKLIFGLKYFKNWVLERVAAWFPIPSWRAKFHKMRGVNLGKNVYVGYDVVFDRLHPEMITVGDYSEIGDRCILSAHSRGSLTTRQAYPRTIEPIKIGCGVSVNPGCIITQGVEIGDNSIIGIGSVVTRDISPNSLALGYPARVIKKLDGVGELQTSFNDT

SEQ ID NO: 15485 - DNA, 702 bp, Methanosarcina mazei Go1
  CDS (1)..(702): transl_table=11
atgtgtagttttaagtccacagtattccacagtataactcttactcttcttaacgaagatcttcttaaagaagaattaaataaacaggattatcattttacaaaggagggaacaactatggttgaaatgactgaaaaagaaaaagcagctcagggcttattatacaatgcatactatgatgaagagctgatctctcaacgggcttattgcaaagcaatttgctacgagtataatcagcttcatccagcaaaaattgaggaaaggacagctttaattcagaaactctttggcaagaccggaggttcttttcttattgagccgccatttatatgcgactacggttacaacatcgaaataggcagcaatttctatgcaaatcacaactgcatcatcctcgacggagcaaaggttgtttttggggataatgtgatgatcgctccaaactgcagcttctacacagccgggcatccgcttgatgtagaacgtcgcaatgcaggactggaatacgcttatccagtaaaagtcggcagcaatgtatggataggcggcaatgtttctgtacttcccggagtaactataggggataatgctgtcataggcgccgggagtattgtgacaaaagatattccttccgacgttgttgcttttgggaatccctgcagggttattcgtgagattagtgatgaagataaaaaattttaa

SEQ ID NO: 15486 - protein, 233 aa, Methanosarcina mazei Go1
MCSFKSTVFHSITLTLLNEDLLKEELNKQDYHFTKEGTTMVEMTEKEKAAQGLLYNAYYDEELISQRAYCKAICYEYNQLHPAKIEERTALIQKLFGKTGGSFLIEPPFICDYGYNIEIGSNFYANHNCIILDGAKVVFGDNVMIAPNCSFYTAGHPLDVERRNAGLEYAYPVKVGSNVWIGGNVSVLPGVTIGDNAVIGAGSIVTKDIPSDVVAFGNPCRVIREISDEDKKF

SEQ ID NO: 15487 - DNA, 579 bp, Xanthomonas campestris pv. campestris str. ATCC 33913
  CDS (1)..(579): transl_table=11
gtgcaccgaaaaaagaagatgctcgcaggcgagctgtacaacgcggccgatgacgaactgcaggccgatcaggctgccgccgccgcgtggatggcgcgttacaacgccgctgcgcaacagcccgctgcgcagcgccatgccttgctggtcgaacgtctggccgaggtgggcgcgggtgcagtgattcgcccgccgttccattgcgactatggctacaacatccgtttgggtgcgggggtttttctcaacttcaattgcgtgattctggatgtgtgcgaggtcagcatcggcgatggcacgcagatcggcccggcggtgcagttctacgcggccgaccatccgcgcgatgcgaccgatcgtgccagcgggctggagtttggccgcccgattcatgtgggacgtaatgtgtggatcggcggcggtgcgatcattctgccgggcgtgcgcattggcgacgatgcgttgatcggggccggtgcggtggtcacccgcgatgtgccggcaggcgccactgcggtggggaatcctgcgcgtgtgcgcatggcgcgcaccgatccgcaggcgacgccgaccgattga

SEQ ID NO: 15488 - protein, 192 aa, Xanthomonas campestris pv. campestris str. ATCC 33913
MHRKKKMLAGELYNAADDELQADQAAAAAWMARYNAAAQQPAAQRHALLVERLAEVGAGAVIRPPFHCDYGYNIRLGAGVFLNFNCVILDVCEVSIGDGTQIGPAVQFYAADHPRDATDRASGLEFGRPIHVGRNVWIGGGAIILPGVRIGDDALIGAGAVVTRDVPAGATAVGNPARVRMARTDPQATPTD

SEQ ID NO: 15489 - DNA, 579 bp, Xanthomonas axonopodis pv. citri str. 306
  CDS (1)..(579): transl_table=11
atgcagaccgaaaaacagaaaatgctggcaggcgaactctacaacgccgccgatgcgcagctgcaggccgatcaggcggcagctgcggtgtggatggagcgctacaacgccactggcgcgcagtcatcggcgcagcggcatgcattgctggtcgagcggctcgccgaggtgggtgcgaatgcggtgatccggccgccgtttcattgcgattacggctacaacatccatctgggcgcgggcgtgttcctcaacttcaattgcgtgatcctggatatctgccaggtgtacatcggcgatggcacgcaggtggggccagcggtgcagttctacgctgccgaccatccgcgcgatgccgccggacgtgccagcgggctggagttcgggcggccaatccgcgtcgggcgcaatgtgtggattgggggcggggcgatcatcctgccgggcgtctgcatcggcgacgatgcggtaatcggtgccggtgcggtcgtcacgcgcgatgtgccggccggtgcgatcgccgtgggcaatccggcgcgcgtgcgcgcaccccggcttgccgatgcgccgcccaccgactga

SEQ ID NO: 15490 - protein, 192 aa, Xanthomonas axonopodis pv. citri str. 306
MQTEKQKMLAGELYNAADAQLQADQAAAAVWMERYNATGAQSSAQRHALLVERLAEVGANAVIRPPFHCDYGYNIHLGAGVFLNFNCVILDICQVYIGDGTQVGPAVQFYAADHPRDAAGRASGLEFGRPIRVGRNVWIGGGAIILPGVCIGDDAVIGAGAVVTRDVPAGAIAVGNPARVRAPRLADAPPTD

SEQ ID NO: 15491 - DNA, 639 bp, Streptococcus agalactiae 2603V/R
  CDS (1)..(639): transl_table=11
atggctagtattttaaaaaaacatttagagaaacgtttagagcttaaaaatgatcctatgaggacagatatgagtactggtgccagttaccctaaatatggattctcggtaggaaagtacacatatggatatcaacaattcttttacgaaggcgttaacttaaaagaaattggagcattttgctcaatagcccagaacgttactattactggtctgaatcatccaaccgatcacattaccactaacccttttatttactataagtcaaggggatttataaatgaggatagggcggacttaatagatgaaaagaaaaatggaaaagttattattggcaacgatgtctggataggaactaatgtcactatacttccatctgttacaataggtaatggagcaattattggagcaggttcagttattaccaaagacattcctgactatgctgttgtcgctggaacacctgctaaaattatcaaatatcgcttttcagaggaagaaataacattattaaatgcatctcagtggtggaattggtcagatgaagctattaaggaacatattagcgaattttcagataagaaggaattcttcaatactctaaaaagtatttccgaaaacaaaaatcataaactctag

SEQ ID NO: 15492 - protein, 212 aa, Streptococcus agalactiae 2603V/R
MASILKKHLEKRLELKNDPMRTDMSTGASYPKYGFSVGKYTYGYQQFFYEGVNLKEIGAFCSIAQNVTITGLNHPTDHITTNPFIYYKSRGFINEDRADLIDEKKNGKVIIGNDVWIGTNVTILPSVTIGNGAIIGAGSVITKDIPDYAVVAGTPAKIIKYRFSEEEITLLNASQWWNWSDEAIKEHISEFSDKKEFFNTLKSISENKNHKL

SEQ ID NO: 15493 - DNA, 549 bp, Streptococcus agalactiae 2603V/R
  CDS (1)..(549): transl_table=11
atgaccgaaaaagaaaaaatgttagcaggacaatattatcgtccatcagcacctgaactacgcaaggatagagaagttgcactaaaaaatatgcaagcctttaacaatgaagataatagtagcaaacgtaacgtcattttacaaaaatggtttggtgctactgggaagagtatccatatggaacaacgttttgtctgcgattatggttgtaatatttatgttggtgaaaacttctacgccaattttaaccaaactttcttagatgtttgtgaaattcgtattggcgataactgtatgtttggcccaaactgtcaactcctcaccccactccatcctctagatccaatagaaagaaattcaggattagaatacggtgccccaatccaaatcgggaataatgtctggctaggtggaggagtgactattttaccaggtgttgtattaggagataatgtcgtcgttggcgctggaagtgtcgttacgaaatcatttgaaaataacgttgttatagcaggaaaccctgctaagataatcaaaaaattagcttaa

SEQ ID NO: 15494 - protein, 182 aa, Streptococcus agalactiae 2603V/R
MTEKEKMLAGQYYRPSAPELRKDREVALKNMQAFNNEDNSSKRNVILQKWFGATGKSIHMEQRFVCDYGCNIYVGENFYANFNQTFLDVCEIRIGDNCMFGPNCQLLTPLHPLDPIERNSGLEYGAPIQIGNNVWLGGGVTILPGVVLGDNVVVGAGSVVTKSFENNVVIAGNPAKIIKKLA

SEQ ID NO: 15495 - DNA, 540 bp, Oceanobacillus iheyensis HTE831
  CDS (1)..(540): transl_table=11
atgatagacggcgaattatataaaccagcggaccctgaattatataaagcgagacaatttgcgagaagagcaactcgctactataatgcgacaacggaagaggatgttgtaaaacgttcaggtatgttaaaagaattatttggtagtaccggaaaaaatatttttattgaacctcattttcgatgtgactatggttttaatattcatattggggagaatttctacgctaattttgattgtatattgttggatatttgtgaaataagaattggtgaagattgtatgttggcaccaggagtcaagatttttactgctactcatccacttcacccagttgaaagaaagagcggactggagtatggaaagcctgttaccataggagataatgtctggattggtggcggagcaattattaatcccggtgtaacaatcggagataatgcggtaatagcttcaggtgccgttgttacgaaaaacgttcctacaaatacagtgtacggaggaaacccggcaaagtttatgaaagagatattgttatag

SEQ ID NO: 15496 - protein, 179 aa, Oceanobacillus iheyensis HTE831
MIDGELYKPADPELYKARQFARRATRYYNATTEEDVVKRSGMLKELFGSTGKNIFIEPHFRCDYGFNIHIGENFYANFDCILLDICEIRIGEDCMLAPGVKIFTATHPLHPVERKSGLEYGKPVTIGDNVWIGGGAIINPGVTIGDNAVIASGAVVTKNVPTNTVYGGNPAKFMKEILL

SEQ ID NO: 15497 - DNA, 675 bp, Bifidobacterium longum NCC2705
  CDS (1)..(675): transl_table=11
atgatgaccgaagacaagccgatcgccaagccgattatcgatgatgcgacgcgcgagaaaatggcgcttatgttctctggcgaggtctacctgccggatgatgtggacggcttttttgatctgcaggccgcccagcgtgatctccagctcgaactcaacgccacgccgctgaccaacccgaagcgccgtaccgaactcatgcaggcgttcttcggcgcggcgggggagggtctgtacctcgaatgcccggtgtatgcgaactggggctgcaatacttattggggcgagcgctgttacgccaacttcaacctgacgctggtggacgatggtgagatcttcatcggatcccacaccatgatcggccccaacgtcacgcttgtagccaccggccatcccgtgcgtccggacctgcgctatcagggtgcccagtattcgttgcccgtccacatcggcgagaacgtctggatcggcgcgaatgtcaccgtgctgcccggggtcaccatcggggacaacgcggtcattggcgccaactcgctggtcaccaaggacatccccgccaacacggtcgcctatggcagcccgtgcaaggtaattcgcgaaatcaacgaacgcgacgacgtctactactggcgcgaccgccaattcagtgagcgttttaagctcaaagagcagtag

SEQ ID NO: 15498 - protein, 224 aa, Bifidobacterium longum NCC2705
MMTEDKPIAKPIIDDATREKMALMFSGEVYLPDDVDGFFDLQAAQRDLQLELNATPLTNPKRRTELMQAFFGAAGEGLYLECPVYANWGCNTYWGERCYANFNLTLVDDGEIFIGSHTMIGPNVTLVATGHPVRPDLRYQGAQYSLPVHIGENVWIGANVTVLPGVTIGDNAVIGANSLVTKDIPANTVAYGSPCKVIREINERDDVYYWRDRQFSERFKLKEQ

SEQ ID NO: 15499 - DNA, 678 bp, Bifidobacterium longum NCC2705
  CDS (1)..(678): transl_table=11
atgagcgaaatcaatgctgaatccaccaccatgcctcccgtcgaactgcgtatgccgcgcgccagcgagcgcgaggagatgctcgccggcaaactgtacaattcggtagaccctgaattgaatgccctgcgcgagaaggccggcgacctgtgcgcgcgcttcaacgccgcgtcgcgtaccgatcatgccgcccgtgccgcgattctcgatgagctgctgcccggccacggtgccggccttgacgtgatggggccgattttcttcgactatggctgcaacatcaccatcggagagcgcgtgttcgccaacttcaacttcactgtgctggattgttgcccggtgacgattggcgacgacgtgctgttcggcccgaacgtttcgctgctgccaccgatgcatccgttgcgttggcaggatcgtaacgtgagacaggcacctgatggttccgcatacgactgcgagtatggcaagccgattgtcatcggctcgaactgctggtttggcggcaatgtgacggtaatcggcggcgtgacgatcggcgagggttgcgtgatcggtgccggctcggtggtgacgcgcgatattccgccgcacaccgtggccgtgggtaatccggcccgtccgattcgcgagattacggataaggatgcttccgcgctacagtattacgcgcagtga

SEQ ID NO: 15500 - protein, 225 aa, Bifidobacterium longum NCC2705
MSEINAESTTMPPVELRMPRASEREEMLAGKLYNSVDPELNALREKAGDLCARFNAASRTDHAARAAILDELLPGHGAGLDVMGPIFFDYGCNITIGERVFANFNFTVLDCCPVTIGDDVLFGPNVSLLPPMHPLRWQDRNVRQAPDGSAYDCEYGKPIVIGSNCWFGGNVTVIGGVTIGEGCVIGAGSVVTRDIPPHTVAVGNPARPIREITDKDASALQYYAQ

SEQ ID NO: 15501 - DNA, 597 bp, Leptospira interrogans serovar Lai str. 56601
  CDS (1)..(597): transl_table=11
atggtgttcataaagatatttaaaaagatattaaaagaagttttactatggtttgtatatattgctttcaatgtgcctggctattccggaattatgattcggcgatttgtgcttaaatataaaattagggagataggtagttgtataaatattggtcctaatgttgaaattactggatataataacattaaatttggtaataacgttaatattatgaagtattgttctatttattctcatgatggaatgcttgaaattggagataattttagcatgaattctaatagttgtttaggggcagcagatggcggagaaattatcataggtaataacgttctaataggtcagaatgtcgtattacgcgcttctgatcatgaatttaaggacatttctattccaataatgaatcaaggacatcgtggaggaaaaattaaaatcggggatgattgttggataggtgcaaatgtggtaattacatcaaacataagtattggtgatcattgtattattgctgctggcgctgtagttactaaaaatgttgaatcttattctattgtaggtggggttccggctaaattaatcaagaaaagaatttga

SEQ ID NO: 15502 - protein, 198 aa, Leptospira interrogans serovar Lai str. 56601
MVFIKIFKKILKEVLLWFVYIAFNVPGYSGIMIRRFVLKYKIREIGSCINIGPNVEITGYNNIKFGNNVNIMKYCSIYSHDGMLEIGDNFSMNSNSCLGAADGGEIIIGNNVLIGQNVVLRASDHEFKDISIPIMNQGHRGGKIKIGDDCWIGANVVITSNISIGDHCIIAAGAVVTKNVESYSIVGGVPAKLIKKRI

SEQ ID NO: 15503 - DNA, 579 bp, Shewanella oneidensis MR-1
  CDS (1)..(579): transl_table=11
atgactgagaaacaaaaaatgttggcgggccagccttataaggcttgggatgatgcgttattggctgagcggatgcgggcgaaatctatttgccatcagtttaatcaggccgatccgactttgcttgatgcgcgtatggcgcatcttcgtggcctgctcgatattccagcctgcgctcacattgagcctaatttcttttgcgattacggctataacatccatatcggtaagcaattttatgctaatcacaacttaaccatactggatgtttgctctgttttgattggcgataacgtgatgtttggtcctcatgtgatgatttcaaccgcgacgcatcctatcgaccctattgcgcggcaaacaattgaatacggcgcgccaattcaaatcggtaataatgtctggttgggtggaaacgtctctgtgttacccggtgtgatcattggcgataattgtgtcatcggtgctggtagtgttgtgaataagagcattccctcgaactgcgtggcggcgggtaacccttgtaaggttatcaaacctatcgatgtggattatcacaggaacgttaatgccgagtaa

SEQ ID NO: 15504 - protein, 192 aa, Shewanella oneidensis MR-1
MTEKQKMLAGQPYKAWDDALLAERMRAKSICHQFNQADPTLLDARMAHLRGLLDIPACAHIEPNFFCDYGYNIHIGKQFYANHNLTILDVCSVLIGDNVMFGPHVMISTATHPIDPIARQTIEYGAPIQIGNNVWLGGNVSVLPGVIIGDNCVIGAGSVVNKSIPSNCVAAGNPCKVIKPIDVDYHRNVNAE

SEQ ID NO: 15505 - DNA, 630 bp, Shewanella oneidensis MR-1
  CDS (1)..(630): transl_table=11
atgcacacgccaatcacaaccgctttgccagattatcaaagccaacacaaaaagcgtctgtcttggatgccttggctgtatttctcgttaaaagaaaaacatttaacctgggccaaaccttggcaaaatgaagtgcaaaccaacctttgcgccctcgaaaccgtcaccattggtgataattgttttatcgcccccgaggcacaattatttgccgagccaaaccgcgatatcaacatcggcaatcactgtatgattgctgctgactgttttttacatggccccatcacccttggtaatgaagtcgccatcaatcatggctgctccctcgatggcggtcgagtggggatccagattggcgatcaaacccgcattgcaaaccatgtgaccatctatgcctttaatcatggcatggcgcccgacaccccaatttaccaacaagcctcccattctaaagggatcgtgattggtaaagatgtgtggattggcgcccaggcagggatagtcgatggcgtcaccattggcgaccatgcggtgattggcatgggctgtatcgtcactaaagatgtccccgcatgggccatcgtcgctggtaatcctgcacgagtgattggcgataggcgagataagtaa

SEQ ID NO: 15506 - protein, 209 aa, Shewanella oneidensis MR-1
MHTPITTALPDYQSQHKKRLSWMPWLYFSLKEKHLTWAKPWQNEVQTNLCALETVTIGDNCFIAPEAQLFAEPNRDINIGNHCMIAADCFLHGPITLGNEVAINHGCSLDGGRVGIQIGDQTRIANHVTIYAFNHGMAPDTPIYQQASHSKGIVIGKDVWIGAQAGIVDGVTIGDHAVIGMGCIVTKDVPAWAIVAGNPARVIGDRRDK

SEQ ID NO: 15507 - DNA, 699 bp, Streptococcus mutans UA159
  CDS (1)..(699): transl_table=11
atgactgcacaaaaaatgtctgcgcaagaaatcattgctttcatcggcaatgccgaaaagaagactaatgtcaaagtgacttttgaaggagccttggccgcggctcttcctgaaaatgttgtcaagcttggcaatgttcttttcggtgattggaaggacattgaaccgcttttggctaatttaacagaaaataaagactatgtggtagagcaggatggccgcaattctgcagtgcctttgctagataaacgcaacatcaatgctcgtattgagccgggtgccatcattcgtgatcaagtgaccattgaagataatgctgtggtcatgatgggggctattatcaatatcggtgctgaaattggtgaaggaaccatgattgatatgggagctattcttggtggtcgcgcaactgttggtaagaacagtcacatcggtgcaggtgcagtacttgctggtgtcattgagcccgcttctgcagatcccgttcgtattggagacaatgttctggttggtgccaatgcggttattattgaaggggtgcaagtggggagtggttcggtcgttgcagcaggtgctattgtaactcaagacgtccctgacaatgtcgtggtagctggtgtgcctgcgcgtgttatcaaagaaattgatgaaaaaacgcagcaaaagactgctttagaagatgctcttcgtaacctctaa

SEQ ID NO: 15508 - protein, 232 aa, Streptococcus mutans UA159
MTAQKMSAQEIIAFIGNAEKKTNVKVTFEGALAAALPENVVKLGNVLFGDWKDIEPLLANLTENKDYVVEQDGRNSAVPLLDKRNINARIEPGAIIRDQVTIEDNAVVMMGAIINIGAEIGEGTMIDMGAILGGRATVGKNSHIGAGAVLAGVIEPASADPVRIGDNVLVGANAVIIEGVQVGSGSVVAAGAIVTQDVPDNVVVAGVPARVIKEIDEKTQQKTALEDALRNL

SEQ ID NO: 15509 - DNA, 648 bp, Streptomyces coelicolor A3(2)
  CDS (1)..(648)
atgaccaccgacccccgtgaacgcgaggtccgccgcaggatggcggcccgtgagctgtattcggacggcgccccggggctggcggccctggcggaggagcggctgcgcggcaaggagctggccgacgcctacaaccggaccggcgcacgggacgaggagggccgccgggcgctcttgaaggagatgctcgccgcactcggcacgggggtgtggatcgagccgccgctgcacgtggcctacggcaaccgggtgcacctgggcgacgacgtgtacgccaacttcggcctcaccctcgtcgacgacgtcgaggtcttcgtcggcgaccgggtgatgttcgccccgcacgtgacggtcagcaccaccgggcatccggtccacccggacctgcgcagggacggcacccagttctcggcgccggtgcgcatcgaggacgacgtgtggatcggggccggcgcccagatcatgcccggggtgaccgtcggccggggttcggtggtcggcgcgggcagtgtggtgacggcccacgtgccgccgatgacggtcgtggccgggacgccggcgcgggtgctgcgcgagatcaccgacgccgaccgcgagtggagctaccgtccgccccgcactctggggcccgggccggggccggggtga

SEQ ID NO: 15510 - protein, 215 aa, Streptomyces coelicolor A3(2)
MTTDPREREVRRRMAARELYSDGAPGLAALAEERLRGKELADAYNRTGARDEEGRRALLKEMLAALGTGVWIEPPLHVAYGNRVHLGDDVYANFGLTLVDDVEVFVGDRVMFAPHVTVSTTGHPVHPDLRRDGTQFSAPVRIEDDVWIGAGAQIMPGVTVGRGSVVGAGSVVTAHVPPMTVVAGTPARVLREITDADREWSYRPPRTLGPGPGPG

SEQ ID NO: 15511 - DNA, 567 bp, Pseudomonas putida KT2440
  CDS (1)..(567): transl_table=11
atgtccctcagcgaaaaacacaaaatgctcaccggccagctctaccacgctggctgccctgaactacaggccgagcagatcgccaacaagcactggatgcatcgctacaacaacagtgtcgaactgctcaacgacgcacgccacgggctgcttgtggagcactttggccaggttggcgaaggcgcggtgattcgcccgccgttctattgcgactacggctacaacatcagcgttggccgtaatactttcatgaacttcaactgcgtgatcctcgacgtggtgccggtgcgtatcggcgaggactgccagatcggtcccaacgtgcagatctataccgccgaccatccgctcgatcctgaagtgcggcgcagcgggctggagagcgggcggccggtaaccatcggcgacaacgtgtggattggcggtgcggcgatcatcctgccgggggtgaccatcggtgataatgccatcgtcggcgccggcagtgtggtgacccgggatgtgcccgcgggcgcgacggtggtgggtaacccggcgagggtccgtcagcccgaccaagggcagtag

SEQ ID NO: 15512 - protein, 188 aa, Pseudomonas putida KT2440
MSLSEKHKMLTGQLYHAGCPELQAEQIANKHWMHRYNNSVELLNDARHGLLVEHFGQVGEGAVIRPPFYCDYGYNISVGRNTFMNFNCVILDVVPVRIGEDCQIGPNVQIYTADHPLDPEVRRSGLESGRPVTIGDNVWIGGAAIILPGVTIGDNAIVGAGSVVTRDVPAGATVVGNPARVRQPDQGQ

SEQ ID NO: 15513 - DNA, 552 bp, Escherichia coli CFT073
  CDS (1)..(552): transl_table=11
atgagcacagaaaaagaaaagatgattgctggtgagttgtatcactcggcagatgaggcgttatctcgcgatcgcctgcgagctcgtcggcttattcaccgatacaatcattccctggcggaagagcacacattacgccagcaaattcttgctgatttattcggtcaggtgacagaggcttatattgagccaacgtttcgctgtgactatggctataacatttttctcggcaataattttttcgccaacttcgattgcgtgatgcttgatgtctgccctattcgcattggtgataactgtatgttggcaccaggcgttcatatctacacggcaacacatcccatcgaccctgtagcacgtaatagcggtgctgaactggggaaacccgtcaccatcggtaataacgtctggattggcggacgtgcagtcattaaccctggtgtgaccattggtgataacgtcgtggtagcctcaggtgcagttgtcacaaaagatgtcccggacaacgttgtcgtgggcggtaatccagccagaatcattaaaaaattgtaa

SEQ ID NO: 15514 - protein, 183 aa, Escherichia coli CFT073
MSTEKEKMIAGELYHSADEALSRDRLRARRLIHRYNHSLAEEHTLRQQILADLFGQVTEAYIEPTFRCDYGYNIFLGNNFFANFDCVMLDVCPIRIGDNCMLAPGVHIYTATHPIDPVARNSGAELGKPVTIGNNVWIGGRAVINPGVTIGDNVVVASGAVVTKDVPDNVVVGGNPARIIKKL

SEQ ID NO: 15515 - DNA, 549 bp, Escherichia coli CFT073
  CDS (1)..(549): transl_table=11
atgcaggatttaagtggattctcggtgccgaaagggttccggggtggcaacgctattaaagtgcaattgtggtgggcagtacaggcaacaatatttgcctggtcgccacaagtattgtatcgctggcgggcatttttattacgtttattcggcgcaaaaataggaaaaaacgtagttattcgtccgtcagtaaaaattacctatccgtggaaattaaccttaggtgattacgcatgggtcggcgatgaggtcaatttatataccctcggtgaaataaccattggcgcacattcggtgatatcgcaaaaaagttatttatgcaccgggagccacgaccatgcaagtcaacatttcaccattaacgccacgcctattgtgattggcgagaaatgctggctggcaaccgatgtctttgttgcccctggcgtcacgatcggcgacggcaccgtcgtgggtgcgcgaagcagtgtttttaaatcgcttccggcaaatgtggtttgccgggggaaccccgcagtggtgatacgcaaacgcgttgaaactgaataa

SEQ ID NO: 15516 - protein, 182 aa, Escherichia coli CFT073
MQDLSGFSVPKGFRGGNAIKVQLWWAVQATIFAWSPQVLYRWRAFLLRLFGAKIGKNVVIRPSVKITYPWKLTLGDYAWVGDEVNLYTLGEITIGAHSVISQKSYLCTGSHDHASQHFTINATPIVIGEKCWLATDVFVAPGVTIGDGTVVGARSSVFKSLPANVVCRGNPAVVIRKRVETE

SEQ ID NO: 15517 - DNA, 588 bp, Mycoplasma penetrans HF-2
  CDS (1)..(588): transl_table=4
atggcaattaaaactaaagaagaatatataaaaaaatactcagatactggagaatgaattaaatgaggggatgaagattataatttcttatttgaagcaaatatagaagcttataagattacttcaatcattaatagtggataccattctcaaaagcacttaaatagtttattttcaaagttatttggttttaaagttgatgaatctgtttttattcaccctccttttatgacagactttgggaaaaatattaagttggggaaaagattagcaattaatgctaattgttgcttccaagattgaggaggaatagaaattggtgatgattgtcaaataggtcataatgtagttttagcaactacaaatcaccatttagatcctaataagagacatgatttaataaataaaaaaatagtattaggaaaatctgtttgagtaggatcaaattcagtaattgttggaggagttacagttggagatggtgcagtaattgcagcaggtgctgttgttactaaagatgttccagcaaatactgtagttggtggagttcctgcaagaattattaaaaagattgaagttgaagattaa

SEQ ID NO: 15518 - protein, 195 aa, Mycoplasma penetrans HF-2
MAIKTKEEYIKKYSDTGEWIKWGDEDYNFLFEANIEAYKITSIINSGYHSQKHLNSLFSKLFGFKVDESVFIHPPFMTDFGKNIKLGKRLAINANCCFQDWGGIEIGDDCQIGHNVVLATTNHHLDPNKRHDLINKKIVLGKSVWVGSNSVIVGGVTVGDGAVIAAGAVVTKDVPANTVVGGVPARIIKKIEVED

SEQ ID NO: 15519 - DNA, 771 bp, Vibrio vulnificus CMCP6
  CDS (1)..(771): transl_table=11
atgttggtgaataaatcacaactcggagtcaaaccagatagcgagaaaaacacgaaaacctttcaaggaagcgacgtaaaatcttggctcaaacatcatcccaatcctcttatgcgagcgctttttcgcacactcaaacagatccgttgtgccaacttacccacaccacatttttacaatgccttgctctaccgtttgatggtgttgcttcgccaatcaagcgactatgtgtatcgcaccttcatcaccacgccagcattcaaaggcagggtcaaggcatgcggcaaacagctctacttgtatggcggattaccgctcatcaccaacaatgttcgtatctccatgggcgatgactgtaacctttccggtcaagcaaccatcacaggctgcagctctgtcaaagagcctcgattgaacatcggcaatcgtgtctcgattggctggcaaaccaccatcgcggtgggcgacctgatcacgattgaagacgacgtcgcgatcgccggacgctgcatgttttttggttattcaggccaccccttagatcccaaacgtcgtgccgcgggtgaaggcgatgatcccagccagattcgcccaattaccctacaacgcggcagctggattggcagcaacgtgatgatcatggcgggcgtcaccgtcggagctggcagtgtgatcgccgcaggcagtgtggtgacacattctattcctgaaggtgtgatcgcaggcggtaatcccgcccacgtgattcgttcattgaacatacctcgttga

SEQ ID NO: 15520 - protein, 256 aa, Vibrio vulnificus CMCP6
MLVNKSQLGVKPDSEKNTKTFQGSDVKSWLKHHPNPLMRALFRTLKQIRCANLPTPHFYNALLYRLMVLLRQSSDYVYRTFITTPAFKGRVKACGKQLYLYGGLPLITNNVRISMGDDCNLSGQATITGCSSVKEPRLNIGNRVSIGWQTTIAVGDLITIEDDVAIAGRCMFFGYSGHPLDPKRRAAGEGDDPSQIRPITLQRGSWIGSNVMIMAGVTVGAGSVIAAGSVVTHSIPEGVIAGGNPAHVIRSLNIPR

SEQ ID NO: 15521 - DNA, 594 bp, Vibrio vulnificus CMCP6
  CDS (1)..(594): transl_table=11
atgcatcaacaaaagatttacttttgtgatgatgagagtgtggcgttagagcagcaagcttgcctggaaattctctatgattttaaccaaaccagaccctcagaaatggaaaaacgcacagcgattttgcgtgatctcttggctgaagtcggtgagaactgctacatcgagccaccattaagagccaattggggtaagcacacacacttaggtaataatgtttatgccaatttcaatttaaccttggtggatgatacacacatctacattggtaactcggtgatgattgcacccaatgtcaccatcgccacggcgggacatccgattgatcctgaactgcgacgtaaagtggcgcaattcaacattcctgtgcacattaaagataacgtttggattggggcgaacagtgttgtgttaccaggcgtaacgattggcgaaaacagcgtgattggtgccggcagtgtggtgacgaaagacatccccgccaatgtcgtggccgttggtaatccttgccgagtgttgcggccgattggagagcatgacaaacgttacttctatcgcgataacgttattgacgatttaccacaagcctaa

SEQ ID NO: 15522 - protein, 197 aa, Vibrio vulnificus CMCP6
MHQQKIYFCDDESVALEQQACLEILYDFNQTRPSEMEKRTAILRDLLAEVGENCYIEPPLRANWGKHTHLGNNVYANFNLTLVDDTHIYIGNSVMIAPNVTIATAGHPIDPELRRKVAQFNIPVHIKDNVWIGANSVVLPGVTIGENSVIGAGSVVTKDIPANVVAVGNPCRVLRPIGEHDKRYFYRDNVIDDLPQA

SEQ ID NO: 15523 - DNA, 549 bp, Vibrio vulnificus CMCP6
  CDS (1)..(549): transl_table=11
atgactgaatttgaaaaaatgaattccgggcaaatctttgatggcgcggatgcggaaattgatgcgattcgcaatcgtgctgcggtgttattgaaagagatcaacgcagcaacggaaacagaacaacgcatcgcactgcaaaaacagctctttgccagcatgggcaacagttatatccagccaccatttatgtgtgaatttggcaaaaccatctctattggtgaggaaacgttcatcaacatgaatgttgtgatgctggatggggcgcacattacgatcggcagccacgtgttaattggcccgagttgccagttttataccgcttctcattcccttgattaccgaagccgccgccagtgggaaaccttctgcaaaccgattgttgtagaagatgatgtttggattggtggaaattgcgttatcaatcagggggtcactattggagctcgttctgtcatcgctgcaaattcggtcgtcaatcatgatgtcccaccagactgcttgtatgggggcaccccagcgaaactgattcgacggttagacaagtag

SEQ ID NO: 15524 - protein, 182 aa, Vibrio vulnificus CMCP6
MTEFEKMNSGQIFDGADAEIDAIRNRAAVLLKEINAATETEQRIALQKQLFASMGNSYIQPPFMCEFGKTISIGEETFINMNVVMLDGAHITIGSHVLIGPSCQFYTASHSLDYRSRRQWETFCKPIVVEDDVWIGGNCVINQGVTIGARSVIAANSVVNHDVPPDCLYGGTPAKLIRRLDK

SEQ ID NO: 15525 - DNA, 621 bp, Bradyrhizobium japonicum USDA 110
  CDS (1)..(621)
atgtccagcctctccacgctcgtgcgctggtgcgtacatgccattgatggcttcaatttacactatattgtgcagcgcctgatcgggcgggcaacctgccgcttggaccgaggcgcattcttggcccatagcgcgcggatcaggaacgcgctcggcgatagtgagaagattgtcattggcagccattctcatgtcaggggtgaactgatgatcctcggtcacggcggtcaaattaatatcggagagtggtgctatgtcggggttggcacgcggatttggtccggcgcgtcgatcgatatcgggaatcgtgtcttgatttcgcattccgtcaacatattcgacaatctctcgcatcctatccgtgcttccgagcgacacgaacaggcgaaggagattttctctaccggtcacccaaggcagctttctctcgacgaccgtccgatcaagatttgcgatgatgcgtggatcggtgcttgcgccatggttatgcgtggcgtgaccattggtgagggtgggattgtcgccgcgggtgctgtggtcaccaaggatgttccggcatattccatcgtcgcgggcaaccctgcgaccatcgtcagggaattgtcgccggacgagcgatga

SEQ ID NO: 15526 - protein, 206 aa, Bradyrhizobium japonicum USDA 110
MSSLSTLVRWCVHAIDGFNLHYIVQRLIGRATCRLDRGAFLAHSARIRNALGDSEKIVIGSHSHVRGELMILGHGGQINIGEWCYVGVGTRIWSGASIDIGNRVLISHSVNIFDNLSHPIRASERHEQAKEIFSTGHPRQLSLDDRPIKICDDAWIGACAMVMRGVTIGEGGIVAAGAVVTKDVPAYSIVAGNPATIVRELSPDER

SEQ ID NO: 15527 - DNA, 564 bp, Clostridium tetani E88
  CDS (1)..(564): transl_table=11
atgatgaaaagcgaaaaagaaaaaatgttatcaggtgatttttataatgctaatgataaagaattggttaaagaaagagactatgcaagaaatttaacttttgagtttaatcatataaatccgactgaaaaagaaaaaagacgagaaattataaaccaattaattaataccaaaggttcatttcatattgaagcaccctttaattgtgattatggttataatattgaagttggtgaaaacttttatgctaattatggatgtaccatattagatgtaaataaggttaaagttggagacaatgtacttttagcaccgaatgttcaaatctatactgctactcatcccaccaatcctacagaaagactcactggcaaagaatactctacaccaattgttataggaaataatgtttgggttggtggtggaacaataatatgccctggagtaaaaattggaaataatgtaactataggagcaggtagtgttgtggctaaagacatacctgataatgtaattgctgtaggaaatccttgcaaagttattaaaaaggctaccatactataa

SEQ ID NO: 15528 - protein, 187 aa, Clostridium tetani E88
MMKSEKEKMLSGDFYNANDKELVKERDYARNLTFEFNHINPTEKEKRREIINQLINTKGSFHIEAPFNCDYGYNIEVGENFYANYGCTILDVNKVKVGDNVLLAPNVQIYTATHPTNPTERLTGKEYSTPIVIGNNVWVGGGTIICPGVKIGNNVTIGAGSVVAKDIPDNVIAVGNPCKVIKKATIL

SEQ ID NO: 15529 - DNA, 618 bp, Lactobacillus plantarum WCFS1
  CDS (1)..(618): transl_table=11
atgaccaataataacgatcgtcttcatactggcgaactctacttacctaacgaccctgaacttgaaaaacgccaatttggctatctcgatcagctctatgatttcaaccaaactcggcccagcgaactaaccaagcgccaaattctacttagcaagatgttcgcagaaatcggcccgaagtgttacatcgaaccaccgtttcacagtaactttggtgggcaccatgtccactttggcaagggggtttacgccaattttaacctaacactggtagatgatacccatatttacgttggcgactatacgatgttcggccccaacgtgacaattgcaaccgcgggccatccgattttgccatcattgcgcgaacaagcttatcagtacaatatgccagttcatatcggccgtaactgttggttcggcgcaggtgccatcgtactacccggtattacgattggcgacaatgtcgtcgttggcgctggtagcatcgtgaccaaagacttacctgataacgtcgtcgccgtggggaatcccgcccatatcttgcgacacattaatgatcacgaccgtctgtactactttaaagaccgccagattgatcctagcttgttaaattag

SEQ ID NO: 15530 - protein, 205 aa, Lactobacillus plantarum WCFS1
MTNNNDRLHTGELYLPNDPELEKRQFGYLDQLYDFNQTRPSELTKRQILLSKMFAEIGPKCYIEPPFHSNFGGHHVHFGKGVYANFNLTLVDDTHIYVGDYTMFGPNVTIATAGHPILPSLREQAYQYNMPVHIGRNCWFGAGAIVLPGITIGDNVVVGAGSIVTKDLPDNVVAVGNPAHILRHINDHDRLYYFKDRQIDPSLLN

SEQ ID NO: 15531 - DNA, 609 bp, Lactobacillus plantarum WCFS1
  CDS (1)..(609): transl_table=11
atgatggatgaacgacagcggagtttgagcggtcagacctatgatgcacacgcaccagtatttttagagctaaaacggcgtacacggcaacttttaagccagtataaccagctcgcctatgaccaaaaaagtgagaaacgtacgatattgcaggctatgtttgccaagattggatcgaatgtttcggtggggagcccatttatttgtgactacgggtgtaatatttcgattggtcagaatgtttcaatcaatatgaactgtaccttgatcgactgtaatcggattaccattggtaataatgtcttgattgcctcaaatgttcaaatttatacggctacccatccggtcgaactgcatgaacgtttacgtgcggactggcagccagatagtgatcagtatttttgccagacgttagcgcggccagtcacaatcgaggatggctgttggattggcggtggcgtgattattattcccggcgtgacaattggtcggggatccgtgattggtgccggtagtgtggtcgtcaaagacattccagctaattcgttggcggtaggcaatccttgtcgtgtgattcggcagattaatcaaggtgaaccgcatgcttaa

SEQ ID NO: 15532 - protein, 202 aa, Lactobacillus plantarum WCFS1
MMDERQRSLSGQTYDAHAPVFLELKRRTRQLLSQYNQLAYDQKSEKRTILQAMFAKIGSNVSVGSPFICDYGCNISIGQNVSINMNCTLIDCNRITIGNNVLIASNVQIYTATHPVELHERLRADWQPDSDQYFCQTLARPVTIEDGCWIGGGVIIIPGVTIGRGSVIGAGSVVVKDIPANSLAVGNPCRVIRQINQGEPHA

SEQ ID NO: 15533 - DNA, 555 bp, Lactobacillus plantarum WCFS1
  CDS (1)..(555): transl_table=11
atgtcagaattagataaattagcagctggggaatggtatcaatttaaagatgctgaggtggccgctcaaaaagcgcgggctgccaagttatgtcaagagttcaatcagatcgatgcaacaaatccagatgcgcaaactgccaagattcaagagattcttggtagttacggtcgcaatctttccgttcaagcagactttaattgtgataatggtcgtaatattcatgttggtgataattttcttagtaattataacttaactattttggatatcgcgccagttcatataggggataacgtgatgattggccccaatgttgatatttatacggtcaatcacccgttgacggctagtggtcgacgtgctagcttggcccagggtcatccagtcacgattggtcatgatgtttggattggggggagagcggtgattacgcccggcgtgacgattggtaataatgttgtgattgcggctggagcagtcgttactcatgacatgcctgataatacgttggtggccggggtaccagccaaagttattcgacaattagaataa

SEQ ID NO: 15534 - protein, 184 aa, Lactobacillus plantarum WCFS1
MSELDKLAAGEWYQFKDAEVAAQKARAAKLCQEFNQIDATNPDAQTAKIQEILGSYGRNLSVQADFNCDNGRNIHVGDNFLSNYNLTILDIAPVHIGDNVMIGPNVDIYTVNHPLTASGRRASLAQGHPVTIGHDVWIGGRAVITPGVTIGNNVVIAAGAVVTHDMPDNTLVAGVPAKVIRQLE

SEQ ID NO: 15535 - DNA, 603 bp, Lactobacillus plantarum WCFS1
  CDS (1)..(603): transl_table=11
atgaatttagatgagaagtttgcgtatatggcgactggtcagccgtatcgagatacggatgcagaactaacggcgttgcgtgaccaagcgacgttgacaacgaacgcggtcaatgcgactgctgatccagagactaaagaaactttattgcgacaattggttggttcagctggtcgcaagccatttgtaaatcctaattttcgcgttgaatttggacggaacattcatctaggtgataacttttatgccaactatgattgtgtaatgttagatggggcgccaattacgatcggcagtcaggtcttgttggggccaaaagtcggcctttacacgagcaaccacttgtttgatgcaaccgaacgaattaggggcggctgcatcgcccgaccaatcacaattggtgatggttgttggctagccgctaacgtcaccgtattaccaggagtgaccattggtgctaacacgattattggtggtgggagcgtggtaacccacgatattccagctaacgtgattgcggctggcaacccttgccaagttattcgaccaatcacggcggccgaccgcactggttacaccggggcgcaattcgaattgtcatga

SEQ ID NO: 15536 - protein, 200 aa, Lactobacillus plantarum WCFS1
MNLDEKFAYMATGQPYRDTDAELTALRDQATLTTNAVNATADPETKETLLRQLVGSAGRKPFVNPNFRVEFGRNIHLGDNFYANYDCVMLDGAPITIGSQVLLGPKVGLYTSNHLFDATERIRGGCIARPITIGDGCWLAANVTVLPGVTIGANTIIGGGSVVTHDIPANVIAAGNPCQVIRPITAADRTGYTGAQFELS

SEQ ID NO: 15537 - DNA, 621 bp, Lactobacillus plantarum WCFS1
  CDS (1)..(621): transl_table=11
atgaaaacacagaaagaacgaatgctgtcgggtgagttgtacgttgctgatgatccagaattaggacgtgaaaatcatcgtgccaaacggttagtacgggaatttaatcaaacaaccgaagcccaaccaaaagaacggcaacgattgttaacggcaatgttcaacaaaattggtgacgggggctatatcgaaccgccatttcataccgactatggaagtaacacgacaattggcaagcacttttacgccaattacgatgcgatttttattgatgtgggtcggattacgattggggacaacgtctttatggggccgcgggtcggcttatatacggcgggtcaccccattgacgccgccattcgtgctgaacaactcgaatatggttggccaattacgattggacacgatgtttggtttgggggcaacgtggtcgttaatccgggtgtcacgattgggagtaacgtcgtgattgggtctggttccgtggttactcatgatatcccggataacgtggttgcggtcggcaatccttgccatgtcttacgagaaatcaccaccgccgaccatgaatattgggctcggcaacgggccgcctattttgctgatcgtgatgatgattga

SEQ ID NO: 15538 - protein, 206 aa, Lactobacillus plantarum WCFS1
MKTQKERMLSGELYVADDPELGRENHRAKRLVREFNQTTEAQPKERQRLLTAMFNKIGDGGYIEPPFHTDYGSNTTIGKHFYANYDAIFIDVGRITIGDNVFMGPRVGLYTAGHPIDAAIRAEQLEYGWPITIGHDVWFGGNVVVNPGVTIGSNVVIGSGSVVTHDIPDNVVAVGNPCHVLREITTADHEYWARQRAAYFADRDDD

SEQ ID NO: 15539 - DNA, 570 bp, Lactobacillus plantarum WCFS1
  CDS (1)..(570): transl_table=11
atggaaatcgataatgacccagcgtatcaacaaatgattaatggtgaattgtacttagaatcaccaatcctacagcaacgtcggcgagacgtgcggacgaagttaatgcaatataatcagattgctgataatgatgaacggaatactaagatgaaaagtctcttacgttcagccggtgaccggttcttcgttgaaccgacctttgaatttagttatggcgtcaatattcgtatcggcaatcatttttatgctaaccatggggtcacgttatgtgatgaaggacttattacgattggtaatgattgcaaatttggtcctaaagttggcttgtacacgcctgctcatccattagacccaactgtgcggcggactgaagcggaacggactgcaccgattacgattggtaatgatgtttggattggtggtagtgccgtgatcttacccggggtgacgttgggcaacaacgtgattgttggtgccggtgctgtcgtaacacattcatttccagataacgtcatcgtagtcggtaatccggcgcgtgtcttgaaacaaaatgcaccgcagtcataa

SEQ ID NO: 15540 - protein, 189 aa, Lactobacillus plantarum WCFS1
MEIDNDPAYQQMINGELYLESPILQQRRRDVRTKLMQYNQIADNDERNTKMKSLLRSAGDRFFVEPTFEFSYGVNIRIGNHFYANHGVTLCDEGLITIGNDCKFGPKVGLYTPAHPLDPTVRRTEAERTAPITIGNDVWIGGSAVILPGVTLGNNVIVGAGAVVTHSFPDNVIVVGNPARVLKQNAPQS

SEQ ID NO: 15541 - DNA, 561 bp, Lactobacillus plantarum WCFS1
  CDS (1)..(561): transl_table=11
gtgattaagagtgaaaaggccaaaatgattgctggtgagttgtttaatgtttatgacccagaactagtcggtgagcgagccatagcacggcaacaagtagaagctttcaatcagctcggtgagacgaatccccataaaagccaacaaataattaaacgattatttggcgcgactggtgataaaattgaagttcatgctacctttcgttgtgattacgggtataacctattcgttggtgaagatttctttgctaattatgactgcgtgattttagatgtggccccgattaagattggaaaacactgtctattaggtcccaaagtacaaatttattctgtgaatcatcctgatgaccctcagttacgacgcaatggtgccatgggtattggtaagtctgtgaatctaggagatgatttatgggttggcggtggcgcgattatttgtccaggggtcacattgggaaataatgtgattgttgctgcggggagtgtggtcaccaagtcctttggagataacgtggttgttggtggtaatccagcgcgggtgattcgggaattatga

SEQ ID NO: 15542 - protein, 186 aa, Lactobacillus plantarum WCFS1
MIKSEKAKMIAGELFNVYDPELVGERAIARQQVEAFNQLGETNPHKSQQIIKRLFGATGDKIEVHATFRCDYGYNLFVGEDFFANYDCVILDVAPIKIGKHCLLGPKVQIYSVNHPDDPQLRRNGAMGIGKSVNLGDDLWVGGGAIICPGVTLGNNVIVAAGSVVTKSFGDNVVVGGNPARVIREL

SEQ ID NO: 15543 - DNA, 555 bp, Vibrio parahaemolyticus RIMD 2210633
  CDS (1)..(555): transl_table=11
atgaccgaactagaaaaaatgatgtccggccaagtatttgatggcatggacaaagaaattgacgccattcgaactcaagccactcttgccctgcgcgccttcaataacaacactgacgaaagtaagcgcgacgaattgcaaaaacagctgtttggcaacgcgggtctttgcattgttcaagcccctttccattgcgaattcggtaaaaccatcgaaatcggtgaagagacctttatcaacatgaacgtggtcatgctcgatggtgccaaaattaccatcgggaaccacgtgctcattggcccgagcgtgcaattgtataccgcttctcattctgtggattaccgaagtcgccgacgttgggaaacgttttgtaaacccatcacgattgaagatgatgtgtggattggcggtaactccgtcattaaccaaggtgtgacgataggtgctcgctcagtcattgcggcgaattcagtcgttaaccatgatgtgccgccagattgtctatacggaggcactccagcgaagttgattcgtcgtctcaacgaagaagagtaa

SEQ ID NO: 15544 - protein, 184 aa, Vibrio parahaemolyticus RIMD 2210633
MTELEKMMSGQVFDGMDKEIDAIRTQATLALRAFNNNTDESKRDELQKQLFGNAGLCIVQAPFHCEFGKTIEIGEETFINMNVVMLDGAKITIGNHVLIGPSVQLYTASHSVDYRSRRRWETFCKPITIEDDVWIGGNSVINQGVTIGARSVIAANSVVNHDVPPDCLYGGTPAKLIRRLNEEE

SEQ ID NO: 15545 - DNA, 549 bp, Vibrio parahaemolyticus RIMD 2210633
  CDS (1)..(549): transl_table=11
atgttagaactgactcggatgcgctctggagaaacctataattgtctggatgaagaactaaagctaatgcgcgccaaaaccgcgcagcttgtcttccaatttaaccacgagccaaacccagatatacgtagacaactattggcagaaatgggcgtccaattagaaaacagcgcctgtatagagccaccgcttcaacttacctacggttgtcacttgtccatcggggaaaactcctacatcaactgggatgccattattctggacaatgggcaggttgagattggcgcgaacgtcatgattgggcctagagtgcaaatttacacagccgctcattcactcgatacacaaagacgcttagccggagatgagatcgccaaaccggtaaaaattggcaataacgtttggattggtgggggcgcaatcatactgccaggcgtgaccattggcgatgaggccgtcgtcggcgctggctctgtgataaccaaagacgttgcgccgggcgatcgagttgctggaaatcccgcgcgctccattaaaccaaaaaactga

SEQ ID NO: 15546 - protein, 182 aa, Vibrio parahaemolyticus RIMD 2210633
MLELTRMRSGETYNCLDEELKLMRAKTAQLVFQFNHEPNPDIRRQLLAEMGVQLENSACIEPPLQLTYGCHLSIGENSYINWDAIILDNGQVEIGANVMIGPRVQIYTAAHSLDTQRRLAGDEIAKPVKIGNNVWIGGGAIILPGVTIGDEAVVGAGSVITKDVAPGDRVAGNPARSIKPKN

SEQ ID NO: 15547 - DNA, 552 bp, Salmonella enterica subsp. enterica serovar Typhi Ty2
  CDS (1)..(552): transl_table=11
atgagtgacgaaaaacaaaaaatgatcgctggggcactgtattgcccgaccgatgaaactttatgccaggatcgactgcgggcgcgtcaactcatccatcaatacaattatactacgcctgatgaaataaataagcgtcaggcgattttacgcgacctgttgggtcgatgcgaagacgcctatattgaaccttccttccgttgcgactacggctataatatttttcttggtcactccttttacgctaacttcgactgcgtcatgcttgatgtttgcccaattcatattggcgataattgtatgctcgcgccaggggtacatatctataccgccacgcacccgctggacgccgtcgaacgcaacagcggcagagaattaggtaaacccgtcactatcggaaataacgtctggataggcggacgagccgtcgttaatcctggcgtaaccatcggcgataacgtcgtcgtcgcttcaggcgctgtggtgacaaaaaacgtaccgccagacgtcgtggtaggcggaaatccggcgcgaatcattaaaaaattgtag

SEQ ID NO: 15548 - protein, 183 aa, Salmonella enterica subsp. enterica serovar Typhi Ty2
MSDEKQKMIAGALYCPTDETLCQDRLRARQLIHQYNYTTPDEINKRQAILRDLLGRCEDAYIEPSFRCDYGYNIFLGHSFYANFDCVMLDVCPIHIGDNCMLAPGVHIYTATHPLDAVERNSGRELGKPVTIGNNVWIGGRAVVNPGVTIGDNVVVASGAVVTKNVPPDVVVGGNPARIIKKL

SEQ ID NO: 15549 - DNA, 759 bp, Bacteroides thetaiotaomicron VPI-5482
  CDS (1)..(759): transl_table=11
atgaatttatcggttgttctgtttatactaatagttgtatttattaagtattggttactgctatttacttctcctttactaatggcttattgttggctgcatcgtcgcaaaaacatggctaatcctgaaggtgaggtgagtgaaattagggattctggcattacttcttcttcttgttctaaaaaattgttcaaacgaatagataaaagaggattgatcaatattgtggatggttattttcgttggatgatcaaaataatttcggatattccttcacatcatatacgtgatttcttttacaagtatattttcttggtaaaaatggaaaagaattcagtattatattatggaagtgaaattcgtgcaccatggatgttgatgataggaaaaggttctgtcgttggagataatagtattctggatgcgaggcgtggaggaatctatatcggtgaaaacgttaatattgcttctaatgtttctctttggacaggtggtcatgattataatgatccatactttcgatctatgaaaacgaatcgtggtcctatttatataaagaaccgtgtatggattggccctaatgtaacaattttgcatagtgttactattggggagggagcagtgatagcagctggtgccgtagttactaaggatattccgccttttactatatgtggaggaataccagcaaaagttttggcgcaacgttctattgatttgcggtatactttgggagggacatatcttcattttctataa

SEQ ID NO: 15550 - protein, 252 aa, Bacteroides thetaiotaomicron VPI-5482
MNLSVVLFILIVVFIKYWLLLFTSPLLMAYCWLHRRKNMANPEGEVSEIRDSGITSSSCSKKLFKRIDKRGLINIVDGYFRWMIKIISDIPSHHIRDFFYKYIFLVKMEKNSVLYYGSEIRAPWMLMIGKGSVVGDNSILDARRGGIYIGENVNIASNVSLWTGGHDYNDPYFRSMKTNRGPIYIKNRVWIGPNVTILHSVTIGEGAVIAAGAVVTKDIPPFTICGGIPAKVLAQRSIDLRYTLGGTYLHFL

SEQ ID NO: 15551 - DNA, 624 bp, Bacteroides thetaiotaomicron VPI-5482
  CDS (1)..(624): transl_table=11
atggagaaaaggacactgaaacagcgaatcaaacagaatccggctttgaaacaagccgtacatcgttttattatgcatcccgtaaagacacgtcccaactggtggatacgccttttctattttgtatatctgaaacgtggaaaaggttccgtaatttatcgcagtgtccgcaaagaccttcctccttttaatcagttctcgctagggcgctattcggtagtagaagacttttcctgccttaataatgcggtaggagatttaatcattggagattatacccgcatcggattaggaaataccattatcggtccggttcgtatagggaatcatgtgaatcttgcacagaatataacagtcacaggacttaatcataactatcaagatgcggagaaatcaatcgacgaacaaggagtaagtacacagcctgtcactattgaggatgatgtatgggtaggtgcaaactccgtcatactgccgggagtaactttagggaaacattgtgtagtggctgccggaagcgttgtcagccgttccatcccggcatactctatttgtgccggttgccctgccaaagtgatcaaatcatatgatttcgcaacgaaagagtggaaaaaagtaaaatga

SEQ ID NO: 15552 - protein, 207 aa, Bacteroides thetaiotaomicron VPI-5482
MEKRTLKQRIKQNPALKQAVHRFIMHPVKTRPNWWIRLFYFVYLKRGKGSVIYRSVRKDLPPFNQFSLGRYSVVEDFSCLNNAVGDLIIGDYTRIGLGNTIIGPVRIGNHVNLAQNITVTGLNHNYQDAEKSIDEQGVSTQPVTIEDDVWVGANSVILPGVTLGKHCVVAAGSVVSRSIPAYSICAGCPAKVIKSYDFATKEWKKVK

SEQ ID NO: 15553 - DNA, 564 bp, Bacteroides thetaiotaomicron VPI-5482
  CDS (1)..(564): transl_table=11
atgctttcgggaaaaatgtataatgacttgtctgtagaactggttcaaagaagagaacaggctgttttcctgaccaatgattataattccacttatggaaagcctaaagaagttcgggaggcattgttacgtaaactattgaggtgtattggcagtagtgttcattttgaaccgaatttccggtgtgagtttggattcaatatcagtattggcaataatttcttcgccaattttgattgcatcatgttggacggaaatctcattacgataggcgacaatgtattattagggccccgtgtcggtttatatacggccaatcatgcgctcgatccgcaggaacgtcttatgggcgggtgctatgcccatccgattgtcattgaagataatgtatgggtaggtgccggcgttcatataatgggtggtgtcactgtcgggagaaattcagtaatcggtgcgggcagtgtggtgacaaagagcattccggagaatgtaattgccgcaggtgttccctgtaaagttattcgggaaataaccgatgaagacaagaccggttttctgccttag

SEQ ID NO: 15554 - protein, 187 aa, Bacteroides thetaiotaomicron VPI-5482
MLSGKMYNDLSVELVQRREQAVFLTNDYNSTYGKPKEVREALLRKLLRCIGSSVHFEPNFRCEFGFNISIGNNFFANFDCIMLDGNLITIGDNVLLGPRVGLYTANHALDPQERLMGGCYAHPIVIEDNVWVGAGVHIMGGVTVGRNSVIGAGSVVTKSIPENVIAAGVPCKVIREITDEDKTGFLP

SEQ ID NO: 15555 - DNA, 606 bp, Bacteroides thetaiotaomicron VPI-5482
  CDS (1)..(606): transl_table=11
atgatattcggttttattgcaaaaatatataggaaatatcaagaatatattcatcctggtatttatgttacgaggcatggtattctgtacagagaaaaagattgccgatataatgtatatccgttacaaagattaattgttggtaaggtatgggttggaaacattccttcacaggagaaagggcggcttattcttcatgctaactcggaattgatagtaaaagggaattttgatattatcggttcaactgtagtcgtattgccggatgctaaactgattttaggttccgggtatattaatttccattcgaagttacattgttttaatcacatagaaataggagaaaatgttatcatttcagagaatgtaattatccgggattctgataatcaccagataacgggaggaaatagcatgtttgctcctgttataataaaggataatgcatggattggtatgtctgctatcattttaaaaggggtgacggttggtgaaggtgctattgttgcagcaggttctgtcgtgactaaagacgtaccgccgcatactattgtcgcaggagtaccggcaagggtaattaaaaaagatgtttattatacaatatga

SEQ ID NO: 15556 - protein, 201 aa, Bacteroides thetaiotaomicron VPI-5482
MIFGFIAKIYRKYQEYIHPGIYVTRHGILYREKDCRYNVYPLQRLIVGKVWVGNIPSQEKGRLILHANSELIVKGNFDIIGSTVVVLPDAKLILGSGYINFHSKLHCFNHIEIGENVIISENVIIRDSDNHQITGGNSMFAPVIIKDNAWIGMSAIILKGVTVGEGAIVAAGSVVTKDVPPHTIVAGVPARVIKKDVYYTI

SEQ ID NO: 15557 - DNA, 552 bp, Bacteroides thetaiotaomicron VPI-5482
  CDS (1)..(552): transl_table=11
atgacagaagtagagaagatgcgtagcagccagttggctgatatgtccgcgccggagttgcaggtgcgttttgagcatgccaagaagttgctggcgatcatgcgcgggttgagcacgtatgatgacgggtacagagaattgctggaagaactggtgccgggtattcctgaaacttcggtgatctgtcctcctttccattgcgatcacggagacgggataaagttgggcgaacacgtctttgtcaatgccaactgtacttttctggacggagggtatatcacaatcggtgcccatacgctagtcggcccttgcgtacagatttatacaccgcatcatccgatgaattatctggagcgtcgcggttcgaaagagtatgcttatccggttacgatcggcgaggattgctggattggcggcggtgctgtcatttgtcccggtgtgacgattggcaaccgttgtgtgataggagcgggaagcgtcgtgacgaaagatattcccgacgacagtgttgcagtcgggaatccggcgcgccttatccgtaagcaggcttga

SEQ ID NO: 15558 - protein, 183 aa, Bacteroides thetaiotaomicron VPI-5482
MTEVEKMRSSQLADMSAPELQVRFEHAKKLLAIMRGLSTYDDGYRELLEELVPGIPETSVICPPFHCDHGDGIKLGEHVFVNANCTFLDGGYITIGAHTLVGPCVQIYTPHHPMNYLERRGSKEYAYPVTIGEDCWIGGGAVICPGVTIGNRCVIGAGSVVTKDIPDDSVAVGNPARLIRKQA

SEQ ID NO: 15559 - DNA, 846 bp, Enterococcus faecalis V583
  CDS (1)..(846): transl_table=11
atggaagaatttaaatcagaaaaagaaaaaatgatcgcaggtgcactatattttgcctcagatcctgaattagtggctgatcgcaaaaaagcccgtgaacaaatggcgttaattaaccaacaaccagacacttatattcgtcgtcaattaatagaagaaacgtttggaaaagtgggtgtcgggacgtacatcgaaccgatgattcaatttgattatggctacaacatttctgtgggaaaaaatttctatgccaattttaataacgtttttttagatgtttgtccaatcgaaattggcgataactgtatgtttggacccaatgtgcaactttatacagccgagcatccattacaagcggccaagcgtaatagcggaatggaatcagggaaacgaattatcattggcaacaatgtttggattggcggtggagcgattgtccttcctggcgtaacattaggcgataatgtagtggtggcagcaggtgctgttgtgaccaaatcgtttccagaaaactgtgtgatcgcaggtaatccagcacggataattaaagaattgactgaagatgacgccccaacaacttctttagaacaacaacgagcaaagattaaccaaatcgataaggaactggtccgtttattagaacagcggatggacgtcgtcgcagagattgctgcagtgaaaaagaaagcaggtcatgcggtttttgattctgaaagagaacaacaagtattagaaactattctgaatcatgttgaaaatgccgagtatgaagaaacattatctgagactttccagggaattatggacgcctctaaacgtttccaagaaaaacatttaggagagtga

SEQ ID NO: 15560 - protein, 281 aa, Enterococcus faecalis V583
MEEFKSEKEKMIAGALYFASDPELVADRKKAREQMALINQQPDTYIRRQLIEETFGKVGVGTYIEPMIQFDYGYNISVGKNFYANFNNVFLDVCPIEIGDNCMFGPNVQLYTAEHPLQAAKRNSGMESGKRIIIGNNVWIGGGAIVLPGVTLGDNVVVAAGAVVTKSFPENCVIAGNPARIIKELTEDDAPTTSLEQQRAKINQIDKELVRLLEQRMDVVAEIAAVKKKAGHAVFDSEREQQVLETILNHVENAEYEETLSETFQGIMDASKRFQEKHLGE

SEQ ID NO: 15561 - DNA, 639 bp, Enterococcus faecalis V583
  CDS (1)..(639): transl_table=11
atgaaacaaaatgactttgattatatgcaaatgttaaaaggtgaattatattacgcccccaccattttacccgaaaacaaatcaacaaaaggcaaggtgttagctcaaaaaatcaatcaacttcctatcgataatgtgaaagaaattgtggccctagaaaaagaattattaggaaaaactggcaatgagttatatatcaccccacccctccatgtagattacggtcgccatattgaggtaggagaaaatttttatgcaaatatggattgcatttttttagatgtaaacaaaatcatcttcggtgataatgtcatggttggccctcgtgctagtttttatactgccggccatccaattgatccaacgattcgaactgcagaattagaattcggtacgccaattattgttgaagataacgtgtggattggcggaagtgccaccattttacctggcgttacaattggaaaaaatgctattgttgctgctggtgctgtggttacaaaagacgttcctgccaacacgattgttgggggtaatccagcaaaagtcattcgcaaaattgatgaaaacgatcagcaattttggacagaaaagcaacggcagtatcaaatcgctaagaagcaattctttcatgaataa

SEQ ID NO: 15562 - protein, 212 aa, Enterococcus faecalis V583
MKQNDFDYMQMLKGELYYAPTILPENKSTKGKVLAQKINQLPIDNVKEIVALEKELLGKTGNELYITPPLHVDYGRHIEVGENFYANMDCIFLDVNKIIFGDNVMVGPRASFYTAGHPIDPTIRTAELEFGTPIIVEDNVWIGGSATILPGVTIGKNAIVAAGAVVTKDVPANTIVGGNPAKVIRKIDENDQQFWTEKQRQYQIAKKQFFHE

SEQ ID NO: 15563 - DNA, 582 bp, Enterococcus faecalis V583
  CDS (1)..(582): transl_table=11
atgcttacaaaaaatctccaagaactaattgcaacaggtagcattgataaagatgaaccactatttcaacttattcatcagattcaagaggaaaatagtcgctatttaatagaattaaatcaacaagcctatacacataatgaagtaaggaatcttcttgccacgattatccaagacaaaattgacgaaaccgttacgattttattacctttttatacagattttggacgcaatatacattttggtaaaaatatttttattaatcgggcagctatgtttgttgatttagggggcattataattgaagacaatgttttaattggtccgcgcgttaatctcttaagtgtcaatcatccggaactgccaatgaaacggcgaggcgtattgctagcaccaattaccattaaaaaatttgcgtggttaggcgcgggtgtcactgttttaccaggtattacgattggtgaaaatgctatcgtagcagctaatgcgactgtaactaaagatgtgccagctaacgctattgttgcaggaacaccagctaaaattattcgttggattcaggaagataaggaggaaatataa

SEQ ID NO: 15564 - protein, 193 aa, Enterococcus faecalis V583
MLTKNLQELIATGSIDKDEPLFQLIHQIQEENSRYLIELNQQAYTHNEVRNLLATIIQDKIDETVTILLPFYTDFGRNIHFGKNIFINRAAMFVDLGGIIIEDNVLIGPRVNLLSVNHPELPMKRRGVLLAPITIKKFAWLGAGVTVLPGITIGENAIVAANATVTKDVPANAIVAGTPAKIIRWIQEDKEEI

SEQ ID NO: 15565 - DNA, 723 bp, Bacillus cereus ATCC 14579
  CDS (1)..(723): transl_table=11
atgaaaatgatggacgctaacgaaattatttcgtttattcaaaaaagtgaaaagaaaactcctgtaaaggtatacataaaaggggatttaaaagaagtaacattccctgaaacagtacaagcatttgtgaataaaaaatcaggtgtattattcggagaatggtctgaaattaagacaattcttgatgagaataataagcacatcgttgactacgttgtagaaaacgatcgtcgtaattctgcaatcccaatgcttgatttaaaaggtattaaagctcgcatcgagccaggtgctattattcgtgaccatgttgaaattggtgacaacgctgtaattatgatgaatgcaacaattaacattggtgctgtaattggtgaaggttctatgatcgacatgaacgcagtacttggtggacgtgcaacagtcggtaaaaactgtcacgtaggtgcaggtgctgtacttgcaggtgttattgagccaccttctgcaaaaccagttatcgttgaagatgatgtagtaatcggtgcaaatgtagttgttttagagggtgttacagtaggtaaaggtgcagttgtagcagcgggagctgttgtaacagaagatgtgcctccatacacagttgttgcaggtactccagcacgtgtaattaaagaaattgatgagaagacaaaagcaaaaacagaaattaaacaagagcttcgtcaattaaacccagagaaataa

SEQ ID NO: 15566 - protein, 240 aa, Bacillus cereus ATCC 14579
MKMMDANEIISFIQKSEKKTPVKVYIKGDLKEVTFPETVQAFVNKKSGVLFGEWSEIKTILDENNKHIVDYVVENDRRNSAIPMLDLKGIKARIEPGAIIRDHVEIGDNAVIMMNATINIGAVIGEGSMIDMNAVLGGRATVGKNCHVGAGAVLAGVIEPPSAKPVIVEDDVVIGANVVVLEGVTVGKGAVVAAGAVVTEDVPPYTVVAGTPARVIKEIDEKTKAKTEIKQELRQLNPEK

SEQ ID NO: 15567 - DNA, 561 bp, Bacillus cereus ATCC 14579
  CDS (1)..(561): transl_table=11
atgatgaaaacagaaaaggaaaagatgatactaggagaaatgtacataccggctgatccagttttagtacaagaaagagagcaagcacgtatattaacgagaaaattaaatgatacgccagaagagcaattgaaagagcgtagcgaaatcgtaaaagaattattcggaacgacaggagataatattcatcttgaatcttcttttagatgtgattacggctataacattcatgtcggtgaaaatttttacgcgaactttgactgtacgattttagacgtatgcccggtaacaatcggagtgaactgtatgttagctccaggtgttcacatttatacagcaacgcacccacttgatccggtagagcgtataagcggatcagaatacggaaaaccagttacaattggcgataacgtatggattggcggaagagcaattattaatccaggtgtaacaattggagacaatgcggtaatcgcatctggtgctgtcgtaacgaaagatgtgcctaataatgtagtagttggcgggaatcctgcaaagattataaaaaaactaaaataa

SEQ ID NO: 15568 - protein, 186 aa, Bacillus cereus ATCC 14579
MMKTEKEKMILGEMYIPADPVLVQEREQARILTRKLNDTPEEQLKERSEIVKELFGTTGDNIHLESSFRCDYGYNIHVGENFYANFDCTILDVCPVTIGVNCMLAPGVHIYTATHPLDPVERISGSEYGKPVTIGDNVWIGGRAIINPGVTIGDNAVIASGAVVTKDVPNNVVVGGNPAKIIKKLK

SEQ ID NO: 15569 - DNA, 666 bp, Bacillus anthracis str. Ames
  CDS (1)..(666): transl_table=11
atgtttaagaggcttcgggaagatattgaagtcgtttttgaacaggatccagcggcaagaagttatttcgaagtcattttgacttactctggattacatgcagtttgggcccatcgaattgcacatgctttttataaaaagaatttcttctttattgcacgttggatctcacaagttagtcgtttctttactggcattgagattcatccaggagcaacaattggtcgtcgttttttcattgaccatggaatgggggttgtaattggagaaacgtgcgaaattggtgataatgtaacgatctaccaaggagttacattaggtggtacaggtaaagaaaagggaaagaggcaccctacaattcaagataatgtattaattgcaacgggtgctaaagtactaggttctattacagttggagagaactctaaaattggagcaggttctgtcgtattaaaagaagtccctgcacattctacagttgtaggtatacctggccgagtcgttattcaaaatggagtaaagatcggtcaagaattaaatcattccgaccttccagacccaatttttgataaattaaaggtcatggaagtagaacttgataaattgaaaaaacaacttgaagtaaaggtagaaaggaaggataaaaatgactattcacatttataa

SEQ ID NO: 15570 - protein, 221 aa, Bacillus anthracis str. Ames
MFKRLREDIEVVFEQDPAARSYFEVILTYSGLHAVWAHRIAHAFYKKNFFFIARWISQVSRFFTGIEIHPGATIGRRFFIDHGMGVVIGETCEIGDNVTIYQGVTLGGTGKEKGKRHPTIQDNVLIATGAKVLGSITVGENSKIGAGSVVLKEVPAHSTVVGIPGRVVIQNGVKIGQELNHSDLPDPIFDKLKVMEVELDKLKKQLEVKVERKDKNDYSHL

SEQ ID NO: 15571 - DNA, 564 bp, Bacillus anthracis str. Ames
  CDS (1)..(564): transl_table=11
atgaaaacagaaaaagacaagatgttagcgggagaaatgtatattgcggatgacgaagaattagtagctgatagggtggaggcaaaacgtttaacacgcctttataacgaggcggtggagacaggagatgagagacgttttacgttattaaatcagcttttaggttcttcagctgatgggaaagcccaaattaatcctgattttcgttgtgattatggatacaatatccatgttggaaagagcttttttgcaaatttcaattgtgtgattttagacgtttgtgaagttcgaatcggtgatcattgtatgtttgcacctggtgttcacatttatactgctacgcatcctttacatccggtagagcggaattctggtaaagagtatgggaagcctgtaaagattggtaacaatgtttgggttggcgggggagctattattaaccctggtgtttcaattggagataacgctgtaattgcttcaggggcagttgtgacaaaagatgtacctaataatgtagtagttggtggtaatccagctaaagttattaaaacgatagaagaataa

SEQ ID NO: 15572 - protein, 187 aa, Bacillus anthracis str. Ames
MKTEKDKMLAGEMYIADDEELVADRVEAKRLTRLYNEAVETGDERRFTLLNQLLGSSADGKAQINPDFRCDYGYNIHVGKSFFANFNCVILDVCEVRIGDHCMFAPGVHIYTATHPLHPVERNSGKEYGKPVKIGNNVWVGGGAIINPGVSIGDNAVIASGAVVTKDVPNNVVVGGNPAKVIKTIEE

SEQ ID NO: 15573 - DNA, 723 bp, Bacillus anthracis str. Ames
  CDS (1)..(723): transl_table=11
atgaaaatgatggacgctaacgaaattatttcgtttattcaaaaaagtgaaaagaaaactcctgtaaaggtatacataaaaggggatttaaaagaagtaacattccctgaaacagtacaagcatttgtaaataaaaagtctggtgtattatttggagaatggtctgaaattaagacaattctagatgaaaatagcaaatacattgttgattacgttgttgaaaatgaccgtcgtaattctgcaattccaatgcttgatttaaaaggtattaaagctcgtattgagccaggtgcgattattcgtgaccacgttgaaatcggcgacaacgctgttattatgatgaatgcaacaattaacatcggtgctgtaattggtgaaggttctatgatcgacatgaacgcggtacttggtggacgtgcaactgttggtaagaactgtcacgtaggtgcaggtgcagtacttgcaggcgttattgagccaccttcagcaaaaccagttatcgttgaagacgatgttgtaattggtgctaacgtagttgtgttagagggagttacagtaggtaaaggtgcagttgtagcagcaggagctgttgtaacagaagatgtacctccatatacagttgttgcaggtactccagcacgtgtaattaaagaaattgatgagaagacaaaagcaaaaactgaaattaaacaagagcttcgtcaattaaacccagagaaataa

SEQ ID NO: 15574 - protein, 240 aa, Bacillus anthracis str. Ames
MKMMDANEIISFIQKSEKKTPVKVYIKGDLKEVTFPETVQAFVNKKSGVLFGEWSEIKTILDENSKYIVDYVVENDRRNSAIPMLDLKGIKARIEPGAIIRDHVEIGDNAVIMMNATINIGAVIGEGSMIDMNAVLGGRATVGKNCHVGAGAVLAGVIEPPSAKPVIVEDDVVIGANVVVLEGVTVGKGAVVAAGAVVTEDVPPYTVVAGTPARVIKEIDEKTKAKTEIKQELRQLNPEK

SEQ ID NO: 15575 - DNA, 618 bp, Helicobacter hepaticus ATCC 51449
  CDS (1)..(618): transl_table=11
atgaaaccaactttttcgcttcgtagcacacccacacctagcacaaatcgcgatattttcacgcgggatttgggtggggagcttatagatatgaatgacccagagtttgagaggattaaagagattattttagagacgattaggcttacaagtgagctaaatagcggacatcatagcgccgagcgcgtgcaggagctgttttcgcaaatcattggcaaagaggtggattgtagcacttggattatcccgcctttttatgtggattttggcaaaaatattaaggtgggcaaaaatttctttatgaatcaagcttgcacctttatggataggggcggcatcacaatcggtgatgatgtgtttatcgcacccaaagtctgcctcacaacgattaatcacgattttaatccctacaatcgccaagcgactttttgcaaacccattgtgataaaagatagggtatggatagggattaatgcaactatttgtccgggtgtaaccattgggcaaaactctgtgattgctgctggaagcgtggtaactaaagatgttcctccaaatgtgattgttggaggcaaccctgcaagggtgctaaaaagcattgaggggtatgagaaatag

SEQ ID NO: 15576 - protein, 205 aa, Helicobacter hepaticus ATCC 51449
MKPTFSLRSTPTPSTNRDIFTRDLGGELIDMNDPEFERIKEIILETIRLTSELNSGHHSAERVQELFSQIIGKEVDCSTWIIPPFYVDFGKNIKVGKNFFMNQACTFMDRGGITIGDDVFIAPKVCLTTINHDFNPYNRQATFCKPIVIKDRVWIGINATICPGVTIGQNSVIAAGSVVTKDVPPNVIVGGNPARVLKSIEGYEK

SEQ ID NO: 15577 - DNA, 555 bp, Rhodopirellula baltica SH 1
  CDS (1)..(555): transl_table=11
atggttaccgaacgagaaagaatgttggccggtgagttgtacgacgcgggagacgcggagttggtcgaggcgcggatcatcgctcgagagcgttgtcagcagatcaacgcgagcttgcctcgcgacgaagcgtttcggcgcgtgctgacgaggaaactattcgccagcggtggagactcggttcagttggagtcaccgtttcgatgcgactatgggacgaacattcacctcggccaaaacgtgtatttcaatttcgactgtgtggttttggatgtctgcgaagttcggatcggtgattttgtgttttttggacctggcgttcatgtctacacagcttcgcatcctttggatgcaggcccacggcggacgcaggaattcggcaaaccagtcacgatcggcagcgatgtttggatcggtggcaaagccgtgatctgcccgggcgtttcgatcgggcaacgcagcgtgattggcgctggaagcgtggttacaaaagacgttcccgatggagtggtggtggccggcaatcccgcgaaactgattcgccgaattgactga

SEQ ID NO: 15578 - protein, 184 aa, Rhodopirellula baltica SH 1
MVTERERMLAGELYDAGDAELVEARIIARERCQQINASLPRDEAFRRVLTRKLFASGGDSVQLESPFRCDYGTNIHLGQNVYFNFDCVVLDVCEVRIGDFVFFGPGVHVYTASHPLDAGPRRTQEFGKPVTIGSDVWIGGKAVICPGVSIGQRSVIGAGSVVTKDVPDGVVVAGNPAKLIRRID

SEQ ID NO: 15579 - DNA, 522 bp, Chromobacterium violaceum ATCC 12472
  CDS (1)..(522): transl_table=11
atgaaggtttttaatgcggccgagcctggtttgatcgaaagaaggcgcattgccagggatttgtgtcattcgataagcaccgcttcgagggggcgcgatgagctgtaccgggcgctgtttggaaaagttgggcaagggttcgaactgtggggcacggtattctgcgagtttggctggaatatcaaaataggaaatcaggtatttatcaacaccaatggcgtattcctggatgcatttgatatcgacataggcaatcacgtctttatcgggcccagtgtgggaatttatacctctaatcatgaccagaattcccagcgcaggcgggagtatgtggaatccggcgcgccagtggtgatagaagatgatgtctggataggcggcggtgccatcatcttgccgggagtcagtatagggaggggctcgattatcggagccggcgcggtggtggcccgctcggtgccggcattcagcaaggttttaggtgctcgttcccaggtttatcctcttgctatggaaggttga

SEQ ID NO: 15580 - protein, 173 aa, Chromobacterium violaceum ATCC 12472
MKVFNAAEPGLIERRRIARDLCHSISTASRGRDELYRALFGKVGQGFELWGTVFCEFGWNIKIGNQVFINTNGVFLDAFDIDIGNHVFIGPSVGIYTSNHDQNSQRRREYVESGAPVVIEDDVWIGGGAIILPGVSIGRGSIIGAGAVVARSVPAFSKVLGARSQVYPLAMEG

SEQ ID NO: 15581 - DNA, 561 bp, Gloeobacter violaceus PCC 7421
  CDS (1)..(561): transl_table=11
atggcgcgaagcgaaaaagaaaagatgctcgccggtgaactctatcgtgcgagcgatcccgaactggtggccctgcgggtgagcgcgcgcggactgctcgccctctacaacgccaccgaacccggaccaggggagcggcggcaacaattgctgcgcgagctgttgggcgccgtcggaacgatggtggaaatcgagccgccctttttctgcgactacggcagtcagatctatgccggggaaggattctacctgaataccggctgcgttatcctcgactgcgccccggtcactatcggcaccaatgtgctgtgcgctcctggggtgcatatctacaccgccacgcaccccaccgagcctgccctgcgccggtcgggccttgaattggccgccccggtaaccattggcgacaacgtctggctcgggggcaaggcaatcgtctgtccgggggtgacgatcggccagaacaccaccatcggcgcgggcagcgtcgtagtcaaaagtatccccgccaacgtcatcgccgccggcaatccgtgccgggtgctgcgccatctcgattga

SEQ ID NO: 15582 - protein, 186 aa, Gloeobacter violaceus PCC 7421
MARSEKEKMLAGELYRASDPELVALRVSARGLLALYNATEPGPGERRQQLLRELLGAVGTMVEIEPPFFCDYGSQIYAGEGFYLNTGCVILDCAPVTIGTNVLCAPGVHIYTATHPTEPALRRSGLELAAPVTIGDNVWLGGKAIVCPGVTIGQNTTIGAGSVVVKSIPANVIAAGNPCRVLRHLD

SEQ ID NO: 15583 - DNA, 771 bp, Vibrio vulnificus YJ016
  CDS (1)..(771): transl_table=11
atgttggtgaataaatcacaactcggagtcaaaccagatagcgagaaaaacacgaaaacctgtcgaggaagcgacttaaaatcttggctcaaacatcatcccaatcctcttatgcgaacgctttttcgcacactcaaacagatccgttgtgccaacttacccaccccacatttttacaatgccttgctctaccgtttgatggtgttgctccgccaatcaagtgactatgtctatcgcaccttcattaccacgccagcattcaaaggcagggtcaaggcatgcggcaaacagctctatttgtatggcggattaccgctcatcactaacaatgttcgtatctccatgggtgatgactgtaacctttccggtcaagcaaccattacgggctgcagttctgtcaaagaacctcgattgaacatcggtaatcgtgtctcgattggctggcaaacgaccatcgcggtgggcgacctcatcacgattgaagacgacgtagcgatcgccggacgctgcatgttttttggttattcaggccaccccttagaccccaaacgtcgtgccgcgggtgaaggcgatgatcccagccagattcgcccaattaccctacaacgcggctgctggattggcagcaacgtgatgatcatggcgggcgtcaccgtcggggctggcagtgtgatcgccgcaggcagtgtggtgacacattccattcctgaaggtgtgatcgcaggcggcaatcccgcccacgtgattcgttcattgaacatacctcgttga

SEQ ID NO: 15584 - protein, 256 aa, Vibrio vulnificus YJ016
MLVNKSQLGVKPDSEKNTKTCRGSDLKSWLKHHPNPLMRTLFRTLKQIRCANLPTPHFYNALLYRLMVLLRQSSDYVYRTFITTPAFKGRVKACGKQLYLYGGLPLITNNVRISMGDDCNLSGQATITGCSSVKEPRLNIGNRVSIGWQTTIAVGDLITIEDDVAIAGRCMFFGYSGHPLDPKRRAAGEGDDPSQIRPITLQRGCWIGSNVMIMAGVTVGAGSVIAAGSVVTHSIPEGVIAGGNPAHVIRSLNIPR

SEQ ID NO: 15585 - DNA, 558 bp, Vibrio vulnificus YJ016
  CDS (1)..(558): transl_table=11
gtgtatccgatgactgaatttgaaaaaatgaattccgggcaaatctttgatggcgcggatgcggaaattgatgcgattcgcaatcgtgctgcggtgttattgaaagagatcaacgcagcaacggaaacagaacaacgcatcacactgcaaaaacagctctttgccagcatgggcaacagttatatccagccaccatttatgtgtgaatttggcaaaaccatctctattggtgaggaaacgttcatcaacatgaatgttgtgatgttggatggggcgcacattacgatcggcagtcacgtgttaattggcccgagttgccagttttataccgcttctcattcccttgattaccgaagccgacgccagtgggaaaccttctgcaaaccgattgttgtagaagatgatgtttggattggtggaaattgcgttatcaatcaaggggtcacgattggagctcgttccgtcatcgctgcaaattcggtcgtcaatcatgatgtcccgccagactgcttgtatgggggcaccccagcgaaactgattcgacggttagacaagtag

SEQ ID NO: 15586 - protein, 185 aa, Vibrio vulnificus YJ016
MYPMTEFEKMNSGQIFDGADAEIDAIRNRAAVLLKEINAATETEQRITLQKQLFASMGNSYIQPPFMCEFGKTISIGEETFINMNVVMLDGAHITIGSHVLIGPSCQFYTASHSLDYRSRRQWETFCKPIVVEDDVWIGGNCVINQGVTIGARSVIAANSVVNHDVPPDCLYGGTPAKLIRRLDK

SEQ ID NO: 15587 - DNA, 657 bp, Vibrio vulnificus YJ016
  CDS (1)..(657): transl_table=11
gtggcggtgtggtcatcaaggcaaaacggttttgtggagagaaaaatgagtgtgagagagcgaatgcatcaacaaaagatttacttttgtgatgatgagagtgtggcgttagagcagcaagcttgtctggaaattctctatgattttaaccaaaccagaccctcagaaatggaaaaacgcacggcgattttgcgcgatctcttggctgaagtcggtgagaactgctacatcgagccaccactaagagccaattggggtaagcatacacacttaggtaataatgtttatgccaatttcaatttaaccttggtggatgatacacacatctacatcggtaactcggtgatgattgcacccaatgtcaccatcgcaacggcgggacatccgattgatcctgaactgcgacgtaaagtggcgcaattcaacattcctgtgcacattaaagataacgtttggattggggcgaacagtgttgtgttaccaggcgtaacgataggcgaaaacagcgtgattggtgccggcagtgtggtgacgaaagacatccccgccaatgtcgtggctgttggtaatccttgccgagtgttgcggccgattggagagcatgacaaacgttacttctatcgcgataacgttattgacgatttaccacaagcctaa

SEQ ID NO: 15588 - protein, 218 aa, Vibrio vulnificus YJ016
MAVWSSRQNGFVERKMSVRERMHQQKIYFCDDESVALEQQACLEILYDFNQTRPSEMEKRTAILRDLLAEVGENCYIEPPLRANWGKHTHLGNNVYANFNLTLVDDTHIYIGNSVMIAPNVTIATAGHPIDPELRRKVAQFNIPVHIKDNVWIGANSVVLPGVTIGENSVIGAGSVVTKDIPANVVAVGNPCRVLRPIGEHDKRYFYRDNVIDDLPQA

SEQ ID NO: 15589 - DNA, 621 bp, Vibrio vulnificus YJ016
  CDS (1)..(621): transl_table=11
atgtgcgatagtgcgcagcagaaaatgcccgttgtgaacgttggaagacgcgaaatgaacagaactgaaaagcaaaaaatgttggctggagaaccttacaatgcgtgggatgaagagctgtatgggctgcgaattgagtgtcgtaaaaccttgcagcgattgaacaatgcgatccctgatagcaccgaatggcgagaagccatcgaccagttgatcccccaatcgcaaggtgcctatctcgaaccgccgtttcgttgtgactacggcgcaaacatcactttaggcaaaaacttctacgccaactttaactgtgtggtgctggatgttgctcctgtggtgattggcgataatgtgctgtttgcccccaacgtgcaaatatacacggcgggtcatccgctggacgtaaaaagccgcgtggaagagggtattgagtttggcacaccgattaccattggcaacaatgtgtggctcggtggcggcgtgattgtgtgcccaggcgtgacgattggtgataacagcgtcatcggcgcaggctcggtggtcaccaaagatgtgcctgccaatgtggttgcggcgggcaatccgtgtcgtgtaattcggacgttggacgccacgatttaa

SEQ ID NO: 15590 - protein, 206 aa, Vibrio vulnificus YJ016
MCDSAQQKMPVVNVGRREMNRTEKQKMLAGEPYNAWDEELYGLRIECRKTLQRLNNAIPDSTEWREAIDQLIPQSQGAYLEPPFRCDYGANITLGKNFYANFNCVVLDVAPVVIGDNVLFAPNVQIYTAGHPLDVKSRVEEGIEFGTPITIGNNVWLGGGVIVCPGVTIGDNSVIGAGSVVTKDVPANVVAAGNPCRVIRTLDATI

SEQ ID NO: 15591 - DNA, 570 bp, Corynebacterium diphtheriae NCTC 13129
  CDS (1)..(570): transl_table=11
atggccgaccagcgcgcccaacgatggcatatcccggtatctccggagatcacgcaggctatggctcgtaccgccgagttggttttcgattacaacgccactcacccagcgcataccgaggagcttagtcgcctccgccggttgatcctcagccccgccagtaaggactgcacgatcagacagcctctgaccattgaatatggtgttaacacgaccattggcaaagacacttttatcaattacggcgtgaccatcctcgacaccgcagaggtcaccattggcagccaggttcttatcggaccgaactgccagctcatcacggtcacccaccccgttgacaacgccgatatgcgcaccgccggctgggaaattgcccacccgattgtcgtcggcaagcaggcatggctaggggctggcgtgatcgttttacctggggtcaccatcggcgagcgtgctgttatcggcgctggcagtgtggtcacccacgatattcccgacgacaccatcgcctacggcaaccccgcccgagttatacgcaccaccaatcctcacaccacttatgagctttaa

SEQ ID NO: 15592 - protein, 189 aa, Corynebacterium diphtheriae NCTC 13129
MADQRAQRWHIPVSPEITQAMARTAELVFDYNATHPAHTEELSRLRRLILSPASKDCTIRQPLTIEYGVNTTIGKDTFINYGVTILDTAEVTIGSQVLIGPNCQLITVTHPVDNADMRTAGWEIAHPIVVGKQAWLGAGVIVLPGVTIGERAVIGAGSVVTHDIPDDTIAYGNPARVIRTTNPHTTYEL

SEQ ID NO: 15593 - DNA, 573 bp, Rhodopseudomonas palustris CGA009
  CDS (1)..(573): transl_table=11
atgaaccggaccgagaaggaaaagatgctggcgggcgagctgtatcgccccggcagcccggagctcgccgccgacgaggccgccaacaaggcctggatcgcccgctacaatgcttccggtgcgcagccggtggcggagcggcatgcgctgctgtcggagcatttcggccatgtcggcaagggcgcggtggtgcggccgccgttcttctgcgactgcggctacaacatcttcgtcggcgacaacgtcttcctcaatttcaactgcgtgatcctggacatcatgccggtccggatcggcgaccgcacccagatcggcccggcggtgcagatctatgcggccgaccacccgcgcgacgccgccacccgccgcgatggcctggaattcggccggccggtgacgatcggcaacgacgtctggatcggcggcggtgccatcatcctgcccggcatcagcatcggcgacggcgccgtgattggggccggcagcgtggtgacccgcgacgtcgccccccatgccatcgtcggcggcaacccggccaagccgctggggaagggcggccagacgcaaggatga

SEQ ID NO: 15594 - protein, 190 aa, Rhodopseudomonas palustris CGA009
MNRTEKEKMLAGELYRPGSPELAADEAANKAWIARYNASGAQPVAERHALLSEHFGHVGKGAVVRPPFFCDCGYNIFVGDNVFLNFNCVILDIMPVRIGDRTQIGPAVQIYAADHPRDAATRRDGLEFGRPVTIGNDVWIGGGAIILPGISIGDGAVIGAGSVVTRDVAPHAIVGGNPAKPLGKGGQTQG

SEQ ID NO: 15595 - DNA, 615 bp, Lactobacillus johnsonii NCC 533
  CDS (1)..(615): transl_table=11
atggaagaaaatactaaaaatatgctagcaggattaccttatcgtcccgacacagaagagttaagagctatttcgacaaaggcgcatcgcttaagccgtgactataatcaaacagcagatgaagataaggaagtaagaaaagcaattatcgataatttatttccagatcatggagaaggagtttacctgcaaggaccaattgaagtagattacggtaaatttacaaaattaggtaaaaatttttatgctaactttaatttgactattctagatacttgtccagttactattggcgacaatgtaatgtgtggtcctaatacttcattagtaacgccgctgcatcccttattgccagagcaaagaaatgcgcgcttgcaagcagatgggaagatagcagatattgaatatggcgcaccaattacaattggggataattgctggttagctagtaatgtaactgtttgtccaggagtaacgattggaaacaactgcgttattggagctggcagcgtagttacaaaagatattccagacaactctttagtttttggggttccaggccgagtagttagaaaaatcactgagaaagaccgcctagatacttatccatattaa

SEQ ID NO: 15596 - protein, 204 aa, Lactobacillus johnsonii NCC 533
MEENTKNMLAGLPYRPDTEELRAISTKAHRLSRDYNQTADEDKEVRKAIIDNLFPDHGEGVYLQGPIEVDYGKFTKLGKNFYANFNLTILDTCPVTIGDNVMCGPNTSLVTPLHPLLPEQRNARLQADGKIADIEYGAPITIGDNCWLASNVTVCPGVTIGNNCVIGAGSVVTKDIPDNSLVFGVPGRVVRKITEKDRLDTYPY

SEQ ID NO: 15597 - DNA, 564 bp, Bacillus cereus ATCC 10987
  CDS (1)..(564): transl_table=11
atgaaaacagaaaaagaaaagatgttagcgggagaaatgtatattgcagatgacgaagaattagtagctgatagggtggaggcaaaacgtttaacacgtctttataacgaggcgatggagacaggggatgaacaacgttttacattattaaatcagcttttaggttcttcagctgatgggaaagctcaaattaatcctgattttcgttgtgattacggctacaatattcatgttggaaagagctttttcgcaaatttcaattgtgtgattttggatgtttgtgaagtgcgaatcggtgatcattgtatgtttgcacctggggttcacatttacactgctacgcatcctttacacccgatagagcggaattctggcaaagaatatgggaagcctgtaaagattggtaacaatgtttgggtcggcgggggcgctattattaaccctggtgtttcaattggagacaacgctgtaattgcttcaggagcagttgtgacaaaagatgtacctaataatgtagttgttggtggtaacccagccaaggttattaaaacgatagacttatag

SEQ ID NO: 15598 - protein, 187 aa, Bacillus cereus ATCC 10987
MKTEKEKMLAGEMYIADDEELVADRVEAKRLTRLYNEAMETGDEQRFTLLNQLLGSSADGKAQINPDFRCDYGYNIHVGKSFFANFNCVILDVCEVRIGDHCMFAPGVHIYTATHPLHPIERNSGKEYGKPVKIGNNVWVGGGAIINPGVSIGDNAVIASGAVVTKDVPNNVVVGGNPAKVIKTIDL

SEQ ID NO: 15599 - DNA, 2154 bp, Neurospora crassa
  CDS (1)..(2154)
atgacgactttcacagctctaaatgggtcatcgcccaggccaactgagatctccaatggtgctcgggagcttgaacgcggaaacggacagtctgctggtccagacccaagatccgctagtgatgttgcagtcagccagagagaacgggaccgggaaaactggggcacttcaacccgtgaaaggcatccgtatcctgtgactaattaccacgatgctgaacctgccccaaaacggatgcggacagattccgattctcactctcccaggcgggagcacaggccttcacccatttccactgagcggcccgacaagttcgaaagaacagagagaactcccattgaacggaccgaaaggttggaaagaacggaaagaatggagagagtggagaggcctgaagtaacagagaaggcggagcaatatgaacccccacggcctccgtccaacccccatgaccgctatccgtctccccaaaaggaaggatatcgtggttacgaaaatcgtgagagcgatgaccgatggcgctctcagcaggccagaagtgagaggaacgcaagctacgatgcagcttactcggccgggccagtatccggccagtccgaggagccgatgggcgaacatatgcgcagagcgaccagtcaagcagacagcggcgactacgaaaatcagagccccgatggtgacgaaaaccgctactcggatcagtacacgcctgagcagcgcagagatggcaccgttcagtccgaccccaagaagcggaaacgcaatttcagtaatcggacgaaaaccggttgcctgacgtgcaggaggcgcaaaaagaagtgtgatgagacaaagcctcagtgtaccaactgcatcaagggttcattccaatgtgctggttacccaccacagaggggtaactggcagaagcctgagagcaagccaacccaagtcaacatcgagtccaaggatcccaactatgtccctcttggagcatatgggatgccgcagcaaccgatccctccttacaccagcaacactgctccgatattgagccaaccaaagcagcgcgagcctttcccgatggcgcgtgggcagcaacccactctccgcatcacaccgcctcaaggacggcctcttcaaagcgacgacgaccggctcacggcatcaactcttcctagtgcatcggttattagcccagacaacaaactgtccgccctctcagcttatccttcaaacgtcttccccacgcccatcagtgcccggacgccccttagagagtatgcaagagtgcccccgctccacgatttgacgaggacagaccctgaccaccaaccaccgccgccaccaccgcctcctcaaagcgccatttccgcacatcctccatacaaccttcatggtagccgaacggacacgccaacatcagcggtccagcctctaatcacatctcagccaccttcaagtgccgtacaggcgactgcgcagctagcactatcccatgcgcagtcgcatactccgtccagcgctaccgtgccccccgtacgaagggagaaagacgagatgatcagtggacgagccttttatcccttcgacaaggagcttgtgctagaacgcgagagatgcaatgcagcttgttggagattcaacaactcgaccaatcctaacattggcgtatcacctgctgaacgcgcccgacttttcaaagagatcttgcacccacgcgaaggtgttcagttgacgcccaaccagctatcccccataggccgtattggtcatgttggtgataacgtttcggtcgaggccccgttcaactgtgactatgggtacaacatctccattggcaataacgtgtctatcggccggaactgcctgattaccgactcttgcgaggtacgcattgggcacaatgtgattatcagcccgaatgtcaacatctacacaaacagctgctacacagactggaggcgccgtgatgggcacaggggtgcgcagtttggcaagccagtcatcattgacgacgatgtctggattgcggcaaacgtggtcatcttgcccggtgtaaagatcggaagggggtcaacggttggggctgggtcaattgtttcaagggacgttgctccctacagcatctacattggacggaaagcaaacatgcaccgcggcattccaacttga

SEQ ID NO: 15600 - protein, 717 aa, Neurospora crassa
MTTFTALNGSSPRPTEISNGARELERGNGQSAGPDPRSASDVAVSQRERDRENWGTSTRERHPYPVTNYHDAEPAPKRMRTDSDSHSPRREHRPSPISTERPDKFERTERTPIERTERLERTERMERVERPEVTEKAEQYEPPRPPSNPHDRYPSPQKEGYRGYENRESDDRWRSQQARSERNASYDAAYSAGPVSGQSEEPMGEHMRRATSQADSGDYENQSPDGDENRYSDQYTPEQRRDGTVQSDPKKRKRNFSNRTKTGCLTCRRRKKKCDETKPQCTNCIKGSFQCAGYPPQRGNWQKPESKPTQVNIESKDPNYVPLGAYGMPQQPIPPYTSNTAPILSQPKQREPFPMARGQQPTLRITPPQGRPLQSDDDRLTASTLPSASVISPDNKLSALSAYPSNVFPTPISARTPLREYARVPPLHDLTRTDPDHQPPPPPPPPQSAISAHPPYNLHGSRTDTPTSAVQPLITSQPPSSAVQATAQLALSHAQSHTPSSATVPPVRREKDEMISGRAFYPFDKELVLERERCNAACWRFNNSTNPNIGVSPAERARLFKEILHPREGVQLTPNQLSPIGRIGHVGDNVSVEAPFNCDYGYNISIGNNVSIGRNCLITDSCEVRIGHNVIISPNVNIYTNSCYTDWRRRDGHRGAQFGKPVIIDDDVWIAANVVILPGVKIGRGSTVGAGSIVSRDVAPYSIYIGRKANMHRGIPT

SEQ ID NO: 15601 - DNA, 660 bp, Magnaporthe grisea 70-15
  CDS (1)..(660)
atggcttcaaaaaccgaaaaagaccaggaacaaatcgccatagccaaggggttggaaaacatcccctggtgcgatgactacgaaaagatgatctctggtgtcttgtacgacgctttcgtaccagagctggtgcagggtcgctttagggcccgacaatttatgcacaaatacaaccactacttccccgaagacgccactcccgaatcgctgcaaaaaggccgtgaggagcttctacggggcatcatgggcaaggtcggcaaggacgccttcatcgagcccccggtcaacattgactatggctgcaacataatcatcggcgacaccttttactcgaacttcaacctcgtaattctagactgcggcatcgtcaacattggcaaccgagtcatgttcggacccttcgtctccatcttcaccgccacccacgagaccgaggtacagtcgcgccgggatgggattgagtatgccctccctgtcacgattggggacgactgctggatcggcgggaacgtcaccatcttgcccggtgtgacaatcggcaagggcaccaccatcggctctggaagcgtcgtgaccaagtcaatccctgagttctctgttgccgtaggatcgcctgcaaaggttatcaagaaggttcagcctgtgcctgacctcccatag

SEQ ID NO: 15602 - protein, 219 aa, Magnaporthe grisea 70-15
MASKTEKDQEQIAIAKGLENIPWCDDYEKMISGVLYDAFVPELVQGRFRARQFMHKYNHYFPEDATPESLQKGREELLRGIMGKVGKDAFIEPPVNIDYGCNIIIGDTFYSNFNLVILDCGIVNIGNRVMFGPFVSIFTATHETEVQSRRDGIEYALPVTIGDDCWIGGNVTILPGVTIGKGTTIGSGSVVTKSIPEFSVAVGSPAKVIKKVQPVPDLP

SEQ ID NO: 15603 - DNA, 699 bp, Gibberella zeae PH-1
  CDS (1)..(699)
atggccaagcaacaaaaagacaccgagatcatcgagatcgcaaagaccctcaaagacacaccctggtgcgaagagtatgagaaaatgatatctggcatgctttacaaccctcttcaccccaaactgctggaaggtcgtcacagagctcgcagtctagcctacaagttcaacaatcttgatcccaacaccggatcatacctagaagttgaaaagaagaggaccgagatgcttagcgagatgctcggaaaggttgggagcggcaccttcattgaggcaccattcatgccagactatggaagcaatgtctctatcggagagaactgcttcatgaactttggcttgacaattctagataccagcctcgtcatcattggtgatcgcgtacaaatgggccccaacgtaaacatttatacagcaggccatgagacaagtgttctctcaaggatcaagtttgttgagttcggacatcccatccgcatcgaagacgactgctggattggaggaaacgtcgtcattctgcctggtgtgacgattggaaagggttgcacagttggtgcaggtgcagtggtcacaaagagtatacctccttactcaatcgccctgggtgctcctgcaaaggttgtcaagaagatacagagtgtcgaagacgagatggcagatcccaacaaccctttccgaaatatgcccgatcgggagtga

SEQ ID NO: 15604 - protein, 232 aa, Gibberella zeae PH-1
MAKQQKDTEIIEIAKTLKDTPWCEEYEKMISGMLYNPLHPKLLEGRHRARSLAYKFNNLDPNTGSYLEVEKKRTEMLSEMLGKVGSGTFIEAPFMPDYGSNVSIGENCFMNFGLTILDTSLVIIGDRVQMGPNVNIYTAGHETSVLSRIKFVEFGHPIRIEDDCWIGGNVVILPGVTIGKGCTVGAGAVVTKSIPPYSIALGAPAKVVKKIQSVEDEMADPNNPFRNMPDRE

SEQ ID NO: 15605 - DNA, 699 bp, Gibberella zeae PH-1
  CDS (1)..(699)
atggcggcccaagagaagaacttggtcgagttagagaaggcttcgaagctggccaatgttccccactgtgaacaatacgagaggatgatctcgggcatgctttacgactcactcatcccaaaacttaccaacgctcgtcttgctgctcgaaaagctatgaatgagtacaacacatggttccccacaggcgacgacttcaacattgagaccatcacgaaaagacgagccgagatgctcaagtcgtttctcggtcatgtagcggacgacgaagtttttatcgagcctccattcagagtcgactacggacccaacatgtctgtcggcaagagattttacgccaactttaatctgacagtcttggactctgctatcctaacaatcggcgacagagtcatgattggacctaatgttatgatttcaaccgcaactcacgagaccgaggttagcagtcgaagagccaatatcgaatatgcttatccgattacgattggcgatgattgctggattggaggcggtgttaccatcttgccaggtgtcacaattggaaatggatgtactattggggcaggttctattgttactagggatgttcctgcgtggagtgttgctgtcggatcacctgcgagggttgttagaaaagttcaagaactgggcgactttgaggaagatgtcaagcaaaacgggaccactagcgcatag

SEQ ID NO: 15606 - protein, 232 aa, Gibberella zeae PH-1
MAAQEKNLVELEKASKLANVPHCEQYERMISGMLYDSLIPKLTNARLAARKAMNEYNTWFPTGDDFNIETITKRRAEMLKSFLGHVADDEVFIEPPFRVDYGPNMSVGKRFYANFNLTVLDSAILTIGDRVMIGPNVMISTATHETEVSSRRANIEYAYPITIGDDCWIGGGVTILPGVTIGNGCTIGAGSIVTRDVPAWSVAVGSPARVVRKVQELGDFEEDVKQNGTTSA

SEQ ID NO: 15607 - DNA, 690 bp, Ustilago maydis 521
  CDS (1)..(690)
atgtcaggcacgtccaagctgttccaagacattgaccgtcaatacggtgataaggtggccacgatgagcgaggaagccaagatgctcgtcggactaccctatctcgccaacacagagaatctcatccgtgcgcgtgtcagagcacgtcgtcttcagaccgagtacaacaagacgcaacccacctcggcgctggacgatcagaccaaccacttcaagcacggccagacggttatgtcggaagaccgaaagcgtctgctctcggaactgcttcaagtaccgctctcgcaggtggccaatgtggaaatcgaaccgcctctgtgggtcgactatggcaccaacatcaagccggaaggcgcattctacgcaaactacaacaccacaatcttggactgttccgaggtgaggctgggcgacggtgtgctgttcggacccaatgtcagtatttactgtggaacccactcagtatcggtcaaggaaaggaaggagggcttggaaagaagtttgcccgtcagcattggtaaggacacctgggtaggcggtggcactatcatcatggctggtgtgaccatcggcaggggctgcacaattggcgccggaagcgtagttaccaaaaacatcccggattggagcgtcgccgcgggtacgccatgcaaagttatgaggacactcacccaagacgagcgagcatga

SEQ ID NO: 15608 - protein, 229 aa, Ustilago maydis 521
MSGTSKLFQDIDRQYGDKVATMSEEAKMLVGLPYLANTENLIRARVRARRLQTEYNKTQPTSALDDQTNHFKHGQTVMSEDRKRLLSELLQVPLSQVANVEIEPPLWVDYGTNIKPEGAFYANYNTTILDCSEVRLGDGVLFGPNVSIYCGTHSVSVKERKEGLERSLPVSIGKDTWVGGGTIIMAGVTIGRGCTIGAGSVVTKNIPDWSVAAGTPCKVMRTLTQDERA

SEQ ID NO: 15609 - DNA, 702 bp, Aspergillus nidulans FGSC A4
  CDS (1)..(702)
atggccgccccagcgaaaaggccggagattatcgagattgcacgcgggctggaccacatccccatgtgtgaggattacgaaaagatgatttcgggaatgatgtacaatcccctgcttcccactcttgccgcagcacggcaccgctgccggggcgtggcaagtgattacaacaatctcgacacaaaggccgtctcctgggaggagattggggaacgccggttcgagttgttaaagaatgttgttgggcgggttggagaaggcacctttgtcgagcctccattttggccagactatgggtgcaatattgtaattgggaaggaatgctttgtgaatttcaactttacggccctggacacgagcctaatcgtcattggcgaccgcgtgcagcttggtcctaacgtatccatttacacggcaggccacgacacatccatcctatcccgacgcaagttcgtcgagtttggtcaccccgtgtttattggagatgattgctggattgggggaaatgtgattattctgcctggcgtgaggattggagaagggtgcacaattggggcggggagtgtggttacgaaggatatcccgccgttttcggttgcagtgggtagcccttgtaaggccataaagaccattcaaagtgcggaggaggagttgaacgatcccaagaatccgtatagggatttgccagagaagtcggggtag

SEQ ID NO: 15610 - protein, 233 aa, Aspergillus nidulans FGSC A4
MAAPAKRPEIIEIARGLDHIPMCEDYEKMISGMMYNPLLPTLAAARHRCRGVASDYNNLDTKAVSWEEIGERRFELLKNVVGRVGEGTFVEPPFWPDYGCNIVIGKECFVNFNFTALDTSLIVIGDRVQLGPNVSIYTAGHDTSILSRRKFVEFGHPVFIGDDCWIGGNVIILPGVRIGEGCTIGAGSVVTKDIPPFSVAVGSPCKAIKTIQSAEEELNDPKNPYRDLPEKSG

SEQ ID NO: 15611 - DNA, 618 bp, Aspergillus nidulans FGSC A4
  CDS (1)..(618)
atggccgcctctaaagaatggcagaagatgctcaagggcgagctatactgggcatgggacgccgacctgcaggctaatcgggatcgctgtagggaggcgtgcaagaggtttaatgaagccggccctgtctcccgacgacgtcgagcagcgctctggagagatataatcggcgacactcgcccacttccacctgtcaaacaggacccagcagcagacgagaagcaattcgacgagacagaccccattgttgatcctccattctccgtagaccacgggctcaatctcaaagtcggaaagggcaccttcatcaatttcgatacgacaattctcgatacatgcctcgttacaattggagagcgcgtactttttggcccgcatgttcgcatatacggggccacgcacccgatcgatccggctgtgcgtcggggcctagaggggcctgaggctggaaaagaggtgcatatcgaggatgatgtgtggattggaggcagtgtgattgtacttgccggggatgtcccacccttccatttcgttgccggaaacccggcgagggttatccgcaagattgagacgagtatggatccagtacaagctacggagggttctgagacggtttag

SEQ ID NO: 15612 - protein, 205 aa, Aspergillus nidulans FGSC A4
MAASKEWQKMLKGELYWAWDADLQANRDRCREACKRFNEAGPVSRRRRAALWRDIIGDTRPLPPVKQDPAADEKQFDETDPIVDPPFSVDHGLNLKVGKGTFINFDTTILDTCLVTIGERVLFGPHVRIYGATHPIDPAVRRGLEGPEAGKEVHIEDDVWIGGSVIVLAGDVPPFHFVAGNPARVIRKIETSMDPVQATEGSETV

SEQ ID NO: 15613 - DNA, 573 bp, Candida glabrata CBS138
  CDS (1)..(573)
atgaacactcaggactttattaaccaacttaacactggagaaccagtcttcgcaggcactgaaacttacaagttcatgcatggtgtgagccaggatgctttgaagattaccatggagatgaataacaagtaccacaccccggaagaactacttgagttgttttcgcaattgataggtaaacaagtggatcctactttttgtcttttccctccattctatactgactgtggtaaaaacattactgttggaaagagggttttcatcaactctggctgtagattccaggaccaaggtggtgtaaccattggtgatgattgcttaattggtcacaatgctgtgctggcaactttaaatcatggaatgagtcccgctgaccgtaagaacctttatccagctccaattagaataggtaataatgtgtggctcggtgccaacgtaactgtgctgcccggtgtcacaattggtgataatgcagttgttgcagcaggcgctgtggttactaaagatgtacctgaaaacatgattgttgctggtgtacctgcaaaaatactaaaatcgattcatgacaattaa

SEQ ID NO: 15614 - protein, 190 aa, Candida glabrata CBS138
MNTQDFINQLNTGEPVFAGTETYKFMHGVSQDALKITMEMNNKYHTPEELLELFSQLIGKQVDPTFCLFPPFYTDCGKNITVGKRVFINSGCRFQDQGGVTIGDDCLIGHNAVLATLNHGMSPADRKNLYPAPIRIGNNVWLGANVTVLPGVTIGDNAVVAAGAVVTKDVPENMIVAGVPAKILKSIHDN

SEQ ID NO: 15615 - DNA, 570 bp, Kluyveromyces lactis NRRL Y-1140
  CDS (1)..(570)
atgacaaggagcgaaaaagagaagatgcttataggtgagccatacttatgtatggatcctgaactcgtagaagaaagactcaaagcacgtcaattggtttacgatttcaaccagtccaaaccagaagatgaagagcttagaaaacggattctagatcagttattgggaaagcactacaacgcctttattgaaccaaactttcgttgtgattatggatctaacatcactgtcggaaagaacttctacgccaatttcgattgcattatgttagacgtttgtaaaattgaaattggtgatgatgttctgctgggacctggtgtacatatatacacagcgtcacatgctctggatcctattgaacgctcgaaaggcgtggagtttggtatcccagttaaaattggaaatagagtctggattggtggaaacgtgacaatcttgcctggtgttacaattggtgacaatgctgttattggatctggaagtgtgatcactaaagacgttgatgctaatgtcgttgtggcaggtaaccctgcaaaatttatcaaacacatcgaattgaacaagaaataa

SEQ ID NO: 15616 - protein, 189 aa, Kluyveromyces lactis NRRL Y-1140
MTRSEKEKMLIGEPYLCMDPELVEERLKARQLVYDFNQSKPEDEELRKRILDQLLGKHYNAFIEPNFRCDYGSNITVGKNFYANFDCIMLDVCKIEIGDDVLLGPGVHIYTASHALDPIERSKGVEFGIPVKIGNRVWIGGNVTILPGVTIGDNAVIGSGSVITKDVDANVVVAGNPAKFIKHIELNKK

SEQ ID NO: 15617 - DNA, 693 bp, Debaryomyces hansenii CBS767
  CDS (1)..(693)
atgactaaagataccttgtttaagaaagcagcaatatctgctgaaattatgaaaaagtcactcgaaggcaacaaagaatacgaaaaaatgctagcaggagagacgtacaattccttcgacaaagatttgatattggcccgtacgatcacaagtgaaattgcaagtgaatatgctgatattaagttgaccgatcatgattatgacattgcgaaacatcaaaaatcaagggccgattatttgtccaagtatttgttctttaaaaatgtgcctgacatttacattgaaccgccattttttgttgattttggctgcaatataaactttggtgtcaatttttatgccaacttcaacgcaacgttccttgattgtgcaccaataacatttggtgacaatgttcttttgggaactaacgtaacgttcactactgctggtcatgcgaccgatcctaaagagagaatggatggggttgaatttgcctatcccattaatatcggtagtaatgtgtggttcggtgcaaattcgattgtattgccaggtgttactattggggacggtgtggtggttggtgctggcagtgtggtaactaaagacattactagtaactgtgtcgtcgttgggtcacctgcgagagtgattaaacacttgaagctgagagaagaaagagaaattgtaattaaagaggtcgatacttag

SEQ ID NO: 15618 - protein, 230 aa, Debaryomyces hansenii CBS767
MTKDTLFKKAAISAEIMKKSLEGNKEYEKMLAGETYNSFDKDLILARTITSEIASEYADIKLTDHDYDIAKHQKSRADYLSKYLFFKNVPDIYIEPPFFVDFGCNINFGVNFYANFNATFLDCAPITFGDNVLLGTNVTFTTAGHATDPKERMDGVEFAYPINIGSNVWFGANSIVLPGVTIGDGVVVGAGSVVTKDITSNCVVVGSPARVIKHLKLREEREIVIKEVDT

SEQ ID NO: 15619 - DNA, 690 bp, Debaryomyces hansenii CBS767
  CDS (1)..(690)
atgagcgaggaatctataaagcaagaagttgtagactatgcatataaaaacttgagaggtattccaaaagggaataaagagtacgagaaaatgattctgcagctttcctacaattgctttgaccatgaattattaatgtcaagaaatttagcacacgaaagagctattgattatgctgacattagaatgaaggactatgactttgatccagaaaaacactataaagcaagagaagagtacttaagaactatatttggtaagcttggagataagagttttattgaagctccattttttgtcgattacggattcaatgtaagtgccggaaagaatttttattgtaatttcaattgtacttttcttgattgctgtttgattgtgtttggggacaattgcatgtgtggccccaatgttacgttctgcacacccacccatgcaatagatcctgaaagaagattagcaggtgaggaatcagctggtccaataactgttggtgacaatgtgtggttcggcgcaaatgccgttgttttgcaagatatcacaattggggataacagtattattggggcaggtgcagtggttaccaaagatgttcctgccaacacagttgttgtcggatctccagctagagttgtaaagcatcttactctggaacaagacaaaatagagtcagccaatcatttgacttga

SEQ ID NO: 15620 - protein, 229 aa, Debaryomyces hansenii CBS767
MSEESIKQEVVDYAYKNLRGIPKGNKEYEKMILQLSYNCFDHELLMSRNLAHERAIDYADIRMKDYDFDPEKHYKAREEYLRTIFGKLGDKSFIEAPFFVDYGFNVSAGKNFYCNFNCTFLDCCLIVFGDNCMCGPNVTFCTPTHAIDPERRLAGEESAGPITVGDNVWFGANAVVLQDITIGDNSIIGAGAVVTKDVPANTVVVGSPARVVKHLTLEQDKIESANHLT

SEQ ID NO: 15621 - DNA, 666 bp, Yarrowia lipolytica CLIB99
  CDS (1)..(666)
atgcctctgtcgcggaaattcgagctcgatgcagagcagattgcgctctccaagaaactcaacaatgtgctgcacggcgacgagtacgacaagatgatctcaaccatgggataccaggactcgggacccgaactgatccagggacgccacaggatccgaatggcccaaaagaagtacaacgactacttcccggagggcgctacgcccgatgagctggctgaggcgcgaacagccatgctggaaaagatgctgggtcgagtcggaaagggagcctacatcgagcccccggtgtttttcgactacggatacaacatgtctgtgggcgagcggttctactccaactacaactgcacgtttctggactgcgctctcatcaccattggcgaccgtgtgctgctgggacccaacgtcaatctcatcaccgccacccacgacgtggacgtgcagtcaagacgagatcatgtggagtacgcggcgcctattaccgttggagacgactgttggctcggatcgggggtccaggtcatgcccggcgtcaacattggcaagggatgcaccattggagccaactcggtggtcaccaaggacattcctccgtactccgtggcggtcggagctccggcccgagtgatcaagaccctggaggatcctgacgcggaaaagtga

SEQ ID NO: 15622 - protein, 221 aa, Yarrowia lipolytica CLIB99
MPLSRKFELDAEQIALSKKLNNVLHGDEYDKMISTMGYQDSGPELIQGRHRIRMAQKKYNDYFPEGATPDELAEARTAMLEKMLGRVGKGAYIEPPVFFDYGYNMSVGERFYSNYNCTFLDCALITIGDRVLLGPNVNLITATHDVDVQSRRDHVEYAAPITVGDDCWLGSGVQVMPGVNIGKGCTIGANSVVTKDIPPYSVAVGAPARVIKTLEDPDAEK

SEQ ID NO: 15623 - DNA, 840 bp, Yarrowia lipolytica CLIB99
  CDS (1)..(840)
atgaatcaatgtgtatattttcttttgtcgtctgcgtatgtacagtgtacacccattcggtgtatgatctgcgcaacttctccgtattatgcatcatcaattcagagttcacgcatcccggtatctcgtgatttcatacaaccacgagtacagtaccggtatttgtacttgtgcaacatgcccagtggacggaaatttgagctcaacgaggcagaaatagcaaaatcgaagaagctgaatcatgtgccccacaatgagcattacgacaagatgatttcggccatgggataccatgagtacgagccgcagctagtccaggctagacacaacatccacgtgacacaaaagaaatacaacgactactttccagaggatattactcctgagcaattgcgcaatgacagagctgtcatgttggagaatatggtcggtcatgtcggcaaaaaccctcatattgaagcacccgtctactttgactatggttgcaacttttcatgtggccaagacttcgttgctagctacaactgtgtgtttctagactgcgctctcatcactatcggcgaccgtgtcgtgatgggacccggtgtgaaactcattacagcaacccacgacgtggaagtacaaactagaagggacgggatagagtatgcttctcccatcactatcggagacgactgttggctgggatcagcggttcaggtcatgccaggagtcactataggtaagggttgcactatatcagcagggtctgtggtcacgagagacattccccccttctctgtagcggtgggagctccagcaaaggtcaccaggactctgaagaatcctgattccagctga

SEQ ID NO: 15624 - protein, 279 aa, Yarrowia lipolytica CLIB99
MNQCVYFLLSSAYVQCTPIRCMICATSPYYASSIQSSRIPVSRDFIQPRVQYRYLYLCNMPSGRKFELNEAEIAKSKKLNHVPHNEHYDKMISAMGYHEYEPQLVQARHNIHVTQKKYNDYFPEDITPEQLRNDRAVMLENMVGHVGKNPHIEAPVYFDYGCNFSCGQDFVASYNCVFLDCALITIGDRVVMGPGVKLITATHDVEVQTRRDGIEYASPITIGDDCWLGSAVQVMPGVTIGKGCTISAGSVVTRDIPPFSVAVGAPAKVTRTLKNPDSS

SEQ ID NO: 15625 - DNA, 642 bp, Cryptococcus neoformans var. neoformans JEC21
  CDS (1)..(642)
atgccccctgctcctgctcctcaccttaccaacaagcttattccacctcccgaggaaggtgaagaccctacccagttgtctttgatgatctccgccaaaccctacctcgcccttgacaaataccttgaccgtcttcgcaatcgtggtgctatcaaactagatgaaattacgagaacacctgatcatgagaagcgcatggagctttggaaggagtttgccaacataggcgaaaatgtatcaatcactcaacgatttttctgcgaatatggcttcaatttgcattttgaaggcgagaacttcatcgcagctgattgtacattcgttgatgtctgcccaatttacatcggcaagagaacgatgattggtccgaacgtcagaatatacactcccgaccaccctatttctcccgaagctcgagccggtttgactggtgaggagtggggcaagattgtaaggattgaagaggactgttggatatgcggttctgctatcatcttgcctggcgttaccgtcggtaagggaagcactgttgccgctggagcagtagtcacgaaagacatccctcccaggagtctggccatgggtaatcctgctcgtgtcgtcaagaaaattctggaggacggtaccattgtcaaggcttaa

SEQ ID NO: 15626 - protein, 213 aa, Cryptococcus neoformans var. neoformans JEC21
MPPAPAPHLTNKLIPPPEEGEDPTQLSLMISAKPYLALDKYLDRLRNRGAIKLDEITRTPDHEKRMELWKEFANIGENVSITQRFFCEYGFNLHFEGENFIAADCTFVDVCPIYIGKRTMIGPNVRIYTPDHPISPEARAGLTGEEWGKIVRIEEDCWICGSAIILPGVTVGKGSTVAAGAVVTKDIPPRSLAMGNPARVVKKILEDGTIVKA

SEQ ID NO: 15627 - DNA, 546 bp, Dictyostelium discoideum
  CDS (1)..(546)
atggaaaaagagaaatttgaatactcaagagagggtgaaaagagtagtttaacaattgatacaggtaaattagttcaggaatttaattctttgccatatgaagatattcaaggtaaaaagaaaattatagaaaagttatttggttcagttggtgacgatgtatcaatagaacacaattttcattgtgatttaggattcaatattcatgttggtaatagattctatgcaggttataattttacagtattggatgtagcagaggttagaattggtgataattgtttaattgcaccaaatgttggcatttatacagcaggccactatatatcaccaccagaggaaaggcataaaacaggttatggtatacctataacaattggtaacaatgtttggataggtggtcattctgtaatattaccaggtgtaaccattggcgataactctatcattgccgctggttctgtcgttaataaagatgttccaaaaaatacaatcgttgctgggaatccagctagaaaaataaaagatataacttcaaaactttaa

SEQ ID NO: 15628 - protein, 181 aa, Dictyostelium discoideum
MEKEKFEYSREGEKSSLTIDTGKLVQEFNSLPYEDIQGKKKIIEKLFGSVGDDVSIEHNFHCDLGFNIHVGNRFYAGYNFTVLDVAEVRIGDNCLIAPNVGIYTAGHYISPPEERHKTGYGIPITIGNNVWIGGHSVILPGVTIGDNSIIAAGSVVNKDVPKNTIVAGNPARKIKDITSKL

SEQ ID NO: 15629 - DNA, 576 bp, Dictyostelium discoideum
  CDS (1)..(576)
atggatagcattaatatgacagaaaaagaaaaaatgactaaagggttaatgtatgactcatttgatgaagaattatgtaaagatagaacagaagccagagaacttattcatagatttaataatagtatggataaattggaaagaaaagatatcaccaaacaattatttggatcaactggcgaaaagatttatattgagccaacattaagagtggattatggttacaatattcatgttggtgagaatttctttgcaaactttggtacgatatttttagatacttgtccaatcacaattggaaagaatgcaatgttagctccaaacgttcaattttattccgcaactcacccaattgatccaactgaacgtaactctggtttagaattaggtaggcctattacaattggagataatgtttggattggtgggggtgtaataattttgccaggtgttgaattaggagataatgttgttgttggtgctggtgctgtggtgactaaatcatttggaagtaatgttgttattgctggaaatcctgccaaaattattaaacaaatacctgttaaatctgaataa

SEQ ID NO: 15630 - protein, 191 aa, Dictyostelium discoideum
MDSINMTEKEKMTKGLMYDSFDEELCKDRTEARELIHRFNNSMDKLERKDITKQLFGSTGEKIYIEPTLRVDYGYNIHVGENFFANFGTIFLDTCPITIGKNAMLAPNVQFYSATHPIDPTERNSGLELGRPITIGDNVWIGGGVIILPGVELGDNVVVGAGAVVTKSFGSNVVIAGNPAKIIKQIPVKSE

SEQ ID NO: 15631 - DNA, 591 bp, Dictyostelium discoideum
  CDS (1)..(591)
atggaaccggtattaacagaaagagagaaaatggtgacaggattaagatatagatttgaagatccagaattagatcaattaagactacgtgcaagaagattaaataaacaatttaataatttaattggtagtgatgaagatgatggtaaaaaaggaccagaaattattaaacagttatttggttcaacaggtgaaattgtgattgttcgtgaaggtattaaagttagttatggagttaatattcatgttggagataagttctttattaatcataattgcatattaaatgatgatggtccaattagaattggatatggcgcaatgattggtccaaactctcaattatatacagctacacacccattcgaaccatctgaaagaattggcggatcagatgaaaattttacaaaaggaattacaattggtgataatttttggggtggtggtaatgttataattttacctggtgtcactttaggaaataacgttattgttggtgctggttctgttgtcaccaaatcattccctgataattctattattgctggtaatcctgcaaaattaattcgtatgaatattccaacaaaataa

SEQ ID NO: 15632 - protein, 196 aa, Dictyostelium discoideum
MEPVLTEREKMVTGLRYRFEDPELDQLRLRARRLNKQFNNLIGSDEDDGKKGPEIIKQLFGSTGEIVIVREGIKVSYGVNIHVGDKFFINHNCILNDDGPIRIGYGAMIGPNSQLYTATHPFEPSERIGGSDENFTKGITIGDNFWGGGNVIILPGVTLGNNVIVGAGSVVTKSFPDNSIIAGNPAKLIRMNIPTK

SEQ ID NO: 15633 - DNA, 573 bp, Dictyostelium discoideum
  CDS (1)..(573)
atggataccaaaatgacagaaagagaaaaaatgaccaaaggattaatgtatgacccaggtgatgaagaattatgtaaaggtagaaccgaagccagacaacttattcatagatttaataatagcatggataagttggaaagaaaagatatcaccaaacaattatttggatcaactggcgaaaagatttatcttgaaccaacattaagagtggattatggctacaatattcacgttggtgagaatttctatgcaaattttggtgccatatttttagatatttgcccaattacaattggaaagaatgcaatgttagctccaaatgttcaattatattctgcaactcacccaattgatccaactgaacgtaactctggtttagaatttggtaagcctattacaattggagataatgcttggattggtggtggagcaataattttacctggtgtcacattaggtgataatgttgttgttggttctggagctgtagtaactagatcatttggaagtaatgttgttattgctggaaatccagccaaagttattaaagaaatacctgttaaatccgaataa

SEQ ID NO: 15634 - protein, 190 aa, Dictyostelium discoideum
MDTKMTEREKMTKGLMYDPGDEELCKGRTEARQLIHRFNNSMDKLERKDITKQLFGSTGEKIYLEPTLRVDYGYNIHVGENFYANFGAIFLDICPITIGKNAMLAPNVQLYSATHPIDPTERNSGLEFGKPITIGDNAWIGGGAIILPGVTLGDNVVVGSGAVVTRSFGSNVVIAGNPAKVIKEIPVKSE

SEQ ID NO: 15635 - DNA, 459 bp, Entamoeba histolytica HM-1:IMSS
  CDS (1)..(459)
atgaacaccactgctgaacaagaaacaaagtatatgttagaaggtaaaattatgataccagcaacacctgatggagttgctgcatcaattgcattaggaaataagttatttgatttcaaccatgaacgagatttatccttcaaacaatacaatgtctttgctccattcaattgcacacgagggaatttcattgacattggagacaacacagtgattaacattaattgttatattcttgaaggtggaccagtgaaaataggaaataatgtgatgataggacctaatgttagtcttataggtggtacacactcaactgatccaaagatcagaaacgcatgtggtggaacagcatatggaaaaccaattaccatcaaggatggagcatggataggatgtggtgcaatcatcttaccaggtgtaacaattggagaaaatcggttgttgggtcaggaagtgtag

SEQ ID NO: 15636 - protein, 152 aa, Entamoeba histolytica HM-1:IMSS
MNTTAEQETKYMLEGKIMIPATPDGVAASIALGNKLFDFNHERDLSFKQYNVFAPFNCTRGNFIDIGDNTVININCYILEGGPVKIGNNVMIGPNVSLIGGTHSTDPKIRNACGGTAYGKPITIKDGAWIGCGAIILPGVTIGENRLLGQEV

SEQ ID NO: 15637 - DNA, 609 bp, Entamoeba histolytica HM-1:IMSS
  CDS (1)..(609)
atggcaacacctacatttgatgaaagaagtttaatgcttaatggaaagttatatgatagtacagtcccagagttagctcatgacagagagtcttgttgtgaaaaaattattgattttaattgtgaaagaaatgcacaaaagagattagaaatgttgaaggatattgttggaagtcttggagaaaatagttgtatacttccaccatttcgttgtgattatggtaaatacatttctgttggacatgatacatttgttaattataatttaacagtactagatgctaattacgttaaaattggtaatcatgtcttgattggtcctaatgtccaactcattgcagctactcatccaactgatccacttattagaaattctcttgttgaatatggattacctattgtaattaaagatggtgcttggattggtgcaggtgcaactattcttccaggaattacaattggagaaaattcagttgtaggtgctgcttctgtagttactcatgatgttccagataatacagttgttgctggcaatcctgcaagaattatcagaaaagtttcagaacatccaggatggacaagagaacaacgagatgttccactgaactaa

SEQ ID NO: 15638 - protein, 202 aa, Entamoeba histolytica HM-1:IMSS
MATPTFDERSLMLNGKLYDSTVPELAHDRESCCEKIIDFNCERNAQKRLEMLKDIVGSLGENSCILPPFRCDYGKYISVGHDTFVNYNLTVLDANYVKIGNHVLIGPNVQLIAATHPTDPLIRNSLVEYGLPIVIKDGAWIGAGATILPGITIGENSVVGAASVVTHDVPDNTVVAGNPARIIRKVSEHPGWTREQRDVPLN

SEQ ID NO: 15639 - DNA, 609 bp, Entamoeba histolytica HM-1:IMSS
  CDS (1)..(609)
atggcaacacctacatttgatgaaagaagtttaatgcttaatggaaagttatatgatagtacagtcccagagttagctcatgacagagagtcttgttgtgaaaaaattattgattttaattgtgaaagaaatgcacaaaagagattagaaatgttgaaggatattgttggaagtcttggagaaaatagttgtatacttccaccatttcgttgtgattatggtaaatacatttctgttggacatgatacatttattaattataatttaacagtactagatgctaattacgttaaaattggtaatcatgtcttgattggtcctaatgtccaactcatttcagctactcatccaactgatccacttattagaaattctcttgttgaatatggattacctattgtaattaaagatggtgcttggattggtgcaggtgcaactattcttccaggaattacaattggagaaaattcagttgtaggtgctgcttctgtagttactcatgatgttccagataatacagttgttgctggcaatcctgcaagaattatcagaaaagtttcagaacatccaggatggacaagagaacaacgagacgttccactaaactaa

SEQ ID NO: 15640 - protein, 202 aa, Entamoeba histolytica HM-1:IMSS
MATPTFDERSLMLNGKLYDSTVPELAHDRESCCEKIIDFNCERNAQKRLEMLKDIVGSLGENSCILPPFRCDYGKYISVGHDTFINYNLTVLDANYVKIGNHVLIGPNVQLISATHPTDPLIRNSLVEYGLPIVIKDGAWIGAGATILPGITIGENSVVGAASVVTHDVPDNTVVAGNPARIIRKVSEHPGWTREQRDVPLN

SEQ ID NO: 15641 - DNA, 549 bp, Entamoeba histolytica HM-1:IMSS
  CDS (1)..(549)
atgaacaccactgctgaacaagaaacaaagtatatgttagaaggtaaaattatgataccagcaacacctgatggagttgctgcatcaattgcattaggaaataagttatttgatttcaaccatgaacgagattttactaagagaagagaaatctttcaaacaatagttggtcacttaggagaaaatagcaatgtctttgtgccattcaattgcacacgaggaaatttcattgacattggagacaacacagtcattaacattaattgttatattcttgaaggtggaccagtgaaaataggaaataatgtgatgataggacttaatgttagtcttataggtggtacacactcgactgatccaaagatcagaaacgcatgtggtggaacagcatatggaaaaccaattaccatcaaggatggagcatggataggattcacgcatgatgttccagacaatatgattgctgttggaaatcctgctaaagttaggagaagagtttcagaacatctaggatggacaatagagaatagggatgttccattagactaa

SEQ ID NO: 15642 - protein, 182 aa, Entamoeba histolytica HM-1:IMSS
MNTTAEQETKYMLEGKIMIPATPDGVAASIALGNKLFDFNHERDFTKRREIFQTIVGHLGENSNVFVPFNCTRGNFIDIGDNTVININCYILEGGPVKIGNNVMIGLNVSLIGGTHSTDPKIRNACGGTAYGKPITIKDGAWIGFTHDVPDNMIAVGNPAKVRRRVSEHLGWTIENRDVPLD

SEQ ID NO: 15643 - DNA, 612 bp, Entamoeba histolytica HM-1:IMSS
  CDS (1)..(612)
atgtcaattttcagagttgaatttgaagagaaatgttctgcagaaggtaaaatttgttgttttaaattacctgaattagctgaagaagcaaaaatattaaatgataagatgtttgattttaataatgaaagagatcttactaaaagacaagaaattatcaaaacgattgttaaaagtattggtgaaaatagtgttatttttccaccatttagatgttcaaaaggaaggtttataacaattggtaataatactgttattaatgttaattgttatattattgatggaattccaataactataggcaataatgttatgattgctgcaaatgttagtattcttggtggaactcactcaactgatccaataataagaaattatggtacagtttatagaaaacctgttactattgaagacggtgcatggattgggtgtggagcaaagatcttacctggagtaagaataggtaaaaatgctgtagttggagcaggtagtgttgttactcatgatattccagataatatggttgctgtaggaaatcctgcaagagtaaaaagaagagtttcagaacatccaggatggacaatagaaaatagagatgtacctttagactaa

SEQ ID NO: 15644 - protein, 203 aa, Entamoeba histolytica HM-1:IMSS
MSIFRVEFEEKCSAEGKICCFKLPELAEEAKILNDKMFDFNNERDLTKRQEIIKTIVKSIGENSVIFPPFRCSKGRFITIGNNTVINVNCYIIDGIPITIGNNVMIAANVSILGGTHSTDPIIRNYGTVYRKPVTIEDGAWIGCGAKILPGVRIGKNAVVGAGSVVTHDIPDNMVAVGNPARVKRRVSEHPGWTIENRDVPLD

SEQ ID NO: 15645 - DNA, 615 bp, Entamoeba histolytica HM-1:IMSS
  CDS (1)..(615)
atgaacaccactgctgaacaagaaacaaagtacatgttagaaggtaaaattatgataccagcaacacctgatggagttgctgcatcaattgcattaggaaataagttatttgatttcaaccatgaacgagattttattaagagaagagaaatccttcaaaggatagttggtcatttaggagaaaatagcaatgtctttgctccattcaattgcacacgagggaatttcattgatattggagacaacacagtaattaacattaattgttatattcttgaaggtggaccagtgaaaataggaaataatgtgatgataggacctaatgttagtcttataggtggtacacactcaactgatccaaatatcagaaacgcatgtggtggaacagcatatggaaaaccaattaccatcaaggatggagcatggataggatgtggtgcaatcatcttaccaggtgtaacaattggagaaaatgcggttgttgggtcaggaagtatagtcacgcatgatgttccagataatatgattgctgttggaaatcctgctaaagttaggagaagagtttcagaacatccaggatggacaatagagaatagggatgttccattagactaa

SEQ ID NO: 15646 - protein, 204 aa, Entamoeba histolytica HM-1:IMSS
MNTTAEQETKYMLEGKIMIPATPDGVAASIALGNKLFDFNHERDFIKRREILQRIVGHLGENSNVFAPFNCTRGNFIDIGDNTVININCYILEGGPVKIGNNVMIGPNVSLIGGTHSTDPNIRNACGGTAYGKPITIKDGAWIGCGAIILPGVTIGENAVVGSGSIVTHDVPDNMIAVGNPAKVRRRVSEHPGWTIENRDVPLD

SEQ ID NO: 15647 - DNA, 924 bp, Candida albicans SC5314
  CDS (1)..(924): transl_table=12
atgtgtagcttcaccccgccaccatcaccaccaccccgacgagaagaaaaatcatcagtatataaatccggacaaaatctgagtacccccaactcgtacaagatttttcacccaccacctccgacatactccatatacaaaactttaccaaacatgcccaccttcaaagacaaagaagatttcgtcaagcaaacgaatgtcagagcagaaaagaaccaagaactaatcaaatttgcccgtgacaaccttaaccatttaccattcaccgaaaaagacggaggtgcatgggaaaactatgaacgaatgatcagtggtatgctctacaactgtttacaaaaagaattggaaacaacacgtatgtcttgcagagactacatgttggactacggcagtttcagaactagagattataaaacaacccaagaatttcttgatgcaaaatacaaacatttagaaagtttcattggacatgttggcaaaaatgcatttatggaatatccaatctattttgattatgggtttaacacttatttgggtgataatttctattccaattacaatttgacaattttggatgtttccatagtcagaattggtaataatgtcaagtgtggtcccaatgtatctatccttaccccaacacacccagtggatcccactttgcgctatgatcaattggaaaatgccttgcctgtgacggtgggtaacggggtctggttatgtggaagctgtaccattcttggtggggtgacagtaggtgatggcagcattgtggctgctggtgcagttgtcaacaaggacgttccaccaaacactgtagttgcgggagttcctgctagggtagttaagcagctagaacctagagaccctaactttgacactatggcagttttgaaacaatatggtatgggttatatagattag

SEQ ID NO: 15648 - protein, 307 aa, Candida albicans SC5314
MCSFTPPPSPPPRREEKSSVYKSGQNSSTPNSYKIFHPPPPTYSIYKTLPNMPTFKDKEDFVKQTNVRAEKNQELIKFARDNLNHLPFTEKDGGAWENYERMISGMLYNCLQKELETTRMSCRDYMLDYGSFRTRDYKTTQEFLDAKYKHLESFIGHVGKNAFMEYPIYFDYGFNTYLGDNFYSNYNLTILDVSIVRIGNNVKCGPNVSILTPTHPVDPTLRYDQLENALPVTVGNGVWLCGSCTILGGVTVGDGSIVAAGAVVNKDVPPNTVVAGVPARVVKQLEPRDPNFDTMAVLKQYGMGYID

SEQ ID NO: 15649 - DNA, 888 bp, Thermus thermophilus HB27
  CDS (1)..(888): transl_table=11
atgccctggcttcttccccgcgagatcgcgcccctccaccaaaaggccctggaccgctatctgggtagcctcacggagaggctttccgaccccaatgtggaccggaacgccttggtgcgggaggagcttgcccgcctcctttacgggaggccctacgaggagcttctggaggcgaacccgctcgcggccatgggcctggacccggaggggatcacctttgaggccgagtactacgccgccaccgacctggagaagttccggcgggtcaagcccctcctctggttctggaaggtcctggacctcacgcctttgggccagtcggtgcactcgggggtggccataaggcgggccctcgccccattcatcttcaagcgggtggggaaaaaccccaagttcttccagaacgtggagttctccgtgggctacaacctggagcttggggacgacgtggtggtgcaccgctacgtcttcctggacgacatcggcggcatcaagatcggggaccgcacctccctctccgactacgtcaacgtctacagccacacccaccacgtcctggcctcccccgacgtcaccctgaaggagaccatcatcggaagcggggtccgcatcacctaccacgccaccgtcttggcgggggtgcgcatcggggacgacgccatggtgggcacgggggccgtcgtcaccaaggacatccccccccacgccatcgccctgggcatccccgcgaggcccgtgcgctacaaggtccgccacgactgcccctactgccgcaagggggagccccatccctcggaccttgttcccaagcttcccgaccgcaaggggaaccccgactaccccgacttcctgcccccgggcttcggaacaagggaggcgggctcttga

SEQ ID NO: 15650 - protein, 295 aa, Thermus thermophilus HB27
MPWLLPREIAPLHQKALDRYLGSLTERLSDPNVDRNALVREELARLLYGRPYEELLEANPLAAMGLDPEGITFEAEYYAATDLEKFRRVKPLLWFWKVLDLTPLGQSVHSGVAIRRALAPFIFKRVGKNPKFFQNVEFSVGYNLELGDDVVVHRYVFLDDIGGIKIGDRTSLSDYVNVYSHTHHVLASPDVTLKETIIGSGVRITYHATVLAGVRIGDDAMVGTGAVVTKDIPPHAIALGIPARPVRYKVRHDCPYCRKGEPHPSDLVPKLPDRKGNPDYPDFLPPGFGTREAGS

SEQ ID NO: 15651 - DNA, 594 bp, Desulfovibrio vulgaris subsp. vulgaris str. Hildenborough
  CDS (1)..(594): transl_table=11
atggctcgttgcgccgtctttctcgaagaactgtggttcgccctcttcgcgtgggtgcccaccgtgctcggcacggcggtgcgtctcgtggcgtggcgtccgctgttcaggcttctcggcggcgtgtgcggcaaggtgcgcttcgggcagtcgctcacgcttcagggcgcggggcacatgcgccttgccgacggcgtacgcctcggcaaggggtgccacctctacgcccgcacgggtgaactcgtcatgggcgagaacgccgcgctgaacatcaacgtggtggtggacgccgacggcggcaccgtccgcatcggcgcacacgccaccgtgggccccggcaccgtcattcgcgccgccaaccaccgtttcgacaggctcgacacccccatcatgttccaggggcacgaatacggcgaagtcgtcatcgacgatgacgtatggatagccgccaactgcaccgtggtgcccggcgtgcacatcgggcgcggggccgtggtgggggcgggtgccgtcgtcacgaaggacgtggaaccctacaccgtggtcgcgggcgtacccgcacggttcatccgcaggcgcggccccgcagaatag

SEQ ID NO: 15652 - protein, 197 aa, Desulfovibrio vulgaris subsp. vulgaris str. Hildenborough
MARCAVFLEELWFALFAWVPTVLGTAVRLVAWRPLFRLLGGVCGKVRFGQSLTLQGAGHMRLADGVRLGKGCHLYARTGELVMGENAALNINVVVDADGGTVRIGAHATVGPGTVIRAANHRFDRLDTPIMFQGHEYGEVVIDDDVWIAANCTVVPGVHIGRGAVVGAGAVVTKDVEPYTVVAGVPARFIRRRGPAE

SEQ ID NO: 15653 - DNA, 570 bp, Listeria monocytogenes str. 4b F2365
  CDS (1)..(570): transl_table=11
atgatagaacaagatttacagaaaagactagtcgaccaagaaattctccaagggtcggatttgttagatgaaattcacaaagtaaagcaaaacaatgaacaacttatcatcgaactaaacaccaagtaccactcaaaaaaagaagtgattaaatatctcagtgacatcactggaaaaccagtcgatccatcagtcgatgtctcacttcctttttatagcgacttcgggaaacatattacttttgggaaaaatatctttatcaatttaaatgtaactttcgtggatttaggtgggattacgattgaagataatgttttaattggcccaggagcaagacttgtgaccgttaatcatttagttagcccgaaaaaaagacgtggactacgtgtagccccaatttgtgtgaagaaaaacgcctggattggcgcaaacgcgacgatattatcaggcgtaacaatcggcgaaaatgctatcgttgctgcggatgctaccgtcacaagagatgtcccagcaaacgttatcgtcgccggaagcccagccaaacaaattcgtaaaattatcgaggaataa

SEQ ID NO: 15654 - protein, 189 aa, Listeria monocytogenes str. 4b F2365
MIEQDLQKRLVDQEILQGSDLLDEIHKVKQNNEQLIIELNTKYHSKKEVIKYLSDITGKPVDPSVDVSLPFYSDFGKHITFGKNIFINLNVTFVDLGGITIEDNVLIGPGARLVTVNHLVSPKKRRGLRVAPICVKKNAWIGANATILSGVTIGENAIVAADATVTRDVPANVIVAGSPAKQIRKIIEE

SEQ ID NO: 15655 - DNA, 564 bp, Listeria monocytogenes str. 4b F2365
  CDS (1)..(564): transl_table=11
atgaaaacagaactagaaaagatgattgcaggagaaatgtatgatcctagcgacagagagctcgcacacggaagaaatcgtgcacgtaagttctgcagagagattaacgatgcgatggattcagagtcccgtgcaagcgtgctgaagcgcctattcggcggaacaaaagagaatgtatatgtggaacctgattttcgtgttgattacggttctaatatatatgtaggcgaaaatttttatgctaattttgattgtgttattttagatgtttgcgaagtacatattggtgataattgtatgatggcgcctggagttcatatttatacggcaacgcatccgcttgatccagtagaacgtaatagtgggctagagcttggtaaaccagttgaaattggcgataatgtttggattggtggtcgggcaattattaatccgggggttaagcttggaaataatgtcgtggttgcttcaggcgcagttgtaacgaaaagcttccccgataatgtcgttcttgccggcaacccagcacgcgttattaaaacaattgaggttgaggaaaaatga

SEQ ID NO: 15656 - protein, 187 aa, Listeria monocytogenes str. 4b F2365
MKTELEKMIAGEMYDPSDRELAHGRNRARKFCREINDAMDSESRASVLKRLFGGTKENVYVEPDFRVDYGSNIYVGENFYANFDCVILDVCEVHIGDNCMMAPGVHIYTATHPLDPVERNSGLELGKPVEIGDNVWIGGRAIINPGVKLGNNVVVASGAVVTKSFPDNVVLAGNPARVIKTIEVEEK

SEQ ID NO: 15657 - DNA, 564 bp, Bacillus thuringiensis serovar konkukian str. 97-27
  CDS (1)..(564): transl_table=11
atgaaaacggaaaaagaaaagatgttggcgggagaaatgtatattgcggatgacgaagaattagtggctgatagggtggaggcaaaacgtttaacacgcctttataacgaggcgatggagacaggagatgagagacgttacactttattaaatcagcttttaggttcttcagctgatggaaaagcccgaattaatcctgattttcgttgtgattacggctacaatatccatgttggaaagagctttttcgcaaatttcaattgtgtgattttagacgtttgtgaagttcgaatcggtgatcattgtatgtttgcacctggtgttcacatttatactgctacgcatcctttacatccggtagagcggaattctggtaaagagtatgggaagcctgtaaagattggtaacaatgtttgggttggcgggggagctattattaaccctggtgtttcaattggagataacgctgtaattgcttcaggggcagttgtgacaaaagatgtacctaataatgtagtagttggaggtaacccagctaaagttattaaaacgatagacttatag

SEQ ID NO: 15658 - protein, 187 aa, Bacillus thuringiensis serovar konkukian str. 97-27
MKTEKEKMLAGEMYIADDEELVADRVEAKRLTRLYNEAMETGDERRYTLLNQLLGSSADGKARINPDFRCDYGYNIHVGKSFFANFNCVILDVCEVRIGDHCMFAPGVHIYTATHPLHPVERNSGKEYGKPVKIGNNVWVGGGAIINPGVSIGDNAVIASGAVVTKDVPNNVVVGGNPAKVIKTIDL

SEQ ID NO: 15659 - DNA, 486 bp, Staphylococcus aureus subsp. aureus MRSA252
  CDS (1)..(486): transl_table=11
ttgagaaaatttttatcaaaagaatatcatcgtacaaaccctttatggcatgtataccgtcttgttaaattttcgaaagtttttaagaatgtaatcatcattgaattttcgaaatttattccaagtatggtactgaaaagacatatatataaacaaattttaaatattaatatcggtaatcaatcgtcgatagcttataaagtaatgttagatattttttatccagaactgattacgattggtagtaacagtgttattggttacaatgtaacaattttgacgcatgaagcattagttgatgaatttcgttatggaccagtgacgataggatctaacactttgattggtgcaaatgctaccattttacccggtataacgattggtgacaatgtaaaagttgcagctggtacggttgtttcaaaagatataccggataatggatttgcatatggcaaccctatgtatataaaaatgattaggaggtga

SEQ ID NO: 15660 - protein, 161 aa, Staphylococcus aureus subsp. aureus MRSA252
MRKFLSKEYHRTNPLWHVYRLVKFSKVFKNVIIIEFSKFIPSMVLKRHIYKQILNINIGNQSSIAYKVMLDIFYPELITIGSNSVIGYNVTILTHEALVDEFRYGPVTIGSNTLIGANATILPGITIGDNVKVAAGTVVSKDIPDNGFAYGNPMYIKMIRR

SEQ ID NO: 15661 - DNA, 600 bp, Staphylococcus aureus subsp. aureus MRSA252
  CDS (1)..(600): transl_table=11
atgactgaaaaagaaaaaatgttagcagaaaaatggtacgatgcaaactttgatcaagacttaatcaatgaacgtgcacgagcgaaagatatttgctttgaattaaatcatacaaagccgagtgacaaaaataaaagaaaggaattaatcgatgaattatttcaaacaacaacagacaatgtaagtatttcgattccttttgatacagattatggttggaacgttaaactaggaaaaaatgtctatgtaaacaccaattgttattttatggatggtggacagattacaattggcgataatgtttttataggacctaattgtggattctacacagcaacacatccacttaattttcatcatagaaatgaaggatttgaaaaagcaggaccaattaatattggcagtaatacttggtttggcggacatgtagccgtgcttccgggagtgacgattggagaaggcagtgtgattggtgctggtagtgttgtcaccaaagatattccgccacacagtttagcggttggaaacccttgtaaagtcgttcgtaaaattgataatgaggtaccatcagaagcattgaacgatgaaacactaaattag

SEQ ID NO: 15662 - protein, 199 aa, Staphylococcus aureus subsp. aureus MRSA252
MTEKEKMLAEKWYDANFDQDLINERARAKDICFELNHTKPSDKNKRKELIDELFQTTTDNVSISIPFDTDYGWNVKLGKNVYVNTNCYFMDGGQITIGDNVFIGPNCGFYTATHPLNFHHRNEGFEKAGPINIGSNTWFGGHVAVLPGVTIGEGSVIGAGSVVTKDIPPHSLAVGNPCKVVRKIDNEVPSEALNDETLN

SEQ ID NO: 15663 - DNA, 627 bp, Erwinia carotovora subsp. atroseptica SCRI1043
  CDS (1)..(627)
atgaaattaaaaaatagctacccggttaaaactgttctttattttttagccctcgtaatgtcggatacattaaaaacgctaaaatcttatcttcgaagagctcaattcagggctaacggtatttatattgataagtccgctatcattagaagcgatgacagaggaagtataacgctgaatgaaggggtaagaatttctcatggcgttgttgttatctgtactaatgagaaagcaagagagggtgtttcctctcagttggttattggaaaaggaaccacaattaatgagtactcaaatataagagcatcaggcgggataattagaattggcgaaaactgtatgatcgcccaatttgtgagtgtggtcgcgtccaatcatgtcgtcaatactgaaaaactgatgattgatgaaagctgggatgataaaaagaatgagatcacaattgggaatgacgtatggattggcgcaggggccgttattttgcctggcgttactattggtgatggtgcagtcgttgccgctggttccgtagtgacgaaagatgtagatgcatttacgataaatgctggagtgccctgcaagaaaataaaagacagggaattgttttttaaaaatatcaatagttga

SEQ ID NO: 15664 - protein, 208 aa, Erwinia carotovora subsp. atroseptica SCRI1043
MKLKNSYPVKTVLYFLALVMSDTLKTLKSYLRRAQFRANGIYIDKSAIIRSDDRGSITLNEGVRISHGVVVICTNEKAREGVSSQLVIGKGTTINEYSNIRASGGIIRIGENCMIAQFVSVVASNHVVNTEKLMIDESWDDKKNEITIGNDVWIGAGAVILPGVTIGDGAVVAAGSVVTKDVDAFTINAGVPCKKIKDRELFFKNINS

SEQ ID NO: 15665 - DNA, 573 bp, Propionibacterium acnes KPA171202
  CDS (1)..(573): transl_table=11
atgagcactgagacgacggccctgctccggaccctcaagcgatgcaaggaacgcgcgatggaggacctcgacgccgccatgcgcgaggatcccgccgctacctcgaagctcatggtcgccatcgcctaccaaggtgttcacgccatctgggcgcatcgcctagcccacgccatgtgggtcaagaagcctgcgctgcgaccactagcacggttgttgtcacaattgtctcgccacatcaccggcattgagatccatccgggggcgacgattggacgccggttcttcatcgaccacggcatgggcgtcgttattggtgagacggcggtcgtcggtgacgacgtcctcatgtatcaccaggtgaccctcggcggccgcgcccgcggacagttcaagcgtcaccccacgattggcaaccgtgtcctcatcggcgcgggagccaagatcattggcaacatcacggttggcgacgactgcaagatcggcgccaacgcgttggtcgtcaaggatgtcgcccccggcacagtcgtcgtcggaatcccgtcgaaggtgcaccagggcgacgtcatcgcctga

SEQ ID NO: 15666 - protein, 190 aa, Propionibacterium acnes KPA171202
MSTETTALLRTLKRCKERAMEDLDAAMREDPAATSKLMVAIAYQGVHAIWAHRLAHAMWVKKPALRPLARLLSQLSRHITGIEIHPGATIGRRFFIDHGMGVVIGETAVVGDDVLMYHQVTLGGRARGQFKRHPTIGNRVLIGAGAKIIGNITVGDDCKIGANALVVKDVAPGTVVVGIPSKVHQGDVIA

SEQ ID NO: 15667 - DNA, 510 bp, Desulfotalea psychrophila LSv54
  CDS (1)..(510): transl_table=11
atgaattacttgtttttgtttttttattactctttcttgatttatctgccatcagtttcatttgttagttttggtgtttttcttcgtcgtttagttgttgctcacatatttaaatatgtagggaagaatgtgaacatagctaagggggtgtactttggtagagggcataatataacgattggtgaaaactcaggaataggtgaaaattctagaatagtctgtatggaaaaggttgaaattggatgtgatgttatgattggcccagaagttatgatgctaactggaggccatggatatactgacactaagcttcttttacgtgaacaagatataattacagcgccaataaaaattggcaatgattgttggataggtgcaagagctattattttgccaggtataacaattaccgatagagtgattatcggtgctgggagtgtagttgctaaatctatatttgaatcaggtatctacgtgggtaatccagcaagtaaaattagaaatttataa

SEQ ID NO: 15668 - protein, 169 aa, Desulfotalea psychrophila LSv54
MNYLFLFFYYSFLIYLPSVSFVSFGVFLRRLVVAHIFKYVGKNVNIAKGVYFGRGHNITIGENSGIGENSRIVCMEKVEIGCDVMIGPEVMMLTGGHGYTDTKLLLREQDIITAPIKIGNDCWIGARAIILPGITITDRVIIGAGSVVAKSIFESGIYVGNPASKIRNL

SEQ ID NO: 15669 - DNA, 579 bp, Bacillus licheniformis ATCC 14580
  CDS (1)..(579): transl_table=11
atgaaaacagaaaagcaaaaaatgctggacggagagctttatcatgcttctgatccggtgctgtgccatgacagactcaaggcgcgcaaaattacgaatgaattcaaccattcgaacgaaatcgacgacaataaaaggaccaagctaatcaaagagctgtttggatcaacaggggaaacgatcctcatcgaaccgtcgtttcgctgtgattacggctttaacatacatgtcggggaaaatttcttcgccaattttgactgtgttttcctcgatgtatgcgatatccggataggcgatcattgtatgctcggaccgggtgtccatatttatacggcgtcccatccgctcgatccgtccgaaaggataagcggtgcggagtacggaatacctgtcatcatcggccggaacgtttggattggcggcggcgcggtcatcaatcccggcgtcaaggtcggcgacaatgcagtgatagcttccggagccgtcgtcacaaaagatgtcccggataatgccatcgtcggcgggaatccggcgaaaatcattaaatacgttgatagcaaaaacaccaattctatgtaa

SEQ ID NO: 15670 - protein, 192 aa, Bacillus licheniformis ATCC 14580
MKTEKQKMLDGELYHASDPVLCHDRLKARKITNEFNHSNEIDDNKRTKLIKELFGSTGETILIEPSFRCDYGFNIHVGENFFANFDCVFLDVCDIRIGDHCMLGPGVHIYTASHPLDPSERISGAEYGIPVIIGRNVWIGGGAVINPGVKVGDNAVIASGAVVTKDVPDNAIVGGNPAKIIKYVDSKNTNSM

SEQ ID NO: 15671 - DNA, 564 bp, Bacillus cereus E33L
  CDS (1)..(564): transl_table=11
atgaaaacggaaaaagaaaagatgttggcgggagaaatgtatattgcggatgacgaagaattagtggctgatagggtggaggcaaaacgtttaacacgcctttataacgaggcgatggagacaggagatgagagacgttacactttattaaatcagcttttaggttcttcagctgatggaaaagcccaaattaatcctgattttcgttgtgattacggctacaatatccatgttggaaagaactttttcgcaaatttcaattgtgtgattttagacgtttgtgaagttcgaatcggtgataattgtatgtttgcacctggtgttcacatttatactgctacgcatcctttacacccaatagagcggaattctggtaaagaatatgggaagcctgtaaagattggtaacaacgtttgggttggcgggggagctattattaaccctggtatttcaattggagacaacgctgtaattgcttcaggggcagttgtgacaaaagatgtacctaataatgtagtagttggtggtaatccagctaaagttattaaaacgatagaagaataa

SEQ ID NO: 15672 - protein, 187 aa, Bacillus cereus E33L
MKTEKEKMLAGEMYIADDEELVADRVEAKRLTRLYNEAMETGDERRYTLLNQLLGSSADGKAQINPDFRCDYGYNIHVGKNFFANFNCVILDVCEVRIGDNCMFAPGVHIYTATHPLHPIERNSGKEYGKPVKIGNNVWVGGGAIINPGISIGDNAVIASGAVVTKDVPNNVVVGGNPAKVIKTIEE

SEQ ID NO: 15673 - DNA, 603 bp, Mannheimia succiniciproducens MBEL55E
  CDS (1)..(603): transl_table=11
atggcaacggaaaaagaaaaaatgttggcgggtttagcccatctcccgatggaagaacatttatccgcattacgtttacagacaaaagagctattatttgatttcaatatgctacgcccgtcaaataagcttgaaaaaacacatttattacggaaaattttgggtaaagcggggaaaaatattcacgtcaatagcccttttcactgcgattacggttgtaatattgaggtgggcgataatttctttgccaattaccattgtgttattttggataacggcggtgtgaaaattggcaatgacgtaatgttcgcgcctaacgttagtctttatacggtcgggcatcctttagatgccgaattgcgtaaccaaggttgggagcaggcaaaacctatcatcatcggtaataatgtttggattggcggtaatgtagtgattttacccggtgtggtaatcggcgataatgtagtgatcggcgcgggatcggtagtcactaaagatattccggcaaacagccttgctttgggtaacccgtgtaaagtattacggcaaatcactgcggcggatcgcgaatattatcagcaaacctttatgcaaaataattaa

SEQ ID NO: 15674 - protein, 200 aa, Mannheimia succiniciproducens MBEL55E
MATEKEKMLAGLAHLPMEEHLSALRLQTKELLFDFNMLRPSNKLEKTHLLRKILGKAGKNIHVNSPFHCDYGCNIEVGDNFFANYHCVILDNGGVKIGNDVMFAPNVSLYTVGHPLDAELRNQGWEQAKPIIIGNNVWIGGNVVILPGVVIGDNVVIGAGSVVTKDIPANSLALGNPCKVLRQITAADREYYQQTFMQNN

SEQ ID NO: 15675 - DNA, 597 bp, Mannheimia succiniciproducens MBEL55E
  CDS (1)..(597): transl_table=11
atggtgggcaggaatgcccaccctacaagcaaaggaaatatgatggactacacactcaatctccccttaaaccaacttatcgcccaaaatagcgaattgtttagtaaaattcaccaagttgtcgataaaaatgcgccgttagtggcagaacttaattccggttttagaacgcaaaacgaaatacgggcaattttaaatgaaatgaccggcacggaaattgatgcaagttttcacgtgaatttaccgctttataccgactttagtgcgcatattcgtattggcaaacgagtgtttattaacactgcggtaatgcttaccgacttaggcggcatcacacttgaagatgatgttttgattggtccgcgcgtgaacattatcaccgtagatcaccccattgatcccgcacaacgtcgaggcgtaattgttaaaccggttgtgattaaaaagaatgcgtggattggcgccggggcaaccattttagccggtgtaaccgtgggtgaaaatgccattgtcgccgcaggtgctgtggtgaacaaagacgtacccgctaatacgatagtaggcggtattcccgccaaattgattaaggaaatctga

SEQ ID NO: 15676 - protein, 198 aa, Mannheimia succiniciproducens MBEL55E
MVGRNAHPTSKGNMMDYTLNLPLNQLIAQNSELFSKIHQVVDKNAPLVAELNSGFRTQNEIRAILNEMTGTEIDASFHVNLPLYTDFSAHIRIGKRVFINTAVMLTDLGGITLEDDVLIGPRVNIITVDHPIDPAQRRGVIVKPVVIKKNAWIGAGATILAGVTVGENAIVAAGAVVNKDVPANTIVGGIPAKLIKEI

SEQ ID NO: 15677 - DNA, 606 bp, Bacteroides fragilis YCH46
  CDS (1)..(606): transl_table=11
atgaaaacagaaatggaaaaatgtctggctggtgaatggtatgattgtcataaccaagttttcttggatttaaagacccgaacatataagttattaataaaatataattcattaccttatgaggataaagaagaaaaacacagcttgctaaaaaagatactaggtagtatcggaatgaaagtttcggttgccagtccatttatttgtgattatggctgcaatatacatataggggataatgttactgtaaatactggttgtacctttgtggattgtaatagaatcactatcggaagtaatgttcttattgcccctaatgttcagctttatacagcaactcaccctattgatttagatgaacggctagcgccttttgaaacagaagatggaataaaacgagttcgccgcacttacgctttgcctattacaattgaggatggatgctggattggtggaggtgtaataatccttcccggaataacaattgggtacggtagtgtaattggagcaggtagtgttgttacaaaagatattccggcaaatagtttagccgttggaaatccatgtaaagtgatacgtcaaatcaatcaaactaagaaactatga

SEQ ID NO: 15678 - protein, 201 aa, Bacteroides fragilis YCH46
MKTEMEKCLAGEWYDCHNQVFLDLKTRTYKLLIKYNSLPYEDKEEKHSLLKKILGSIGMKVSVASPFICDYGCNIHIGDNVTVNTGCTFVDCNRITIGSNVLIAPNVQLYTATHPIDLDERLAPFETEDGIKRVRRTYALPITIEDGCWIGGGVIILPGITIGYGSVIGAGSVVTKDIPANSLAVGNPCKVIRQINQTKKL

SEQ ID NO: 15679 - DNA, 630 bp, Bacteroides fragilis YCH46
  CDS (1)..(630): transl_table=11
atggcactgaaagagaaaatcaaacagaatcccgcactgaaacaagctgtacaccgttttattatgcatccggtaaaaacacgtcccaactggtggatacgtatattctctttcctctacctaaaacgtggaaaaagctctgtgatttaccgtagcgtacgccaggatcttcccccattcaatctcttctctctcgggaagtattcggtagtggaagatttttcgtgtctgaacaatgctgtaggcgacctgattatcggggaatatacccgaatcggactgggcaacaccattatcggccccgcaaccatcggcaaccatgtaaatctggcacagaatgtaaccgtaaccggactgaaccataattatcaggacgcagacaagcggatagacgaacaaggagtaagcacacaacccatcacgattgaagatgatgtatgggtaggtgccaattcggtgattttacccggcgtgacactgggcaaacattgcgtagtagctgccggaagtgtagtcagtcgctccatccctccctactctgtctgtgccggcagtccggctaaagtagtcaaacagttcaatccggagagccgaacctgggaaaaaacagtctcaaaaaacggaaagtaa

SEQ ID NO: 15680 - protein, 209 aa, Bacteroides fragilis YCH46
MALKEKIKQNPALKQAVHRFIMHPVKTRPNWWIRIFSFLYLKRGKSSVIYRSVRQDLPPFNLFSLGKYSVVEDFSCLNNAVGDLIIGEYTRIGLGNTIIGPATIGNHVNLAQNVTVTGLNHNYQDADKRIDEQGVSTQPITIEDDVWVGANSVILPGVTLGKHCVVAAGSVVSRSIPPYSVCAGSPAKVVKQFNPESRTWEKTVSKNGK

SEQ ID NO: 15681 - DNA, 627 bp, Bacteroides fragilis YCH46
  CDS (1)..(627): transl_table=11
atgattatgtggataaaacaattcttgattcgtaaaattctgatatttagtaatgtgaatttgagattagcaaaagacgtttgtgtcgtgaaagtgaaatttggcaaaaacgtcttgttggaaaaaggtgtccagctttcttattcaataattggagacttttcatatattaattataattcttttgtaagccatacttctattgggaaattttgctctgttggtccattttgtgttattggtatgggaaatcatccctctcactcctttgtaagtacttctccttatttgtatgttaaaggagattttttatctgcatctctttataaagagaaacaaaatgttaaaatagggaatgatgtttggattggtgctcatgttacaattattaatggagtcacaattggggatggagcgataattggtgccaattctgtagttattagggatgtacctagctatgctattgttggaggagtgcctgcgcgtgttataagacaacggtttaccgacatggaaattaatcatttgaataaaatacaatggtgggatcaatcagaggtatggttaaaagagaaagctgaaaacatgtctgatataaaaaaatttatagagagtaataaatga

SEQ ID NO: 15682 - protein, 208 aa, Bacteroides fragilis YCH46
MIMWIKQFLIRKILIFSNVNLRLAKDVCVVKVKFGKNVLLEKGVQLSYSIIGDFSYINYNSFVSHTSIGKFCSVGPFCVIGMGNHPSHSFVSTSPYLYVKGDFLSASLYKEKQNVKIGNDVWIGAHVTIINGVTIGDGAIIGANSVVIRDVPSYAIVGGVPARVIRQRFTDMEINHLNKIQWWDQSEVWLKEKAENMSDIKKFIESNK

SEQ ID NO: 15683 - DNA, 591 bp, Methylococcus capsulatus str. Bath
  CDS (1)..(591): transl_table=11
atgtccaagatcgccaaacgtctcctgctgggtttactgacaccggccgccgccatcgccgaccgcctggaatcctggcaccgcctgtgggctcatgcacggctcaaggcggccctcgattcggccctggatccttccgtcgttgtgctgggaacgcccgaactgcatggcagcagaaacatccacctggggcgggatctgttcctttatcccggcctgtacctggaaacccaggaacgaggccgtatcgagatcggcgacggtgtcgtgctgtcgcgcggagtgcacatcgtgtcctatgcctcggtcatcctggaagacggtgtgatggtgggcgaatacaccagcatccgggacgccaatcaccgcatcgccgcaggccgctccgtgcgggacaccggccatgatgccgagccggtccggatcgggcgcaacgcctggatcgggcggggcgcggtcatcctgcggggagtcacgatcggggaggccgccgtagtcggcgccaatgcggtcgtgacgcgcgatgttcccgccggcgcggtcgtggccggggtgcccgcccgttccatcgagcgcaaacgcgccggctga

SEQ ID NO: 15684 - protein, 196 aa, Methylococcus capsulatus str. Bath
MSKIAKRLLLGLLTPAAAIADRLESWHRLWAHARLKAALDSALDPSVVVLGTPELHGSRNIHLGRDLFLYPGLYLETQERGRIEIGDGVVLSRGVHIVSYASVILEDGVMVGEYTSIRDANHRIAAGRSVRDTGHDAEPVRIGRNAWIGRGAVILRGVTIGEAAVVGANAVVTRDVPAGAVVAGVPARSIERKRAG

SEQ ID NO: 15685 - DNA, 648 bp, Photobacterium profundum SS9
  CDS (1)..(648): transl_table=11
atgacttcttatgagttaggccatacaatttcgcataatatctactataaaatattgcttaatggaatggtaatgacagaaaaagaaaagatgctatctggtttaatctatcaagcgtgggatgaagagctaactgccgatcgccataacgccaaaggattatgttttaagatcaatcaaacctgtccgacgcagaaagatgtccgacagggtttgattaatgagctactcggctatgatagtgatgcatggattgaatcaccctttaactgtgattatggctacaacattaaagtcggtagcggtttttatatcaatcatggctgtaccattcttgatgctgtacctattactattggtgataactgtctgctagcccctggcgtcgttatttcaactgcaggtcatccgcttgatcctgttgaaagagcgagaggtgatgagtttgctcaagcgattacgattggcaatgatgtatggcttggtgccaatgtaaccgtgtgccccggcgtgactattggcgataatgtggttgtgggtgctggcagtgtggtggtaaaaaatctacctgcaaacagtgtgtgtgtcggatctcccgctaagcctcttcgctaccttaaagaaggcgagtgtaatcctacgttgtaa

SEQ ID NO: 15686 - protein, 215 aa, Photobacterium profundum SS9
MTSYELGHTISHNIYYKILLNGMVMTEKEKMLSGLIYQAWDEELTADRHNAKGLCFKINQTCPTQKDVRQGLINELLGYDSDAWIESPFNCDYGYNIKVGSGFYINHGCTILDAVPITIGDNCLLAPGVVISTAGHPLDPVERARGDEFAQAITIGNDVWLGANVTVCPGVTIGDNVVVGAGSVVVKNLPANSVCVGSPAKPLRYLKEGECNPTL

SEQ ID NO: 15687 - DNA, 549 bp, Photobacterium profundum SS9
  CDS (1)..(549): transl_table=11
atgtgtatgtctgaattagaaaaaatgcttaatggtattgtctataattgccagtgtaaggcgttagaaaagttacgggaagaagcttctgtcttgcttcgccatttcaataacgaaccgaattcagatcttaggcatgaaatattagttaaccttggtattaaggttcctcttgatagctgcattattccccctctcgatatgagttatggcagtcatttatctattggcaatcaaagctatataaacagcggtgcgcttatattagataatggctatgtgaacattggctctcacgtaatgatagggcctagagtgcaaatatatacggcttctcatgctcttgatgccgatagacgtattgcgggcgacgaagtagcaaaaccagtcacaattaatgataaagcttggattggcggtggcgcaataatattacctggtgtaaccattggtgaaggtgctgttattggtgctggctctgtcgtgacaaaagatgttgcaagctatgaccgtgttgcaggaaacccagctcgctccatcatcaaataa

SEQ ID NO: 15688 - protein, 182 aa, Photobacterium profundum SS9
MCMSELEKMLNGIVYNCQCKALEKLREEASVLLRHFNNEPNSDLRHEILVNLGIKVPLDSCIIPPLDMSYGSHLSIGNQSYINSGALILDNGYVNIGSHVMIGPRVQIYTASHALDADRRIAGDEVAKPVTINDKAWIGGGAIILPGVTIGEGAVIGAGSVVTKDVASYDRVAGNPARSIIK

SEQ ID NO: 15689 - DNA, 564 bp, Photobacterium profundum SS9
  CDS (1)..(564): transl_table=11
atgaatgaattagagaaaatgcgctcagggttgctatacgatggtaacgatgcctcaattgatactttgcgtcagcaatcagagttactgattattcagctacgatcgtcgccttcatctcaacaccaagtattattgaaattgttactcggttctttgggagataactcagtaatacgcatgcctttcagctgcgagtttggtaaaaccattcatattggtagcagcacttttcttaatgctggtatcgtgatgctagataatgccgatatttatattggcgataatgtgttaattggcccatcgacgcagttttttacgccaacacactcactcgatcatgaatctcgtcgacgatgggagtcgtggtgtaagccaattactgtcgaaaatgatgtttggattggtggtaatgtatcgatctgtcagggtgtcaccattggtgctcgttcagtcgtcgcggctggtagtgttgttacacatgatgttccgcctgatacactcgttggtggtacgccagcgaaggttattcgaccaatcaatagtagtgatgcagctatataa

SEQ ID NO: 15690 - protein, 187 aa, Photobacterium profundum SS9
MNELEKMRSGLLYDGNDASIDTLRQQSELLIIQLRSSPSSQHQVLLKLLLGSLGDNSVIRMPFSCEFGKTIHIGSSTFLNAGIVMLDNADIYIGDNVLIGPSTQFFTPTHSLDHESRRRWESWCKPITVENDVWIGGNVSICQGVTIGARSVVAAGSVVTHDVPPDTLVGGTPAKVIRPINSSDAAI

SEQ ID NO: 15691 - DNA, 561 bp, Haloarcula marismortui ATCC 43049
  CDS (1)..(561): transl_table=11
atggcgtctgaacgggagaagatgctggcgggcgagcgctacgacgcgagcgacccagcactcgttgctgcccgagagcgtgcgaacgaactcacccgggagtacaaccagaccgacccatctgaggccgacaccagacaggcgctcatcgaggacctctttggctcggtcggtgcggactgccacgtcgaaccgcccttccggtgtgactacggcgacaacatccacgtcggcgatgggttctacgcgaacttcgactgcgtcgtactggatgtctgccgggtcgatatcggcgacgactgcctgctcgggccgggtgtccacatctacaccgcgacgcacccacttgacccggatgaacgacgtagcggcgtcgagtacgggaagccggtgactatcggcgacaatgtctgggtcggtgggcaggcggtcatcaacccgggcgtcaccgtcggcgacgatgccgtcatcgggtccggtgcggtcgtcaccgacgacgttcctgctggcgtcgtcgttcaggggaaccccgcgtcggtcgtacgtgaaatcgaggattga

SEQ ID NO: 15692 - protein, 186 aa, Haloarcula marismortui ATCC 43049
MASEREKMLAGERYDASDPALVAARERANELTREYNQTDPSEADTRQALIEDLFGSVGADCHVEPPFRCDYGDNIHVGDGFYANFDCVVLDVCRVDIGDDCLLGPGVHIYTATHPLDPDERRSGVEYGKPVTIGDNVWVGGQAVINPGVTVGDDAVIGSGAVVTDDVPAGVVVQGNPASVVREIED

SEQ ID NO: 15693 - DNA, 675 bp, Geobacillus kaustophilus HTA426
  CDS (1)..(675): transl_table=11
atgtttaaaacgttaaaagaggatattgaggtcatttttgagcaagacccggcggcgagaagctatttggaagtcattttaacgtattccggcctgcatgccatctgggcgcatcggatcgcccatgcgctttacaagcggaaattttacttttttgcccgcttgatttcgcaaatcagccgctttttcactggcattgaaatccatccgggcgcgaaaatcggccgccgctttttcatcgaccacggcatgggcgtggtgatcggcgaaacgtgcgaaatcggcgacaatgtcactgtctatcaaggggtcacattaggcgggacagggaaagaaaaagggaagcggcacccgacgatcaaagacaactgtttgatcgctgccggcgcgaaagtgctcggttcgattacgatcggggaaaactcgaaaatcggcgctgggtcggtcgtgttaaaagacgtaccgcccaattcgaccgtcgttggcattccgggccgcgtcgttgtgcgcgacggggtgaaagtgaagaaagatttaaaccataccgaccttcctgacccgatcgccgaccggtttcgggagcttgaagaggaaatcgcccggctgaaaagcgagcttgaggcattgaaacaacaagaaaggaagaacgagtatgagcagcatccggctttataa

SEQ ID NO: 15694 - protein, 224 aa, Geobacillus kaustophilus HTA426
MFKTLKEDIEVIFEQDPAARSYLEVILTYSGLHAIWAHRIAHALYKRKFYFFARLISQISRFFTGIEIHPGAKIGRRFFIDHGMGVVIGETCEIGDNVTVYQGVTLGGTGKEKGKRHPTIKDNCLIAAGAKVLGSITIGENSKIGAGSVVLKDVPPNSTVVGIPGRVVVRDGVKVKKDLNHTDLPDPIADRFRELEEEIARLKSELEALKQQERKNEYEQHPAL

SEQ ID NO: 15695 - DNA, 558 bp, Geobacillus kaustophilus HTA426
  CDS (1)..(558): transl_table=11
atgaaaagcgaaaaagaaaagatgttggcgggacacttgtacaaccctgccgatttggagctcgtcaaggagcgggagcgggcgcggcggctcgttcgcctgtataacgaaacgttggaaacggagtatgacaaacggaccgggctgctcaaagaattgttcggttcgacaggggaacggctgttcatcgagccgaacttccgctgcgactacggctacaacattcacgtcggcgaaaacttttttatgaactttgatggcgtgattttggatgtatgtgaagtgcgaatcggcgaccattgttttatcggtcctggtgtgcacatttatacggcgactcacccgctcgatccgcacgaacgaaattccgggttggagtacggaaagccggttgtgatcggccataacgtctggatcggcgggcgggccgtcatcaacccgggcgtcacgatcggcgacaacgctgtcatcgcctcaggggcggttgtgacaaaagatgtccccgccaacgcggtcgttggcggaaacccggcgaaagtgatcaaatggctcaaatag

SEQ ID NO: 15696 - protein, 185 aa, Geobacillus kaustophilus HTA426
MKSEKEKMLAGHLYNPADLELVKERERARRLVRLYNETLETEYDKRTGLLKELFGSTGERLFIEPNFRCDYGYNIHVGENFFMNFDGVILDVCEVRIGDHCFIGPGVHIYTATHPLDPHERNSGLEYGKPVVIGHNVWIGGRAVINPGVTIGDNAVIASGAVVTKDVPANAVVGGNPAKVIKWLK

SEQ ID NO: 15697 - DNA, 552 bp, Azoarcus sp. EbN1
  CDS (1)..(552): transl_table=11
gtgaggaccgaaagggaaaaaatgctcgcgggagagctttatgatccgttcgacccggacctggttgcccggcgggaccaggcacgcgccttatgccaaacgctgaacgccacgaaagagtcggagcagggcgtcagacgccgcgtcctcgaagacctattcggcgccggtggcgataccgtctggatgcaaccgcccttctattgtgactacggttccaacattcgcctcggcgcgcgcgtatttttcaacttcaattgcaccgttctcgatgtgtgcgaagtccgcatcggcgactacacgttattcggcccgggcgtgcaaatcctcacgccgttgcatccactcgacgccgatctacgcaggaagcaggaatacggaaagccgatcgagatcggggcagacgtgtgggtgggaggtggagcactgattctggccggagtccgtatcgggtctcgaacgatcattggagcgggtagcgtcgtgacacgtgacattccggaaggcgtacttgcagccggaaatccatgccgagtgatccgcagtgtctag

SEQ ID NO: 15698 - protein, 183 aa, Azoarcus sp. EbN1
MRTEREKMLAGELYDPFDPDLVARRDQARALCQTLNATKESEQGVRRRVLEDLFGAGGDTVWMQPPFYCDYGSNIRLGARVFFNFNCTVLDVCEVRIGDYTLFGPGVQILTPLHPLDADLRRKQEYGKPIEIGADVWVGGGALILAGVRIGSRTIIGAGSVVTRDIPEGVLAAGNPCRVIRSV

SEQ ID NO: 15699 - DNA, 600 bp, Zymomonas mobilis subsp. mobilis ZM4
  CDS (1)..(600): transl_table=11
atgaatatggatatcgcgcagcaacgccaacatatcctaagcggcgcttattataatgatctcacccctgaattgataaaggcaagagaagaggcggttcggctttccaatctttataatgatagctttggtgaagctccggcaaaaagagaaagctatctgcggcaattattgaaaaaaataggcaaaaatgcctattttgagccgcgcttccgttgtgaatttggtttcaatattagcattggcgacaatttctacgccaattttgactgcattattttagacgggggcgaagtcaccatcggggataatgttctatttggtcctcgtgtcggtatttatacctcgaatcatgcgatcaaccccgatgagcggaaggctggagcttgttatgccaaagccgtgacgattggtcattctgtgtgggtcggcggcggcgttaacatcaatcagggtgtgacaatcggtgataacagtatcatcggttcgggaagcgtcgtcacaaaagatattccggccaatgtgattgcggcaggggtgccttgtcgggtgatacggcctattactgatgccgaccgtgtgggttttaacgcctcttaa

SEQ ID NO: 15700 - protein, 199 aa, Zymomonas mobilis subsp. mobilis ZM4
MNMDIAQQRQHILSGAYYNDLTPELIKAREEAVRLSNLYNDSFGEAPAKRESYLRQLLKKIGKNAYFEPRFRCEFGFNISIGDNFYANFDCIILDGGEVTIGDNVLFGPRVGIYTSNHAINPDERKAGACYAKAVTIGHSVWVGGGVNINQGVTIGDNSIIGSGSVVTKDIPANVIAAGVPCRVIRPITDADRVGFNAS

SEQ ID NO: 15701 - DNA, 693 bp, Dehalococcoides ethenogenes 195
  CDS (1)..(693): transl_table=11
atgataaaagatattagaaacgttttcagtaaagacccggctgcccgaagtgtggcagaggttcttttttgttatccgggtttgcatgccctctggtttcaccgggtggcaaactggctttggcgtcacaagctccatttctgggcacgctggctttcccacggcgggcggttctgcaccggcattgagattcatccgggggcaaaaataggccagcgtttcttcattgaccatggaatgggtgtagtcattggtgaaacctctgaaattggtgatgacgtgctcatgtatcagggggtggtcttaggcggcaccagtttgtccaagggtaagcgtcaccctactatcggcagcaatgtggttatcggcacaggtgcggtagtgctgggcggcattacagtgggcgaaggggcaaaaataggggcgggttcggtagtgactaaagacgttccggccggggcaactgtagtgggtataccggggcgggtagtagaagaatcccgccagatggttattgatttggaacacggcaaactgcctgacccggtagcggatgccttaaaggtagtgctggccgaacagcaaaagctgatggacaggcttgcccagcttgaaaaaaacagcgagctgaaagtgcctcaggatgagcttcgcgggcagatacgtgaaattatgaaagagtttaacctctga

SEQ ID NO: 15702 - protein, 230 aa, Dehalococcoides ethenogenes 195
MIKDIRNVFSKDPAARSVAEVLFCYPGLHALWFHRVANWLWRHKLHFWARWLSHGGRFCTGIEIHPGAKIGQRFFIDHGMGVVIGETSEIGDDVLMYQGVVLGGTSLSKGKRHPTIGSNVVIGTGAVVLGGITVGEGAKIGAGSVVTKDVPAGATVVGIPGRVVEESRQMVIDLEHGKLPDPVADALKVVLAEQQKLMDRLAQLEKNSELKVPQDELRGQIREIMKEFNL

SEQ ID NO: 15703 - DNA, 486 bp, Staphylococcus aureus subsp. aureus COL
  CDS (1)..(486): transl_table=11
ttgaggaaatttttatcaaaaacacatcatcatacaaaccctttatggcgtgtataccgtcttgttaaattttcgaaagtttttaagaatgtaattatcattgaattttcgaaatttattccaagtatggtactgaaaagacatatatataaacaacttttaaatattaatatcggtaatcaatcgtcgatagcttataaagtaatgttagatattttttacccagaactgattacgattggtagtaacagtgttattggttacaatgtaacaattttgacgcatgaagcattagttgatgaatttcgttatggaccagtgacgataggatctaacactttgattggtgcaaatgctaccattttacccggtataacgattggtgacaatgtaaaagttgcagctggtacggttgtttcaaaagatataccggataatggatttgcatatggcaaccctatgtatataaaaatgattaggaggtga

SEQ ID NO: 15704 - protein, 161 aa, Staphylococcus aureus subsp. aureus COL
MRKFLSKTHHHTNPLWRVYRLVKFSKVFKNVIIIEFSKFIPSMVLKRHIYKQLLNINIGNQSSIAYKVMLDIFYPELITIGSNSVIGYNVTILTHEALVDEFRYGPVTIGSNTLIGANATILPGITIGDNVKVAAGTVVSKDIPDNGFAYGNPMYIKMIRR

SEQ ID NO: 15705 - DNA, 600 bp, Staphylococcus aureus subsp. aureus COL
  CDS (1)..(600): transl_table=11
atgactgaaaaagaaaaaatgttagcagaaaaatggtacgatgcaaactttgatcaatacttaatcaatgaacgtgcacgagcgaaagatatttgctttgaattaaatcatacaagaccgagtgctacaaataaaagaaaggaattaattgatcaattatttcaaacaacaacagacaatgtaagtatttcgattccttttgatacagattatggttggaacgttaaactaggaaaaaatgtctatgtaaacaccaattgttactttatggatggtggacagattacaattggcgataatgtttttataggacctaattgtggattctacacagcgacacatccacttaatttccatcatagaaatgaaggttttgaaaaagccggacccattcatattggcagtaatacttggtttggcggtcatgtagccgtgttaccaggggtgacgattggagaaggcagtgtgattggtgctggtagtgttgtcactaaagatattccgccacacagcttagcggttggaaacccttgtaaagtcgttcgtaaaattgataatgacctaccatccgaaacattaaatgacgaaacgataaagtag

SEQ ID NO: 15706 - protein, 199 aa, Staphylococcus aureus subsp. aureus COL
MTEKEKMLAEKWYDANFDQYLINERARAKDICFELNHTRPSATNKRKELIDQLFQTTTDNVSISIPFDTDYGWNVKLGKNVYVNTNCYFMDGGQITIGDNVFIGPNCGFYTATHPLNFHHRNEGFEKAGPIHIGSNTWFGGHVAVLPGVTIGEGSVIGAGSVVTKDIPPHSLAVGNPCKVVRKIDNDLPSETLNDETIK

SEQ ID NO: 15707 - DNA, 615 bp, Lactobacillus acidophilus NCFM
  CDS (1)..(615): transl_table=11
atggaagaaaatactaaaaatatgcttgctggaaagccttatcgtccaggaacaccagaattacatcaaatttctagattggctcaccgactttgtcgtgactataatttactagcagacactgataaagaagaacgaaaagcaattattaaccgcctatttcccgatcatcaagaaggtatttatttacaaggtcctattaatgtagattatggtcgttttactactctaggtaagaacttttatgctaactttaatctaactattttagacacttgccctgtaaaaatcggtgataatgttatgtgtggacctaacgttaatattcttactccacttcatccgctacttcccagtcaacgcaattctcgcgtattagaaaatggcactgtaggcgattatgaatatggtgctcctattacaattggtgataattgttggctagctggaaacgtaacaatttgtgctggtgtgactattggcaatggatgcgtaattggagctggcgctgtagttactagagatgttcctgataactcacttgttgtgggggttccaggacgtgtcattagaaaaataacaaaagaagatcgtttaaagaactggccatattaa

SEQ ID NO: 15708 - protein, 204 aa, Lactobacillus acidophilus NCFM
MEENTKNMLAGKPYRPGTPELHQISRLAHRLCRDYNLLADTDKEERKAIINRLFPDHQEGIYLQGPINVDYGRFTTLGKNFYANFNLTILDTCPVKIGDNVMCGPNVNILTPLHPLLPSQRNSRVLENGTVGDYEYGAPITIGDNCWLAGNVTICAGVTIGNGCVIGAGAVVTRDVPDNSLVVGVPGRVIRKITKEDRLKNWPY

SEQ ID NO: 15709 - DNA, 600 bp, Vibrio fischeri ES114
  CDS (1)..(600): transl_table=11
atgagtcataaattgtcggatttttcagttcaaattcccataaataaagaactgtgcgcatttcaggatgaagtaaaagagcaactgtatgactttaaccactcccgaccatcagaacatcagttaagagccgatgtattgcaatctatccttggtcaatataagggagtgactatcgtacctccattttattgtgatatgggaaagaacatacattttgagtgtggtggatttttaaattcaggagttaagatcttagatcttgctcctgtttttattggagcacatgttcaagttggcccaaatgttgtgatcagtacagcagggcatccttttgatttagcggagcgagtattaccgattgcttctgctaacccaattaagattggagataacgtttggattggtgctaacgctgttatattggatggtgtgacaatcggtgctcgaagtgtgattggtgcaggaagtgtagtgacaaaagatattccgccagactgtgtcgctgtcggtaatccttgtcgagtgattaagacgattacccattcagacatgccatctgacgatgaacttgatgaaatgtgggcagatctaacataa

SEQ ID NO: 15710 - protein, 199 aa, Vibrio fischeri ES114
MSHKLSDFSVQIPINKELCAFQDEVKEQLYDFNHSRPSEHQLRADVLQSILGQYKGVTIVPPFYCDMGKNIHFECGGFLNSGVKILDLAPVFIGAHVQVGPNVVISTAGHPFDLAERVLPIASANPIKIGDNVWIGANAVILDGVTIGARSVIGAGSVVTKDIPPDCVAVGNPCRVIKTITHSDMPSDDELDEMWADLT

SEQ ID NO: 15711 - DNA, 546 bp, Vibrio fischeri ES114
  CDS (1)..(546): transl_table=11
atgactgaaaaagagaaaatgttagcagggcttccttatgatgcttgggaagaaacgctattaaatgatcgtatgaatgccaaagcgatttgccaccaatttaatttagctgacccaactaagcttgatgaaagaatggccattttaagtgagttgctgtgtataaaggacaaagcacatatagagccaaatttcttttgtgattatggttataacattgaaattggaagtaatttttattctaaccataatttgacgattgtggatgtatgtaaggttactattggaaacaatgtgctgtttgggccacatgtgatgatttctactggtacgcatccgattgatcctatcgagcgacaaaaaacggagttcggggcgagtatttctattggtaatgacgtatggctaggaggaaatgtatccgttcttccaggtgtacgtattggaaataattgtgtgataggcgctggaagcgttgttaaccgagatattcctgataatagcgttgcggtgggtaatccttgtagagtcatcaaatccgtttag

SEQ ID NO: 15712 - protein, 181 aa, Vibrio fischeri ES114
MTEKEKMLAGLPYDAWEETLLNDRMNAKAICHQFNLADPTKLDERMAILSELLCIKDKAHIEPNFFCDYGYNIEIGSNFYSNHNLTIVDVCKVTIGNNVLFGPHVMISTGTHPIDPIERQKTEFGASISIGNDVWLGGNVSVLPGVRIGNNCVIGAGSVVNRDIPDNSVAVGNPCRVIKSV

SEQ ID NO: 15713 - DNA, 552 bp, Vibrio fischeri ES114
  CDS (1)..(552): transl_table=11
atgaccgaatttgaaaaaatgaaaagtggtttggtatttgatggtggtgatcctgaaatagacgctattcgtaaccaaacacaaaagtaccttcaacaatttaatcaaagtacagaaacgaaagaaaagttatctattttaccaaatgtctttaatgcctttggtcagagttttattcaagccccgttcttttgtgaatttggaaagacaatttcaataggaaacgaaacgtttattaatatgaacgtaaccatgctcgatggtgcagaaattacgattggtaataatgtattaattggtcctaatgctcaattttatacggcttcacattctttagattataaaagccgtcgttgttgggaaacctattgtaaaccgattgtcattgaagatgatgtgtgggttggtggtagtgtagtgattaatcaaggcgttactattggggctcgttctgttattgcagcaaattcagtggtgaaccatgatgtgccatctgattgtttgtacggtggaacgcctgccaagttaattaaacgacttgatcaaaaataa

SEQ ID NO: 15714 - protein, 183 aa, Vibrio fischeri ES114
MTEFEKMKSGLVFDGGDPEIDAIRNQTQKYLQQFNQSTETKEKLSILPNVFNAFGQSFIQAPFFCEFGKTISIGNETFINMNVTMLDGAEITIGNNVLIGPNAQFYTASHSLDYKSRRCWETYCKPIVIEDDVWVGGSVVINQGVTIGARSVIAANSVVNHDVPSDCLYGGTPAKLIKRLDQK

SEQ ID NO: 15715 - DNA, 756 bp, Vibrio fischeri ES114
  CDS (1)..(756): transl_table=11
atgaatacattatcaatttatcgttttaaacagtggctaaaagaaggtgagagtccgctagctctgacgctatttcgtatagcgaaatccatccgacattttgagttgccaactcctcgcctgcttaacaaggtactttatgggttgcacaagactctatgtactcaatggcaagcgtttactcaccttattttttatgttccagctttcaaaggtcgtttagaaagttatgggaaacgcacactgctttacggtggcttacccttctttagtggtcctttaacgatgcgcattggtaatgactgccgcatttcagggcaaacgacctttagtgggcgaacgaattcagataatccaaccttagaagtgggagacaatgtcgatatttgttggcaaaccactattgctgtaggcaacaaagttattattggtaacaatgtacgaattgcaggacaaggttttttatgtgggtatccaggacatccaattgatccaactgagcgagctttggggaagcctgatctagatagtcaagtgggcgatattatcttagagcaagacgtatggcttggttctcgagtgagtattatcggcaacgttacggttggtgaaggaaccattgttgcatctggtagtgtcgtaaccaaaagccttccaccttttgtacttgccgccggaaatcctgcaaaagtaatcaaaaaactagatgttaatgcatcaaatacaatcaaagaggaaattcactatgaagcctga

SEQ ID NO: 15716 - protein, 251 aa, Vibrio fischeri ES114
MNTLSIYRFKQWLKEGESPLALTLFRIAKSIRHFELPTPRLLNKVLYGLHKTLCTQWQAFTHLIFYVPAFKGRLESYGKRTLLYGGLPFFSGPLTMRIGNDCRISGQTTFSGRTNSDNPTLEVGDNVDICWQTTIAVGNKVIIGNNVRIAGQGFLCGYPGHPIDPTERALGKPDLDSQVGDIILEQDVWLGSRVSIIGNVTVGEGTIVASGSVVTKSLPPFVLAAGNPAKVIKKLDVNASNTIKEEIHYEA

SEQ ID NO: 15717 - DNA, 522 bp, Bacteroides fragilis NCTC 9343
  CDS (1)..(522): transl_table=11
atgaaaaagttagtttatgatgtacgaaaagatataattccatggaattctcgtattactagaattttattttttttgaataaaataccgtatttgagacttttttcgaaacctttgttgaggaaacagtttaatttatcaaatacagttcaatttaattcgggatttttttgtcatgctccgaaattgaagtgtggaaattatgtaggattatctgatacttttattttggcttatgcagacgtcgttattggtaacaacgtatctttctcttttaggaatatgttaattacgtcaacacatgatgttaatgattttaataaaataatagcttcctcaattgttataggcaataatgtttggataacatcaaatgtaataatactggctggtgttaaaataggagataatacaataataggagcagggagtgttgttacacatgatattcccgcaaatgtatttgcggcaggtaatccatgtcgtgtaataaaaagtataagatttaataagaatgaataa

SEQ ID NO: 15718 - protein, 173 aa, Bacteroides fragilis NCTC 9343
MKKLVYDVRKDIIPWNSRITRILFFLNKIPYLRLFSKPLLRKQFNLSNTVQFNSGFFCHAPKLKCGNYVGLSDTFILAYADVVIGNNVSFSFRNMLITSTHDVNDFNKIIASSIVIGNNVWITSNVIILAGVKIGDNTIIGAGSVVTHDIPANVFAAGNPCRVIKSIRFNKNE

SEQ ID NO: 15719 - DNA, 600 bp, Bacteroides fragilis NCTC 9343
  CDS (1)..(600): transl_table=11
atgaaaacagaattggaaaaatgcttgtcgggcgaatggtatgattgtcatgctcccgtatttatggggtttaaaagaaagacgcatgaattgttgctgaaatacaattcattgccgtatgattataaagaggaaaagtatgcgctattgaaagaaatgtttgaaagcgttggcaagaaagtttcagtagggcattcttttatatgcgattatggctgtaacatcagcataggtaataatgtcagcataaacactggatgcacctttgtggactgcaacaaaatcattatcggcaacaatgtattgatagcccccaatgtgcaaatctatacggctacccaccctgttgaattgaatgagcggctaacaccgacagaaacggaggacgggacagcatatatccgtcacacgtatgccttgcctgttaccattgaggacggttgttggattggcggcggtgtcattatcctgccgggtgttactatcggtcggggaagcgttattggagcgggaagtgttgtcaccaaatccgttccggcaaacagccttgccgtaggaaatccatgtaaagtaattcgggaaatcaatacttccatatag

SEQ ID NO: 15720 - protein, 199 aa, Bacteroides fragilis NCTC 9343
MKTELEKCLSGEWYDCHAPVFMGFKRKTHELLLKYNSLPYDYKEEKYALLKEMFESVGKKVSVGHSFICDYGCNISIGNNVSINTGCTFVDCNKIIIGNNVLIAPNVQIYTATHPVELNERLTPTETEDGTAYIRHTYALPVTIEDGCWIGGGVIILPGVTIGRGSVIGAGSVVTKSVPANSLAVGNPCKVIREINTSI

SEQ ID NO: 15721 - DNA, 630 bp, Bacteroides fragilis NCTC 9343
  CDS (1)..(630): transl_table=11
atggcactgaaagagaaaatcaaacagaatcccgcactgaaacaagctgtacaccgttttattatgcatccggtaaaaacacgtcccaactggtggatacgtatattctctttcctctacctaaaacgtggaaaaggctctgtgatttaccgtagcgtacgccaggatcttcccccattcaatctcttctctctcgggaagtattcggtagtggaagatttttcgtgtctgaacaatgctgtaggcgacctgattatcggggaatatacccgaatcggactgggcaacactattatcggccccgcaaccatcggcaaccatgtaaacctggcacagaatgtaaccgtaaccggcctgaaccataattatcaggacacaggcaagcggatagacgaacaaggagtaagcacacaacccatcacgattgaagatgatgtatgggtaggtgccaattcggtaattttacccggcgtgacactgggcaaacattgcgtagtagctgccggaagtgtagtcagtcgctccatccctccctactctgtctgtgccggcagtccggctaaagtagtcaaacagttcaatccggagagccgaacctgggaaaaaacagtctcaaaaaacggaaagtaa

SEQ ID NO: 15722 - protein, 209 aa, Bacteroides fragilis NCTC 9343
MALKEKIKQNPALKQAVHRFIMHPVKTRPNWWIRIFSFLYLKRGKGSVIYRSVRQDLPPFNLFSLGKYSVVEDFSCLNNAVGDLIIGEYTRIGLGNTIIGPATIGNHVNLAQNVTVTGLNHNYQDTGKRIDEQGVSTQPITIEDDVWVGANSVILPGVTLGKHCVVAAGSVVSRSIPPYSVCAGSPAKVVKQFNPESRTWEKTVSKNGK

SEQ ID NO: 15723 - DNA, 624 bp, Bacteroides fragilis NCTC 9343
  CDS (1)..(624): transl_table=11
atgaaaacagagatggagaaatgcttggccggtgaatggtatgattgccatgctccggtttttctagaactaaaaggaaaaactcaccgtttgttgatgagatacaattcactgtcttatgaacaaaaagaagaaaaatatgcgattctgaaagaaatgttcggtagtatcggaacagaggtttccgtaggacattcttttctctgcgattatggatgtaatattcatattggtgataatgttacggtaaatatgggctgtgtgtttgtcgattgcaataagattacagttggtaataatgtactgattgctcctaatgtccagatttatacggcaacgcatcccattgatttgaatgaacggttaacacctgttgaggcaccggagggagttcgatatgtccgtcatacatttgcccttccggtcactgttgaagatggttgctggatcggtggtggagttattatattgcccggggttactattggtaagggaagtgttattggtgccggaagtgttgttaccacaaatgttcctgcaaacagtctggctgttggaaacccatgtagggtgattcgtcaaatcaataaatctgaaaattatgatccggctggtagcttttga

SEQ ID NO: 15724 - protein, 207 aa, Bacteroides fragilis NCTC 9343
MKTEMEKCLAGEWYDCHAPVFLELKGKTHRLLMRYNSLSYEQKEEKYAILKEMFGSIGTEVSVGHSFLCDYGCNIHIGDNVTVNMGCVFVDCNKITVGNNVLIAPNVQIYTATHPIDLNERLTPVEAPEGVRYVRHTFALPVTVEDGCWIGGGVIILPGVTIGKGSVIGAGSVVTTNVPANSLAVGNPCRVIRQINKSENYDPAGSF

SEQ ID NO: 15725 - DNA, 552 bp, Bacteroides fragilis NCTC 9343
  CDS (1)..(552): transl_table=11
atgacagaaatagaaaaaatgcgtagcggtgaattggcggatatgtcggcacctgaattacaggtgagatttgaacatgccaagaagttattggcacgaatgcggtgcttgagtacgtatgacgaaacttatcggggactacttgaagaattgatacctgatcttccggctacttccgttatttgcccgccttttcattgtgatcatggcgatggcatccgtttgggtgagcatgtatttgtgaatgccaattgtacgttccttgacggagcattcatcaccatcggaagtcatacattgataggtccgtgtgtgcaaatctatactccacatcatccaatggactatctggaacgccgtaaccccaaagagtacgcttatccggtaactattggcgaagactgttggattggtggcggggctgtcatttgtcccggcgtgacgataggtgaccgttgtgtgatcggagccggcagtgtggtgacaaaggatataccggacgattgtgtggcggtaggtaatcctgcacgtgttattaggtgtcggatgtaa

SEQ ID NO: 15726 - protein, 183 aa, Bacteroides fragilis NCTC 9343
MTEIEKMRSGELADMSAPELQVRFEHAKKLLARMRCLSTYDETYRGLLEELIPDLPATSVICPPFHCDHGDGIRLGEHVFVNANCTFLDGAFITIGSHTLIGPCVQIYTPHHPMDYLERRNPKEYAYPVTIGEDCWIGGGAVICPGVTIGDRCVIGAGSVVTKDIPDDCVAVGNPARVIRCRM

SEQ ID NO: 15727 - DNA, 588 bp, Bacteroides fragilis NCTC 9343
  CDS (1)..(588): transl_table=11
atggaaagtgaaaaagaaaaaatgggtacaggcaggctttacgatgctaattatgatacagaattgatagccgaacgtcaggcttgcaaagagttgtgttataccttaaatcatttgcctccctcgcagatagctgaacgggaggccattatccgtcggttgttttgcaagacgaaagaacgttttctgttggaacagcctttttattgtgactatggctataacattgagattggtgaaaatttttatgccaatatgaactgtgtcattctggatgaggctaaagtaacgttcggtgataatgtctttatcgctccatcctgtggcttctataccgcggggcatcctttggatgtggaacagagaaatcgagggttggaatatgcccgtcccattcgtgtcggaaataatgtgtggattggggcacaagtgtgcgtattaccgggcgtgacgattggtgacaacacagtgataggtgcgggaagtgtagtaaatagagatattcctgccaatgtgattgctgcgggtaatccttgtcgcgtgattcgggaaattacggaagaagataaaacaaaatatttattatag

SEQ ID NO: 15728 - protein, 195 aa, Bacteroides fragilis NCTC 9343
MESEKEKMGTGRLYDANYDTELIAERQACKELCYTLNHLPPSQIAEREAIIRRLFCKTKERFLLEQPFYCDYGYNIEIGENFYANMNCVILDEAKVTFGDNVFIAPSCGFYTAGHPLDVEQRNRGLEYARPIRVGNNVWIGAQVCVLPGVTIGDNTVIGAGSVVNRDIPANVIAAGNPCRVIREITEEDKTKYLL

SEQ ID NO: 15729 - DNA, 690 bp, Brucella abortus biovar 1 str. 9-941
  CDS (1)..(690): transl_table=11
atgatgaaccgatacaggactgccgggcaatatgcaaaaatttcagaaagctatgaaatgacgcagggcgacgacctccgtttccagaacggcgagccgcatattcattcgaccgcgcagctcaaatccgtcaagctggggcgctatgccgatatcggggaacgggtgatcctgcgtgaagtaacggtgggtgatttcacctatttcgagcgcaatggcgaggggatttatgccgaaatcggcaagttctgctccattgccgccaatgtgcggatcaatgcgcttgaacatccgatggagcggctcaccacgcataaggtgagctaccggcccaacgaatatttccgctatcttggcgttgatggcgattttcgcgccagacggcaggcaaggcgggtcgtgatcggcaatgatgtgtggatcggccatggcgcggttatcacgccgggcgtggtgattggccatggtgcggtgatcggggccaatgcggtggtgacaagggatgtcgcaccctatttagtggtgggcggcgttccggcgcggcttatccgcaaacggttcagcgatgcggtgatcgcgcgcctgcttgcgctttcctggtgggactggcctgtggaaaagctctatgaggctgttcccgatatgcaggcgcttgagatcgaggcgtttttggaaaagtggggcggatga

SEQ ID NO: 15730 - protein, 229 aa, Brucella abortus biovar 1 str. 9-941
MMNRYRTAGQYAKISESYEMTQGDDLRFQNGEPHIHSTAQLKSVKLGRYADIGERVILREVTVGDFTYFERNGEGIYAEIGKFCSIAANVRINALEHPMERLTTHKVSYRPNEYFRYLGVDGDFRARRQARRVVIGNDVWIGHGAVITPGVVIGHGAVIGANAVVTRDVAPYLVVGGVPARLIRKRFSDAVIARLLALSWWDWPVEKLYEAVPDMQALEIEAFLEKWGG

SEQ ID NO: 15731 - DNA, 690 bp, Chloroflexus aurantiacus
  CDS (1)..(690)
atgcgacaacgactggtacggctctggactgactggtggatgcggcaggccggccctgggcgctgggggaaagtggcgacatggctggcagcgtggccgcacgcgccatacaaagcacgggtcgcgctcgctcatcactatccacagggctatgtttcgccatcggcccaattgagtggtcgtcgtatccgccgagggcggcatgtctttatcggcgacggcgttgtgatctatcagcgtcaggatggcggccagattgatctgggtgattacgtagaactccaccgcgatacgatcatcgaatgtggtcgtggtggtagtctgcgaatcggcgaacgaaccggtattcagccccgctgtcaactatcggcgtatattgaacagattgtcatcgggcgtggctgccagattgcaccacaatgtgcattctacccctacgaccacggtacagcacccggtcagccgatagggagccagcccctgactagcaaggggcctatcgtgctggaagatgatgtctggttgggttacggggttgtggtgctgtcgggggtcacgattggtagcgggacggtggtgggagccgggagtgttgtaacccgcagtctgccggcaggggtgattgccgccggtattccggcgcgtattgtacgtgagcgaactgagcaggatgtggaacgtacgaggtga

SEQ ID NO: 15732 - protein, 229 aa, Chloroflexus aurantiacus
MRQRLVRLWTDWWMRQAGPGRWGKVATWLAAWPHAPYKARVALAHHYPQGYVSPSAQLSGRRIRRGRHVFIGDGVVIYQRQDGGQIDLGDYVELHRDTIIECGRGGSLRIGERTGIQPRCQLSAYIEQIVIGRGCQIAPQCAFYPYDHGTAPGQPIGSQPLTSKGPIVLEDDVWLGYGVVVLSGVTIGSGTVVGAGSVVTRSLPAGVIAAGIPARIVRERTEQDVERTR

SEQ ID NO: 15733 - DNA, 564 bp, Chloroflexus aurantiacus
  CDS (1)..(564)
atgaaagagcgtatctatcagaaagtattacgtgtattaggcgaggagttaggagctgcccaaccacgactctggcttgccggatggctgatccacctactgccacgctataccgcttcacggctgcgtccggtgctgctaaggctggccggttttcggattggttacggtaccgttatcgttggaccactcaggcttcacggctttgggggaatccacaacaggcttcagatcggatcacactgtttcatcaacaccgattgtttcttcgatttgaatgatcacattactattgccgattacgtaagtcttgggcatgaagtcatgattctcaccacgtcacatcagatcagtagtgctgcacatcgagccggttcgctaactaaagcgccggttgtgatcgagaacggagcatggatcggtgcccgcgctctaatcctccccggtgtgcgaattggtgccggtagtatcgtcgctgccggtagtgtcgtgaatcggtcggtaccgcccaatacgctggttggtggtgttccggctaagccaattcgtcagcttgatgagtga

SEQ ID NO: 15734 - protein, 187 aa, Chloroflexus aurantiacus
MKERIYQKVLRVLGEELGAAQPRLWLAGWLIHLLPRYTASRLRPVLLRLAGFRIGYGTVIVGPLRLHGFGGIHNRLQIGSHCFINTDCFFDLNDHITIADYVSLGHEVMILTTSHQISSAAHRAGSLTKAPVVIENGAWIGARALILPGVRIGAGSIVAAGSVVNRSVPPNTLVGGVPAKPIRQLDE

SEQ ID NO: 15735 - DNA, 615 bp, Lactobacillus gasseri
  CDS (1)..(615)
atggaagaaaatactaaaaaaatgctcgccggtttaccatatcgtccagatactaaagagttaagtagaatttcaatgaaggcccatcgcttaagcagggattataatcaaactgccgatgaagataaagaagtcagaaaagcaattattgatgaactttttccagaccatgaaacaggagtatatttacaaggaccaattgaggttgactatggaaaatttactaaactaggtaaaaatttctatgccaatttcaacttaactattttagatacttgccctgtaacgataggtgataatgtaatgtgcggtccaaatacctcattagtaactccgcttcatcccttattacctgagcagcgtaatgcacgtcttcaaaaagatggaaaaattgctgatatcgaatatggtgctcccattacaattggcgataactgctggttagcaagtaatgtaactgtttgtcccggtgtaactattggtaagaattgtgttatcggggcagggagcgtagtaactaaagatatcccagataattcacttgtcttaggagttccaggtcgggtagtaagaaaaatcactgaaaaggatcgcttagataattatccctactaa

SEQ ID NO: 15736 - protein, 204 aa, Lactobacillus gasseri
MEENTKKMLAGLPYRPDTKELSRISMKAHRLSRDYNQTADEDKEVRKAIIDELFPDHETGVYLQGPIEVDYGKFTKLGKNFYANFNLTILDTCPVTIGDNVMCGPNTSLVTPLHPLLPEQRNARLQKDGKIADIEYGAPITIGDNCWLASNVTVCPGVTIGKNCVIGAGSVVTKDIPDNSLVLGVPGRVVRKITEKDRLDNYPY

SEQ ID NO: 15737 - DNA, 606 bp, Magnetospirillum magnetotacticum MS-1
  CDS (1)..(606)
atggccgagctggccgccacggacgaggacctccgcagcctgctctccggcgggtggctgcgctaccgcacgtcgcccgcgctgcaggagctgacccgcgacgcgcacgcgacgtgcgaccgcatcgggcgcgtgtacttcgaggacgtcgacgaggcacgccgcctcttccaccggctcgtccccggcgccgaggaggggatcgacttccgcccgccgctgacgatcgactacggcgaccggctgctgatcggcgcgcgcaccttcatcaacgccgacttcatggtcatcggcggcggcctcgtcacgatcggcccggactgcctcatcggcccgcgctgctcgatctacacgccgaaccacgccgaggacgtcgtccgtcgccgcgagggctgggagcgccccgagcccgtcacgatcgggagcaacgtgtggatcggcggctcggtcaccctcacgcccggcgtgacgatcggcgacgacagcatcatcggggcgggatccgtggtcacgcgggacatccccgcgggcgtcgtcgcggtgggcaacccgtgccgacccgcccgcgcgatcacgacggaccccgcggacaccaccgcccgctga

SEQ ID NO: 15738 - protein, 201 aa, Magnetospirillum magnetotacticum MS-1
MAELAATDEDLRSLLSGGWLRYRTSPALQELTRDAHATCDRIGRVYFEDVDEARRLFHRLVPGAEEGIDFRPPLTIDYGDRLLIGARTFINADFMVIGGGLVTIGPDCLIGPRCSIYTPNHAEDVVRRREGWERPEPVTIGSNVWIGGSVTLTPGVTIGDDSIIGAGSVVTRDIPAGVVAVGNPCRPARAITTDPADTTAR

SEQ ID NO: 15739 - DNA, 702 bp, Leuconostoc mesenteroides subsp. mesenteroides ATCC 8293
  CDS (1)..(702)
atggctgaaaacgaagcacaaaaactaattaatttcattgcaaatgcaaaaaaaattaccccagtaaaagttacatataaaggtacattggcaactgaagtgccagatactgtgcaacaatttggagatgagtcatttggacaattaattggcgactggtctgaaattgaattgttaattaagaatctaccatcagaagatgtatttattgaaaatgattcacgtaactctgccgttcctttgcttgataaaaaagaaattaatgctcgcattgaaccaggtgccattattcgcgatcaagttgaaattggtgacaatgcggtgattatgttgggcgcagtgattaatattggtgcagagattggtgctaacacaatgattgatatgggtgctgtacttggcggccgtgccattgttggtgaaaattctcatattggtgctggcgcggtattagctggtgtgattgaaccagcatctgcccaacctgttcgcatcggaaataacgttctagttggcgctaatgccgtcgttattgaaggcgtacaggtcggtgacggcgcagtagttgcggctggagcgattgtcacaaaggatgtaccagccaatacagtagttgcgggtgttcctgcaaaagtcattaaggagattgattcgaagacgcaacaaaagactgcgttaattgacgcattgcgaggcttataa

SEQ ID NO: 15740 - protein, 233 aa, Leuconostoc mesenteroides subsp. mesenteroides ATCC 8293
MAENEAQKLINFIANAKKITPVKVTYKGTLATEVPDTVQQFGDESFGQLIGDWSEIELLIKNLPSEDVFIENDSRNSAVPLLDKKEINARIEPGAIIRDQVEIGDNAVIMLGAVINIGAEIGANTMIDMGAVLGGRAIVGENSHIGAGAVLAGVIEPASAQPVRIGNNVLVGANAVVIEGVQVGDGAVVAAGAIVTKDVPANTVVAGVPAKVIKEIDSKTQQKTALIDALRGL

SEQ ID NO: 15741 - DNA, 561 bp, Nostoc punctiforme PCC 73102
  CDS (1)..(561)
atggaaaaaaccgaaaaacagaaaatgctcgcaggcgaattatatctggcggaagatccagaattggctgccgaaaataaacgagctagtcgtctgttgcgaaggtacaattctacaactgaagaacagcaagatcaacggcagcaaattttgcaagagttatttggaaacataggtgacaaagtatcaattgtgccaccatttcactgtgattatggtggtaatattttcgtcggcgacaaattttatatgaactatggctgtgtaattttagactgcaatccagttcacattggtgaaaatgtcctgtgcgctccttatgtacaaatttatactgcttatcatcctacagagccagaaattcgcctttctggtagagaattagctgccccaattaacattggtaataatgtctggattggtggcagtgcaattatttgtccaggtgtcacgattggtgataacacaaccattggtgctggcagtgtggttgtcaaagatatacctgagaatgttgtcgctgcgggtaatccctgccgcgtcattcgatatttatcctag

SEQ ID NO: 15742 - protein, 186 aa, Nostoc punctiforme PCC 73102
MEKTEKQKMLAGELYLAEDPELAAENKRASRLLRRYNSTTEEQQDQRQQILQELFGNIGDKVSIVPPFHCDYGGNIFVGDKFYMNYGCVILDCNPVHIGENVLCAPYVQIYTAYHPTEPEIRLSGRELAAPINIGNNVWIGGSAIICPGVTIGDNTTIGAGSVVVKDIPENVVAAGNPCRVIRYLS

SEQ ID NO: 15743 - DNA, 594 bp, Nostoc punctiforme PCC 73102
  CDS (1)..(594)
atgaaagagatcaaaaataaaattacaaataaattagagcgattattggaacaatggttagtacctcgtctagtacgctggggagaatatctagaaactaaaattaggcgctacaagcatcaagaactcaagagtaaattaaaattttctggctcaggtctacgatttaagcgagatattaaaattgaccatccgcaaaatgtgtctctgggaaataaagtctatatcggcccggatgtcttcttagatggacgtggtggaatcacaattggcgacaataccacactcggatttaatgttattattctctctgcaaaccacgactatcaaagtaatgatttgccttatgaacataatgtctacattcataaacctgttgtcattggccgcaatgtttggattggcggaaatgttctaattattccgggagttactattggagatggtgcaattgtggcggctggtactgttgtaactgcgaatgttgaacctttagcaattgttggaaatcaaccgatgagaacaattaaataccgcgacaaggaacattatgaaaaactcgctaacaagcaagagaatcaggatatctcataa

SEQ ID NO: 15744 - protein, 197 aa, Nostoc punctiforme PCC 73102
MKEIKNKITNKLERLLEQWLVPRLVRWGEYLETKIRRYKHQELKSKLKFSGSGLRFKRDIKIDHPQNVSLGNKVYIGPDVFLDGRGGITIGDNTTLGFNVIILSANHDYQSNDLPYEHNVYIHKPVVIGRNVWIGGNVLIIPGVTIGDGAIVAAGTVVTANVEPLAIVGNQPMRTIKYRDKEHYEKLANKQENQDIS

SEQ ID NO: 15745 - DNA, 702 bp, Nostoc punctiforme PCC 73102
  CDS (1)..(702)
atgcctaacgagcaatatttttcaaaattgcagcgtgtgcaagaacttgtagtaactactgtgttaggggatcttcctgcacttcttctggggccaaagttgcgtagtttaggatatgggagtatttttgcccaaataggcagcccaatttatattcaaaatggtgttgaatttaacggtacttcttgtattgagataggcagtggagtctatattttcaagggtgtacggatggatgctagaggacacaaaaataataaaattcatctaggcaatagagtagctattgagcgtaacgttgatatagggtgtttgaaagatacgtgtatacatattgatgaagacaccttcattgctcccaacgtgtgtattgaggggccaggagacattaaaattggcaaacactgcatgattgctgcccactccgggatatatgccaataatcataattttgccgatccgatggagctaattaaataccaaggtgttactcgcaagggaattgtgattgaagatgactgttggctaggtcatggagtaacggtattagatggcgttaccatcggcaaaggtagtgttattggtgcaggagcagttgtcaataaagatattcctcctttctccgttgctgtaggtatacctgcacgagtagtcaaaaaccgaattagtaaagacctagcaaaagttcaaactgagaaatag

SEQ ID NO: 15746 - protein, 233 aa, Nostoc punctiforme PCC 73102
MPNEQYFSKLQRVQELVVTTVLGDLPALLLGPKLRSLGYGSIFAQIGSPIYIQNGVEFNGTSCIEIGSGVYIFKGVRMDARGHKNNKIHLGNRVAIERNVDIGCLKDTCIHIDEDTFIAPNVCIEGPGDIKIGKHCMIAAHSGIYANNHNFADPMELIKYQGVTRKGIVIEDDCWLGHGVTVLDGVTIGKGSVIGAGAVVNKDIPPFSVAVGIPARVVKNRISKDLAKVQTEK

SEQ ID NO: 15747 - DNA, 675 bp, Bifidobacterium longum DJO10A
  CDS (1)..(675)
atgatgaccgaagacaagccgatcgccaagccgattatcgatgatgcgacgcgcgagaaaatggcgcttatgttctctggcgaggtctacctgccggatgatgtggacggcttttttgatctgcaggccgcccagcgtgatctccagctcgaactcaacgccacgccgctgaccaacccgaagcgccgtaccgaactcatgcaggcgttcttcggcgcggcgggggagggtctgtacctcgaatgcccggtgtatgcgaactggggctgcaatacttattggggcgagcgctgttacgccaacttcaacctgacgctggtggacgatggtgagatcttcatcggatcccacaccatgatcggccccaacgtcacgcttgtagccaccggccatcccgtgcgtccggacctgcgctatcagggtgcccagtattcgttgccagtccacatcggcgagaacgtctggatcggcgcgaatgtcaccgtgctgcccgggggcaccatcggggacaacgcggtcattggcgccaactcgctggtcaccaaggacatccccgccaacacggtcgcctatggcagcccgtgcaaggtaattcgcgaaatcaacgaacgcgacgacgtctactactggcgcgaccgccaattcagtgagcgttttaagctcaaagagcagtag

SEQ ID NO: 15748 - protein, 224 aa, Bifidobacterium longum DJO10A
MMTEDKPIAKPIIDDATREKMALMFSGEVYLPDDVDGFFDLQAAQRDLQLELNATPLTNPKRRTELMQAFFGAAGEGLYLECPVYANWGCNTYWGERCYANFNLTLVDDGEIFIGSHTMIGPNVTLVATGHPVRPDLRYQGAQYSLPVHIGENVWIGANVTVLPGGTIGDNAVIGANSLVTKDIPANTVAYGSPCKVIREINERDDVYYWRDRQFSERFKLKEQ

SEQ ID NO: 15749 - DNA, 633 bp, Bifidobacterium longum DJO10A
  CDS (1)..(633)
atggcgcacgatctcgaacaactcaagcaagatcacccggatgtggcgaaactgttcgccgatgactggttgcagtaccgtaagtcggagattttgccggaacttacgcgcgaggcgcagtccacgtgcgaccgcatcaatcgcatctactttgaagacaccgccgaagctgagcgactgttccgcgaactcgtgcccgaggccggcgagggcgtggacttccgcccgccaatccggcttgattacgggctgggcctgaaaatcggagaccgtacgttcatcaacatggacctgctgattgtgggcggcggcccgatctccatcggctccgattgcctgatcggcccgcgcgtgagcatctatacgccaaaccacgccatcgcccgcaagcctcgactggaaggctggcagcacaacgccgacgtgaccatcggcaacaatgtgtggctgggcggcaatgtggtgatctgccccggcgtcaccatcggagacaactcgattatcggtgcgggcgcagtcgtcacccacgacattcccgccgattccatcgctgtgggcaatccgtgccatgtgattgccgaagtcccggatgactggactcctgaagagcgggccgctgccgagggtcggtag

SEQ ID NO: 15750 - protein, 210 aa, Bifidobacterium longum DJO10A
MAHDLEQLKQDHPDVAKLFADDWLQYRKSEILPELTREAQSTCDRINRIYFEDTAEAERLFRELVPEAGEGVDFRPPIRLDYGLGLKIGDRTFINMDLLIVGGGPISIGSDCLIGPRVSIYTPNHAIARKPRLEGWQHNADVTIGNNVWLGGNVVICPGVTIGDNSIIGAGAVVTHDIPADSIAVGNPCHVIAEVPDDWTPEERAAAEGR

SEQ ID NO: 15751 - DNA, 609 bp, Desulfovibrio desulfuricans G20
  CDS (1)..(609)
atgctgccgcgtcctgaaacgctctgcctgcgcgctgcgctgcgcgacaacgccgaagaactgtggacatggcttgcagccgtgccgcccaccgcagcgggcaccctgctgcgtatggccatgctgcggccgctgttcggcagcggcgcgccccgtatgggaacaggctgcctgctgcggggctgccgcaacatgcactttgcgcagcaggtgcgcatcatgccgcgctgcagcctgtacgcccgcggcggcagcatcagcatcggcagccgcacggcactcaacagcggggtatttgtggacgccgaagacggcggtaccataaccataggcagcgactgcggcatagggcccggcaccgtcatccgtgcggcaaaccacaggttcggcaaagccggtattcccatcagcatgcaggggcacaggccgggccgcatagtcatagaggatgacgtctggataggcgccaactgcaccattttgcccgatgtacgcataggcaccggcgcagttgtgggcgcaggagcagttgtgacgcgcgatgtgcccccccataccgtggccaccggcgtaccggcgcgtgtcaccggcagccgctccgaccgctga

SEQ ID NO: 15752 - protein, 202 aa, Desulfovibrio desulfuricans G20
MLPRPETLCLRAALRDNAEELWTWLAAVPPTAAGTLLRMAMLRPLFGSGAPRMGTGCLLRGCRNMHFAQQVRIMPRCSLYARGGSISIGSRTALNSGVFVDAEDGGTITIGSDCGIGPGTVIRAANHRFGKAGIPISMQGHRPGRIVIEDDVWIGANCTILPDVRIGTGAVVGAGAVVTRDVPPHTVATGVPARVTGSRSDR

SEQ ID NO: 15753 - DNA, 558 bp, Desulfovibrio desulfuricans G20
  CDS (1)..(558)
atggatgtgactgaaaaggaaaaaatgatcgcggggcagttgtataatgccggcgacgcggagctgacagcgctgaggctggcgtgccgcaggctgctgcactcgtttaatcatgcgcatcctgacaatgccgcggatgcggccggtgtgctggcgcagctgttgggcggtagcggggcaggtctgcagattatgccgccgtttcattgcgattacgggttcaatattaccgtaggctgcaatgtcttcatgaattataattgtatcattctggatcccgcaccggttcacatcggcgacaatgtcatgttcggcccgtctgtgtcgctgtatactgcaacgcaccccgcagatgctgccaagcggcttgaagggccggagctggggcttgccatcagcgtgggggacaatgcgtggataggcggggcagctatcatctgtcccggtgtgcaggtgggccgcaacgccgttgtcgccgcgggcgcggtagtaaccagagacgtgccggacaatgtggtggtggcaggcaatccggcgcggataatcaggcagctgtag

SEQ ID NO: 15754 - protein, 185 aa, Desulfovibrio desulfuricans G20
MDVTEKEKMIAGQLYNAGDAELTALRLACRRLLHSFNHAHPDNAADAAGVLAQLLGGSGAGLQIMPPFHCDYGFNITVGCNVFMNYNCIILDPAPVHIGDNVMFGPSVSLYTATHPADAAKRLEGPELGLAISVGDNAWIGGAAIICPGVQVGRNAVVAAGAVVTRDVPDNVVVAGNPARIIRQL

SEQ ID NO: 15755 - DNA, 576 bp, Anabaena variabilis ATCC 29413
  CDS (1)..(576)
atgatttttgctcacataggcagtcctgtatatattcaacatggagtagaatttaccaacgcttctaatattgaaattggcaatagtgtacatctatttaaaggtgtacgtcttgatgctaaagggcatccaaacaatagaatttatttggcagatggagtggcaattgagcgcaacgttgatatagggtgtctggaaaatacgtgtattcacattgacgtggaaactttcattgcttctgatgtttgtatttctgggccaggagacatcacaattggtaagcgttgcatgattgctgctcattcaggtatatatgctaacaatcacaactttacagatccgatattgccgattaaataccaaggtgttacttgtaaagggatcgtgattgaggatgattgttggctaggacatggagtaacggtattggatggtgtgaccattggtaaaggaagtgtcattggtgcaggggcagtcgtcaccaaagatattcccccattctccgtagctgtaggcgcacctgcacgagtaattaaaagccgtgttgcccaggatttagttacatctggagattag

SEQ ID NO: 15756 - protein, 191 aa, Anabaena variabilis ATCC 29413
MIFAHIGSPVYIQHGVEFTNASNIEIGNSVHLFKGVRLDAKGHPNNRIYLADGVAIERNVDIGCLENTCIHIDVETFIASDVCISGPGDITIGKRCMIAAHSGIYANNHNFTDPILPIKYQGVTCKGIVIEDDCWLGHGVTVLDGVTIGKGSVIGAGAVVTKDIPPFSVAVGAPARVIKSRVAQDLVTSGD

SEQ ID NO: 15757 - DNA, 561 bp, Anabaena variabilis ATCC 29413
  CDS (1)..(561)
atggaaaaaaccgaaaaacaaaaaatgcttgcaggtgaattatacctagcagatgatccagaattagcagccgagagtaaacgagctagtcgcctgttgcgaatgtataacgccacaaccgaggaacaaccagaacaacgcaggcaaattttacaagaattatttgcccagataggcgaaaaaatcaccatagtaccgccgcttcattgtgattacggtagcaatatctacgtaggtaatggagtatatatgaactatggctgtgtaattttagattgcaataaggtagaaatcggggataatgtcttgttcgcgccctacgtgcagatttatactgcctaccatcccacagaaccggaaattcgcctatctggaagagaattagctgccccaattaaaattggtaataacgtctggattggtggtggtgtaattatttgtcctggggtaacaattggggacaatacaacaattggggctgggagcgtagttgtaaaagatatccctgctaacgttgtagcggttgggaatccttgtcggataattcgcaatttaacctaa

SEQ ID NO: 15758 - protein, 186 aa, Anabaena variabilis ATCC 29413
MEKTEKQKMLAGELYLADDPELAAESKRASRLLRMYNATTEEQPEQRRQILQELFAQIGEKITIVPPLHCDYGSNIYVGNGVYMNYGCVILDCNKVEIGDNVLFAPYVQIYTAYHPTEPEIRLSGRELAAPIKIGNNVWIGGGVIICPGVTIGDNTTIGAGSVVVKDIPANVVAVGNPCRIIRNLT

SEQ ID NO: 15759 - DNA, 576 bp, Actinobacillus pleuropneumoniae serovar 1 str. 4074
  CDS (1)..(576)
atgcaatacgctgttgatttacctatgaatagtttgattgctaagggtagtcaaatttttgaagatattcatcgaattgtagcagaaaatgccccgaaaattgccgaattatcaggaaagtttcaaacacaagctgaaatccaacgtctattgagcgaaattacccaatcgcatattgatgaaactttacacgttaatttgccgttatattgtgatttcggtcgtcatcttcgcattggtaaaaatgtatttattaataccgcttgtgtgtttaccgacttgggagggattacacttgaagataatgttttgcttgccccgagagtaaatattattacggttaaccacccaacggatccgaaaactcgtcgtggtgtgatcgccaaacctgtaataattaagcaaaatgcttggattggtgctggagctacgattttacctggtgttacggttggtgaaaatgcgattgttgcggcaggtagtgtggttactaaagatgtaccagcaaatacgcttgttgcgggagtaccagctaaaatcatcaaaatgattgatgaggttagcgatgaaaattaa

SEQ ID NO: 15760 - protein, 191 aa, Actinobacillus pleuropneumoniae serovar 1 str. 4074
MQYAVDLPMNSLIAKGSQIFEDIHRIVAENAPKIAELSGKFQTQAEIQRLLSEITQSHIDETLHVNLPLYCDFGRHLRIGKNVFINTACVFTDLGGITLEDNVLLAPRVNIITVNHPTDPKTRRGVIAKPVIIKQNAWIGAGATILPGVTVGENAIVAAGSVVTKDVPANTLVAGVPAKIIKMIDEVSDEN

SEQ ID NO: 15761 - DNA, 501 bp, Burkholderia cepacia R18194
  CDS (1)..(501)
atggtggccgaggtcaagcgggcgatgtcgatcgccgtgcggatcaatcgcctgacattcgacgatgccgccgaggttcgcacattattcggagaactgatcggcacgcaggtggacgacggcttcgtgttgatcccgccgttccatgcgacaggcggcaccggcatgaaaatcgggcgcaacgtgttcgtcaaccagaactgcacgttctacgatctcggcgggctcgagatcggcgacgacgtgatgatcgggccgaacgtcagcctcatcacgtccggccatcccgtcgagccttcgcggcggcatgacgccgttatcgcgaagccgatcgtgatcggacggaacgtctggatcggcgccggtgcgacgatcatcggcggtgtgacggtaggcgagaattcggtggtcgcggccggtgccgtcgtcacgcgggatgttccaccgaacgtgttggtcggcggcaatccggcagcggtcattcggtcgatcgacgagtaa

SEQ ID NO: 15762 - protein, 166 aa, Burkholderia cepacia R18194
MVAEVKRAMSIAVRINRLTFDDAAEVRTLFGELIGTQVDDGFVLIPPFHATGGTGMKIGRNVFVNQNCTFYDLGGLEIGDDVMIGPNVSLITSGHPVEPSRRHDAVIAKPIVIGRNVWIGAGATIIGGVTVGENSVVAAGAVVTRDVPPNVLVGGNPAAVIRSIDE

SEQ ID NO: 15763 - DNA, 609 bp, Burkholderia cepacia R18194
  CDS (1)..(609)
atgaaaagcaggatcaaggcccgcctgctagcgtcgtcgacgtatttttttctggccgcgctcaagtactacatcggcaacaacttcattgcgcgcatgccgattgaaagcgtccgcaacttctactatcgacgcgtgctgggtatcgtcatcggccaacgaacgcacgtcagcatgcggcagttcttcaccgggtaccacacacgctgcaacgtgcgcatcggcgacaactgcgtgctcaatcgtgagatctacctggacggtcgcacgggcatcgagatcggaaacaacgtcaacatctcgttccagtgctgccttctcagcctgcatcacgatcacaaccaccctggtttcatgtcgatcggcggcgtcgtgaccatccacgaccacgcatggctgggcgcgcgcgccattatcctgccaggtgtaacgatcggcaaaggcgcagtcgtcgcagccggcgcggtcgtcacgaaggacgtcccggatttcaccgtagtcggtggtgtgcctgcaaaaatcatcggtcaacgcaatcccgacattgcctatctgaccgacttttctcctttcttcgacaccgacgtgtttgacgaatcccgtggctaa

SEQ ID NO: 15764 - protein, 202 aa, Burkholderia cepacia R18194
MKSRIKARLLASSTYFFLAALKYYIGNNFIARMPIESVRNFYYRRVLGIVIGQRTHVSMRQFFTGYHTRCNVRIGDNCVLNREIYLDGRTGIEIGNNVNISFQCCLLSLHHDHNHPGFMSIGGVVTIHDHAWLGARAIILPGVTIGKGAVVAAGAVVTKDVPDFTVVGGVPAKIIGQRNPDIAYLTDFSPFFDTDVFDESRG

SEQ ID NO: 15765 - DNA, 528 bp, Listeria monocytogenes str. 4b H7858
  CDS (1)..(528): transl_table=11
atgtatgatcctagcgacagagagctcgcacacggaagaaatcgtgcacgtaagttctgcagagagattaacgatgcgatggattcagagtcccgtgcaagcgtgctgaagcgcctattcggcggaacaaaagagaatgtatatgtggaacctgattttcgtgttgattacggttctaatatatatgtaggcgaaaatttttatgctaattttgattgtgttattttagatgtttgcgaagtacatattggtgataattgtatgatggcgcctggagttcatatttatacggcaacgcatccgcttgatccagtagaacgtaatagtgggctagagcttggtaaaccagttgaaattggcgataatgtttggattggtggtcgggcaattattaatccaggggttaagcttggaaataatgtcgtggttgcttcaggcgcagttgtaacgaaaagcttccccgataatgtcgttcttgccggcaacccagcacgcgttattaaaacaattgaggttgaggaaaaatga

SEQ ID NO: 15766 - protein, 175 aa, Listeria monocytogenes str. 4b H7858
MYDPSDRELAHGRNRARKFCREINDAMDSESRASVLKRLFGGTKENVYVEPDFRVDYGSNIYVGENFYANFDCVILDVCEVHIGDNCMMAPGVHIYTATHPLDPVERNSGLELGKPVEIGDNVWIGGRAIINPGVKLGNNVVVASGAVVTKSFPDNVVLAGNPARVIKTIEVEEK

SEQ ID NO: 15767 - DNA, 570 bp, Listeria monocytogenes str. 4b H7858
  CDS (1)..(570): transl_table=11
atgatagaacaagatttacagaaaagactagtcggccaagaaattctccaagggtcggatttgttagatgaaattcacaaagtaaagcaaaacaatgaacaacttatcatcgaactaaacaccaagtaccactcaaaaaaagaagtgattaaatatctcagtgacatcactggaaaaccagtcgatccatcagtcgatgtctcacttcctttttatagcgacttcgggaaacatattacttttgggaaaaatatctttatcaatttaaatgtaactttcgtggatttgggtgggattacaattgaagataatgttttaattggcccaggagcaagacttgtgaccgtcaaccatttagttagcccgaaaaaaagacgtggcttaagagtagccccaatttgtgtgaagaaaaacgcctggattggcgcaaacgcaacgatattatcaggcgtaacaatcggcgaaaatgctatcgttgctgcggatgctaccgtcacaagagatgtcccagcaaacgttatcgtcgccggaagcccagccaaacaaattcgtaaaattatcgaggaataa

SEQ ID NO: 15768 - protein, 189 aa, Listeria monocytogenes str. 4b H7858
MIEQDLQKRLVGQEILQGSDLLDEIHKVKQNNEQLIIELNTKYHSKKEVIKYLSDITGKPVDPSVDVSLPFYSDFGKHITFGKNIFINLNVTFVDLGGITIEDNVLIGPGARLVTVNHLVSPKKRRGLRVAPICVKKNAWIGANATILSGVTIGENAIVAADATVTRDVPANVIVAGSPAKQIRKIIEE

SEQ ID NO: 15769 - DNA, 564 bp, Bacillus cereus G9241
  CDS (1)..(564): transl_table=11
atgaaaacggagaaagaaaagatggtggcaggagaaatgtatattgcggatgacgaagaattggtggctgatagggtggaggcaaaacgtttaacacgcctttataacgaggcgatggagacaggagatgagaggcgttttacgttgttaaatcagcttttaggttcttcagctgatgggaaatcccaaattaatcctgattttcgttgtgattacggctacaatatccatgttggaaagggctttttcgcaaatttcaattgtgtgattttagatgtttgtgaagttcgaatcggtgataattgtatgtttgcacctggtgtccacatttacactgctacacatcctttacacccagtagagcggaattctggcaaagaatatgggaagcctgtaaagattggtaacaatgtttgggttggcgggggcgctattattaaccctggtgtttcaattggagataacgctgtaattgcttcaggggcagttgtgacaaaagatgtacctaataatgtagtagttggtggtaacccagctaaagttattaaaacgatagacttatag

SEQ ID NO: 15770 - protein, 187 aa, Bacillus cereus G9241
MKTEKEKMVAGEMYIADDEELVADRVEAKRLTRLYNEAMETGDERRFTLLNQLLGSSADGKSQINPDFRCDYGYNIHVGKGFFANFNCVILDVCEVRIGDNCMFAPGVHIYTATHPLHPVERNSGKEYGKPVKIGNNVWVGGGAIINPGVSIGDNAVIASGAVVTKDVPNNVVVGGNPAKVIKTIDL

SEQ ID NO: 15771 - DNA, 558 bp, Bacillus cereus G9241
  CDS (1)..(558): transl_table=11
atgaaaacagaaaaagaaaagatgatactaggcgaaatgtacataccagctgatccagttttagttcaagagagggagcaagctcgtatactaacgagaaaattaaatgaaacgccaaaagtacaattaaaagagcgtagcgaaatcgtaaaagaactattcggaacgactggagataatattcatcttgaatcttcttttagatgtgattatggatataacattcacgtgggcgaaaatttttacgcgaactttgactgtaccattttagatgtatgtccagtaacaatcggagtgaactgtatgttagctccaggtgttcacatttatacagcaacacatccgcttgatccagtagagcgcataagcggattagaatacggaaaaccagtaacaattggtgataacgtatggattggcggaagagcgattattaatccaggtgtaacaattggagacaatgcggtgatcgcatctggcgccgttgtaacgaaagatgtgccggacaatgtagtagttggcggaaatcctgcaaagattattaaaaaaataaaataa

SEQ ID NO: 15772 - protein, 185 aa, Bacillus cereus G9241
MKTEKEKMILGEMYIPADPVLVQEREQARILTRKLNETPKVQLKERSEIVKELFGTTGDNIHLESSFRCDYGYNIHVGENFYANFDCTILDVCPVTIGVNCMLAPGVHIYTATHPLDPVERISGLEYGKPVTIGDNVWIGGRAIINPGVTIGDNAVIASGAVVTKDVPDNVVVGGNPAKIIKKIK

SEQ ID NO: 15773 - DNA, 588 bp, Burkholderia fungorum LB400
  CDS (1)..(588)
atgaaccggatcttgctggcctggtatcggctcaagacccgcttctggtacgcccacgtgttcgagtcgatcggcgcgaagacgacgatcttccgtcccatgctgctcgtcaacgtgcagtacgcgtcgcttggcgagcgtgtgctgatccggcccggcgcgcgcatcgaacttgtcgtgacggacccggccgcgccaccacggctcaccataggcagccgggtcaatatcgagcagaacgttcacatcgtatgcgggtcatcgatcgagatcggcgacggtgtgacgattacgggcaacgtcgccattgtcgacgtcgaacatccctacgaggacgtcaacgaccccacgcgcattggcgaccggattcgcacgcggggcaattacgtgcggatcgggcagggcgcattcatcggctttaacacaatcgttctgccgaacgtgaagatcggccgccacacggtggtgggcgcgcattcagtagtgactcgcgatgttcctgattactgcgtggtctcgggaaatcccgcgcggatcatgaagcgctacaacttcgaaacgcaatgctgggaaagggagaagcaatga

SEQ ID NO: 15774 - protein, 195 aa, Burkholderia fungorum LB400
MNRILLAWYRLKTRFWYAHVFESIGAKTTIFRPMLLVNVQYASLGERVLIRPGARIELVVTDPAAPPRLTIGSRVNIEQNVHIVCGSSIEIGDGVTITGNVAIVDVEHPYEDVNDPTRIGDRIRTRGNYVRIGQGAFIGFNTIVLPNVKIGRHTVVGAHSVVTRDVPDYCVVSGNPARIMKRYNFETQCWEREKQ

SEQ ID NO: 15775 - DNA, 555 bp, Thermobifida fusca
  CDS (1)..(555)
atggcagggcagaaggaacgcatgctcgcaggcgaactgtacattgccgacgatcctgagctggcggctgacctgcggcgggcgatgaagctgatggagcggttcaacacggctcctgcggaggacgctgacgggcggcgggcgatcctggcggaactgttgggtgaggtcggggaggatgtggagatccgcccgccgctgtacgtggactacggctaccagatcagtatcggaccgcggacgttcgtcaatttcggggcggtcatgttggacgtggcgccgatccggatcggcgctgacacgcagatcggcccgaacgtgcagttgttgacccccacccatccgttggatcccgagttgcggcgcgccaagtgggaggcggccgagcccatcacgatcggggagaacgtgtggctgggcggcggcgtcatcgtctgcccaggggtgacgatcggcgacaacacggtggtgggcgcgggggcggtggtcacccgtgaccttccggcgaacgtggtcgcggtggggaatcctgcgcgggtgatccgcgagctttag

SEQ ID NO: 15776 - protein, 184 aa, Thermobifida fusca
MAGQKERMLAGELYIADDPELAADLRRAMKLMERFNTAPAEDADGRRAILAELLGEVGEDVEIRPPLYVDYGYQISIGPRTFVNFGAVMLDVAPIRIGADTQIGPNVQLLTPTHPLDPELRRAKWEAAEPITIGENVWLGGGVIVCPGVTIGDNTVVGAGAVVTRDLPANVVAVGNPARVIREL

SEQ ID NO: 15777 - DNA, 513 bp, Cytophaga hutchinsonii
  CDS (1)..(513)
atgtatgctcaaaatattgtcatcggaaaatttgttaaactggatgatggggtttatttaagcggattgggaaaaggtaagttgactttagcaaataatgtgagtattggtgcctatagtagaattattgtatcaactagtttaaataatattggggaatatattcatatcggaaataatgttggtattggagagtttgcttatttaggcggtggtggcggcttagagattggtgatgattgtatcataggacaatacttaagttgccatccggaaaatcataattatgattctgttgatacgttaatccgtcaccagggagtaagcaggcaaggaattgttatagggaaaaattgttggatcggttctaaggtgactattttagatggtgtccatataggaaataattgtgtgattgctgcaggtgctgttgtaaccaagtctgttccggacaattcagttgttggcggagttcctgcacgggtgttaaaaagtagaatatctgataagtaa

SEQ ID NO: 15778 - protein, 170 aa, Cytophaga hutchinsonii
MYAQNIVIGKFVKLDDGVYLSGLGKGKLTLANNVSIGAYSRIIVSTSLNNIGEYIHIGNNVGIGEFAYLGGGGGLEIGDDCIIGQYLSCHPENHNYDSVDTLIRHQGVSRQGIVIGKNCWIGSKVTILDGVHIGNNCVIAAGAVVTKSVPDNSVVGGVPARVLKSRISDK

SEQ ID NO: 15779 - DNA, 654 bp, Cytophaga hutchinsonii
  CDS (1)..(654)
atgtttttgcggatagcaaataaaatattgaaacgtttggctggagtacaggttattcctgtaaataaaaagcgtttatctgttttagataataagcatctgcatattgcctccaattcaatcttgctggaaggtacgtcattggatttcagacaggaaatttcttcttccgatacgtatgtttctattggcgggtattgcctgatcaaagctatcttcacatttgaaacaactacaggattaataaccataggtaataatgttcatattggaaatgcacattttatatgccggtccgccattacgattcatgatgatgtaacaatggcgtggggtattaccttatacgatcataattcacatagcattcattgggaagaacggaaggatgataataaaacctgttacgaagattttgttcagcatcatggaaataatatcgttaataaaaactggataaacgttctttccaggcccatagtaattgaatctaaagcctggataggttttaatgtaacaatattaaaaggcgtaactataggtgaaggcgcagtgataggagcctgcagcgttgtgacaaaagacgttcccgcgtggacagttgttgccggaaacccggctgctgttgtaaaacatttacaaaaaccggaatga

SEQ ID NO: 15780 - protein, 217 aa, Cytophaga hutchinsonii
MFLRIANKILKRLAGVQVIPVNKKRLSVLDNKHLHIASNSILLEGTSLDFRQEISSSDTYVSIGGYCLIKAIFTFETTTGLITIGNNVHIGNAHFICRSAITIHDDVTMAWGITLYDHNSHSIHWEERKDDNKTCYEDFVQHHGNNIVNKNWINVLSRPIVIESKAWIGFNVTILKGVTIGEGAVIGACSVVTKDVPAWTVVAGNPAAVVKHLQKPE

SEQ ID NO: 15781 - DNA, 744 bp, Microbulbifer degradans 2-40
  CDS (1)..(744)
atgcgtaaagaacacaaaccactttttgtattgcgctttttggcccgctgcaatcagttttatgtagagcgctttttacgcccacagtttgatcacttaggtgcgaagcctgcggttgccaaaccgcgcaccgtacaggtttttggccataatatacaggccggcaattttttgcatttaattagcagcaaacaacaaccggtgcgtttgacaacctggtctgggcgcaatcaacaggggcgcattagtattggcgattactgtttaatagccccaggggtagttattaattccgccgtagctattacgctgggcaataactgtatgctggcaaccgatgtaatgattgccgatagcgattggcatggtatttacaaccgcgtacgaccctataaatgcgatggcgaagtagtattgggtaataacgtgtgggtagggttgcgcagtattattggcaaaggcgtacatattggcgataacagcataattggtgcaggctcggtggtaactaagtctattcccgccaattgtatagctgctggcaaccccgcaaaggtagtaaaacaactggaccctagcaagcgcatggttacgcgcgaatatttatttaaccccgaggtacgcttaggtaaaaatattcgcgactatgataataaccaacaacaattagatgagtttatgttcgcccaaaactcttttagcggttggctgcgcgcaaccttaaaaccaactaaaaacgattag

SEQ ID NO: 15782 - protein, 247 aa, Microbulbifer degradans 2-40
MRKEHKPLFVLRFLARCNQFYVERFLRPQFDHLGAKPAVAKPRTVQVFGHNIQAGNFLHLISSKQQPVRLTTWSGRNQQGRISIGDYCLIAPGVVINSAVAITLGNNCMLATDVMIADSDWHGIYNRVRPYKCDGEVVLGNNVWVGLRSIIGKGVHIGDNSIIGAGSVVTKSIPANCIAAGNPAKVVKQLDPSKRMVTREYLFNPEVRLGKNIRDYDNNQQQLDEFMFAQNSFSGWLRATLKPTKND

SEQ ID NO: 15783 - DNA, 549 bp, Microbulbifer degradans 2-40
  CDS (1)..(549)
atgattggtaaattggtaagctggttgcgccgccgcaagcgtcaaaaatatatagaaggcctagtggctaagggtttaaaacttggaaacaatgttcacattgtagaccagtgcttttgggacgccgcccactgctaccttatacaaatagacgataacgttactatcgcaccaaacgttacttttctcgcccacgacgccagcacaaaagaatttttaaattacacaaaacttggcaaagttcatgtaaaagaaaattcttttatcggccattccgcaataataatgcccggcgtaactgttggtaaaaatactattattggttcgggctctgtagtaaccaaagacatacccgatggggtaatagccgcaggcaacccggcacgtattattaccaccttagaaagttacttagaaaaagtaaaagctgacgtaagcgaaaacaataagactatatttggtcaagactaccacatttacaacttagacgaccaaaagcgcgcagaactagtaaaaagtgcaaccggcacaaccggctacatcgattaa

SEQ ID NO: 15784 - protein, 182 aa, Microbulbifer degradans 2-40
MIGKLVSWLRRRKRQKYIEGLVAKGLKLGNNVHIVDQCFWDAAHCYLIQIDDNVTIAPNVTFLAHDASTKEFLNYTKLGKVHVKENSFIGHSAIIMPGVTVGKNTIIGSGSVVTKDIPDGVIAAGNPARIITTLESYLEKVKADVSENNKTIFGQDYHIYNLDDQKRAELVKSATGTTGYID

SEQ ID NO: 15785 - DNA, 417 bp, Oenococcus oeni PSU-1
  CDS (1)..(417)
atgactatcggttatggaactcaaatcagaccaagttcgtattatggagttgggcaaattggatatggcttaactattggaaatcatagttctattggtccaatggggtatctagggtgtgcaggagaaatcaaaattggagaaaaagtgatgattggccccaaggtaacacttgttgccgaaaatcatatttttaaagatgctgatatagacatcaagaatcagggagtttcccaaaaaggtattattatcgaaaataatgtttggataggcactgattgtactattctggatggtgtaactataggcgaaggaagcgtaattggggctggttgtttaataacaaaagatgttcctaataattctattgtgtatgataaaagagataaggtttatcgtgaaaggctgccagaatga

SEQ ID NO: 15786 - protein, 138 aa, Oenococcus oeni PSU-1
MTIGYGTQIRPSSYYGVGQIGYGLTIGNHSSIGPMGYLGCAGEIKIGEKVMIGPKVTLVAENHIFKDADIDIKNQGVSQKGIIIENNVWIGTDCTILDGVTIGEGSVIGAGCLITKDVPNNSIVYDKRDKVYRERLPE

SEQ ID NO: 15787 - DNA, 567 bp, Pediococcus pentosaceus ATCC 25745
  CDS (1)..(567)
atgaaagagattgaaaagttaaaacaaggtttagaatattgctttttagatgaagaagttgccaagcttaagcaagcagcattaatcaagtgcgcgcgattcaataatattgatccaacggatgaccaaaaacaacaagccgcaattaaggatttatttggttcaactggggcaaacgtatatgtgcagcctaattttaattgtgataatggtaaaaatatccatgttggagaggattttctaaccaactataacgtcacgattcttgatattgcgcccgtgaaaattggtgattatgtcatgattggacccaatacgctgattgctacggtcaatcatccgatgtctcccaagcaacgtcgacaaaagatggcgcaaggaacgccggttaccatcggaaatgacgtttggattggtggaaattgtacaattttaccgggagtaacgattggcaataatgtcgtggttgctgcaagcgcagtcgttactaaagatgtgcctgataactgtttggtagcaggagtgccagcgaaagttatcagaaagttggataacgatttggattaa

SEQ ID NO: 15788 - protein, 188 aa, Pediococcus pentosaceus ATCC 25745
MKEIEKLKQGLEYCFLDEEVAKLKQAALIKCARFNNIDPTDDQKQQAAIKDLFGSTGANVYVQPNFNCDNGKNIHVGEDFLTNYNVTILDIAPVKIGDYVMIGPNTLIATVNHPMSPKQRRQKMAQGTPVTIGNDVWIGGNCTILPGVTIGNNVVVAASAVVTKDVPDNCLVAGVPAKVIRKLDNDLD

SEQ ID NO: 15789 - DNA, 555 bp, Pediococcus pentosaceus ATCC 25745
  CDS (1)..(555)
atgcaatccaaaatggatttgggaacagcggcctatgatggtgtcgaagaaatcgtagctaaaaaccaacggttggttcagcaattaaatactggagttcattcggcaaatgaagtacttagcattgtaagccaaatcactaacgagcgaattgatggttcgactgaaattcgattaccttttcaaaccgattttggtcgcaatctccacattggtaaaaaagttttcattaatagcggatcgatgtttgtggacttaggtggtatctatattggtgatcacgtcttgattggtccaaacgtaacgattgcttccgttaatcaccgtctagaacctagcgagcgccgtaatctagatttatactcggtttgtattcataataatgcttggttaggcgccaatgtgacggtaactcctggcgtaattattggtgaaaatgcagtagttgctgcgggcgccgtggttacccgcgatgttccacccaatgcggtagttgctggtattccagcacgtgtaattaaaataatcaagagtactaaggaggatcaaaaataa

SEQ ID NO: 15790 - protein, 184 aa, Pediococcus pentosaceus ATCC 25745
MQSKMDLGTAAYDGVEEIVAKNQRLVQQLNTGVHSANEVLSIVSQITNERIDGSTEIRLPFQTDFGRNLHIGKKVFINSGSMFVDLGGIYIGDHVLIGPNVTIASVNHRLEPSERRNLDLYSVCIHNNAWLGANVTVTPGVIIGENAVVAAGAVVTRDVPPNAVVAGIPARVIKIIKSTKEDQK

SEQ ID NO: 15791 - DNA, 552 bp, Pediococcus pentosaceus ATCC 25745
  CDS (1)..(552)
atgacaagaactgaacgagaaaaaatgactgctggagaaccttaccagcagtttgatgctgaattaattggtcgtcgaaagttcatccgtcaacaattacaagtgattaacaacgaaacagacaatgagaaacgtaatggtggctttaaaaaactactaggtgatgtaggtgacgatttctttgtcgagagtgaattcaaatttgattatggatggaatattcacattggtaatcatttttatggcaactacgatatgactttccttgatacgtgtccaattacgattggtgaacactgttattttggtcctaacgtggggctgtatactcctattcatccacttgatcccgttaagagaaatgctgatgtagaattaggtgctccaattacaattggtaatagctgttggtttggaggacgagtgaccgttttacctggggtaactttgggcaataacgtcgtcgtgggtgctggatcagtggcaacaaagagttttggggacaatgtggtaattgcgggaaatcctgccagagtaatcaaacaaatctag

SEQ ID NO: 15792 - protein, 183 aa, Pediococcus pentosaceus ATCC 25745
MTRTEREKMTAGEPYQQFDAELIGRRKFIRQQLQVINNETDNEKRNGGFKKLLGDVGDDFFVESEFKFDYGWNIHIGNHFYGNYDMTFLDTCPITIGEHCYFGPNVGLYTPIHPLDPVKRNADVELGAPITIGNSCWFGGRVTVLPGVTLGNNVVVGAGSVATKSFGDNVVIAGNPARVIKQI

SEQ ID NO: 15793 - DNA, 465 bp, Streptococcus suis 89/1591
  CDS (1)..(465)
atgaagagatttaacgatgagctagatggtaaggtccgctcggagcaattgaaaaactggtttggagctacaggtgagcggatttacatggagctaaatttctactgtgactacggtagcaatattcatgttggtgaggatttttacgcaaattttaactgtacgatgttggatgtttgtcccattaccatcgggaaaaatgccatgattggtcccaatgtacagttgctaactccacttcatccactagatcctgatgaacgaaattctggtttggaatatggctctccaattaccattggtgataatttctgggctggtggtggtgcgacaatcttacctggcgtgaccttaggcaacaatgtggttgttggtgctggatctgtcgtgactaagtcttttggtgataatgttgttttagcgggcaatcctgcgtgtgttatcaaagaaatacctaaaaaataa

SEQ ID NO: 15794 - protein, 154 aa, Streptococcus suis 89/1591
MKRFNDELDGKVRSEQLKNWFGATGERIYMELNFYCDYGSNIHVGEDFYANFNCTMLDVCPITIGKNAMIGPNVQLLTPLHPLDPDERNSGLEYGSPITIGDNFWAGGGATILPGVTLGNNVVVGAGSVVTKSFGDNVVLAGNPACVIKEIPKK

SEQ ID NO: 15795 - DNA, 606 bp, Desulfovibrio desulfuricans G20
  CDS (1)..(606)
atgatcatgatgtcttcagagatgcagcccccgcagcacggcccggatgaaagacgttttcagagccgcgtgcgcacggcggcgtccggcgggctgtggcacgacatgcgccgctggtggcagctgcgccgcgtgggcagtgccggctgcggcatacacatggacagcggtgtgcatctgatgcggtacacgcggcatatgcatttcggcgacaatgtgtttttcaaacagggcgcgcggctgtgtgtggctcagccgcagggtgaactgcgcatcggcagcaatacgacaataggatatcacacgactatttttgcaagctactctgtagtgataggggcggactgcctcatagcgcccttctgttatctggtggatgccgaccacggcattgcggcgggcagcagaatcaacacgcaggatatgaccgcccgccccgtggtggtgggcgatgatgtgtggctgggggcgcgtgtgaccgtggtttcgggggtgcgtataggaaccggcgctgtggcgggggccggcagcgtcattactgccgatgtgcctgcaggggccatcgtggccggtgctccggcacggatagtgggatacagaaaatga

SEQ ID NO: 15796 - protein, 201 aa, Desulfovibrio desulfuricans G20
MIMMSSEMQPPQHGPDERRFQSRVRTAASGGLWHDMRRWWQLRRVGSAGCGIHMDSGVHLMRYTRHMHFGDNVFFKQGARLCVAQPQGELRIGSNTTIGYHTTIFASYSVVIGADCLIAPFCYLVDADHGIAAGSRINTQDMTARPVVVGDDVWLGARVTVVSGVRIGTGAVAGAGSVITADVPAGAIVAGAPARIVGYRK

SEQ ID NO: 15797 - DNA, 543 bp, Chloroflexus aurantiacus
  CDS (1)..(543)
atgccatcacgtccgctaaccgacattgtgagcgatattctggctgtgttgcgggcacgctggtatctccgtagtgcgacattggggccacgagtacggttgtgggggcgtccggcaatcagtaattatggccagctcatcatcggtgagcgagcgcgattggtttcaacgattgtgccactcgagctggcagtagctcatggggcgcggttagagattggtcaggggacgtttatcaactatggttgttcaattgcggcaactgaactggtacgtatcgggccgcgttgtaatatcggtacctacgccatgattatggacaacgacttccaccgtctggagccagagcggcgccaggaacgtccaccatcagccccaattattctggaagagaacgtctggctcggtgggcgggtaacggtattgagcggtgtgacgattggcgctggtagtgtgatcggtgccggtagtgtggtgaccaagagcatcccgccgcgttcattggcagcaggagtcccggcacgtgtgattaggcagttataa

SEQ ID NO: 15798 - protein, 180 aa, Chloroflexus aurantiacus
MPSRPLTDIVSDILAVLRARWYLRSATLGPRVRLWGRPAISNYGQLIIGERARLVSTIVPLELAVAHGARLEIGQGTFINYGCSIAATELVRIGPRCNIGTYAMIMDNDFHRLEPERRQERPPSAPIILEENVWLGGRVTVLSGVTIGAGSVIGAGSVVTKSIPPRSLAAGVPARVIRQL

SEQ ID NO: 15799 - DNA, 186 bp, Brevibacterium linens BL2
  CDS (1)..(186)
atgcatcctggccacatcatcatcggccgcaacgtgtggatcggtgcgaatgtgaccgtcctgcccggagtgaccatcggcgacaacgccgtggttgcggcggcctcggtcgtgaccaaggacgtgcgcgcaggaaccgtcgtggtcgggtcgccggcacgcgtggtgcgctcggtcaacgactga

SEQ ID NO: 15800 - protein, 61 aa, Brevibacterium linens BL2
MHPGHIIIGRNVWIGANVTVLPGVTIGDNAVVAAASVVTKDVRAGTVVVGSPARVVRSVND

SEQ ID NO: 15801 - DNA, 612 bp, Lactococcus lactis subsp. cremoris SK11
  CDS (1)..(612)
atgaataaagaacaaattaaaacactaatcaattctggaaaaacctatgatgacaatgacctagaactcagtgagtatcgtaatcatgccctttttgaaacccgacgttacaatcaaaaaatcaacaataatgagggttatcaaccagagattttaagacagctctttgaacatttgggagaaaatccctatattgaatacaattttcgctgtgaatttggctttaatataaaaattggggataatgtccttattaatcatgatctgattattttagattgcaatcaggtcacgataggtgataatgtttactttgggcctcgctgtggtttatttgctgccaatcattcagaagacccagcagtcagaactgctggtggggtctattcaaagccaattacggttggaaatcaagtctggctgggagcaaatgtcagccttcttccaggagtaacgattggtgacaactgcattattggtgcaggaagtgtcgttaccaaagatattccagcaaatgttgttgccgccggaaatccttgccaagtgattcggacaatccgaatcgaagaccaagaatggattaaaaaggataaaatattcatttcaaaataa

SEQ ID NO: 15802 - protein, 203 aa, Lactococcus lactis subsp. cremoris SK11
MNKEQIKTLINSGKTYDDNDLELSEYRNHALFETRRYNQKINNNEGYQPEILRQLFEHLGENPYIEYNFRCEFGFNIKIGDNVLINHDLIILDCNQVTIGDNVYFGPRCGLFAANHSEDPAVRTAGGVYSKPITVGNQVWLGANVSLLPGVTIGDNCIIGAGSVVTKDIPANVVAAGNPCQVIRTIRIEDQEWIKKDKIFISK

SEQ ID NO: 15803 - DNA, 588 bp, Lactococcus lactis subsp. cremoris SK11
  CDS (1)..(588)
atggttgctggcgaactctataaagcaagtaaagttgaaccagaatacaaacctgataataatcgagcattaaatcaagaaattaaccaactctatctacttgatacagaaaaaattgtggcacttgaaaaagaactttttggtcaaactggtgatgagttatttgtaaatccaccgctttacatcgactatggtaagaatacaagaattggtcagcgcttttatgccaatatgggctgtatttttctggatgttgcaccgattacgattggcgatgatgtgatgtttggacctcgtgtcagtctgattacggcttctcatccaattgatgccggagttcgacagcgtggactagaatatggaaaagcaattacgattggtgaccgagtttggctcggtgcaggagtaattgttaatccgggcgttacgattggcgaaaatacaattgtgggctcgggaacggtagtgacaaaaaatttgccagcaaatgtgattgcagtaggtaatccagcacgaattctccgcgaaattactgattctgaccgactttactgggaagaaaaagagaacgaatattatgaaaaataa

SEQ ID NO: 15804 - protein, 195 aa, Lactococcus lactis subsp. cremoris SK11
MVAGELYKASKVEPEYKPDNNRALNQEINQLYLLDTEKIVALEKELFGQTGDELFVNPPLYIDYGKNTRIGQRFYANMGCIFLDVAPITIGDDVMFGPRVSLITASHPIDAGVRQRGLEYGKAITIGDRVWLGAGVIVNPGVTIGENTIVGSGTVVTKNLPANVIAVGNPARILREITDSDRLYWEEKENEYYEK

SEQ ID NO: 15805 - DNA, 597 bp, Lactobacillus casei ATCC 334
  CDS (1)..(597)
atgaatctagaagaaaaatttgctttcatggcaactggtaagccatacgacgacatggatcctttgttactggctgtgcgggatgaagcaactgccaaaactgatgcacttaacaatgaacacgatccagccaaacgcaatgccttgtttaggaaattggtaggccaaactggcttcaaaccgtttgtgaacccaaactttcactgtgaatttggtcggaatatccgcgtaggcgatcatttttatgccaattatgactgtaccattttggacggggcgccggtgaccattggcaatcacgttttgtttggcccgaaagtcggtttgtacaccagcaaccatctttttgatccgcttgaacgacaacttggtggctgtattgctaaaccgattgtagtcggggatggctgttggctcgctgccaatgtgacggtactaccaggcgtcacgattggtgcggggacgattatcggagcaggtagtgttgtcacccacgacatcccagcgcgcgtgattgcggcgggtaatccttgcgaagtgctccgcgagatcacggctgctgataaaacagggtttgcagggcatgacatgatctaa

SEQ ID NO: 15806 - protein, 198 aa, Lactobacillus casei ATCC 334
MNLEEKFAFMATGKPYDDMDPLLLAVRDEATAKTDALNNEHDPAKRNALFRKLVGQTGFKPFVNPNFHCEFGRNIRVGDHFYANYDCTILDGAPVTIGNHVLFGPKVGLYTSNHLFDPLERQLGGCIAKPIVVGDGCWLAANVTVLPGVTIGAGTIIGAGSVVTHDIPARVIAAGNPCEVLREITAADKTGFAGHDMI

SEQ ID NO: 15807 - DNA, 705 bp, Lactobacillus casei ATCC 334
  CDS (1)..(705)
atgacagccaagattcggtacaatgagcttatcttaagtatggaggctctaaccaatatggaatcaatgaagcaaagaatgcttggtggcaaactgtataaagcaaacgatccagaaatcagcgttgagagtcagcgaggcagtgatctcgtctggcagtttaatcatttagcccctgataaaaaagcagaacgagctgcggttttaaaacaattatttcatgcatttggagacaataactacattgagcctcctttctacgttgactacggtgctcacacgtcaatcggtgatcatttttatgccaacacagattgtgttttcttggataccgcgccaattaccattggcaaccgggtttatttagcgcctaaagtgagtttatttacagccggccacccaattgatgccgctatccgcggtgaagatttagaatatggtaagcctatcaaaattggcgatgatgtctggattggcggcggcgtcattattaatccaggtgtgaccatcggcagcgatgttgttatcggttctggatcggtggtcacaaaagacgttcctgatcatgtcatcgttgctggcaatcctgctcgcatgattcggcggattactgataaagatcatgcccagtggcaacaacaaaaagatgagttcttaacctggcagcaacaggctgatgaaagccaacaatcaaagcagtcttaa

SEQ ID NO: 15808 - protein, 234 aa, Lactobacillus casei ATCC 334
MTAKIRYNELILSMEALTNMESMKQRMLGGKLYKANDPEISVESQRGSDLVWQFNHLAPDKKAERAAVLKQLFHAFGDNNYIEPPFYVDYGAHTSIGDHFYANTDCVFLDTAPITIGNRVYLAPKVSLFTAGHPIDAAIRGEDLEYGKPIKIGDDVWIGGGVIINPGVTIGSDVVIGSGSVVTKDVPDHVIVAGNPARMIRRITDKDHAQWQQQKDEFLTWQQQADESQQSKQS

SEQ ID NO: 15809 - DNA, 591 bp, Lactobacillus delbrueckii subsp. bulgaricus ATCC BAA-365
  CDS (1)..(591)
atgccgatcgaaaaagaaaaaacgctggctggccaggtctataatcctggtcaagacgaagaactggtgacagaactgacggcctgcaaggccaagtgcctccgctacaaccaattgccgtctggagcagaaaagaaggaactcttaaaggaaatcctgggccaaagcggggaaaactgccacatcgaacccaacttctggtgcgactatggctggaatattaaagtaggcgacaacttctacgccaaccataatttgaccgtcctggatgctgggggagtgacctttggtgacaatgtcttcatcggccctgactgcagcttctacacctccggccacccgttggacgcggccagaagaaataccggcctggaatatgcctacccgattactgttggcaataacgtctggatcggcgggggagtccgggtggtgcctggcgtcacaatcggtgacaattccgtgatcggcgccggcagcgtcgttgttaaagatgtcccggccaattccgtagccgctggcaatccttgccgggttatccgggaaatcactgaagctgataaaaacagtgacttaaactggaagaagtaa

SEQ ID NO: 15810 - protein, 196 aa, Lactobacillus delbrueckii subsp. bulgaricus ATCC BAA-365
MPIEKEKTLAGQVYNPGQDEELVTELTACKAKCLRYNQLPSGAEKKELLKEILGQSGENCHIEPNFWCDYGWNIKVGDNFYANHNLTVLDAGGVTFGDNVFIGPDCSFYTSGHPLDAARRNTGLEYAYPITVGNNVWIGGGVRVVPGVTIGDNSVIGAGSVVVKDVPANSVAAGNPCRVIREITEADKNSDLNWKK

SEQ ID NO: 15811 - DNA, 609 bp, Bacillus anthracis str. A2012
  CDS (1)..(609): Xaa of translated CDS can stand for any naturally occuring amino acid which can be translated from respective CDS-codon
atgtttaataagtgcagttcattcgataacaaaggagatgattctatgaaaacagaaaaagacaagatgttagcgggagaaatgtatattgcggatgacgaagaattagtagctgatagggtggaggcaaaacgtttaacacgcctttataacgaggcggtggagacaggagatgagagacgttttacgttattaaatcagcttttaggttcttcagctgatgggaaagcccaaattaatcctgattttcgttgtgattatggatacaatatccatgttggaaagagcttttttgcaaatttcaattgtgtgattttagacgtttgtgaagttcgaatcggtgatcattgtatgtttgcacctggtgttcacatttatactgctacgcatcctttacatccggtwkagcggaattctggtaaagagtatgggaagcctgtaaagattggtaacaatgtttgggttggcgggggagctattattaaccctggtgtttcaattggagataacgctgtaattgcttcaggggcagttgtgacaaaagatgtacctaataatgtagtagttggtggtaatccagctaaagttattaaaacgatagaagaataa

SEQ ID NO: 15812 - protein, 202 aa, Bacillus anthracis str. A2012
  misc_feature (136)..(136): Xaa can be any naturally occuring amino acid
MFNKCSSFDNKGDDSMKTEKDKMLAGEMYIADDEELVADRVEAKRLTRLYNEAVETGDERRFTLLNQLLGSSADGKAQINPDFRCDYGYNIHVGKSFFANFNCVILDVCEVRIGDHCMFAPGVHIYTATHPLHPVXRNSGKEYGKPVKIGNNVWVGGGAIINPGVSIGDNAVIASGAVVTKDVPNNVVVGGNPAKVIKTIEE

SEQ ID NO: 15813 - DNA, 534 bp, Anaeromyxobacter dehalogenans 2CP-C
  CDS (1)..(534): transl_table=11
atggtcataaaggtactgttcgagatcaaactgtgggtgttctggttcgtgaagtctgttcccgggaacatcggttgtgcgctccgtcgcgcggtgctgccggcagcgatcgcaaaaggagccaaggtctgggatggcgttcagattgacatgccctcgaaactccggattggactcagaacgtccatcaaccgcggcacgattttgaactgtggcggaggcattacgataggtgacgacgttctgatcgggccggacgtcatagtgtattcccagaaccacaactacaaagacgcatcccgactggtcgctgaacagggctatagcttcgctcccgtcgtgatcggtgatgatgtgtggatcgcggcccgcgccgtgatcctgccgggggtagagcttggacggggcgccgttgttgcgagtggcgcagtcgtgaccaagaacgtcccgccctacacactcgtcggaggcgtccccgcccgcgccctcggacgtcgaacgtccgacagcgatcctcaatcgtccacgacctaa

SEQ ID NO: 15814 - protein, 177 aa, Anaeromyxobacter dehalogenans 2CP-C
MVIKVLFEIKLWVFWFVKSVPGNIGCALRRAVLPAAIAKGAKVWDGVQIDMPSKLRIGLRTSINRGTILNCGGGITIGDDVLIGPDVIVYSQNHNYKDASRLVAEQGYSFAPVVIGDDVWIAARAVILPGVELGRGAVVASGAVVTKNVPPYTLVGGVPARALGRRTSDSDPQSSTT

SEQ ID NO: 15815 - DNA, 663 bp, Streptococcus pneumoniae TIGR4
  CDS (1)..(663)
atggtatgtgatgaaggtagagcatcaattgtagaaagtgctccttattctagtcagatacgtggaaaatttgatatgatagtagggaataaggagaagaataatatgactagcgaataccagaaaatgatagcaggagagttttaccgtccatcagacccagaactgagagccttagctcaggcttctcgccaaaaacaggccgcctttaacaaggaagagaaccccttgaagggagccgaaatcatcaagacttggtttgcctcaaccgggaaaaatctttacatcaacactcgcttgatggtggactacggtgtcaacatccatctaggggaaaatttttattctaattggaacttgaccatgctggatatctgtcccattcgtatcggggacaatgctatgattggtcctaattgtcagtttttgacacccctccatccactagatccacaggaacgcaattcaggtatcgagtacggaaagcctatcacaatcggagataatttctggactggtggtggcgtcattgtccttcctggagtgacactgggaaataatgtcgttgcaggagcaggggcagtaattaccaaatcttttggcgacaacgttgtcctagctggcaatcctgcgcgcgtgattaaggaaatacctgttaaatag

SEQ ID NO: 15816 - protein, 220 aa, Streptococcus pneumoniae TIGR4
MVCDEGRASIVESAPYSSQIRGKFDMIVGNKEKNNMTSEYQKMIAGEFYRPSDPELRALAQASRQKQAAFNKEENPLKGAEIIKTWFASTGKNLYINTRLMVDYGVNIHLGENFYSNWNLTMLDICPIRIGDNAMIGPNCQFLTPLHPLDPQERNSGIEYGKPITIGDNFWTGGGVIVLPGVTLGNNVVAGAGAVITKSFGDNVVLAGNPARVIKEIPVK

SEQ ID NO: 15817 - DNA, 558 bp, Burkholderia vietnamiensis G4
  CDS (1)..(558): transl_table=11
atggcccacgacgaccgcacgacggtcatttcccggcgcacgcccgaatcggcggcgatgcgcgccgagctcgcgcgcgcgatggcgatcaccgcgcggctcaaccggctgacgttcgccgatgcggacgaagtccgcagcctgttcggcgaactgacgggcaagccgatcgacgacggcttcctgctgattccgccgttctacgcaaccggcggcgcagccacgcggatcggccggaacgtgttcgtcaaccagaactgcacgttctacgacctcggcggcctcgacatcggcgacgacgtgatgatcgggccgaacgtgagcctcatcacgtccggccatccgctcgagccgtcgcgccgacgcgacgcggtcgtggcccggccgatctcgatcggcaacaacgtgtggatcggcgcgggcgcgacgatcctcggcggcgtgacggtcggcgagaacgcggtggtcggcgccggctcggtcgtgacgcgcgacgtcccgccggatacgctggtcgccggcaacccggcgcggatcgtccgttcgattgcggagtga

SEQ ID NO: 15818 - protein, 185 aa, Burkholderia vietnamiensis G4
MAHDDRTTVISRRTPESAAMRAELARAMAITARLNRLTFADADEVRSLFGELTGKPIDDGFLLIPPFYATGGAATRIGRNVFVNQNCTFYDLGGLDIGDDVMIGPNVSLITSGHPLEPSRRRDAVVARPISIGNNVWIGAGATILGGVTVGENAVVGAGSVVTRDVPPDTLVAGNPARIVRSIAE

SEQ ID NO: 15819 - DNA, 576 bp, Crocosphaera watsonii WH 8501
  CDS (1)..(576): transl_table=11
atggacaatccacaaaactcgagtagagaaaagcaaaaaatgcttaaaggagaatattataattcttttgaagaaagcttactttatgatagaaaaagagcaaaaaaattatgtcaacaattaaatgctattcctgatggaagtcaaggcgaaagaagtaaaataattcagaatttattacaaacagataaacaggtatggattgaatctccttttcgctgtgattatggttataatattgaagttggtgacaacttttatgctaattttggctgtattattctcgactgcaatctagttaaaattggtgacaatgttaaatttggtcccaatgtacaagtttatgctgcaacccatcctactaaccccgaagaaagaattgcagggaaagaaatggcctatcctattaccattggtgataatgttttgattgggggaagttctattattcttcctggtgtgactattggtaataatagtgttatcggtgccggaagtattgtgacaaaaaatattcctgaaaacgttgttgctgtgggcaacccttgtcgtgttcttcggtcaattaattgttaa

SEQ ID NO: 15820 - protein, 191 aa, Crocosphaera watsonii WH 8501
MDNPQNSSREKQKMLKGEYYNSFEESLLYDRKRAKKLCQQLNAIPDGSQGERSKIIQNLLQTDKQVWIESPFRCDYGYNIEVGDNFYANFGCIILDCNLVKIGDNVKFGPNVQVYAATHPTNPEERIAGKEMAYPITIGDNVLIGGSSIILPGVTIGNNSVIGAGSIVTKNIPENVVAVGNPCRVLRSINC

SEQ ID NO: 15821 - DNA, 555 bp, Chlorobium phaeobacteroides DSM 266
  CDS (1)..(555): transl_table=11
atgaaaaaagttgtatttgagagaccctcaaagattaaatatactatatatatattaagatcagttttctctattgagtttattaaacatcttgcttatttgtttgtatattttataatcaactttacaagaggaagatgtattgcaaaaatcggagttaatacaaagttgcatcctaccgtattaatgagagaggctgaacgtatcataatcggtgataattgcttaattaatcataataatgtattacaagcagggaaaaaagatgctaaaattgtaattggaaattatgttcatactggcccaaatgttatgatgtttgcatacaatcatgtatttgatgatcctcatataccttccaaaaatcaacaatattatgaaggggatataattatatgtgatgacgtatggataggtgctggatctatcattcttgctggcgtgacaataggaaagggtgttgttgttgctgcgggtacagttgtgaataaaaatatcacgccgtttacagtggttggtggggtacctgctaaagtcttaaaaattagagaatag

SEQ ID NO: 15822 - protein, 184 aa, Chlorobium phaeobacteroides DSM 266
MKKVVFERPSKIKYTIYILRSVFSIEFIKHLAYLFVYFIINFTRGRCIAKIGVNTKLHPTVLMREAERIIIGDNCLINHNNVLQAGKKDAKIVIGNYVHTGPNVMMFAYNHVFDDPHIPSKNQQYYEGDIIICDDVWIGAGSIILAGVTIGKGVVVAAGTVVNKNITPFTVVGGVPAKVLKIRE

SEQ ID NO: 15823 - DNA, 618 bp, Chlorobium phaeobacteroides BS1
  CDS (1)..(618): transl_table=11
atgggagtagtcgacaagataaaatcaaacccaaagcttaaaaagctggtattgtatctattgatgcctaaaaaccaggccagacctcgattatgggttaagctatttgttaatccgtttaaacatcataaaggtaaacgatcgctaatccgccgtagtgtccggatggatgttatgccattcaattatttttctttgggaaacgactctactatcgaggacttctcaaccattaataatggtgtgggcgatgtggttattggcgaaagggtaagaattggccttgggaatacgttgattggccccattaccataggaaacgatatcatgttcgctcaaaacatagtactttcaggtcttaatcatggctatgaggatatttcattacccatcagcgatcaacccgtatctactaaacctatcttcattgaagatgaagtatggattggcgccaatgccgtaattactgcaggcgttactgttggaaagcatagcattgtggcagcaggatccgttgtggttaaatccgtacctccctactccattgtcggaggtaacccagccaaactactcaaacaatataaccaaactaccaagaactgggaaagagttctttaa

SEQ ID NO: 15824 - protein, 205 aa, Chlorobium phaeobacteroides BS1
MGVVDKIKSNPKLKKLVLYLLMPKNQARPRLWVKLFVNPFKHHKGKRSLIRRSVRMDVMPFNYFSLGNDSTIEDFSTINNGVGDVVIGERVRIGLGNTLIGPITIGNDIMFAQNIVLSGLNHGYEDISLPISDQPVSTKPIFIEDEVWIGANAVITAGVTVGKHSIVAAGSVVVKSVPPYSIVGGNPAKLLKQYNQTTKNWERVL

SEQ ID NO: 15825 - DNA, 576 bp, Exiguobacterium sp. 255-15
  CDS (1)..(576): transl_table=11
atggaatcatcatcacttcttcaacagattcaaaatcgactgattgaggcggacgatcccctgctcgagcagattcatgccgtacagcgggacggagagcggctgctccaccggttgaatcagcagttgttgtcaccaatggagtttcgcgagacgctgggtgaactgattggtcagcccgttgatgagagtgtggtcgtcttacccccgttttatacagacttcgggcgacatatctcactcgggacagacatcttcatcaatcgtggagtcatgttgacggatctcggttcaattcaaatcgatgatcacgtgctgatcggtccgtttgcgaagctgttgaccgtcaatcatcccgtcagtccgtccgagcgacggggactgtccgtcaaaccgattcatctgaaaggaaatgcctggattggagcgggggcaacgatcctgccaggtgtcacgatcggcgagaatgcaatcgttgcggcggacgcgaccgtgacgaaagatgtgccggacttggcgattgtcgccggaaccccggcgcggatcatccgttatatcaatgaatcggaggactga

SEQ ID NO: 15826 - protein, 191 aa, Exiguobacterium sp. 255-15
MESSSLLQQIQNRLIEADDPLLEQIHAVQRDGERLLHRLNQQLLSPMEFRETLGELIGQPVDESVVVLPPFYTDFGRHISLGTDIFINRGVMLTDLGSIQIDDHVLIGPFAKLLTVNHPVSPSERRGLSVKPIHLKGNAWIGAGATILPGVTIGENAIVAADATVTKDVPDLAIVAGTPARIIRYINESED

SEQ ID NO: 15827 - DNA, 552 bp, Exiguobacterium sp. 255-15
  CDS (1)..(552): transl_table=11
atgacggaaaaagaaaaaatgattcaaggtcaattgtatttagccggagatgcggaactggtcgctgatcgaaagcgggctcagatgctttgtcatcaatttaatcaactcagcatcaacgagttacctgcccgaaagtcgctcctgcaggaactgttccaaatcgagcagaccgatttttacatcgaaccgtcttttaaatgtgattacggctacaacattacattcggcgcacggttttatgccaattacgattgtgtgctgctcgacatttgtccgattacgatcggcgacaactgtatgctcgctccaggtgtccacatctatacagcgacgcatccgctcgatccggtcgaacgcaacagcggttacgaattcggaaaaccggtcgtcatcggggataacgtctggatcggtggacgtgccgtcatcgcaccgggtataacgatcggtgacaatgctgtcatcgcagccggaagtgtcgtcgtcaaagatgttgctccgaatacggtggtcggaggaaatccggcccgcttcatcaaatcgatttaa

SEQ ID NO: 15828 - protein, 183 aa, Exiguobacterium sp. 255-15
MTEKEKMIQGQLYLAGDAELVADRKRAQMLCHQFNQLSINELPARKSLLQELFQIEQTDFYIEPSFKCDYGYNITFGARFYANYDCVLLDICPITIGDNCMLAPGVHIYTATHPLDPVERNSGYEFGKPVVIGDNVWIGGRAVIAPGITIGDNAVIAAGSVVVKDVAPNTVVGGNPARFIKSI

SEQ ID NO: 15829 - DNA, 702 bp, Exiguobacterium sp. 255-15
  CDS (1)..(702): transl_table=11
atggagaggagaacaaacatgacacggatgcgtgaagatatccgcaatgtatttaaacaggatccggcagcccggagtacgatagaagtcgtcttgacttatccggggttacacgctgtctggatgcaccggttagcccaccgtatgtggaaaatgaatctgcatctcgccgcccgaatgctatcgcaattcagtcggttcctgacaggaatcgaaattcatcccggtgcgacgatcggacgtcgtttcttcattgatcacggtatgggcgtcgtcatcggcgaaacagcgattatcggcgacgatgtcacgttgttccaaggtgtgacactcgggggaacagggaaagaaacgggcaaacggcatccgacactcggaaatggtgtcctcgtatccgccggagcacgcgtactcggtgatatcacgattggtgattcgtcgaagattggtgcaagctccgtcgttttaaaagacgtaccgtccaatgcgaccgttgtcggtattcccggacgtgtcgtgatacaggacggtatcaaggtcgatgcaccgcttgatcatcaattacccgatccggttcgtgaatgccaggaacgggttgaactggaacttgaacaattaaaatatgagattgaacgaataaaaggaggacaccgccatgatacaactttacaacagcatgaccggaaaaaaggaaccgtttaa

SEQ ID NO: 15830 - protein, 233 aa, Exiguobacterium sp. 255-15
MERRTNMTRMREDIRNVFKQDPAARSTIEVVLTYPGLHAVWMHRLAHRMWKMNLHLAARMLSQFSRFLTGIEIHPGATIGRRFFIDHGMGVVIGETAIIGDDVTLFQGVTLGGTGKETGKRHPTLGNGVLVSAGARVLGDITIGDSSKIGASSVVLKDVPSNATVVGIPGRVVIQDGIKVDAPLDHQLPDPVRECQERVELELEQLKYEIERIKGGHRHDTTLQQHDRKKGTV

SEQ ID NO: 15831 - DNA, 642 bp, Methanosarcina barkeri str. fusaro
  CDS (1)..(642): transl_table=11
atgagagaagaagaaaagatattttcgggcaaaatgtttgattcgcgcaaaaaagaactgagagacatcaagcataaggcgcacactgcatgtcaaagatacaatgcaatggacgaatatgatcccgaacgtttgccaattatcaaggaatttattggcggcatcggcaagaaatattattttcagggacctatccagtttaattatggctgtcacacctttattggagaaaactttgttgcgaatttcaatctcatggtgatggacgacgcacgtatttatattggcaacaatgtatgcttcggaccgaatgtttcgttaatggccacttctcatcccctgattgcccaagaacgtatgggaacagatgaaaacgggaacacgataatggccgaatatgccgaagaaatccatatcggcaacaacgtgtggattgcatgtaatgttgttgtattgggcggcgtacatataggaaacaatgtagtaatcggtgccggcagtgtcgtaacaaaagatatcccggataaccatcttgcttttggcaacccttgccgtccggttcgtccgatcaccgaagccgacagtaaaaagcatttgattttagaagaagacctcaagcattttggatataacattaaataa

SEQ ID NO: 15832 - protein, 213 aa, Methanosarcina barkeri str. fusaro
MREEEKIFSGKMFDSRKKELRDIKHKAHTACQRYNAMDEYDPERLPIIKEFIGGIGKKYYFQGPIQFNYGCHTFIGENFVANFNLMVMDDARIYIGNNVCFGPNVSLMATSHPLIAQERMGTDENGNTIMAEYAEEIHIGNNVWIACNVVVLGGVHIGNNVVIGAGSVVTKDIPDNHLAFGNPCRPVRPITEADSKKHLILEEDLKHFGYNIK

SEQ ID NO: 15833 - DNA, 600 bp, Methanosarcina barkeri str. fusaro
  CDS (1)..(600): transl_table=11
atggtagatcaagagatagtttcaatgagtgaaaaagtgttgaataaagacatttttgagcgtgatagggctggagaaccagtttctatagatgacccggaatatccaaagttaaaggaaatgatgcttcgtgctgcggaactaaccaccagattgaatacttcatttcatgatgaggatgaaataaggagcctgttcagtgagttgataggttcggaagtggataaatcttcgagggtaactcctccattctatacggatttcggacgaaatatcaaggtcggtaaaaatgtgtttatcaatcatgcatgcacctttatggatagaggaggcataacaatcgaggatgacaccaagataggaccaaaagccaatcttatcacatccaatcatccattggatccagcccatagaaaggaattaatttcaactccgatatggattaaaaggaatgtatggataggtgctggtgcaaccattttacccggcgtaactatcggagagaactctgttgtagcagctgcagctgtcgttacgcaaaatgtacctcctaacacagtcgtggctggtgtaccagcaaaagttatcaaaacattgtaa

SEQ ID NO: 15834 - protein, 199 aa, Methanosarcina barkeri str. fusaro
MVDQEIVSMSEKVLNKDIFERDRAGEPVSIDDPEYPKLKEMMLRAAELTTRLNTSFHDEDEIRSLFSELIGSEVDKSSRVTPPFYTDFGRNIKVGKNVFINHACTFMDRGGITIEDDTKIGPKANLITSNHPLDPAHRKELISTPIWIKRNVWIGAGATILPGVTIGENSVVAAAAVVTQNVPPNTVVAGVPAKVIKTL

SEQ ID NO: 15835 - DNA, 549 bp, Methanosarcina barkeri str. fusaro
  CDS (1)..(549): transl_table=11
atggggggtattcgtacgactgctgtagtgtctaatagagatcaggtaaccttttgcgaaattgcggaccattatcacagtaataaacttctttttggcattaaatattttaaaaattggattctagaacggcttgcttcaagcgctccagttccttcctggagagctaaattgcacagaatgcggggtgtaaatatcggggagaatgtatatgtcggctatgatgtggtttttgacaggatacaccctgaattaattacgataggggattactcggaaattggcgataaatgcatattatctgcacatacgagaggaagtttgactacaagacaggcatatccgagaactatggctcccataaaaataggacgtggagtctctgtaaatccaggatgtataatcacgcagggtgttgaaatcggggataactcaataataggtattggatccgtagttagccgtaatatctctccaaatagtcttgccctgggttatcctgcaagggttatcaaaaaacttgaagatgtaggagaacttaaaacctga

SEQ ID NO: 15836 - protein, 182 aa, Methanosarcina barkeri str. fusaro
MGGIRTTAVVSNRDQVTFCEIADHYHSNKLLFGIKYFKNWILERLASSAPVPSWRAKLHRMRGVNIGENVYVGYDVVFDRIHPELITIGDYSEIGDKCILSAHTRGSLTTRQAYPRTMAPIKIGRGVSVNPGCIITQGVEIGDNSIIGIGSVVSRNISPNSLALGYPARVIKKLEDVGELKT

SEQ ID NO: 15837 - DNA, 609 bp, Methanosarcina barkeri str. fusaro
  CDS (1)..(609): transl_table=11
atggaatttaaaatgagagagaaagaaaaaatgctagcaggcaaaccgtatagagcttttggggaagaactagtcgcagaacgtcaggctgcaaaagaattgatttttgaatttaattctcttcatccaagtaaaattgagcaacgaaacaaaatcattcaaagactctttggcaaaacgggcaaaaacttcattattgaaccaccctttcgctgcgattatggatacaatatctccataggagagaatttttacgccaattataattgcacaattatcgactgcgctaaagttaccatcggtgacaacgcttttatcgcacccaatgtgagtctttttactgcaggacatcccgtacattccgatatacggaattaccagttagaatatgccacccctatttttataggcgataatgtttggcttggtggtggtgctattgtgaatccgggtgttatcattgatgataacgtcgtcattggttctggaagtgtagtaacaaaggatattccggccaatgtaatcgctgttggcaatccttgtagggtgaaacgcaaaattacagaaaaagataaaactaattttttggagatgatgcataatgactaa

SEQ ID NO: 15838 - protein, 202 aa, Methanosarcina barkeri str. fusaro
MEFKMREKEKMLAGKPYRAFGEELVAERQAAKELIFEFNSLHPSKIEQRNKIIQRLFGKTGKNFIIEPPFRCDYGYNISIGENFYANYNCTIIDCAKVTIGDNAFIAPNVSLFTAGHPVHSDIRNYQLEYATPIFIGDNVWLGGGAIVNPGVIIDDNVVIGSGSVVTKDIPANVIAVGNPCRVKRKITEKDKTNFLEMMHND

SEQ ID NO: 15839 - DNA, 531 bp, Desulfuromonas acetoxidans DSM 684
  CDS (1)..(531): transl_table=11
atgtctgttcccaagctgttttcatggattcgcggcggtctggttcaagggcctggttatggctattacatgctgttctggtggttgtacaccgaacggacattacgttcgaaggccgcggtatcgccctataaccgcctgcgcaagttgttgttggtcaagtcggggattgttattggcgagggaacggagatcggctttggcagttttattctcgggataagccgcacgccaccgtccgtaacctttggcaaacgtgtagccgtggcgccttatgtcgtgtttgttgccagcagttaccccgataactctcggctggcgtatcaccctgaagccaaggggctggttcagaagaccgcaccgattttggttgaagatgatgcttggatcggggcgcatgcggtcattttccccggtgttaccgtgggggcttcggccattgttgctgctggtgctgtggtgagacaggatgtgccgccaaaatcgattgttgccggtgtgccggctaaggtcatacgcacgctggattaa

SEQ ID NO: 15840 - protein, 176 aa, Desulfuromonas acetoxidans DSM 684
MSVPKLFSWIRGGLVQGPGYGYYMLFWWLYTERTLRSKAAVSPYNRLRKLLLVKSGIVIGEGTEIGFGSFILGISRTPPSVTFGKRVAVAPYVVFVASSYPDNSRLAYHPEAKGLVQKTAPILVEDDAWIGAHAVIFPGVTVGASAIVAAGAVVRQDVPPKSIVAGVPAKVIRTLD

SEQ ID NO: 15841 - DNA, 555 bp, Jannaschia sp. CCS1
  CDS (1)..(555): transl_table=11
atgaaaacagaacgacagaagatggacgcgggcaaatggtacacatgccttgatgatgagcttgaagcgcttcgtgttaaggcgcgtgctgcggtgcatgaacacaatactctgccgccggatgcccgaggtgcgatgggaccaaaactcgcgcaacttgtcaggactggtgcggcaatcattgaggcaccgttccactgtgcatacggcatcaatatcgtgcttggtgagcaggtttttctgaatgcaggttgcacaatcctggattgcgccaaggtgacgatcagcgaccagtgtcagcttgggccgaacgtgcagatctattgtgccgaacaccataaggacccgatcaagcgaagcgtcgaggggttggagatcgcccgtccagtcttcatcgggaagcaagcctggattggtgggggagcgatcattctggccggtgttacaattggggccggtgcagtcgtcggggcgggcagcgtcgtcacgaaggatgttggtcccggcgcggttgtggtcggcaatccagcccgacccgttggtcgagccgaataa

SEQ ID NO: 15842 - protein, 184 aa, Jannaschia sp. CCS1
MKTERQKMDAGKWYTCLDDELEALRVKARAAVHEHNTLPPDARGAMGPKLAQLVRTGAAIIEAPFHCAYGINIVLGEQVFLNAGCTILDCAKVTISDQCQLGPNVQIYCAEHHKDPIKRSVEGLEIARPVFIGKQAWIGGGAIILAGVTIGAGAVVGAGSVVTKDVGPGAVVVGNPARPVGRAE

SEQ ID NO: 15843 - DNA, 630 bp, Frankia sp. EAN1pec
  CDS (1)..(630): transl_table=11
gtgaccagggttctcggctttcttcgttccctgctcgacgcccgcgccctcctgcactcactgcggatcctccacttctacaactactcgcatgtccagcaggttcgccggatgacgatcgaacggggtgtccgcctggcgccgaacgtctccgtccggaacggggagcgggtggagatacgggcgttcgcccacatcggtgagcgggtttcgctgtgggccggtgaccgcactggccggatcgagatcggcgagcactccctgatcggcccgggcacgtttctcacggccgcgaactacgagacgctgccggacatcgtcatcgacagccagccgaagcgggaggcggacatcgtcatcggtaacgacgtgtgggtcggcgccaactcggtggttcttccgggcgtgacgataggcgacagcacgattgtcggcgccggttctgtcgtcacgaagtcgttgcccgccggagcgttggccgcgggtgttccggcgaaggtcatcgggaagcgcggggagtcgacccgttccggtcgtgccgtccaggcggaccggcctgagcagaacggccgtaccggtgcggacggcaccgggcggcgtcccggctcccacccggcgggtgagcagtga

SEQ ID NO: 15844 - protein, 209 aa, Frankia sp. EAN1pec
MTRVLGFLRSLLDARALLHSLRILHFYNYSHVQQVRRMTIERGVRLAPNVSVRNGERVEIRAFAHIGERVSLWAGDRTGRIEIGEHSLIGPGTFLTAANYETLPDIVIDSQPKREADIVIGNDVWVGANSVVLPGVTIGDSTIVGAGSVVTKSLPAGALAAGVPAKVIGKRGESTRSGRAVQADRPEQNGRTGADGTGRRPGSHPAGEQ

SEQ ID NO: 15845 - DNA, 555 bp, Shewanella baltica OS155
  CDS (1)..(555): transl_table=11
atgactgaattccaaaagatgatcgctggccaagaatatgattgccttgccagcgaactattaagtttacgagctcaacagcaacggctgaatcgacaattaaatcaaataattgaccacgataccccagagtacagccaactctgtcagcagctcattccccataaatcaccagccgcaacgatatccacgccgatttttatcagttatggcgccaacctatcccttgctgacaaagtgtttatcaatgtgaatgtcaccttgcaggataatgcgcctatttctattggtgagcagactatggtcggccccaatgcacagttttatacctcgagtcacccactcgatgccgagctgcgttgctcaggtttagaaaccgctaaagcaattaaggtcggtaaacgggtatggattggtggcggcgctatcataatgccaggcgtcattattggtgatgacgccatcataggcgctggcgccgtagttacaaaaaatgtagccgccaaaaccgtggtcgcaggtaaccccgcaaagccgatccggcagctaatttaa

SEQ ID NO: 15846 - protein, 184 aa, Shewanella baltica OS155
MTEFQKMIAGQEYDCLASELLSLRAQQQRLNRQLNQIIDHDTPEYSQLCQQLIPHKSPAATISTPIFISYGANLSLADKVFINVNVTLQDNAPISIGEQTMVGPNAQFYTSSHPLDAELRCSGLETAKAIKVGKRVWIGGGAIIMPGVIIGDDAIIGAGAVVTKNVAAKTVVAGNPAKPIRQLI

SEQ ID NO: 15847 - DNA, 585 bp, Shewanella baltica OS155
  CDS (1)..(585): transl_table=11
atggttgagagtaaagggactgagataaaacagacagagaaacaaaaaatgttagcgggtcagccctataaggcatgggatgatgagctattggctgagcggatgcgggcgaaatccgtttgccatcagtttaatctggccgaaccgactcagcttgatgcccgtatggatcaccttcgtggcctgctcgatattcaacactgcgcccatattgagcccaattttttttgtgactacggttataacattcatattggtaaacaattttacgctaatcataatctaaccatattagatgtttgctctgtctcgattggcgataacgtgatgtttggtccccatgtgatgatttctaccgcaacgcatcctatcgatcccattgcgcggcaaacgacggaatacggcgcgccaattcaaattggtaataatgtctggcttggcggtaacgtctctgtgttgcccggtgtgaccattggcgataattgtgtcatcggtgctggtagtgtcgtgaataagagcattccggcgaactgtgtggcggctggcaacccttgtaaggttatcaaacccatcaatgtggcataa

SEQ ID NO: 15848 - protein, 194 aa, Shewanella baltica OS155
MVESKGTEIKQTEKQKMLAGQPYKAWDDELLAERMRAKSVCHQFNLAEPTQLDARMDHLRGLLDIQHCAHIEPNFFCDYGYNIHIGKQFYANHNLTILDVCSVSIGDNVMFGPHVMISTATHPIDPIARQTTEYGAPIQIGNNVWLGGNVSVLPGVTIGDNCVIGAGSVVNKSIPANCVAAGNPCKVIKPINVA

SEQ ID NO: 15849 - DNA, 726 bp, Ralstonia metallidurans CH34
  CDS (1)..(726): transl_table=11
atgcgcgagtggctcctatccgccatttacaaaggaagaatcatgccgacagagaacgaggctgagcgacagtccgccgatatccgcaagcgctgcgccgaactcggcggccgcatcgctcctacagcacaagtcagcagtgcggtgagcttcgacgaagcgattgatattggtgacggcgctgtggcctacgcgccggcatttattggcgggttcacctacgtcaatgtaggtgctgtggtctttccccacgtccgcatcggcaaattctgctcgatcgggcgtaacgtgcagatcggggcggcacgtcaccccgtggaattcctgagttcccacccattccaattctccccagcgctcttcaatcgcgtgccgggctatcctgccttgcagacagagaagtggcgctttcacgcgccaactaccgttggcaacgacgtttggcttggaacgaactgcgtaatcgtggctggcgtcaagattggggatggggcggttgtgggcgctggcgctgtggtgacgaaggatgtcgccccttacgaaatcgtgggaggagttccagcgcggcgcatccgacttcgcttcgatgaagacaaagtgtcgcgcctgctcaagacacgctggtgggatcttccccttgattcattgaaagatattccgttcggcaatatcgatcaggccattgcatccattgaagccatccgaagcagcaaggaaagcgcgtga

SEQ ID NO: 15850 - protein, 241 aa, Ralstonia metallidurans CH34
MREWLLSAIYKGRIMPTENEAERQSADIRKRCAELGGRIAPTAQVSSAVSFDEAIDIGDGAVAYAPAFIGGFTYVNVGAVVFPHVRIGKFCSIGRNVQIGAARHPVEFLSSHPFQFSPALFNRVPGYPALQTEKWRFHAPTTVGNDVWLGTNCVIVAGVKIGDGAVVGAGAVVTKDVAPYEIVGGVPARRIRLRFDEDKVSRLLKTRWWDLPLDSLKDIPFGNIDQAIASIEAIRSSKESA

SEQ ID NO: 15851 - DNA, 549 bp, Paracoccus denitrificans PD1222
  CDS (1)..(549): transl_table=11
ttgaccgcgcgcgaggacatgctggccggccggccctataaccccggcgacggcgagttggtggcgatgcgcaaggccgcgcagggattgatgcgcgactacaataacacgatcatcggcgacaagacccgcgcccgcacgctgacccagctgctgggcacgtggaacggcgccgtgatccgcacccccttccatgtcgattacggcaagcatatccatttcgggccggattgcttcgtgaattacggctgcttcttcatggatatctgcgagatccgcatcggcgcgcgctgccagttcggcaccgccgtgcaactgctgaccgaggaccggccgcgcgaccgcgaaagccgggccacgggcgaggaatggggcaagcccatcgccatcggcgacgatgtctgggtgggcggcggcgcaatcgtcctgccgggcgtgtccatcggcgacggcgccatcgtcggcgccggcgcggtggtgacgcgcgacgtggcgccggggaccaccgtggtcggcaacccggcccgtccgctgccgccgaaatcctga

SEQ ID NO: 15852 - protein, 182 aa, Paracoccus denitrificans PD1222
MTAREDMLAGRPYNPGDGELVAMRKAAQGLMRDYNNTIIGDKTRARTLTQLLGTWNGAVIRTPFHVDYGKHIHFGPDCFVNYGCFFMDICEIRIGARCQFGTAVQLLTEDRPRDRESRATGEEWGKPIAIGDDVWVGGGAIVLPGVSIGDGAIVGAGAVVTRDVAPGTTVVGNPARPLPPKS

SEQ ID NO: 15853 - DNA, 615 bp, Shewanella frigidimarina NCIMB 400
  CDS (1)..(615): transl_table=11
atggcagacatagattatcaagcacaacataagaaacgcttatcatggatgccatggctgtatttttcacttaaaccaaagcatttatcatgggcaaaaccttggcaagatgacattcaacaacggttatgtcagcttgaaaccattcatataggtgaacagtgttttattgccccacaagctcagctttttgccgaaccgggtcgtgatatctctataggtaaccaatgcatgattgccgcggatgtgtttatgcatggtccaatcaccctaggcaatgaagtggccattaaccatggctgtagtatagacgggggccgaaatggtatcaaaattggcaaccaaactcgtattgctaacaacgtcacgatttatgcctttaaccatggcatgtcacccagcgaacccatttataaacaacccgcgacatcaaaaggtgtagtgataggccaagatgtatggattggcgctcaggcgggcattgttgacggtgtcaccattggagattgtgcggtgattggcatgggctgcattgtcacaaaagatgtacccaattttgctattgttgctggtaatccagcccgagttattggcgaccgacgcgataaaaaatag

SEQ ID NO: 15854 - protein, 204 aa, Shewanella frigidimarina NCIMB 400
MADIDYQAQHKKRLSWMPWLYFSLKPKHLSWAKPWQDDIQQRLCQLETIHIGEQCFIAPQAQLFAEPGRDISIGNQCMIAADVFMHGPITLGNEVAINHGCSIDGGRNGIKIGNQTRIANNVTIYAFNHGMSPSEPIYKQPATSKGVVIGQDVWIGAQAGIVDGVTIGDCAVIGMGCIVTKDVPNFAIVAGNPARVIGDRRDKK

SEQ ID NO: 15855 - DNA, 777 bp, Escherichia coli
  CDS (1)..(777): transl_table=11
atgttaagactcaagactcaagactcaagactcaagactcaagactcaagactcaagactcaagactcaagactcaagactcaagactcaagactcaagactcaagactcaagactcaagactcaagactcgttttccgttgatgataatgggtcaggtaatgtttttgtatgtggagatcttgtaaatagcaaagagaataaagttcagttcaatggaaacaataacaaacttattatagaagatgatgttgagtgtcgatggcttaccgtaatatttaggggtgataataattacgtaagaatacataaaaacagtaagattaaaggtgatattgtcgcaacaaaaggttcaaaagttattatcggtagaagaacgacaataggtgcaggttttgaagtcgtcactgataagtgcaatgttacaattggccatgactgcatgatagcaagagatgttattttgcgtgcatcagatgggcatcctatatttgatattcatagcaaaaaaaggattaattgggcaaaagatatcattatatctagttacgtatgggtagggagaaatgtctctataatgaaaggagtatctgttggaagcggatctgtcattgggtatgggagtattgtaactaaagatgtgccatctatgtgtgcagcagccggtaatccagcaaaaataataaaaagaaatataatatgggcaagaacggataaagcggagctaattagtgatgacaagagatgctccagctatcatgcgaagctcacgcaataa

SEQ ID NO: 15856 - protein, 258 aa, Escherichia coli
MLRLKTQDSRLKTQDSRLKTQDSRLKTQDSRLKTQDSRLKTQDSFSVDDNGSGNVFVCGDLVNSKENKVQFNGNNNKLIIEDDVECRWLTVIFRGDNNYVRIHKNSKIKGDIVATKGSKVIIGRRTTIGAGFEVVTDKCNVTIGHDCMIARDVILRASDGHPIFDIHSKKRINWAKDIIISSYVWVGRNVSIMKGVSVGSGSVIGYGSIVTKDVPSMCAAAGNPAKIIKRNIIWARTDKAELISDDKRCSSYHAKLTQ

SEQ ID NO: 15857 - DNA, 651 bp, Pseudomonas fluorescens
  CDS (1)..(651): transl_table=11
atgaagcacattctggaaacctttaagaaacatcatgtatttttaatatataaaatatcaaaaagaatactgaccttattaagagtttttttcatcctaaagatcaatccaagatcaagaacaaaatgcacattgggagcaaattctagaattcttggaatacaaaacataacaatagcaggaaacttctctctgggtgatcacttttggttggaagccatctcagagtatcgtgaccagatttttgagccacacattgagatcggagataatttttccgcaagcgactttgttcaccttgcctgcgttaacaaaatctccataggacgaaacgtacttttaggaagcaaggtgcacataacagaccattctcatggagtttatagcggagaagctcattcaagtccccacatagcacctatcgagcgacctctatcaagccccggacatgtaatcattgaagataatgtatggatcggggataacgtgacaatacttccaaatacatctataggaagtggatctattatcggggcaaacagtgtagtttcaaaaaacatcccaaaaaatgtcattgccgtcggagtacccgcaaaacctattaagaggtgggacgacatacaaaaggaatggacagccatactgatttaa

SEQ ID NO: 15858 - protein, 216 aa, Pseudomonas fluorescens
MKHILETFKKHHVFLIYKISKRILTLLRVFFILKINPRSRTKCTLGANSRILGIQNITIAGNFSLGDHFWLEAISEYRDQIFEPHIEIGDNFSASDFVHLACVNKISIGRNVLLGSKVHITDHSHGVYSGEAHSSPHIAPIERPLSSPGHVIIEDNVWIGDNVTILPNTSIGSGSIIGANSVVSKNIPKNVIAVGVPAKPIKRWDDIQKEWTAILI

SEQ ID NO: 15859 - DNA, 579 bp, Staphylococcus haemolyticus
  CDS (1)..(579): transl_table=11
atgacagaaaaagaaaagatgttagcacaccagtggtatgatgccaattttgataaagatttggaaactgaacgagtacgtgcaaaagatttatgttttgactttaaccaaacgcgtccgagtgatgacagtagaagacaggctatattaactgaattatttggttatacattagagaatgtcgcaattaatagtccgttcgatacagattatggttggaatgttaaattaggcaaaaatgtgtttgttaatagtaattgttacttcatggatggaggtggcatcacgattggtaatgatgtatttataggtccgtcttgtggcttctatactgcccatcatccattaacgcctaaagaacgtaatgcaggtttagagttggcgcagccgattactattggaaataatatttggtttggtggcaatgtcgttgtcacacctggtgtaacgattggagatggttcagttatagcagcaggaagtgtagtaactaaagatgtaccaccgaatagcctagttgcgggtgtgcctgctaaagtaataagagagataaatgaaaatgacgcacctaaaaattaa

SEQ ID NO: 15860 - protein, 192 aa, Staphylococcus haemolyticus
MTEKEKMLAHQWYDANFDKDLETERVRAKDLCFDFNQTRPSDDSRRQAILTELFGYTLENVAINSPFDTDYGWNVKLGKNVFVNSNCYFMDGGGITIGNDVFIGPSCGFYTAHHPLTPKERNAGLELAQPITIGNNIWFGGNVVVTPGVTIGDGSVIAAGSVVTKDVPPNSLVAGVPAKVIREINENDAPKN

SEQ ID NO: 15861 - DNA, 648 bp, Aspergillus fumigatus Af293
  CDS (1)..(648)
atgatgcccagaacggagaaagacagccagatcatcgaaaaggccaaaagccttcagggtgtctgctggggcgaggaatatgagaagatgatatcagggatactatatagtccgctcgcgtcggagctcatagagggtcgcaccagggcgcgcttcctaatgtcggaattcaatggtcctcctaaacccgatgtgccgttctctgagaccgttgcgcagagggaggtgacattaaggaagttgtttgggcgggtaggaaggggcgtctatatcgagcctcctctctttgtggactatggctgcaacatcagtgttggagacggtttttatgcaaacttcaatttgactgtcctggactgtggactggtcaccatcggaaacaacgtggagattggcccgaatgtaaacatcatcacgggcgagcacgagacgaagatcgaagcccgtcgcaaacatcgaggaacggagttcaccagggaagtcattatcggtgatgattgctggattggagcgaatgtgactatcttggctggggtgaccattggatcagggtgctccatcggtgctggctctgtggtgaagagagatatcccgccgtatagtattgcagtgggaagtcctgctcgagttatcaggtcggcagtctga

SEQ ID NO: 15862 - protein, 215 aa, Aspergillus fumigatus Af293
MMPRTEKDSQIIEKAKSLQGVCWGEEYEKMISGILYSPLASELIEGRTRARFLMSEFNGPPKPDVPFSETVAQREVTLRKLFGRVGRGVYIEPPLFVDYGCNISVGDGFYANFNLTVLDCGLVTIGNNVEIGPNVNIITGEHETKIEARRKHRGTEFTREVIIGDDCWIGANVTILAGVTIGSGCSIGAGSVVKRDIPPYSIAVGSPARVIRSAV

SEQ ID NO: 15863 - DNA, 747 bp, Aspergillus fumigatus Af293
  CDS (1)..(747)
atgtccatctttcagagtggcattgatcagcggccggcacatactggcaccgtggacatgaacagcccccaggcacaggctcgaatggctcttagcattgagcatcagctgtccaatcgcaccgtaagtgaagaatcggagaaggacaagatgattcgcggcgagctttatcgccctttcgatattcaccttgtggaggagcgcgagcgatgcaaagcagccatctggcggttcaacaatgcttgtaatcctgtttcgggcttgagtgcgaaggaacagaatcgcctgctgaaggaggttctgattcctcctggttcggttgttggttctccatcgagcgtgggaccactaagacccgccggatctattgggcaaggcgctgttgttgagtcaccttttcaatgccactatgggttcaacattcacattggtgaggacgttatgatatcagagaattgtctcttcgtggatgactgtcctatcactatcggtgctcatacatggataggtcctcgagtcactattctcagttctatggcccatgcaaacatgcaagaacggaagggctctcaaagccgctaccaaggccgtcccgtcacgattgaggaggactgttacgtcggcgctggttgcactatatatcccggtgtccgtcttcggcgtggtgcctatgtggctccgggcgaggtagtcaaaagtgacattgtagcctatggttttcagggtctaaagccaagctacatgtga

SEQ ID NO: 15864 - protein, 248 aa, Aspergillus fumigatus Af293
MSIFQSGIDQRPAHTGTVDMNSPQAQARMALSIEHQLSNRTVSEESEKDKMIRGELYRPFDIHLVEERERCKAAIWRFNNACNPVSGLSAKEQNRLLKEVLIPPGSVVGSPSSVGPLRPAGSIGQGAVVESPFQCHYGFNIHIGEDVMISENCLFVDDCPITIGAHTWIGPRVTILSSMAHANMQERKGSQSRYQGRPVTIEEDCYVGAGCTIYPGVRLRRGAYVAPGEVVKSDIVAYGFQGLKPSYM

SEQ ID NO: 15865 - DNA, 687 bp, Aspergillus fumigatus Af293
  CDS (1)..(687)
atggcagccagcgaaaagcgccccgagatcatcgcactcgcgcgcgaactgaaagacgttcccatgtgcgaggaatacgagcgcatggtttccggcatgatgtacaatcctaacacacccaaactactcgaggcacggcaccggtgtcgcgggctaacagccgactacaacggcctggatacgaaaacggtgccctacgaacaaatcgccgagaaaaggctcgagctgctccggcgcgtggtcggccgagtgggcgacggcacgtttatcgagccgccgttcatggcagactacggatgtaacatcattatcggcaagaattgtttcattaattggaatctcactgtgctggacacaagcctcgtcgtcatcggtgaccgggttcagataggaacgaacgtcagcatcatcactgccggccacgacacgagtatcctgtcgcggcggaagaatgtggaattcggccacccgatcttcatcgaggatgactgctggattggtgcgaatgtcgtcattctgcctggcgtgaggatcgggcagggttcgacgattggcgcgggctccatcgtcaccaaggatattccgcccttctctgtggcactggggagtccgtgccgggtcaaacggacgattccatcggcggaggaagaagagcaggatgagacaaatccgttcaggaatctgtag

SEQ ID NO: 15866 - protein, 228 aa, Aspergillus fumigatus Af293
MAASEKRPEIIALARELKDVPMCEEYERMVSGMMYNPNTPKLLEARHRCRGLTADYNGLDTKTVPYEQIAEKRLELLRRVVGRVGDGTFIEPPFMADYGCNIIIGKNCFINWNLTVLDTSLVVIGDRVQIGTNVSIITAGHDTSILSRRKNVEFGHPIFIEDDCWIGANVVILPGVRIGQGSTIGAGSIVTKDIPPFSVALGSPCRVKRTIPSAEEEEQDETNPFRNL

SEQ ID NO: 15867 - DNA, 603 bp, Lactobacillus crispatus
  CDS (1)..(603): transl_table=11
atgtcgcttagaacaaaatttaattacatggctactggtcgtccttataatgatgcggatcctcgccttggcaccttgagagaccttgctaccttgaagaccaataatattaataatgagaatgatcacgctaaaaaagaaatattaatcaaagaactctttggttcaacaggtgagcatcccttcgtgaaccctaattttcgttgtgaatttggacaaaatattcatgttggggataacttttatgccaactatgattgcacgattttagatggcgcgcctgtttatattggaaacaatgttttgtttggtcctaaggttggcttgtataccagcaaccatttatttgatccagccgagcgaaaagccggtggttgtgttgcacattcgatcggcattggtgacaatgtctggctaggtgcaggggttagcgtaactccagatacaattattggacgtaattcaattattggtgcaggcagtgtagttgtgaatgacatcccagataatgtaattgcagcggggaatccatgcaaggtaattagaaagattaccgcggcagatcgtactggattcgatcctaatagtggtcaatttctatag

SEQ ID NO: 15868 - protein, 200 aa, Lactobacillus crispatus
MSLRTKFNYMATGRPYNDADPRLGTLRDLATLKTNNINNENDHAKKEILIKELFGSTGEHPFVNPNFRCEFGQNIHVGDNFYANYDCTILDGAPVYIGNNVLFGPKVGLYTSNHLFDPAERKAGGCVAHSIGIGDNVWLGAGVSVTPDTIIGRNSIIGAGSVVVNDIPDNVIAAGNPCKVIRKITAADRTGFDPNSGQFL

SEQ ID NO: 15869 - DNA, 642 bp, Cryptococcus neoformans var
  CDS (1)..(642)
atgccccctgctcctgctcctcaccttaccaacaagcttattccacctcccgaggaaggtgaagaccctacccagttgtctttgatgatctccaccaaaccctacctcgcccttgacaaataccttgaccgtcttcgcaatcgtggtgctatcaaactagatgaaattacgagaacacctgatcatgagaagcgcatggagctttggaaggagtttgccaacataggcgaaaatgtatcaatcactcaacgatttttctgcgaatatggcttcaatttgcattttgaaggcgagaacttcatcgcagctgattgtacattcgttgatgtctgcccaatttacatcggcaagagaacgatgattggtccgaacgtcagaatatacactcccgaccaccctatttctcccgaagctcgagccggtttgactggtgaggagtggggcaagattgtaaggattgaagaggactgttggatatgcggttctgctatcatcttgcctggcgttaccgtcggtaagggaagcactgttgccgctggagcagtagtcacgaaagacatccctcccaggagtctggccatgggtaatcctgctcgtgtcgtcaagaaaattctggaggacggtaccattgtcaaggcttaa

SEQ ID NO: 15870 - protein, 213 aa, Cryptococcus neoformans var
MPPAPAPHLTNKLIPPPEEGEDPTQLSLMISTKPYLALDKYLDRLRNRGAIKLDEITRTPDHEKRMELWKEFANIGENVSITQRFFCEYGFNLHFEGENFIAADCTFVDVCPIYIGKRTMIGPNVRIYTPDHPISPEARAGLTGEEWGKIVRIEEDCWICGSAIILPGVTVGKGSTVAAGAVVTKDIPPRSLAMGNPARVVKKILEDGTIVKA

SEQ ID NO: 15871 - DNA, 513 bp, Klebsiella pneumoniae
  CDS (1)..(513): transl_table=11
gtgtcacgcaaacaagataatcccgatgttcaaaggagttttttagtttccttaatcagatcctttataagaaattggagatttcaattaattagatttaaaaatagagggaaaatttcgcggggaaaaaatgcttatgttggcccaagtgcaaatgtttatatccctaattttgtaaaaatgggtgataacatatctattggtgctgattttatttcacaagtgaatctgactattggaaatgatagtttaatatcctcacgtgtatcatttattggtaacgaccatgatttattcaatgagtcatcttcagcatatttctctggaagaaacaagcctgccactatagtactggaaggagataattttatcggatttggttcggttattttgggaaatgtcacgatagggaaaggtgctattgttgcagcctgttcatttgttaataaagatgtcccacctaattctgtagtaggtggggtacctgcaaaagtattaagaaatcgttattga

SEQ ID NO: 15872 - protein, 170 aa, Klebsiella pneumoniae
MSRKQDNPDVQRSFLVSLIRSFIRNWRFQLIRFKNRGKISRGKNAYVGPSANVYIPNFVKMGDNISIGADFISQVNLTIGNDSLISSRVSFIGNDHDLFNESSSAYFSGRNKPATIVLEGDNFIGFGSVILGNVTIGKGAIVAACSFVNKDVPPNSVVGGVPAKVLRNRY

SEQ ID NO: 15873 - DNA, 555 bp, Vibrio cholerae non
  CDS (1)..(555): transl_table=11
atgagagaaagagaaaaaatgctctctggcgagtattacgatccgagtgacgctgagctcgtcaagttgcgtcttgaggctcgtttactcacggagaagctaaatcaaacaagtgtaagttgcccagagaaaagagtagagataatcaaatccttgttgggctctacaggaaatagcattcacattgaatctaccttcaactgcgattacgggctgaatatacacgttggtgagaatttctatgccaattttggctgtgtcattttggacgtagcggaagttcgtattggcgataactgttttatagcaccacaggttggaatttatactgcaactcatccaatcgatccgattcagagaaacagtgggttagagtttggaaagcaaatcagaataggtaacaactgttggattggaggtcatgcaacgatcaacccaggagtgatgttaggtgacaatgttgttgttgcctcgggagccgttgtgacaaagagttttggtagcaatgttgttattggtggcaatccagcacgagtgttaaaagaaatcgagtaa

SEQ ID NO: 15874 - protein, 184 aa, Vibrio cholerae non
MREREKMLSGEYYDPSDAELVKLRLEARLLTEKLNQTSVSCPEKRVEIIKSLLGSTGNSIHIESTFNCDYGLNIHVGENFYANFGCVILDVAEVRIGDNCFIAPQVGIYTATHPIDPIQRNSGLEFGKQIRIGNNCWIGGHATINPGVMLGDNVVVASGAVVTKSFGSNVVIGGNPARVLKEIE

SEQ ID NO: 15875 - DNA, 645 bp, Rhizobium etli
  CDS (1)..(645): transl_table=11
atgcaaaatatcgccagaaatatctccaatcgattagccgggtttgtctatcgccagatgcgtaaggcgcatgcgaatgcaaattcaaccgttggctactcagtaaatgccaatggcgccttgctggccgggtgtgtcattgactgcagatccggcaagtccgacggacgggtattctttggcaaggattccgttctctcttgcaggattgttctcgagcgtgatgttggcacggtgcacattgggaatgacagctatgtaggaggttctcaaatcatttgcgccgaccacatcgagattggaaataatgtccttatctcctggggctgcacaattgtcgatcacgattcacattccgtcgattggcgcaaccgtgccgaggatgttcgtaagtggcgtgaagggcttttgtcgggaggccttgaaaaggcgagcgaatccaaggactgggcggttgtcgagaaggctccgataaaaattggagataagacttggctcggtatgaatgtaaccgtgttgaaaggaataacgattggagaaggggcggtcgtcgccgctggatctgtcgtcacaaaggatgttgacccgtggactctggttgccggaaatcccgcgcgggtgatcaaggaattgccgaaatcatga

SEQ ID NO: 15876 - protein, 214 aa, Rhizobium etli
MQNIARNISNRLAGFVYRQMRKAHANANSTVGYSVNANGALLAGCVIDCRSGKSDGRVFFGKDSVLSCRIVLERDVGTVHIGNDSYVGGSQIICADHIEIGNNVLISWGCTIVDHDSHSVDWRNRAEDVRKWREGLLSGGLEKASESKDWAVVEKAPIKIGDKTWLGMNVTVLKGITIGEGAVVAAGSVVTKDVDPWTLVAGNPARVIKELPKS

SEQ ID NO: 15877 - DNA, 558 bp, Bacillus stearothermophilus
  CDS (1)..(558): transl_table=11
atgaaaaccgaaaaagaaaagatggtagcgggacacttgtacaatcccgctgatccggagctcgtcaaggagcgggagcgggcgcggcggctcgttcgtttgtataacgaaacgttggaaacggaatatgaaaagcgaaccgctctgctgaaggagctgttcggttcaacgggagaacggctgtttatcgagccgaacttccgctgcgactacggctacaacattcatgtcggcgaaaacttttttatgaactttgatggcgtgattttggatgtatgtgaagtgcgaatcggcgaccattgttttattggtcctggtgtgcacatttatacggcgactcacccgctcgatccgcacgaacgaaattccgggttggagtacggaaagccggttgtgatcggccataacgtctggatcggcgggcgggccgtcatcaacccgggcgtcacgatcggcgacaacgctgtcatcgcctcaggggcggtcgtgacaaaagatgtccccgccaacgcggtcgttggcggaaacccggcgaaagtgatcaaatggctcaaatag

SEQ ID NO: 15878 - protein, 185 aa, Bacillus stearothermophilus
MKTEKEKMVAGHLYNPADPELVKERERARRLVRLYNETLETEYEKRTALLKELFGSTGERLFIEPNFRCDYGYNIHVGENFFMNFDGVILDVCEVRIGDHCFIGPGVHIYTATHPLDPHERNSGLEYGKPVVIGHNVWIGGRAVINPGVTIGDNAVIASGAVVTKDVPANAVVGGNPAKVIKWLK

SEQ ID NO: 15879 - DNA, 594 bp, Rhizobium leguminosarum bv
  CDS (1)..(594): transl_table=11
atgaagcttagcctgaccacgatcgcaaacatggcggcgggatggttggctcgcaagcggagcaaatttgtcgttgggagtggtagcaatgtccgttggctgatattgcgatccgttcgcggaggcaatgtgaagatcggcgagaactgtatcatcaattgcaatatcagcttcgatgatccccgcggccgcatcagcattggcgatcgctgctatattggtgccagtcacctggtatgccattccggaattacgattggaaacgatgtcatcatctcatggggagtgacaatcgtggatcatgattctcattctctcgactgggaattgcgcaagaacgatgtgaccgattggggcttaggaaagaaggattggaccggggtttccatcaagccagtgtttattcaaaacaaggtgtggattggttttggcgtgagtatcctgaagggggtgacagtcggcgacggggcagttattggagcccatgctgttgtcacgcgcgatgtccccccttacaccgtcgtcgccggtaaccccgctcgcataattcggaatctcaagccgacgcaaaaagagacagaaggtcaaccatga

SEQ ID NO: 15880 - protein, 197 aa, Rhizobium leguminosarum bv
MKLSLTTIANMAAGWLARKRSKFVVGSGSNVRWLILRSVRGGNVKIGENCIINCNISFDDPRGRISIGDRCYIGASHLVCHSGITIGNDVIISWGVTIVDHDSHSLDWELRKNDVTDWGLGKKDWTGVSIKPVFIQNKVWIGFGVSILKGVTVGDGAVIGAHAVVTRDVPPYTVVAGNPARIIRNLKPTQKETEGQP

SEQ ID NO: 15881 - DNA, 573 bp, Dictyostelium discoideum
  CDS (1)..(573)
atggataccaaaatgacagaaagagaaaaaatgaccaaaggattaatgtatgacccaggtgatgaagaattatgtaaaggtagaaccgaagccagacaacttattcatagatttaataatagcatggataagttggaaagaaaagatatcaccaaacaattatttggatcaactggcgaaaagatttatcttgaaccaacattaagagtggattatggctacaatattcacgttggtgagaatttctatgcaaattttggtgccatatttttagatatttgcccaattacaattggaaagaatgcaatgttagctccaaatgttcaattatattctgcaactcacccaattgatccaactgaacgtaactctggtttagaatttggtaagcctattacaattggagataatgcttggattggtggtggagcaataattttacttggtgtcacattaggtgataatgttgttgttggttttggagctgtagtaactagatcatttggaagtaatgttgttattgctggaaatccagccaaagttattaaagaaatacctgttaaatccgaataa

SEQ ID NO: 15882 - protein, 190 aa, Dictyostelium discoideum
MDTKMTEREKMTKGLMYDPGDEELCKGRTEARQLIHRFNNSMDKLERKDITKQLFGSTGEKIYLEPTLRVDYGYNIHVGENFYANFGAIFLDICPITIGKNAMLAPNVQLYSATHPIDPTERNSGLEFGKPITIGDNAWIGGGAIILLGVTLGDNVVVGFGAVVTRSFGSNVVIAGNPAKVIKEIPVKSE

SEQ ID NO: 15883 - DNA, 657 bp, Physcomitrella patens
  CDS (1)..(657)
atgtcgacgactaaccttcccgaagatggtcctctgcctcaaggagctccggtgccagagcccttctactggcctctgggcgaggcattgttcgcccagagacgagacgcacgggaaaagctgcgaagatacaacatgacgggcctttcgtctttgcccacaaaggagctggaggctcagcgaaccgagattttgaaagagttgtttgggaaaatcaacattgagaagccccccttcatagagccgcctttccagtgcgactacggccacaacatcgaggtcggcgcagacttgtacatgaactttggatgctgcattctggattgtgccaaagttaccatcggcgacaatgtcctgtttggacccaacgtccagatttattgtcccggccatcccctcgatcccgtcttaagaaatggagtcaatggacctgaatacgcgttgcctgtcacaataggaaacgatgtctggatcggtggcggtgctatagtactgccgggggtaaccattggcgatggcgctgttgtaggagctggagctgttgtgacgaaggacgtggagcccatggttgtagtggctggtaaccctgccaaagtagtgcgcagagatgtcaagggcagttggggtagcgttgtatcgcgccacaagaatgcgtga

SEQ ID NO: 15884 - protein, 218 aa, Physcomitrella patens
MSTTNLPEDGPLPQGAPVPEPFYWPLGEALFAQRRDAREKLRRYNMTGLSSLPTKELEAQRTEILKELFGKINIEKPPFIEPPFQCDYGHNIEVGADLYMNFGCCILDCAKVTIGDNVLFGPNVQIYCPGHPLDPVLRNGVNGPEYALPVTIGNDVWIGGGAIVLPGVTIGDGAVVGAGAVVTKDVEPMVVVAGNPAKVVRRDVKGSWGSVVSRHKNA

SEQ ID NO: 15885 - DNA, 636 bp, Aeromonas hydrophila
  CDS (1)..(636): transl_table=11
atgttaagcggcttgttaacagcatttaagaaaagtattagtaaaagaaaaataataataaagtcatccttttataaggtgcgaaatagtacatcaagattctctgataagacgatacttttccgtatggcccatgttagccactccgatataggaaggtatacatatatagccggttatgcaaatataaataactgtacgataggatccttttgttctattgctgatggcgtgagggttggagttggggtacaccctctgaacttgatatccactcatcctgcattgtattccgtaaaaactatttttccatataaattaatagatgaagcaatcattaattcattaccaagtcacgaagagtccaagcgaattaatattggtaatgacgtttggatagggactgattctattattttagatggtgttaatattggtgatggtgccgtcatcgccgcaggttctgttgtaacaaaagatgtacctccttttgctgtcgttggtggggttcctgcccgtgtaattaaatacagaaccattcctgacatgatagatggtaagccatggtgggagttacaagatgctgaattgtcttgttatctaaataaaatatataaagataatcaaaaggaatga

SEQ ID NO: 15886 - protein, 211 aa, Aeromonas hydrophila
MLSGLLTAFKKSISKRKIIIKSSFYKVRNSTSRFSDKTILFRMAHVSHSDIGRYTYIAGYANINNCTIGSFCSIADGVRVGVGVHPLNLISTHPALYSVKTIFPYKLIDEAIINSLPSHEESKRINIGNDVWIGTDSIILDGVNIGDGAVIAAGSVVTKDVPPFAVVGGVPARVIKYRTIPDMIDGKPWWELQDAELSCYLNKIYKDNQKE

SEQ ID NO: 15887 - DNA, 600 bp, Aeromonas hydrophila
  CDS (1)..(600): transl_table=11
atgaagttttatatagagcactatggtttttggggatgtatcaggttaataatagaggtgattttcacaaaaatcagatttcgtaatgcgaaaataattcgtactccctttgaatgccgtggtaaaaagttattcaaaattggccgcggatttactacaggtagatactgcagactagaagcgcatggttctgaaggtaccaaagttataattggagaacgttgccagataaatgactcggttcatattgcagcagcggacagcattgttattggtgatgatgtgttgatcgccagccgggtgtttatcacggacctcaatcatggtagctacagtggagaagagcactctcatcctgattccatttgcagggagcgcatgctgcatactaagccggtcttgattgagtcaaatgtttggcttggcgaaggtgtagtcgtgttgcctggtgtaacgattggcaaggcctccatcattggcgcaaattcggtggtttccagagatatacctgcaaattccattgcggtaggtaatccggcaagagtgattaagcggtttgatttccaatgcgggcaatgggtggctgtggatgcgaagtaa

SEQ ID NO: 15888 - protein, 199 aa, Aeromonas hydrophila
MKFYIEHYGFWGCIRLIIEVIFTKIRFRNAKIIRTPFECRGKKLFKIGRGFTTGRYCRLEAHGSEGTKVIIGERCQINDSVHIAAADSIVIGDDVLIASRVFITDLNHGSYSGEEHSHPDSICRERMLHTKPVLIESNVWLGEGVVVLPGVTIGKASIIGANSVVSRDIPANSIAVGNPARVIKRFDFQCGQWVAVDAK

SEQ ID NO: 15889 - DNA, 678 bp, Corynebacterium glutamicum
  CDS (1)..(678): transl_table=11
atggacaatgactttgaatctatcgagaaaatgagcagcggcgattggtacgtggctaccggcgcggaacgtgaagaagtggcacaaaaaacagcgttacttttccacgaatacaaccaaattggacctacagaccccgcacgaactgccgaaatactaagaactgtactaaatcctgccagcggaacctgcacgatcaaagcgccagccatcattgaatacggcttcaacaccacgatcggcgagcatgtgttcatcaactttggcctcaccattttagatatcgcaccggttcgcatcggggcacgcagcatgctcgggccaaactgtcagctcttcaccgcaggtcacccggtcgatgactgggaaatgcgctccggtgggtgggaaaatggcgcacccatttccattggcgaggatacgtggctgggtggaaatgtcaccgtcgttggtggcgtgagcattggcgataggtgtgtgattggcgcgggggccgtggtgaccaaggatattccggatgattctattgctgtgggcaaccctgcgcgagtagtgcggaaacgtgatgatagccggctcgaacgttcgcagctgccagaaggtgcttccgtggatgcgttggggattcttcctacaaaatcacctaggctgtcagaaaatattgccgaaaaatattaa

SEQ ID NO: 15890 - protein, 225 aa, Corynebacterium glutamicum
MDNDFESIEKMSSGDWYVATGAEREEVAQKTALLFHEYNQIGPTDPARTAEILRTVLNPASGTCTIKAPAIIEYGFNTTIGEHVFINFGLTILDIAPVRIGARSMLGPNCQLFTAGHPVDDWEMRSGGWENGAPISIGEDTWLGGNVTVVGGVSIGDRCVIGAGAVVTKDIPDDSIAVGNPARVVRKRDDSRLERSQLPEGASVDALGILPTKSPRLSENIAEKY

SEQ ID NO: 15891 - DNA, 624 bp, Lactococcus lactis
  CDS (1)..(624): transl_table=11
atgcttaaattagaaaactacaaacgagttcacacgggagaactctactttcctaacgatcaaaaattatggaaagagcaacaagaagctttagttttactggaaaagtttaatcaaacttcagtgactcagccagagcaacaaatggtacttctcaaagaaatgttttcagaaattggagaaaattgttttattcaaccccctttctatgctaattttggtggaaaaaatgtccattttgggacagggatttacgctaattttaatctaacattagttgatgatacagatatttttgtaggaaatcatgtcatgtttggaccaaatgttacgattgacacggcgacacattctgtctcgcctgacttacgtaaacgaggggctcaatataataaaaaagtttatattgaagaaaatgtttggctaggtgctggagtaattgttttacctggtgttagaattgggaaaaatagtgtgattggcgcagggagtcttgtaactaaagacattccagataatgtggttgcttttggaactccttgtagggttaaaagaaaaatcaatgattctgactttaaaacttatgatcatggaaaaaagattgatttagatgatttcatctga

SEQ ID NO: 15892 - protein, 207 aa, Lactococcus lactis
MLKLENYKRVHTGELYFPNDQKLWKEQQEALVLLEKFNQTSVTQPEQQMVLLKEMFSEIGENCFIQPPFYANFGGKNVHFGTGIYANFNLTLVDDTDIFVGNHVMFGPNVTIDTATHSVSPDLRKRGAQYNKKVYIEENVWLGAGVIVLPGVRIGKNSVIGAGSLVTKDIPDNVVAFGTPCRVKRKINDSDFKTYDHGKKIDLDDFI

SEQ ID NO: 15893 - DNA, 621 bp, Candida albicans
  CDS (1)..(621): transl_table=12
atgatcagtggtatgctctacaactgtttacaaaaagaattggaaacaacacgtatgtcttgcagagactacatgttggactacggcagtttcagaactagagattataaaacaacccaagaatttcttgatgcaaaatacaaacatttagaaagtttcattggacatgttggcaaaaatgcatttatggaatatccaatctattttgattatgggtttaacacttatttgggtgataatttctattccaattacaatttgacaattttggatgtttccatagtcagaattggtaataatgtcaagtgtggtcccaatgtatctatccttaccccaacacacccagtggatcccactttgcgctatgatcaattggaaaatgccttgcctgtgacggtgggtaacggggtctggttgtgtggaagctgtaccattcttggtggggtgacagtaggtgatggcagcattgtggctgctggtgcagttgtcaacaaggacgttccaccaaacactgtagttgcgggagttcctgctagggtagttaagcagctagaacctagagaccctaactttgacactatggcagttttgaaacaatatggtatgggttatatagattag

SEQ ID NO: 15894 - protein, 206 aa, Candida albicans
MISGMLYNCLQKELETTRMSCRDYMLDYGSFRTRDYKTTQEFLDAKYKHLESFIGHVGKNAFMEYPIYFDYGFNTYLGDNFYSNYNLTILDVSIVRIGNNVKCGPNVSILTPTHPVDPTLRYDQLENALPVTVGNGVWLCGSCTILGGVTVGDGSIVAAGAVVNKDVPPNTVVAGVPARVVKQLEPRDPNFDTMAVLKQYGMGYID

SEQ ID NO: 15895 - DNA, 519 bp, Staphylococcus aureus
  CDS (1)..(519): transl_table=11
atgaaaaaattatttttaaagttaatgaaaaggaatctatctgaagataagataaggaaattgggtgtacaagttggaaatgattgtaggtttttaagtgttgatagatcaacatttggatctgagccttacctgattcaaataggaaatcatgtaacaataactagtggtgtaaaatttgctacccatgatggtggggtatggatttttagaaaaaaatatcctgagatagataattttcatagaatatttatcggtaataatgttttcatagggattaattcaataattttgccaggagtaacaataggaaataatgttgtagtaggtgctgggagtgtggtaacgaaagatgtacctgataatgtaattattggtggtaatcctgccaaaaaaattaaaagtatagaggcctatgaaactaaaatattagaaaatgcggattacacaaaaaaacttaattataatgaaaagaagatatatttattaaataaattcaaagagaataggtataattaa

SEQ ID NO: 15896 - protein, 172 aa, Staphylococcus aureus
MKKLFLKLMKRNLSEDKIRKLGVQVGNDCRFLSVDRSTFGSEPYLIQIGNHVTITSGVKFATHDGGVWIFRKKYPEIDNFHRIFIGNNVFIGINSIILPGVTIGNNVVVGAGSVVTKDVPDNVIIGGNPAKKIKSIEAYETKILENADYTKKLNYNEKKIYLLNKFKENRYN

SEQ ID NO: 15897 - DNA, 555 bp, Bacillus subtilis
  CDS (1)..(555): transl_table=11
atgctgaggacagaaaaagaaaaaatggcagccggagaattatacaattcggaagatcaacaactattactagaacgcaagcatgcgagacagctgattagacaatacaacgaaacaccggaagatgatgcagtgcggacgaagcttttgaaggagctgctcggttcggttggggatcaagtcacgattttgccgacattccgctgtgattatggctatcacattcatatcggagatcatacatttgttaattttgactgtgtcattttagatgtgtgtgaggtgcgtatcggctgtcattgtttgattgcgccaggtgtacatatctacacggccggtcatcctcttgatccgatcgaaaggaaatccgggaaggagttcggtaagcctgtgacaattggagatcaagtttggattggaggccgggcggtgattaacccgggagtgacaatcggtgataacgcagtgattgcttctggatctgttgtcactaaggatgtacccgctaatactgttgtaggcggaaaccccgcaaggattttgaagcaattgtaa

SEQ ID NO: 15898 - protein, 184 aa, Bacillus subtilis
MLRTEKEKMAAGELYNSEDQQLLLERKHARQLIRQYNETPEDDAVRTKLLKELLGSVGDQVTILPTFRCDYGYHIHIGDHTFVNFDCVILDVCEVRIGCHCLIAPGVHIYTAGHPLDPIERKSGKEFGKPVTIGDQVWIGGRAVINPGVTIGDNAVIASGSVVTKDVPANTVVGGNPARILKQL

SEQ ID NO: 15899 - DNA, 552 bp, Escherichia coli; identical to SEQ ID NO: 15433
  CDS (1)..(552)

SEQ ID NO: 15900 - protein, 183 aa, Escherichia coli; identical to SEQ ID NO: 15434

SEQ ID NO: 15901 - DNA, 573 bp, Rhizobium leguminosarum bv
  CDS (1)..(573): transl_table=11
atgacacgcagccaaaaagagaagatgctagcaggcgaaatgtacaacgcagcggaccccgagatccaagccgagttgctcctcaccggggcttggttgaagcggtataatgacacgctgggcgactccgccgagcggtggaatgggctccttttagaacgattgggagcagtcgggcttggagcggttattcgtcctccgttccactgcgattacgggttcaacatccggatcggagcttgggtttacatcaattacaactgcgtcattcttgacgtggcagcggtaactatcggtgacggaaccgcaataggccctgctgtgcagatttacaccgcggaccatccacatgatccagagcagcgccaggctggactgcagttgggacgacctgtcagcattggcaggcacgcctggattggcggtggagcaatcattctcccgggcgtgacaattggcgatcacgctgtcattggcgctggtagtgtggtcacgcgagatgttcctgcaggaagcacggccatgggaaatccagctcgggtcaaggctggtggacgcttgccgaaatcataa
